(19) United States
(12) Patent Application Publication
(10) Pub. No.: US 2007/0042382 A1
(43) Pub. Date: Feb. 22, 2007

(54) Genetic polymorphisms associated with myocardial infarction, methods of detection and uses thereof

(75) Inventors: Michele Cargill, San Francisco, CA (US); James J. Devlin, Lafayette, CA (US); Olga Iakoubova, Pleasanton, CA (US); Dov Shiffman, Palo Alto, CA (US)

Correspondence Address: CELERA GENOMICS CORP.;ATTN: WAYNE MONTGOMERY, VICE PRES, INTEL PROPERTY, 45 WEST GUDE DRIVE, C2-4#20, ROCKVILLE, MD, 20850, US

(73) Assignee: APPLERA CORPORATION, Norwalk, CT (US)

(21) Appl. No.: 10/796,307

(22) Filed: Mar. 10, 2004

Related U.S. Application Data
(60) Provisional application No. 60/453,135, filed on Mar. 10, 2003.
(60) Provisional application No. 60/466,412, filed on Apr. 30, 2003.

(51) Int. Cl. C12Q 1/68; C07H 21/04

(52) U.S. Cl. 435/6; 536/23.2

(57) ABSTRACT

The present invention is based on the discovery of genetic polymorphisms that are associated with myocardial infarction. In particular, the present invention relates to nucleic acid molecules containing the polymorphisms, variant proteins encoded by such nucleic acid molecules, reagents for detecting the polymorphic nucleic acid molecules and proteins, and methods of using the nucleic acid and proteins as well as methods of using reagents for their detection.

### FIELD OF THE INVENTION

[0001] The present invention is in the field of myocardial infarction diagnosis and therapy. In particular, the present invention relates to specific single nucleotide polymorphisms (SNPs) in the human genome, and their association with myocardial infarction and related pathologies. Based on differences in allele frequencies in the myocardial infarction patient population relative to normal individuals, the naturally-occurring SNPs disclosed herein can be used as targets for the design of diagnostic reagents and the development of therapeutic agents, as well as for disease association and linkage analysis. In particular, the SNPs of the present invention are useful for identifying an individual who is at an increased or decreased risk of developing myocardial infarction and for early detection of the disease, for providing clinically important information for the prevention and/or treatment of myocardial infarction, and for screening and selecting therapeutic agents. The SNPs disclosed herein are also useful for human identification applications. Methods, assays, kits, and reagents for detecting the presence of these polymorphisms and their encoded products are provided.

### BACKGROUND OF THE INVENTION

[0002] Myocardial Infarction (Including Recurrent Myocardial Infarction)

[0003] Myocardial infarction (MI) is the most common cause of mortality in developed countries. It is a multifactorial disease that involves atherogenesis, thrombus formation and propagation. Thrombosis can result in complete or partial occlusion of coronary arteries. The luminal narrowing or blockage of coronary arteries reduces oxygen and nutrient supply to the cardiac muscle (cardiac ischemia), leading to myocardial necrosis and/or stunning. MI, unstable angina, or sudden ischemic death are clinical manifestations of cardiac muscle damage. All three endpoints are part of the Acute Coronary Syndrome since the underlying mechanisms of acute complications of atherosclerosis are considered to be the same.

[0004] Atherogenesis, the first step of pathogenesis of MI, is a complex interaction between blood elements, mechanical forces, disturbed blood flow, and vessel wall abnormality. On the cellular level, these include endothelial dysfunction, monocytes/macrophages activation by modified lipoproteins, monocytes/macrophages migration into the neointima and subsequent migration and proliferation of vascular smooth muscle cells (VSMC) from the media that results in plaque accumulation.

[0005] In recent years, an unstable (vulnerable) plaque was recognized as an underlying cause of arterial thrombotic events and MI. A vulnerable plaque is a plaque, often not stenotic, that has a high likelihood of becoming disrupted or eroded, thus forming a thrombogenic focus. Two vulnerable plaque morphologies have been described. A first type of vulnerable plaque morphology is a rupture of the protective fibrous cap. It can occur in plaques that have distinct morphological features such as large and soft lipid pool with distinct necrotic core and thinning of the fibrous cap in the region of the plaque shoulders. Fibrous caps have considerable metabolic activity. The imbalance between matrix synthesis and matrix degradation thought to be regulated by inflammatory mediators combined with VSMC apoptosis are the key underlying mechanisms of plaque rupture. A second type of vulnerable plaque morphology, known as “plaque erosion”, can also lead to a fatal coronary thrombotic event. Plaque erosion is morphologically different from plaque rupture. Eroded plaques do not have fractures in the plaque fibrous cap, only superficial erosion of the intima. The loss of endothelial cells can expose the thrombogenic subendothelial matrix that precipitates thrombus formation. This process could be regulated by inflammatory mediators. The propagation of the acute thrombi for both plaque rupture and plaque erosion events depends on the balance between coagulation and thrombolysis. MI due to a vulnerable plaque is a complex phenomenon that includes: plaque vulnerability, blood vulnerability (hypercoagulation, hypothrombolysis), and heart vulnerability (sensitivity of the heart to ischemia or propensity for arrhythmia).

[0006] Recurrent myocardial infarction (RMI) can generally be viewed as a severe form of MI progression caused by multiple vulnerable plaques that are able to undergo pre-rupture or a pre-erosive state, coupled with extreme blood coagulability.

[0007] The incidence of MI is still high despite currently available preventive measures and therapeutic intervention. More than 1,500,000 people in the US suffer acute MI each year (many without seeking help due to unrecognized MI), and one third of these people die. The lifetime risk of coronary artery disease events at age 40 years is 42.4% for men (one in two) and 24.9% for women (one in four) (Lloyd-Jones D M; Lancet, 1999 353: 89-92).

[0008] The current diagnosis of MI is based on the levels of troponin I or T that indicate the cardiac muscle progressive necrosis, impaired electrocardiogram (ECG), and detection of abnormal ventricular wall motion or angiographic data (the presence of acute thrombi). However, due to the asymptomatic nature of 25% of acute MIs (absence of atypical chest pain, low ECG sensitivity), a significant portion of MIs are not diagnosed and therefore not treated appropriately (e.g., prevention of recurrent MIs).

[0009] Despite a very high prevalence and lifetime risk of MI, there are no good prognostic markers that can identify an individual with a high risk of vulnerable plaques and justify preventive treatments. MI risk assessment and prognosis is currently done using classic risk factors or the recently introduced Framingham Risk Index. Both of these assessments put a significant weight on LDL levels to justify preventive treatment. However, it is well established that half of all MIs occur in individuals without overt hyperlipidemia. Hence, there is a need for additional risk factors for predicting predisposition to MI.

[0010] Other emerging risk factors are inflammatory biomarkers such as C-reactive protein (CRP), ICAM-1, SAA, TNF α, homocysteine, impaired fasting glucose, new lipid markers (ox LDL, Lp-a, MAD-LDL, etc.) and pro-thrombotic factors (fibrinogen, PAI-1). Despite showing some promise, these markers have significant limitations such as low specificity and low positive predictive value, and the need for multiple reference intervals to be used for different groups of people (e.g., males-females, smokers-non smokers, hormone replacement therapy users, different age groups). These limitations diminish the utility of such markers as independent prognostic markers for MI screening.

[0011] Genetics plays an important role in MI risk. Families with a positive family history of MI account for 14% of the general population, 72% of premature MIs, and 48% of all MIs (Williams R R, Am J Cardiology, 2001; 87:129). In addition, replicated linkage studies have revealed evidence of multiple regions of the genome that are associated with MI and relevant to MI genetic traits, including regions on chromosomes 14, 2, 3 and 7 (Broeckel U, Nature Genetics, 2002; 30: 210; Harrap S, Arterioscler Thromb Vasc Biol, 2002; 22: 874-878, Shearman A, Human Molecular Genetics, 2000, 9; 9, 1315-1320), implying that genetic risk factors influence the onset, manifestation, and progression of MI. Recent association studies have identified allelic variants that are associated with acute complications of coronary heart disease, including allelic variants of the ApoE, ApoA5, Lpa, APOCIII, and Klotho genes.

[0012] Genetic markers such as single nucleotide polymorphisms are preferable to other types of biomarkers. Genetic markers that are prognostic for MI can be genotyped early in life and could predict individual response to various risk factors. The combination of serum protein levels and genetic predisposition revealed by genetic analysis of susceptibility genes can provide an integrated assessment of the interaction between genotypes and environmental factors, resulting in synergistically increased prognostic value of diagnostic tests.

[0013] Thus, there is an urgent need for novel genetic markers that are predictive of predisposition to MI, particularly for individuals who are unrecognized as having a predisposition to MI. Such genetic markers may enable prognosis of MI in much larger populations compared with the populations which can currently be evaluated by using existing risk factors and biomarkers. The availability of a genetic test may allow, for example, appropriate preventive treatments for acute coronary events to be provided for susceptible individuals (such preventive treatments may include, for example, statin treatments and statin dose escalation, as well as changes to modifiable risk factors), lowering of the thresholds for ECG and angiography testing, and allow adequate monitoring of informative biomarkers.

[0014] Moreover, the discovery of genetic markers associated with MI will provide novel targets for therapeutic intervention or preventive treatments of MI, and enable the development of new therapeutic agents for treating MI and other cardiovascular disorders.

[0015] SNPs

[0016] The genomes of all organisms undergo spontaneous mutation in the course of their continuing evolution, generating variant forms of progenitor genetic sequences (Gusella, Ann. Rev. Biochem. 55, 831-854 (1986)). A variant form may confer an evolutionary advantage or disadvantage relative to a progenitor form or may be neutral. In some instances, a variant form confers an evolutionary advantage to the species and is eventually incorporated into the DNA of many or most members of the species and effectively becomes the progenitor form. Additionally, the effects of a variant form may be both beneficial and detrimental, depending on the circumstances. For example, a heterozygous sickle cell mutation confers resistance to malaria, but a homozygous sickle cell mutation is usually lethal. In many cases, both progenitor and variant forms survive and co-exist in a species population. The coexistence of multiple forms of a genetic sequence gives rise to genetic polymorphisms, including SNPs.

[0017] Approximately 90% of all polymorphisms in the human genome are SNPs. SNPs are single base positions in DNA at which different alleles, or alternative nucleotides, exist in a population. The SNP position (interchangeably referred to herein as SNP, SNP site, SNP locus, SNP marker, or marker) is usually preceded by and followed by highly conserved sequences of the allele (e.g., sequences that vary in less than 1/100 or 1/1000 members of the populations). An individual may be homozygous or heterozygous for an allele at each SNP position. A SNP can, in some instances, be referred to as a “cSNP” to denote that the nucleotide sequence containing the SNP is an amino acid coding sequence.

[0018] A SNP may arise from a substitution of one nucleotide for another at the polymorphic site. Substitutions can be transitions or transversions. A transition is the replacement of one purine nucleotide by another purine nucleotide, or one pyrimidine by another pyrimidine. A transversion is the replacement of a purine by a pyrimidine, or vice versa. A SNP may also be a single base insertion or deletion variant referred to as an “indel” (Weber et al., “Human diallelic insertion/deletion polymorphisms”, Am J Hum Genet 2002 October; 71(4):854-62).

[0019] A synonymous codon change, or silent mutation/SNP (terms such as “SNP”, “polymorphism”, “mutation”, “mutant”, “variation”, and “variant” are used herein interchangeably), is one that does not result in a change of amino acid due to the degeneracy of the genetic code. A substitution that changes a codon coding for one amino acid to a codon coding for a different amino acid (i.e., a non-synonymous codon change) is referred to as a missense mutation. A nonsense mutation results in a type of non-synonymous codon change in which a stop codon is formed, thereby leading to premature termination of a polypeptide chain and a truncated protein. A read-through mutation is another type of non-synonymous codon change that causes the destruction of a stop codon, thereby resulting in an extended polypeptide product. While SNPs can be bi-, tri-, or tetra-allelic, the vast majority of the SNPs are bi-allelic, and are thus often referred to as “bi-allelic markers”, or “di-allelic markers”.

[0020] As used herein, references to SNPs and SNP genotypes include individual SNPs and/or haplotypes, which are groups of SNPs that are generally inherited together. Haplotypes can have stronger correlations with diseases or other phenotypic effects compared with individual SNPs, and therefore may provide increased diagnostic accuracy in some cases (Stephens et al. Science 293, 489-493, 20 Jul. 2001).

[0021] Causative SNPs are those SNPs that produce alterations in gene expression or in the expression, structure, and/or function of a gene product, and therefore are most predictive of a possible clinical phenotype. One such class includes SNPs falling within regions of genes encoding a polypeptide product, i.e. cSNPs. These SNPs may result in an alteration of the amino acid sequence of the polypeptide product (i.e., non-synonymous codon changes) and give rise to the expression of a defective or other variant protein. Furthermore, in the case of nonsense mutations, a SNP may lead to premature termination of a polypeptide product. Such variant products can result in a pathological condition, e.g., genetic disease. Examples of genes in which a SNP within a coding sequence causes a genetic disease include sickle cell anemia and cystic fibrosis.

[0022] Causative SNPs do not necessarily have to occur in coding regions; causative SNPs can occur in, for example, any genetic region that can ultimately affect the expression, structure, and/or activity of the protein encoded by a nucleic acid. Such genetic regions include, for example, those involved in transcription, such as SNPs in transcription factor binding domains, SNPs in promoter regions, in areas involved in transcript processing, such as SNPs at intron-exon boundaries that may cause defective splicing, or SNPs in mRNA processing signal sequences such as polyadenylation signal regions. Some SNPs that are not causative SNPs nevertheless are in close association with, and therefore segregate with, a disease-causing sequence. In this situation, the presence of a SNP correlates with the presence of, or predisposition to, or an increased risk in developing the disease. These SNPs, although not causative, are nonetheless also useful for diagnostics, disease predisposition screening, and other uses.

[0023] An association study of a SNP and a specific disorder involves determining the presence or frequency of the SNP allele in biological samples from individuals with the disorder of interest, such as myocardial infarction, and comparing the information to that of controls (i.e., individuals who do not have the disorder; controls may be also referred to as “healthy” or “normal” individuals) who are preferably of similar age and race. The appropriate selection of patients and controls is important to the success of SNP association studies. Therefore, a pool of individuals with well-characterized phenotypes is extremely desirable.

[0024] A SNP may be screened in diseased tissue samples or any biological sample obtained from a diseased individual, and compared to control samples, and selected for its increased (or decreased) occurrence in a specific pathological condition, such as pathologies related to myocardial infarction. Once a statistically significant association is established between one or more SNP(s) and a pathological condition (or other phenotype) of interest, then the region around the SNP can optionally be thoroughly screened to identify the causative genetic locus/sequence(s) (e.g., causative SNP/mutation, gene, regulatory region, etc.) that influences the pathological condition or phenotype. Association studies may be conducted within the general population and are not limited to studies performed on related individuals in affected families (linkage studies).

[0025] Clinical trials have shown that patient response to treatment with pharmaceuticals is often heterogeneous. There is a continuing need to improve pharmaceutical agent design and therapy. In that regard, SNPs can be used to identify patients most suited to therapy with particular pharmaceutical agents (this is often termed “pharmacogenomics”). Similarly, SNPs can be used to exclude patients from certain treatment due to the patient's increased likelihood of developing toxic side effects or their likelihood of not responding to the treatment. Pharmacogenomics can also be used in pharmaceutical research to assist the drug development and selection process. (Linder et al. (1997), Clinical Chemistry, 43, 254; Marshall (1997), Nature Biotechnology, 15, 1249; International Patent Application WO 97/40462, Spectra Biomedical; and Schafer et al. (1998), Nature Biotechnology, 16, 3).

### SUMMARY OF THE INVENTION

[0026] The present invention relates to the identification of novel SNPs, unique combinations of such SNPs, and haplotypes of SNPs that are associated with myocardial infarction and related pathologies. The polymorphisms disclosed herein are directly useful as targets for the design of diagnostic reagents and the development of therapeutic agents for use in the diagnosis and treatment of myocardial infarction and related pathologies.

[0027] Based on the identification of SNPs associated with myocardial infarction, the present invention also provides methods of detecting these variants as well as the design and preparation of detection reagents needed to accomplish this task. The invention specifically provides novel SNPs in genetic sequences involved in myocardial infarction, variant proteins encoded by nucleic acid molecules containing such SNPs, antibodies to the encoded variant proteins, computer-based and data storage systems containing the novel SNP information, methods of detecting these SNPs in a test sample, methods of identifying individuals who have an altered (i.e., increased or decreased) risk of developing myocardial infarction based on the presence of a SNP disclosed herein or its encoded product, methods of identifying individuals who are more or less likely to respond to a treatment, methods of screening for compounds useful in the treatment of a disorder associated with a variant gene/protein, compounds identified by these methods, methods of treating disorders mediated by a variant gene/protein, and methods of using the novel SNPs of the present invention for human identification.

[0028] In Tables 1-2, the present invention provides gene information, transcript sequences (SEQ ID NOS:1-450), encoded amino acid sequences (SEQ ID NOS:451-900), genomic sequences (SEQ ID NOS:8682-8935), transcript-based context sequences (SEQ ID NOS:901-8681) and genomic-based context sequences (SEQ ID NOS:8936-43,787) that contain the SNPs of the present invention, and extensive SNP information that includes observed alleles, allele frequencies, populations/ethnic groups in which alleles have been observed, information about the type of SNP and corresponding functional effect, and, for cSNPs, information about the encoded polypeptide product. The transcript sequences (SEQ ID NOS:1-450), amino acid sequences (SEQ ID NOS:451-900), genomic sequences (SEQ ID NOS:8682-8935), transcript-based SNP context sequences (SEQ ID NOS: 901-8681), and genomic-based SNP context sequences (SEQ ID NOS:8936-43,787) are also provided in the Sequence Listing.

[0029] In a specific embodiment of the present invention, SNPs which occur naturally in the human genome are provided as isolated nucleic acid molecules. These SNPs are associated with myocardial infarction such that they can have a variety of uses in the diagnosis and/or treatment of myocardial infarction. One aspect of the present invention relates to an isolated nucleic acid molecule comprising a nucleotide sequence in which at least one nucleotide is a SNP disclosed in Tables 3 and/or 4. In an alternative embodiment, a nucleic acid of the invention is an amplified polynucleotide, which is produced by amplification of a SNP-containing nucleic acid template. In another embodiment, the invention provides for a variant protein which is encoded by a nucleic acid molecule containing a SNP disclosed herein.

[0030] In yet another embodiment of the invention, a reagent for detecting a SNP in the context of its naturally-occurring flanking nucleotide sequences (which can be, e.g., either DNA or mRNA) is provided. In particular, such a reagent may be in the form of, for example, a hybridization probe or an amplification primer that is useful in the specific detection of a SNP of interest. In an alternative embodiment, a protein detection reagent is used to detect a variant protein which is encoded by a nucleic acid molecule containing a SNP disclosed herein. A preferred embodiment of a protein detection reagent is an antibody or an antigen-reactive antibody fragment.

[0031] Also provided in the invention are kits comprising SNP detection reagents, and methods for detecting the SNPs disclosed herein by employing detection reagents. In a specific embodiment, the present invention provides for a method of identifying an individual having an increased or decreased risk of developing myocardial infarction by detecting the presence or absence of a SNP allele disclosed herein. In another embodiment, a method for diagnosis of myocardial infarction by detecting the presence or absence of a SNP allele disclosed herein is provided.

[0032] The nucleic acid molecules of the invention can be inserted in an expression vector, such as to produce a variant protein in a host cell. Thus, the present invention also provides for a vector comprising a SNP-containing nucleic acid molecule, genetically-engineered host cells containing the vector, and methods for expressing a recombinant variant protein using such host cells. In another specific embodiment, the host cells, SNP-containing nucleic acid molecules, and/or variant proteins can be used as targets in a method for screening and identifying therapeutic agents or pharmaceutical compounds useful in the treatment of myocardial infarction.

[0033] An aspect of this invention is a method for treating myocardial infarction in a human subject wherein said human subject harbors a gene, transcript, and/or encoded protein identified in Tables 1-2, which method comprises administering to said human subject a therapeutically or prophylactically effective amount of one or more agents counteracting the effects of the disease, such as by inhibiting (or stimulating) the activity of the gene, transcript, and/or encoded protein identified in Tables 1-2.

[0034] Another aspect of this invention is a method for identifying an agent useful in therapeutically or prophylactically treating myocardial infarction in a human subject wherein said human subject harbors a gene, transcript, and/or encoded protein identified in Tables 1-2, which method comprises contacting the gene, transcript, or encoded protein with a candidate agent under conditions suitable to allow formation of a binding complex between the gene, transcript, or encoded protein and the candidate agent and detecting the formation of the binding complex, wherein the presence of the complex identifies said agent.

[0035] Another aspect of this invention is a method for treating myocardial infarction in a human subject, which method comprises:

[0036] (i) determining that said human subject harbors a gene, transcript, and/or encoded protein identified in Tables 1-2, and

[0037] (ii) administering to said subject a therapeutically or prophylactically effective amount of one or more agents counteracting the effects of the disease.

[0038] Many other uses and advantages of the present invention will be apparent to those skilled in the art upon review of the detailed description of the preferred embodiments herein. Solely for clarity of discussion, the invention is described in the sections below by way of non-limiting examples.

### DESCRIPTION OF THE FILES CONTAINED ON THE CD-R NAMED CL001509CDR

[0039] The CD-R named CL001509CDR contains the following five text (ASCII) files:

[0040] 1) File SEQLIST_{—}1509.txt provides the Sequence Listing. The Sequence Listing provides the transcript sequences (SEQ ID NOS:1-450) and protein sequences (SEQ ID NOS:451-900) as shown in Table 1, and genomic sequences (SEQ ID NOS:8682-8935) as shown in Table 2, for each myocardial infarction-associated gene that contains one or more SNPs of the present invention. Also provided in the Sequence Listing are context sequences flanking each SNP, including both transcript-based context sequences as shown in Table 1 (SEQ ID NOS:901-8681) and genomic-based context sequences as shown in Table 2 (SEQ ID NOS:8936-43,787). The context sequences generally provide 100 bp upstream (5′) and 100 bp downstream (3′) of each SNP, with the SNP in the middle of the context sequence, for a total of 200 bp of context sequence surrounding each SNP. File SEQLIST_{—}1509.txt is 38,291 KB in size, and was created on Mar. 8, 2004.

[0041] 2) File TABLE1_{—}1509.txt provides Table 1. File TABLE1_{—}1509.txt is 6,671 KB in size, and was created on Mar. 8, 2004.

[0042] 3) File TABLE2_{—}1509.txt provides Table 2. File TABLE2_{—}1509.txt is 32,434 KB in size, and was created on Mar. 8, 2004.

[0043] 4) File TABLE3_{—}1509.txt provides Table 3. File TABLE3_{—}1509.txt is 53 KB in size, and was created on Mar. 8, 2004.

[0044] 5) File TABLE4_{—}1509.txt provides Table 4. File TABLE4_{—}1509.txt is 76 KB in size, and was created on Mar. 8, 2004.

[0045] The material contained on the CD-R labeled CL001509CDR is hereby incorporated by reference pursuant to 37 CFR 1.77(b)(4).

LENGTHY TABLES FILED ON CD
The patent application contains a lengthy table section. A copy of the table is available in electronic form from the USPTO web site (http://seqdata.uspto.gov/?pageRequest=docDetail&DocID=US20070042382A1). An electronic copy of the table will also be available from the USPTO upon request and payment of the fee set forth in 37 CFR 1.19(b)(3).

### DESCRIPTION OF TABLE 1 AND TABLE 2

[0046] Table 1 and Table 2 (both provided on the CD-R) disclose the SNP and associated gene/transcript/protein information of the present invention. For each gene, Table 1 and Table 2 each provide a header containing gene/transcript/protein information, followed by a transcript and protein sequence (in Table 1) or genomic sequence (in Table 2), and then SNP information regarding each SNP found in that gene/transcript.

[0047] NOTE: SNPs may be included in both Table 1 and Table 2; Table 1 presents the SNPs relative to their transcript sequences and encoded protein sequences, whereas Table 2 presents the SNPs relative to their genomic sequences (in some instances Table 2 may also include, after the last gene sequence, genomic sequences of one or more intergenic regions, as well as SNP context sequences and other SNP information for any SNPs that lie within these intergenic regions). SNPs can readily be cross-referenced between Tables based on their hCV (or, in some instances, hDV) identification numbers.

[0048] The gene/transcript/protein information includes:

[0049] a gene number (1 through n, where n=the total number of genes in the Table)

[0050] a Celera hCG and UID internal identification numbers for the gene

[0051] a Celera hCT and UID internal identification numbers for the transcript (Table 1 only)

[0052] a public Genbank accession number (e.g., RefSeq NM number) for the transcript (Table 1 only)

[0053] a Celera hCP and UID internal identification numbers for the protein encoded by the hCT transcript (Table 1 only)

[0054] a public Genbank accession number (e.g., RefSeq NP number) for the protein (Table 1 only)

[0055] an art-known gene symbol

[0056] an art-known gene/protein name

[0057] Celera genomic axis position (indicating start nucleotide position-stop nucleotide position)

[0058] the chromosome number of the chromosome on which the gene is located

[0059] an OMIM (Online Mendelian Inheritance in Man; Johns Hopkins University/NCBI) public reference number for obtaining further information regarding the medical significance of each gene

[0060] alternative gene/protein name(s) and/or symbol(s) in the OMIM entry

[0061] NOTE: Due to the presence of alternative splice forms, multiple transcript/protein entries can be provided for a single gene entry in Table 1; i.e., for a single Gene Number, multiple entries may be provided in series that differ in their transcript/protein information and sequences.

[0062] Following the gene/transcript/protein information is a transcript sequence and protein sequence (in Table 1), or a genomic sequence (in Table 2), for each gene, as follows:

[0063] transcript sequence (Table 1 only) (corresponding to SEQ ID NOS:1-450 of the Sequence Listing), with SNPs identified by their IUB codes (transcript sequences can include 5′ UTR, protein coding, and 3′ UTR regions). (NOTE: If there are differences between the nucleotide sequence of the hCT transcript and the corresponding public transcript sequence identified by the Genbank accession number, the hCT transcript sequence (and encoded protein) is provided, unless the public sequence is a RefSeq transcript sequence identified by an NM number, in which case the RefSeq NM transcript sequence (and encoded protein) is provided. However, whether the hCT transcript or RefSeq NM transcript is used as the transcript sequence, the disclosed SNPs are represented by their IUB codes within the transcript.)

[0064] the encoded protein sequence (Table 1 only) (corresponding to SEQ ID NOS:451-900 of the Sequence Listing)

[0065] the genomic sequence of the gene (Table 2 only), including 6 kb on each side of the gene boundaries (i.e., 6 kb on the 5′ side of the gene plus 6 kb on the 3′ side of the gene) (corresponding to SEQ ID NOS:8682-8935 of the Sequence Listing).

[0066] After the last gene sequence, Table 2 may include additional genomic sequences of intergenic regions (in such instances, these sequences are identified as “Intergenic region:” followed by a numerical identification number), as well as SNP context sequences and other SNP information for any SNPs that lie within each intergenic region (and such SNPs are identified as “INTERGENIC” for SNP type).

[0067] NOTE: The transcript, protein, and transcript-based SNP context sequences are provided in both Table 1 and in the Sequence Listing. The genomic and genomic-based SNP context sequences are provided in both Table 2 and in the Sequence Listing. SEQ ID NOS are indicated in Table 1 for each transcript sequence (SEQ ID NOS:1-450), protein sequence (SEQ ID NOS:451-900), and transcript-based SNP context sequence (SEQ ID NOS:901-8681), and SEQ ID NOS are indicated in Table 2 for each genomic sequence (SEQ ID NOS:8682-8935), and genomic-based SNP context sequence (SEQ ID NOS:8936-43,787).

[0068] The SNP information includes:

[0069] context sequence (taken from the transcript sequence in Table 1, and taken from the genomic sequence in Table 2) with the SNP represented by its IUB code, including 100 bp upstream (5′) of the SNP position plus 100 bp downstream (3′) of the SNP position (the transcript-based SNP context sequences in Table 1 are provided in the Sequence Listing as SEQ ID NOS:901-8681; the genomic-based SNP context sequences in Table 2 are provided in the Sequence Listing as SEQ ID NOS:8936-43,787).

[0070] Celera hCV internal identification number for the SNP (in some instances, an “hDV” number is given instead of an “hCV” number)

[0071] SNP position [position of the SNP within the given transcript sequence (Table 1) or within the given genomic sequence (Table 2)]

[0072] SNP source (may include any combination of one or more of the following five codes, depending on which internal sequencing projects and/or public databases the SNP has been observed in: “Applera”=SNP observed during the re-sequencing of genes and regulatory regions of 39 individuals, “Celera”=SNP observed during shotgun sequencing and assembly of the Celera human genome sequence, “Celera Diagnostics”=SNP observed during re-sequencing of nucleic acid samples from individuals who have myocardial infarction or a related pathology, “dbSNP”=SNP observed in the dbSNP public database, “HGBASE”=SNP observed in the HGBASE public database, “HGMD” =SNP observed in the Human Gene Mutation Database (HGMD) public database) (NOTE: multiple “Applera” source entries for a single SNP indicate that the same SNP was covered by multiple overlapping amplification products and the re-sequencing results (e.g., observed allele counts) from each of these amplification products is being provided)

[0073] Population/allele/allele count information in the format of [population1(first_allele,count|second_allele,count)population2(first_allele count|second_allele,count) total (first_allele,total count|second_allele,total count)]. The information in this field includes populations/ethnic groups in which particular SNP alleles have been observed (“cau”=Caucasian, “his”=Hispanic, “chn”=Chinese, and “afr”=African-American, “jpn”=Japanese, “ind”=Indian, “mex”=Mexican, “ain”=“American Indian, “cra”=Celera donor, “no_pop”=no population information available), identified SNP alleles, and observed allele counts (within each population group and total allele counts), where available [“−” in the allele field represents a deletion allele of an insertion/deletion (“indel”) polymorphism (in which case the corresponding insertion allele, which may be comprised of one or more nucleotides, is indicated in the allele field on the opposite side of the “|”); “−” in the count field indicates that allele count information is not available].

[0074] NOTE: For SNPs of “Applera” SNP source, genes/regulatory regions of 39 individuals (20 Caucasians and 19 African Americans) were re-sequenced and, since each SNP position is represented by two chromosomes in each individual (with the exception of SNPs on X and Y chromosomes in males, for which each SNP position is represented by a single chromosome), up to 78 chromosomes were genotyped for each SNP position. Thus, the sum of the African-American (“afr”) allele counts is up to 38, the sum of the Caucasian allele counts (“cau”) is up to 40, and the total sum of all allele counts is up to 78.

[0075] (NOTE: semicolons separate population/allele/count information corresponding to each indicated SNP source; i.e., if four SNP sources are indicated, such as “Celera”, “dbSNP”, “HGBASE”, and “HGMD”, then population/allele/count information is provided in four groups which are separated by semicolons and listed in the same order as the listing of SNP sources, with each population/allele/count information group corresponding to the respective SNP source based on order; thus, in this example, the first population/allele/count information group would correspond to the first listed SNP source (Celera) and the third population/allele/count information group separated by semicolons would correspond to the third listed SNP source (HGBASE); if population/allele/count information is not available for any particular SNP source, then a pair of semicolons is still inserted as a place-holder in order to maintain correspondence between the list of SNP sources and the corresponding listing of population/allele/count information)

[0076] SNP type (e.g., location within gene/transcript and/or predicted functional effect) [“MIS-SENSE MUTATION”=SNP causes a change in the encoded amino acid (i.e., a non-synonymous coding SNP); “SILENT MUTATION”=SNP does not cause a change in the encoded amino acid (i.e., a synonymous coding SNP); “STOP CODON MUTATION”=SNP is located in a stop codon; “NONSENSE MUTATION”=SNP creates or destroys a stop codon; “UTR 5”=SNP is located in a 5′ UTR of a transcript; “UTR 3”=SNP is located in a 3′ UTR of a transcript; “PUTATIVE UTR 5”=SNP is located in a putative 5′ UTR; “PUTATIVE UTR 3”=SNP is located in a putative 3′ UTR; “DONOR SPLICE SITE”=SNP is located in a donor splice site (5′ intron boundary); “ACCEPTOR SPLICE SITE”=SNP is located in an acceptor splice site (3′ intron boundary); “CODING REGION”=SNP is located in a protein-coding region of the transcript; “EXON”=SNP is located in an exon; “INTRON”=SNP is located in an intron; “hmCS”=SNP is located in a human-mouse conserved segment; “TFBS”=SNP is located in a transcription factor binding site; “UNKNOWN”=SNP type is not defined; “INTERGENIC”=SNP is intergenic, i.e., outside of any gene boundary]

[0077] Protein coding information (Table 1 only), where relevant, in the format of [protein SEQ ID NO:#, amino acid position, (amino acid-1, codon1) (amino acid-2, codon2)]. The information in this field includes SEQ ID NO of the encoded protein sequence, position of the amino acid residue within the protein identified by the SEQ ID NO that is encoded by the codon containing the SNP, amino acids (represented by one-letter amino acid codes) that are encoded by the alternative SNP alleles (in the case of stop codons, “X” is used for the one-letter amino acid code), and alternative codons containing the alternative SNP nucleotides which encode the amino acid residues (thus, for example, for missense mutation-type SNPs, at least two different amino acids and at least two different codons are generally indicated; for silent mutation-type SNPs, one amino acid and at least two different codons are generally indicated, etc.). In instances where the SNP is located outside of a protein-coding region (e.g., in a UTR region), “None” is indicated following the protein SEQ ID NO.

### DESCRIPTION OF TABLE 3 AND TABLE 4

[0078] Tables 3 and 4 (both provided on the CD-R) provide a list of a subset of SNPs from Table 1 (in the case of Table 3) or Table 2 (in the case of Table 4) for which the SNP source falls into one of the following three categories: 1) SNPs for which the SNP source is only “Applera” and none other, 2) SNPs for which the SNP source is only “Celera Diagnostics” and none other, and 3) SNPs for which the SNP source is both “Applera” and “Celera Diagnostics” but none other.

[0079] These SNPs have not been observed in any of the public databases (dbSNP, HGBASE, and HGMD), and were also not observed during shotgun sequencing and assembly of the Celera human genome sequence (i.e., “Celera” SNP source). Tables 3 and 4 provide the hCV identification number (or hDV identification number for SNPs having “Celera Diagnostics” SNP source) and the SEQ ID NO of the context sequence for each of these SNPs.

### DESCRIPTION OF TABLE 5

[0080] Table 5 provides sequences (SEQ ID NOS:43,201) of primers that have been synthesized and used in the laboratory to carry out allele-specific PCR reactions in order to assay the SNPs disclosed in Tables 6-8 during the course of myocardial infarction association studies.

[0081] Table 5 provides the following:

[0082] the column labeled “Marker” provides an hCV identification number for each SNP site

[0083] the column labeled “Alleles” designates the two alternative alleles at the SNP site identified by the hCV identification number that are targeted by the allele-specific primers (the allele-specific primers are shown as “Sequence A” and “Sequence B”) [NOTE: Alleles may be presented in Table 5 based on a different orientation (i.e., the reverse complement) relative to how the same alleles are presented in Tables 1-2]

[0084] the column labeled “Sequence A (allele-specific primer)” provides an allele-specific primer that is specific for the first allele designated in the “Alleles” column

[0085] the column labeled “Sequence B (allele-specific primer)” provides an allele-specific primer that is specific for the second allele designated in the “Alleles” column

[0086] the column labeled “Sequence C (common primer)” provides a common primer that is used in conjunction with each of the allele-specific primers (the “Sequence A” primer and the “Sequence B” primer) and which hybridizes at a position away from the SNP site.

[0087] All primer sequences are given in the 5′ to 3′ direction.

[0088] Each of the alleles designated in the “Alleles” column matches (or is the reverse complement of, depending on the orientation of the primer relative to the designated allele) the 3′ nucleotide of the allele-specific primer that is specific for that allele. Thus, the first allele designated in the “Alleles” column matches (or is the reverse complement of) the 3′ nucleotide of the “Sequence A” primer, and the second allele designated in the “Alleles” column matches (or is the reverse complement of) the 3′ nucleotide of the “Sequence B” primer.

### DESCRIPTION OF TABLES 6-8

[0089] Tables 6-8 provide results of statistical analyses for SNPs disclosed in Tables 1-5 (SNPs can be cross-referenced between Tables based on their hCV identification numbers). The SNPs presented in Tables 6-8 have shown a statistically significant association with myocardial infarction (MI) and/or recurrent myocardial infarction (RMI) in at least one of two independently collected sample sets. Table 6 provides statistical results for association of SNPs with MI, and Tables 7-8 provides statistical results for association of SNPs with RMI/MI. The statistical results shown in Tables 6-8 provide support for the association of these SNPs with MI and/or RMI. For example, the statistical results provided in Tables 6-8 show that the association of these SNPs with MI and/or RMI is supported by p-values <0.05 in an allelic association test and/or at least one of two genotypic association tests. Moreover, the majority of the SNPs presented in Tables 6-8 are SNPs for which their association with MI and/or RMI has been replicated by virtue of being significant in at least two independently collected sample sets, which further verifies the association of these SNPs with MI and/or RMI. Furthermore, results of stratification-based analyses are also provided where available; stratification-based analysis can, for example, enable increased prediction of MI and/or RMI risk via interaction between conventional risk factors (stratum) and SNPs.

[0090] The statistical results provided in Table 7 show association of SNPs with RMI and/or MI replicated between study S12 and either the Cohort, Pre-CARE, or During-CARE studies. The statistical results provided in Table 8 show association of SNPs with RMI replicated between Pre-CARE and During-CARE studies. These replicated results provided in Tables 7-8 further confirm the association of these SNPs with MI and/or RMI.

[0091] NOTE: SNPs can be cross-referenced between Tables 1-8 based on the hCV identification number of each SNP. However, seven of the SNPs that are included in Tables 1-8 may possess two different hCV identification numbers, as follows:

[0092] hCV11975563 is equivalent to hCV27243130

[0093] hCV15805367 is equivalent to hCV26647840

[0094] hCV15954570 is equivalent to hCV22271851

[0095] hCV15965459 is equivalent to hCV22274416

[0096] hCV2848651 is equivalent to hCV27456767

[0097] hCV7591528 is equivalent to hCV25618313

[0098] hCV9626088 is equivalent to hCV26809148

[0099] Description of Column Headings for Table 6:

| Table 6 column | |
|---|---|
| heading | Definition |
| Marker | Internal hCV identification number for the SNP that is tested |
| Allele | Nucleotide (allele) of the tested SNP for which statistical results are |
| | being reported [NOTE: Alleles may be presented in Table 6 based on |
| | a different orientation (i.e., the reverse complement) relative to how the |
| | same allele is presented in Tables 1-2] |
| Study | Internal identification number for the sample set used in the analysis |
| | (S12 and S28 are two independently collected sample sets. Thus, |
| | SNPs for which data are presented for both the S12 and the S28 |
| | sample sets have had their association with myocardial infarction |
| | replicated in two independently collected sample sets, thereby further |
| | verifying the association of these SNPs with myocardial infarction. |
| | SNPs for which data are presented for either the S12 or the S28 |
| | sample set, but not both, have a significant association with |
| | myocardial infarction in one sample set but have not been tested in the |
| | other sample set.) |
| Strata | Indicates what substratum was used in the analysis (strata are |
| | described below) |
| Design | Identifies the inclusion/exclusion criteria for cases and controls |
| | (described below) |
| OR | Allelic odds ratio |
| p-value | Result of the Fisher exact test for allelic association |

[0100] Definition of Entries in the “Strata” Column (Table 6) for Stratification-Based Analyses:

| Strata | Definition |
|---|---|
| ALL | All individuals |
| M | Male individuals |
| F | Female individuals |
| sm | Individuals with history of smoking |
| non sm | Individuals with no history of smoking |

[0101] Definition of Entries in the “Design” Column (Table 6):

| Status | Definition |
|---|---|
| ALL | All MI cases compared to |
| | all controls |
| Y-O | MI cases younger than |
| | median of samples |
| | compared to controls older |
| | than median of sample |
| MI_LS | MI cases compared to |
| | controls with low stenosis |
| | score |

[0102] Description of Column Headings for Tables 7-8:

| Table 7 & 8 column | |
|---|---|
| heading | Definition |
| hCG | Internal hCG Identification number for the gene that contains the |
| | tested SNP |
| Gene Name | Locus Link HUGO approved gene symbol for the gene that contains |
| | the tested SNP |
| Marker | Internal hCV identification number for the tested SNP |
| p-value | Result of the asymptotic chi square test for allelic association, |
| | dominant genotypic association, recessive genotypic association, or |
| | the allelic, dominant, or recessive p-value of the stratified analysis |
| OR | Odds ratio |
| Mode | The mode of inheritance |
| Allele | Nucleotide (allele) of the tested SNP for which statistical results are |
| | being reported [NOTE: Alleles may be presented in Tables 7-8 based |
| | on a different orientation (i.e., the reverse complement) relative to how |
| | the same allele is presented in Tables 1-2] |
| Strata | Indicates if the analysis of the dataset was based on a substratum |
| | such as gender, age, BMI, hypertension, fasting glucose levels, etc. |
| | (strata are described below) |
| Status Name | Sample set used in the analysis: During-CARE, Pre-CARE, or S12 |
| | (STATUS_ALLCASE_VS_ALL CONTROL, |
| | STATUS12_LT60CASE_VS_GT75CONTROL, and |
| | STATUS3_ALLCASE_VS_LT75CONTROL are from study S12). |

[0103] Definition of Entries in the “Strata” Column (Tables 7-8) for Stratification-Based Analyses:

| Stratum | Definition |
|---|---|
| BMI_TERTILE_1 | Individuals in the lowest tertile of body mass index; T1 <= 25.3 |
| BMI_TERTILE_2 | Individuals in the middle tertile of body mass index; |
| | 25.3 < T2 < 28.5 |
| BMI_TERTILE_3 | Individuals in the highest tertile of body mass index; T3 >= 28.5 |
| PLACEBO | Patients who were in the placebo arm of the CARE trial |
| PRAVASTATIN | Patients who were in the Pravastatin arm of the CARE trial |
| MALE | Only male individuals |
| FEMALE | Only female individuals |
| HYPERTEN_Yes | Individuals with a history of hypertension |
| HYPERTEN_No | Individuals with no history of hypertension |
| GLUCOSE_TERTILE_1 | Individuals in the lowest tertile of fasting glucose levels; |
| | T1 < 84.3 |
| GLUCOSE_TERTILE_2 | Individuals in the middle tertile of fasting glucose levels; |
| | 84.3 < T2 < 95.2 |
| GLUCOSE_TERTILE_3 | Individuals in the highest tertile of fasting glucose levels; |
| | T3 >= 95.2 |
| AGE_TERTILE_1 | Individuals in the lowest tertile of age; T1 < 55 |
| AGE_TERTILE_2 | Individuals in the middle tertile of age; 55 < T2 < 64 |
| AGE_TERTILE_3 | Individuals in the highest tertile age; T3 >= 64 |
| Smoke_No | Individuals who never smoked |
| Smoke_Yes | Former smokers or current smokers |
| FMHX_Yes | Individuals with family history of CHD |
| FMHX_No | Individuals with no family history of CHD |

[0104] Definition of Entries in the “Status Name” column (Tables 7-8):

| Status Name | Definition |
|---|---|
| STATUS_ALLCASE_VS_ALL CONTROL | Patients regardless of age were used in the |
| | analysis |
| STATUS12_LT60CASE_VS_GT75CONTROL | Cases were less than 60 years old and the |
| | controls were greater than 75 years old |
| STATUS3_ALLCASE_VS_LT75CONTROL | Controls were less than 75 years old |
| During-CARE | Cases had RMI during CARE; controls were a |
| | subset of CARE |
| Pre-CARE | Cases had an MI prior to the MI at CARE |
| | enrollment; controls were a subset of CARE |
| Cohort | Cases had RMI during CARE; all CARE controls |

### DESCRIPTION OF THE FIGURE

[0105] FIG. 1 provides a diagrammatic representation of a computer-based discovery system containing the SNP information of the present invention in computer readable form.

### DETAILED DESCRIPTION OF THE INVENTION

[0106] The present invention provides SNPs associated with myocardial infarction, nucleic acid molecules containing SNPs, methods and reagents for the detection of the SNPs disclosed herein, uses of these SNPs for the development of detection reagents, and assays or kits that utilize such reagents. The myocardial infarction-associated SNPs disclosed herein are useful for diagnosing, screening for, and evaluating predisposition to myocardial infarction and related pathologies in humans. Furthermore, such SNPs and their encoded products are useful targets for the development of therapeutic agents.

[0107] A large number of SNPs have been identified from re-sequencing DNA from 39 individuals, and they are indicated as “Applera” SNP source in Tables 1-2. Their allele frequencies observed in each of the Caucasian and African-American ethnic groups are provided. Additional SNPs included herein were previously identified during shotgun sequencing and assembly of the human genome, and they are indicated as “Celera” SNP source in Tables 1-2. Furthermore, the information provided in Table 1-2, particularly the allele frequency information obtained from 39 individuals and the identification of the precise position of each SNP within each gene/transcript, allows haplotypes (i.e., groups of SNPs that are co-inherited) to be readily inferred. The present invention encompasses SNP haplotypes, as well as individual SNPs.

[0108] Thus, the present invention provides individual SNPs associated with myocardial infarction, as well as combinations of SNPs and haplotypes in genetic regions associated with myocardial infarction, polymorphic/variant transcript sequences (SEQ ID NOS:1-450) and genomic sequences (SEQ ID NOS:8682-8935) containing SNPs, encoded amino acid sequences (SEQ ID NOS: 451-900), and both transcript-based SNP context sequences (SEQ ID NOS: 901-8681) and genomic-based SNP context sequences (SEQ ID NOS:8936-43,787) (transcript sequences, protein sequences, and transcript-based SNP context sequences are provided in Table 1 and the Sequence Listing; genomic sequences and genomic-based SNP context sequences are provided in Table 2 and the Sequence Listing), methods of detecting these polymorphisms in a test sample, methods of determining the risk of an individual of having or developing myocardial infarction, methods of screening for compounds useful for treating disorders associated with a variant gene/protein such as myocardial infarction, compounds identified by these screening methods, methods of using the disclosed SNPs to select a treatment strategy, methods of treating a disorder associated with a variant gene/protein (i.e., therapeutic methods), and methods of using the SNPs of the present invention for human identification.

[0109] The present invention provides novel SNPs associated with myocardial infarction, as well as SNPs that were previously known in the art, but were not previously known to be associated with myocardial infarction. Accordingly, the present invention provides novel compositions and methods based on the novel SNPs disclosed herein, and also provides novel methods of using the known, but previously unassociated, SNPs in methods relating to myocardial infarction (e.g., for diagnosing myocardial infarction, etc.). In Tables 1-2, known SNPs are identified based on the public database in which they have been observed, which is indicated as one or more of the following SNP types: “dbSNP”=SNP observed in dbSNP, “HGBASE”=SNP observed in HGBASE, and “HGMD”=SNP observed in the Human Gene Mutation Database (HGMD). Novel SNPs for which the SNP source is only “Applera” and none other, i.e., those that have not been observed in any public databases and which were also not observed during shotgun sequencing and assembly of the Celera human genome sequence (i.e., “Celera” SNP source), are indicated in Tables 3-4.

[0110] Particular SNP alleles of the present invention can be associated with either an increased risk of having or developing myocardial infarction, or a decreased risk of having or developing myocardial infarction. SNP alleles that are associated with a decreased risk of having or developing myocardial infarction may be referred to as “protective” alleles, and SNP alleles that are associated with an increased risk of having or developing myocardial infarction may be referred to as “susceptibility” alleles or “risk factors”. Thus, whereas certain SNPs (or their encoded products) can be assayed to determine whether an individual possesses a SNP allele that is indicative of an increased risk of having or developing myocardial infarction (i.e., a susceptibility allele), other SNPs (or their encoded products) can be assayed to determine whether an individual possesses a SNP allele that is indicative of a decreased risk of having or developing myocardial infarction (i.e., a protective allele). Similarly, particular SNP alleles of the present invention can be associated with either an increased or decreased likelihood of responding to a particular treatment or therapeutic compound, or an increased or decreased likelihood of experiencing toxic effects from a particular treatment or therapeutic compound. The term “altered” may be used herein to encompass either of these two possibilities (e.g., an increased or a decreased risk/likelihood).

[0111] Those skilled in the art will readily recognize that nucleic acid molecules may be double-stranded molecules and that reference to a particular site on one strand refers, as well, to the corresponding site on a complementary strand. In defining a SNP position, SNP allele, or nucleotide sequence, reference to an adenine, a thymine (uridine), a cytosine, or a guanine at a particular site on one strand of a nucleic acid molecule also defines the thymine (uridine), adenine, guanine, or cytosine (respectively) at the corresponding site on a complementary strand of the nucleic acid molecule. Thus, reference may be made to either strand in order to refer to a particular SNP position, SNP allele, or nucleotide sequence. Probes and primers, may be designed to hybridize to either strand and SNP genotyping methods disclosed herein may generally target either strand. Throughout the specification, in identifying a SNP position, reference is generally made to the protein-encoding strand, only for the purpose of convenience.

[0112] References to variant peptides, polypeptides, or proteins of the present invention include peptides, polypeptides, proteins, or fragments thereof, that contain at least one amino acid residue that differs from the corresponding amino acid sequence of the art-known peptide/polypeptide/protein (the art-known protein may be interchangeably referred to as the “wild-type”, “reference”, or “normal” protein). Such variant peptides/polypeptides/proteins can result from a codon change caused by a nonsynonymous nucleotide substitution at a protein-coding SNP position (i.e., a missense mutation) disclosed by the present invention. Variant peptides/polypeptides/proteins of the present invention can also result from a nonsense mutation, i.e. a SNP that creates a premature stop codon, a SNP that generates a read-through mutation by abolishing a stop codon, or due to any SNP disclosed by the present invention that otherwise alters the structure, function/activity, or expression of a protein, such as a SNP in a regulatory region (e.g. a promoter or enhancer) or a SNP that leads to alternative or defective splicing, such as a SNP in an intron or a SNP at an exon/intron boundary. As used herein, the terms “polypeptide”, “peptide”, and “protein” are used interchangeably.

[0113] Isolated Nucleic Acid Molecules and SNP Detection Reagents & Kits

[0114] Tables 1 and 2 provide a variety of information about each SNP of the present invention that is associated with myocardial infarction, including the transcript sequences (SEQ ID NOS:1-450), genomic sequences (SEQ ID NOS:8682-8935), and protein sequences (SEQ ID NOS:451-900) of the encoded gene products (with the SNPs indicated by IUB codes in the nucleic acid sequences). In addition, Tables 1 and 2 include SNP context sequences, which generally include 100 nucleotide upstream (5′) plus 100 nucleotides downstream (3′) of each SNP position (SEQ ID NOS:901-8681 correspond to transcript-based SNP context sequences disclosed in Table 1, and SEQ ID NOS:8936-43,787 correspond to genomic-based context sequences disclosed in Table 2), the alternative nucleotides (alleles) at each SNP position, and additional information about the variant where relevant, such as SNP type (coding, missense, splice site, UTR, etc.), human populations in which the SNP was observed, observed allele frequencies, information about the encoded protein, etc.

[0115] Isolated Nucleic Acid Molecules

[0116] The present invention provides isolated nucleic acid molecules that contain one or more SNPs disclosed Table 1 and/or Table 2. Preferred isolated nucleic acid molecules contain one or more SNPs identified in Table 3 and/or Table 4. Isolated nucleic acid molecules containing one or more SNPs disclosed in at least one of Tables 1-4 may be interchangeably referred to throughout the present text as “SNP-containing nucleic acid molecules”. Isolated nucleic acid molecules may optionally encode a full-length variant protein or fragment thereof. The isolated nucleic acid molecules of the present invention also include probes and primers (which are described in greater detail below in the section entitled “SNP Detection Reagents”), which may be used for assaying the disclosed SNPs, and isolated full-length genes, transcripts, cDNA molecules, and fragments thereof, which may be used for such purposes as expressing an encoded protein.

[0117] As used herein, an “isolated nucleic acid molecule” generally is one that contains a SNP of the present invention or one that hybridizes to such molecule such as a nucleic acid with a complementary sequence, and is separated from most other nucleic acids present in the natural source of the nucleic acid molecule. Moreover, an “isolated” nucleic acid molecule, such as a cDNA molecule containing a SNP of the present invention, can be substantially free of other cellular material, or culture medium when produced by recombinant techniques, or chemical precursors or other chemicals when chemically synthesized. A nucleic acid molecule can be fused to other coding or regulatory sequences and still be considered “isolated”. Nucleic acid molecules present in non-human transgenic animals, which do not naturally occur in the animal, are also considered “isolated”. For example, recombinant DNA molecules contained in a vector are considered “isolated”. Further examples of “isolated” DNA molecules include recombinant DNA molecules maintained in heterologous host cells, and purified (partially or substantially) DNA molecules in solution. Isolated RNA molecules include in vivo or in vitro RNA transcripts of the isolated SNP-containing DNA molecules of the present invention. Isolated nucleic acid molecules according to the present invention further include such molecules produced synthetically.

[0118] Generally, an isolated SNP-containing nucleic acid molecule comprises one or more SNP positions disclosed by the present invention with flanking nucleotide sequences on either side of the SNP positions. A flanking sequence can include nucleotide residues that are naturally associated with the SNP site and/or heterologous nucleotide sequences. Preferably the flanking sequence is up to about 500, 300, 100, 60, 50, 30, 25, 20, 15, 10, 8, or 4 nucleotides (or any other length in-between) on either side of a SNP position, or as long as the full-length gene or entire protein-coding sequence (or any portion thereof such as an exon), especially if the SNP-containing nucleic acid molecule is to be used to produce a protein or protein fragment.

[0119] For full-length genes and entire protein-coding sequences, a SNP flanking sequence can be, for example, up to about 5 KB, 4 KB, 3 KB, 2 KB, 1 KB on either side of the SNP. Furthermore, in such instances, the isolated nucleic acid molecule comprises exonic sequences (including protein-coding and/or non-coding exonic sequences), but may also include intronic sequences. Thus, any protein coding sequence may be either contiguous or separated by introns. The important point is that the nucleic acid is isolated from remote and unimportant flanking sequences and is of appropriate length such that it can be subjected to the specific manipulations or uses described herein such as recombinant protein expression, preparation of probes and primers for assaying the SNP position, and other uses specific to the SNP-containing nucleic acid sequences.

[0120] An isolated SNP-containing nucleic acid molecule can comprise, for example, a full-length gene or transcript, such as a gene isolated from genomic DNA (e.g., by cloning or PCR amplification), a cDNA molecule, or an mRNA transcript molecule. Polymorphic transcript sequences are provided in Table 1 and in the Sequence Listing (SEQ ID NOS: 1-450), and polymorphic genomic sequences are provided in Table 2 and in the Sequence Listing (SEQ ID NOS:8682-8935). Furthermore, fragments of such full-length genes and transcripts that contain one or more SNPs disclosed herein are also encompassed by the present invention, and such fragments may be used, for example, to express any part of a protein, such as a particular functional domain or an antigenic epitope.

[0121] Thus, the present invention also encompasses fragments of the nucleic acid sequences provided in Tables 1-2 (transcript sequences are provided in Table 1 as SEQ ID NOS:1-450, genomic sequences are provided in Table 2 as SEQ ID NOS:8682-8935, transcript-based SNP context sequences are provided in Table 1 as SEQ ID NO:901-8681, and genomic-based SNP context sequences are provided in Table 2 as SEQ ID NO:8936-43,787) and their complements. A fragment typically comprises a contiguous nucleotide sequence at least about 8 or more nucleotides, more preferably at least about 12 or more nucleotides, and even more preferably at least about 16 or more nucleotides. Further, a fragment could comprise at least about 18, 20, 22, 25, 30, 40, 50, 60, 80, 100, 150, 200, 250 or 500 (or any other number in-between) nucleotides in length. The length of the fragment will be based on its intended use. For example, the fragment can encode epitope-bearing regions of a variant peptide or regions of a variant peptide that differ from the normal/wild-type protein, or can be useful as a polynucleotide probe or primer. Such fragments can be isolated using the nucleotide sequences provided in Table 1 and/or Table 2 for the synthesis of a polynucleotide probe. A labeled probe can then be used, for example, to screen a cDNA library, genomic DNA library, or mRNA to isolate nucleic acid corresponding to the coding region. Further, primers can be used in amplification reactions, such as for purposes of assaying one or more SNPs sites or for cloning specific regions of a gene.

[0122] An isolated nucleic acid molecule of the present invention further encompasses a SNP-containing polynucleotide that is the product of any one of a variety of nucleic acid amplification methods, which are used to increase the copy numbers of a polynucleotide of interest in a nucleic acid sample. Such amplification methods are well known in the art, and they include but are not limited to, polymerase chain reaction (PCR) (U.S. Pat. Nos. 4,683,195; and 4,683,202; PCR Technology: Principles and Applications for DNA Amplification, ed. H. A. Erlich, Freeman Press, NY, NY, 1992), ligase chain reaction (LCR) (Wu and Wallace, Genomics 4:560, 1989; Landegren et al., Science 241:1077, 1988), strand displacement amplification (SDA) (U.S. Pat. Nos. 5,270,184; and 5,422,252), transcription-mediated amplification (TMA) (U.S. Pat. No. 5,399,491), linked linear amplification (LLA) (U.S. Pat. No. 6,027,923), and the like, and isothermal amplification methods such as nucleic acid sequence based amplification (NASBA), and self-sustained sequence replication (Guatelli et al., Proc. Natl. Acad. Sci. USA 87: 1874, 1990). Based on such methodologies, a person skilled in the art can readily design primers in any suitable regions 5′ and 3′ to a SNP disclosed herein. Such primers may be used to amplify DNA of any length so long that it contains the SNP of interest in its sequence.

[0123] As used herein, an “amplified polynucleotide” of the invention is a SNP-containing nucleic acid molecule whose amount has been increased at least two fold by any nucleic acid amplification method performed in vitro as compared to its starting amount in a test sample. In other preferred embodiments, an amplified polynucleotide is the result of at least ten fold, fifty fold, one hundred fold, one thousand fold, or even ten thousand fold increase as compared to its starting amount in a test sample. In a typical PCR amplification, a polynucleotide of interest is often amplified at least fifty thousand fold in amount over the unamplified genomic DNA, but the precise amount of amplification needed for an assay depends on the sensitivity of the subsequent detection method used.

[0124] Generally, an amplified polynucleotide is at least about 16 nucleotides in length. More typically, an amplified polynucleotide is at least about 20 nucleotides in length. In a preferred embodiment of the invention, an amplified polynucleotide is at least about 30 nucleotides in length. In a more preferred embodiment of the invention, an amplified polynucleotide is at least about 32, 40, 45, 50, or 60 nucleotides in length. In yet another preferred embodiment of the invention, an amplified polynucleotide is at least about 100, 200, 300, 400, or 500 nucleotides in length. While the total length of an amplified polynucleotide of the invention can be as long as an exon, an intron or the entire gene where the SNP of interest resides, an amplified product is typically up to about 1,000 nucleotides in length (although certain amplification methods may generate amplified products greater than 1000 nucleotides in length). More preferably, an amplified polynucleotide is not greater than about 600-700 nucleotides in length. It is understood that irrespective of the length of an amplified polynucleotide, a SNP of interest may be located anywhere along its sequence.

[0125] In a specific embodiment of the invention, the amplified product is at least about 201 nucleotides in length, comprises-one of the transcript-based context sequences or the genomic-based context sequences shown in Tables 1-2. Such a product may have additional sequences on its 5′ end or 3′ end or both. In another embodiment, the amplified product is about 101 nucleotides in length, and it contains a SNP disclosed herein. Preferably, the SNP is located at the middle of the amplified product (e.g., at position 101 in an amplified product that is 201 nucleotides in length, or at position 51 in an amplified product that is 101 nucleotides in length), or within 1, 2, 3, 4, 5, 6, 7, 8, 9, 10, 12, 15, or 20 nucleotides from the middle of the amplified product (however, as indicated above, the SNP of interest may be located anywhere along the length of the amplified product).

[0126] The present invention provides isolated nucleic acid molecules that comprise, consist of, or consist essentially of one or more polynucleotide sequences that contain one or more SNPs disclosed herein, complements thereof, and SNP-containing fragments thereof.

[0127] Accordingly, the present invention provides nucleic acid molecules that consist of any of the nucleotide sequences shown in Table 1 and/or Table 2 (transcript sequences are provided in Table 1 as SEQ ID NOS:1-450, genomic sequences are provided in Table 2 as SEQ ID NOS:8682-8935, transcript-based SNP context sequences are provided in Table 1 as SEQ ID NO:901-8681, and genomic-based SNP context sequences are provided in Table 2 as SEQ ID NO:8936-43,787), or any nucleic acid molecule that encodes any of the variant proteins provided in Table 1 (SEQ ID NOS:451-900). A nucleic acid molecule consists of a nucleotide sequence when the nucleotide sequence is the complete nucleotide sequence of the nucleic acid molecule.

[0128] The present invention further provides nucleic acid molecules that consist essentially of any of the nucleotide sequences shown in Table 1 and/or Table 2 (transcript sequences are provided in Table 1 as SEQ ID NOS:1-450, genomic sequences are provided in Table 2 as SEQ ID NOS:8682-8935, transcript-based SNP context sequences are provided in Table 1 as SEQ ID NO:901-8681, and genomic-based SNP context sequences are provided in Table 2 as SEQ ID NO:8936-43,787), or any nucleic acid molecule that encodes any of the variant proteins provided in Table 1 (SEQ ID NOS:451-900). A nucleic acid molecule consists essentially of a nucleotide sequence when such a nucleotide sequence is present with only a few additional nucleotide residues in the final nucleic acid molecule.

[0129] The present invention further provides nucleic acid molecules that comprise any of the nucleotide sequences shown in Table 1 and/or Table 2 or a SNP-containing fragment thereof (transcript sequences are provided in Table 1 as SEQ ID NOS:1-450, genomic sequences are provided in Table 2 as SEQ ID NOS:8682-8935, transcript-based SNP context sequences are provided in Table 1 as SEQ ID NO:901-8681, and genomic-based SNP context sequences are provided in Table 2 as SEQ ID NO:8936-43,787), or any nucleic acid molecule that encodes any of the variant proteins provided in Table 1 (SEQ ID NOS:451-900). A nucleic acid molecule comprises a nucleotide sequence when the nucleotide sequence is at least part of the final nucleotide sequence of the nucleic acid molecule. In such a fashion, the nucleic acid molecule can be only the nucleotide sequence or have additional nucleotide residues, such as residues that are naturally associated with it or heterologous nucleotide sequences. Such a nucleic acid molecule can have one to a few additional nucleotides or can comprise many more additional nucleotides. A brief description of how various types of these nucleic acid molecules can be readily made and isolated is provided below, and such techniques are well known to those of ordinary skill in the art (Sambrook and Russell, 2000, Molecular Cloning: A Laboratory Manual, Cold Spring Harbor Press, NY).

[0130] The isolated nucleic acid molecules can encode mature proteins plus additional amino or carboxyl-terminal amino acids or both, or amino acids interior to the mature peptide (when the mature form has more than one peptide chain, for instance). Such sequences may play a role in processing of a protein from precursor to a mature form, facilitate protein trafficking, prolong or shorten protein half-life, or facilitate manipulation of a protein for assay or production. As generally is the case in situ, the additional amino acids may be processed away from the mature protein by cellular enzymes.

[0131] Thus, the isolated nucleic acid molecules include, but are not limited to, nucleic acid molecules having a sequence encoding a peptide alone, a sequence encoding a mature peptide and additional coding sequences such as a leader or secretory sequence (e.g., a pre-pro or pro-protein sequence), a sequence encoding a mature peptide with or without additional coding sequences, plus additional non-coding sequences, for example introns and non-coding 5′ and 3′ sequences such as transcribed but untranslated sequences that play a role in, for example, transcription, mRNA processing (including splicing and polyadenylation signals), ribosome binding, and/or stability of mRNA. In addition, the nucleic acid molecules may be fused to heterologous marker sequences encoding, for example, a peptide that facilitates purification.

[0132] Isolated nucleic acid molecules can be in the form of RNA, such as mRNA, or in the form DNA, including cDNA and genomic DNA, which may be obtained, for example, by molecular cloning or produced by chemical synthetic techniques or by a combination thereof (Sambrook and Russell, 2000, Molecular Cloning: A Laboratory Manual, Cold Spring Harbor Press, NY). Furthermore, isolated nucleic acid molecules, particularly SNP detection reagents such as probes and primers, can also be partially or completely in the form of one or more types of nucleic acid analogs, such as peptide nucleic acid (PNA) (U.S. Pat. Nos. 5,539,082; 5,527,675; 5,623,049; 5,714,331). The nucleic acid, especially DNA, can be double-stranded or single-stranded. Single-stranded nucleic acid can be the coding strand (sense strand) or the complementary non-coding strand (anti-sense strand). DNA, RNA, or PNA segments can be assembled, for example, from fragments of the human genome (in the case of DNA or RNA) or single nucleotides, short oligonucleotide linkers, or from a series of oligonucleotides, to provide a synthetic nucleic acid molecule. Nucleic acid molecules can be readily synthesized using the sequences provided herein as a reference; oligonucleotide and PNA oligomer synthesis techniques are well known in the art (see, e.g., Corey, “Peptide nucleic acids: expanding the scope of nucleic acid recognition”, Trends Biotechnol. 1997 June; 15(6):224-9, and Hyrup et al., “Peptide nucleic acids (PNA): synthesis, properties and potential applications”, Bioorg Med. Chem. 1996 January; 4(1):5-23). Furthermore, large-scale automated oligonucleotide/PNA synthesis (including synthesis on an array or bead surface or other solid support) can readily be accomplished using commercially available nucleic acid synthesizers, such as the Applied Biosystems (Foster City, Calif.) 3900 High-Throughput DNA Synthesizer or Expedite 8909 Nucleic Acid Synthesis System, and the sequence information provided herein.

[0133] The present invention encompasses nucleic acid analogs that contain modified, synthetic, or non-naturally occurring nucleotides or structural elements or other alternative/modified nucleic acid chemistries known in the art. Such nucleic acid analogs are useful, for example, as detection reagents (e.g., primers/probes) for detecting one or more SNPs identified in Table 1 and/or Table 2. Furthermore, kits/systems (such as beads, arrays, etc.) that include these analogs are also encompassed by the present invention. For example, PNA oligomers that are based on the polymorphic sequences of the present invention are specifically contemplated. PNA oligomers are analogs of DNA in which the phosphate backbone is replaced with a peptide-like backbone (Lagriffoul et al., Bioorganic & Medicinal Chemistry Letters, 4: 1081-1082 (1994), Petersen et al., Bioorganic & Medicinal Chemistry Letters, 6: 793-796 (1996), Kumar et al., Organic Letters 3(9): 1269-1272 (2001), WO96/04000). PNA hybridizes to complementary RNA or DNA with higher affinity and specificity than conventional oligonucleotides and oligonucleotide analogs. The properties of PNA enable novel molecular biology and biochemistry applications unachievable with traditional oligonucleotides and peptides.

[0134] Additional examples of nucleic acid modifications that improve the binding properties and/or stability of a nucleic acid include the use of base analogs such as inosine, intercalators (U.S. Pat. No. 4,835,263) and the minor groove binders (U.S. Pat. No. 5,801,115). Thus, references herein to nucleic acid molecules, SNP-containing nucleic acid molecules, SNP detection reagents (e.g., probes and primers), oligonucleotides/polynucleotides include PNA oligomers and other nucleic acid analogs. Other examples of nucleic acid analogs and alternative/modified nucleic acid chemistries known in the art are described in Current Protocols in Nucleic Acid Chemistry, John Wiley & Sons, N.Y. (2002).

[0135] The present invention further provides nucleic acid molecules that encode fragments of the variant polypeptides disclosed herein as well as nucleic acid molecules that encode obvious variants of such variant polypeptides. Such nucleic acid molecules may be naturally occurring, such as paralogs (different locus) and orthologs (different organism), or may be constructed by recombinant DNA methods or by chemical synthesis. Non-naturally occurring variants may be made by mutagenesis techniques, including those applied to nucleic acid molecules, cells, or organisms. Accordingly, the variants can contain nucleotide substitutions, deletions, inversions and insertions (in addition to the SNPs disclosed in Tables 1-2). Variation can occur in either or both the coding and non-coding regions. The variations can produce conservative and/or non-conservative amino acid substitutions.

[0136] Further variants of the nucleic acid molecules disclosed in Tables 1-2, such as naturally occurring allelic variants (as well as orthologs and paralogs) and synthetic variants produced by mutagenesis techniques, can be identified and/or produced using methods well known in the art. Such further variants can comprise a nucleotide sequence that shares at least 70-80%, 80-85%, 85-90%, 91%, 92%, 93%, 94%, 95%, 96%, 97%, 98%, or 99% sequence identity with a nucleic acid sequence disclosed in Table 1 and/or Table 2 (or a fragment thereof) and that includes a novel SNP allele disclosed in Table 1 and/or Table 2. Further, variants can comprise a nucleotide sequence that encodes a polypeptide that shares at least 70-80%, 80-85%, 85-90%, 91%, 92%, 93%, 94%, 95%, 96%, 97%, 98%, or 99% sequence identity with a polypeptide sequence disclosed in Table 1 (or a fragment thereof) and that includes a novel SNP allele disclosed in Table 1 and/or Table 2. Thus, an aspect of the present invention that is specifically contemplated are isolated nucleic acid molecules that have a certain degree of sequence variation compared with the sequences shown in Tables 1-2, but that contain a novel SNP allele disclosed herein. In other words, as long as an isolated nucleic acid molecule contains a novel SNP allele disclosed herein, other portions of the nucleic acid molecule that flank the novel SNP allele can vary to some degree from the specific transcript, genomic, and context sequences shown in Tables 1-2, and can encode a polypeptide that varies to some degree from the specific polypeptide sequences shown in Table 1.

[0137] To determine the percent identity of two amino acid sequences or two nucleotide sequences of two molecules that share sequence homology, the sequences are aligned for optimal comparison purposes (e.g., gaps can be introduced in one or both of a first and a second amino acid or nucleic acid sequence for optimal alignment and non-homologous sequences can be disregarded for comparison purposes). In a preferred embodiment, at least 30%, 40%, 50%, 60%, 70%, 80%, or 90% or more of the length of a reference sequence is aligned for comparison purposes. The amino acid residues or nucleotides at corresponding amino acid positions or nucleotide positions are then compared. When a position in the first sequence is occupied by the same amino acid residue or nucleotide as the corresponding position in the second sequence, then the molecules are identical at that position (as used herein, amino acid or nucleic acid “identity” is equivalent to amino acid or nucleic acid “homology”). The percent identity between the two sequences is a function of the number of identical positions shared by the sequences, taking into account the number of gaps, and the length of each gap, which need to be introduced for optimal alignment of the two sequences.

[0138] The comparison of sequences and determination of percent identity between two sequences can be accomplished using a mathematical algorithm. (Computational Molecular Biology, Lesk, A. M., ed., Oxford University Press, New York, 1988; Biocomputing: Informatics and Genome Projects, Smith, D. W., ed., Academic Press, New York, 1993; Computer Analysis of sequence Data, Part 1, Griffin, A. M., and Griffin, H. G., eds., Humana Press, New Jersey, 1994; Sequence Analysis in Molecular Biology, von Heinje, G., Academic Press, 1987; and Sequence Analysis Primer, Gribskov, M. and Devereux, J., eds., M Stockton Press, New York, 1991). In a preferred embodiment, the percent identity between two amino acid sequences is determined using the Needleman and Wunsch algorithm (J. Mol. Biol. (48):444-453 (1970)) which has been incorporated into the GAP program in the GCG software package, using either a Blossom 62 matrix or a PAM250 matrix, and a gap weight of 16, 14, 12, 10, 8, 6, or 4 and a length weight of 1, 2, 3, 4, 5, or 6.

[0139] In yet another preferred embodiment, the percent identity between two nucleotide sequences is determined using the GAP program in the GCG software package (Devereux, J., et al., Nucleic Acids Res. 12(1):387 (1984)), using a NWSgapdna.CMP matrix and a gap weight of 40, 50, 60, 70, or 80 and a length weight of 1, 2, 3, 4, 5, or 6. In another embodiment, the percent identity between two amino acid or nucleotide sequences is determined using the algorithm of E. Myers and W. Miller (CABIOS, 4:11-17 (1989)) which has been incorporated into the ALIGN program (version 2.0), using a PAM120 weight residue table, a gap length penalty of 12, and a gap penalty of 4.

[0140] The nucleotide and amino acid sequences of the present invention can further be used as a “query sequence” to perform a search against sequence databases to, for example, identify other family members or related sequences. Such searches can be performed using the NBLAST and XBLAST programs (version 2.0) of Altschul, et al. (J. Mol. Biol. 215:403-10 (1990)). BLAST nucleotide searches can be performed with the NBLAST program, score=100, wordlength=12 to obtain nucleotide sequences homologous to the nucleic acid molecules of the invention. BLAST protein searches can be performed with the XBLAST program, score=50, wordlength=3 to obtain amino acid sequences homologous to the proteins of the invention. To obtain gapped alignments for comparison purposes, Gapped BLAST can be utilized as described in Altschul et al. (Nucleic Acids Res. 25(17):3389-3402 (1997)). When utilizing BLAST and gapped BLAST programs, the default parameters of the respective programs (e.g., XBLAST and NBLAST) can be used. In addition to BLAST, examples of other search and sequence comparison programs used in the art include, but are not limited to, FASTA (Pearson, Methods Mol. Biol. 25, 365-389 (1994)) and KERR (Dufresne et al., Nat Biotechnol 2002 December; 20(12):1269-71). For further information regarding bioinformatics techniques, see Current Protocols in Bioinformatics, John Wiley & Sons, Inc., N.Y.

[0141] The present invention further provides non-coding fragments of the nucleic acid molecules disclosed in Table 1 and/or Table 2. Preferred non-coding fragments include, but are not limited to, promoter sequences, enhancer sequences, intronic sequences, 5′ untranslated regions (UTRs), 3′ untranslated regions, gene modulating sequences and gene termination sequences. Such fragments are useful, for example, in controlling heterologous gene expression and in developing screens to identify gene-modulating agents.

[0142] SNP Detection Reagents

[0143] In a specific aspect of the present invention, the SNPs disclosed in Table 1 and/or Table 2, and their associated transcript sequences (provided in Table 1 as SEQ ID NOS:1-450), genomic sequences (provided in Table 2 as SEQ ID NOS:8682-8935), and context sequences (transcript-based context sequences are provided in Table 1 as SEQ ID NOS:901-8681; genomic-based context sequences are provided in Table 2 as SEQ ID NOS:8936-43,787), can be used for the design of SNP detection reagents. As used herein, a “SNP detection reagent” is a reagent that specifically detects a specific target SNP position disclosed herein, and that is preferably specific for a particular nucleotide (allele) of the target SNP position (i.e., the detection reagent preferably can differentiate between different alternative nucleotides at a target SNP position; thereby allowing the identity of the nucleotide present at the target SNP position to be determined). Typically, such detection reagent hybridizes to a target SNP-containing nucleic acid molecule by complementary base-pairing in a sequence specific manner, and discriminates the target variant sequence from other nucleic acid sequences such as an art-known form in a test sample. An example of a detection reagent is a probe that hybridizes to a target nucleic acid containing one or more of the SNPs provided in Table 1 and/or Table 2. In a preferred embodiment, such a probe can differentiate between nucleic acids having a particular nucleotide (allele) at a target SNP position from other nucleic acids that have a different nucleotide at the same target SNP position. In addition, a detection reagent may hybridize to a specific region 5′ and/or 3′ to a SNP position, particularly a region corresponding to the context sequences provided in Table 1 and/or Table 2 (transcript-based context sequences are provided in Table 1 as SEQ ID NOS:901-8681; genomic-based context sequences are provided in Table 2 as SEQ ID NOS:8936-43,787). Another example of a detection reagent is a primer which acts as an initiation point of nucleotide extension along a complementary strand of a target polynucleotide. The SNP sequence information provided herein is also useful for designing primers, e.g. allele-specific primers, to amplify (e.g., using PCR) any SNP of the present invention.

[0144] In one preferred embodiment of the invention, a SNP detection reagent is an isolated or synthetic DNA or RNA polynucleotide probe or primer or PNA oligomer, or a combination of DNA, RNA and/or PNA, that hybridizes to a segment of a target nucleic acid molecule containing a SNP identified in Table 1 and/or Table 2. A detection reagent in the form of a polynucleotide may optionally contain modified base analogs, intercalators or minor groove binders. Multiple detection reagents such as probes may be, for example, affixed to a solid support (e.g., arrays or beads) or supplied in solution (e.g., probe/primer sets for enzymatic reactions such as PCR, RT-PCR, TaqMan assays, or primer-extension reactions) to form a SNP detection kit.

[0145] A probe or primer typically is a substantially purified oligonucleotide or PNA oligomer. Such oligonucleotide typically comprises a region of complementary nucleotide sequence that hybridizes under stringent conditions to at least about 8, 10, 12, 16, 18, 20, 22, 25, 30, 40, 50, 55, 60, 65, 70, 80, 90, 100, 120 (or any other number in-between) or more consecutive nucleotides in a target nucleic acid molecule. Depending on the particular assay, the consecutive nucleotides can either include the target SNP position, or be a specific region in close enough proximity 5′ and/or 3′ to the SNP position to carry out the desired assay.

[0146] Other preferred primer and probe sequences can readily be determined using the transcript sequences (SEQ ID NOS:1-450), genomic sequences (SEQ ID NOS:8682-8935), and SNP context sequences (transcript-based context sequences are provided in Table 1 as SEQ ID NOS:901-8681; genomic-based context sequences are provided in Table 2 as SEQ ID NOS:8936-43,787) disclosed in the Sequence Listing and in Tables 1-2. It will be apparent to one of skill in the art that such primers and probes are directly useful as reagents for genotyping the SNPs of the present invention, and can be incorporated into any kit/system format.

[0147] In order to produce a probe or primer specific for a target SNP-containing sequence, the gene/transcript and/or context sequence surrounding the SNP of interest is typically examined using a computer algorithm which starts at the 5′ or at the 3′ end of the nucleotide sequence. Typical algorithms will then identify oligomers of defined length that are unique to the gene/SNP context sequence, have a GC content within a range suitable for hybridization, lack predicted secondary structure that may interfere with hybridization, and/or possess other desired characteristics or that lack other undesired characteristics.

[0148] A primer or probe of the present invention is typically at least about 8 nucleotides in length. In one embodiment of the invention, a primer or a probe is at least about 10 nucleotides in length. In a preferred embodiment, a primer or a probe is at least about 12 nucleotides in length. In a more preferred embodiment, a primer or probe is at least about 16, 17, 18, 19, 20, 21, 22, 23, 24 or 25 nucleotides in length. While the maximal length of a probe can be as long as the target sequence to be detected, depending on the type of assay in which it is employed, it is typically less than about 50, 60, 65, or 70 nucleotides in length. In the case of a primer, it is typically less than about 30 nucleotides in length. In a specific preferred embodiment of the invention, a primer or a probe is within the length of about 18 and about 28 nucleotides. However, in other embodiments, such as nucleic acid arrays and other embodiments in which probes are affixed to a substrate, the probes can be longer, such as on the order of 30-70, 75, 80, 90, 100, or more nucleotides in length (see the section below entitled “SNP Detection Kits and Systems”).

[0149] For analyzing SNPs, it may be appropriate to use oligonucleotides specific for alternative SNP alleles. Such oligonucleotides which detect single nucleotide variations in target sequences may be referred to by such terms as “allele-specific oligonucleotides”, “allele-specific probes”, or “allele-specific primers”. The design and use of allele-specific probes for analyzing polymorphisms is described in, e.g., Mutation Detection A Practical Approach, ed. Cotton et al. Oxford University Press, 1998; Saiki et al., Nature 324, 163-166 (1986); Dattagupta, EP235,726; and Saiki, WO 89/11548.

[0150] While the design of each allele-specific primer or probe depends on variables such as the precise composition of the nucleotide sequences flanking a SNP position in a target nucleic acid molecule, and the length of the primer or probe, another factor in the use of primers and probes is the stringency of the condition under which the hybridization between the probe or primer and the target sequence is performed. Higher stringency conditions utilize buffers with lower ionic strength and/or a higher reaction temperature, and tend to require a more perfect match between probe/primer and a target sequence in order to form a stable duplex. If the stringency is too high, however, hybridization may not occur at all. In contrast, lower stringency conditions utilize buffers with higher ionic strength and/or a lower reaction temperature, and permit the formation of stable duplexes with more mismatched bases between a probe/primer and a target sequence. By way of example and not limitation, exemplary conditions for high stringency hybridization conditions using an allele-specific probe are as follows: Prehybridization with a solution containing 5× standard saline phosphate EDTA (SSPE), 0.5% NaDodSO₄ (SDS) at 55° C., and incubating probe with target nucleic acid molecules in the same solution at the same temperature, followed by washing with a solution containing 2×SSPE, and 0.1% SDS at 55° C. or room temperature.

[0151] Moderate stringency hybridization conditions may be used for allele-specific primer extension reactions with a solution containing, e.g., about 50 mM KCl at about 46° C. Alternatively, the reaction may be carried out at an elevated temperature such as 60° C. In another embodiment, a moderately stringent hybridization condition suitable for oligonucleotide ligation assay (OLA)-reactions wherein two probes are ligated if they are completely complementary to the target sequence may utilize a solution of about 100 mM KCl at a temperature of 46° C.

[0152] In a hybridization-based assay, allele-specific probes can be designed that hybridize to a segment of target DNA from one individual but do not hybridize to the corresponding segment from another individual due to the presence of different polymorphic forms (e.g., alternative SNP alleles/nucleotides) in the respective DNA segments from the two individuals. Hybridization conditions should be sufficiently stringent that there is a significant detectable difference in hybridization intensity between alleles, and preferably an essentially binary response, whereby a probe hybridizes to only one of the alleles or significantly more strongly to one allele. While a probe may be designed to hybridize to a target sequence that contains a SNP site such that the SNP site aligns anywhere along the sequence of the probe, the probe is preferably designed to hybridize to a segment of the target sequence such that the SNP site aligns with a central position of the probe (e.g., a position within the probe that is at least three nucleotides from either end of the probe). This design of probe generally achieves good discrimination in hybridization between different allelic forms.

[0153] In another embodiment, a probe or primer may be designed to hybridize to a segment of target DNA such that the SNP aligns with either the 5′ most end or the 3′ most end of the probe or primer. In a specific preferred embodiment which is particularly suitable for use in a oligonucleotide ligation assay (U.S. Pat. No. 4,988,617), the 3′ most nucleotide of the probe aligns with the SNP position in the target sequence.

[0154] Oligonucleotide probes and primers may be prepared by methods well known in the art. Chemical synthetic methods include, but are limited to, the phosphotriester method described by Narang et al., 1979, Methods in Enzymology 68:90; the phosphodiester method described by Brown et al., 1979, Methods in Enzymology 68:109, the diethylphosphoamidate method described by Beaucage et al., 1981, Tetrahedron Letters 22:1859; and the solid support method described in U.S. Pat. No. 4,458,066.

[0155] Allele-specific probes are often used in pairs (or, less commonly, in sets of 3 or 4, such as if a SNP position is known to have 3 or 4 alleles, respectively, or to assay both strands of a nucleic acid molecule for a target SNP allele), and such pairs may be identical except for a one nucleotide mismatch that represents the allelic variants at the SNP position. Commonly, one member of a pair perfectly matches a reference form of a target sequence that has a more common SNP allele (i.e., the allele that is more frequent in the target population) and the other member of the pair perfectly matches a form of the target sequence that has a less common SNP allele (i.e., the allele that is rarer in the target population). In the case of an array, multiple pairs of probes can be immobilized on the same support for simultaneous analysis of multiple different polymorphisms.

[0156] In one type of PCR-based assay, an allele-specific primer hybridizes to a region on a target nucleic acid molecule that overlaps a SNP position and only primes amplification of an allelic form to which the primer exhibits perfect complementarity (Gibbs, 1989, Nucleic Acid Res. 17 2427-2448). Typically, the primer's 3′-most nucleotide is aligned with and complementary to the SNP position of the target nucleic acid molecule. This primer is used in conjunction with a second primer that hybridizes at a distal site. Amplification proceeds from the two primers, producing a detectable product that indicates which allelic form is present in the test sample. A control is usually performed with a second pair of primers, one of which shows a single base mismatch at the polymorphic site and the other of which exhibits perfect complementarity to a distal site. The single-base mismatch prevents amplification or substantially reduces amplification efficiency, so that either no detectable product is formed or it is formed in lower amounts or at a slower pace. The method generally works most effectively when the mismatch is at the 3′-most position of the oligonucleotide (i.e., the 3′-most position of the oligonucleotide aligns with the target SNP position) because this position is most destabilizing to elongation from the primer (see, e.g., WO 93/22456). This PCR-based assay can be utilized as part of the TaqMan assay, described below.

[0157] In a specific embodiment of the invention, a primer of the invention contains a sequence substantially complementary to a segment of a target SNP-containing nucleic acid molecule except that the primer has a mismatched nucleotide in one of the three nucleotide positions at the 3′-most end of the primer, such that the mismatched nucleotide does not base pair with a particular allele at the SNP site. In a preferred embodiment, the mismatched nucleotide in the primer is the second from the last nucleotide at the 3′-most position of the primer. In a more preferred embodiment, the mismatched nucleotide in the primer is the last nucleotide at the 3′-most position of the primer.

[0158] In another embodiment of the invention, a SNP detection reagent of the invention is labeled with a fluorogenic reporter dye that emits a detectable signal. While the preferred reporter dye is a fluorescent dye, any reporter dye that can be attached to a detection reagent such as an oligonucleotide probe or primer is suitable for use in the invention. Such dyes include, but are not limited to, Acridine, AMCA, BODIPY, Cascade Blue, Cy2, Cy3, Cy5, Cy7, Dabcyl, Edans, Eosin, Erythrosin, Fluorescein, 6-Fam, Tet, Joe, Hex, Oregon Green, Rhodamine, Rhodol Green, Tamra, Rox, and Texas Red.

[0159] In yet another embodiment of the invention, the detection reagent may be further labeled with a quencher dye such as Tamra, especially when the reagent is used as a self-quenching probe such as a TaqMan (U.S. Pat. Nos. 5,210,015 and 5,538,848) or Molecular Beacon probe (U.S. Pat. Nos. 5,118,801 and 5,312,728), or other stemless or linear beacon probe (Livak et al., 1995, PCR Method Appl. 4:357-362; Tyagi et al., 1996, Nature Biotechnology 14: 303-308; Nazarenko et al., 1997, Nucl. Acids Res. 25:2516-2521; U.S. Pat. Nos. 5,866,336 and 6,117,635).

[0160] The detection reagents of the invention may also contain other labels, including but not limited to, biotin for streptavidin binding, hapten for antibody binding, and oligonucleotide for binding to another complementary oligonucleotide such as pairs of zipcodes.

[0161] The present invention also contemplates reagents that do not contain (or that are complementary to) a SNP nucleotide identified herein but that are used to assay one or more SNPs disclosed herein. For example, primers that flank, but do not hybridize directly to a target SNP position provided herein are useful in primer extension reactions in which the primers hybridize to a region adjacent to the target SNP position (i.e., within one or more nucleotides from the target SNP site). During the primer extension reaction, a primer is typically not able to extend past a target SNP site if a particular nucleotide (allele) is present at that target SNP site, and the primer extension product can be detected in order to determine which SNP allele is present at the target SNP site. For example, particular ddNTPs are typically used in the primer extension reaction to terminate primer extension once a ddNTP is incorporated into the extension product (a primer extension product which includes a ddNTP at the 3′-most end of the primer extension product, and in which the ddNTP is a nucleotide of a SNP disclosed herein, is a composition that is specifically contemplated by the present invention). Thus, reagents that bind to a nucleic acid molecule in a region adjacent to a SNP site and that are used for assaying the SNP site, even though the bound sequences do not necessarily include the SNP site itself, are also contemplated by the present invention.

[0162] SNP Detection Kits and Systems

[0163] A person skilled in the art will recognize that, based on the SNP and associated sequence information disclosed herein, detection reagents can be developed and used to assay any SNP of the present invention individually or in combination, and such detection reagents can be readily incorporated into one of the established kit or system formats which are well known in the art. The terms “kits” and “systems”, as used herein in the context of SNP detection reagents, are intended to refer to such things as combinations of multiple SNP detection reagents, or one or more SNP detection reagents in combination with one or more other types of elements or components (e.g., other types of biochemical reagents, containers, packages such as packaging intended for commercial sale, substrates to which SNP detection reagents are attached, electronic hardware components, etc.). Accordingly, the present invention further provides SNP detection kits and systems, including but not limited to, packaged probe and primer sets (e.g., TaqMan probe/primer sets), arrays/microarrays of nucleic acid molecules, and beads that contain one or more probes, primers, or other detection reagents for detecting one or more SNPs of the present invention. The kits/systems can optionally include various electronic hardware components; for example, arrays (“DNA chips”) and microfluidic systems (“lab-on-a-chip” systems) provided by various manufacturers typically comprise hardware components. Other kits/systems (e.g., probe/primer sets) may not include electronic hardware components, but may be comprised of, for example, one or more SNP detection reagents (along with, optionally, other biochemical reagents) packaged in one or more containers.

[0164] In some embodiments, a SNP detection kit typically contains one or more detection reagents and other components (e.g., a buffer, enzymes such as DNA polymerases or ligases, chain extension nucleotides such as deoxynucleotide triphosphates, and in the case of Sanger-type DNA sequencing reactions, chain terminating nucleotides, positive control sequences, negative control sequences, and the like) necessary to carry out an assay or reaction, such as amplification and/or detection of a SNP-containing nucleic acid molecule. A kit may further contain means for determining the amount of a target nucleic acid, and means for comparing the amount with a standard, and can comprise instructions for using the kit to detect the SNP-containing nucleic acid molecule of interest. In one embodiment of the present invention, kits are provided which contain the necessary reagents to carry out one or more assays to detect one or more SNPs disclosed herein. In a preferred embodiment of the present invention, SNP detection kits/systems are in the form of nucleic acid arrays, or compartmentalized kits, including microfluidic/lab-on-a-chip systems.

[0165] SNP detection kits/systems may contain, for example, one or more probes, or pairs of probes, that hybridize to a nucleic acid molecule at or near each target SNP position. Multiple pairs of allele-specific probes may be included in the kit/system to simultaneously assay large numbers of SNPs, at least one of which is a SNP of the present invention. In some kits/systems, the allele-specific probes are immobilized to a substrate such as an array or bead. For example, the same substrate can comprise allele-specific probes for detecting at least 1; 10; 100; 1000; 10,000; 100,000 (or any other number in-between) or substantially all of the SNPs shown in Table 1 and/or Table 2.

[0166] The terms “arrays”, “microarrays”, and “DNA chips” are used herein interchangeably to refer to an array of distinct polynucleotides affixed to a substrate, such as glass, plastic, paper, nylon or other type of membrane, filter, chip, or any other suitable solid support. The polynucleotides can be synthesized directly on the substrate, or synthesized separate from the substrate and then affixed to the substrate. In one embodiment, the microarray is prepared and used according to the methods described in U.S. Pat. No. 5,837,832, Chee et al., PCT application WO95/11995 (Chee et al.), Lockhart, D. J. et al. (1996; Nat. Biotech. 14: 1675-1680) and Schena, M. et al. (1996; Proc. Natl. Acad. Sci. 93: 10614-10619), all of which are incorporated herein in their entirety by reference. In other embodiments, such arrays are produced by the methods described by Brown et al., U.S. Pat. No. 5,807,522.

[0167] Nucleic acid arrays are reviewed in the following references: Zammatteo et al., “New chips for molecular biology and diagnostics”, Biotechnol Annu Rev. 2002; 8:85-101; Sosnowski et al., “Active microelectronic array system for DNA hybridization, genotyping and pharmacogenomic applications”, Psychiatr Genet. 2002 December; 12(4):181-92; Heller, “DNA microarray technology: devices, systems, and applications”, Annu Rev Biomed Eng. 2002; 4:129-53. Epub 2002 Mar. 22; Kolchinsky et al., “Analysis of SNPs and other genomic variations using gel-based chips”, Hum Mutat. 2002 April; 19(4):343-60; and McGall et al., “High-density genechip oligonucleotide probe arrays”, Adv Biochem Eng Biotechnol. 2002; 77:21-42.

[0168] Any number of probes, such as allele-specific probes, may be implemented in an array, and each probe or pair of probes can hybridize to a different SNP position. In the case of polynucleotide probes, they can be synthesized at designated areas (or synthesized separately and then affixed to designated areas) on a substrate using a light-directed chemical process. Each DNA chip can contain, for example, thousands to millions of individual synthetic polynucleotide probes arranged in a grid-like pattern and miniaturized (e.g., to the size of a dime). Preferably, probes are attached to a solid support in an ordered, addressable array.

[0169] A microarray can be composed of a large number of unique, single-stranded polynucleotides, usually either synthetic antisense polynucleotides or fragments of cDNAs, fixed to a solid support. Typical polynucleotides are preferably about 6-60 nucleotides in length, more preferably about 15-30 nucleotides in length, and most preferably about 18-25 nucleotides in length. For certain types of microarrays or other detection kits/systems, it may be preferable to use oligonucleotides that are only about 7-20 nucleotides in length. In other types of arrays, such as arrays used in conjunction with chemiluminescent detection technology, preferred probe lengths can be, for example, about 15-80 nucleotides in length, preferably about 50-70 nucleotides in length, more preferably about 55-65 nucleotides in length, and most preferably about 60 nucleotides in length. The microarray or detection kit can contain polynucleotides that cover the known 5′ or 3′ sequence of a gene/transcript or target SNP site, sequential polynucleotides that cover the full-length sequence of a gene/transcript; or unique polynucleotides selected from particular areas along the length of a target gene/transcript sequence, particularly areas corresponding to one or more SNPs disclosed in Table 1 and/or Table 2. Polynucleotides used in the microarray or detection kit can be specific to a SNP or SNPs of interest (e.g., specific to a particular SNP allele at a target SNP site, or specific to particular SNP alleles at multiple different SNP sites), or specific to a polymorphic gene/transcript or genes/transcripts of interest.

[0170] Hybridization assays based on polynucleotide arrays rely on the differences in hybridization stability of the probes to perfectly matched and mismatched target sequence variants. For SNP genotyping, it is generally preferable that stringency conditions used in hybridization assays are high enough such that nucleic acid molecules that differ from one another at as little as a single SNP position can be differentiated (e.g., typical SNP hybridization assays are designed so that hybridization will occur only if one particular nucleotide is present at a SNP position, but will not occur if an alternative nucleotide is present at that SNP position). Such high stringency conditions may be preferable when using, for example, nucleic acid arrays of allele-specific probes for SNP detection. Such high stringency conditions are described in the preceding section, and are well known to those skilled in the art and can be found in, for example, Current Protocols in Molecular Biology, John Wiley & Sons, N.Y. (1989), 6.3.1-6.3.6.

[0171] In other embodiments, the arrays are used in conjunction with chemiluminescent detection technology. The following patents and patent applications, which are all hereby incorporated by reference, provide additional information pertaining to chemiluminescent detection: U.S. patent application Ser. Nos. 10/620,332 and 10/620,333 describe chemiluminescent approaches for microarray detection; U.S. Pat. Nos. 6,124,478, 6,107,024, 5,994,073, 5,981,768, 5,871,938, 5,843,681, 5,800,999, and 5,773,628 describe methods and compositions of dioxetane for performing chemiluminescent detection; and U.S. published application US2002/0110828 discloses methods and compositions for microarray controls.

[0172] In one embodiment of the invention, a nucleic acid array can comprise an array of probes of about 15-25 nucleotides in length. In further embodiments, a nucleic acid array can comprise any number of probes, in which at least one probe is capable of detecting one or more SNPs disclosed in Table 1 and/or Table 2, and/or at least one probe comprises a fragment of one of the sequences selected from the group consisting of those disclosed in Table 1, Table 2, the Sequence Listing, and sequences complementary thereto, said fragment comprising at least about 8 consecutive nucleotides, preferably 10, 12, 15, 16, 18, 20, more preferably 22, 25, 30, 40, 47, 50, 55, 60, 65, 70, 80, 90, 100, or more consecutive nucleotides (or any other number in-between) and containing (or being complementary to) a novel SNP allele disclosed in Table 1 and/or Table 2. In some embodiments, the nucleotide complementary to the SNP site is within 5, 4, 3, 2, or 1 nucleotide from the center of the probe, more preferably at the center of said probe.

[0173] A polynucleotide probe can be synthesized on the surface of the substrate by using a chemical coupling procedure and an ink jet application apparatus, as described in PCT application WO95/251116 (Baldeschweiler et al.) which is incorporated herein in its entirety by reference. In another aspect, a “gridded” array analogous to a dot (or slot) blot may be used to arrange and link cDNA fragments or oligonucleotides to the surface of a substrate using a vacuum system, thermal, UV, mechanical or chemical bonding procedures. An array, such as those described above, may be produced by hand or by using available devices (slot blot or dot blot apparatus), materials (any suitable solid support), and machines (including robotic instruments), and may contain 8, 24, 96, 384, 1536, 6144 or more polynucleotides, or any other number which lends itself to the efficient use of commercially available instrumentation.

[0174] Using such arrays or other kits/systems, the present invention provides methods of identifying the SNPs disclosed herein in a test sample. Such methods typically involve incubating a test sample of nucleic acids with an array comprising one or more probes corresponding to at least one SNP position of the present invention, and assaying for binding of a nucleic acid from the test sample with one or more of the probes. Conditions for incubating a SNP detection reagent (or a kit/system that employs one or more such SNP detection reagents) with a test sample vary. Incubation conditions depend on such factors as the format employed in the assay, the detection methods employed, and the type and nature of the detection reagents used in the assay. One skilled in the art will recognize that any one of the commonly available hybridization, amplification and array assay formats can readily be adapted to detect the SNPs disclosed herein.

[0175] A SNP detection kit/system of the present invention may include components that are used to prepare nucleic acids from a test sample for the subsequent amplification and/or detection of a SNP-containing nucleic acid molecule. Such sample preparation components can be used to produce nucleic acid extracts (including DNA and/or RNA), proteins or membrane extracts from any bodily fluids (such as blood, serum, plasma, urine, saliva, phlegm, gastric juices, semen, tears, sweat, etc.), skin, hair, cells (especially nucleated cells), biopsies, buccal swabs or tissue specimens. The test samples used in the above-described methods will vary based on such factors as the assay format, nature of the detection method, and the specific tissues, cells or extracts used as the test sample to be assayed. Methods of preparing nucleic acids, proteins, and cell extracts are well known in the art and can be readily adapted to obtain a sample that is compatible with the system utilized. Automated sample preparation systems for extracting nucleic acids from a test sample are commercially available, and examples are Qiagen's BioRobot 9600, Applied Biosystems' PRISM 6700, and Roche Molecular Systems' COBAS AmpliPrep System.

[0176] Another form of kit contemplated by the present invention is a compartmentalized kit. A compartmentalized kit includes any kit in which reagents are contained in separate containers. Such containers include, for example, small glass containers, plastic containers, strips of plastic, glass or paper, or arraying material such as silica. Such containers allow one to efficiently transfer reagents from one compartment to another compartment such that the test samples and reagents are not cross-contaminated, or from one container to another vessel not included in the kit, and the agents or solutions of each container can be added in a quantitative fashion from one compartment to another or to another vessel. Such containers may include, for example, one or more containers which will accept the test sample, one or more containers which contain at least one probe or other SNP detection reagent for detecting one or more SNPs of the present invention, one or more containers which contain wash reagents (such as phosphate buffered saline, Tris-buffers, etc.), and one or more containers which contain the reagents used to reveal the presence of the bound probe or other SNP detection reagents. The kit can optionally further comprise compartments and/or reagents for, for example, nucleic acid amplification or other enzymatic reactions such as primer extension reactions, hybridization, ligation, electrophoresis (preferably capillary electrophoresis), mass spectrometry, and/or laser-induced fluorescent detection. The kit may also include instructions for using the kit. Exemplary compartmentalized kits include microfluidic devices known in the art (see, e.g., Weigl et al., “Lab-on-a-chip for drug development”, Adv Drug Deliv Rev. 2003 Feb. 24; 55(3):349-77). In such microfluidic devices, the containers may be referred to as, for example, microfluidic “compartments”, “chambers”, or “channels”.

[0177] Microfluidic devices, which may also be referred to as “lab-on-a-chip” systems, biomedical micro-electro-mechanical systems (bioMEMs), or multicomponent integrated systems, are exemplary kits/systems of the present invention for analyzing SNPs. Such systems miniaturize and compartmentalize processes such as probe/target hybridization, nucleic acid amplification, and capillary electrophoresis reactions in a single functional device. Such microfluidic devices typically utilize detection reagents in at least one aspect of the system, and such detection reagents may be used to detect one or more SNPs of the present invention. One example of a microfluidic system is disclosed in U.S. Pat. No. 5,589,136, which describes the integration of PCR amplification and capillary electrophoresis in chips. Exemplary microfluidic systems comprise a pattern of microchannels designed onto a glass, silicon, quartz, or plastic wafer included on a microchip. The movements of the samples may be controlled by electric, electroosmotic or hydrostatic forces applied across different areas of the microchip to create functional microscopic valves and pumps with no moving parts. Varying the voltage can be used as a means to control the liquid flow at intersections between the micro-machined channels and to change the liquid flow rate for pumping across different sections of the microchip. See, for example, U.S. Pat. No. 6,153,073, Dubrow et al., and U.S. Pat. No. 6,156,181, Parce et al.

[0178] For genotyping SNPs, an exemplary microfluidic system may integrate, for example, nucleic acid amplification, primer extension, capillary electrophoresis, and a detection method such as laser induced fluorescence detection. In a first step of an exemplary process for using such an exemplary system, nucleic acid samples are amplified, preferably by PCR. Then, the amplification products are subjected to automated primer extension reactions using ddNTPs (specific fluorescence for each ddNTP) and the appropriate oligonucleotide primers to carry out primer extension reactions which hybridize just upstream of the targeted SNP. Once the extension at the 3′ end is completed, the primers are separated from the unincorporated fluorescent ddNTPs by capillary electrophoresis. The separation medium used in capillary electrophoresis can be, for example, polyacrylamide, polyethyleneglycol or dextran. The incorporated ddNTPs in the single nucleotide primer extension products are identified by laser-induced fluorescence detection. Such an exemplary microchip can be used to process, for example, at least 96 to 384 samples, or more, in parallel.

[0179] Uses of Nucleic Acid Molecules

[0180] The nucleic acid molecules of the present invention have a variety of uses, especially in the diagnosis and treatment of myocardial infarction. For example, the nucleic acid molecules are useful as hybridization probes, such as for genotyping SNPs in messenger RNA, transcript, cDNA, genomic DNA, amplified DNA or other nucleic acid molecules, and for isolating full-length cDNA and genomic clones encoding the variant peptides disclosed in Table 1 as well as their orthologs.

[0181] A probe can hybridize to any nucleotide sequence along the entire length of a nucleic acid molecule provided in Table 1 and/or Table 2. Preferably, a probe of the present invention hybridizes to a region of a target sequence that encompasses a SNP position indicated in Table 1 and/or Table 2. More preferably, a probe hybridizes to a SNP-containing target sequence in a sequence-specific manner such that it distinguishes the target sequence from other nucleotide sequences which vary from the target sequence only by which nucleotide is present at the SNP site. Such a probe is particularly useful for detecting the presence of a SNP-containing nucleic acid in a test sample, or for determining which nucleotide (allele) is present at a particular SNP site (i.e., genotyping the SNP site).

[0182] A nucleic acid hybridization probe may be used for determining the presence, level, form, and/or distribution of nucleic acid expression. The nucleic acid whose level is determined can be DNA or RNA. Accordingly, probes specific for the SNPs described herein can be used to assess the presence, expression and/or gene copy number in a given cell, tissue, or organism. These uses are relevant for diagnosis of disorders involving an increase or decrease in gene expression relative to normal levels. In vitro techniques for detection of mRNA include, for example, Northern blot hybridizations and in situ hybridizations. In vitro techniques for detecting DNA include Southern blot hybridizations and in situ hybridizations (Sambrook and Russell, 2000, Molecular Cloning: A Laboratory Manual, Cold Spring Harbor Press, Cold Spring Harbor, N.Y.).

[0183] Probes can be used as part of a diagnostic test kit for identifying cells or tissues in which a variant protein is expressed, such as by measuring the level of a variant protein-encoding nucleic acid (e.g., mRNA) in a sample of cells from a subject or determining if a polynucleotide contains a SNP of interest.

[0184] Thus, the nucleic acid molecules of the invention can be used as hybridization probes to detect the SNPs disclosed herein, thereby determining whether an individual with the polymorphisms is at risk for myocardial infarction or has developed early stage myocardial infarction. Detection of a SNP associated with a disease phenotype provides a diagnostic tool for an active disease and/or genetic predisposition to the disease.

[0185] The nucleic acid molecules of the invention are also useful as primers to amplify any given region of a nucleic acid molecule, particularly a region containing a SNP identified in Table 1 and/or Table 2.

[0186] The nucleic acid molecules of the invention are also useful for constructing recombinant vectors (described in greater detail below). Such vectors include expression vectors that express a portion of, or all of, any of the variant peptide sequences provided in Table 1. Vectors also include insertion vectors, used to integrate into another nucleic acid molecule sequence, such as into the cellular genome, to alter in situ expression of a gene and/or gene product. For example, an endogenous coding sequence can be replaced via homologous recombination with all or part of the coding region containing one or more specifically introduced SNPs.

[0187] The nucleic acid molecules of the invention are also useful for expressing antigenic portions of the variant proteins, particularly antigenic portions that contain a variant amino acid sequence (e.g., an amino acid substitution) caused by a SNP disclosed in Table 1 and/or Table 2.

[0188] The nucleic acid molecules of the invention are also useful for constructing vectors containing a gene regulatory region of the nucleic acid molecules of the present invention.

[0189] The nucleic acid molecules of the invention are also useful for designing ribozymes corresponding to all, or a part, of an mRNA molecule expressed from a SNP-containing nucleic acid molecule described herein.

[0190] The nucleic acid molecules of the invention are also useful for constructing host cells expressing a part, or all, of the nucleic acid molecules and variant peptides.

[0191] The nucleic acid molecules of the invention are also useful for constructing transgenic animals expressing all, or a part, of the nucleic acid molecules and variant peptides. The production of recombinant cells and transgenic animals having nucleic acid molecules which contain the SNPs disclosed in Table 1 and/or Table 2 allow, for example, effective clinical design of treatment compounds and dosage regimens.

[0192] The nucleic acid molecules of the invention are also useful in assays for drug screening to identify compounds that, for example, modulate nucleic acid expression.

[0193] The nucleic acid molecules of the invention are also useful in gene therapy in patients whose cells have aberrant gene expression. Thus, recombinant cells, which include a patient's cells that have been engineered ex vivo and returned to the patient, can be introduced into an individual where the recombinant cells produce the desired protein to treat the individual.

[0194] SNP Genotyping Methods

[0195] The process of determining which specific nucleotide (i.e., allele) is present at each of one or more SNP positions, such as a SNP position in a nucleic acid molecule disclosed in Table 1 and/or Table 2, is referred to as SNP genotyping. The present invention provides methods of SNP genotyping, such as for use in screening for myocardial infarction or related pathologies, or determining predisposition thereto, or determining responsiveness to a form of treatment, or in genome mapping or SNP association analysis, etc.

[0196] Nucleic acid samples can be genotyped to determine which allele(s) is/are present at any given genetic region (e.g., SNP position) of interest by methods well known in the art. The neighboring sequence can be used to design SNP detection reagents such as oligonucleotide probes, which may optionally be implemented in a kit format. Exemplary SNP genotyping methods are described in Chen et al., “Single nucleotide polymorphism genotyping: biochemistry, protocol, cost and throughput”, Pharmacogenomics J. 2003; 3(2):77-96; Kwok et al., “Detection of single nucleotide polymorphisms”, Curr Issues Mol. Biol. 2003 April; 5(2):43-60; Shi, “Technologies for individual genotyping: detection of genetic polymorphisms in drug targets and disease genes”, Am J Pharmacogenomics. 2002; 2(3):197-205; and Kwok, “Methods for genotyping single nucleotide polymorphisms”, Annu Rev Genomics Hum Genet 2001; 2:235-58; Exemplary techniques for high-throughput SNP genotyping are described in Marnellos, “High-throughput SNP analysis for genetic association studies”, Curr Opin Drug Discov Devel. 2003 May; 6(3):317-21. Common SNP genotyping methods include, but are not limited to, TaqMan assays, molecular beacon assays, nucleic acid arrays, allele-specific primer extension, allele-specific PCR, arrayed primer extension, homogeneous primer extension assays, primer extension with detection by mass spectrometry, pyrosequencing, multiplex primer extension sorted on genetic arrays, ligation with rolling circle amplification, homogeneous ligation, OLA (U.S. Pat. No. 4,988,167), multiplex ligation reaction sorted on genetic arrays, restriction-fragment length polymorphism, single base extension-tag assays, and the Invader assay. Such methods may be used in combination with detection mechanisms such as, for example, luminescence or chemiluminescence detection, fluorescence detection, time-resolved fluorescence detection, fluorescence resonance energy transfer, fluorescence polarization, mass spectrometry, and electrical detection.

[0197] Various methods for detecting polymorphisms include, but are not limited to, methods in which protection from cleavage agents is used to detect mismatched bases in RNA/RNA or RNA/DNA duplexes (Myers et al., Science 230:1242 (1985); Cotton et al., PNAS 85:4397 (1988); and Saleeba et al., Meth. Enzymol. 217:286-295 (1992)), comparison of the electrophoretic mobility of variant and wild type nucleic acid molecules (Orita et al., PNAS 86:2766 (1989); Cotton et al., Mutat. Res. 285:125-144 (1993); and Hayashi et al., Genet. Anal. Tech. Appl. 9:73-79 (1992)), and assaying the movement of polymorphic or wild-type fragments in polyacrylamide gels containing a gradient of denaturant using denaturing gradient gel electrophoresis (DGGE) (Myers et al., Nature 313:495 (1985)). Sequence variations at specific locations can also be assessed by nuclease protection assays such as RNase and S1 protection or chemical cleavage methods.

[0198] In a preferred embodiment, SNP genotyping is performed using the TaqMan assay, which is also known as the 5′ nuclease assay (U.S. Pat. Nos. 5,210,015 and 5,538,848). The TaqMan assay detects the accumulation of a specific amplified product during PCR. The TaqMan assay utilizes an oligonucleotide probe labeled with a fluorescent reporter dye and a quencher dye. The reporter dye is excited by irradiation at an appropriate wavelength, it transfers energy to the quencher dye in the same probe via a process called fluorescence resonance energy transfer (FRET). When attached to the probe, the excited reporter dye does not emit a signal. The proximity of the quencher dye to the reporter dye in the intact probe maintains a reduced fluorescence for the reporter. The reporter dye and quencher dye may be at the 5′ most and the 3′ most ends, respectively, or vice versa. Alternatively, the reporter dye may be at the 5′ or 3′ most end while the quencher dye is attached to an internal nucleotide, or vice versa. In yet another embodiment, both the reporter and the quencher may be attached to internal nucleotides at a distance from each other such that fluorescence of the reporter is reduced.

[0199] During PCR, the 5′ nuclease activity of DNA polymerase cleaves the probe, thereby separating the reporter dye and the quencher dye and resulting in increased fluorescence of the reporter. Accumulation of PCR product is detected directly by monitoring the increase in fluorescence of the reporter dye. The DNA polymerase cleaves the probe between the reporter dye and the quencher dye only if the probe hybridizes to the target SNP-containing template which is amplified during PCR, and the probe is designed to hybridize to the target SNP site only if a particular SNP allele is present.

[0200] Preferred TaqMan primer and probe sequences can readily be determined using the SNP and associated nucleic acid sequence information provided herein. A number of computer programs, such as Primer Express (Applied Biosystems, Foster City, Calif.), can be used to rapidly obtain optimal primer/probe sets. It will be apparent to one of skill in the art that such primers and probes for detecting the SNPs of the present invention are useful in diagnostic assays for myocardial infarction and related pathologies, and can be readily incorporated into a kit format. The present invention also includes modifications of the Taqman assay well known in the art such as the use of Molecular Beacon probes (U.S. Pat. Nos. 5,118,801 and 5,312,728) and other variant formats (U.S. Pat. Nos. 5,866,336 and 6,117,635).

[0201] Another preferred method for genotyping the SNPs of the present invention is the use of two oligonucleotide probes in an OLA (see, e.g., U.S. Pat. No. 4,988,617). In this method, one probe hybridizes to a segment of a target nucleic acid with its 3′ most end aligned with the SNP site. A second probe hybridizes to an adjacent segment of the target nucleic acid molecule directly 3′ to the first probe. The two juxtaposed probes hybridize to the target nucleic acid molecule, and are ligated in the presence of a linking agent such as a ligase if there is perfect complementarity between the 3′ most nucleotide of the first probe with the SNP site. If there is a mismatch, ligation would not occur. After the reaction, the ligated probes are separated from the target nucleic acid molecule, and detected as indicators of the presence of a SNP.

[0202] The following patents, patent applications, and published international patent applications, which are all hereby incorporated by reference, provide additional information pertaining to techniques for carrying out various types of OLA: U.S. Pat. Nos. 6,027,889, 6,268,148, 5,494,810, 5,830,711, and 6,054,564 describe OLA strategies for performing SNP detection; WO 97/31256 and WO 00/56927 describe OLA strategies for performing SNP detection using universal arrays, wherein a zipcode sequence can be introduced into one of the hybridization probes, and the resulting product, or amplified product, hybridized to a universal zip code array; U.S. application Ser. Nos. 01/17329 (and 09/584,905) describes OLA (or LDR) followed by PCR, wherein zipcodes are incorporated into OLA probes, and amplified PCR products are determined by electrophoretic or universal zipcode array readout; U.S. application 60/427,818, 60/445,636, and 60/445,494 describe SNPlex methods and software for multiplexed SNP detection using OLA followed by PCR, wherein zipcodes are incorporated into OLA probes, and amplified PCR products are hybridized with a zipchute reagent, and the identity of the SNP determined from electrophoretic readout of the zipchute. In some embodiments, OLA is carried out prior to PCR (or another method of nucleic acid amplification). In other embodiments, PCR (or another method of nucleic acid amplification) is carried out prior to OLA.

[0203] Another method for SNP genotyping is based on mass spectrometry. Mass spectrometry takes advantage of the unique mass of each of the four nucleotides of DNA. SNPs can be unambiguously genotyped by mass spectrometry by measuring the differences in the mass of nucleic acids having alternative SNP alleles. MALDI-TOF (Matrix Assisted Laser Desorption Ionization-Time of Flight) mass spectrometry technology is preferred for extremely precise determinations of molecular mass, such as SNPs. Numerous approaches to SNP analysis have been developed based on mass spectrometry. Preferred mass spectrometry-based methods of SNP genotyping include primer extension assays, which can also be utilized in combination with other approaches, such as traditional gel-based formats and microarrays.

[0204] Typically, the primer extension assay involves designing and annealing a primer to a template PCR amplicon upstream (5′) from a target SNP position. A mix of dideoxynucleotide triphosphates (ddNTPs) and/or deoxynucleotide triphosphates (dNTPs) are added to a reaction mixture containing template (e.g., a SNP-containing nucleic acid molecule which has typically been amplified, such as by PCR), primer, and DNA polymerase. Extension of the primer terminates at the first position in the template where a nucleotide complementary to one of the ddNTPs in the mix occurs. The primer can be either immediately adjacent (i.e., the nucleotide at the 3′ end of the primer hybridizes to the nucleotide next to the target SNP site) or two or more nucleotides removed from the SNP position. If the primer is several nucleotides removed from the target SNP position, the only limitation is that the template sequence between the 3′ end of the primer and the SNP position cannot contain a nucleotide of the same type as the one to be detected, or this will cause premature termination of the extension primer. Alternatively, if all four ddNTPs alone, with no dNTPs, are added to the reaction mixture, the primer will always be extended by only one nucleotide, corresponding to the target SNP position. In this instance, primers are designed to bind one nucleotide upstream from the SNP position (i.e., the nucleotide at the 3′ end of the primer hybridizes to the nucleotide that is immediately adjacent to the target SNP site on the 5′ side of the target SNP site). Extension by only one nucleotide is preferable, as it minimizes the overall mass of the extended primer, thereby increasing the resolution of mass differences between alternative SNP nucleotides. Furthermore, mass-tagged ddNTPs can be employed in the primer extension reactions in place of unmodified ddNTPs. This increases the mass difference between primers extended with these ddNTPs, thereby providing increased sensitivity and accuracy, and is particularly useful for typing heterozygous base positions. Mass-tagging also alleviates the need for intensive sample-preparation procedures and decreases the necessary resolving power of the mass spectrometer.

[0205] The extended primers can then be purified and analyzed by MALDI-TOF mass spectrometry to determine the identity of the nucleotide present at the target SNP position. In one method of analysis, the products from the primer extension reaction are combined with light absorbing crystals that form a matrix. The matrix is then hit with an energy source such as a laser to ionize and desorb the nucleic acid molecules into the gas-phase. The ionized molecules are then ejected into a flight tube and accelerated down the tube towards a detector. The time between the ionization event, such as a laser pulse, and collision of the molecule with the detector is the time of flight of that molecule. The time of flight is precisely correlated with the mass-to-charge ratio (m/z) of the ionized molecule. Ions with smaller m/z travel down the tube faster than ions with larger m/z and therefore the lighter ions reach the detector before the heavier ions. The time-of-flight is then converted into a corresponding, and highly precise, m/z. In this manner, SNPs can be identified based on the slight differences in mass, and the corresponding time of flight differences, inherent in nucleic acid molecules having different nucleotides at a single base position. For further information regarding the use of primer extension assays in conjunction with MALDI-TOF mass spectrometry for SNP genotyping, see, e.g., Wise et al., “A standard protocol for single nucleotide primer extension in the human genome using matrix-assisted laser desorption/ionization time-of-flight mass spectrometry”, Rapid Commun Mass Spectrom. 2003; 17(11):1195-202.

[0206] The following references provide further information describing mass spectrometry-based methods for SNP genotyping: Bocker, “SNP and mutation discovery using base-specific cleavage and MALDI-TOF mass spectrometry”, Bioinformatics. 2003 July; 19 Suppl 1:I44-153; Storm et al., “MALDI-TOF mass spectrometry-based SNP genotyping”, Methods Mol. Biol. 2003; 212:241-62; Jurinke et al., “The use of MassARRAY technology for high throughput genotyping”, Adv Biochem Eng Biotechnol. 2002; 77:57-74; and Jurinke et al., “Automated genotyping using the DNA MassArray technology”, Methods Mol. Biol. 2002; 187:179-92.

[0207] SNPs can also be scored by direct DNA sequencing. A variety of automated sequencing procedures can be utilized ((1995) Biotechniques 19:448), including sequencing by mass spectrometry (see, e.g., PCT International Publication No. WO94/16101; Cohen et al., Adv. Chromatogr. 36:127-162 (1996); and Griffin et al., Appl. Biochem. Biotechnol. 38:147-159 (1993)). The nucleic acid sequences of the present invention enable one of ordinary skill in the art to readily design sequencing primers for such automated sequencing procedures. Commercial instrumentation, such as the Applied Biosystems 377, 3100, 3700, 3730, and 3730×1 DNA Analyzers (Foster City, Calif.), is commonly used in the art for automated sequencing

[0208] Other methods that can be used to genotype the SNPs of the present invention include single-strand conformational polymorphism (SSCP), and denaturing gradient gel electrophoresis (DGGE) (Myers et al., Nature 313:495 (1985)). SSCP identifies base differences by alteration in electrophoretic migration of single stranded PCR products, as described in Orita et al., Proc. Nat. Acad. Single-stranded PCR products can be generated by heating or otherwise denaturing double stranded PCR products. Single-stranded nucleic acids may refold or form secondary structures that are partially dependent on the base sequence. The different electrophoretic mobilities of single-stranded amplification products are related to base-sequence differences at SNP positions. DGGE differentiates SNP alleles based on the different sequence-dependent stabilities and melting properties inherent in polymorphic DNA and the corresponding differences in electrophoretic migration patterns in a denaturing gradient gel (Erlich, ed., PCR Technology, Principles and Applications for DNA Amplification, W.H. Freeman and Co, New York, 1992, Chapter 7).

[0209] Sequence-specific ribozymes (U.S. Pat. No. 5,498,531) can also be used to score SNPs based on the development or loss of a ribozyme cleavage site. Perfectly matched sequences can be distinguished from mismatched sequences by nuclease cleavage digestion assays or by differences in melting temperature. If the SNP affects a restriction enzyme cleavage site, the SNP can be identified by alterations in restriction enzyme digestion patterns, and the corresponding changes in nucleic acid fragment lengths determined by gel electrophoresis

[0210] SNP genotyping can include the steps of, for example, collecting a biological sample from a human subject (e.g., sample of tissues, cells, fluids, secretions, etc.), isolating nucleic acids (e.g., genomic DNA, mRNA or both) from the cells of the sample, contacting the nucleic acids with one or more primers which specifically hybridize to a region of the isolated nucleic acid containing a target SNP under conditions such that hybridization and amplification of the target nucleic acid region occurs, and determining the nucleotide present at the SNP position of interest, or, in some assays, detecting the presence or absence of an amplification product (assays can be designed so that hybridization and/or amplification will only occur if a particular SNP allele is present or absent). In some assays, the size of the amplification product is detected and compared to the length of a control sample; for example, deletions and insertions can be detected by a change in size of the amplified product compared to a normal genotype.

[0211] SNP genotyping is useful for numerous practical applications, as described below. Examples of such applications include, but are not limited to, SNP-disease association analysis, disease predisposition screening, disease diagnosis, disease prognosis, disease progression monitoring, determining therapeutic strategies based on an individual's genotype (“pharmacogenomics”), developing therapeutic agents based on SNP genotypes associated with a disease or likelihood of responding to a drug, stratifying a patient population for clinical trial for a treatment regimen, predicting the likelihood that an individual will experience toxic side effects from a therapeutic agent, and human identification applications such as forensics.

[0212] Analysis of Genetic Association Between SNPs and Phenotypic Traits

[0213] SNP genotyping for disease diagnosis, disease predisposition screening, disease prognosis, determining drug responsiveness (pharmacogenomics), drug toxicity screening, and other uses described herein, typically relies on initially establishing a genetic association between one or more specific SNPs and the particular phenotypic traits of interest.

[0214] Different study designs may be used for genetic association studies (Modern Epidemiology, Lippincott Williams & Wilkins (1998), 609-622). Observational studies are most frequently carried out in which the response of the patients is not interfered with. The first type of observational study identifies a sample of persons in whom the suspected cause of the disease is present and another sample of persons in whom the suspected cause is absent, and then the frequency of development of disease in the two samples is compared. These sampled populations are called cohorts, and the study is a prospective study. The other type of observational study is case-control or a retrospective study. In typical case-control studies, samples are collected from individuals with the phenotype of interest (cases) such as certain manifestations of a disease, and from individuals without the phenotype (controls) in a population (target population) that conclusions are to be drawn from. Then the possible causes of the disease are investigated retrospectively. As the time and costs of collecting samples in case-control studies are considerably less than those for prospective studies, case-control studies are the more commonly used study design in genetic association studies, at least during the exploration and discovery stage.

[0215] In both types of observational studies, there may be potential confounding factors that should be taken into consideration. Confounding factors are those that are associated with both the real cause(s) of the disease and the disease itself, and they include demographic information such as age, gender, ethnicity as well as environmental factors. When confounding factors are not matched in cases and controls in a study, and are not controlled properly, spurious association results can arise. If potential confounding factors are identified, they should be controlled for by analysis methods explained below.

[0216] In a genetic association study, the cause of interest to be tested is a certain allele or a SNP or a combination of alleles or a haplotype from several SNPs. Thus, tissue specimens (e.g., whole blood) from the sampled individuals may be collected and genomic DNA genotyped for the SNP(s) of interest. In addition to the phenotypic trait of interest, other information such as demographic (e.g., age, gender, ethnicity, etc.), clinical, and environmental information that may influence the outcome of the trait can be collected to further characterize and define the sample set. In many cases, these factors are known to be associated with diseases and/or SNP allele frequencies. There are likely gene-environment and/or gene-gene interactions as well. Analysis methods to address gene-environment and gene-gene interactions (for example, the effects of the presence of both susceptibility alleles at two different genes can be greater than the effects of the individual alleles at two genes combined) are discussed below.

[0217] After all the relevant phenotypic and genotypic information has been obtained, statistical analyses are carried out to determine if there is any significant correlation between the presence of an allele or a genotype with the phenotypic characteristics of an individual. Preferably, data inspection and cleaning are first performed before carrying out statistical tests for genetic association. Epidemiological and clinical data of the samples can be summarized by descriptive statistics with tables and graphs. Data validation is preferably performed to check for data completion, inconsistent entries, and outliers. Chi-squared tests and t-tests (Wilcoxon rank-sum tests if distributions are not normal) may then be used to check for significant differences between cases and controls for discrete and continuous variables, respectively. To ensure genotyping quality, Hardy-Weinberg disequilibrium tests can be performed on cases and controls separately. Significant deviation from Hardy-Weinberg equilibrium (HWE) in both cases and controls for individual markers can be indicative of genotyping errors. If HWE is violated in a majority of markers, it is indicative of population substructure that should be further investigated. Moreover, Hardy-Weinberg disequilibrium in cases only can indicate genetic association of the markers with the disease (Genetic Data Analysis, Weir B., Sinauer (1990)).

[0218] To test whether an allele of a single SNP is associated with the case or control status of a phenotypic trait, one skilled in the art can compare allele frequencies in cases and controls. Standard chi-squared tests and Fisher exact tests can be carried out on a 2×2 table (2 SNP alleles×2 outcomes in the categorical trait of interest). To test whether genotypes of a SNP are associated, chi-squared tests can be carried out on a 3×2 table (3 genotypes×2 outcomes). Score tests are also carried out for genotypic association to contrast the three genotypic frequencies (major homozygotes, heterozygotes and minor homozygotes) in cases and controls, and to look for trends using 3 different modes of inheritance, namely dominant (with contrast coefficients 2, −1, −1), additive (with contrast coefficients 1, 0, −1) and recessive (with contrast coefficients 1, 1, −2). Odds ratios for minor versus major alleles, and odds ratios for heterozygote and homozygote variants versus the wild type genotypes are calculated with the desired confidence limits, usually 95%.

[0219] In order to control for confounders and to test for interaction and effect modifiers, stratified analyses may be performed using stratified factors that are likely to be confounding, including demographic information such as age, ethnicity, and gender, or an interacting element or effect modifier, such as a known major gene (e.g., APOE for Alzheimer's disease or HLA genes for autoimmune diseases), or environmental factors such as smoking in lung cancer. Stratified association tests may be carried out using Cochran-Mantel-Haenszel tests that take into account the ordinal nature of genotypes with 0, 1, and 2 variant alleles. Exact tests by StatXact may also be performed when computationally possible. Another way to adjust for confounding effects and test for interactions is to perform stepwise multiple logistic regression analysis using statistical packages such as SAS or R. Logistic regression is a model-building technique in which the best fitting and most parsimonious model is built to describe the relation between the dichotomous outcome (for instance, getting a certain disease or not) and a set of independent variables (for instance, genotypes of different associated genes, and the associated demographic and environmental factors). The most common model is one in which the logit transformation of the odds ratios is expressed as a linear combination of the variables (main effects) and their cross-product terms (interactions) (Applied Logistic Regression, Hosmer and Lemeshow, Wiley (2000)). To test whether a certain variable or interaction is significantly associated with the outcome, coefficients in the model are first estimated and then tested for statistical significance of their departure from zero.

[0220] In addition to performing association tests one marker at a time, haplotype association analysis may also be performed to study a number of markers that are closely linked together. Haplotype association tests can have better power than genotypic or allelic association tests when the tested markers are not the disease-causing mutations themselves but are in linkage disequilibrium with such mutations. The test will even be more powerful if the disease is indeed caused by a combination of alleles on a haplotype (e.g., APOE is a haplotype formed by 2 SNPs that are very close to each other). In order to perform haplotype association effectively, marker-marker linkage disequilibrium measures, both D′ and R², are typically calculated for the markers within a gene to elucidate the haplotype structure. Recent studies (Daly et al, Nature Genetics, 29, 232-235, 2001) in linkage disequilibrium indicate that SNPs within a gene are organized in block pattern, and a high degree of linkage disequilibrium exists within blocks and very little linkage disequilibrium exists between blocks. Haplotype association with the disease status can be performed using such blocks once they have been elucidated.

[0221] Haplotype association tests can be carried out in a similar fashion as the allelic and genotypic association tests. Each haplotype in a gene is analogous to an allele in a multi-allelic marker. One skilled in the art can either compare the haplotype frequencies in cases and controls or test genetic association with different pairs of haplotypes. It has been proposed (Schaid et al, Am. J. Hum. Genet., 70, 425-434, 2002) that score tests can be done on haplotypes using the program “haplo.score”. In that method, haplotypes are first inferred by EM algorithm and score tests are carried out with a generalized linear model (GLM) framework that allows the adjustment of other factors.

[0222] An important decision in the performance of genetic association tests is the determination of the significance level at which significant association can be declared when the p-value of the tests reaches that level. In an exploratory analysis where positive hits will be followed up in subsequent confirmatory testing, an unadjusted p-value <0.1 (a significance level on the lenient side) may be used for generating hypotheses for significant association of a SNP with certain phenotypic characteristics of a disease. It is preferred that a p-value <0.05 (a significance level traditionally used in the art) is achieved in order for a SNP to be considered to have an association with a disease. It is more preferred that a p-value <0.01 (a significance level on the stringent side) is achieved for an association to be declared. When hits are followed up in confirmatory analyses in more samples of the same source or in different samples from different sources, adjustment for multiple testing will be performed as to avoid excess number of hits while maintaining the experiment-wise error rates at 0.05. While there are different methods to adjust for multiple testing to control for different kinds of error rates, a commonly used but rather conservative method is Bonferroni correction to control the experiment-wise or family-wise error rate (Multiple comparisons and multiple tests, Westfall et al, SAS Institute (1999)). Permutation tests to control for the false discovery rates, FDR, can be more powerful (Benjamini and Hochberg, Journal of the Royal Statistical Society, Series B 57, 1289-1300, 1995, Resampling-based Multiple Testing, Westfall and Young, Wiley (1993)). Such methods to control for multiplicity would be preferred when the tests are dependent and controlling for false discovery rates is sufficient as opposed to controlling for the experiment-wise error rates.

[0223] In replication studies using samples from different populations after statistically significant markers have been identified in the exploratory stage, meta-analyses can then be performed by combining evidence of different studies (Modern Epidemiology, Lippincott Williams & Wilkins, 1998, 643-673). If available, association results known in the art for the same SNPs can be included in the meta-analyses.

[0224] Since both genotyping and disease status classification can involve errors, sensitivity analyses may be performed to see how odds ratios and p-values would change upon various estimates on genotyping and disease classification error rates.

[0225] It has been well known that subpopulation-based sampling bias between cases and controls can lead to spurious results in case-control association studies (Ewens and Spielman, Am. J. Hum. Genet. 62, 450-458, 1995) when prevalence of the disease is associated with different subpopulation groups. Such bias can also lead to a loss of statistical power in genetic association studies. To detect population stratification, Pritchard and Rosenberg (Pritchard et al. Am. J. Hum. Gen. 1999, 65:220-228) suggested typing markers that are unlinked to the disease and using results of association tests on those markers to determine whether there is any population stratification. When stratification is detected, the genomic control (GC) method as proposed by Devlin and Roeder (Devlin et al. Biometrics 1999, 55:997-1004) can be used to adjust for the inflation of test statistics due to population stratification. GC method is robust to changes in population structure levels as well as being applicable to DNA pooling designs (Devlin et al. Genet. Epidem. 20001, 21:273-284).

[0226] While Pritchard's method recommended using 15-20 unlinked microsatellite markers, it suggested using more than 30 biallelic markers to get enough power to detect population stratification. For the GC method, it has been shown (Bacanu et al. Am. J. Hum. Genet. 2000, 66:1933-1944) that about 60-70 biallelic markers are sufficient to estimate the inflation factor for the test statistics due to population stratification. Hence, 70 intergenic SNPs can be chosen in unlinked regions as indicated in a genome scan (Kehoe et al. Hum. Mol. Genet. 1999, 8:237-245).

[0227] Once individual risk factors, genetic or non-genetic, have been found for the predisposition to disease, the next step is to set up a classification/prediction scheme to predict the category (for instance, disease or no-disease) that an individual will be in depending on his genotypes of associated SNPs and other non-genetic risk factors. Logistic regression for discrete trait and linear regression for continuous trait are standard techniques for such tasks (Applied Regression Analysis, Draper and Smith, Wiley (1998)). Moreover, other techniques can also be used for setting up classification. Such techniques include, but are not limited to, MART, CART, neural network, and discriminant analyses that are suitable for use in comparing the performance of different methods (The Elements of Statistical Learning, Hastie, Tibshirani & Friedman, Springer (2002)).

[0228] Disease Diagnosis and Predisposition Screening

[0229] Information on association/correlation between genotypes and disease-related phenotypes can be exploited in several ways. For example, in the case of a highly statistically significant association between one or more SNPs with predisposition to a disease for which treatment is available, detection of such a genotype pattern in an individual may justify immediate administration of treatment, or at least the institution of regular monitoring of the individual. Detection of the susceptibility alleles associated with serious disease in a couple contemplating having children may also be valuable to the couple in their reproductive decisions. In the case of a weaker but still statistically significant association between a SNP and a human disease, immediate therapeutic intervention or monitoring may not be justified after detecting the susceptibility allele or SNP. Nevertheless, the subject can be motivated to begin simple life-style changes (e.g., diet, exercise) that can be accomplished at little or no cost to the individual but would confer potential benefits in reducing the risk of developing conditions for which that individual may have an increased risk by virtue of having the susceptibility allele(s).

[0230] The SNPs of the invention may contribute to myocardial infarction in an individual in different ways. Some polymorphisms occur within a protein coding sequence and contribute to disease phenotype by affecting protein structure. Other polymorphisms occur in noncoding regions but may exert phenotypic effects indirectly via influence on, for example, replication, transcription, and/or translation. A single SNP may affect more than one phenotypic trait. Likewise, a single phenotypic trait may be affected by multiple SNPs in different genes.

[0231] As used herein, the terms “diagnose”, “diagnosis”, and “diagnostics” include, but are not limited to any of the following: detection of myocardial infarction that an individual may presently have, predisposition screening (i.e., determining the increased risk of an individual in developing myocardial infarction in the future, or determining whether an individual has a decreased risk of developing myocardial infarction in the future), determining a particular type or subclass of myocardial infarction in an individual known to have myocardial infarction confirming or reinforcing a previously made diagnosis of myocardial infarction, pharmacogenomic evaluation of an individual to determine which therapeutic strategy that individual is most likely to positively respond to or to predict whether a patient is likely to respond to a particular treatment, predicting whether a patient is likely to experience toxic effects from a particular treatment or therapeutic compound, and evaluating the future prognosis of an individual having myocardial infarction. Such diagnostic uses are based on the SNPs individually or in a unique combination or SNP haplotypes of the present invention.

[0232] Haplotypes are particularly useful in that, for example, fewer SNPs can be genotyped to determine if a particular genomic region harbors a locus that influences a particular phenotype, such as in linkage disequilibrium-based SNP association analysis.

[0233] Linkage disequilibrium (LD) refers to the co-inheritance of alleles (e.g., alternative nucleotides) at two or more different SNP sites at frequencies greater than would be expected from the separate frequencies of occurrence of each allele in a given population. The expected frequency of co-occurrence of two alleles that are inherited independently is the frequency of the first allele multiplied by the frequency of the second allele. Alleles that co-occur at expected frequencies are said to be in “linkage equilibrium”. In contrast, LD refers to any non-random genetic association between allele(s) at two or more different SNP sites, which is generally due to the physical proximity of the two loci along a chromosome. LD can occur when two or more SNPs sites are in close physical proximity to each other on a given chromosome and therefore alleles at these SNP sites will tend to remain unseparated for multiple generations with the consequence that a particular nucleotide (allele) at one SNP site will show a non-random association with a particular nucleotide (allele) at a different SNP site located nearby. Hence, genotyping one of the SNP sites will give almost the same information as genotyping the other SNP site that is in LD.

[0234] For diagnostic purposes, if a particular SNP site is found to be useful for diagnosing myocardial infarction, then the skilled artisan would recognize that other SNP sites which are in LD with this SNP site would also be useful for diagnosing the condition. Various degrees of LD can be encountered between two or more SNPs with the result being that some SNPs are more closely associated (i.e., in stronger LD) than others. Furthermore, the physical distance over which LD extends along a chromosome differs between different regions of the genome, and therefore the degree of physical separation between two or more SNP sites necessary for LD to occur can differ between different regions of the genome.

[0235] For diagnostic applications, polymorphisms (e.g., SNPs and/or haplotypes) that are not the actual disease-causing (causative) polymorphisms, but are in LD with such causative polymorphisms, are also useful. In such instances, the genotype of the polymorphism(s) that is/are in LD with the causative polymorphism is predictive of the genotype of the causative polymorphism and, consequently, predictive of the phenotype (e.g., myocardial infarction) that is influenced by the causative SNP(s). Thus, polymorphic markers that are in LD with causative polymorphisms are useful as diagnostic markers, and are particularly useful when the actual causative polymorphism(s) is/are unknown.

[0236] Linkage disequilibrium in the human genome is reviewed in: Wall et al., “Haplotype blocks and linkage disequilibrium in the human genome”, Nat Rev Genet. 2003 August; 4(8):587-97; Garner et al., “On selecting markers for association studies: patterns of linkage disequilibrium between two and three diallelic loci”, Genet Epidemiol. 2003 January; 24(1):57-67; Ardlie et al., “Patterns of linkage disequilibrium in the human genome”, Nat Rev Genet. 2002 April; 3(4):299-309 (erratum in Nat Rev Genet 2002 July; 3(7):566); and Remm et al., “High-density genotyping and linkage disequilibrium in the human genome using chromosome 22 as a model”; Curr Opin Chem Biol. 2002 February; 6(1):24-30.

[0237] The contribution or association of particular SNPs and/or SNP haplotypes with disease phenotypes, such as myocardial infarction, enables the SNPs of the present invention to be used to develop superior diagnostic tests capable of identifying individuals who express a detectable trait, such as myocardial infarction, as the result of a specific genotype, or individuals whose genotype places them at an increased or decreased risk of developing a detectable trait at a subsequent time as compared to individuals who do not have that genotype. As described herein, diagnostics may be based on a single SNP or a group of SNPs. Combined detection of a plurality of SNPs (for example 2, 3, 4, 5, 6, 7, 8, 9, 10, 11, 12, 13, 14, 15, 16, 17, 18, 19, 20, 24, 25, 30, 32, 48, 50, 64, 96, 100, or any other number in-between, or more, of the SNPs provided in Table 1 and/or Table 2) typically increases the probability of an accurate diagnosis. For example, the presence of a single SNP known to correlate with myocardial infarction might indicate a probability of 20% that an individual has or is at risk of developing myocardial infarction, whereas detection of five SNPs, each of which correlates with myocardial infarction, might indicate a probability of 80% that an individual has or is at risk of developing myocardial infarction. To further increase the accuracy of diagnosis or predisposition screening, analysis of the SNPs of the present invention can be combined with that of other polymorphisms or other risk factors of myocardial infarction, such as disease symptoms, pathological characteristics, family history, diet, environmental factors or lifestyle factors.

[0238] It will, of course, be understood by practitioners skilled in the treatment or diagnosis of myocardial infarction that the present invention generally does not intend to provide an absolute identification of individuals who are at risk (or less at risk) of developing myocardial infarction, and/or pathologies related to myocardial infarction, but rather to indicate a certain increased (or decreased) degree or likelihood of developing the disease based on statistically significant association results. However, this information is extremely valuable as it can be used to, for example, initiate preventive treatments or to allow an individual carrying one or more significant SNPs or SNP haplotypes to foresee warning signs such as minor clinical symptoms, or to have regularly scheduled physical exams to monitor for appearance of a condition in order to identify and begin treatment of the condition at an early stage. Particularly with diseases that are extremely debilitating or fatal if not treated on time, the knowledge of a potential predisposition, even if this predisposition is not absolute, would likely contribute in a very significant manner to treatment efficacy.

[0239] The diagnostic techniques of the present invention may employ a variety of methodologies to determine whether a test subject has a SNP or a SNP pattern associated with an increased or decreased risk of developing a detectable trait or whether the individual suffers from a detectable trait as a result of a particular polymorphism/mutation, including, for example, methods which enable the analysis of individual chromosomes for haplotyping, family studies, single sperm DNA analysis, or somatic hybrids. The trait analyzed using the diagnostics of the invention may be any detectable trait that is commonly observed in pathologies and disorders related to myocardial infarction.

[0240] Another aspect of the present invention relates to a method of determining whether an individual is at risk (or less at risk) of developing one or more traits or whether an individual expresses one or more traits as a consequence of possessing a particular trait-causing or trait-influencing allele. These methods generally involve obtaining a nucleic acid sample from an individual and assaying the nucleic acid sample to determine which nucleotide(s) is/are present at one or more SNP positions, wherein the assayed nucleotide(s) is/are indicative of an increased or decreased risk of developing the trait or indicative that the individual expresses the trait as a result of possessing a particular trait-causing or trait-influencing allele.

[0241] In another embodiment, the SNP detection reagents of the present invention are used to determine whether an individual has one or more SNP allele(s) affecting the level (e.g., the concentration of mRNA or protein in a sample, etc.) or pattern (e.g., the kinetics of expression, rate of decomposition, stability profile, Km, Vmax, etc.) of gene expression (collectively, the “gene response” of a cell or bodily fluid). Such a determination can be accomplished by screening for mRNA or protein expression (e.g., by using nucleic acid arrays, RT-PCR, TaqMan assays, or mass spectrometry), identifying genes having altered expression in an individual, genotyping SNPs disclosed in Table 1 and/or Table 2 that could affect the expression of the genes having altered expression (e.g., SNPs that are in and/or around the gene(s) having altered expression, SNPs in regulatory/control regions, SNPs in and/or around other genes that are involved in pathways that could affect the expression of the gene(s) having altered expression, or all SNPs could be genotyped), and correlating SNP genotypes with altered gene expression. In this manner, specific SNP alleles at particular SNP sites can be identified that affect gene expression.

[0242] Pharmacogenomics and Therapeutics/Drug Development

[0243] The present invention provides methods for assessing the pharmacogenomics of a subject harboring particular SNP alleles or haplotypes to a particular therapeutic agent or pharmaceutical compound, or to a class of such compounds. Pharmacogenomics deals with the roles which clinically significant hereditary variations (e.g., SNPs) play in the response to drugs due to altered drug disposition and/or abnormal action in affected persons. See, e.g., Roses, Nature 405, 857-865 (2000); Gould Rothberg, Nature Biotechnology 19, 209-211 (2001); Eichelbaum, Clin. Exp. Pharmacol. Physiol. 23(10-11):983-985 (1996); and Linder, Clin. Chem. 43(2):254-266 (1997). The clinical outcomes of these variations can result in severe toxicity of therapeutic drugs in certain individuals or therapeutic failure of drugs in certain individuals as a result of individual variation in metabolism. Thus, the SNP genotype of an individual can determine the way a therapeutic compound acts on the body or the way the body metabolizes the compound. For example, SNPs in drug metabolizing enzymes can affect the activity of these enzymes, which in turn can affect both the intensity and duration of drug action, as well as drug metabolism and clearance.

[0244] The discovery of SNPs in drug metabolizing enzymes, drug transporters, proteins for pharmaceutical agents, and other drug targets has explained why some patients do not obtain the expected drug effects, show an exaggerated drug effect, or experience serious toxicity from standard drug dosages. SNPs can be expressed in the phenotype of the extensive metabolizer and in the phenotype of the poor metabolizer. Accordingly, SNPs may lead to allelic variants of a protein in which one or more of the protein functions in one population are different from those in another population. SNPs and the encoded variant peptides thus provide targets to ascertain a genetic predisposition that can affect treatment modality. For example, in a ligand-based treatment, SNPs may give rise to amino terminal extracellular domains and/or other ligand-binding regions of a receptor that are more or less active in ligand binding, thereby affecting subsequent protein activation. Accordingly, ligand dosage would necessarily be modified to maximize the therapeutic effect within a given population containing particular SNP alleles or haplotypes.

[0245] As an alternative to genotyping, specific variant proteins containing variant amino acid sequences encoded by alternative SNP alleles could be identified. Thus, pharmacogenomic characterization of an individual permits the selection of effective compounds and effective dosages of such compounds for prophylactic or therapeutic uses based on the individual's SNP genotype, thereby enhancing and optimizing the effectiveness of the therapy. Furthermore, the production of recombinant cells and transgenic animals containing particular SNPs/haplotypes allow effective clinical design and testing of treatment compounds and dosage regimens. For example, transgenic animals can be produced that differ only in specific SNP alleles in a gene that is orthologous to a human disease susceptibility gene.

[0246] Pharmacogenomic uses of the SNPs of the present invention provide several significant advantages for patient care, particularly in treating myocardial infarction. Pharmacogenomic characterization of an individual, based on an individual's SNP genotype, can identify those individuals unlikely to respond to treatment with a particular medication and thereby allows physicians to avoid prescribing the ineffective medication to those individuals. On the other hand, SNP genotyping of an individual may enable physicians to select the appropriate medication and dosage regimen that will be most effective based on an individual's SNP genotype. This information increases a physician's confidence in prescribing medications and motivates patients to comply with their drug regimens. Furthermore, pharmacogenomics may identify patients predisposed to toxicity and adverse reactions to particular drugs or drug dosages. Adverse drug reactions lead to more than 100,000 avoidable deaths per year in the United States alone and therefore represent a significant cause of hospitalization and death, as well as a significant economic burden on the healthcare system (Pfost et. al., Trends in Biotechnology, August 2000). Thus, pharmacogenomics based on the SNPs disclosed herein has the potential to both save lives and reduce healthcare costs substantially.

[0247] Pharmacogenomics in general is discussed further in Rose et al., “Pharmacogenetic analysis of clinically relevant genetic polymorphisms”, Methods Mol Med. 2003; 85:225-37. Pharmacogenomics as it relates to Alzheimer's disease and other neurodegenerative disorders is discussed in Cacabelos, “Pharmacogenomics for the treatment of dementia”, Ann Med. 2002; 34(5):357-79, Maimone et al., “Pharmacogenomics of neurodegenerative diseases”, Eur J. Pharmacol. 2001 Feb. 9; 413(1):11-29, and Poirier, “Apolipoprotein E: a pharmacogenetic target for the treatment of Alzheimer's disease”, Mol Diagn. 1999 December; 4(4):335-41. Pharmacogenomics as it relates to cardiovascular disorders is discussed in Siest et al., “Pharmacogenomics of drugs affecting the cardiovascular system”, Clin Chem Lab Med. 2003 April; 41(4):590-9, Mukherjee et al., “Pharmacogenomics in cardiovascular diseases”, Prog Cardiovasc Dis. 2002 May-June; 44(6):479-98, and Mooser et al., “Cardiovascular pharmacogenetics in the SNP era”, J Thromb Haemost. 2003 July; 1(7):1398-402. Pharmacogenomics as it relates to cancer is discussed in McLeod et al., “Cancer pharmacogenomics: SNPs, chips, and the individual patient”, Cancer Invest. 2003; 21(4):630-40 and Watters et al., “Cancer pharmacogenomics: current and future applications”, Biochim Biophys Acta. 2003 Mar. 17; 1603(2):99-111.

[0248] The SNPs of the present invention also can be used to identify novel therapeutic targets for myocardial infarction. For example, genes containing the disease-associated variants (“variant genes”) or their products, as well as genes or their products that are directly or indirectly regulated by or interacting with these variant genes or their products, can be targeted for the development of therapeutics that, for example, treat the disease or prevent or delay disease onset. The therapeutics may be composed of, for example, small molecules, proteins, protein fragments or peptides, antibodies, nucleic acids, or their derivatives or mimetics which modulate the functions or levels of the target genes or gene products.

[0249] The SNP-containing nucleic acid molecules disclosed herein, and their complementary nucleic acid molecules, may be used as antisense constructs to control gene expression in cells, tissues, and organisms. Antisense technology is well established in the art and extensively reviewed in Antisense Drug Technology: Principles, Strategies, and Applications, Crooke (ed.), Marcel Dekker, Inc.: New York (2001). An antisense nucleic acid molecule is generally designed to be complementary to a region of mRNA expressed by a gene so that the antisense molecule hybridizes to the mRNA and thereby blocks translation of mRNA into protein. Various classes of antisense oligonucleotides are used in the art, two of which are cleavers and blockers. Cleavers, by binding to target RNAs, activate intracellular nucleases (e.g., RNaseH or RNase L) that cleave the target RNA. Blockers, which also bind to target RNAs, inhibit protein translation through steric hindrance of ribosomes. Exemplary blockers include peptide nucleic acids, morpholinos, locked nucleic acids, and methylphosphonates (see, e.g., Thompson, Drug Discovery Today, 7 (17): 912-917 (2002)). Antisense oligonucleotides are directly useful as therapeutic agents, and are also useful for determining and validating gene function (e.g., in gene knock-out or knock-down experiments).

[0250] Antisense technology is further reviewed in: Lavery et al., “Antisense and RNAi: powerful tools in drug target discovery and validation”, Curr Opin Drug Discov Devel. 2003 July; 6(4):561-9; Stephens et al., “Antisense oligonucleotide therapy in cancer”, Curr Opin Mol Ther. 2003 April; 5(2): 118-22; Kurreck, “Antisense technologies. Improvement through novel chemical modifications”, Eur J. Biochem. 2003 April; 270(8):1628-44; Dias et al., “Antisense oligonucleotides: basic concepts and mechanisms”, Mol Cancer Ther. 2002 March; 1(5):347-55; Chen, “Clinical development of antisense oligonucleotides as anti-cancer therapeutics”, Methods Mol Med. 2003; 75:621-36; Wang et al., “Antisense anticancer oligonucleotide therapeutics”, Curr Cancer Drug Targets. 2001 November; 1(3):177-96; and Bennett, “Efficiency of antisense oligonucleotide drug discovery”, Antisense Nucleic Acid Drug Dev. 2002 June; 12(3):215-24.

[0251] The SNPs of the present invention are particularly useful for designing antisense reagents that are specific for particular nucleic acid variants. Based on the SNP information disclosed herein, antisense oligonucleotides can be produced that specifically target mRNA molecules that contain one or more particular SNP nucleotides. In this manner, expression of mRNA molecules that contain one or more undesired polymorphisms (e.g., SNP nucleotides that lead to a defective protein such as an amino acid substitution in a catalytic domain) can be inhibited or completely blocked. Thus, antisense oligonucleotides can be used to specifically bind a particular polymorphic form (e.g., a SNP allele that encodes a defective protein), thereby inhibiting translation of this form, but which do not bind an alternative polymorphic form (e.g., an alternative SNP nucleotide that encodes a protein having normal function).

[0252] Antisense molecules can be used to inactivate mRNA in order to inhibit gene expression and production of defective proteins. Accordingly, these molecules can be used to treat a disorder, such as myocardial infarction, characterized by abnormal or undesired gene expression or expression of certain defective proteins. This technique can involve cleavage by means of ribozymes containing nucleotide sequences complementary to one or more regions in the mRNA that attenuate the ability of the mRNA to be translated. Possible mRNA regions include, for example, protein-coding regions and particularly protein-coding regions corresponding to catalytic activities, substrate/ligand binding, or other functional activities of a protein.

[0253] The SNPs of the present invention are also useful for designing RNA interference reagents that specifically target nucleic acid molecules having particular SNP variants. RNA interference (RNAi), also referred to as gene silencing, is based on using double-stranded RNA (dsRNA) molecules to turn genes off. When introduced into a cell, dsRNAs are processed by the cell into short fragments (generally about 21, 22, or 23 nucleotides in length) known as small interfering RNAs (siRNAs) which the cell uses in a sequence-specific manner to recognize and destroy complementary RNAs (Thompson, Drug Discovery Today, 7 (17): 912-917 (2002)). Accordingly, an aspect of the present invention specifically contemplates isolated nucleic acid molecules that are about 18-26 nucleotides in length, preferably 21, 22, or 23 nucleotides in length, and the use of these nucleic acid molecules for RNAi. Because RNAi molecules, including siRNAs, act in a sequence-specific manner, the SNPs of the present invention can be used to design RNAi reagents that recognize and destroy nucleic acid molecules having specific SNP alleles/nucleotides (such as deleterious alleles that lead to the production of defective proteins), while not affecting nucleic acid molecules having alternative SNP alleles (such as alleles that encode proteins having normal function). As with antisense reagents, RNAi reagents may be directly useful as therapeutic agents (e.g., for turning off defective, disease-causing genes), and are also useful for characterizing and validating gene function (e.g., in gene knock-out or knock-down experiments).

[0254] The following references provide a further review of RNAi: Reynolds et al., “Rational siRNA design for RNA interference”, Nat Biotechnol. 2004 March; 22(3):326-30. Epub 2004 Feb. 1; Chi et al., “Genomewide view of gene silencing by small interfering RNAs”, PNAS 100(11):6343-6346, 2003; Vickers et al., “Efficient Reduction of Target RNAs by Small Interfering RNA and RNase H-dependent Antisense Agents”, J. Biol. Chem. 278: 7108-7118, 2003; Agami, “RNAi and related mechanisms and their potential use for therapy”, Curr Opin Chem Biol. 2002 December; 6(6):829-34; Lavery et al., “Antisense and RNAi: powerful tools in drug target discovery and validation”, Curr Opin Drug Discov Devel. 2003 July; 6(4):56-19; Shi, “Mammalian RNAi for the masses”, Trends Genet 2003 January; 19(1):9-12), Shuey et al., “RNAi: gene-silencing in therapeutic intervention”, Drug Discovery Today 2002 October; 7(20):1040-1046; McManus et al., Nat Rev Genet 2002 October; 3(10):737-47; Xia et al., Nat Biotechnol 2002 October; 20(10):1006-10; Plasterk et al., Curr Opin Genet Dev 2000 October; 10(5):562-7; Bosher et al., Nat Cell Biol 2000 February; 2(2):E31-6; and Hunter, Curr Biol 1999 Jun. 17; 9(12):R440-2).

[0255] A subject suffering from a pathological condition, such as myocardial infarction, ascribed to a SNP may be treated so as to correct the genetic defect (see Kren et al., Proc. Natl. Acad. Sci. USA 96:10349-10354 (1999)). Such a subject can be identified by any method that can detect the polymorphism in a biological sample drawn from the subject. Such a genetic defect may be permanently corrected by administering to such a subject a nucleic acid fragment incorporating a repair sequence that supplies the normal/wild-type nucleotide at the position of the SNP. This site-specific repair sequence can encompass an RNA/DNA oligonucleotide that operates to promote endogenous repair of a subject's genomic DNA. The site-specific repair sequence is administered in an appropriate vehicle, such as a complex with polyethylenimine, encapsulated in anionic liposomes, a viral vector such as an adenovirus, or other pharmaceutical composition that promotes intracellular uptake of the administered nucleic acid. A genetic defect leading to an inborn pathology may then be overcome, as the chimeric oligonucleotides induce incorporation of the normal sequence into the subject's genome. Upon incorporation, the normal gene product is expressed, and the replacement is propagated, thereby engendering a permanent repair and therapeutic enhancement of the clinical condition of the subject.

[0256] In cases in which a cSNP results in a variant protein that is ascribed to be the cause of, or a contributing factor to, a pathological condition, a method of treating such a condition can include administering to a subject experiencing the pathology the wild-type/normal cognate of the variant protein. Once administered in an effective dosing regimen, the wild-type cognate provides complementation or remediation of the pathological condition.

[0257] The invention further provides a method for identifying a compound or agent that can be used to treat myocardial infarction. The SNPs disclosed herein are useful as targets for the identification and/or development of therapeutic agents. A method for identifying a therapeutic agent or compound typically includes assaying the ability of the agent or compound to modulate the activity and/or expression of a SNP-containing nucleic acid or; the encoded product and thus identifying an agent or a compound that can be used to treat a disorder characterized by undesired activity or expression of the SNP-containing nucleic acid or the encoded product. The assays can be performed in cell-based and cell-free systems. Cell-based assays can include cells naturally expressing the nucleic acid molecules of interest or recombinant cells genetically engineered to express certain nucleic acid molecules.

[0258] Variant gene expression in a myocardial infarction patient can include, for example, either expression of a SNP-containing nucleic acid sequence (for instance, a gene that contains a SNP can be transcribed into an mRNA transcript molecule containing the SNP, which can in turn be translated into a variant protein) or altered expression of a normal/wild-type nucleic acid sequence due to one or more SNPs (for instance, a regulatory/control region can contain a SNP that affects the level or pattern of expression of a normal transcript).

[0259] Assays for variant gene expression can involve direct assays of nucleic acid levels (e.g., mRNA levels), expressed protein levels, or of collateral compounds involved in a signal pathway. Further, the expression of genes that are up- or down-regulated in response to the signal pathway can also be assayed. In this embodiment, the regulatory regions of these genes can be operably linked to a reporter gene such as luciferase.

[0260] Modulators of variant gene expression can be identified in a method wherein, for example, a cell is contacted with a candidate compound/agent and the expression of mRNA determined. The level of expression of mRNA in the presence of the candidate compound is compared to the level of expression of mRNA in the absence of the candidate compound. The candidate compound can then be identified as a modulator of variant gene expression based on this comparison and be used to treat a disorder such as myocardial infarction that is characterized by variant gene expression (e.g., either expression of a SNP-containing nucleic acid or altered expression of a normal/wild-type nucleic acid molecule due to one or more SNPs that affect expression of the nucleic acid molecule) due to one or more SNPs of the present invention. When expression of mRNA is statistically significantly greater in the presence of the candidate compound than in its: absence, the candidate compound is identified as a stimulator of nucleic acid expression. When nucleic acid expression is statistically significantly less in the presence of the candidate compound than in its absence, the candidate compound is identified as an inhibitor of nucleic acid expression.

[0261] The invention further provides methods of treatment, with the SNP or associated nucleic acid domain (e.g., catalytic domain, ligand/substrate-binding domain, regulatory/control region, etc.) or gene, or the encoded mRNA transcript, as a target, using a compound identified through drug screening as a gene modulator to modulate variant nucleic acid expression. Modulation can include either up-regulation (i.e., activation or agonization) or down-regulation (i.e., suppression or antagonization) of nucleic acid expression.

[0262] Expression of mRNA transcripts and encoded proteins, either wild type or variant, may be altered in individuals with a particular SNP allele in a regulatory/control element, such as a promoter or transcription factor binding domain, that regulates expression. In this situation, methods of treatment and compounds can be identified, as discussed herein, that regulate or overcome the variant regulatory/control element, thereby generating normal, or healthy, expression levels of either the wild type or variant protein.

[0263] The SNP-containing nucleic acid molecules of the present invention are also useful for monitoring the effectiveness of modulating compounds on the expression or activity of a variant gene, or encoded product, in clinical trials or in a treatment regimen. Thus, the gene expression pattern can serve as an indicator for the continuing effectiveness of treatment with the compound, particularly with compounds to which a patient can develop resistance, as well as an indicator for toxicities. The gene expression pattern can also serve as a marker indicative of a physiological response of the affected cells to the compound. Accordingly, such monitoring would allow either increased administration of the compound or the administration of alternative compounds to which the patient has not become resistant. Similarly, if the level of nucleic acid expression falls below a desirable level, administration of the compound could be commensurately decreased.

[0264] In another aspect of the present invention, there is provided a pharmaceutical pack comprising a therapeutic agent (e.g., a small molecule drug, antibody, peptide, antisense or RNAi nucleic acid molecule, etc.) and a set of instructions for administration of the therapeutic agent to humans diagnostically tested for one or more SNPs or SNP haplotypes provided by the present invention.

[0265] The SNPs/haplotypes of the present invention are also useful for improving many different aspects of the drug development process. For example, individuals can be selected for clinical trials based on their SNP genotype. Individuals with SNP genotypes that indicate that they are most likely to respond to the drug can be included in the trials and those individuals whose SNP genotypes indicate that they are less likely to or would not respond to the drug, or suffer adverse reactions, can be eliminated from the clinical trials. This not only improves the safety of clinical trials, but also will enhance the chances that the trial will demonstrate statistically significant efficacy. Furthermore, the SNPs of the present invention may explain why certain previously developed drugs performed poorly in clinical trials and may help identify a subset of the population that would benefit from a drug that had previously performed poorly in clinical trials, thereby “rescuing” previously developed drugs, and enabling the drug to be made available to a particular myocardial infarction patient population that can benefit from it.

[0266] SNPs have many important uses in drug discovery, screening, and development. A high probability exists that, for any gene/protein selected as a potential drug target, variants of that gene/protein will exist in a patient population. Thus, determining the impact of gene/protein variants on the selection and delivery of a therapeutic agent should be an integral aspect of the drug discovery and development process. (Jazwinska, A Trends Guide to Genetic Variation and Genomic Medicine, 2002 March; S30-S36).

[0267] Knowledge of variants (e.g., SNPs and any corresponding amino acid polymorphisms) of a particular therapeutic target (e.g., a gene, mRNA transcript, or protein) enables parallel screening of the variants in order to identify therapeutic candidates (e.g., small molecule compounds, antibodies, antisense or RNAi nucleic acid compounds, etc.) that demonstrate efficacy across variants (Rothberg, Nat Biotechnol 2001 March; 19(3):209-11). Such therapeutic candidates would be expected to show equal efficacy across a larger segment of the patient population, thereby leading to a larger potential market for the therapeutic candidate.

[0268] Furthermore, identifying variants of a potential therapeutic target enables the most common form of the target to be used for selection of therapeutic candidates, thereby helping to ensure that the experimental activity that is observed for the selected candidates reflects the real activity expected in the largest proportion of a patient population (Jazwinska, A Trends Guide to Genetic Variation and Genomic Medicine, 2002 March; S30-S36).

[0269] Additionally, screening therapeutic candidates against all known variants of a target can enable the early identification of potential toxicities and adverse reactions relating to particular variants. For example, variability in drug absorption, distribution, metabolism and excretion (ADME) caused by, for example, SNPs in therapeutic targets or drug metabolizing genes, can be identified, and this information can be utilized during the drug development process to minimize variability in drug disposition and develop therapeutic agents that are safer across a wider range of a patient population. The SNPs of the present invention, including the variant proteins and encoding polymorphic nucleic acid molecules provided in Tables 1-2, are useful in conjunction with a variety of toxicology methods established in the art, such as those set forth in Current Protocols in Toxicology, John Wiley & Sons, Inc., N.Y.

[0270] Furthermore, therapeutic agents that target any art-known proteins (or nucleic acid molecules, either RNA or DNA) may cross-react with the variant proteins (or polymorphic nucleic acid molecules) disclosed in Table 1, thereby significantly affecting the pharmacokinetic properties of the drug. Consequently, the protein variants and the SNP-containing nucleic acid molecules disclosed in Tables 1-2 are useful in developing, screening, and evaluating therapeutic agents that target corresponding art-known protein forms (or nucleic acid molecules). Additionally, as discussed above, knowledge of all polymorphic forms of a particular drug target enables the design of therapeutic agents that are effective against most or all such polymorphic forms of the drug target.

[0271] Pharmaceutical Compositions and Administration thereof

[0272] Any of the myocardial infarction-associated proteins, and encoding nucleic acid molecules, disclosed herein can be used as therapeutic targets (or directly used themselves as therapeutic compounds) for treating myocardial infarction and related pathologies, and the present disclosure enables therapeutic compounds (e.g., small molecules, antibodies, therapeutic proteins, RNAi and antisense molecules, etc.) to be developed that target (or are comprised of) any of these therapeutic targets.

[0273] In general, a therapeutic compound will be administered in a therapeutically effective amount by any of the accepted modes of administration for agents that serve similar utilities. The actual amount of the therapeutic compound of this invention, i.e., the active ingredient, will depend upon numerous factors such as the severity of the disease to be treated, the age and relative health of the subject, the potency of the compound used, the route and form of administration, and other factors.

[0274] Therapeutically effective amounts of therapeutic compounds may range from, for example, approximately 0.01-50 mg per kilogram body weight of the recipient per day; preferably about 0.1-20 mg/kg/day. Thus, as an example, for administration to a 70 kg person, the dosage range would most preferably be about 7 mg to 1.4 g per day.

[0275] In general, therapeutic compounds will be administered as pharmaceutical compositions by any one of the following routes: oral, systemic (e.g., transdermal, intranasal, or by suppository), or parenteral (e.g., intramuscular, intravenous, or subcutaneous) administration. The preferred manner of administration is oral or parenteral using a convenient daily dosage regimen, which can be adjusted according to the degree of affliction. Oral compositions can take the form of tablets, pills, capsules, semisolids, powders, sustained release formulations, solutions, suspensions, elixirs, aerosols, or any other appropriate compositions.

[0276] The choice of formulation depends on various factors such as the mode of drug administration (e.g., for oral administration, formulations in the form of tablets, pills, or capsules are preferred) and the bioavailability of the drug substance. Recently, pharmaceutical formulations have been developed especially for drugs that show poor bioavailability based upon the principle that bioavailability can be increased by increasing the surface area, i.e., decreasing particle size. For example, U.S. Pat. No. 4,107,288 describes a pharmaceutical formulation having particles in the size range from 10 to 1,000 nm in which the active material is supported on a cross-linked matrix of macromolecules. U.S. Pat. No. 5,145,684 describes the production of a pharmaceutical formulation in which the drug substance is pulverized to nanoparticles (average particle size of 400 nm) in the presence of a surface modifier and then dispersed in a liquid medium to give a pharmaceutical formulation that exhibits remarkably high bioavailability.

[0277] Pharmaceutical compositions are comprised of, in general, a therapeutic compound in combination with at least one pharmaceutically acceptable excipient. Acceptable excipients are non-toxic, aid administration, and do not adversely affect the therapeutic benefit of the therapeutic compound. Such excipients may be any solid, liquid, semi-solid or, in the case of an aerosol composition, gaseous excipient that is generally available to one skilled in the art.

[0278] Solid pharmaceutical excipients include starch, cellulose, talc, glucose, lactose, sucrose, gelatin, malt, rice, flour, chalk, silica gel, magnesium stearate, sodium stearate, glycerol monostearate, sodium chloride, dried skim milk and the like. Liquid and semisolid excipients may be selected from glycerol, propylene glycol, water, ethanol and various oils, including those of petroleum, animal, vegetable or synthetic origin, e.g., peanut oil, soybean oil, mineral oil, sesame oil, etc. Preferred liquid carriers, particularly for injectable solutions, include water, saline, aqueous dextrose, and glycols.

[0279] Compressed gases may be used to disperse a compound of this invention in aerosol form. Inert gases suitable for this purpose are nitrogen, carbon dioxide, etc.

[0280] Other suitable pharmaceutical excipients and their formulations are described in Remington's Pharmaceutical Sciences, edited by E. W. Martin (Mack Publishing Company, 18th ed., 1990).

[0281] The amount of the therapeutic compound in a formulation can vary within the full range employed by those skilled in the art. Typically, the formulation will contain, on a weight percent (wt %) basis, from about 0.01-99.99 wt % of the therapeutic compound based on the total formulation, with the balance being one or more suitable pharmaceutical excipients. Preferably, the compound is present at a level of about 1-80 wt %.

[0282] Therapeutic compounds can be administered alone or in combination with other therapeutic compounds or in combination with one or more other active ingredient(s). For example, an inhibitor or stimulator of a myocardial infarction-associated protein can be administered in combination with another agent that inhibits or stimulates the activity of the same or a different myocardial infarction-associated protein to thereby counteract the affects of myocardial infarction.

[0283] For further information regarding pharmacology, see Current Protocols in Pharmacology, John Wiley & Sons, Inc., N.Y.

[0284] Human Identification Applications

[0285] In addition to their diagnostic and therapeutic uses in myocardial infarction and related pathologies, the SNPs provided by the present invention are also useful as human identification markers for such applications as forensics, paternity testing, and biometrics (see, e.g., Gill, “An assessment of the utility of single nucleotide polymorphisms (SNPs) for forensic purposes”, Int J Legal Med. 2001; 114(4-5):204-10). Genetic variations in the nucleic acid sequences between individuals can be used as genetic markers to identify individuals and to associate a biological sample with an individual. Determination of which nucleotides occupy a set of SNP positions in an individual identifies a set of SNP markers that distinguishes the individual. The more SNP positions that are analyzed, the lower the probability that the set of SNPs in one individual is the same as that in an unrelated individual. Preferably, if multiple sites are analyzed, the sites are unlinked (i.e., inherited independently). Thus, preferred sets of SNPs can be selected from among the SNPs disclosed herein, which may include SNPs on different chromosomes, SNPs on different chromosome arms, and/or SNPs that are dispersed over substantial distances along the same chromosome arm.

[0286] Furthermore, among the SNPs disclosed herein, preferred SNPs for use in certain forensic/human identification applications include SNPs located at degenerate codon positions (i.e., the third position in certain codons which can be one of two or more alternative nucleotides and still encode the same amino acid), since these SNPs do not affect the encoded protein. SNPs that do not affect the encoded protein are expected to be under less selective pressure and are therefore expected to be more polymorphic in a population, which is typically an advantage for forensic/human identification applications. However, for certain forensics/human identification applications, such as predicting phenotypic characteristics (e.g., inferring ancestry or inferring one or more physical characteristics of an individual) from a DNA sample, it may be desirable to utilize SNPs that affect the encoded protein.

[0287] For many of the SNPs disclosed in Tables 1-2 (which are identified as “Applera” SNP source), Tables 1-2 provide SNP allele frequencies obtained by re-sequencing the DNA of chromosomes from 39 individuals (Tables 1-2 also provide allele frequency information for “Celera” source SNPs and, where available; public SNPs from dbEST, HGBASE, and/or HGMD). The allele frequencies provided in Tables 1-2 enable these SNPs to be readily used for human identification applications. Although any SNP disclosed in Table 1 and/or Table 2 could be used for human identification, the closer that the frequency of the minor allele at a particular SNP site is to 50%, the greater the ability of that SNP to discriminate between different individuals in a population since it becomes increasingly likely that two randomly selected individuals would have different alleles at that SNP site. Using the SNP allele frequencies provided in Tables 1-2, one of ordinary skill in the art could readily select a subset of SNPs for which the frequency of the minor allele is, for example, at least 1%, 2%, 5%, 10%, 20%, 25%, 30%, 40%, 45%, or 50%, or any other frequency in-between. Thus, since Tables 1-2 provide allele frequencies based on the re-sequencing of the chromosomes from 39 individuals, a subset of SNPs could readily be selected for human identification in which the total allele count of the minor allele at a particular SNP site is, for example, at least 1, 2, 4, 8, 10, 16, 20, 24, 30, 32, 36, 38, 39, 40, or any other number in-between.

[0288] Furthermore, Tables 1-2 also provide population group (interchangeably referred to herein as ethnic or racial groups) information coupled with the extensive allele frequency information. For example, the group of 39 individuals whose DNA was re-sequenced was made-up of 20 Caucasians and 19 African-Americans. This population group information enables further refinement of SNP selection for human identification. For example, preferred SNPs for human identification can be selected from Tables 1-2 that have similar allele frequencies in both the Caucasian and African-American populations; thus, for example, SNPs can be selected that have equally high discriminatory power in both populations. Alternatively, SNPs can be selected for which there is a statistically significant difference in allele frequencies between the Caucasian and African-American populations (as an extreme example, a particular allele may be observed only in either the Caucasian or the African-American population group but not observed in the other population group); such SNPs are useful, for example, for predicting the race/ethnicity of an unknown perpetrator from a biological sample such as a hair or blood stain recovered at a crime scene. For a discussion of using SNPs to predict ancestry from a DNA sample, including statistical methods, see Frudakis et al., “A Classifier for the SNP-Based Inference of Ancestry”, Journal of Forensic Sciences 2003; 48(4):771-782.

[0289] SNPs have numerous advantages over other types of polymorphic markers, such as short tandem repeats (STRs). For example, SNPs can be easily scored and are amenable to automation, making SNPs the markers of choice for large-scale forensic databases. SNPs are found in much greater abundance throughout the genome than repeat polymorphisms. Population frequencies of two polymorphic forms can usually be determined with greater accuracy than those of multiple polymorphic forms at multi-allelic loci. SNPs are mutationaly more stable than repeat polymorphisms. SNPs are not susceptible to artifacts such as stutter bands that can hinder analysis. Stutter bands are frequently encountered when analyzing repeat polymorphisms, and are particularly troublesome when analyzing samples such as crime scene samples that may contain mixtures of DNA from multiple sources. Another significant advantage of SNP markers over STR markers is the much shorter length of nucleic acid needed to score a SNP. For example, STR markers are generally several hundred base pairs in length. A SNP, on the other hand, comprises a single nucleotide, and generally a short conserved region on either side of the SNP position for primer and/or probe binding. This makes SNPs more amenable to typing in highly degraded or aged biological samples that are frequently encountered in forensic casework in which DNA may be fragmented into short pieces.

[0290] SNPs also are not subject to microvariant and “off-ladder” alleles frequently encountered when analyzing STR loci. Microvariants are deletions or insertions within a repeat unit that change the size of the amplified DNA product so that the amplified product does not migrate at the same rate as reference alleles with normal sized repeat units. When separated by size, such as by electrophoresis on a polyacrylamide gel, microvariants do not align with a reference allelic ladder of standard sized repeat units, but rather migrate between the reference alleles. The reference allelic ladder is used for precise sizing of alleles for allele classification; therefore alleles that do not align with the reference allelic ladder lead to substantial analysis problems. Furthermore, when analyzing multi-allelic repeat polymorphisms, occasionally an allele is found that consists of more or less repeat units than has been previously seen in the population, or more or less repeat alleles than are included in a reference allelic ladder. These alleles will migrate outside the size range of known alleles in a reference allelic ladder, and therefore are referred to as “off-ladder” alleles. In extreme cases, the allele may contain so few or so many repeats that it migrates well out of the range of the reference allelic ladder. In this situation, the allele may not even be observed, or, with multiplex analysis, it may migrate within or close to the size range for another locus, further confounding analysis.

[0291] SNP analysis avoids the problems of microvariants and off-ladder alleles encountered in STR analysis. Importantly, microvariants and off-ladder alleles may provide significant problems, and may be completely missed, when using analysis methods such as oligonucleotide hybridization arrays, which utilize oligonucleotide probes specific for certain known alleles. Furthermore, off-ladder alleles and microvariants encountered with STR analysis, even when correctly typed, may lead to improper statistical analysis, since their frequencies in the population are generally unknown or poorly characterized, and therefore the statistical significance of a matching genotype may be questionable. All these advantages of SNP analysis are considerable in light of the consequences of most DNA identification cases, which may lead to life imprisonment for an individual, or re-association of remains to the family of a deceased individual.

[0292] DNA can be isolated from biological samples such as blood, bone, hair, saliva, or semen, and compared with the DNA from a reference source at particular SNP positions. Multiple SNP markers can be assayed simultaneously in order to increase the power of discrimination and the statistical significance of a matching genotype. For example, oligonucleotide arrays can be used to genotype a large number of SNPs simultaneously. The SNPs provided by the present invention can be assayed in combination with other polymorphic genetic markers, such as other SNPs known in the art or STRs, in order to identify an individual or to associate an individual with a particular biological sample.

[0293] Furthermore, the SNPs provided by the present invention can be genotyped for inclusion in a database of DNA genotypes, for example, a criminal DNA databank such as the FBI's Combined DNA Index System (CODIS) database. A genotype obtained from a biological sample of unknown source can then be queried against the database to find a matching genotype, with the SNPs of the present invention providing nucleotide positions at which to compare the known and unknown DNA sequences for identity. Accordingly, the present invention provides a database comprising novel SNPs or SNP alleles of the present invention (e.g., the database can comprise information indicating which alleles are possessed by individual members of a population at one or more novel SNP sites of the present invention), such as for use in forensics, biometrics, or other human identification applications. Such a database typically comprises a computer-based system in which the SNPs or SNP alleles of the present invention are recorded on a computer readable medium (see the section of the present specification entitled “Computer-Related Embodiments”).

[0294] The SNPs of the present invention can also be assayed for use in paternity testing. The object of paternity testing is usually to determine whether a male is the father of a child. In most cases, the mother of the child is known and thus, the mother's contribution to the child's genotype can be traced. Paternity testing investigates whether the part of the child's genotype not attributable to the mother is consistent with that of the putative father. Paternity testing can be performed by analyzing sets of polymorphisms in the putative father and the child, with the SNPs of the present invention providing nucleotide positions at which to compare the putative father's and child's DNA sequences for identity. If the set of polymorphisms in the child attributable to the father does not match the set of polymorphisms of the putative father, it can be concluded, barring experimental error, that the putative father is not the father of the child. If the set of polymorphisms in the child attributable to the father match the set of polymorphisms of the putative father, a statistical calculation can be performed to determine the probability of coincidental match, and a conclusion drawn as to the likelihood that the putative father is the true biological father of the child.

[0295] In addition to paternity testing, SNPs are also useful for other types of kinship testing, such as for verifying familial relationships for immigration purposes, or for cases in which an individual alleges to be related to a deceased individual in order to claim an inheritance from the deceased individual, etc. For further information regarding the utility of SNPs for paternity testing and other types of kinship testing, including methods for statistical analysis, see Krawczak, “Informativity assessment for biallelic single nucleotide polymorphisms”, Electrophoresis 1999 June; 20(8):1676-81.

[0296] The use of the SNPs of the present invention for human identification further extends to various authentication systems, commonly referred to as biometric systems; which typically convert physical characteristics of humans (or other organisms) into digital data. Biometric systems include various technological devices that measure such unique anatomical or physiological characteristics as finger, thumb, or palm prints; hand geometry; vein patterning on the back of the hand; blood vessel patterning of the retina and color and texture of the iris; facial characteristics; voice patterns; signature and typing dynamics; and DNA. Such physiological measurements can be used to verify identity and, for example, restrict or allow access based on the identification. Examples of applications for biometrics include physical area security, computer and network security, aircraft passenger check-in and boarding, financial transactions, medical records access, government benefit distribution, voting, law enforcement, passports, visas and immigration, prisons, various military applications, and for restricting access to expensive or dangerous items, such as automobiles or guns (see, for example, O'Connor, Stanford Technology Law Review and U.S. Pat. No. 6,119,096).

[0297] Groups of SNPs, particularly the SNPs provided by the present invention, can be typed to uniquely identify an individual for biometric applications such as those described above. Such SNP typing can readily be accomplished using, for example, DNA chips/arrays. Preferably, a minimally invasive means for obtaining a DNA sample is utilized. For example, PCR amplification enables sufficient quantities of DNA for analysis to be obtained from buccal swabs or fingerprints, which contain DNA-containing skin cells and oils that are naturally transferred during contact.

[0298] Further information regarding techniques for using SNPs in forensic/human identification applications can be found in, for example, Current Protocols in Human Genetics, John Wiley & Sons, N.Y. (2002), 14.1-14.7.

[0299] Variant Proteins, Antibodies, Vectors & Host Cells, & Uses thereof

[0300] Variant Proteins Encoded by SNP-Containing Nucleic Acid Molecules

[0301] The present invention provides SNP-containing nucleic acid molecules, many of which encode proteins having variant amino acid sequences as compared to the art-known (i.e., wild-type) proteins. Amino acid sequences encoded by the polymorphic nucleic acid molecules of the present invention are provided as SEQ ID NOS:451-900 in Table 1 and the Sequence Listing. These variants will generally be referred to herein as variant proteins/peptides/polypeptides, or polymorphic proteins/peptides/polypeptides of the present invention. The terms “protein”, “peptide”, and “polypeptide” are used herein interchangeably.

[0302] A variant protein of the present invention may be encoded by, for example, a nonsynonymous nucleotide substitution at any one of the cSNP positions disclosed herein. In addition, variant proteins may also include proteins whose expression, structure, and/or function is altered by a SNP disclosed herein, such as a SNP that creates or destroys a stop codon, a SNP that affects splicing, and a SNP in control/regulatory elements, e.g. promoters, enhancers, or transcription factor binding domains.

[0303] As used herein, a protein or peptide is said to be “isolated” or “purified” when it is substantially free of cellular material or chemical precursors or other chemicals. The variant proteins of the present invention can be purified to homogeneity or other lower degrees of purity. The level of purification will be based on the intended use. The key feature is that the preparation allows for the desired function of the variant protein, even if in the presence of considerable amounts of other components.

[0304] As used herein, “substantially free of cellular material” includes preparations of the variant protein having less than about 30% (by dry weight) other proteins (i.e., contaminating protein), less than about 20% other proteins, less than about 10% other proteins, or less than about 5% other proteins. When the variant protein is recombinantly produced, it can also be substantially free of culture medium, i.e., culture medium represents less than about 20% of the volume of the protein preparation.

[0305] The language “substantially free of chemical precursors or other chemicals” includes preparations of the variant protein in which it is separated from chemical precursors or other chemicals that are involved in its synthesis. In one embodiment, the language “substantially free of chemical precursors or other chemicals” includes preparations of the variant protein having less than about 30% (by dry weight) chemical precursors or other chemicals, less than about 20% chemical precursors or other chemicals, less than about 10% chemical precursors or other chemicals, or less than about 5% chemical precursors or other chemicals.

[0306] An isolated variant protein may be purified from cells that naturally express it, purified from cells that have been altered to express it (recombinant host cells), or synthesized using known protein synthesis methods. For example, a nucleic acid molecule containing SNP(s) encoding the variant protein can be cloned into an expression vector, the expression vector introduced into a host cell, and the variant protein expressed in the host cell. The variant protein can then be isolated from the cells by any appropriate purification scheme using standard protein purification techniques. Examples of these techniques are described in detail below (Sambrook and Russell, 2000, Molecular Cloning: A Laboratory Manual, Cold Spring Harbor Laboratory Press, Cold Spring Harbor, N.Y.).

[0307] The present invention provides isolated variant proteins that comprise, consist of or consist essentially of amino acid sequences that contain one or more variant amino acids encoded by one or more codons which contain a SNP of the present invention.

[0308] Accordingly, the present invention provides variant proteins that consist of amino acid sequences that contain one or more amino acid polymorphisms (or truncations or extensions due to creation or destruction of a stop codon, respectively) encoded by the SNPs provided in Table 1 and/or Table 2. A protein consists of an amino acid sequence when the amino acid sequence is the entire amino acid sequence of the protein.

[0309] The present invention further provides variant proteins that consist essentially of amino acid sequences that contain one or more amino acid polymorphisms (or truncations or extensions due to creation or destruction of a stop codon, respectively) encoded by the SNPs provided in Table 1 and/or Table 2. A protein consists essentially of an amino acid sequence when such an amino acid sequence is present with only a few additional amino acid residues in the final protein.

[0310] The present invention further provides variant proteins that comprise amino acid sequences that contain one or more amino acid polymorphisms (or truncations or extensions due to creation or destruction of a stop codon, respectively) encoded by the SNPs provided in Table 1 and/or Table 2. A protein comprises an amino acid sequence when the amino acid sequence is at least part of the final amino acid sequence of the protein. In such a fashion, the protein may contain only the variant amino acid sequence or have additional amino acid residues, such as a contiguous encoded sequence that is naturally associated with it or heterologous amino acid residues. Such a protein can have a few additional amino acid residues or can comprise many more additional amino acids. A brief description of how various types of these proteins can be made and isolated is provided below.

[0311] The variant proteins of the present invention can be attached to heterologous sequences to form chimeric or fusion proteins. Such chimeric and fusion proteins comprise a variant protein operatively linked to a heterologous protein having an amino acid sequence not substantially homologous to the variant protein. “Operatively linked” indicates that the coding sequences for the variant protein and the heterologous protein are ligated in-frame. The heterologous protein can be fused to the N-terminus or C-terminus of the variant protein. In another embodiment, the fusion protein is encoded by a fusion polynucleotide that is synthesized by conventional techniques including automated DNA synthesizers. Alternatively, PCR amplification of gene fragments can be carried out using anchor primers which give rise to complementary overhangs between two consecutive gene fragments which can subsequently be annealed and re-amplified to generate a chimeric gene sequence (see Ausubel et al., Current Protocols in Molecular Biology, 1992). Moreover, many expression vectors are commercially available that already encode a fusion moiety (e.g., a GST protein). A variant protein-encoding nucleic acid can be cloned into such an expression vector such that the fusion moiety is linked in-frame to the variant protein.

[0312] In many uses, the fusion protein does not affect the activity of the variant protein.

[0313] The fusion protein can include, but is not limited to, enzymatic fusion proteins, for example, beta-galactosidase fusions, yeast two-hybrid GAL fusions, poly-His fusions, MYC-tagged, HI-tagged and Ig fusions. Such fusion proteins, particularly poly-His fusions, can facilitate their purification following recombinant expression. In certain host cells (e.g., mammalian host cells), expression and/or secretion of a protein can be increased by using a heterologous signal sequence. Fusion proteins are further described in, for example, Terpe, “Overview of tag protein fusions: from molecular and biochemical fundamentals to commercial systems”, Appl Microbiol Biotechnol. 2003 January; 60(5):523-33. Epub 2002 Nov. 7; Graddis et al., “Designing proteins that work using recombinant technologies”, Curr Pharm Biotechnol. 2002 December; 3(4):285-97; and Nilsson et al., “Affinity fusion strategies for detection, purification, and immobilization of recombinant proteins”, Protein Expr Purif 1997 October; 11(1): 1-16.

[0314] The present invention also relates to further obvious variants of the variant polypeptides of the present invention, such as naturally-occurring mature forms (e.g., alleleic variants), non-naturally occurring recombinantly-derived variants, and orthologs and paralogs of such proteins that share sequence homology. Such variants can readily be generated using art-known techniques in the fields of recombinant nucleic acid technology and protein biochemistry. It is understood, however, that variants exclude those known in the prior art before the present invention.

[0315] Further variants of the variant polypeptides disclosed in Table 1 can comprise an amino acid sequence that shares at least 70-80%, 80-85%, 85-90%, 91%, 92%, 93%, 94%, 95%, 96%, 97%, 98%, or 99% sequence identity with an amino acid sequence disclosed in Table 1 (or a fragment thereof) and that includes a novel amino acid residue (allele) disclosed in Table 1 (which is encoded by a novel SNP allele). Thus, an aspect of the present invention that is specifically contemplated are polypeptides that have a certain degree of sequence variation compared with the polypeptide sequences shown in Table 1, but that contain a novel amino acid residue (allele) encoded by a novel SNP allele disclosed herein. In other words, as long as a polypeptide contains a novel amino acid residue disclosed herein, other portions of the polypeptide that flank the novel amino acid residue can vary to some degree from the polypeptide sequences shown in Table 1.

[0316] Full-length pre-processed forms, as well as mature processed forms, of proteins that comprise one of the amino acid sequences disclosed herein can readily be identified as having complete sequence identity to one of the variant proteins of the present invention as well as being encoded by the same genetic locus as the variant proteins provided herein.

[0317] Orthologs of a variant peptide can readily be identified as having some degree of significant sequence homology/identity to at least a portion of a variant peptide as well as being encoded by a gene from another organism. Preferred orthologs will be isolated from non-human mammals, preferably primates, for the development of human therapeutic targets and agents. Such orthologs can be encoded by a nucleic acid sequence that hybridizes to a variant peptide-encoding nucleic acid molecule under moderate to stringent conditions depending on the degree of relatedness of the two organisms yielding the homologous proteins.

[0318] Variant proteins include, but are not limited to, proteins containing deletions, additions and substitutions in the amino acid sequence caused by the SNPs of the present invention. One class of substitutions is conserved amino acid substitutions in which a given amino acid in a polypeptide is substituted for another amino acid of like characteristics. Typical conservative substitutions are replacements, one for another, among the aliphatic amino acids Ala, Val, Leu, and Ile; interchange of the hydroxyl residues Ser and Thr; exchange of the acidic residues Asp and Glu; substitution between the amide residues Asn and Gln; exchange of the basic residues Lys and Arg; and replacements among the aromatic residues Phe and Tyr. Guidance concerning which amino acid changes are likely to be phenotypically silent are found in, for example, Bowie et al., Science 247:1306-1310 (1990).

[0319] Variant proteins can be fully functional or can lack function in one or more activities, e.g. ability to bind another molecule, ability to catalyze a substrate, ability to mediate signaling, etc. Fully functional variants typically contain only conservative variations or variations in non-critical residues or in non-critical regions. Functional variants can also contain substitution of similar amino acids that result in no change or an insignificant change in function. Alternatively, such substitutions may positively or negatively affect function to some degree. Non-functional variants typically contain one or more non-conservative amino acid substitutions, deletions, insertions, inversions, truncations or extensions, or a substitution, insertion, inversion, or deletion of a critical residue or in a critical region.

[0320] Amino acids that are essential for function of a protein can be identified by methods known in the art, such as site-directed mutagenesis or alanine-scanning mutagenesis (Cunningham et al., Science 244:1081-1085 (1989)), particularly using the amino acid sequence and polymorphism information provided in Table 1. The latter procedure introduces single alanine mutations at every residue in the molecule. The resulting mutant molecules are then tested for biological activity such as enzyme activity or in assays such as an in vitro proliferative activity. Sites that are critical for binding partner/substrate binding can also be determined by structural analysis such as crystallization, nuclear magnetic resonance or photoaffinity labeling (Smith et. al., J. Mol. Biol. 224:899-904 (1992); de Vos et al. Science 255:306-312 (1992)).

[0321] Polypeptides can contain amino acids other than the 20 amino acids commonly referred to as the 20 naturally occurring amino acids. Further, many amino acids, including the terminal amino acids, may be modified by natural processes, such as processing and other post-translational modifications, or by chemical modification techniques well known in the art. Accordingly, the variant proteins of the present invention also encompass derivatives or analogs in which a substituted amino acid residue is not one encoded by the genetic code, in which a substituent group is included, in which the mature polypeptide is fused with another compound, such as a compound to increase the half-life of the polypeptide (e.g., polyethylene glycol), or in which additional amino acids are fused to the mature polypeptide, such as a leader or secretory sequence or a sequence for purification of the mature polypeptide or a pro-protein sequence.

[0322] Known protein modifications include, but are not limited to, acetylation, acylation, ADP-ribosylation, amidation, covalent attachment of flavin, covalent attachment of a heme moiety, covalent attachment of a nucleotide or nucleotide derivative, covalent attachment of a lipid or lipid derivative, covalent attachment of phosphotidylinositol, cross-linking, cyclization, disulfide bond formation, demethylation, formation of covalent crosslinks, formation of cystine, formation of pyroglutamate, formylation, gamma carboxylation, glycosylation, GPI anchor formation, hydroxylation, iodination, methylation, myristoylation, oxidation, proteolytic processing, phosphorylation, prenylation, racemization, selenoylation, sulfation, transfer-RNA mediated addition of amino acids to proteins such as arginylation, and ubiquitination.

[0323] Such protein modifications are well known to those of skill in the art and have been described in great detail in the scientific literature. Several particularly common modifications, glycosylation, lipid attachment, sulfation, gamma-carboxylation of glutamic acid residues, hydroxylation and ADP-ribosylation, for instance, are described in most basic texts, such as Proteins—Structure and Molecular Properties, 2nd Ed., T. E. Creighton, W. H. Freeman and Company, New York (1993); Wold, F., Posttranslational Covalent Modification of Proteins, B. C. Johnson, Ed., Academic Press, New York 1-12 (1983); Seifter et al., Meth. Enzymol. 182: 626-646 (1990); and Rattan et al., Ann. N.Y. Acad. Sci. 663:48-62 (1992).

[0324] The present invention further provides fragments of the variant proteins in which the fragments contain one or more amino acid sequence variations (e.g., substitutions, or truncations or extensions due to creation or destruction of a stop codon) encoded by one or more SNPs disclosed herein. The fragments to which the invention pertains, however, are not to be construed as encompassing fragments that have been disclosed in the prior art before the present invention.

[0325] As used herein, a fragment may comprise at least about 4, 8, 10, 12, 14, 16, 18, 20, 25, 30, 50, 100 (or any other number in-between) or more contiguous amino acid residues from a variant protein, wherein at least one amino acid residue is affected by a SNP of the present invention, e.g., a variant amino acid residue encoded by a nonsynonymous nucleotide substitution at a cSNP position provided by the present invention. The variant amino acid encoded by a cSNP may occupy any residue position along the sequence of the fragment. Such fragments can be chosen based on the ability to retain one or more of the biological activities of the variant protein or the ability to perform a function, e.g., act as an immunogen. Particularly important fragments are biologically active fragments. Such fragments will typically comprise a domain or motif of a variant protein of the present invention, e.g., active site, transmembrane domain, or ligand/substrate binding domain. Other fragments include, but are not limited to, domain or motif-containing fragments, soluble peptide fragments, and fragments containing immunogenic structures. Predicted domains and functional sites are readily identifiable by computer programs well known to those of skill in the art (e.g., PROSITE analysis) (Current Protocols in Protein Science, John Wiley & Sons, N.Y. (2002)).

[0326] Uses of Variant Proteins

[0327] The variant proteins of the present invention can be used in a variety of ways, including but not limited to, in assays to determine the biological activity of a variant protein, such as in a panel of multiple proteins for high-throughput screening; to raise antibodies or to elicit another type of immune response; as a reagent (including the labeled reagent) in assays designed to quantitatively determine levels of the variant protein (or its binding partner) in biological fluids; as a marker for cells or tissues in which it is preferentially expressed (either constitutively or at a particular stage of tissue differentiation or development or in a disease state); as a target for screening for a therapeutic agent; and as a direct therapeutic agent to be administered into a human subject. Any of the variant proteins disclosed herein may be developed into reagent grade or kit format for commercialization as research products. Methods for performing the uses listed above are well known to those skilled in the art (see, e.g., Molecular Cloning: A Laboratory Manual, Cold Spring Harbor Laboratory Press, Sambrook and Russell, 2000, and Methods in Enzymology: Guide to Molecular Cloning Techniques, Academic Press, Berger, S. L. and A. R. Kimmel eds., 1987).

[0328] In a specific embodiment of the invention, the methods of the present invention include detection of one or more variant proteins disclosed herein. Variant proteins are disclosed in Table 1 and in the Sequence Listing as SEQ ID NOS: 451-900. Detection of such proteins can be accomplished using, for example, antibodies, small molecule compounds, aptamers, ligands/substrates, other proteins or protein fragments, or other protein-binding agents. Preferably, protein detection agents are specific for a variant protein of the present invention and can therefore discriminate between a variant protein of the present invention and the wild-type protein or another variant form. This can generally be accomplished by, for example, selecting or designing detection agents that bind to the region of a protein that differs between the variant and wild-type protein, such as a region of a protein that contains one or more amino acid substitutions that is/are encoded by a non-synonymous cSNP of the present invention, or a region of a protein that follows a nonsense mutation-type SNP that creates a stop codon thereby leading to a shorter polypeptide, or a region of a protein that follows a read-through mutation-type SNP that destroys a stop codon thereby leading to a longer polypeptide in which a portion of the polypeptide is present in one version of the polypeptide but not the other.

[0329] In another specific aspect of the invention, the variant proteins of the present invention are used as targets for diagnosing myocardial infarction or for determining predisposition to myocardial infarction in a human. Accordingly, the invention provides methods for detecting the presence of, or levels of, one or more variant proteins of the present invention in a cell, tissue, or organism. Such methods typically involve contacting a test sample with an agent (e.g., an antibody, small molecule compound, or peptide) capable of interacting with the variant protein such that specific binding of the agent to the variant protein can be detected. Such an assay can be provided in a single detection format or a multi-detection format such as an array, for example, an antibody or aptamer array (arrays for protein detection may also be referred to as “protein chips”). The variant protein of interest can be isolated from a test sample and assayed for the presence of a variant amino acid sequence encoded by one or more SNPs disclosed by the present invention. The SNPs may cause changes to the protein and the corresponding protein function/activity, such as through non-synonymous substitutions in protein coding regions that can lead to amino acid substitutions, deletions, insertions, and/or rearrangements; formation or destruction of stop codons; or alteration of control elements such as promoters. SNPs may also cause inappropriate post-translational modifications.

[0330] One preferred agent for detecting a variant protein in a sample is an antibody capable of selectively binding to a variant form of the protein (antibodies are described in greater detail in the next section). Such samples include, for example, tissues, cells, and biological fluids isolated from a subject, as well as tissues, cells and fluids present within a subject.

[0331] In vitro methods for detection of the variant proteins associated with myocardial infarction that are disclosed herein and fragments thereof include, but are not limited to, enzyme linked immunosorbent assays (ELISAs), radioimmunoassays (RIA), Western blots, immunoprecipitations, immunofluorescence, and protein arrays/chips (e.g., arrays of antibodies or aptamers). For further information regarding immunoassays and related protein detection methods, see Current Protocols in Immunology, John Wiley & Sons, N.Y., and Hage, “Immunoassays”, Anal Chem. 1999 Jun. 15; 71(12):294R-304R.

[0332] Additional analytic methods of detecting amino acid variants include, but are not limited to, altered electrophoretic mobility, altered tryptic peptide digest, altered protein activity in cell-based or cell-free assay, alteration in ligand or antibody-binding pattern, altered isoelectric point, and direct amino acid sequencing.

[0333] Alternatively, variant proteins can be detected in vivo in a subject by introducing into the subject a labeled antibody (or other type of detection reagent) specific for a variant protein. For example, the antibody can be labeled with a radioactive marker whose presence and location in a subject can be detected by standard imaging techniques.

[0334] Other uses of the variant peptides of the present invention are based on the class or action of the protein. For example, proteins isolated from humans and their mammalian orthologs serve as targets for identifying agents (e.g., small molecule drugs or antibodies) for use in therapeutic applications, particularly for modulating a biological or pathological response in a cell or tissue that expresses the protein. Pharmaceutical agents can be developed that modulate protein activity.

[0335] As an alternative to modulating gene expression, therapeutic compounds can be developed that modulate protein function. For example, many SNPs disclosed herein affect the amino acid sequence of the encoded protein (e.g., non-synonymous cSNPs and nonsense mutation-type SNPs). Such alterations in the encoded amino acid sequence may affect protein function, particularly if such amino acid sequence variations occur in functional protein domains, such as catalytic domains, ATP-binding domains, or ligand/substrate binding domains. It is well established in the art that variant proteins having amino acid sequence variations in functional domains can cause or influence pathological conditions. In such instances, compounds (e.g., small molecule drugs or antibodies) can be developed that target the variant protein and modulate (e.g., up- or down-regulate) protein function/activity.

[0336] The therapeutic methods of the present invention further include methods that target one or more variant proteins of the present invention. Variant proteins can be targeted using, for example, small molecule compounds, antibodies, aptamers, ligands/substrates, other proteins, or other protein-binding agents. Additionally, the skilled artisan will recognize that the novel protein variants (and polymorphic nucleic acid molecules) disclosed in Table 1 may themselves be directly used as therapeutic agents by acting as competitive inhibitors of corresponding art-known proteins (or nucleic acid molecules such as mRNA molecules).

[0337] The variant proteins of the present invention are particularly useful in drug screening assays, in cell-based or cell-free systems. Cell-based systems can utilize cells that naturally express the protein, a biopsy specimen, or cell cultures. In one embodiment, cell-based assays involve recombinant host cells expressing the variant protein. Cell-free assays can be used to detect the ability of a compound to directly bind to a variant protein or to the corresponding SNP-containing nucleic acid fragment that encodes the variant protein.

[0338] A variant protein of the present invention, as well as appropriate fragments thereof, can be used in high-throughput screening assays to test candidate compounds for the ability to bind and/or modulate the activity of the variant protein. These candidate compounds can be further screened against a protein having normal function (e.g., a wild-type/non-variant protein) to further determine the effect of the compound on the protein activity. Furthermore, these compounds can be tested in animal or invertebrate systems to determine in vivo activity/effectiveness. Compounds can be identified that activate (agonists) or inactivate (antagonists) the variant protein, and different compounds can be identified that cause various degrees of activation or inactivation of the variant protein.

[0339] Further, the variant proteins can be used to screen a compound for the ability to stimulate or inhibit interaction between the variant protein and a target molecule that normally interacts with the protein. The target can be a ligand, a substrate or a binding partner that the protein normally interacts with (for example, epinephrine or norepinephrine). Such assays typically include the steps of combining the variant protein with a candidate compound under conditions that allow the variant protein, or fragment thereof, to interact with the target molecule, and to detect the formation of a complex between the protein and the target or to detect the biochemical consequence of the interaction with the variant protein and the target, such as any of the associated effects of signal transduction.

[0340] Candidate compounds include, for example, 1) peptides such as soluble peptides, including Ig-tailed fusion peptides and members of random peptide libraries (see, e.g., Lam et al., Nature 354:82-84 (1991); Houghten et al., Nature 354:84-86 (1991)) and combinatorial chemistry-derived molecular libraries made of D- and/or L-configuration amino acids; 2) phosphopeptides (e.g., members of random and partially degenerate, directed phosphopeptide libraries, see, e.g., Songyang et al., Cell 72:767-778 (1993)); 3) antibodies (e.g., polyclonal, monoclonal, humanized, anti-idiotypic, chimeric, and single chain antibodies as well as Fab, F(ab′)₂, Fab expression library fragments, and epitope-binding fragments of antibodies); and 4) small organic and inorganic molecules (e.g., molecules obtained from combinatorial and natural product libraries).

[0341] One candidate compound is a soluble fragment of the variant protein that competes for ligand binding. Other candidate compounds include mutant proteins or appropriate fragments containing mutations that affect variant protein function and thus compete for ligand. Accordingly, a fragment that competes for ligand, for Example with a higher affinity, or a fragment that binds ligand but does not allow release, is encompassed by the invention.

[0342] The invention further includes other end point assays to identify compounds that modulate (stimulate or inhibit) variant protein activity. The assays typically involve an assay of events in the signal transduction pathway that indicate protein activity. Thus, the expression of genes that are up or down-regulated in response to the variant protein dependent signal cascade can be assayed. In one embodiment, the regulatory region of such genes can be operably linked to a marker that is easily detectable, such as luciferase. Alternatively, phosphorylation of the variant protein, or a variant protein target, could also be measured. Any of the biological or biochemical functions mediated by the variant protein can be used as an endpoint assay. These include all of the biochemical or biological events described herein, in the references cited herein, incorporated by reference for these endpoint assay targets, and other functions known to those of ordinary skill in the art.

[0343] Binding and/or activating compounds can also be screened by using chimeric variant proteins in which an amino terminal extracellular domain or parts thereof, an entire transmembrane domain or subregions, and/or the carboxyl terminal intracellular domain or parts thereof, can be replaced by heterologous domains or subregions. For example, a substrate-binding region can be used that interacts with a different substrate than that which is normally recognized by a variant protein. Accordingly, a different set of signal transduction components is available as an end-point assay for activation. This allows for assays to be performed in other than the specific host cell from which the variant protein is derived.

[0344] The variant proteins are also useful in competition binding assays in methods designed to discover compounds that interact with the variant protein. Thus, a compound can be exposed to a variant protein under conditions that allow the compound to bind or to otherwise interact with the variant protein. A binding partner, such as ligand, that normally interacts with the variant protein is also added to the mixture. If the test compound interacts with the variant protein or its binding partner, it decreases the amount of complex formed or activity from the variant protein. This type of assay is particularly useful in screening for compounds that interact with specific regions of the variant protein (Hodgson, Biotechnology, 1992, September 10(9), 973-80).

[0345] To perform cell-free drug screening assays, it is sometimes desirable to immobilize either the variant protein or a fragment thereof, or its target molecule, to facilitate separation of complexes from uncomplexed forms of one or both of the proteins, as well as to accommodate automation of the assay. Any method for immobilizing proteins on matrices can be used in drug screening assays. In one embodiment, a fusion protein containing an added domain allows the protein to be bound to a matrix. For example, glutathione-S-transferase/¹²⁵I fusion proteins can be adsorbed onto glutathione sepharose beads (Sigma Chemical, St. Louis, Mo.) or glutathione derivatized microtitre plates, which are then combined with the cell lysates (e.g., ³⁵S-labeled) and a candidate compound, such as a drug candidate, and the mixture incubated under conditions conducive to complex formation (e.g., at physiological conditions for salt and pH). Following incubation, the beads can be washed to remove any unbound label, and the matrix immobilized and radiolabel determined directly, or in the supernatant after the complexes are dissociated. Alternatively, the complexes can be dissociated from the matrix, separated by SDS-PAGE, and the level of bound material found in the bead fraction quantitated from the gel using standard electrophoretic techniques.

[0346] Either the variant protein or its target molecule can be immobilized utilizing conjugation of biotin and streptavidin. Alternatively, antibodies reactive with the variant protein but which do not interfere with binding of the variant protein to its target molecule can be derivatized to the wells of the plate, and the variant protein trapped in the wells by antibody conjugation. Preparations of the target molecule and a candidate compound are incubated in the variant protein-presenting wells and the amount of complex trapped in the well can be quantitated. Methods for detecting such complexes, in addition to those described above for the GST-immobilized complexes, include immunodetection of complexes using antibodies reactive with the protein target molecule, or which are reactive with variant protein and compete with the target molecule, and enzyme-linked assays that rely on detecting an enzymatic activity associated with the target molecule.

[0347] Modulators of variant protein activity identified according to these drug screening assays can be used to treat a subject with a disorder mediated by the protein pathway, such as myocardial infarction. These methods of treatment typically include the steps of administering the modulators of protein activity in a pharmaceutical composition to a subject in need of such treatment.

[0348] The variant proteins, or fragments thereof, disclosed herein can themselves be directly used to treat a disorder characterized by an absence of, inappropriate, or unwanted expression or activity of the variant protein. Accordingly, methods for treatment include the use of a variant protein disclosed herein or fragments thereof.

[0349] In yet another aspect of the invention, variant proteins can be used as “bait proteins” in a two-hybrid assay or three-hybrid assay (see, e.g., U.S. Pat. No. 5,283,317; Zervos et al. (1993) Cell 72:223-232; Madura et al. (1993) J. Biol. Chem. 268:12046-12054; Bartel et al. (1993) Biotechniques 14:920-924; Iwabuchi et al. (1993) Oncogene 8:1693-1696; and Brent WO94/10300) to identify other proteins that bind to or interact with the variant protein and are involved in variant protein activity. Such variant protein-binding proteins are also likely to be involved in the propagation of signals by the variant proteins or variant protein targets as, for example, elements of a protein-mediated signaling pathway. Alternatively, such variant protein-binding proteins are inhibitors of the variant protein.

[0350] The two-hybrid system is based on the modular nature of most transcription factors, which typically consist of separable DNA-binding and activation domains. Briefly, the assay typically utilizes two different DNA constructs. In one construct, the gene that codes for a variant protein is fused to a gene encoding the DNA binding domain of a known transcription factor (e.g., GAL-4). In the other construct, a DNA sequence, from a library of DNA sequences, that encodes an unidentified protein (“prey” or “sample”) is fused to a gene that codes for the activation domain of the known transcription factor. If the “bait” and the “prey” proteins are able to interact, in vivo, forming a variant protein-dependent complex, the DNA-binding and activation domains of the transcription factor are brought into close proximity. This proximity allows transcription of a reporter gene (e.g., LacZ) that is operably linked to a transcriptional regulatory site responsive to the transcription factor. Expression of the reporter gene can be detected, and cell colonies containing the functional transcription factor can be isolated and used to obtain the cloned gene that encodes the protein that interacts with the variant protein.

[0351] Antibodies Directed to Variant Proteins

[0352] The present invention also provides antibodies that selectively bind to the variant proteins disclosed herein and fragments thereof. Such antibodies may be used to quantitatively or qualitatively detect the variant proteins of the present invention. As used herein, an antibody selectively binds a target variant protein when it binds the variant protein and does not significantly bind to non-variant proteins, i.e., the antibody does not significantly bind to normal, wild-type, or art-known proteins that do not contain a variant amino acid sequence due to one or more SNPs of the present invention (variant amino acid sequences may be due to, for example, nonsynonymous cSNPs, nonsense SNPs that create a stop codon, thereby causing a truncation of a polypeptide or SNPs that cause read-through mutations resulting in an extension of a polypeptide).

[0353] As used herein, an antibody is defined in terms consistent with that recognized in the art: they are multi-subunit proteins produced by an organism in response to an antigen challenge. The antibodies of the present invention include both monoclonal antibodies and polyclonal antibodies, as well as antigen-reactive proteolytic fragments of such antibodies, such as Fab, F(ab)′₂, and Fv fragments. In addition, an antibody of the present invention further includes any of a variety of engineered antigen-binding molecules such as a chimeric antibody (U.S. Pat. Nos. 4,816,567 and 4,816,397; Morrison et al., Proc. Natl. Acad. Sci. USA, 81:6851, 1984; Neuberger et al., Nature 312:604, 1984), a humanized antibody (U.S. Pat. Nos. 5,693,762; 5,585,089; and 5,565,332), a single-chain Fv (U.S. Pat. No. 4,946,778; Ward et al., Nature 334:544, 1989), a bispecific antibody with two binding specificities (Segal et al., J. Immunol. Methods 248:1, 2001; Carter, J. Immunol. Methods 248:7, 2001), a diabody, a triabody, and a tetrabody (Todorovska et al., J. Immunol. Methods, 248:47, 2001), as well as a Fab conjugate (dimer or trimer), and a minibody.

[0354] Many methods are known in the art for generating and/or identifying antibodies to a given target antigen (Harlow, Antibodies, Cold Spring Harbor Press, (1989)). In general, an isolated peptide (e.g., a variant protein of the present invention) is used as an immunogen and is administered to a mammalian organism, such as a rat, rabbit, hamster or mouse Either a full-length protein, an antigenic peptide fragment (e.g., a peptide fragment containing a region that varies between a variant protein and a corresponding wild-type protein), or a fusion protein can be used. A protein used as an immunogen may be naturally-occurring, synthetic or recombinantly produced, and may be administered in combination with an adjuvant, including but not limited to, Freund's (complete and incomplete), mineral gels such as aluminum hydroxide, surface active substance such as lysolecithin, pluronic polyols, polyanions, peptides, oil emulsions, keyhole limpet hemocyanin, dinitrophenol, and the like.

[0355] Monoclonal antibodies can be produced by hybridoma technology (Kohler and Milstein, Nature, 256:495, 1975), which immortalizes cells secreting a specific monoclonal antibody. The immortalized cell lines can be created in vitro by fusing two different cell types, typically lymphocytes, and tumor cells. The hybridoma cells may be cultivated in vitro or in vivo. Additionally, fully human antibodies can be generated by transgenic animals (He et al., J. Immunol., 169:595, 2002). Fd phage and Fd phagemid technologies may be used to generate and select recombinant antibodies in vitro (Hoogenboom and Chames, Immunol. Today 21:371, 2000; Liu et al., J. Mol. Biol. 315:1063, 2002). The complementarity-determining regions of an antibody can be identified, and synthetic peptides corresponding to such regions may be used to mediate antigen binding (U.S. Pat. No. 5,637,677).

[0356] Antibodies are preferably prepared against regions or discrete fragments of a variant protein containing a variant amino acid sequence as compared to the corresponding wild-type protein (e.g., a region of a variant protein that includes an amino acid encoded by a nonsynonymous cSNP, a region affected by truncation caused by a nonsense SNP that creates a stop codon, or a region resulting from the destruction of a stop codon due to read-through mutation caused by a SNP). Furthermore, preferred regions will include those involved in function/activity and/or protein/binding partner interaction. Such fragments can be selected on a physical property, such as fragments corresponding to regions that are located on the surface of the protein, e.g., hydrophilic regions, or can be selected based on sequence uniqueness, or based on the position of the variant amino acid residue(s) encoded by the SNPs provided by the present invention. An antigenic fragment will typically comprise at least about 8-10 contiguous amino acid residues in which at least one of the amino acid residues is an amino acid affected by a SNP disclosed herein. The antigenic peptide can comprise, however, at least 12, 14, 16, 20, 25, 50, 100 (or any other number in-between) or more amino acid residues, provided that at least one amino acid is affected by a SNP disclosed herein.

[0357] Detection of an antibody of the present invention can be facilitated by coupling (i.e., physically linking) the antibody or an antigen-reactive fragment thereof to a detectable substance. Detectable substances include, but are not limited to, various enzymes, prosthetic groups, fluorescent materials, luminescent materials, bioluminescent materials, and radioactive materials. Examples of suitable enzymes include horseradish peroxidase, alkaline phosphatase, β-galactosidase, or acetylcholinesterase; examples of suitable prosthetic group complexes include streptavidin/biotin and avidin/biotin; examples of suitable fluorescent materials include umbelliferone, fluorescein, fluorescein isothiocyanate, rhodamine, dichlorotriazinylamine fluorescein, dansyl chloride or phycoerythrin; an example of a luminescent material includes luminol; examples of bioluminescent materials include luciferase, luciferin, and aequorin, and examples of suitable radioactive material include ¹²⁵I, ¹³¹I, ³⁵S or ³H.

[0358] Antibodies, particularly the use of antibodies as therapeutic agents, are reviewed in: Morgan, “Antibody therapy for Alzheimer's disease”, Expert Rev Vaccines. 2003 February; 2(1):53-9; Ross et al., “Anticancer antibodies”, Am J Clin Pathol. 2003 April; 119(4):472-85; Goldenberg, “Advancing role of radiolabeled antibodies in the therapy of cancer”, Cancer Immunol Immunother. 2003 May; 52(5):281-96. Epub 2003 Mar. 11; Ross et al., “Antibody-based therapeutics in oncology”, Expert Rev Anticancer Ther. 2003 February; 3(1):107-21; Cao et al., “Bispecific antibody conjugates in therapeutics”, Adv Drug Deliv Rev. 2003 Feb. 10; 55(2): 171-97; von Mehren et al., “Monoclonal antibody therapy for cancer”, Annu Rev Med. 2003; 54:343-69. Epub 2001 Dec. 3; Hudson et al., “Engineered antibodies”, Nat Med. 2003 January; 9(1):129-34; Brekke et al., “Therapeutic antibodies for human diseases at the dawn of the twenty-first century”, Nat Rev Drug Discov. 2003 January; 2(1):52-62 (Erratum in: Nat Rev Drug Discov. 2003 March; 2(3):240); Houdebine, “Antibody manufacture in transgenic animals and comparisons with other systems”, Curr Opin Biotechnol. 2002 December; 13(6):625-9; Andreakos et al., “Monoclonal antibodies in immune and inflammatory diseases”, Curr Opin Biotechnol. 2002 December; 13(6):615-20; Kellermann et al., “Antibody discovery: the use of transgenic mice to generate human monoclonal antibodies for therapeutics”, Curr Opin Biotechnol. 2002 December; 13(6):593-7; Pini et al., “Phage display and colony filter screening for high-throughput selection of antibody libraries”, Comb Chem High Throughput Screen. 2002 November; 5(7):503-10; Batra et al., “Pharmacokinetics and biodistribution of genetically engineered antibodies”, Curr Opin Biotechnol. 2002 December; 13(6):603-8; and Tangri et al., “Rationally engineered proteins or antibodies with absent or reduced immunogenicity”, Curr Med. Chem. 2002 December; 9(24):2191-9.

[0359] Uses of Antibodies

[0360] Antibodies can be used to isolate the variant proteins of the present invention from a natural cell source or from recombinant host cells by standard techniques, such as affinity chromatography or immunoprecipitation. In addition, antibodies are useful for detecting the presence of a variant protein of the present invention in cells or tissues to determine the pattern of expression of the variant protein among various tissues in an organism and over the course of normal development or disease progression. Further, antibodies can be used to detect variant protein in situ, in vitro, in a bodily fluid, or in a cell lysate or supernatant in order to evaluate the amount and pattern of expression. Also, antibodies can be used to assess abnormal tissue distribution, abnormal expression during development, or expression in an abnormal condition, such as myocardial infarction. Additionally, antibody detection of circulating fragments of the full-length variant protein can be used to identify turnover.

[0361] Antibodies to the variant proteins of the present invention are also useful in pharmacogenomic analysis. Thus, antibodies against variant proteins encoded by alternative SNP alleles can be used to identify individuals that require modified treatment modalities.

[0362] Further, antibodies can be used to assess expression of the variant protein in disease states such as in active stages of the disease or in an individual with a predisposition to a disease related to the protein's function, particularly myocardial infarction. Antibodies specific for a variant protein encoded by a SNP-containing nucleic acid molecule of the present invention can be used to assay for the presence of the variant protein, such as to screen for predisposition to myocardial infarction as indicated by the presence of the variant protein.

[0363] Antibodies are also useful as diagnostic tools for evaluating the variant proteins in conjunction with analysis by electrophoretic mobility, isoelectric point, tryptic peptide digest, and other physical assays well known in the art.

[0364] Antibodies are also useful for tissue typing. Thus, where a specific variant protein has been correlated with expression in a specific tissue, antibodies that are specific for this protein can be used to identify a tissue type.

[0365] Antibodies can also be used to assess aberrant subcellular localization of a variant protein in cells in various tissues. The diagnostic uses can be applied, not only in genetic testing, but also in monitoring a treatment modality. Accordingly, where treatment is ultimately aimed at correcting the expression level or the presence of variant protein or aberrant tissue distribution or developmental expression of a variant protein, antibodies directed against the variant protein or relevant fragments can be used to monitor therapeutic efficacy.

[0366] The antibodies are also useful for inhibiting variant protein function, for example, by blocking the binding of a variant protein to a binding partner. These uses can also be applied in a therapeutic context in which treatment involves inhibiting a variant protein's function. An antibody can be used, for example, to block or competitively inhibit binding, thus modulating (agonizing or antagonizing) the activity of a variant protein. Antibodies can be prepared against specific variant protein fragments containing sites required for function or against an intact variant protein that is associated with a cell or cell membrane. For in vivo administration, an antibody may be linked with an additional therapeutic payload such as a radionuclide, an enzyme, an immunogenic epitope, or a cytotoxic agent. Suitable cytotoxic agents include, but are not limited to, bacterial toxin such as diphtheria, and plant toxin such as ricin. The in vivo half-life of an antibody or a fragment thereof may be lengthened by pegylation through conjugation to polyethylene glycol (Leong et al., Cytokine 16:106, 2001).

[0367] The invention also encompasses kits for using antibodies, such as kits for detecting the presence of a variant protein in a test sample. An exemplary kit can comprise antibodies such as a labeled or labelable antibody and a compound or agent for detecting variant proteins in a biological sample; means for determining the amount, or presence/absence of variant protein in the sample; means for comparing the amount of variant protein in the sample with a standard; and instructions for use.

[0368] Vectors and Host Cells

[0369] The present invention also provides vectors containing the SNP-containing nucleic acid molecules described herein. The term “vector” refers to a vehicle, preferably a nucleic acid molecule, which can transport a SNP-containing nucleic acid molecule. When the vector is a nucleic acid molecule, the SNP-containing nucleic acid molecule can be covalently linked to the vector nucleic acid. Such vectors include, but are not limited to, a plasmid, single or double stranded phage, a single or double stranded RNA or DNA viral vector, or artificial chromosome, such as a BAC, PAC, YAC, or MAC.

[0370] A vector can be maintained in a host cell as an extrachromosomal element where it replicates and produces additional copies of the SNP-containing nucleic acid molecules. Alternatively, the vector may integrate into the host cell genome and produce additional copies of the SNP-containing nucleic acid molecules when the host cell replicates.

[0371] The invention provides vectors for the maintenance (cloning vectors) or vectors for expression (expression vectors) of the SNP-containing nucleic acid molecules. The vectors can function in prokaryotic or eukaryotic cells or in both (shuttle vectors).

[0372] Expression vectors typically contain cis-acting regulatory regions that are operably linked in the vector to the SNP-containing nucleic acid molecules such that transcription of the SNP-containing nucleic acid molecules is allowed in a host cell. The SNP-containing nucleic acid molecules can also be introduced into the host cell with a separate nucleic acid molecule capable of affecting transcription. Thus, the second nucleic acid molecule may provide a trans-acting factor interacting with the cis-regulatory control region to allow transcription of the SNP-containing nucleic acid molecules from the vector. Alternatively, a trans-acting factor may be supplied by the host cell. Finally, a trans-acting factor can be produced from the vector itself. It is understood, however, that in some embodiments, transcription and/or translation of the nucleic acid molecules can occur in a cell-free system.

[0373] The regulatory sequences to which the SNP-containing nucleic acid molecules described herein can be operably linked include promoters for directing mRNA transcription. These include, but are not limited to, the left promoter from bacteriophage λ, the lac, TRP, and TAC promoters from E. coli, the early and late promoters from SV40, the CMV immediate early promoter, the adenovirus early and late promoters, and retrovirus long-terminal repeats.

[0374] In addition to control regions that promote transcription, expression vectors may also include regions that modulate transcription, such as repressor binding sites and enhancers. Examples include the SV40 enhancer, the cytomegalovirus immediate early enhancer, polyoma enhancer, adenovirus enhancers, and retrovirus LTR enhancers.

[0375] In addition to containing sites for transcription initiation and control, expression vectors can also contain sequences necessary for transcription termination and, in the transcribed region, a ribosome-binding site for translation. Other regulatory control elements for expression include initiation and termination codons as well as polyadenylation signals. A person of ordinary skill in the art would be aware of the numerous regulatory sequences that are useful in expression vectors (see, e.g., Sambrook and Russell, 2000, Molecular Cloning: A Laboratory Manual, Cold Spring Harbor Laboratory Press, Cold Spring Harbor, N.Y.).

[0376] A variety of expression vectors can be used to express a SNP-containing nucleic acid molecule. Such vectors include chromosomal, episomal, and virus-derived vectors, for example, vectors derived from bacterial plasmids, from bacteriophage, from yeast episomes, from yeast chromosomal elements, including yeast artificial chromosomes, from viruses such as baculoviruses, papovaviruses such as SV40, Vaccinia viruses, adenoviruses, poxviruses, pseudorabies viruses, and retroviruses. Vectors can also be derived from combinations of these sources such as those derived from plasmid and bacteriophage genetic elements, e.g., cosmids and phagemids. Appropriate cloning and expression vectors for prokaryotic and eukaryotic hosts are described in Sambrook and Russell, 2000, Molecular Cloning: A Laboratory Manual, Cold Spring Harbor Laboratory Press, Cold Spring Harbor, N.Y.

[0377] The regulatory sequence in a vector may provide constitutive expression in one or more host cells (e.g., tissue specific expression) or may provide for inducible expression in one or more cell types such as by temperature, nutrient additive, or exogenous factor, e.g., a hormone or other ligand. A variety of vectors that provide constitutive or inducible expression of a nucleic acid sequence in prokaryotic and eukaryotic host cells are well known to those of ordinary skill in the art.

[0378] A SNP-containing nucleic acid molecule can be inserted into the vector by methodology well-known in the art. Generally, the SNP-containing nucleic acid molecule that will ultimately be expressed is joined to an expression vector by cleaving the SNP-containing nucleic acid molecule and the expression vector with one or more restriction enzymes and then ligating the fragments together. Procedures for restriction enzyme digestion and ligation are well known to those of ordinary skill in the art.

[0379] The vector containing the appropriate nucleic acid molecule can be introduced into an appropriate host cell for propagation or expression using well-known techniques. Bacterial host cells include, but are not limited to, E. coli, Streptomyces, and Salmonella typhimurium. Eukaryotic host cells include, but are not limited to, yeast, insect cells such as Drosophila, animal cells such as COS and CHO cells, and plant cells.

[0380] As described herein, it may be desirable to express the variant peptide as a fusion protein. Accordingly, the invention provides fusion vectors that allow for the production of the variant peptides. Fusion vectors can, for example, increase the expression of a recombinant protein, increase the solubility of the recombinant protein, and aid in the purification of the protein by acting, for example, as a ligand for affinity purification. A proteolytic cleavage site may be introduced at the junction of the fusion moiety so that the desired variant peptide can ultimately be separated from the fusion moiety. Proteolytic enzymes suitable for such use include, but are not limited to, factor Xa, thrombin, and enterokinase. Typical fusion expression vectors include pGEX (Smith et al., Gene 67:31-40 (1988)), pMAL (New England Biolabs, Beverly, Mass.) and pRIT5 (Pharmacia, Piscataway, N.J.) which fuse glutathione S-transferase (GST), maltose E binding protein, or protein A, respectively, to the target recombinant protein. Examples of suitable inducible non-fusion E. coli expression vectors include pTrc (Amann et al., Gene 69:301-315 (1988)) and pET 11d (Studier et al., Gene Expression Technology: Methods in Enzymology 185:60-89 (1990)).

[0381] Recombinant protein expression can be maximized in a bacterial host by providing a genetic background wherein the host cell has an impaired capacity to proteolytically cleave the recombinant protein (Gottesman, S., Gene Expression Technology: Methods in Enzymology 185, Academic Press, San Diego, Calif. (1990) 119-128). Alternatively, the sequence of the SNP-containing nucleic acid molecule of interest can be altered to provide preferential codon usage for a specific host cell, for example, E. coli (Wada et al., Nucleic Acids Res. 20:2111-2118 (1992)).

[0382] The SNP-containing nucleic acid molecules can also be expressed by expression vectors that are operative in yeast. Examples of vectors for expression in yeast (e.g., S. cerevisiae) include pYepSec1 (Baldari, et al., EMBO J. 6:229-234 (1987)), pMFa (Kujan et al., Cell 30:933-943(1982)), pJRY88 (Schultz et al., Gene 54:113-123 (1987)), and pYES2 (Invitrogen Corporation, San Diego, Calif.).

[0383] The SNP-containing nucleic acid molecules can also be expressed in insect cells using, for example, baculovirus expression vectors. Baculovirus vectors available for expression of proteins in cultured insect cells (e.g., Sf 9 cells) include the pAc series (Smith et al., Mol. Cell Biol. 3:2156-2165 (1983)) and the pVL series (Lucklow et al., Virology 170:31-39 (1989)).

[0384] In certain embodiments of the invention, the SNP-containing nucleic acid molecules described herein are expressed in mammalian cells using mammalian expression vectors.

[0385] Examples of mammalian expression vectors include pCDM8 (Seed, B. Nature 329:840(1987)) and pMT2PC (Kaufman et al., EMBO J. 6:187-195 (1987)).

[0386] The invention also encompasses vectors in which the SNP-containing nucleic acid molecules described herein are cloned into the vector in reverse orientation, but operably linked to a regulatory sequence that permits transcription of antisense RNA. Thus, an antisense transcript can be produced to the SNP-containing nucleic acid sequences described herein, including both coding and non-coding regions. Expression of this antisense RNA is subject to each of the parameters described above in relation to expression of the sense RNA (regulatory sequences, constitutive or inducible expression, tissue-specific expression).

[0387] The invention also relates to recombinant host cells containing the vectors described herein. Host cells therefore include, for example, prokaryotic cells, lower eukaryotic cells such as yeast, other eukaryotic cells such as insect cells, and higher eukaryotic cells such as mammalian cells.

[0388] The recombinant host cells can be prepared by introducing the vector constructs described herein into the cells by techniques readily available to persons of ordinary skill in the art. These include, but are not limited to, calcium phosphate transfection, DEAE-dextran-mediated transfection, cationic lipid-mediated transfection, electroporation, transduction, infection, lipofection, and other techniques such as those described in Sambrook and Russell, 2000, Molecular Cloning: A Laboratory Manual, Cold Spring Harbor Laboratory, Cold Spring Harbor Laboratory Press, Cold Spring Harbor, N.Y.).

[0389] Host cells can contain more than one vector. Thus, different SNP-containing nucleotide sequences can be introduced in different vectors into the same cell. Similarly, the SNP-containing nucleic acid molecules can be introduced either alone or with other nucleic acid molecules that are not related to the SNP-containing nucleic acid molecules, such as those providing trans-acting factors for expression vectors. When more than one vector is introduced into a cell, the vectors can be introduced independently, co-introduced, or joined to the nucleic acid molecule vector.

[0390] In the case of bacteriophage and viral vectors, these can be introduced into cells as packaged or encapsulated virus by standard procedures for infection and transduction. Viral vectors can be replication-competent or replication-defective. In the case in which viral replication is defective, replication can occur in host cells that provide functions that complement the defects.

[0391] Vectors generally include selectable markers that enable the selection of the subpopulation of cells that contain the recombinant vector constructs. The marker can be inserted in the same vector that contains the SNP-containing nucleic acid molecules described herein or may be in a separate vector. Markers include, for example, tetracycline or ampicillin-resistance genes for prokaryotic host cells, and dihydrofolate reductase or neomycin resistance genes for eukaryotic host cells. However, any marker that provides selection for a phenotypic trait can be effective.

[0392] While the mature variant proteins can be produced in bacteria, yeast, mammalian cells, and other cells under the control of the appropriate regulatory sequences, cell-free transcription and translation systems can also be used to produce these variant proteins using RNA derived from the DNA constructs described herein.

[0393] Where secretion of the variant protein is desired, which is difficult to achieve with multi-transmembrane domain containing proteins such as G-protein-coupled receptors (GPCRs), appropriate secretion signals can be incorporated into the vector. The signal sequence can be endogenous to the peptides or heterologous to these peptides.

[0394] Where the variant protein is not secreted into the medium, the protein can be isolated from the host cell by standard disruption procedures, including freeze/thaw, sonication, mechanical disruption, use of lysing agents, and the like. The variant protein can then be recovered and purified by well-known purification methods including, for example, ammonium sulfate precipitation, acid extraction, anion or cationic exchange chromatography, phosphocellulose chromatography, hydrophobic-interaction chromatography, affinity chromatography, hydroxylapatite chromatography, lectin chromatography, or high performance liquid chromatography.

[0395] It is also understood that, depending upon the host cell in which recombinant production of the variant proteins described herein occurs, they can have various glycosylation patterns, or may be non-glycosylated, as when produced in bacteria. In addition, the variant proteins may include an initial modified methionine in some cases as a result of a host-mediated process.

[0396] For further information regarding vectors and host cells, see Current Protocols in Molecular Biology, John Wiley & Sons, N.Y.

[0397] Uses of Vectors and Host Cells, and Transgenic Animals

[0398] Recombinant host cells that express the variant proteins described herein have a variety of uses. For example, the cells are useful for producing a variant protein that can be further purified into a preparation of desired amounts of the variant protein or fragments thereof. Thus, host cells containing expression vectors are useful for variant protein production.

[0399] Host cells are also useful for conducting cell-based assays involving the variant protein or variant protein fragments, such as those described above as well as other formats known in the art. Thus, a recombinant host cell expressing a variant protein is useful for assaying compounds that stimulate or inhibit variant protein function. Such an ability of a compound to modulate variant protein function may not be apparent from assays of the compound on the native/wild-type protein, or from cell-free assays of the compound. Recombinant host cells are also useful for assaying functional alterations in the variant proteins as compared with a known function.

[0400] Genetically-engineered host cells can be further used to produce non-human transgenic animals. A transgenic animal is preferably a non-human mammal, for example, a rodent, such as a rat or mouse, in which one or more of the cells of the animal include a transgene. A transgene is exogenous DNA containing a SNP of the present invention which is integrated into the genome of a cell from which a transgenic animal develops and which remains in the genome of the mature animal in one or more of its cell types or tissues. Such animals are useful for studying the function of a variant protein in vivo, and identifying and evaluating modulators of variant protein activity. Other examples of transgenic animals include, but are not limited to, non-human primates, sheep, dogs, cows, goats, chickens, and amphibians. Transgenic non-human mammals such as cows and goats can be used to produce variant proteins which can be secreted in the animal's milk and then recovered.

[0401] A transgenic animal can be produced by introducing a SNP-containing nucleic acid molecule into the male pronuclei of a fertilized oocyte, e.g., by microinjection or retroviral infection, and allowing the oocyte to develop in a pseudopregnant female foster animal. Any nucleic acid molecules that contain one or more SNPs of the present invention can potentially be introduced as a transgene into the genome of a non-human animal.

[0402] Any of the regulatory or other sequences useful in expression vectors can form part of the transgenic sequence. This includes intronic sequences and polyadenylation signals, if not already included. A tissue-specific regulatory sequence(s) can be operably linked to the transgene to direct expression of the variant protein in particular cells or tissues.

[0403] Methods for generating transgenic animals via embryo manipulation and microinjection, particularly animals such as mice, have become conventional in the art and are described in, for example, U.S. Pat. Nos. 4,736,866 and 4,870,009, both by Leder et al., U.S. Pat. No. 4,873,191 by Wagner et al., and in Hogan, B., Manipulating the Mouse Embryo, (Cold Spring Harbor Laboratory Press, Cold Spring Harbor, N.Y., 1986). Similar methods are used for production of other transgenic animals. A transgenic founder animal can be identified based upon the presence of the transgene in its genome and/or expression of transgenic mRNA in tissues or cells of the animals. A transgenic founder animal can then be used to breed additional animals carrying the transgene. Moreover, transgenic animals carrying a transgene can further be bred to other transgenic animals carrying other transgenes. A transgenic animal also includes a non-human animal in which the entire animal or tissues in the animal have been produced using the homologously recombinant host cells described herein.

[0404] In another embodiment, transgenic non-human animals can be produced which contain selected systems that allow for regulated expression of the transgene. One example of such a system is the cre/loxP recombinase system of bacteriophage P1 (Lakso et al. PNAS 89:6232-6236 (1992)). Another example of a recombinase system is the FLP recombinase system of S. cerevisiae (O'Gorman et al. Science 251:1351-1355 (1991)). If a cre/loxP recombinase system is used to regulate expression of the transgene, animals containing transgenes encoding both the Cre recombinase and a selected protein are generally needed. Such animals can be provided through the construction of “double” transgenic animals, e.g., by mating two transgenic animals, one containing a transgene encoding a selected variant protein and the other containing a transgene encoding a recombinase.

[0405] Clones of the non-human transgenic animals described herein can also be produced according to the methods described in, for example, Wilmut, I. et al. Nature 385:810-813 (1997) and PCT International Publication Nos. WO 97/07668 and WO 97/07669. In brief, a cell (e.g., a somatic cell) from the transgenic animal can be isolated and induced to exit the growth cycle and enter Gₒ phase. The quiescent cell can then be fused, e.g., through the use of electrical pulses, to an enucleated oocyte from an animal of the same species from which the quiescent cell is isolated. The reconstructed oocyte is then cultured such that it develops to morula or blastocyst and then transferred to pseudopregnant female foster animal. The offspring born of this female foster animal will be a clone of the animal from which the cell (e.g., a somatic cell) is isolated.

[0406] Transgenic animals containing recombinant cells that express the variant proteins described herein are useful for conducting the assays described herein in an in vivo context. Accordingly, the various physiological factors that are present in vivo and that could influence ligand or substrate binding, variant protein activation, signal transduction, or other processes or interactions, may not be evident from in vitro cell-free or cell-based assays. Thus, non-human transgenic animals of the present invention may be used to assay in vivo variant protein function as well as the activities of a therapeutic agent or compound that modulates variant protein function/activity or expression. Such animals are also suitable for assessing the effects of null mutations (i.e., mutations that substantially or completely eliminate one or more variant protein functions).

[0407] For further information regarding transgenic animals, see Houdebine, “Antibody manufacture in transgenic animals and comparisons with other systems”, Curr Opin Biotechnol. 2002 December; 13(6):625-9; Petters et al., “Transgenic animals as models for human disease”, Transgenic Res. 2000; 9(4-5):347-51; discussion 345-6; Wolf et al., “Use of transgenic animals in understanding molecular mechanisms of toxicity”, J Pharm Pharmacol. 1998 June; 50(6):567-74; Echelard, “Recombinant protein production in transgenic animals”, Curr Opin Biotechnol. 1996 October; 7(5):536-40; Houdebine, “Transgenic animal bioreactors”, Transgenic Res. 2000; 9(4-5):305-20; Pirity et al., “Embryonic stem cells, creating transgenic animals”, Methods Cell Biol. 1998; 57:279-93; and Robl et al., “Artificial chromosome vectors and expression of complex proteins in transgenic animals”, Theriogenology. 2003 Jan. 1; 59(1):107-13.

[0408] Computer-Related Embodiments

[0409] The SNPs provided in the present invention may be “provided” in a variety of mediums to facilitate use thereof. As used in this section, “provided” refers to a manufacture, other than an isolated nucleic acid molecule, that contains SNP information of the present invention. Such a manufacture provides the SNP information in a form that allows a skilled artisan to examine the manufacture using means not directly applicable to examining the SNPs or a subset thereof as they exist in nature or in purified form. The SNP information that may be provided in such a form includes any of the SNP information provided by the present invention such as, for example, polymorphic nucleic acid and/or amino acid sequence information such as SEQ ID NOS:1-450, SEQ ID NOS:451-900, SEQ ID NOS:8682-8935, SEQ ID NOS:901-8681, and SEQ ID NOS:8936-43,787; information about observed SNP alleles, alternative codons, populations, allele frequencies, SNP types, and/or affected proteins; or any other information provided by the present invention in Tables 1-2 and/or the Sequence Listing.

[0410] In one application of this embodiment, the SNPs of the present invention can be recorded on a computer readable medium. As used herein, “computer readable medium” refers to any medium that can be read and accessed directly by a computer. Such media include, but are not limited to: magnetic storage media, such as floppy discs, hard disc storage medium, and magnetic tape; optical storage media such as CD-ROM; electrical storage media such as RAM and ROM; and hybrids of these categories such as magnetic/optical storage media. A skilled artisan can readily appreciate how any of the presently known computer readable media can be used to create a manufacture comprising computer readable medium having recorded thereon a nucleotide sequence of the present invention. One such medium is provided with the present application, namely, the present application contains computer readable medium (CD-R) that has nucleic acid sequences (and encoded protein sequences) containing SNPs provided/recorded thereon in ASCII text format in a Sequence Listing along with accompanying Tables that contain detailed SNP and sequence information (transcript sequences are provided as SEQ ID NOS:1-450, protein sequences are provided as SEQ ID NOS:451-900, genomic sequences are provided as SEQ ID NOS:8682-8935, transcript-based context sequences are provided as SEQ ID NOS:901-8681, and genomic-based context sequences are provided as SEQ ID NOS:8936-43,787).

[0411] As used herein, “recorded” refers to a process for storing information on computer readable medium. A skilled artisan can readily adopt any of the presently known methods for recording information on computer readable medium to generate manufactures comprising the SNP information of the present invention.

[0412] A variety of data storage structures are available to a skilled artisan for creating a computer readable medium having recorded thereon a nucleotide or amino acid sequence of the present invention. The choice of the data storage structure will generally be based on the means chosen to access the stored information. In addition, a variety of data processor programs and formats can be used to store the nucleotide/amino acid sequence information of the present invention on computer readable medium. For example, the sequence information can be represented in a word processing text file, formatted in commercially-available software such as WordPerfect and Microsoft Word, represented in the form of an ASCII file, or stored in a database application, such as OB2, Sybase, Oracle, or the like. A skilled artisan can readily adapt any number of data processor structuring formats (e.g., text file or database) in order to obtain computer readable medium having recorded thereon the SNP information of the present invention.

[0413] By providing the SNPs of the present invention in computer readable form, a skilled artisan can routinely access the SNP information for a variety of purposes. Computer software is publicly available which allows a skilled artisan to access sequence information provided in a computer readable medium. Examples of publicly available computer software include BLAST (Altschul et at, J. Mol. Biol. 215:403-410 (1990)) and BLAZE (Brutlag et at, Comp. Chem. 17:203-207 (1993)) search algorithms.

[0414] The present invention further provides systems, particularly computer-based systems, which contain the SNP information described herein. Such systems may be designed to store and/or analyze information on, for example, a large number of SNP positions, or information on SNP genotypes from a large number of individuals. The SNP information of the present invention represents a valuable information source. The SNP information of the present invention stored/analyzed in a computer-based system may be used for such computer-intensive applications as determining or analyzing SNP allele frequencies in a population, mapping disease genes, genotype-phenotype association studies, grouping SNPs into haplotypes, correlating SNP haplotypes with response to particular drugs, or for various other bioinformatic, pharmacogenomic, drug development, or human identification/forensic applications.

[0415] As used herein, “a computer-based system” refers to the hardware means, software means, and data storage means used to analyze the SNP information of the present invention. The minimum hardware means of the computer-based systems of the present invention typically comprises a central processing unit (CPU), input means, output means, and data storage means. A skilled artisan can readily appreciate that any one of the currently available computer-based systems are suitable for use in the present invention. Such a system can be changed into a system of the present invention by utilizing the SNP information provided on the CD-R, or a subset thereof, without any experimentation.

[0416] As stated above, the computer-based systems of the present invention comprise a data storage means having stored therein SNPs of the present invention and the necessary hardware means and software means for supporting and implementing a search means. As used herein, “data storage means” refers to memory which can store SNP information of the present invention, or a memory access means which can access manufactures having recorded thereon the SNP information of the present invention.

[0417] As used herein, “search means” refers to one or more programs or algorithms that are implemented on the computer-based system to identify or analyze SNPs in a target sequence based on the SNP information stored within the data storage means. Search means can be used to determine which nucleotide is present at a particular SNP position in the target sequence. As used herein, a “target sequence” can be any DNA sequence containing the SNP position(s) to be searched or queried.

[0418] As used herein, “a target structural motif,” or “target motif,” refers to any rationally selected sequence or combination of sequences containing a SNP position in which the sequence(s) is chosen based on a three-dimensional configuration that is formed upon the folding of the target motif. There are a variety of target motifs known in the art. Protein target motifs include, but are not limited to, enzymatic active sites and signal sequences. Nucleic acid target motifs include, but are not limited to, promoter sequences, hairpin structures, and inducible expression elements (protein binding sequences).

[0419] A variety of structural formats for the input and output means can be used to input and output the information in the computer-based systems of the present invention. An exemplary format for an output means is a display that depicts the presence or absence of specified nucleotides (alleles) at particular SNP positions of interest. Such presentation can provide a rapid, binary scoring system for many SNPs simultaneously.

[0420] One exemplary embodiment of a computer-based system comprising SNP information of the present invention is provided in FIG. 1. FIG. 1 provides a block diagram of a computer system 102 that can be used to implement the present invention. The computer system 102 includes a processor 106 connected to a bus 104. Also connected to the bus 104 are a main memory 108 (preferably implemented as random access memory, RAM) and a variety of secondary storage devices 110, such as a hard drive 112 and a removable medium storage device 114. The removable medium storage device 114 may represent, for example, a floppy disk drive, a CD-ROM drive, a magnetic tape drive, etc. A removable storage medium 116 (such as a floppy disk, a compact disk, a magnetic tape, etc.) containing control logic and/or data recorded therein may be inserted into the removable medium storage device 114. The computer system 102 includes appropriate software for reading the control logic and/or the data from the removable storage medium 116 once inserted in the removable medium storage device 114.

[0421] The SNP information of the present invention may be stored in a well-known manner in the main memory 108, any of the secondary storage devices 110, and/or a removable storage medium 116. Software for accessing and processing the SNP information (such as SNP scoring tools, search tools, comparing tools, etc.) preferably resides in main memory 108 during execution.

### EXAMPLES

### Statistical Analysis of SNP Association with Myocardial Infarction and Recurrent Myocardial Infarction

[0422] Myocardial Infarction Studies (see Table 6)

[0423] A case-control genetic study to determine the association of SNPs in the human genome with myocardial infarction (MI) was carried out using genomic DNA extracted from two independently collected case-control sample sets.

[0424] Study S12 had 1400 samples, in which patients (cases) had self-reported history of MI, and controls had no history of MI or of acute angina lasting more than 1 hour. Study S28 had 1500 samples, in which patients (cases) had clinical evidence of history of MI, and controls had no history of MI. All individuals who were included in each study had signed a written informed consent form. The study protocol was IRB approved.

[0425] DNA was extracted from blood samples using conventional DNA extraction methods such as the QIA-amp kit from Qiagen. The samples were used for pooling studies, in which DNA from about 50 individuals was pooled, and allele frequencies were determined in pooled DNA. Allele frequencies were obtained on a PRISM 7900HT sequence detection PCR system (Applied Biosystems Foster City, Calif.) by allele-specific PCR, similar to the method described by Germer et al (Germer S., Holland M. J., Higuchi R. 2000, Genome Res. 10: 258-266). Primers for the allele-specific PCR reactions are disclosed in Table 5.

[0426] Summary statistics for demographic and environmental traits, history of vascular disease, and allele frequencies for the tested SNPs were obtained and compared between cases and controls. No multiple testing corrections were made.

[0427] Statistical analysis was carried out using Fisher's exact test of allelic association. Effect sizes were estimated through allelic odds ratios. The reported allele (an allele presented in any of Tables 6-8) may be under-represented in cases (with a lower allele frequency in cases than in controls, indicating that the reported allele is associated with decreased risk for disease and the other allele is a risk factor for disease) or over-represented in cases (indicating that the reported allele is a risk factor in the development of disease).

[0428] A SNP was considered to be a significant genetic marker if it exhibited a p-value <0.05 in the allelic association test or in any of the two genotypic tests (dominant, recessive). The association of a marker with MI was considered replicated if the marker exhibited an allelic association test p-value <0.05 in one of the sample sets and the same test and strata (or substrata) were significant (p<0.05) in another independent sample set.

[0429] An example of a replicated marker, where the reported allele is associated with decreased risk for MI is hCV1455653 (Table 6). hCV1455653 shows significant association with male individuals (strata=“M”) of study S12 and with male individuals (Strata=“M”) of study S28. The odds ratio in both studies is less than 1 (0.7 and 0.5 in studies S12 and S28, respectively), using the same reported allele (Allele=“T”) for analysis.

[0430] An example of a replicated marker, where the reported allele is associated with increased risk for MI is hCV15853281 (Table 6). hCV15853281 shows significant association with male individuals (Strata=“M”) of study S12 and with males individuals of study S28 (Strata=“M”). The odds ratio in both studies is greater than 1 (1.4 in both studies), using the same reported allele (Allele=“T”) for analysis.

[0431] Myocardial Infarction (MI) and Recurrent Myocardial Infarction (RMI) Studies (See Tables 7-8)

[0432] To identify genetic markers associated with RMI, samples from the Cholesterol and Recurrent Events (CARE) cohort study were genotyped. A well-documented MI was one of the enrollment criteria for the CARE study. Patients were followed up for 5 years and rates of recurrent MI (RMI) were recorded in Pravastatin and placebo treated groups.

[0433] In the initial analysis, SNP genotype frequencies in a group of 264 patients who had an RMI (second, third, or fourth) during the 5 years of CARE follow-up (During-CARE cases) were compared with the SNP genotype frequencies in a group of 1255 CARE patients who had not experienced an MI during the 5-years of CARE follow-up (controls). This is referred to as the “During-CARE” RMI study.

[0434] To replicate the initial findings, a second group of 394 CARE patients was analyzed who had an MI prior to the MI at CARE enrollment but who had not experienced an MI during the 5-years of CARE follow-up (Pre-CARE RMI cases). The genotype frequencies in this group were compared to a second independent group of controls consisting of 1221 CARE patients who did not have an MI during CARE follow-up. This is referred to as the “Pre-CARE” RMI Study. No patients from the During-CARE Study were used in Pre-CARE Study.

[0435] In the CARE Cohort Study, SNP genotype frequencies in 264 patients who in addition to an MI at CARE enrollment had another MI (second, third, or fourth) during the 5 years of CARE follow-up were compared with SNP genotype frequencies in all CARE patients who had not experienced another MI during 5-years of CARE follow-up. The Cohort Study design allows one to calculate relative and absolute risks, sensitivity, specificity, and other important characteristics of predictive genetic tests. The SNPs associated with RMI in the During-CARE, Pre-CARE, or CARE Cohort Studies were also compared to SNPs associated with primary MI in a study referred to as Study S12.

[0436] Study S12 had 1400 samples. MI patients (cases) in this study had a self-reported history of MI, and controls had no history of MI or acute angina lasting more than one hour. Allele frequencies in this study were detected in pooling experiments, in which DNA from about 50 individuals was pooled, and allele frequencies were determined in the pooled DNA. For study S12, only male cases and controls were used in pooling studies.

[0437] Disease associations were analyzed using any one of three categories of case and control status (see “Status Name” definitions for Tables 7-8 in the section entitled “Description of Tables 6-8”). Any SNPs associated with RMI in one of the three CARE studies (During-CARE, Pre-CARE, CARE Cohort Study) that were also associated with primary MI in the S12 Study in any one of three status categories were considered to be replicated associations.

[0438] DNA was extracted from blood samples using conventional DNA extraction methods like the QIA-amp kit from Qiagen. Genotypes were obtained on a PRISM 7900HT sequence detection PCR system (Applied Biosystems, Foster City, Calif.) by allele-specific PCR, similar to the method described by Germer et al (Germer S., Holland M. J., Higuchi R. 2000, Genome Res. 10: 258-266).

[0439] Statistical analysis was carried out using an asymptotic chi square test for allelic, dominant, or recessive association. Replicated SNPs (SNPs demonstrating an association with RMI in more than one study) are reported in Tables 7-8. A SNP was considered replicated if the at-risk alleles in both sample sets were identical, the p-values were less than 0.05 in both sample sets, and the significant association was seen in the same stratum in both sets or one stratum was inclusive of the other.

[0440] Effect sizes were estimated through allelic odds ratios and odds ratios for dominant and recessive modes. Homogeneity of Cochran-Mantel-Haenszel odds ratios was tested across different strata using the Breslow-Day test. A SNP was considered to be a significant genetic marker if it exhibited a p-value <0.05 in the allelic association test or in any of the two genotypic tests (dominant, recessive). Haldane Odds Ratios were used if either the case or control count was zero. SNPs with significant HWE violations in both cases and controls (p<1×10⁻⁴ in both tests) were not considered for further analysis, since significant deviation from HWE in both cases and controls for individual markers can be indicative of genotyping errors.

[0441] All publications and patents cited in this specification are herein incorporated by reference in their entirety. Various modifications and variations of the described compositions, methods and systems of the invention will be apparent to those skilled in the art without departing from the scope and spirit of the invention. Although the invention has been described in connection with specific preferred embodiments and certain working examples, it should be understood that the invention as claimed should not be unduly limited to such specific embodiments. Indeed, various modifications of the above-described modes for carrying out the invention that are obvious to those skilled in the field of molecular biology, genetics and related fields are intended to be within the scope of the following claims.

TABLE 5

| | | Sequence A | Sequence B | Sequence C |
|---|---|---|---|---|
| Marker | Alleles | (allele-specific primer) | (allele-specific primer) | (common primer) |
| hCV11181829 | C/T | GATGGAGTTTTGAGGAACC | CGATGGAGTTTTGAGGAACT | CCCTGGGCAGAATCAGA |
| | | (SEQ ID NO: 43788) | (SEQ ID NO: 43789) | (SEQ ID NO: 43790) |
| hCV11194241 | G/T | CGCAGGTTGAATTCTCG | GTCGCAGGTTGAATTCTCT | GGATAGCCCGCTGACTCT |
| | | (SEQ ID NO: 43791) | (SEQ ID NO: 43792) | (SEQ ID NO: 43793) |
| hCV1129436 | G/T | TTCCAGGGTATATCTCAGAGC | GTTCCAGGGTATATCTCAGAGA | TTGAAAGAGTGTGAGCAAGATC |
| | | (SEQ ID NO: 43794) | (SEQ ID NO: 43795) | (SEQ ID NO: 43796) |
| hCV11450583 | C/G | GCCGAAAAATAAAATGCAG | GCCGAAAAATAAAATGCAC | GGCACAGGAGGTGTTATGAC |
| | | (SEQ ID NO: 43797) | (SEQ ID NO: 43798) | (SEQ ID NO: 43799) |
| hCV11481423 | A/G | GGCGACGAAGTGCTACA | GCGACGAAGTGCTACG | TTGTCATGGTTGCATTGATC |
| | | (SEQ ID NO: 43800) | (SEQ ID NO: 43801) | (SEQ ID NO: 43802) |
| hCV11623862 | T/G | CACCTTTCAGGGTTGAAGT | ACCTTTCAGGGTTGAAGG | CTGTCCCCAGCCTCATT |
| | | (SEQ ID NO: 43803) | (SEQ ID NO: 43804) | (SEQ ID NO: 43805) |
| hCV11626683 | C/T | ACCGTGCACTTCCCAC | ACCGTGCACTTCCCAT | TCTCCGCACCAAGAATG |
| | | (SEQ ID NO: 43806) | (SEQ ID NO: 43807) | (SEQ ID NO: 43808) |
| hCV11922961 | C/T | GACAGATTGTCACGGAACAC | GACAGATTGTCACGGAACAT | GGCTCAGGACTCTCTGCTAGTA |
| | | (SEQ ID NO: 43809) | (SEQ ID NO: 43810) | (SEQ ID NO: 43811) |
| hCV11975563 | T/G | CCCTGCCCCCAGAA | CCCTGCCCCCAGAC | CTCATCATGGGTTGGATTAGTA |
| | | (SEQ ID NO: 43812) | (SEQ ID NO: 43813) | (SEQ ID NO: 43814) |
| hCV1243283 | A/G | TTATTCCTAGTTCCAATGAAAGAT | TTATTCCTAGTTCCAATGAAAGAC | ATCAGAGCCTGGGTTCTAAG |
| | | (SEQ ID NO: 43815) | (SEQ ID NO: 43816) | (SEQ ID NO: 43817) |
| hCV1247654 | C/G | GTATCCAAGAAAGTTCTTCCC | GTATCCAAGAAAGTTCTTCCG | GAGTTATCAAAATGAACCTGTCTC |
| | | (SEQ ID NO: 43818) | (SEQ ID NO: 43819) | (SEQ ID NO: 43820) |
| hCV1361979 | A/G | CAGTTTTGGTGTCAACTAGAAA | CAGTTTTGGTGTCAACTAGAAG | TTGCAACCTGAAAAACATAACTA |
| | | (SEQ ID NO: 43821) | (SEQ ID NO: 43822) | (SEQ ID NO: 43823) |
| hCV1381400 | C/T | GGTCTCAGCGTCACCC | CGGTCTCAGCGTCACCT | CGCCTCCCCACCATC |
| | | (SEQ ID NO: 43824) | (SEQ ID NO: 43825) | (SEQ ID NO: 43826) |
| hCV1432822 | A/G | GAACTGTCCGTCATCGGT | ACTGTCCGTCATCGGC | TTGCTAGTGGCATGACTGTC |
| | | (SEQ ID NO: 43827) | (SEQ ID NO: 43828) | (SEQ ID NO: 43829) |
| hCV1455653 | C/T | GTGTGGATTGGTGCTACC | GGTGTGGATTGGTGCTACT | CATGCGGGATCCATAGTCT |
| | | (SEQ ID NO: 43830) | (SEQ ID NO: 43831) | (SEQ ID NO: 43832) |
| hCV1459753 | G/T | AGGGGGTTGCGTGG | CAGGGGGTTGCGTGT | GGCGCCCAGGAACTAG |
| | | (SEQ ID NO: 43833) | (SEQ ID NO: 43834) | (SEQ ID NO: 43835) |
| hCV15746839 | C/T | GCATGGCCGACAGAC | GCATGGCCGACAGAT | CCAACCCGTGTGACATCT |
| | | (SEQ ID NO: 43836) | (SEQ ID NO: 43837) | (SEQ ID NO: 43838) |
| hCV15805367 | C/T | GCCAGAACGCAGAGTACG | TGCCAGAACGCAGAGTACA | GCATTTTAGTTTGTTCATGACTTTG |
| | | (SEQ ID NO: 43839) | (SEQ ID NO: 43840) | (SEQ ID NO: 43841) |
| hCV15824045 | C/G | CAAGCCCCTGTGATGC | CAAGCCCCTGTGATGG | TGTGATGCTCCTCAGCTTCT |
| | | (SEQ ID NO: 43842) | (SEQ ID NO: 43843) | (SEQ ID NO: 43844) |
| hCV15852472 | C/T | GGGAGGCTTGTTGCC | TGGGAGGCTTGTTGCT | TCTCATGAGGGTGGATTTACT |
| | | (SEQ ID NO: 43845) | (SEQ ID NO: 43846) | (SEQ ID NO: 43847) |
| hCV15852601 | C/G | GAGGGGCAGATAGGTGC | GAGGGGCAGATAGGTGG | CTTCGTGGCGGTGTTACT |
| | | (SEQ ID NO: 43848) | (SEQ ID NO: 43849) | (SEQ ID NO: 43850) |
| hCV15853281 | C/T | GCTGGTGGTGCTGTCAAC | GCTGGTGGTGCTGTCAAT | CCCGTGGAGGGTCTGA |
| | | (SEQ ID NO: 43851) | (SEQ ID NO: 43852) | (SEQ ID NO: 43853) |
| hCV15874455 | C/T | TGGCTGCGATTCCG | AGTGGCTGCGATTCCA | GCAATGGGCATGATTTCA |
| | | (SEQ ID NO: 43854) | (SEQ ID NO: 43855) | (SEQ ID NO: 43856) |
| hCV15954570 | G/A | CAGGCTTAAGGTCCTTCC | GCAGGCTTAAGGTCCTTCT | TCCCTGCGAGCAAGAA |
| | | (SEQ ID NO: 43857) | (SEQ ID NO: 43858) | (SEQ ID NO: 43859) |
| hCV15965459 | A/T | CAGCCTCAGGAGATAACAGT | CAGCCTCAGGAGATAACAGA | TCAACCCTTTTCCACATAGAT |
| | | (SEQ ID NO: 43860) | (SEQ ID NO: 43861) | (SEQ ID NO: 43862) |
| hCV15976316 | C/T | GCACCGGAGGACAATG | GCACCGGAGGACAATA | GGGTTGGCTCAGTCTCAA |
| | | (SEQ ID NO: 43863) | (SEQ ID NO: 43864) | (SEQ ID NO: 43865) |
| hCV16047108 | A/G | TGTTTTCATCCACTTGAACTGT | TTTTCATCCACTTGAACTGC | CAATTTTGGCTCCCTTAAAAG |
| | | (SEQ ID NO: 43866) | (SEQ ID NO: 43867) | (SEQ ID NO: 43868) |
| hCV16093418 | A/G | ACAAGAAGTTCACAGCTGAAGA | CAAGAAGTTCACAGCTGAAGG | CCTGCTGGAGAGACAGAGTG |
| | | (SEQ ID NO: 43869) | (SEQ ID NO: 43870) | (SEQ ID NO: 43871) |
| hCV1611549 | C/T | CCCCAGCTGGTGACG | CCCCAGCTGGTGACA | TGGTTGGGACTGGATCTG |
| | | (SEQ ID NO: 43872) | (SEQ ID NO: 43873) | (SEQ ID NO: 43874) |
| hCV16172087 | A/C | GACTGCCCGTCAGCA | GACTGCCCGTCAGCC | GGAGGTCAGGTGGATGTTTA |
| | | (SEQ ID NO: 43875) | (SEQ ID NO: 43876) | (SEQ ID NO: 43877) |
| hCV18187524 | C/T | TGGCTCCTTTGGGATG | CTTGGCTCCTTTGGGATA | CCCCTGTTGGAGAAGATGT |
| | | (SEQ ID NO: 43878) | (SEQ ID NO: 43879) | (SEQ ID NO: 43880) |
| hCV16266313 | A/G | CACGGCGCACTTTCTT | CACGGCGCACTTTCTC | TGTTTTTTCCTTTGTCATCTTATCTA |
| | | (SEQ ID NO: 43881) | (SEQ ID NO: 43882) | (SEQ ID NO: 43883) |
| hCV1639938 | A/C | AGTGGAGCTTCAGGGCT | TGGAGCTTCAGGGCG | CAGTGGAGACAGAGGATGTTTAC |
| | | (SEQ ID NO: 43884) | (SEQ ID NO: 43885) | (SEQ ID NO: 43886) |
| hCV1770462 | A/G | GCACCTCTGGGTGAAGAATA | CACCTCTGGGTGAAGAATG | TGACGATGGGAGGAACAG |
| | | (SEQ ID NO: 43887) | (SEQ ID NO: 43888) | (SEQ ID NO: 43889) |
| hCV177490 | C/G | GGTGTTAATCTCATCTGGTGAC | GGTGTTAATCTCATCTGGTGAG | GCAGAAGCAAGCATCATCT |
| | | (SEQ ID NO: 43890) | (SEQ ID NO: 43891) | (SEQ ID NO: 43892) |
| hCV1840838 | C/G | TCTTGCCCTGCTGCAC | TCTTGCCCTGCTGCAG | GCTGCACAGTCTCCACTTCT |
| | | (SEQ ID NO: 43893) | (SEQ ID NO: 43894) | (SEQ ID NO: 43895) |
| hCV1927249 | C/T | CAGGTTAATCACCGAGGAAC | CAGGTTAATCACCGAGGAAT | TCAAACTAAAGTTGAGTTCAGATTCT |
| | | (SEQ ID NO: 43896) | (SEQ ID NO: 43897) | (SEQ ID NO: 43898) |
| hCV1975247 | A/T | GACAGATGAACAGGAAATAGAGT | GACAGATGAACAGGAAATAGAGA | AAATCCCAGGAGTGTTTGTAAT |
| | | (SEQ ID NO: 43899) | (SEQ ID NO: 43900) | (SEQ ID NO: 43901) |
| hCV22271672 | A/G | CATTATCTTGAGATTTCTGCATAAT | CATTATCTTGAGATTTCTGCATAAC | AACAGAAAATGTGTACATAAATTTGAC |
| | | (SEQ ID NO: 43902) | (SEQ ID NO: 43903) | (SEQ ID NO: 43904) |
| hCV22271841 | C/T | CATCACGGAGATCCACC | ATCATCACGGAGATCCACT | TCAGCTCCAAGGAGATTCTTAG |
| | | (SEQ ID NO: 43905) | (SEQ ID NO: 43906) | (SEQ ID NO: 43907) |
| hCV22273204 | A/G | CGTCAGCTTCTTCACTGCTA | GTCAGCTTCTTCACTGCTG | GCTTTGATTTCCTACTCTGATTTA |
| | | (SEQ ID NO: 43908) | (SEQ ID NO: 43909) | (SEQ ID NO: 43910) |
| hCV22273670 | A/G | CAGACTTTTCTGGAATGTCAA | CAGACTTTTCTGGAATGTCAG | GCGGCAGCCTCTGTG |
| | | (SEQ ID NO: 43911) | (SEQ ID NO: 43912) | (SEQ ID NO: 43913) |
| hCV22274632 | A/C | TGAATGAGCATCCAAAAGAA | TGAATGAGCATCCAAAAGAC | GCAGCACGAAGCATTCAT |
| | | (SEQ ID NO: 43914) | (SEQ ID NO: 43915) | (SEQ ID NO: 43916) |
| hCV2295013 | C/T | AGTTGAAAGTGTTGATTTTGG | CAGTTGAAAGTGTTGATTTTGA | CTGTGTTGGCAAGGATGTAA |
| | | (SEQ ID NO: 43917) | (SEQ ID NO: 43918) | (SEQ ID NO: 43919) |
| hCV2336609 | C/T | AAGATGGGCGTGATGG | AAAGATGGGCGTGATGA | AATAGGACATCAGTCTCCTCATATC |
| | | (SEQ ID NO: 43920) | (SEQ ID NO: 43921) | (SEQ ID NO: 43922) |
| hCV2390370 | C/T | GCATATTGAATTGCTCCG | TGCATATTGAATTGCTCCA | CAGTATGCCAATAATCCAAGAGT |
| | | (SEQ ID NO: 43923) | (SEQ ID NO: 43924) | (SEQ ID NO: 43925) |
| hCV2404043 | C/T | GGAGCTGTGGACTTAACCG | GGAGCTGTGGACTTAACCA | GAGGTAGCCCAGTTCAAACTTT |
| | | (SEQ ID NO: 43926) | (SEQ ID NO: 43927) | (SEQ ID NO: 43928) |
| hCV2464666 | A/G | TCCTTTTCCCTTGCAGAT | TCCTTTTCCCTTGCAGAC | CACAATAGGCTCGGATTCAT |
| | | (SEQ ID NO: 43929) | (SEQ ID NO: 43930) | (SEQ ID NO: 43931) |
| hCV2482592 | A/G | TCCCTGGCTGTTATCTTCA | CCCTGGCTGTTATCTTCG | GAGGATGGGCACACTCATAC |
| | | (SEQ ID NO: 43932) | (SEQ ID NO: 43933) | (SEQ ID NO: 43934) |
| hCV2506294 | C/T | ACTACCATGCACAGTAAGCC | CACTACCATGCACAGTAAGCT | GTACAAAGGGATTTTTGAACAA |
| | | (SEQ ID NO: 43935) | (SEQ ID NO: 43936) | (SEQ ID NO: 43937) |
| hCV2530382 | A/G | CCTTCCTGCATACCATTATTAT | CCTTCCTGCATACCATTATTAC | ACTTCCTCCAAGAAGAAATACAG |
| | | (SEQ ID NO: 43938) | (SEQ ID NO: 43939) | (SEQ ID NO: 43940) |
| hCV25472673 | C/T | TGGGCTCCATCCCAC | TGGGCTCCATCCCAT | CCAATTCTTTTTCTTCTTTCAGTT |
| | | (SEQ ID NO: 43941) | (SEQ ID NO: 43942) | (SEQ ID NO: 43943) |
| hCV25472944 | T/C | TCAAAGTCATTAATTGGGATCA | CAAAGTCATTAATTGGGATCG | GGTGGAAGTCTCTCTGCTAACT |
| | | (SEQ ID NO: 43944) | (SEQ ID NO: 43945) | (SEQ ID NO: 43946) |
| hCV25474320 | C/T | ACTAGAGATGGATGAACTTTTCTC | ACTAGAGATGGATGAACTTTTCTT | GTTCTCCAGAAAGCATTCTTTAT |
| | | (SEQ ID NO: 43947) | (SEQ ID NO: 43948) | (SEQ ID NO: 43949) |
| hCV25592204 | C/T | CCCCCAGCAATGGAC | CCCCCAGCAATGGAT | GGAGATCCCCCTGATTAATATA |
| | | (SEQ ID NO: 43950) | (SEQ ID NO: 43951) | (SEQ ID NO: 43952) |
| hCV25592965 | C/T | TGGGGCCCATGAGAC | ATGGGGCCCATGAGAT | CCCAGGGAAGATGTAGACTATC |
| | | (SEQ ID NO: 43953) | (SEQ ID NO: 43954) | (SEQ ID NO: 43955) |
| hCV25593206 | C/G | GCCCTCTGCTGGAACTC | GCCCTCTGCTGGAACTG | GACCCGCAAACCTGAGA |
| | | (SEQ ID NO: 43956) | (SEQ ID NO: 43957) | (SEQ ID NO: 43958) |
| hCV25598093 | A/G | CTGTCAGTCCTTTCGCA | TGTCAGTCCTTTCGCG | AGCTGTTCCTGCAAAGTTCT |
| | | (SEQ ID NO: 43959) | (SEQ ID NO: 43960) | (SEQ ID NO: 43961) |
| hCV25598461 | C/G | GGGCCTCACCAGAGAC | GGGCCTCACCAGAGAG | CCAGAATGCCATCAAGACA |
| | | (SEQ ID NO: 43962) | (SEQ ID NO: 43963) | (SEQ ID NO: 43964) |
| hCV25601276 | C/T | GCGAGTGCAGATGTGTTTAG | GCGAGTGCAGATGTGTTTAA | GAACAGCAGTGTTTTATCATCATT |
| | | (SEQ ID NO: 43965) | (SEQ ID NO: 43966) | (SEQ ID NO: 43967) |
| hCV25605897 | G/T | AAGGCAGGATGGGAGTG | AAAGGCAGGATGGGAGTT | CGTCAAAGCACTAATGTCATGT |
| | | (SEQ ID NO: 43968) | (SEQ ID NO: 43969) | (SEQ ID NO: 43970) |
| hCV25607108 | A/G | CCCTGTACTTTCATAAGATGCT | CCTGTACTTTCATAAGATGCC | CGACGCCAAGGTGATACT |
| | | (SEQ ID NO: 43971) | (SEQ ID NO: 43972) | (SEQ ID NO: 43973) |
| hCV25608818 | A/G | CTCAATGTCGTATTCACCTTCT | CAATGTCGTATTCACCTTCC | ACTCCAGGATTTTTCAAAGATTAT |
| | | (SEQ ID NO: 43974) | (SEQ ID NO: 43975) | (SEQ ID NO: 43976) |
| hCV25612213 | A/G | CACACTTCTCCATTCTTCACA | ACACTTCTCCATTCTTCACG | GAATCTTTTCCTTACTCTTGACTCTA |
| | | (SEQ ID NO: 43977) | (SEQ ID NO: 43978) | (SEQ ID NO: 43979) |
| hCV25614384 | C/T | TGTGGTCTGTGAGCAACG | CTGTGGTCTGTGAGCAACA | GGGATCCCGAGGAAGAG |
| | | (SEQ ID NO: 43980) | (SEQ ID NO: 43981) | (SEQ ID NO: 43982) |
| hCV25616053 | C/G | CCCCAGGTTGCATAGC | CCCCAGGTTGCATAGG | GACACAGCAGTGTGAAGATGT |
| | | (SEQ ID NO: 43983) | (SEQ ID NO: 43984) | (SEQ ID NO: 43985) |
| hCV25617571 | C/T | TGCCAGCAGTATGGACG | AATGCCAGCAGTATGGACA | CCATCCAGCCTCAGGAAC |
| | | (SEQ ID NO: 43986) | (SEQ ID NO: 43987) | (SEQ ID NO: 43988) |
| hCV25618313 | C/T | GGGACCGGATCAGCAC | GGGACCGGATCAGCAT | GGCAGTAGGATGAATTAGAAAGTG |
| | | (SEQ ID NO: 43989) | (SEQ ID NO: 43990) | (SEQ ID NO: 43991) |
| hCV25618493 | G/A | AGGAGGCTGCGTATCC | CAGGAGGCTGCGTATCT | GTAGCTGTGCAGTGACAGTGT |
| | | (SEQ ID NO: 43992) | (SEQ ID NO: 43993) | (SEQ ID NO: 43994) |
| hCV25619464 | A/T | CTGTAGGCTTCATCCTCCAT | TGTAGGCTTCATCCTCCAA | GGGAGAGTTCAAAGCAAGTATT |
| | | (SEQ ID NO: 43995) | (SEQ ID NO: 43996) | (SEQ ID NO: 43997) |
| hCV25620774 | C/T | CACCCTGGCTGGAGAG | CACCCTGGCTGGAGAA | CTCCCTGTCCCAAAAAGAC |
| | | (SEQ ID NO: 43998) | (SEQ ID NO: 43999) | (SEQ ID NO: 44000) |
| hCV25623506 | C/T | TGCAGGGGACTGGAGTC | TGCAGGGGACTGGAGTT | CCCTTGCAGGGCTTCTAC |
| | | (SEQ ID NO: 44001) | (SEQ ID NO: 44002) | (SEQ ID NO: 44003) |
| hCV25627205 | C/T | CCTCACTGCCAGTGAAGC | ATACCTCACTGCCAGTGAAGT | GGAGCACCAGCAACTGTTAG |
| | | (SEQ ID NO: 44004) | (SEQ ID NO: 44005) | (SEQ ID NO: 44006) |
| hCV25630499 | C/T | CATTGCTGGTTTCCACG | CATTGCTGGTTTCCACA | GGCAGTGGCACACAATCT |
| | | (SEQ ID NO: 44007) | (SEQ ID NO: 44008) | (SEQ ID NO: 44009) |
| hCV25632546 | C/T | GCGCCCGAACTCTTC | GCGCCCGAACTCTTT | TGGCCAACGTCATGAGT |
| | | (SEQ ID NO: 44010) | (SEQ ID NO: 44011) | (SEQ ID NO: 44012) |
| hCV25632652 | C/T | TGGAGCATCTTGGAGTTTC | TGGAGCATCTTGGAGTTTT | CTGCTGGAGCGTGAGAA |
| | | (SEQ ID NO: 44013) | (SEQ ID NO: 44014) | (SEQ ID NO: 44015) |
| hCV25639556 | C/G | CGAAGTCGCTCAAAGTCTG | CGAAGTCGCTCAAAGTCTC | GATACTGACATTTTGACTGGTGTTA |
| | | (SEQ ID NO: 44016) | (SEQ ID NO: 44017) | (SEQ ID NO: 44018) |
| hCV25644901 | A/G | GCAGACCTGCAGCTTCA | CAGACCTGCAGCTTCG | TGTAACCCATCAACTCTGTTTATC |
| | | (SEQ ID NO: 44019) | (SEQ ID NO: 44020) | (SEQ ID NO: 44021) |
| hCV25646461 | G/T | GTTCACAGAGTGTTTCCAAAG | GTTCACAGAGTGTTTCCAAAT | TGGTCCCCTTGAGAGACTT |
| | | (SEQ ID NO: 44022) | (SEQ ID NO: 44023) | (SEQ ID NO: 44024) |
| hCV25651174 | A/G | GCGCTGCAGGGTCAT | GCGCTGCAGGGTCAC | CCTCCCCGCAGAGAATTA |
| | | (SEQ ID NO: 44025) | (SEQ ID NO: 44026) | (SEQ ID NO: 44027) |
| hCV25652722 | C/G | TGAGCCCACAGACCG | CTGAGCCCACAGACCC | GCCAGACTCAGCACTCATT |
| | | (SEQ ID NO: 44028) | (SEQ ID NO: 44029) | (SEQ ID NO: 44030) |
| hCV25654217 | C/G | CCAATAGTCGTTTTTTGTTGG | CCAATAGTCGTTTTTTGTTGC | GCTGTGTGGGAAGTCAGAAC |
| | | (SEQ ID NO: 44031) | (SEQ ID NO: 44032) | (SEQ ID NO: 44033) |
| hCV25751017 | C/A | CTTATTTTCAGCGAAAGGC | CCTTATTTTCAGCGAAAGGA | CCAATGGTCGTCATCTCC |
| | | (SEQ ID NO: 44034) | (SEQ ID NO: 44035) | (SEQ ID NO: 44036) |
| hCV25753038 | T/C | GGAGCCACCTATGTTCTCTACT | GAGCCACCTATGTTCTCTACC | TCCCTCTTTGCTCATTCATC |
| | | (SEQ ID NO: 44037) | (SEQ ID NO: 44038) | (SEQ ID NO: 44039) |
| hCV25764546 | A/C | CTGTCCTGTGTGCATTATAGATAT | CTGTCCTGTGTGCATTATAGATAG | AACCAGGCCTCAAGACTCTA |
| | | (SEQ ID NO: 44040) | (SEQ ID NO: 44041) | (SEQ ID NO: 44042) |
| hCV25921533 | C/T | CCTTGCCTTTCTTTTTAGC | CCCTTGCCTTTCTTTTTAGT | GCCTCAAAGAAAGTGACATCTAT |
| | | (SEQ ID NO: 44043) | (SEQ ID NO: 44044) | (SEQ ID NO: 44045) |
| hCV25926178 | C/G | GCTTTATCAGAGACTCTGAAGC | GCTTTATCAGAGACTCTGAAGG | CCAAGGCCACGGATATC |
| | | (SEQ ID NO: 44046) | (SEQ ID NO: 44047) | (SEQ ID NO: 44048) |
| hCV25935439 | T/G | GTCCTTCCAAGCAGCAT | GTCCTTCCAAGCAGCAG | GGGTGCGGTCATTGAA |
| | | (SEQ ID NO: 44049) | (SEQ ID NO: 44050) | (SEQ ID NO: 44051) |
| hCV25952807 | A/T | TCGGTGGGGGTTGTTTA | CGGTGGGGGTTGTTTT | GCCTGAAACTTTTTGGAATTAT |
| | | (SEQ ID NO: 44052) | (SEQ ID NO: 44053) | (SEQ ID NO: 44064) |
| hCV25959976 | A/G | TCCAGTCATTTGGTCCACT | CCAGTCATTTGGTCCACC | TGGCCCATTGATTTCTCTA |
| | | (SEQ ID NO: 44055) | (SEQ ID NO: 44056) | (SEQ ID NO: 44057) |
| hCV25966774 | C/T | CCCCTGTGATCCCTTG | GCCCCTGTGATCCCTTA | CCGTGAGATCCTCAAATGAC |
| | | (SEQ ID NO: 44058) | (SEQ ID NO: 44059) | (SEQ ID NO: 44060) |
| hCV25982101 | C/T | TCTCTGTCAATGGGGTCAG | TCTCTGTCAATGGGGTCAA | CAAAGTGCTGATCAGAGGTATTA |
| | | (SEQ ID NO: 44061) | (SEQ ID NO: 44062) | (SEQ ID NO: 44063) |
| hCV25998929 | C/T | GGTCTCGCCTTCGGG | GGTCTCGCCTTCGGA | AGCTTCCACAAACCAGATAGA |
| | | (SEQ ID NO: 44064) | (SEQ ID NO: 44065) | (SEQ ID NO: 44066) |
| hCV2603661 | C/T | CCAGTAGGCGGTCATG | GTCCAGTAGGCGGTCATA | GGCCGACCATAGAGATGA |
| | | (SEQ ID NO: 44067) | (SEQ ID NO: 44068) | (SEQ ID NO: 44069) |
| hCV2614880 | A/C | TGGTCTTTTCCAGTTTATCATAA | TGGTCTTTTCCAGTTTATCATAC | GAAGAAGCTGCAGGACTTTG |
| | | (SEQ ID NO: 44070) | (SEQ ID NO: 44071) | (SEQ ID NO: 44072) |
| hCV2628220 | A/G | CCGTGTGGTATGACATCAT | CCGTGTGGTATGACATCAC | TGTCTGCAGGTCACACTCAT |
| | | (SEQ ID NO: 44073) | (SEQ ID NO: 44074) | (SEQ ID NO: 44075) |
| hCV2633049 | G/T | TCTTCTAGGCTCTGTGGTCC | TCTTCTAGGCTCTGTGGTCA | CCACGTGCCCATGAAG |
| | | (SEQ ID NO: 44076) | (SEQ ID NO: 44077) | (SEQ ID NO: 44078) |
| hCV2659022 | C/G | CTGCTGGGTGTCCACC | TGCTGGGTGTCCACG | AGGAGCTGAGGAAGATCTCA |
| | | (SEQ ID NO: 44079) | (SEQ ID NO: 44080) | (SEQ ID NO: 44081) |
| hCV2691236 | C/T | GTTTCCTGGAAGTGGATC | GGTTTCCTGGAAGTGGATT | GGGTTGGGAGAGTTCTTTC |
| | | (SEQ ID NO: 44082) | (SEQ ID NO: 44083) | (SEQ ID NO: 44084) |
| hCV2741051 | C/T | GCTTTGTGGCCTACCAAG | GCTTTGTGGCCTACCAAA | TCCAGTGAGCAAGTCTACTCA |
| | | (SEQ ID NO: 44085) | (SEQ ID NO: 44086) | (SEQ ID NO: 44087) |
| hCV2741104 | C/T | CGGTTTACCTTGACATTATTTC | CGGTTTACCTTGACATTATTTT | ACTGTTGCCCCTTATCTATGT |
| | | (SEQ ID NO: 44088) | (SEQ ID NO: 44089) | (SEQ ID NO: 44090) |
| hCV2769554 | A/G | TCCGTTGTTCTCAGGGAT | TCCGTTGTTCTCAGGGAC | GGTTCCTGGAGGCATGTC |
| | | (SEQ ID NO: 44091) | (SEQ ID NO: 44092) | (SEQ ID NO: 44093) |
| hCV2786283 | G/T | TCTCATCCACAAAGAAACTTG | CTCTCATCCACAAAGAAACTTT | CCCAGAGTTGCTCTCTTGAA |
| | | (SEQ ID NO: 44094) | (SEQ ID NO: 44095) | (SEQ ID NO: 44096) |
| hCV2848651 | C/G | CACATTAATAACTGGAAGTAAAACTG | CACATTAATAACTGGAAGTAAAACTC | GGTCTCCGTGCTCTTAGTCT |
| | | (SEQ ID NO: 44097) | (SEQ ID NO: 44098) | (SEQ ID NO: 44099) |
| hCV309084 | T/C | CAAACCTTCGAGCTGCTA | AAACCTTCGAGCTGCTG | CTGTTCTCATCAGAGAGATTGTAGA |
| | | (SEQ ID NO: 44100) | (SEQ ID NO: 44101) | (SEQ ID NO: 44102) |
| hCV3098622 | C/T | TCAGGGATGGCTCTTCC | AGTCAGGGATGGCTCTTCT | GGGAAGGCATGAGTTGAGT |
| | | (SEQ ID NO: 44103) | (SEQ ID NO: 44104) | (SEQ ID NO: 44105) |
| hCV3186502 | A/G | GAATGTGGGTCTCAACCTTT | GAATGTGGGTCTCAACCTTC | TCCGGTGGCATCAAGA |
| | | (SEQ ID NO: 44106) | (SEQ ID NO: 44107) | (SEQ ID NO: 44108) |
| hCV3187716 | A/C | CCTTCAATTCTGAAAAGTAGCTAAT | CCTTCAATTCTGAAAAGTAGCTAAG | TTTGAGGTTGAGTGACATGTTC |
| | | (SEQ ID NO: 44109) | (SEQ ID NO: 44110) | (SEQ ID NO: 44111) |
| hCV3215409 | A/G | GTGGCTCATTACCAATCTCTT | GTGGCTCATTACCAATCTCTC | GGGCTCCATCAACATCAC |
| | | (SEQ ID NO: 44112) | (SEQ ID NO: 44113) | (SEQ ID NO: 44114) |
| hCV3223182 | C/T | GTCGCAACTCACATCACTG | TGTCGCAACTCACATCACTA | AGTTCTTGGAGGCATCTCAT |
| | | (SEQ ID NO: 44115) | (SEQ ID NO: 44116) | (SEQ ID NO: 44117) |
| hCV334226 | A/G | GAGCCTGGGCCAAAT | GAGCCTGGGCCAAAC | CCTAAGAGGCTGGAAAGATAGAG |
| | | (SEQ ID NO: 44118) | (SEQ ID NO: 44119) | (SEQ ID NO: 44120) |
| hCV378029 | A/G | CTCTGCATGAAGGACCCT | CTGCATGAAGGACCCC | CAGTACCTGCCAAAACAGACT |
| | | (SEQ ID NO: 44121) | (SEQ ID NO: 44122) | (SEQ ID NO: 44123) |
| hCV435368 | T/C | CATGTTCCGAGAAGAACAGATA | TGTTCCGAGAAGAACAGATG | TGGTGGAAGGAGGGTATGT |
| | | (SEQ ID NO: 44124) | (SEQ ID NO: 44125) | (SEQ ID NO: 44126) |
| hCV440166 | C/G | TTGCAACCTCCTTCCG | TTTGCAACCTCCTTCCC | CCAGGCCTCTGAAAAGAGA |
| | | (SEQ ID NO: 44127) | (SEQ ID NO: 44128) | (SEQ ID NO: 44129) |
| hCV582924 | G/T | GGCGGTCCTGAGAGC | TATAGGCGGTCCTGAGAGA | CCATTTGGCCCCTATAATG |
| | | (SEQ ID NO: 44130) | (SEQ ID NO: 44131) | (SEQ ID NO: 44132) |
| hCV7429784 | A/G | GGGTCATGGTACTCAATGAA | GGGTCATGGTACTCAATGAG | TGTACAAAAATGTTGTCACATACAG |
| | | (SEQ ID NO: 44133) | (SEQ ID NO: 44134) | (SEQ ID NO: 44135) |
| hCV7440082 | A/G | CATTCCTTGGGCTCCA | ATTCCTTGGGCTCCG | AATGAACAACATTCTCTTCATTAAG |
| | | (SEQ ID NO: 44136) | (SEQ ID NO: 44137) | (SEQ ID NO: 44138) |
| hCV7440483 | A/G | GGAAGTGATTGGGGTCTT | GGAAGTGATTGGGGTCTC | TCTTGCCTGCCTTGATTAC |
| | | (SEQ ID NO: 44139) | (SEQ ID NO: 44140) | (SEQ ID NO: 44141) |
| hCV7492601 | A/T | AAGGAGGTCTGCCTAAGGT | AAGGAGGTCTGCCTAAGGA | TTACCTGCCTTTAAAGAACATTACT |
| | | (SEQ ID NO: 44142) | (SEQ ID NO: 44143) | (SEQ ID NO: 44144) |
| hCV7494817 | A/T | GACCCTCAGAGTTGCACA | GGACCCTCAGAGTTGCACT | GGTCGGTGTTCGAATCTTC |
| | | (SEQ ID NO: 44145) | (SEQ ID NO: 44146) | (SEQ ID NO: 44147) |
| hCV7514870 | A/C | GAGCAGCAGGTTTGAGGT | GCAGCAGGTTTGAGGG | ACACCACCTGAACGTCTCTT |
| | | (SEQ ID NO: 44148) | (SEQ ID NO: 44149) | (SEQ ID NO: 44150) |
| hCV7577801 | C/T | CCTTTGCTGCTCTGCC | GCCTTTGCTGCTCTGCT | GGTCTCTGGTATTAAGTGGAAACA |
| | | (SEQ ID NO: 44151) | (SEQ ID NO: 44152) | (SEQ ID NO: 44153) |
| hCV7591528 | G/A | CTCATAGCTTGACCTTCGAG | CTCATAGCTTGACCTTCGAA | ACTCCTCATCAGTCACAGACAC |
| | | (SEQ ID NO: 44154) | (SEQ ID NO: 44155) | (SEQ ID NO: 44156) |
| hCV783138 | A/G | CATGCCACCCACTACCA | ATGCCACCCACTACCG | GAGCTTTTGCAGCCACTC |
| | | (SEQ ID NO: 44157) | (SEQ ID NO: 44158) | (SEQ ID NO: 44159) |
| hCV8339788 | C/G | ACCAGCTCATCCGACAC | ACCAGCTCATCCGACAG | GATCCGGCTTCCAACAT |
| | | (SEQ ID NO: 44160) | (SEQ ID NO: 44161) | (SEQ ID NO: 44162) |
| hCV8719648 | A/G | CCGGCTGGTTTTGTAAGATA | CGGCTGGTTTTGTAAGATG | GGCCTGGTTTGCATAGTC |
| | | (SEQ ID NO: 44163) | (SEQ ID NO: 44164) | (SEQ ID NO: 44165) |
| hCV8722613 | C/T | CCTGGGGCAGGTACAG | CCTGGGGCAGGTACAA | CCATCCACTGCTTGAAAAG |
| | | (SEQ ID NO: 44166) | (SEQ ID NO: 44167) | (SEQ ID NO: 44168) |
| hCV8737990 | C/T | GGTCCTTGCAAGTATCCG | TGGTCCTTGCAAGTATCCA | GCACTACAGCTGAGTCCTTTTC |
| | | (SEQ ID NO: 44169) | (SEQ ID NO: 44170) | (SEQ ID NO: 44171) |
| hCV8895373 | A/G | GCAGGACTTCCGTGTCTT | GCAGGACTTCCGTGTCTC | ACAGATGCCAGCAATACAGA |
| | | (SEQ ID NO: 44172) | (SEQ ID NO: 44173) | (SEQ ID NO: 44174) |
| hCV8900861 | A/C | CTCCATCCCACAGGGT | TCCATCCCACAGGGG | CGCTTGAGAAAATTTTGTCTG |
| | | (SEQ ID NO: 44175) | (SEQ ID NO: 44176) | (SEQ ID NO: 44177) |
| hCV8931357 | A/G | TTATTGACACTTTCCAGTAAATAATT | TTATGACACTTTCCAGTAAATAATC | ATTACCATGGCTTAAGAACTATCTT |
| | | (SEQ ID NO: 44178) | (SEQ ID NO: 44179) | (SEQ ID NO: 44180) |
| hCV8950503 | C/T | GGATTGTGTCAGGCCTTAC | GGATTGTGTCAGGCCTTAT | CTTGGTTCGTGAAGAAGTCA |
| | | (SEQ ID NO: 44181) | (SEQ ID NO: 44182) | (SEQ ID NO: 44183) |
| hCV9055799 | C/G | ACAGATCCATTTCATCTAGGTC | ACAGATCCATTTCATCTAGGTG | GGCTCTGGGAATTTCACAT |
| | | (SEQ ID NO: 44184) | (SEQ ID NO: 44185) | (SEQ ID NO: 44186) |
| hCV9077561 | G/A | GAGAAGGTGGGATCCAAAC | GAGAAGGTGGGATCCAAAT | AGAAACCATCATGCTGAGGT |
| | | (SEQ ID NO: 44187) | (SEQ ID NO: 44188) | (SEQ ID NO: 44189) |
| hCV9596971 | A/G | CCTCTGTGCAGCTCCTT | CCTCTGTGCAGCTCCTC | CCGGGAGATGAAGAAGAGA |
| | | (SEQ ID NO: 44190) | (SEQ ID NO: 44191) | (SEQ ID NO: 44192) |
| hCV9625694 | A/G | GAACTGCAACACAGGATCA | AACTGCAACACAGGATCG | GACCTCGGGACCTCATG |
| | | (SEQ ID NO: 44193) | (SEQ ID NO: 44194) | (SEQ ID NO: 44195) |
| hCV9626088 | A/G | CATCATGGTGTTCTTGCCT | ATCATGGTGTTCTTGCCC | CATTATCTGAAATGTTTCATTGTAGA |
| | | (SEQ ID NO: 44196) | (SEQ ID NO: 44197) | (SEQ ID NO: 44198) |
| hCV9698595 | A/T | GCTGGTCATCCTCATCCA | TGCTGGTCATCCTCATCCT | ACCGTCCTGGCTTTTAAAG |
| | | (SEQ ID NO: 44199) | (SEQ ID NO: 44200) | (SEQ ID NO: 44201) |

[0442] TABLE 6

| Marker | Allele | Study1 | Strata(1) | Design(1) | OR(1) | p-value(1) | Study2 | Strata(2) | Design(2) | OR(2) | p-value(2) |
|---|---|---|---|---|---|---|---|---|---|---|---|
| hCV1455653 | T | S12 | M | ALL | 0.7 | 0.039 | S28 | M | ALL | 0.5 | 0.0007 |
| hCV15965459 | T | S12 | sm | ALL | 0.7 | 0.027 | S28 | sm | MI_LS | 0.6 | 0.001 |
| hCV25753038 | C | S12 | ALL | ALL | 1.2 | 0.046 | S28 | ALL | ALL | 1.3 | 0.002 |
| hCV582924 | A | S12 | non sm | ALL | 0.8 | 0.050 | S28 | non sm | ALL | 0.6 | 0.002 |
| hCV16093418 | G | S12 | ALL | ALL | 0.8 | 0.038 | S28 | ALL | ALL | 0.7 | 0.007 |
| hCV25598093 | G | S12 | non sm | ALL | 0.4 | 0.011 | S28 | non sm | MI_LS | 0.3 | 0.008 |
| hCV25601276 | A | S12 | sm | ALL | 0.4 | 0.021 | S28 | sm | ALL | 0.3 | 0.009 |
| hCV15853281 | T | S12 | M | ALL | 1.4 | 0.027 | S28 | M | ALL | 1.4 | 0.014 |
| hCV9626088 | G | S12 | ALL | ALL | 0.8 | 0.002 | S28 | ALL | MI_LS | 0.8 | 0.015 |
| hCV25619464 | A | S12 | sm | ALL | 0.8 | 0.031 | S28 | sm | ALL | 0.8 | 0.016 |
| hCV7429784 | A | S12 | F | ALL | 0.6 | 0.007 | S28 | F | ALL | 0.7 | 0.017 |
| hCV2295013 | A | S12 | M | ALL | 0.7 | 0.046 | S28 | M | ALL | 0.7 | 0.018 |
| hCV3098622 | T | S12 | sm | ALL | 0.8 | 0.042 | S28 | sm | ALL | 0.8 | 0.022 |
| hCV25598461 | G | S28 | F | MI_LS | 1.9 | 0.044 | S12 | F | ALL | 1.9 | 0.025 |
| hCV2628220 | C | S12 | non sm | ALL | 0.8 | 0.047 | S28 | non sm | ALL | 0.7 | 0.030 |
| hCV25982101 | A | S12 | non sm | ALL | 0.6 | 0.043 | S28 | non sm | ALL | 0.6 | 0.031 |
| hCV11626683 | T | S12 | F | ALL | 1.4 | 0.001 | S28 | F | ALL | 1.3 | 0.033 |
| hCV2786283 | T | S12 | ALL | Y_O | 0.8 | 0.010 | S28 | ALL | Y_O | 0.8 | 0.033 |
| hCV16187524 | T | S12 | sm | ALL | 0.8 | 0.036 | S28 | sm | MI_LS | 0.8 | 0.033 |
| hCV8900861 | C | S12 | ALL | Y_O | 1.8 | 0.007 | S28 | ALL | Y_O | 1.7 | 0.035 |
| hCV2691236 | T | S12 | non sm | ALL | 1.7 | 0.011 | S28 | non sm | ALL | 1.6 | 0.037 |
| hCV25623506 | T | S12 | ALL | ALL | 1.5 | 0.009 | S28 | ALL | MI_LS | 1.5 | 0.039 |
| hCV25592204 | T | S12 | M | ALL | 0.7 | 0.009 | S28 | M | ALL | 0.8 | 0.039 |
| hCV378029 | C | S12 | non sm | ALL | 1.4 | 0.039 | S28 | non sm | ALL | 1.5 | 0.040 |
| hCV25764546 | C | S12 | non sm | ALL | 0.7 | 0.010 | S28 | non sm | MI_LS | 0.7 | 0.042 |
| hCV11975563 | C | S12 | sm | ALL | 0.8 | 0.047 | S28 | sm | ALL | 0.8 | 0.042 |
| hCV25998929 | A | S12 | F | ALL | 1.8 | 0.040 | S28 | F | ALL | 1.9 | 0.043 |
| hCV1840838 | G | S12 | sm | ALL | 0.7 | 0.021 | S28 | sm | ALL | 0.7 | 0.045 |
| hCV7440483 | C | S12 | non sm | ALL | 2.9 | 0.008 | | | | | |
| hCV8719648 | G | S12 | F | ALL | 0.7 | 0.009 | | | | | |
| hCV2659022 | G | S12 | ALL | ALL | 0.8 | 0.036 | | | | | |
| hCV1247654 | G | S12 | ALL | ALL | 0.7 | 0.011 | | | | | |
| hCV25639556 | C | S12 | F | ALL | 0.6 | 0.019 | | | | | |
| hCV1975247 | A | S12 | ALL | ALL | 1.4 | 0.034 | | | | | |
| hCV9625694 | G | S28 | non sm | ALL | 1.4 | 0.033 | | | | | |
| hCV2659022 | G | S28 | M | ALL | 0.7 | 0.024 | | | | | |
| hCV25935439 | G | S12 | sm | ALL | 1.3 | 0.042 | | | | | |
| hCV11922961 | T | S12 | ALL | ALL | 1.3 | 0.031 | | | | | |

[0443] TABLE 7

| hCG | Gene Name | Marker | p-value | OR | Mode | Allele |
|---|---|---|---|---|---|---|
| hCG33721 | SERPINB2 | hCV11450583 | 0.0304 | 0.7392 | Allelic | G |
| hCG33721 | SERPINB2 | hCV11450583 | 0.0267 | 0.7185 | Allelic | G |
| hCG33721 | SERPINB2 | hCV11450583 | 0.0213 | 0.6780 | Allelic | G |
| hCG2029801 | TCP1 | hCV1361979 | 0.0265 | 1.2566 | Allelic | G |
| hCG2029801 | TCP1 | hCV1361979 | 0.0159 | 1.3094 | Allelic | G |
| hCG2029801 | TCP1 | hCV1361979 | 0.0192 | 1.4958 | Allelic | G |
| hCG2029801 | TCP1 | hCV1361979 | 0.0171 | 1.6123 | Allelic | G |
| hCG2029801 | TCP1 | hCV1361979 | 0.0322 | 1.3920 | Allelic | G |
| hCG2029801 | TCP1 | hCV1361979 | 0.0308 | 1.6738 | Allelic | G |
| hCG24991 | RAB13 | hCV15852472 | 0.0042 | 2.6494 | Allelic | T |
| hCG24991 | RAB13 | hCV15852472 | 0.0197 | 2.4232 | Allelic | T |
| hCG24991 | RAB13 | hCV15852472 | 0.0358 | 2.1604 | Allelic | T |
| hCG24991 | RAB13 | hCV15852472 | 0.0093 | 2.6212 | Allelic | T |
| hCG24991 | RAB13 | hCV15852472 | 0.0440 | 1.6434 | Allelic | T |
| hCG40302 | BAT2 | hCV15874455 | 0.0296 | 0.6475 | Allelic | T |
| hCG40302 | BAT2 | hCV15874455 | 0.0348 | 0.4402 | Allelic | T |
| hCG40302 | BAT2 | hCV15874455 | 0.0260 | 0.4237 | Allelic | T |
| hCG38030 | COLEC12 | hCV15976316 | 0.0073 | 1.6811 | Allelic | T |
| hCG38030 | COLEC12 | hCV15976316 | 0.0297 | 1.3863 | Allelic | T |
| hCG38030 | COLEC12 | hCV15976316 | 0.0095 | 1.6675 | Allelic | T |
| hCG38030 | COLEC12 | hCV15976316 | 0.0181 | 1.4097 | Allelic | T |
| hCG27269 | MBL2 | hCV2336609 | 0.0311 | 1.3735 | Allelic | T |
| hCG27269 | MBL2 | hCV2336609 | 0.0191 | 1.4808 | Allelic | T |
| hCG27269 | MBL2 | hCV2336609 | 0.0129 | 1.4896 | Allelic | T |
| hCG26692 | EDN3 | hCV2506294 | 0.0222 | 0.6843 | Allelic | T |
| hCG26692 | EDN3 | hCV2506294 | 0.0405 | 0.7392 | Allelic | T |
| hCG26692 | EDN3 | hCV2506294 | 0.0121 | 0.6429 | Allelic | T |
| hCG40889 | HF1, HFL1 | hCV2530382 | 0.0163 | 2.0769 | Allelic | G |
| hCG40889 | HF1, HFL1 | hCV2530382 | 0.0215 | 1.6378 | Allelic | G |
| hCG40889 | HF1, HFL1 | hCV2530382 | 0.0218 | 2.0527 | Allelic | G |
| hCG2020552 | LCP1 | hCV25474320 | 0.0356 | 1.5388 | Allelic | T |
| hCG2020552 | LCP1 | hCV25474320 | 0.0338 | 1.7314 | Allelic | T |
| hCG1811178 | PTPRC | hCV25593206 | 0.0495 | 0.2259 | Allelic | G |
| hCG1811178 | PTPRC | hCV25593206 | 0.0462 | 0.2739 | Allelic | G |
| hCG31572 | KDR | hCV25612213 | 0.0201 | 3.3977 | Allelic | G |
| hCG31572 | KDR | hCV25612213 | 0.0431 | 2.7229 | Allelic | G |
| hCG31572 | KDR | hCV25612213 | 0.0001 | 4.3271 | Allelic | G |
| hCG31572 | KDR | hCV25612213 | 0.0047 | 2.4916 | Allelic | G |
| hCG31572 | KDR | hCV25612213 | 0.0474 | 1.7685 | Allelic | G |
| hCG33042 | COL4A2 | hCV25616053 | 0.0449 | 1.7758 | Allelic | G |
| hCG33042 | COL4A2 | hCV25616053 | 0.0133 | 1.8540 | Allelic | G |
| hCG33042 | COL4A2 | hCV25616053 | 0.0449 | 1.7758 | Allelic | G |
| hCG33042 | COL4A2 | hCV25616053 | 0.0133 | 1.8540 | Allelic | G |
| hCG33042 | COL4A2 | hCV25616053 | 0.0441 | 1.6251 | Allelic | G |
| hCG33042 | COL4A2 | hCV25616053 | 0.0092 | 1.9400 | Allelic | G |
| hCG1811009 | WWOX | hCV25654217 | 0.0287 | 0.4393 | Allelic | G |
| hCG1811009 | WWOX | hCV25654217 | 0.0178 | 0.2112 | Allelic | G |
| hCG18119 | GAB3 | hCV25959976 | 0.0333 | 1.5738 | Allelic | G |
| hCG18119 | GAB3 | hCV25959976 | 0.0072 | 1.7911 | Allelic | G |
| hCG18119 | GAB3 | hCV25959976 | 0.0406 | 1.9120 | Allelic | G |
| hCG18119 | GAB3 | hCV25959976 | 0.0022 | 2.4636 | Allelic | G |
| hCG1685787 | ADAM17 | hCV25966774 | 0.0340 | 0.3941 | Allelic | A |
| hCG1685787 | ADAM17 | hCV25966774 | 0.0288 | 0.0000 | Allelic | A |
| hCG1789838 | ABCA1 | hCV2741051 | 0.0173 | 0.6971 | Allelic | T |
| hCG1789838 | ABCA1 | hCV2741051 | 0.0048 | 0.6565 | Allelic | T |
| hCG1789838 | ABCA1 | hCV2741051 | 0.0202 | 0.6919 | Allelic | T |
| hCG2022206 | AGTR1 | hCV3187716 | 0.0090 | 1.3385 | Allelic | C |
| hCG2039388 | AGTR1 | hCV3187716 | 0.0088 | 1.8200 | Allelic | C |
| hCG2022206 | AGTR1 | hCV3187716 | 0.0097 | 1.3715 | Allelic | C |
| hCG2039388 | AGTR1 | hCV3187716 | 0.0038 | 2.0200 | Allelic | C |
| hCG26692 | EDN3 | hCV3223182 | 0.0080 | 1.3038 | Allelic | T |
| hCG26692 | EDN3 | hCV3223182 | 0.0349 | 1.4208 | Allelic | T |
| hCG26692 | EDN3 | hCV3223182 | 0.0063 | 1.6963 | Allelic | T |
| hCG26692 | EDN3 | hCV3223182 | 0.0493 | 1.3358 | Allelic | T |
| hCG26692 | EDN3 | hCV3223182 | 0.0260 | 1.2768 | Allelic | T |
| hCG26692 | EDN3 | hCV3223182 | 0.0126 | 1.5461 | Allelic | T |
| hCG26692 | EDN3 | hCV3223182 | 0.0229 | 1.6345 | Allelic | T |
| hCG43681 | LTA | hCV7514870 | 0.0001 | 0.5809 | Allelic | C |
| hCG43681 | LTA | hCV7514870 | 0.0458 | 0.7192 | Allelic | C |
| hCG43681 | LTA | hCV7514870 | 0.0143 | 0.7296 | Allelic | C |
| hCG43681 | LTA | hCV7514870 | 0.0249 | 0.7472 | Allelic | C |
| hCG43681 | LTA | hCV7514870 | 0.0017 | 0.5016 | Allelic | C |
| hCG43681 | LTA | hCV7514870 | 0.0006 | 0.5146 | Allelic | C |
| hCG43681 | LTA | hCV7514870 | 0.0026 | 0.6318 | Allelic | C |
| hCG43681 | LTA | hCV7514870 | 0.0058 | 0.6819 | Allelic | C |
| hCG43681 | LTA | hCV7514870 | 0.0222 | 0.7297 | Allelic | C |
| hCG23227 | PTPRJ | hCV8895373 | 0.0333 | 1.6632 | Allelic | G |
| hCG23227 | PTPRJ | hCV8895373 | 0.0251 | 1.2927 | Allelic | G |
| hCG33721 | SERPINB2 | hCV8931357 | 0.0003 | 0.6660 | Allelic | G |
| hCG33721 | SERPINB2 | hCV8931357 | 0.0000 | 0.6091 | Allelic | G |
| hCG33721 | SERPINB2 | hCV8931357 | 0.0268 | 0.7214 | Allelic | G |
| hCG33721 | SERPINB2 | hCV8931357 | 0.0323 | 0.6971 | Allelic | G |
| hCG2029091 | SERPINA5 | hCV9596971 | 0.0328 | 0.6700 | Allelic | G |
| hCG2029091 | SERPINA5 | hCV9596971 | 0.0075 | 0.2839 | Allelic | G |
| hCG2029091 | SERPINA5 | hCV9596971 | 0.0286 | 0.3432 | Allelic | G |
| hCG2029091 | SERPINA5 | hCV9596971 | 0.0422 | 0.5739 | Allelic | G |
| hCG2029091 | SERPINA5 | hCV9596971 | 0.0481 | 0.5496 | Allelic | G |
| hCG2029091 | SERPINA5 | hCV9596971 | 0.0328 | 0.6700 | Allelic | G |
| hCG2029091 | SERPINA5 | hCV9596971 | 0.0075 | 0.2839 | Allelic | G |
| hCG2029091 | SERPINA5 | hCV9596971 | 0.0286 | 0.3432 | Allelic | G |
| hCG2029091 | SERPINA5 | hCV9596971 | 0.0422 | 0.5739 | Allelic | G |
| hCG2029091 | SERPINA5 | hCV9596971 | 0.0481 | 0.5496 | Allelic | G |
| hCG2029091 | SERPINA5 | hCV9596971 | 0.0100 | 0.6464 | Allelic | G |
| hCG2029091 | SERPINA5 | hCV9596971 | 0.0045 | 0.6830 | Allelic | G |
| hCG2029091 | SERPINA5 | hCV9596971 | 0.0159 | 0.6258 | Allelic | G |
| hCG2029091 | SERPINA5 | hCV9596971 | 0.0034 | 0.2589 | Allelic | G |
| hCG2029091 | SERPINA5 | hCV9596971 | 0.0449 | 0.3670 | Allelic | G |
| hCG2029091 | SERPINA5 | hCV9596971 | 0.0302 | 0.4565 | Allelic | G |
| hCG2029091 | SERPINA5 | hCV9596971 | 0.0391 | 0.5075 | Allelic | G |
| hCG2029091 | SERPINA5 | hCV9596971 | 0.0080 | 0.4860 | Allelic | G |
| hCG2029091 | SERPINA5 | hCV9596971 | 0.0269 | 0.5036 | Allelic | G |
| hCG2029091 | SERPINA5 | hCV9596971 | 0.0385 | 0.4064 | Allelic | G |

| hCG | Strata | Status Name |
|---|---|---|
| hCG33721 | ALL | STATUS3_ALLCASE_VS_LT75CONTROL |
| hCG33721 | FMHX_No | Pre-CARE |
| hCG33721 | HYPERTEN_Yes | Pre-CARE |
| hCG2029801 | ALL | STATUS_ALLCASE_VS_ALLCONTROL |
| hCG2029801 | ALL | STATUS3_ALLCASE_VS_LT75CONTROL |
| hCG2029801 | AGE_TERTILE_3 | During-CARE |
| hCG2029801 | GLUCOSE_TERTILE_2 | During-CARE |
| hCG2029801 | HYPERTEN_Yes | During-CARE |
| hCG2029801 | SMOKE_No | During-CARE |
| hCG24991 | BM_TERTILE_2 | COHORT |
| hCG24991 | SMOKE_Yes | COHORT |
| hCG24991 | ALL | STATUS12_LT60CASE_VS_GT75CONTROL |
| hCG24991 | BMI_TERTILE_2 | During-CARE |
| hCG24991 | Male | During-CARE |
| hCG40302 | ALL | STATUS_ALLCASE_VS_ALLCONTROL |
| hCG40302 | SMOKE_Yes | COHORT |
| hCG40302 | SMOKE_Yes | During-CARE |
| hCG38030 | GLUCOSE_TERTILE_2 | COHORT |
| hCG38030 | ALL | STATUS12_LT60CASE_VS_GT75CONTROL |
| hCG38030 | GLUCOSE_TERTILE_2 | During-CARE |
| hCG38030 | GLUCOSE_TERTILE_2 | Pre-CARE |
| hCG27269 | ALL | STATUS_ALLCASE_VS_ALLCONTROL |
| hCG27269 | ALL | STATUS3_ALLCASE_VS_LT75CONTROL |
| hCG27269 | Pravastatin | Pre-CARE |
| hCG26692 | BMI_TERTILE_2 | COHORT |
| hCG26692 | ALL | STATUS12_LT60CASE_VS_GT75CONTROL |
| hCG26692 | BMI_TERTILE_2 | During-CARE |
| hCG40889 | SMOKE_No | COHORT |
| hCG40889 | SMOKE_No | STATUS3_ALLCASE_VS_LT75CONTROL |
| hCG40889 | SMOKE_No | During-CARE |
| hCG2020552 | ALL | STATUS3_ALLCASE_VS_LT75CONTROL |
| hCG2020552 | AGE_TERTILE_2 | During-CARE |
| hCG1811178 | SMOKE_No | STATUS3_ALLCASE_VS_LT75CONTROL |
| hCG1811178 | SMOKE_No | Pre-CARE |
| hCG31572 | ALL | STATUS12_LT60CASE_VS_GT75CONTROL |
| hCG31572 | GLUCOSE_TERTILE_1 | During-CARE |
| hCG31572 | AGE_TERTILE_2 | Pre-CARE |
| hCG31572 | FMHX_Yes | Pre-CARE |
| hCG31572 | HYPERTEN_No | Pre-CARE |
| hCG33042 | GLUCOSE_TERTILE_3 | COHORT |
| hCG33042 | HYPERTEN_No | COHORT |
| hCG33042 | GLUCOSE_TERTILE_3 | COHORT |
| hCG33042 | HYPERTEN_No | COHORT |
| hCG33042 | ALL | STATUS12_LT60CASE_VS_GT75CONTROL |
| hCG33042 | HYPERTEN_No | During-CARE |
| hCG1811009 | SMOKE_No | STATUS3_ALLCASE_VS_LT75CONTROL |
| hCG1811009 | SMOKE_No | Pre-CARE |
| hCG18119 | ALL | STATUS_ALLCASE_VS_ALLCONTROL |
| hCG18119 | ALL | STATUS3_ALLCASE_VS_LT75CONTROL |
| hCG18119 | GLUCOSE_TERTILE_3 | Pre-CARE |
| hCG18119 | Pravastatin | Pre-CARE |
| hCG1685787 | ALL | STATUS3_ALLCASE_VS_LT75CONTROL |
| hCG1685787 | GLUCOSE_TERTILE_1 | Pre-CARE |
| hCG1789838 | Placebo | COHORT |
| hCG1789838 | ALL | STATUS12_LT60CASE_VS_GT75CONTROL |
| hCG1789838 | Placebo | During-CARE |
| hCG2022206 | ALL | STATUS_ALLCASE_VS_ALLCONTROL |
| hCG2039388 | SMOKE_No | COHORT |
| hCG2022206 | ALL | STATUS3_ALLCASE_VS_LT75CONTROL |
| hCG2039388 | SMOKE_No | During-CARE |
| hCG26692 | ALL | STATUS_ALLCASE_VS_ALLCONTROL |
| hCG26692 | BMI_TERTILE_2 | COHORT |
| hCG26692 | SMOKE_Yes | COHORT |
| hCG26692 | ALL | STATUS12_LT60CASE_VS_GT75CONTROL |
| hCG26692 | ALL | STATUS3_ALLCASE_VS_LT75CONTROL |
| hCG26692 | BMI_TERTILE_2 | During-CARE |
| hCG26692 | SMOKE_Yes | During-CARE |
| hCG43681 | ALL | STATUS_ALLCASE_VS_ALLCONTROL |
| hCG43681 | AGE_TERTILE_3 | COHORT |
| hCG43681 | Placebo | COHORT |
| hCG43681 | SMOKE_Yes | COHORT |
| hCG43681 | ALL | STATUS12_LT60CASE_VS_GT75CONTROL |
| hCG43681 | SMOKE_Yes | STATUS3_ALLCASE_VS_LT75CONTROL |
| hCG43681 | ALL | STATUS3_ALLCASE_VS_LT75CONTROL |
| hCG43681 | Placebo | During-CARE |
| hCG43681 | SMOKE_Yes | During-CARE |
| hCG23227 | SMOKE_No | STATUS3_ALLCASE_VS_LT75CONTROL |
| hCG23227 | ALL | Pre-CARE |
| hCG33721 | ALL | STATUS_ALLCASE_VS_ALLCONTROL |
| hCG33721 | ALL | STATUS3_ALLCASE_VS_LT75CONTROL |
| hCG33721 | FMHX_No | Pre-CARE |
| hCG33721 | HYPERTEN_Yes | Pre-CARE |
| hCG2029091 | ALL | COHORT |
| hCG2029091 | AGE_TERTILE_1 | COHORT |
| hCG2029091 | GLUCOSE_TERTILE_2 | COHORT |
| hCG2029091 | Placebo | COHORT |
| hCG2029091 | HYPERTEN_Yes | COHORT |
| hCG2029091 | ALL | COHORT |
| hCG2029091 | AGE_TERTILE_1 | COHORT |
| hCG2029091 | GLUCOSE_TERTILE_2 | COHORT |
| hCG2029091 | Placebo | COHORT |
| hCG2029091 | HYPERTEN_Yes | COHORT |
| hCG2029091 | SMOKE_Yes | STATUS3_ALLCASE_VS_LT75CONTROL |
| hCG2029091 | ALL | STATUS3_ALLCASE_VS_LT75CONTROL |
| hCG2029091 | ALL | During-CARE |
| hCG2029091 | AGE_TERTILE_1 | During-CARE |
| hCG2029091 | GLUCOSE_TERTILE_2 | During-CARE |
| hCG2029091 | BMI_TERTILE_2 | During-CARE |
| hCG2029091 | BMI_TERTILE_3 | During-CARE |
| hCG2029091 | Placebo | During-CARE |
| hCG2029091 | HYPERTEN_Yes | During-CARE |
| hCG2029091 | SMOKE_Yes | During-CARE |

[0444] TABLE 8

| hCG | Gene Name | Marker | p-value | OR | Mode | Allele | Strata | Status Name |
|---|---|---|---|---|---|---|---|---|
| hCG37242 | SAH | hCV11181829 | 0.01819 | 2.6459 | Dom | T | ALL | During-CARE |
| hCG37242 | SAH | hCV11181829 | 0.0046 | 3.2161 | Dom | T | FMHX_No | Pre-CARE |
| hCG37242 | SAH | hCV11181829 | 0.01913 | 3.852 | Dom | T | GLUCOSE_TERTILE_1 | Pre-CARE |
| hCG37242 | SAH | hCV11181829 | 0.0285 | 2.246 | Dom | T | Male | Pre-CARE |
| hCG37242 | SAH | hCV11181829 | 0.03191 | 2.3096 | Dom | T | Smoke_Yes | Pre-CARE |
| hCG37242 | SAH | hCV11181829 | 0.03442 | 2.6012 | Dom | T | Placebo | Pre-CARE |
| hCG37892 | PTGIS | hCV11194241 | 0.03162 | 0.5767 | Allelic | T | GLUCOSE_TERTILE_2 | During-CARE |
| hCG37892 | PTGIS | hCV11194241 | 0.04112 | 0.7787 | Dom | T | ALL | Pre-CARE |
| hCG37892 | PTGIS | hCV11194241 | 0.04548 | 0.6584 | Dom | T | GLUCOSE_TERTILE_2 | Pre-CARE |
| hCG41527 | APOL3 | hCV1129436 | 0.02274 | 1.778 | Dom | T | GLUCOSE_TERTILE_1 | During-CARE |
| hCG41527 | APOL3 | hCV1129436 | 0.02356 | 1.8253 | Dom | T | BMI_TERTILE_1 | During-CARE |
| hCG41527 | APOL3 | hCV1129436 | 0.04318 | 1.5513 | Dom | T | Pravastatin | During-CARE |
| hCG41527 | APOL3 | hCV1129436 | 0.01963 | 1.3349 | Dom | T | ALL | Pre-CARE |
| hCG41527 | APOL3 | hCV1129436 | 0.00376 | 1.6341 | Dom | T | Pravastatin | Pre-CARE |
| hCG41527 | APOL3 | hCV1129436 | 0.00223 | 2.0094 | Dom | T | GLUCOSE_TERTILE_1 | Pre-CARE |
| hCG40683 | ITGA2 | hCV11481423 | 0.04893 | 0.3966 | Rec | G | AGE_TERTILE_1 | During-CARE |
| hCG40683 | ITGA2 | hCV11481423 | 0.01069 | 0.6315 | Rec | G | ALL | Pre-CARE |
| hCG14925 | TBXAS1 | hCV11623862 | 0.02701 | 14.8065 | Rec | G | Smoke_No | During-CARE |
| hCG14925 | TBXAS1 | hCV11623862 | 0.0283 | 3.7903 | Dom | G | Smoke_No | Pre-CARE |
| hCG33203 | ITGAE | hCV1243283 | 0.01532 | 1.9732 | Rec | G | Placebo | During-CARE |
| hCG33203 | ITGAE | hCV1243283 | 0.04264 | 1.455 | Allelic | G | BMI_TERTILE_2 | During-CARE |
| hCG33203 | ITGAE | hCV1243283 | 0.01278 | 1.5652 | Rec | G | ALL | Pre-CARE |
| hCG33203 | ITGAE | hCV1243283 | 0.01101 | 2.0735 | Rec | G | BMI_TERTILE_2 | Pre-CARE |
| hCG1811168 | CACNA1E | hCV1432822 | 0.0244 | 0.5485 | Rec | G | FMHX_No | During-CARE |
| hCG1811168 | CACNA1E | hCV1432822 | 0.04447 | 0.5891 | Rec | G | HYPERTEN_No | During-CARE |
| hCG1811168 | CACNA1E | hCV1432822 | 0.04058 | 0.8373 | Allelic | G | ALL | Pre-CARE |
| hCG1811168 | CACNA1E | hCV1432822 | 0.00183 | 0.5881 | Dom | G | FMHX_No | Pre-CARE |
| hCG1811168 | CACNA1E | hCV1432822 | 0.03115 | 0.6946 | Dom | G | HYPERTEN_No | Pre-CARE |
| hCG20851 | LNIR | hCV1459753 | 0.03746 | 1.8689 | Dom | T | BMI_TERTILE_1 | During-CARE |
| hCG20851 | LNIR | hCV1459753 | 0.00311 | 2.0269 | Allelic | T | BMI_TERTILE_1 | Pre-CARE |
| hCG17504 | TAP1 | hCV15746839 | 0.00335 | 21.6197 | Rec | A | ALL | During-CARE |
| hCG17504 | TAP1 | hCV15746839 | 0.04091 | 12.6 | Rec | A | AGE_TERTILE_3 | During-CARE |
| hCG17504 | TAP1 | hCV15746839 | 0.0404 | 2.4 | Dom | A | AGE_TERTILE_3 | Pre-CARE |
| hCG16114 | CCR8 | hCV15824045 | 0.04708 | 0.604 | Dom | G | AGE_TERTILE_1 | During-CARE |
| hCG16114 | CCR8 | hCV15824045 | 0.03528 | 0.5842 | Dom | G | AGE_TERTILE_1 | Pre-CARE |
| hCG2033729 | ICAM3, MGC19604 | hCV15852601 | 0.04129 | 3.1336 | Rec | G | ALL | During-CARE |
| hCG2033729 | ICAM3, MGC19604 | hCV15852601 | 0.00415 | 12.3445 | Rec | G | HYPERTEN_No | Pre-CARE |
| hCG2033729 | ICAM3, MGC19604 | hCV15852601 | 0.02325 | 12.9635 | Rec | G | FMHX_Yes | Pre-CARE |
| hCG2033729 | ICAM3, MGC19604 | hCV15852601 | 0.02811 | 8.4231 | Rec | G | GLUCOSE_TERTILE_2 | Pre-CARE |
| hCG2033729 | ICAM3, MGC19604 | hCV15852601 | 0.02844 | 5.4503 | Rec | G | Male | Pre-CARE |
| hCG37690 | CDA | hCV15949699 | 0.02403 | 0.5678 | Dom | C | AGE_TERTILE_1 | During-CARE |
| hCG37690 | CDA | hCV15949699 | 0.03674 | 0.8254 | Allelic | C | ALL | Pre-CARE |
| hCG22888 | RAGE | hCV15954570 | 0.00314 | 2.2178 | Rec | A | ALL | During-CARE |
| hCG22888 | RAGE | hCV15954570 | 0.00979 | 2.7268 | Rec | A | Pravastatin | During-CARE |
| hCG22888 | RAGE | hCV15954570 | 0.00432 | 2.7105 | Rec | A | FMHX_No | During-CARE |
| hCG22888 | RAGE | hCV15954570 | 0.02059 | 2.4681 | Dom | A | Female | Pre-CARE |
| hCG22888 | RAGE | hCV15954570 | 0.02311 | 1.3819 | Allelic | A | Pravastatin | Pre-CARE |
| hCG22888 | RAGE | hCV15954570 | 0.02636 | 1.4284 | Dom | A | FMHX_No | Pre-CARE |
| hCG22888 | RAGE | hCV15954570 | 0.027 | 1.4253 | Dom | A | HYPERTEN_No | Pre-CARE |
| hCG22888 | RAGE | hCV15954570 | 0.03019 | 1.3848 | Dom | A | Smoke_Yes | Pre-CARE |
| hCG38030 | COLEC12 | hCV15976316 | 0.00947 | 1.6675 | Allelic | T | GLUCOSE_TERTILE_2 | During-CARE |
| hCG38030 | COLEC12 | hCV15976316 | 0.01808 | 1.4097 | Allelic | T | GLUCOSE_TERTILE_2 | Pre-CARE |
| hCG21784 | LAMA2 | hCV16047108 | 0.01961 | 1.5764 | Dom | G | ALL | During-CARE |
| hCG21784 | LAMA2 | hCV16047108 | 0.01458 | 18.0233 | Rec | G | GLUCOSE_TERTILE_2 | During-CARE |
| hCG21784 | LAMA2 | hCV16047108 | 0.0388 | 1.8168 | Dom | G | GLUCOSE_TERTILE_2 | Pre-CARE |
| hCG43681 | LTA | hCV16172087 | 0.02538 | 15.0795 | Rec | C | AGE_TERTILE_1 | During-CARE |
| hCG43681 | LTA | hCV16172087 | 0.01038 | 2.2 | Dom | C | AGE_TERTILE_1 | Pre-CARE |
| hCG27811 | BIRC5 | hCV16266313 | 0.02608 | 1.601 | Dom | G | ALL | During-CARE |
| hCG27811 | BIRC5 | hCV16266313 | 0.00015 | 3.4531 | Dom | G | AGE_TERTILE_3 | During-CARE |
| hCG27811 | BIRC5 | hCV16266313 | 0.00272 | 3.1948 | Dom | G | Smoke_No | During-CARE |
| hCG27811 | BIRC5 | hCV16266313 | 0.00525 | 2.6022 | Allelic | G | GLUCOSE_TERTILE_3 | During-CARE |
| hCG27811 | BIRC5 | hCV16266313 | 0.00745 | 2.2955 | Dom | G | BMI_TERTILE_2 | During-CARE |
| hCG27811 | BIRC5 | hCV16266313 | 0.02785 | 1.6231 | Dom | G | Male | During-CARE |
| hCG27811 | BIRC5 | hCV16266313 | 0.0296 | 1.8335 | Dom | G | Placebo | During-CARE |
| hCG27811 | BIRC5 | hCV16266313 | 0.03324 | 1.9616 | Dom | G | FMHX_Yes | During-CARE |
| hCG27811 | BIRC5 | hCV16266313 | 0.03883 | 2.1011 | Dom | G | GLUCOSE_TERTILE_1 | During-CARE |
| hCG27811 | BIRC5 | hCV16266313 | 0.00124 | 4.2532 | Dom | G | Female | Pre-CARE |
| hCG27811 | BIRC5 | hCV16266313 | 0.00485 | 2.0006 | Dom | G | Placebo | Pre-CARE |
| hCG27811 | BIRC5 | hCV16266313 | 0.00613 | 2.0933 | Allelic | G | AGE_TERTILE_2 | Pre-CARE |
| hCG27811 | BIRC5 | hCV16266313 | 0.01018 | 2.1607 | Dom | G | GLUCOSE_TERTILE_1 | Pre-CARE |
| hCG27811 | BIRC5 | hCV16266313 | 0.0149 | 1.5129 | Allelic | G | ALL | Pre-CARE |
| hCG27811 | BIRC5 | hCV16266313 | 0.01499 | 1.9766 | Allelic | G | BMI_TERTILE_1 | Pre-CARE |
| hCG27811 | BIRC5 | hCV16266313 | 0.02147 | 1.6815 | Dom | G | FMHX_No | Pre-CARE |
| hCG27811 | BIRC5 | hCV16266313 | 0.02966 | 1.6063 | Allelic | G | Smoke_Yes | Pre-CARE |
| hCG27811 | BIRC5 | hCV16266313 | 0.03938 | 1.8321 | Allelic | G | GLUCOSE_TERTILE_2 | Pre-CARE |
| hCG20905 | F13A1, FLJ33708 | hCV1639938 | 0.03456 | 0.6743 | Allelic | C | Pravastatin | During-CARE |
| hCG20905 | F13A1, FLJ33708 | hCV1639938 | 0.0125 | 0.6988 | Allelic | C | Pravastatin | Pre-CARE |
| hCG23161 | MPL | hCV1770462 | 0.04735 | 2.387 | Allelic | G | GLUCOSE_TERTILE_1 | During-CARE |
| hCG23161 | MPL | hCV1770462 | 0.00165 | 3.6287 | Dom | G | GLUCOSE_TERTILE_1 | Pre-CARE |
| hCG39430 | CRP | hCV177490 | 0.0252 | 1.5463 | Dom | G | ALL | During-CARE |
| hCG39430 | CRP | hCV177490 | 0.03131 | 5.3333 | Rec | G | Smoke_Yes | Pre-CARE |
| hCG39430 | CRP | hCV177490 | 0.04799 | 9.8378 | Rec | G | AGE_TERTILE_3 | Pre-CARE |
| hCG14759 | CD86 | hCV22271672 | 0.02302 | 15.5957 | Rec | G | BMI_TERTILE_1 | During-CARE |
| hCG14759 | CD86 | hCV22271672 | 0.01529 | 1.4858 | Dom | G | ALL | Pre-CARE |
| hCG22159 | PDGFRA | hCV22271841 | 0.0209 | 3.2843 | Rec | T | ALL | During-CARE |
| hCG22159 | PDGFRA | hCV22271841 | 0.001 | 9.6964 | Rec | T | Placebo | During-CARE |
| hCG22159 | PDGFRA | hCV22271841 | 0.0267 | 8.514 | Rec | T | Placebo | Pre-CARE |
| hCG22159 | PDGFRA | hCV22271841 | 0.03278 | 13.8571 | Rec | T | Female | Pre-CARE |
| hCG1978757 | SERPINB8 | hCV22273670 | 0.01298 | 18.648 | Rec | G | GLUCOSE_TERTILE_2 | During-CARE |
| hCG1978757 | SERPINB8 | hCV22273670 | 0.02551 | 5.6563 | Rec | G | GLUCOSE_TERTILE_2 | Pre-CARE |
| hCG1643976 | MC3R | hCV22274632 | 0.03609 | 1.439 | Dom | C | ALL | During-CARE |
| hCG1643976 | MC3R | hCV22274632 | 0.02796 | 1.8758 | Dom | C | AGE_TERTILE_2 | During-CARE |
| hCG1643976 | MC3R | hCV22274632 | 0.01439 | 1.9105 | Dom | C | AGE_TERTILE_2 | Pre-CARE |
| hCG40683 | ITGA2 | hCV2390370 | 0.04893 | 0.3966 | Rec | T | AGE_TERTILE_1 | During-CARE |
| hCG40683 | ITGA2 | hCV2390370 | 0.01076 | 0.6289 | Rec | T | ALL | Pre-CARE |
| hCG36908 | SLC11A2 | hCV2404043 | 0.02151 | 2.3549 | Allelic | T | GLUCOSE_TERTILE_1 | During-CARE |
| hCG36908 | SLC11A2 | hCV2404043 | 0.01348 | 15.4348 | Rec | T | GLUCOSE_TERTILE_1 | Pre-CARE |
| hCG38869 | ECE1 | hCV2464666 | 0.00545 | 3.8607 | Rec | G | ALL | During-CARE |
| hCG38869 | ECE1 | hCV2464666 | 0.01529 | 14.8419 | Rec | G | AGE_TERTILE_2 | Pre-CARE |
| hCG38869 | ECE1 | hCV2464666 | 0.02808 | 9.5333 | Rec | G | Female | Pre-CARE |
| hCG38869 | ECE1 | hCV2464666 | 0.04546 | 1.9717 | Allelic | G | Smoke_Yes | Pre-CARE |
| hCG25068 | NPPA | hCV2482592 | 0.04858 | 1.5821 | Allelic | G | BMI_TERTILE_1 | During-CARE |
| hCG25068 | NPPA | hCV2482592 | 0.02338 | 1.6922 | Dom | G | FMHX_Yes | During-CARE |
| hCG25068 | NPPA | hCV2482592 | 0.0414 | 1.5044 | Allelic | G | BMI_TERTILE_1 | Pre-CARE |
| hCG25068 | NPPA | hCV2482592 | 0.02394 | 1.5549 | Dom | G | FMHX_Yes | Pre-CARE |
| hCG37187 | NPC1 | hCV25472673 | 0.00834 | 1.4341 | Allelic | T | Placebo | During-CARE |
| hCG37187 | NPC1 | hCV25472673 | 0.0325 | 1.6625 | Rec | T | Placebo | Pre-CARE |
| hCG2026185 | none | hCV25472944 | 0.03529 | 1.5498 | Allelic | C | GLUCOSE_TERTILE_2 | During-CARE |
| hCG2026185 | none | hCV25472944 | 0.03318 | 2.0096 | Rec | C | GLUCOSE_TERTILE_2 | Pre-CARE |
| hCG1813428 | FN1 | hCV25592965 | 0.03742 | 13.0158 | Rec | T | ALL | During-CARE |
| hCG1813428 | FN1 | hCV25592965 | 0.02519 | 15.1192 | Rec | T | AGE_TERTILE_1 | During-CARE |
| hCG1813428 | FN1 | hCV25592965 | 0.00213 | 4.5272 | Dom | T | AGE_TERTILE_1 | Pre-CARE |
| hCG25049 | SLC21A3 | hCV25605897 | 0.01157 | 0.3192 | Dom | T | Pravastatin | During-CARE |
| hCG25049 | SLC21A3 | hCV25605897 | 0.00019 | 0.437 | Allelic | T | ALL | Pre-CARE |
| hCG25049 | SLC21A3 | hCV25605897 | 0.00273 | 0.3812 | Allelic | T | Pravastatin | Pre-CARE |
| hCG27613 | TBC1D8 | hCV25607108 | 0.00984 | 1.5692 | Rec | G | ALL | During-CARE |
| hCG27613 | TBC1D8 | hCV25607108 | 0.00811 | 2.1316 | Rec | G | BMI_TERTILE_3 | During-CARE |
| hCG27613 | TBC1D8 | hCV25607108 | 0.02607 | 1.82 | Rec | G | BMI_TERTILE_3 | Pre-CARE |
| hCG27991 | SLC10A2 | hCV25608818 | 0.03768 | 12.9802 | Rec | G | ALL | During-CARE |
| hCG27991 | SLC10A2 | hCV25608818 | 0.04518 | 4.2424 | Dom | G | Smoke_Yes | Pre-CARE |
| hCG38060 | LBP | hCV25617571 | 0.0407 | 6.1429 | Rec | T | GLUCOSE_TERTILE_2 | During-CARE |
| hCG38060 | LBP | hCV25617571 | 0.01874 | 13.9354 | Rec | T | GLUCOSE_TERTILE_2 | Pre-CARE |
| hCG38107 | HNF4A, FLJ39654 | hCV25618313 | 0.04162 | 1.7593 | Dom | T | ALL | During-CARE |
| hCG38107 | HNF4A, FLJ39654 | hCV25618313 | 0.02774 | 2.1086 | Dom | T | Placebo | During-CARE |
| hCG38107 | HNF4A, FLJ39654 | hCV25618313 | 0.02483 | 2.1161 | Dom | T | Placebo | Pre-CARE |
| hCG38107 | HNF4A, FLJ39654 | hCV25618313 | 0.02845 | 14.4834 | Rec | T | AGE_TERTILE_1 | Pre-CARE |
| hCG38107 | HNF4A, FLJ39654 | hCV25618313 | 0.03253 | 2.1809 | Dom | T | AGE_TERTILE_3 | Pre-CARE |
| hCG38891 | ABCC6 | hCV25620774 | 0.03198 | 2.1217 | Dom | T | ALL | During-CARE |
| hCG38891 | ABCC6 | hCV25620774 | 0.00662 | 7.7 | Dom | T | Smoke_No | Pre-CARE |
| hCG41170 | UQCRC1 | hCV25627205 | 0.0248 | 15.2013 | Rec | T | AGE_TERTILE_1 | During-CARE |
| hCG41170 | UQCRC1 | hCV25627205 | 0.04413 | 2.4083 | Dom | T | AGE_TERTILE_1 | Pre-CARE |
| hCG41774 | LAMA5 | hCV25629492 | 0.01859 | 0.6071 | Dom | G | Pravastatin | During-CARE |
| hCG41774 | LAMA5 | hCV25629492 | 0.03508 | 0.7023 | Dom | G | Pravastatin | Pre-CARE |
| hCG96721 | LAMB2 | hCV25630499 | 0.03756 | 12.996 | Rec | T | ALL | During-CARE |
| hCG96721 | LAMB2 | hCV25630499 | 0.02516 | 15.086 | Rec | T | Smoke_Yes | During-CARE |
| hCG96721 | LAMB2 | hCV25630499 | 0.02804 | 14.5245 | Rec | T | HYPERTEN_No | During-CARE |
| hCG96721 | LAMB2 | hCV25630499 | 0.03716 | 13.0664 | Rec | T | FMHX_No | During-CARE |
| hCG96721 | LAMB2 | hCV25630499 | 0.03999 | 12.6796 | Rec | T | Male | During-CARE |
| hCG96721 | LAMB2 | hCV25630499 | 0.01389 | 15.2128 | Rec | T | HYPERTEN_No | Pre-CARE |
| hCG96721 | LAMB2 | hCV25630499 | 0.01645 | 14.5181 | Rec | T | BMI_TERTILE_3 | Pre-CARE |
| hCG96721 | LAMB2 | hCV25630499 | 0.02132 | 2.3877 | Allelic | T | Smoke_Yes | Pre-CARE |
| hCG96721 | LAMB2 | hCV25630499 | 0.02525 | 8.6 | Rec | T | ALL | Pre-CARE |
| hCG96721 | LAMB2 | hCV25630499 | 0.02867 | 14.4437 | Rec | T | AGE_TERTILE_1 | Pre-CARE |
| hCG96721 | LAMB2 | hCV25630499 | 0.03084 | 8.1341 | Rec | T | Male | Pre-CARE |
| hCG14819 | CYP1B1 | hCV25632546 | 0.00233 | 5.279 | Dom | T | ALL | During-CARE |
| hCG14819 | CYP1B1 | hCV25632546 | 0.00113 | 15.6289 | Dom | T | GLUCOSE_TERTILE_3 | During-CARE |
| hCG14819 | CYP1B1 | hCV25632546 | 0.00226 | 6.1731 | Dom | T | HYPERTEN_No | During-CARE |
| hCG14819 | CYP1B1 | hCV25632546 | 0.003 | 8.7442 | Dom | T | AGE_TERTILE_3 | During-CARE |
| hCG14819 | CYP1B1 | hCV25632546 | 0.00398 | 6.8127 | Dom | T | Smoke_Yes | During-CARE |
| hCG14819 | CYP1B1 | hCV25632546 | 0.00937 | 5.1 | Allelic | T | Male | During-CARE |
| hCG14819 | CYP1B1 | hCV25632546 | 0.01323 | 8.7733 | Allelic | T | FMHX_No | During-CARE |
| hCG14819 | CYP1B1 | hCV25632546 | 0.01688 | 6.8349 | Allelic | T | Pravastatin | During-CARE |
| hCG14819 | CYP1B1 | hCV25632546 | 0.02412 | 15.4615 | Dom | T | Female | During-CARE |
| hCG14819 | CYP1B1 | hCV25632546 | 0.02519 | 15.1192 | Rec | T | AGE_TERTILE_1 | During-CARE |
| hCG14819 | CYP1B1 | hCV25632546 | 0.03153 | 5.7465 | Dom | T | Placebo | During-CARE |
| hCG14819 | CYP1B1 | hCV25632546 | 0.03474 | 8.7073 | Dom | T | BMI_TERTILE_2 | During-CARE |
| hCG14819 | CYP1B1 | hCV25632546 | 0.03951 | 5.0653 | Allelic | T | BMI_TERTILE_3 | During-CARE |
| hCG14819 | CYP1B1 | hCV25632546 | 0.00135 | 9.5565 | Dom | T | Smoke_No | Pre-CARE |
| hCG14819 | CYP1B1 | hCV25632546 | 0.00648 | 7.161 | Dom | T | Placebo | Pre-CARE |
| hCG14819 | CYP1B1 | hCV25632546 | 0.00823 | 5.4088 | Dom | T | HYPERTEN_Yes | Pre-CARE |
| hCG14819 | CYP1B1 | hCV25632546 | 0.01892 | 9.4038 | Dom | T | GLUCOSE_TERTILE_1 | Pre-CARE |
| hCG14819 | CYP1B1 | hCV25632546 | 0.03278 | 13.8571 | Dom | T | Female | Pre-CARE |
| hCG14819 | CYP1B1 | hCV25632546 | 0.04573 | 2.5706 | Dom | T | ALL | Pre-CARE |
| hCG15079 | LAPTM5 | hCV25632652 | 0.0106 | 1.4312 | Dom | T | ALL | During-CARE |
| hCG15079 | LAPTM5 | hCV25632652 | 0.04595 | 1.5619 | Dom | T | FMHX_Yes | During-CARE |
| hCG15079 | LAPTM5 | hCV25632652 | 0.02209 | 2.3892 | Rec | T | FMHX_Yes | Pre-CARE |
| hCG15079 | LAPTM5 | hCV25632652 | 0.03614 | 2.3746 | Rec | T | AGE_TERTILE_1 | Pre-CARE |
| hCG17143 | APRG1, ITGA9 | hCV25644901 | 0.03779 | 12.9645 | Rec | G | ALL | During-CARE |
| hCG17143 | APRG1, ITGA9 | hCV25644901 | 0.02426 | 2.1375 | Dom | G | BMI_TERTILE_3 | Pre-CARE |
| hCG2039603 | IL16 | hCV25646461 | 0.02265 | 15.6809 | Rec | T | BMI_TERTILE_1 | During-CARE |
| hCG2039603 | IL16 | hCV25646461 | 0.01077 | 2.0246 | Dom | T | BMI_TERTILE_1 | Pre-CARE |
| hCG1644130 | HLA-DPA1 | hCV25651174 | 0.02954 | 1.4094 | Allelic | G | Pravastatin | During-CARE |
| hCG1644130 | HLA-DPA1 | hCV25651174 | 0.0369 | 1.4164 | Dom | G | Pravastatin | Pre-CARE |
| hCG1766487 | PPOX | hCV25652722 | 0.03831 | 12.8958 | Rec | G | ALL | During-CARE |
| hCG1766487 | PPOX | hCV25652722 | 0.00523 | 6.4074 | Allelic | G | BMI_TERTILE_2 | During-CARE |
| hCG1766487 | PPOX | hCV25652722 | 0.02049 | 3.2448 | Dom | G | HYPERTEN_No | During-CARE |
| hCG1766487 | PPOX | hCV25652722 | 0.02558 | 15.0403 | Rec | G | AGE_TERTILE_1 | During-CARE |
| hCG1766487 | PPOX | hCV25652722 | 0.02619 | 14.8894 | Rec | G | Pravastatin | During-CARE |
| hCG1766487 | PPOX | hCV25652722 | 0.03924 | 12.7874 | Rec | G | FMHX_No | During-CARE |
| hCG1766487 | PPOX | hCV25652722 | 0.04082 | 12.5751 | Rec | G | Male | During-CARE |
| hCG1766487 | PPOX | hCV25652722 | 0.00798 | 5.4416 | Dom | G | HYPERTEN_Yes | Pre-CARE |
| hCG1766487 | PPOX | hCV25652722 | 0.01527 | 5.8545 | Dom | G | AGE_TERTILE_3 | Pre-CARE |
| hCG1766487 | PPOX | hCV25652722 | 0.0201 | 4.7583 | Dom | G | GLUCOSE_TERTILE_3 | Pre-CARE |
| hCG1766487 | PPOX | hCV25652722 | 0.02391 | 2.614 | Dom | G | ALL | Pre-CARE |
| hCG1766487 | PPOX | hCV25652722 | 0.02482 | 5.7 | Dom | G | BMI_TERTILE_1 | Pre-CARE |
| hCG1766487 | PPOX | hCV25652722 | 0.03648 | 5.15 | Dom | G | FMHX_Yes | Pre-CARE |
| hCG1766487 | PPOX | hCV25652722 | 0.03828 | 2.7281 | Dom | G | Male | Pre-CARE |
| hCG1766487 | PPOX | hCV25652722 | 0.04651 | 2.815 | Dom | G | Placebo | Pre-CARE |
| hCG24742 | KIAA0329 | hCV25751017 | 0.00921 | 2.1711 | Dom | A | ALL | During-CARE |
| hCG24742 | KIAA0329 | hCV25751017 | 0.00253 | 3.9186 | Dom | A | AGE_TERTILE_1 | During-CARE |
| hCG24742 | KIAA0329 | hCV25751017 | 0.0039 | 2.7196 | Dom | A | Placebo | During-CARE |
| hCG24742 | KIAA0329 | hCV25751017 | 0.00874 | 2.631 | Dom | A | Smoke_Yes | During-CARE |
| hCG24742 | KIAA0329 | hCV25751017 | 0.01075 | 2.2594 | Dom | A | Male | During-CARE |
| hCG24742 | KIAA0329 | hCV25751017 | 0.013 | 3.1818 | Dom | A | BMI_TERTILE_3 | During-CARE |
| hCG24742 | KIAA0329 | hCV25751017 | 0.01342 | 2.6187 | Dom | A | HYPERTEN_No | During-CARE |
| hCG24742 | KIAA0329 | hCV25751017 | 0.04159 | 2.4498 | Dom | A | FMHX_Yes | During-CARE |
| hCG24742 | KIAA0329 | hCV25751017 | 0.04823 | 2.8762 | Dom | A | GLUCOSE_TERTILE_2 | During-CARE |
| hCG24742 | KIAA0329 | hCV25751017 | 0.00021 | 3.7849 | Dom | A | HYPERTEN_Yes | Pre-CARE |
| hCG24742 | KIAA0329 | hCV25751017 | 0.00972 | 2.5963 | Dom | A | GLUCOSE_TERTILE_3 | Pre-CARE |
| hCG24742 | KIAA0329 | hCV25751017 | 0.02797 | 1.84 | Dom | A | Smoke_Yes | Pre-CARE |
| hCG24742 | KIAA0329 | hCV25751017 | 0.03077 | 2.3483 | Dom | A | AGE_TERTILE_3 | Pre-CARE |
| hCG24742 | KIAA0329 | hCV25751017 | 0.0472 | 1.6493 | Allelic | A | ALL | Pre-CARE |
| hCG37774 | MTP | hCV25921533 | 0.02675 | 2.4759 | Dom | G | ALL | During-CARE |
| hCG37774 | MTP | hCV25921533 | 0.0264 | 3.5746 | Dom | G | Pravastatin | Pre-CARE |
| hCG37774 | MTP | hCV25921533 | 0.04684 | 3.5531 | Dom | G | GLUCOSE_TERTILE_2 | Pre-CARE |
| hCG1644073 | MARK3 | hCV25926178 | 0.01201 | 1.2939 | Allelic | G | ALL | During-CARE |
| hCG1644073 | MARK3 | hCV25926178 | 0.02801 | 1.3391 | Allelic | G | FMHX_No | During-CARE |
| hCG1644073 | MARK3 | hCV25926178 | 0.01328 | 2.0095 | Rec | G | BMI_TERTILE_2 | Pre-CARE |
| hCG1644073 | MARK3 | hCV25926178 | 0.03922 | 1.4168 | Dom | G | FMHX_No | Pre-CARE |
| hCG23227 | PTPRJ | hCV25943544 | 0.00904 | 0.3289 | Rec | G | BMI_TERTILE_2 | During-CARE |
| hCG23227 | PTPRJ | hCV25943544 | 0.00931 | 0.6927 | Allelic | G | HYPERTEN_No | During-CARE |
| hCG23227 | PTPRJ | hCV25943544 | 0.01973 | 0.5257 | Rec | G | Placebo | During-CARE |
| hCG23227 | PTPRJ | hCV25943544 | 0.02428 | 0.376 | Rec | G | GLUCOSE_TERTILE_1 | During-CARE |
| hCG23227 | PTPRJ | hCV25943544 | 0.02713 | 0.5179 | Allelic | G | Female | During-CARE |
| hCG23227 | PTPRJ | hCV25943544 | 0.03857 | 0.7211 | Rec | G | ALL | Pre-CARE |
| hCG38457 | AMPD1 | hCV25952807 | 0.00416 | 2.8107 | Dom | T | GLUCOSE_TERTILE_2 | During-CARE |
| hCG38457 | AMPD1 | hCV25952807 | 0.00395 | 1.9133 | Dom | T | ALL | Pre-CARE |
| hCG2026185 | CELL | hCV2603661 | 0.02421 | 2.5381 | Rec | T | AGE_TERTILE_1 | During-CARE |
| hCG2026185 | CELL | hCV2603661 | 0.0459 | 2.1859 | Rec | T | AGE_TERTILE_1 | Pre-CARE |
| hCG38895 | NDE1 | hCV2614880 | 0.01297 | 0.4303 | Rec | C | GLUCOSE_TERTILE_1 | During-CARE |
| hCG38895 | NDE1 | hCV2614880 | 0.00374 | 0.6298 | Rec | C | ALL | Pre-CARE |
| hCG1647381 | CCL24 | hCV2633049 | 0.01536 | 0.6129 | Dom | T | Placebo | During-CARE |
| hCG1647381 | CCL24 | hCV2633049 | 0.00475 | 0.6225 | Allelic | T | Placebo | Pre-CARE |
| hCG1789838 | ABCA1 | hCV2741051 | 0.02017 | 0.6919 | Allelic | T | Placebo | During-CARE |
| hCG1789838 | ABCA1 | hCV2741051 | 0.03646 | 0.6948 | Dom | T | Placebo | Pre-CARE |
| hCG1789838 | ABCA1 | hCV2741104 | 0.01942 | 0.5838 | Dom | T | GLUCOSE_TERTILE_3 | During-CARE |
| hCG1789838 | ABCA1 | hCV2741104 | 0.03262 | 0.6617 | Dom | T | Placebo | During-CARE |
| hCG1789838 | ABCA1 | hCV2741104 | 0.02491 | 0.7932 | Allelic | T | ALL | Pre-CARE |
| hCG1789838 | ABCA1 | hCV2741104 | 0.00028 | 0.5035 | Dom | T | Placebo | Pre-CARE |
| hCG1984906 | IL4R | hCV2769554 | 0.01624 | 0.4692 | Rec | G | GLUCOSE_TERTILE_3 | During-CARE |
| hCG1984906 | IL4R | hCV2769554 | 0.00478 | 0.6638 | Allelic | G | GLUCOSE_TERTILE_3 | Pre-CARE |
| hCG1641222 | SERPINA11 | hCV2786283 | 0.01933 | 1.9405 | Rec | T | GLUCOSE_TERTILE_3 | During-CARE |
| hCG1641222 | SERPINA11 | hCV2786283 | 0.02424 | 1.7985 | Rec | T | Pravastatin | During-CARE |
| hCG1641222 | SERPINA11 | hCV2786283 | 0.03636 | 1.8686 | Rec | T | AGE_TERTILE_3 | During-CARE |
| hCG1641222 | SERPINA11 | hCV2786283 | 0.03768 | 1.2563 | Allelic | T | Male | During-CARE |
| hCG1641222 | SERPINA11 | hCV2786283 | 0.04029 | 1.198 | Allelic | T | ALL | Pre-CARE |
| hCG401253 | COL6A2 | hCV2811372 | 0.03399 | 0.8158 | Dom | G | ALL | During-CARE |
| hCG401253 | COL6A2 | hCV2811372 | 0.02785 | 0.7828 | Rec | G | Smoke_Yes | Pre-CARE |
| hCG1646681 | TLR10 | hCV309084 | 0.03395 | 0.24 | Rec | C | ALL | During-CARE |
| hCG1646681 | TLR10 | hCV309084 | 0.00674 | 0.4407 | Dom | C | AGE_TERTILE_1 | Pre-CARE |
| hCG1646681 | TLR10 | hCV309084 | 0.00994 | 0.5165 | Dom | C | GLUCOSE_TERTILE_1 | Pre-CARE |
| hCG1981155 | FBN2 | hCV3186502 | 0.04613 | 12.0291 | Rec | G | GLUCOSE_TERTILE_1 | During-CARE |
| hCG1981155 | FBN2 | hCV3186502 | 0.00114 | 25.48 | Rec | G | GLUCOSE_TERTILE_1 | Pre-CARE |
| hCG17143 | APRG1, ITGA9 | hCV3215409 | 0.02347 | 0.4602 | Rec | G | Pravastatin | During-CARE |
| hCG17143 | APRG1, ITGA9 | hCV3215409 | 0.01325 | 0.663 | Rec | G | ALL | Pre-CARE |
| hCG19652 | MYH11 | hCV334226 | 0.04197 | 2.035 | Rec | G | ALL | During-CARE |
| hCG19652 | MYH11 | hCV334226 | 0.01034 | 10.5161 | Rec | G | Smoke_Yes | During-CARE |
| hCG19652 | MYH11 | hCV334226 | 0.01691 | 2.8301 | Rec | G | HYPERTEN_No | During-CARE |
| hCG19652 | MYH11 | hCV334226 | 0.01953 | 5.1111 | Rec | G | GLUCOSE_TERTILE_1 | During-CARE |
| hCG19652 | MYH11 | hCV334226 | 0.02531 | 2.0479 | Dom | G | Smoke_No | During-CARE |
| hCG19652 | MYH11 | hCV334226 | 0.03006 | 1.398 | Allelic | G | FMHX_No | During-CARE |
| hCG19652 | MYH11 | hCV334226 | 0.0375 | 1.4819 | Allelic | G | BMI_TERTILE_3 | During-CARE |
| hCG19652 | MYH11 | hCV334226 | 0.0044 | 2.0504 | Dom | G | AGE_TERTILE_1 | Pre-CARE |
| hCG19652 | MYH11 | hCV334226 | 0.0046 | 1.7939 | Dom | G | GLUCOSE_TERTILE_2 | Pre-CARE |
| hCG19652 | MYH11 | hCV334226 | 0.02176 | 1.4511 | Dom | G | FMHX_No | Pre-CARE |
| hCG19652 | MYH11 | hCV334226 | 0.04629 | 1.278 | Dom | G | ALL | Pre-CARE |
| hCG2002097 | PECAM1 | hCV435368 | 0.01763 | 1.2686 | Allelic | C | ALL | During-CARE |
| hCG2002097 | PECAM1 | hCV435368 | 0.00283 | 1.8054 | Rec | C | FMHX_No | During-CARE |
| hCG2002097 | PECAM1 | hCV435368 | 0.00658 | 1.5923 | Allelic | C | GLUCOSE_TERTILE_1 | During-CARE |
| hCG2002097 | PECAM1 | hCV435368 | 0.00733 | 1.4384 | Allelic | C | HYPERTEN_No | During-CARE |
| hCG2002097 | PECAM1 | hCV435368 | 0.00753 | 1.6056 | Allelic | C | BMI_TERTILE_2 | During-CARE |
| hCG2002097 | PECAM1 | hCV435368 | 0.01005 | 1.7989 | Dom | C | Placebo | During-CARE |
| hCG2002097 | PECAM1 | hCV435368 | 0.0146 | 1.7845 | Rec | C | Pravastatin | During-CARE |
| hCG2002097 | PECAM1 | hCV435368 | 0.02275 | 1.2736 | Allelic | C | Male | During-CARE |
| hCG2002097 | PECAM1 | hCV435368 | 0.00054 | 1.635 | Allelic | C | GLUCOSE_TERTILE_3 | Pre-CARE |
| hCG2002097 | PECAM1 | hCV435368 | 0.00069 | 1.6513 | Allelic | C | BMI_TERTILE_3 | Pre-CARE |
| hCG2002097 | PECAM1 | hCV435368 | 0.00074 | 2.1266 | Rec | C | AGE_TERTILE_2 | Pre-CARE |
| hCG2002097 | PECAM1 | hCV435368 | 0.00856 | 1.3235 | Allelic | C | Smoke_Yes | Pre-CARE |
| hCG2002097 | PECAM1 | hCV435368 | 0.01096 | 1.256 | Allelic | C | Male | Pre-CARE |
| hCG2002097 | PECAM1 | hCV435368 | 0.01177 | 1.3314 | Allelic | C | HYPERTEN_No | Pre-CARE |
| hCG2002097 | PECAM1 | hCV435368 | 0.01387 | 1.2353 | Allelic | C | ALL | Pre-CARE |
| hCG2002097 | PECAM1 | hCV435368 | 0.02701 | 1.3129 | Allelic | C | Placebo | Pre-CARE |
| hCG2002097 | PECAM1 | hCV435368 | 0.0286 | 1.2842 | Allelic | C | FMHX_No | Pre-CARE |
| hCG1739048 | IL22RA1 | hCV440166 | 0.00089 | 0.2805 | Dom | G | Female | During-CARE |
| hCG1739048 | IL22RA1 | hCV440166 | 0.00896 | 0.3614 | Dom | G | Female | Pre-CARE |
| hCG1730701 | MMP27 | hCV7492601 | 0.00852 | 2.2587 | Dom | A | GLUCOSE_TERTILE_1 | During-CARE |
| hCG1730701 | MMP27 | hCV7492601 | 0.03638 | 1.5708 | Dom | A | Smoke_Yes | During-CARE |
| hCG1730701 | MMP27 | hCV7492601 | 0.0278 | 1.3681 | Rec | A | ALL | Pre-CARE |
| hCG1730701 | MMP27 | hCV7492601 | 0.01707 | 1.5277 | Rec | A | Smoke_Yes | Pre-CARE |
| hCG37044 | PLAB | hCV7494817 | 0.00789 | 2.9652 | Rec | T | GLUCOSE_TERTILE_2 | During-CARE |
| hCG37044 | PLAB | hCV7494817 | 0.02601 | 2.5403 | Rec | T | FMHX_Yes | During-CARE |
| hCG37044 | PLAB | hCV7494817 | 0.04434 | 1.2755 | Dom | T | ALL | Pre-CARE |
| hCG37044 | PLAB | hCV7494817 | 0.02834 | 1.4983 | Dom | T | FMHX_Yes | Pre-CARE |
| hCG2023558 | TF | hCV7505275 | 0.03439 | 1.5832 | Dom | T | Pravastatin | During-CARE |
| hCG2023558 | TF | hCV7505275 | 0.04592 | 1.2507 | Allelic | T | ALL | Pre-CARE |
| hCG43681 | LTA | hCV7514870 | 0.03133 | 1.3568 | Dom | C | ALL | During-CARE |
| hCG43681 | LTA | hCV7514870 | 0.00579 | 1.4664 | Allelic | C | Placebo | During-CARE |
| hCG43681 | LTA | hCV7514870 | 0.01694 | 1.5739 | Dom | C | Smoke_Yes | During-CARE |
| hCG43681 | LTA | hCV7514870 | 0.01804 | 1.438 | Dom | C | Male | During-CARE |
| hCG43681 | LTA | hCV7514870 | 0.02986 | 1.4939 | Dom | C | FMHX_No | During-CARE |
| hCG43681 | LTA | hCV7514870 | 0.03305 | 1.5173 | Dom | C | HYPERTEN_No | During-CARE |
| hCG43681 | LTA | hCV7514870 | 0.03717 | 1.6553 | Dom | C | AGE_TERTILE_3 | During-CARE |
| hCG43681 | LTA | hCV7514870 | 0.00411 | 2.2277 | Rec | C | BMI_TERTILE_2 | Pre-CARE |
| hCG43681 | LTA | hCV7514870 | 0.01611 | 1.8673 | Rec | C | HYPERTEN_Yes | Pre-CARE |
| hCG43681 | LTA | hCV7514870 | 0.03341 | 1.5625 | Rec | C | Smoke_Yes | Pre-CARE |
| hCG43681 | LTA | hCV7514870 | 0.03346 | 1.7106 | Rec | C | Placebo | Pre-CARE |
| hCG43681 | LTA | hCV7514870 | 0.04831 | 1.4136 | Rec | C | ALL | Pre-CARE |
| hCG42697 | SLC9A3R2 | hCV7577801 | 0.03675 | 0.7665 | Allelic | T | ALL | During-CARE |
| hCG42697 | SLC9A3R2 | hCV7577801 | 0.03908 | 0.6252 | Allelic | T | GLUCOSE_TERTILE_1 | During-CARE |
| hCG42697 | SLC9A3R2 | hCV7577801 | 0.03065 | 0.5953 | Dom | T | GLUCOSE_TERTILE_1 | Pre-CARE |
| hCG38107 | HNF4A, FLJ39654 | hCV7591528 | 0.04368 | 1.7474 | Dom | A | ALL | During-CARE |
| hCG38107 | HNF4A, FLJ39654 | hCV7591528 | 0.02884 | 2.0903 | Dom | A | Placebo | During-CARE |
| hCG38107 | HNF4A, FLJ39654 | hCV7591528 | 0.04271 | 1.9515 | Dom | A | Placebo | Pre-CARE |
| hCG1990887 | CTSB | hCV8339788 | 0.01271 | 1.5833 | Rec | G | ALL | During-CARE |
| hCG1990887 | CTSB | hCV8339788 | 0.00398 | 2.4373 | Rec | G | AGE_TERTILE_1 | Pre-CARE |
| hCG27217 | ANPEP | hCV8722613 | 0.04591 | 1.4558 | Dom | T | Smoke_Yes | During-CARE |
| hCG27217 | ANPEP | hCV8722613 | 0.03941 | 1.62 | Rec | T | Smoke_Yes | Pre-CARE |
| hCG1733963 | IL1RN | hCV8737990 | 0.03372 | 2.3917 | Rec | T | BMI_TERTILE_1 | During-CARE |
| hCG1733963 | IL1RN | hCV8737990 | 0.02275 | 1.4433 | Allelic | T | BMI_TERTILE_1 | Pre-CARE |
| hCG36934 | ADRB2 | hCV8950503 | 0.03779 | 12.9645 | Rec | T | ALL | During-CARE |
| hCG36934 | ADRB2 | hCV8950503 | 0.00397 | 12.8727 | Dom | T | Smoke_Yes | Pre-CARE |
| hCG36934 | ADRB2 | hCV8950503 | 0.00552 | 5.0704 | Dom | T | AGE_TERTILE_1 | Pre-CARE |
| hCG36934 | ADRB2 | hCV8950503 | 0.03483 | 3.4016 | Dom | T | GLUCOSE_TERTILE_2 | Pre-CARE |
| hCG32995 | IMPG1 | hCV9055799 | 0.02635 | 0.7954 | Allelic | G | ALL | During-CARE |
| hCG32995 | IMPG1 | hCV9055799 | 0.00308 | 0.2333 | Rec | G | BMI_TERTILE_2 | During-CARE |
| hCG32995 | IMPG1 | hCV9055799 | 0.00157 | 0.2946 | Dom | G | Female | During-CARE |
| hCG32995 | IMPG1 | hCV9055799 | 0.00034 | 0.5754 | Allelic | G | BMI_TERTILE_2 | Pre-CARE |
| hCG32995 | IMPG1 | hCV9055799 | 0.00222 | 0.6556 | Allelic | G | FMHX_Yes | Pre-CARE |
| hCG32995 | IMPG1 | hCV9055799 | 0.00682 | 0.4686 | Dom | G | Smoke_No | Pre-CARE |
| hCG32995 | IMPG1 | hCV9055799 | 0.02136 | 0.481 | Allelic | G | Female | Pre-CARE |
| hCG1642498 | FCGR2A | hCV9077561 | 0.03998 | 1.5938 | Dom | A | Placebo | During-CARE |
| hCG1642498 | FCGR2A | hCV9077561 | 0.03628 | 1.4929 | Rec | A | Placebo | Pre-CARE |
| hCG15321 | CCR5 | hCV9698595 | 0.03437 | 8.6429 | Rec | T | ALL | During-CARE |
| hCG15321 | CCR5 | hCV9698595 | 0.00604 | 19.007 | Rec | T | Placebo | During-CARE |
| hCG15321 | CCR5 | hCV9698595 | 0.00625 | 18.9196 | Rec | T | GLUCOSE_TERTILE_3 | During-CARE |
| hCG15321 | CCR5 | hCV9698595 | 0.01204 | 3.4854 | Dom | T | GLUCOSE_TERTILE_2 | During-CARE |
| hCG15321 | CCR5 | hCV9698595 | 0.02265 | 15.6809 | Rec | T | BMI_TERTILE_1 | During-CARE |
| hCG15321 | CCR5 | hCV9698595 | 0.02885 | 14.3755 | Rec | T | HYPERTEN_No | During-CARE |
| hCG15321 | CCR5 | hCV9698595 | 0.03394 | 8.7067 | Rec | T | FMHX_No | During-CARE |
| hCG15321 | CCR5 | hCV9698595 | 0.03726 | 8.4384 | Rec | T | Male | During-CARE |
| hCG15321 | CCR5 | hCV9698595 | 0.04014 | 12.7006 | Rec | T | BMI_TERTILE_2 | During-CARE |
| hCG15321 | CCR5 | hCV9698595 | 0.04101 | 12.5866 | Rec | T | AGE_TERTILE_3 | During-CARE |
| hCG15321 | CCR5 | hCV9698595 | 0.04975 | 11.6057 | Rec | T | AGE_TERTILE_2 | During-CARE |
| hCG15321 | CCR5 | hCV9698595 | 0.0248 | 2.6025 | Allelic | T | FMHX_Yes | Pre-CARE |
| hCG15321 | CCR5 | hCV9698595 | 0.02763 | 14.6376 | Rec | T | AGE_TERTILE_1 | Pre-CARE |
| hCG15321 | CCR5 | hCV9698595 | 0.04962 | 1.6152 | Allelic | T | ALL | Pre-CARE |
| hCG27217 | ANPEP | hCV1381400 | 0.01581 | 0.5654 | Allelic | T | Smoke_No | During-CARE |
| hCG27217 | ANPEP | hCV1381400 | 0.04487 | 0.4911 | Rec | T | Smoke_No | Pre-CARE |
| hCG27878 | F7 | hCV783138 | 0.04297 | 2.1939 | Rec | G | BMI_TERTILE_1 | During-CARE |
| hCG27878 | F7 | hCV783138 | 0.01545 | 2.0614 | Rec | G | BMI_TERTILE_1 | Pre-CARE |

What is claimed is:

1. A method for identifying an individual who has an altered risk for developing myocardial infarction, comprising detecting a single nucleotide polymorphism (SNP) in any one of the nucleotide sequences of SEQ ID NOS:1-450 and 901-43,787 in said individual's nucleic acids, wherein the presence of the SNP is correlated with an altered risk for myocardial infarction in said individual.

2. The method of claim 1 in which the altered risk is an increased risk.

3. The method of claim 2 in which said individual has previously had a myocardial infarction.

4. The method of claim 1 in which the altered risk is a decreased risk.

5. The method of claim 1, wherein the SNP is selected from the group consisting of the SNPs set forth in Tables 6-8.

6. The method of claim 1 in which detection is carried out by a process selected from the group consisting of: allele-specific probe hybridization, allele-specific primer extension, allele-specific amplification, sequencing, 5′ nuclease digestion, molecular beacon assay, oligonucleotide ligation assay, size analysis, and single-stranded conformation polymorphism.

7. An isolated nucleic acid molecule comprising at least 8 contiguous nucleotides wherein one of the nucleotides is a single nucleotide polymorphism (SNP) selected from any one of the nucleotide sequences in SEQ ID NOS:1-450 and 901-43,787, or a complement thereof.

8. The isolated nucleic acid molecule of claim 7, wherein the SNP is selected from the group consisting of the SNPs set forth in Tables 3 and 4.

9. An isolated nucleic acid molecule that encodes any one of the amino acid sequences in SEQ ID NOS:451-900.

10. An isolated polypeptide comprising an amino acid sequence selected from the group consisting of SEQ ID NOS:451-900.

11. An antibody that specifically binds to a polypeptide of claim 10, or an antigen-binding fragment thereof.

12. The antibody of claim 11 in which the antibody is a monoclonal antibody.

13. An amplified polynucleotide containing a single nucleotide polymorphism (SNP) selected from any one of the nucleotide sequences of SEQ ID NOS:1-450 and 901-43,787, or a complement thereof, wherein the amplified polynucleotide is between about 16 and about 1,000 nucleotides in length.

14. The amplified polynucleotide of claim 13 in which the nucleotide sequence comprises any one of the nucleotide sequences of SEQ ID NOS:1-450 and 901-43,787.

15. An isolated polynucleotide which specifically hybridizes to a nucleic acid molecule containing a single nucleotide polymorphism (SNP) in any one of the nucleotide sequences in SEQ ID NOS:1-450 and 901-43,787.

16. The polynucleotide of claim 15 which is 8-70 nucleotides in length.

17. The polynucleotide of claim 15 which is an allele-specific probe.

18. The polynucleotide of claim 15 which is an allele-specific primer.

19. The polynucleotide of claim 15, wherein the polynucleotide comprises a nucleotide sequence selected from the group consisting of the primer sequences set forth in Table 5 (SEQ ID NOS:43,201).

20. A kit for detecting a single nucleotide polymorphism (SNP) in a nucleic acid, comprising the polynucleotide of claim 15, a buffer, and an enzyme.

21. A method of detecting a single nucleotide polymorphism (SNP) in a nucleic acid molecule, comprising contacting a test sample with a reagent which specifically hybridizes to a SNP in any one of the nucleotide sequences of SEQ ID NOS:1-450 and 901-43,787 under stringent hybridization conditions, and detecting the formation of a hybridized duplex.

22. The method of claim 21 in which detection is carried out by a process selected from the group consisting of: allele-specific probe hybridization, allele-specific primer extension, allele-specific amplification, sequencing, 5′ nuclease digestion, molecular beacon assay, oligonucleotide ligation assay, size analysis, and single-stranded conformation polymorphism.

23. A method of detecting a variant polypeptide, comprising contacting a reagent with a variant polypeptide encoded by a single nucleotide polymorphism (SNP) in any one of the nucleotide sequences of SEQ ID NOS:1-450 and 901-43,787 in a test sample, and detecting the binding of the reagent to the polypeptide.

24. A method for identifying an agent useful in therapeutically or prophylactically treating myocardial infarction, comprising contacting the polypeptide of claim 10 with a candidate agent under conditions suitable to allow formation of a binding complex between the polypeptide and the candidate agent, and detecting the formation of the binding complex, wherein the presence of the complex identifies said agent.

The application's sequence listing, which the Patent Office published only in electronic form, follows.

SEQUENCE LISTING (44201 sequences)

SEQ ID NO: 1 - DNA, 2718 bp, Homo sapiens
aggagccttaggaggtacggggagctcgcaaatactccttttggtttattcttaccaccttgcttctgtgttccttgggaatgmtgctgtgcttatgcatctggtctctttttggagctacagtggacaggcatttgtgacagcactatgggactgagtaacattctctttgtgatggccttcctgctctctggtgctgctcctctgaagattcaagcttatttcaatgagactgcagacctgccatgccaatttgcaaactctcaaaaccaaagcctgagtgagctagtagtattttggcaggaccaggaaaacttggttctgaatgaggtatacttaggcaaagagaaatttgacagtgttcattccaagtatrtgggccgcacaagttttgattcggacagttggaccctgagacttcacaatcttcagatcaaggacaagggcttgtatcaatgtatcatccatcacaaaaagcccacaggaatgattcgcatccaccagatgaattctgaactgtcagtgcttgctaacttcagtcaacctgaaatagtaccaatttctaatataacagaaaatgtgtacataaatttgacctgctcatctatacacggttacccagaacctaagaagatgagtgttttgctaagaaccaagaattcaactatcgagtatgatggtrttatgcagaaatctcaagataatgtcacagaactgtacgacgtttccatcagcttgtctgtttcattccctgatgttacgagcaatatgaccatcttctgtattctggaaactgacaagacgcggcttttatcttcacctttctctatagagcttgaggaccctcagcctcccccagaccacattccttggattacagctgtacttccaacagttattatatgtgtgatggttttctgtctaattctatggaaatggaagaagaagaagcggcctcgcaactcttataaatgtggaaccaacacaatggagagggaagagagtgaacagaccaagaaaagagaaaaaatccatatacctgaaagatctgatgaarcccagcgtgtttttaaaagttcgaagacatcttcatgcracaaaagtgatacatgtttttaattaaagagtaaagcccatacaagtattcattttttctaccctttcctttgtaagttcctgggcaacctttttgatttcttccagaaggcaaaaagacattaccatgagtaataagggggctccaggactccctctaagtggaatagcctccctgtaactccagctctgctccgtatgccaagaggagactttaattctcttactgcttcttttcacttcagagcacacttatgggccaagcccagcttaatggctcatgacctggaaataaaatttaggaccaatacctcctccagatcagattcttctcttaatttcatagattgtgttttttttttaaatagacctctcaatttctggaaaactgccttttatctgcccagaattctaagctggtgccccactgaatyttgtgtacctgtgactaaacaactacctcctcagtctgggtgggacttatgtatttatgaccttatagtgttaatatcttgaaacatagagatctatgtactgtaatagtgtgattactatgctctagagaaaagtctacccctgctaaggagttctcatccctctgtcagggtcagtaaggaaaacggtggcctagggtacaggcaacaatgagcagaccaacctaaatttggggaaattaggagaggcagagatagaacctggagccacttctatctgggctgttgctaatattgaggaggcttgccccacccaacaagccatagtggagagaactgaataaacaggaaaatgccagagcttgtgaaccctgtttctcttgaagaactgactagtgagatggcctggggaagctgtgaaagaaccaaaagagatcacaatactcaaaagagagagagagagaaaaaagagagatcttgatccacagaaatacatgaaatgtctggtctgtccaccccatcaacaagtcttgaaacaagcaacagatggatagtctgtccaaatggacataagacagacagcagtttccctggtggtcagggaggggttttggtgatacccaagttattgggatgtcatcttcctggaagcagagctggggagggagagccatcaccttgataatgggatgaatggaaggaggcttaggactttccactcctggctgagagaggaagagctgcaacggaattaggaagaccaagacacagatcacccggggcttacttagcctacagatgtcctacgggaacgtgggctggcccagcatagggctagcaaatttgasttggatgattgtttttgctcaaggcaaccagaggaaacttgcatacagagacagatatactgggagaaatgactttgaaaacctggctctaaggtgggatcactaagggatggggcagtctctgcccaaacataaagagaactctggggagcctgagccacaaaaatgttcctttattttatgtaaaccctcaagggttatagactgccatgctagacaagcttgtccatgtaatattcccatgtttttaccctgcccctgccttgattagactcctagcacctggctagtttctaacatgttttgtgcagcacagtttttaataaatgcttgttacattc

SEQ ID NO: 2 - DNA, 2705 bp, Homo sapiens
ggaaggcttgcacagggtgaaagctttgcttctctgctgctgtaacagggactagcacagacacacggatgagtggggtcatttccagatattaggtcacagcagaagcagccaaaatggatccccagtgcactatgggactgagtaacattctctttgtgatggccttcctgctctctggtgctgctcctctgaagattcaagcttatttcaatgagactgcagacctgccatgccaatttgcaaactctcaaaaccaaagcctgagtgagctagtagtattttggcaggaccaggaaaacttggttctgaatgaggtatacttaggcaaagagaaatttgacagtgttcattccaagtatrtgggccgcacaagttttgattcggacagttggaccctgagacttcacaatcttcagatcaaggacaagggcttgtatcaatgtatcatccatcacaaaaagcccacaggaatgattcgcatccaccagatgaattctgaactgtcagtgcttgctaacttcagtcaacctgaaatagtaccaatttctaatataacagaaaatgtgtacataaatttgacctgctcatctatacacggttacccagaacctaagaagatgagtgttttgctaagaaccaagaattcaactatcgagtatgatggtrttatgcagaaatctcaagataatgtcacagaactgtacgacgtttccatcagcttgtctgtttcattccctgatgttacgagcaatatgaccatcttctgtattctggaaactgacaagacgcggcttttatcttcacctttctctatagagcttgaggaccctcagcctcccccagaccacattccttggattacagctgtacttccaacagttattatatgtgtgatggttttctgtctaattctatggaaatggaagaagaagaagcggcctcgcaactcttataaatgtggaaccaacacaatggagagggaagagagtgaacagaccaagaaaagagaaaaaatccatatacctgaaagatctgatgaarcccagcgtgtttttaaaagttcgaagacatcttcatgcracaaaagtgatacatgtttttaattaaagagtaaagcccatacaagtattcattttttctaccctttcctttgtaagttcctgggcaacctttttgatttcttccagaaggcaaaaagacattaccatgagtaataagggggctccaggactccctctaagtggaatagcctccctgtaactccagctctgctccgtatgccaagaggagactttaattctcttactgcttcttttcacttcagagcacacttatgggccaagcccagcttaatggctcatgacctggaaataaaatttaggaccaatacctcctccagatcagattcttctcttaatttcatagattgtgttttttttttaaatagacctctcaatttctggaaaactgccttttatctgcccagaattctaagctggtgccccactgaatyttgtgtacctgtgactaaacaactacctcctcagtctgggtgggacttatgtatttatgaccttatagtgttaatatcttgaaacatagagatctatgtactgtaatagtgtgattactatgctctagagaaaagtctacccctgctaaggagttctcatccctctgtcagggtcagtaaggaaaacggtggcctagggtacaggcaacaatgagcagaccaacctaaatttggggaaattaggagaggcagagatagaacctggagccacttctatctgggctgttgctaatattgaggaggcttgccccacccaacaagccatagtggagagaactgaataaacaggaaaatgccagagcttgtgaaccctgtttctcttgaagaactgactagtgagatggcctggggaagctgtgaaagaaccaaaagagatcacaatactcaaaagagagagagagagaaaaaagagagatcttgatccacagaaatacatgaaatgtctggtctgtccaccccatcaacaagtcttgaaacaagcaacagatggatagtctgtccaaatggacataagacagacagcagtttccctggtggtcagggaggggttttggtgatacccaagttattgggatgtcatcttcctggaagcagagctggggagggagagccatcaccttgataatgggatgaatggaaggaggcttaggactttccactcctggctgagagaggaagagctgcaacggaattaggaagaccaagacacagatcacccggggcttacttagcctacagatgtcctacgggaacgtgggctggcccagcatagggctagcaaatttgasttggatgattgtttttgctcaaggcaaccagaggaaacttgcatacagagacagatatactgggagaaatgactttgaaaacctggctctaaggtgggatcactaagggatggggcagtctctgcccaaacataaagagaactctggggagcctgagccacaaaaatgttcctttattttatgtaaaccctcaagggttatagactgccatgctagacaagcttgtccatgtaatattcccatgtttttaccctgcccctgccttgattagactcctagcacctggctagtttctaacatgttttgtgcagcacagtttttaataaatgcttgttacattc

SEQ ID NO: 3 - DNA, 2318 bp, Homo sapiens
gactctggagtgggagtgggagcgagcgcttctgcgactccagttgtgagagccgcaagggcatgggaattgacgccactcaccgacccccagtctcaatctcaacgctgtgaggaaacctcgactttgccaggtccccaagggcagcggggctcggcgagcgaggcacccttctccgtccccatcccaatccaagcgytcctggcactgacgacgccaagagactcgagtgggagttaaagcttccagtgagggcagcaggtgtccaggccgggcctgcgggttcctgttgacgtcttgccctaggcaaaggtcccagttccttctcggagccggctgtcccgcgccactggaaaccgcacctccccgcagcaygggcaccagcctcagcccgaacgacccttggcygctaaacccgctgtccatcyagcagaccacgctcctgctactcctgtcggtgctggccactgtgcatgtgggccagcggctgctgaggcaacggaggcggcagctcsggtccgcgcccccgggcccgtttgcgtrsccactgatcgraaacgcggcggcggtgggccaggcggctcacctctcgttcgctcgccyggcgcggcgcwacggcgacgttttccagatccgcctgggcagctgccccatagtggtgctgaatggcgagcgcgccatccaccaggccctggtgcagcagggctcggccttcgccgaccggccgkccttcgcctccttccgtgtggtgtccggcggccgcagcatggctttcggccactactcggagcactggaaggtgcagcggcgcgcagcccacagcatgatgcgcaacttcttcacgcgccagccgcgcagccgccaagtcctcgagggccacgtgctgagcgaggcgcgcgagctggtggcgctgctggtgcgcggcagcgcggacggmgccttcctcgwccygaggccgctgaccrtcgtggccgtggccaacgtcatgagtgccgtgtgtttcggctgccgctacakccacgacgwccccgagttccgtgagctgctcagccacaacraagagttcgggcgcacggtgggcgcgggcagcctggtggacgtsatgccctggctgcagtacttccccaacccggtgcgcaccgttttccgcgaattcgagcagctcaaccgcaacttcagcaacttcatcctggacaagttcttgaggcactgmkaaagccttcggcccggggccgccccccgcgacatgatggacgcctttatcctctctgcggaaaagaaggcggccggggactcgcacggtggtggcgcgcggctggatttggagaacktaccggccactatcactgacatcttcggcgccagccaggacaccctgtccaccgcgctgcagtggctgctcctcytcttcaccaggtatcctgatgtgcagactygagtgcaggcagaattggatcaggtcrtgkggagggaccrtctgccttgtrtgggtraccagcccaacctgcyctatgtcctggccttcctttatraagccatgmrcttctccagctttgtgcctgtcactattcctcatgccaccactgccaacacctctgtcttgggctaccacattcccaaggacactgtggtttttgtcaaccagtggtctgtgaatcatgacccastgaagtggcctaaccyggagaactttgatcsagstcrattcttggacaaggahggcctcatcarcaaggacctgaccagcagagtgatgattttttcwgtgggcaaaaggyggtgcattggcgaagaactttctaagatgcagctttttctcttcatctccatcctggctcaccagtgcgatttcagggccaacccaaatgrgcctgcgaaaatgaatttcagttatggtctaaccattaaacccaagtcatttaaagtcaatgtcactctcagagagtccatggagctccttgatagtgctgtccaaaatttacaagccaaggaaacttgccaataagaagcaagaggcaagctgaaattttagaaatattcacatcttcggagatgaggagtaaaattcagtttttttccagttcctcttttgtgctgcttctcaattagcgtttaagatgattttttgaaagttaacattaatgcctgctttttggaaagtcagaatcagaagatagtcttggaagctgtttggaaaagacagtggagatgagggcctaggtcatgactctccaggccttcactgtgccacactcacagatgacagggcttgcggtaccaaaggctctttatcttccagactacagctcctattaatg

SEQ ID NO: 4 - DNA, 5130 bp, Homo sapiens
  misc_feature (1)...(5130): n = A,T,C or G, or insertion/deletion polymorphism (see Tables 1-2)
gactctggagtgggagtgggagcgagcgcttctgcgactccagttgtgagagccgcaagggcatgggaattgacgccactcaccgacccccagtctcaatctcaacgctgtgaggaaacctcgactttgccaggtccccaagggcagcggggctcggcgagcgaggcacccttctccgtccccatcccaatccaagcgytcctggcactgacgacgccaagagactcgagtgggagttaaagcttccagtgagggcagcaggtgtccaggccgggcctgcgggttcctgttgacgtcttgccctaggcaaaggtcccagttccttctcggagccggctgtcccgcgccactggaaaccgcacctccccgcagcaygggcaccagcctcagcccgaacgacccttggcygctaaacccgctgtccatcyagcagaccacgctcctgctactcctgtcggtgctggccactgtgcatgtgggccagcggctgctgaggcaacggaggcggcagctcsggtccgcgcccccgggcccgtttgcgtrsccactgatcgraaacgcggcggcggtgggccaggcggctcacctctcgttcgctcgccyggcgcggcgcwacggcgacgttttccagatccgcctgggcagctgccccatagtggtgctgaatggcgagcgcgccatccaccaggccctggtgcagcagggctcggccttcgccgaccggccgkccttcgcctccttccgtgtggtgtccggcggccgcagcatggctttcggccactactcggagcactggaaggtgcagcggcgcgcagcccacagcatgatgcgcaacttcttcacgcgccagccgcgcagccgccaagtcctcgagggccacgtgctgagcgaggcgcgcgagctggtggcgctgctggtgcgcggcagcgcggacggmgccttcctcgwccygaggccgctgaccrtcgtggccgtggccaacgtcatgagtgccgtgtgtttcggctgccgctacakccacgacgwccccgagttccgtgagctgctcagccacaacraagagttcgggcgcacggtgggcgcgggcagcctggtggacgtsatgccctggctgcagtacttccccaacccggtgcgcaccgttttccgcgaattcgagcagctcaaccgcaacttcagcaacttcatcctggacaagttcttgaggcactgmkaaagccttcggcccggggccgccccccgcgacatgatggacgcctttatcctctctgcggaaaagaaggcggccggggactcgcacggtggtggcgcgcggctggatttggagaacktaccggccactatcactgacatcttcggcgccagccaggacaccctgtccaccgcgctgcagtggctgctcctcytcttcaccaggtatcctgatgtgcagactygagtgcaggcagaattggatcaggtcrtgkggagggaccrtctgccttgtrtgggtraccagcccaacctgcyctatgtcctggccttcctttatraagccatgmrcttctccagctttgtgcctgtcactattcctcatgccaccactgccaacacctctgtcttgggctaccacattcccaaggacactgtggtttttgtcaaccagtggtctgtgaatcatgacccastgaagtggcctaaccyggagaactttgatcsagstcrattcttggacaaggahggcctcatcarcaaggacctgaccagcagagtgatgattttttcwgtgggcaaaaggyggtgcattggcgaagaactttctaagatgcagctttttctcttcatctccatcctggctcaccagtgcgatttcagggccaacccaaatgrgcctgcgaaaatgaatttcagttatggtctaaccattaaacccaagtcatttaaagtcaatgtcactctcagagagtccatggagctccttgatagtgctgtccaaaatttacaagccaaggaaacttgccaataagaagcaagaggcaagctgaaattttagaaatattcacatcttcggagatgaggagtaaaattcagtttttttccagttcctcttttgtgctgcttctcaattagcgtttaaggtgagsataaatcaactgtccatcaggtgaggtgtgctccatacccagcggttcttcatgagtagtgggctatgcaggagcttctgggagatttttttgagtcaaagacttaaagggcccaatgaattattatatacatactgcatcttggttatttctgaaggtagcattctttggagttaaaatgcacatatagacacatacacccaaacacttacaccaaacwactgaatgaagmagtattttggtaaccaggccatttttggtgggaatccaagattggtctcccatatgcagaaatagacaaaaagtatattaaacaaagtttcagagtatattgttgaagagacagagacaagtaatttcagtgtaaagtgtgtgattgaaggtgataagggaaaagataaagaccagaaattcccttttcaccttttcaggaaaataacttagactctagtatttatgggtggatttatccttttgccttctggtatacttccttacttttaaggataaatcataaagtcagttgctcaaaaagaaatcaatagttgaattagtgagtatagtggggttccatgakttatcatgaattttaaagtatgcattattaaattgtaaaactccaaggtgatgttgtacctcttttgcttgccaaagtacagaatttgaattatcagcaaaraaaaaaaaaaaagccagccaagctttaaattatgtgaccataatgtactgatttcagtaagtctcataggttaaaaaaaaaagtcaccaaatagtgtgaaatatattacttaactgtccgtaagcagtatattagtattatcttgttcaggaaaaggttgaataatatatgccttgtntaatattgaaaattgaaaagtacaactaacgcaaccaagtgtgctaaaaatgagcttgattaaatcaaccacctatttttgacatggaaatgaagcagggtttcttttcttcactcaaattttggcgaatctcaaaattagatcctaagatgtgttcttatttttataacatctttattgaaattctatttataatacagaatcttgttttgaaaataacctaattaatatattaaaattccaaattcatggcatgcttaaattttaactaaattttaaagccattctgattattgagttccagttgaagttagtggaaatctgaacattctcctgtggaaggcagagaaatctaagctgtgtctgcccaatgaataatggaaaatgccatgaattacctggatgttctttttacgaggtgacaagagttggggacagaactcccattacaactgaccaagtttctcttctagatgattttttgaaagttaacattaatgcctgctttttggaaagtcagaatcagaagatagtcttggaagctgtttggaaaagacagtggagatgaggtcagttgtgttttttaagatggcaattactttggtagctgggaaagcataaagctcaaatgaaatgtatgcattcacatttagaaaagtgaattgaagtttcaagttttaaagttcattgcaattaaacttccaaagaaagttctacagtgtcctaagtgctaagtgcttattacattttattaagctttttggaatctttgtaccaaaattttaaaaaagggagtttttgatagttgtgtgtatgtgtgtgtggggtggggggatggtaagagaaaagagagaaacactgaaaagaaggaaagatggttaaacattttcccactcattctgaattaattaatttggagcacaaaattcaaagcatggacatttagaagaaagatgtttggcgtagcagagttaaatctcaaataggctattaaaaaagtctacaacatagcagatctgttttgtggtttggaatattaaaaaacttcatgtaattttattttaaaatttcatagctgtacttcttgaatataaaaaatcatgccagtatttttaaaggcattagagtcaactacacaaagcaggcttgcccagtacatttaaattttttggcacttgccattccaaaatattatgccccaccaaggctgagacagtgaatttgggctgctgtagcctatttttttagattgagaaatgtgtagctgcaaaaataatcatgaaccaatctggatgcctcattatgtcaaccaggtccagatgtgctataatctgtttttacgtatgtaggcccagtcgtcatcagatgcttgcggcaaaaggaaagctgtgtttatatggaagaaagtaaggtgcttggagtttacctggcttwtttaatatgcttataacctagttaaagaaaggaaaagaaaacaaaaaacgaatgaaaataactgaatttggaggctggagtaatcagattactgctttaatcagaaaccctcattgtgtttctaccggagagagaatgtatttgctgacaaccattaaagtcagaagttttactccaggttattgcaataaagtataatgtttattaaatgcttcatttgtatgtcaaagctttgactctataagcaaattgcttttttccaaaacaaaaagatgtctcaggtttgttttgtgaattttctaaaagctttcatgtcccagaacttagcctttacctgtgaagtgttactacagccttaatattttcctagtagatctatattagatcaaatagttgcatagcagtatatgttaatttgtgtgtttttagctgtgacacaactgtgtgattaaaaggtatactttagtagacatttataactcaaggataccttcttatttaatcttttcttatttttgtactttatcatgaatgcttttagtgtgtgcataatagctacagtgcatagttgtagacaaagtacattctggggaaacaacatttatatgtagcctttactgtttgatataccaaattaaaaaaaaattgtatctcattacttatactgggacmccattaccaaaataataaaaatcactttcataatcttgttatga

SEQ ID NO: 5 - DNA, 2069 bp, Homo sapiens
aaggaataaagttgctgattcattcctttacactgaaaccctttgttgtgccctcctcttccttcctctttatagggagacactctgagaaagagcacattgtgggggcccactccatgtgatgtttgcttggttgcctgttcccttttctacctgcagagcacggttcccataagggcggcgagatcagcctcctgtctcatctggaagaccaccactctggggtctcagaggaatgatggaagccttggggtttctaaaattggaagtgaatggccccatggtgayggtggccctgtcagtggctctcttggccctcctgaaatggtactccacatcagcattctcaagactggagaagttaggcctcagacatcccaagccttctcctttcattggaaacttgacatttttccrccagggtttttgggaaagccaaatggagctcagaaagctgtatggacctctgtgtgggtactatcttggtcgtcggatgtttattgttatttctgagccagacatgatcaagcaggtgttggttgagaacttcagtaactttaccaacagaatggcgtcgggtttggagttcaagtcrgtagccgacagcgttctgtttttacgtgacaaaagatgggaagaggtcagaggtgccctgatgtctgctttcagtcctgaaaagctgaacgagatggttcccctcatcagccaagcctgcgamcttmtcctggctcatttaaaacgctatgcggaatctggggacgcatttgacatccagaggtgctactgcaattacaccacagatgtggttgccagcgtcgcstttggcaccccggtggactcctggcaggcccctgaggatccctttgtgaaacactgcaagcgtttcttcgaattctgcatccccagacctatcctggttttactcttatcatttccatccataatggtcccactggcccggattttgcccaataagaaccgagacgaactgaatggcttttttaacraactcattrggaatgtgattgccttgcgggaccagcaagctgccgaagagaggcggagagacttcctccaaatggtcctggatgcccgacattctgcaagtcccatgggcgtgcaagactttgacatcgtcagagacgttttctcctctactgggtgcaagccgaacccttcccggmaacaccagcccagccctatggccaggcctttgactgtggatgagaytgtgggccaggccttcatcttcctcatcgctggctatgaaatcatcaccaacacactttcttttgccacctacstactggccaccaaccctgactgccaagagaagcttctgagagaggtagacgtttttaaggagaaacacatggcccctgagttctgcagcctcraggaagkcctgccctatctggacatggtgattgcagagacgctraggatgtacccgccagctttcagattcacacgggaggcagctsaggactgcgaggtgctggggcagygcatccccrcaggcrctgtgctagagatggcygtgggtgccctgcaccatgaccctgagcactggccaagcccggagamcttcaaccctgaaaggttcacggctgaggccmggcagcagcaccggcccttcacgtacctgcccttcggggccggcccacggagctgcctcggggtgcgtctagggctgcttgaggtcaagttgacactgctccacgtgctgcacaagttccggttccaagcctgccctgagacccaggtaccgctgcagctagaatccaaatctgccctaggtccaaaaaatggtgtctatatcaagatcgtatcccgctgacacagaaggctgccgggtsgggggagggcacccccaaattcaaagaaaaccctaagtgtggatgttcagaattttggaaaaatgtcactgaagtgattgaaagagtgcctggcatgcaaggrtaagaggttctttacataacatttcctaaatgcttaataaacrtttgttgcacttggttttgacattgccaatggggtttgaaccagtgctctctctaaatgaagaa

SEQ ID NO: 6 - DNA, 1906 bp, Homo sapiens
aaggaataaagttgctgattcattcctttacactgaaaccctttgttgtgccctcctcttccttcctctttatagggagacactctgagaaagagcacattgtgggggcccactccatgtgatgtttgcttggttgcctgttcccttttctacctgcagagcacggttcccataagggcggcgagatcagcctcctgtctcatctggaagaccaccactctggggtctcagaggaatgatggaagccttggggtttctaaaattggaagtgaatggccccatggtgayggtggccctgtcagtggctctcttggccctcctgaaatggtactccacatcagcattctcaagactggagaagttaggcctcagacatcccaagccttctcctttcattggaaacttgacatttttccrccagggtttttgggaaagccaaatggagctcagaaagctgtatggacctctgtgtgggtactatcttggtcgtcggatgtttattgttatttctgagccagacatgatcaagcaggtgttggttgagaacttcagtaactttaccaacagaatggcgtcgggtttggagttcaagtcrgtagccgacagcgttctgtttttacgtgacaaaagatgggaagaggtcagaggtgccctgatgtctgctttcagtcctgaaaagctgaacgagatggttcccctcatcagccaagcctgcgamcttmtcctggctcatttaaaacgctatgcggaatctggggacgcatttgacatccagaggtgctactgcaattacaccacagatgtggttgccagcgtcgcstttggcaccccggtggactcctggcaggcccctgaggatccctttgtgaaacactgcaagcgtttcttcgaattctgcatccccagacctatcctggttttactcttatcatttccatccataatggtcccactggcccggattttgcccaataagaaccgagacgaactgaatggcttttttaacraactcattrggaatgtgattgccttgcgggaccagcaagctgccgaagagaggcggagagacttcctccaaatggtcctggatgcccgacattctgcaagtcccatgggcgtgcaagactttgacatcgtcagagacgttttctcctctactgggtgcaagccgaacccttcccggmaacaccagcccagccctatggccaggcctttgactgtggatgagaytgtgggccaggccttcatcttcctcatcgctggctatgaaatcatcaccaacacactttcttttgccacctacstactggccaccaaccctgactgccaagagaagcttctgagagaggtagacgtttttaaggagaaacacatggcccctgagttctgcagcctcraggaagkcctgccctatctggacatggtgattgcagagacgctraggatgtacccgccagctttcagattcacacgggaggcagctsaggactgcgaggtgctggggcagygcatccccrcaggcrctgtgctagagatggcygtgggtgccctgcaccatgaccctgagcactggccaagcccggagamcttcaaccctgaaaggtaccgctgcagctagaatccaaatctgccctaggtccaaaaaatggtgtctatatcaagatcgtatcccgctgacacagaaggctgccgggtsgggggagggcacccccaaattcaaagaaaaccctaagtgtggatgttcagaattttggaaaaatgtcactgaagtgattgaaagagtgcctggcatgcaaggrtaagaggttctttacataacatttcctaaatgcttaataaacrtttgttgcacttggttttgacattgccaatggggtttgaaccagtgctctctctaaatgaagaa

SEQ ID NO: 7 - DNA, 2004 bp, Homo sapiens
cttccccttctctgccctgctccaggcaccaggctctttccccttcagtgtctcagaggaggggacggcagcaccatggacccccgcttgtccactgtccgccagacctgctgctgcttcaatgtccgcatcgcaaccaccgccctggccatctaccatgtgatcatgagcgtcttgttgttcatcgagcactcrgtagaggtggcccatggcaaggcgtcctgcaagctctcccagatgggctacctcaggatcgctgacctgatctccagcttcctgctcatcaccatgctcttcatcatcagcctgagcctactgatcggcgtagtcaagaaccgggagaagtacctgctgcccttcctgtccctgcaaatcatggactatctcctgtgcmtgctcaccctgctgggctcctacattgagctgcccgcctacctcaagttggcctcccggagccgtgctagctcctccaagttcyccctgatgacgctgcagctgctggacttctgcctgagcatcctgaccctctgcagctcctacatggaagtgcccacctatctcaacttcaagtccatgaaccacatgaattacctccccagccaggaggatatgcctcataaccagttcatcaagatgatgatcatcttttccatcgccttcatcactgtccttatcttcaaggtctacatgttcaagtgcgtgtggcggtgctacagattgatcaagtgcatgaactcggtggaggagaagaraaactccaagatgctccagaaggtggtcctgccgtcctacgaggaagccctgtctttgccatcgaagaccccagaggggggcccagcaccacccccatactcagaggtgtgaccctcgccaggccccagccccagtgctgggaggggtgragctgcctcataatctgcttttttgctttggtggcccctgtggcctgggtgggccctcccgcccctccctggcaggacaatctgcttgtgtctccctcgctggcctgctcctcctgcagggcctgtgagctgctcacaactgggtcaacgctttaggctgagtcactcctcgggtctctccataattcagcccaacaatgcttggtttatttcaatcagctctgacacttgtttagacgattggccattctaaagttggtgagtttgtcaagcaactatcgacttgatcagttcagccaagcaactgacaaatcaaaaacccacttgtcagttcagtaaaataatttggtcaaacaacagtctattgcattgatttataaatagttgtcagttcacatagcaatttaatcaagtaatcattaattagttaccccctatatataaatatatgtaatcaatttcttcaaatagcttgcttacatgataatcaattagccaaccatgagtcatttagaatagtgataaatagaatacacagaatagtgatgaaattcaatttaaaaaatcacgttagcctccaaaccatttaattcaaatgaacccatcaactggatgccaactctggcgaatgtaggacctctgagtggctgtataattgttaattcaaatgaaattcatttaaacagttgacaaactgtcattcaacaattagctccagkaaataacagttatttcatcataaaacagtcccttcaaacacacaattgttctgctgaagagttgtcatcaacaatccaatgctcacctattcagttgctctgtggtcagtgtggctgcatarcagtggmttccatgaaaggagtcattttagtgatgagctgccagtccattcccaggccaggctgtcgctggccatccattcagtcgattcagtcataggcgaatckgttctgcccgaggcttgtggtcaagttagttcagtcaaagcaggcaacccccttgtgggcactgaccctgccactggggtcatggcggttgtggcagctggggaggtttggccccaacagccctcctgtgcctgcttccctgtgtgtcggggtcc

SEQ ID NO: 8 - DNA, 2223 bp, Homo sapiens
cttccccttctctgccctgctccaggcaccaggctctttccccttcagtgtctcagaggaggggacggcagcaccatggacccccgcttgtccactgtccgccagacctgctgctgcttcaatgtccgcatcgcaaccaccgccctggccatctaccatgtgatcatgagcgtcttgttgttcatcgagcactcrgtagaggtggcccatggcaaggcgtcctgcaagctctcccagatgggctacctcaggatcgctgacctgatctccagcttcctgctcatcaccatgctcttcatcatcagcctgagcctactgatcggcgtagtcaagaaccgggagaagtacctgctgcccttcctgtccctgcaaatcatggactatctcctgtgcmtgctcaccctgctgggctcctacattgagctgcccgcctacctcaagttggcctcccggagccgtgctagctcctccaagttcyccctgatgacgctgcagctgctggacttctgcctgagcatcctgaccctctgcagctcctacatggaagtgcccacctatctcaacttcaagtccatgaaccacatgaattacctccccagccaggaggatatgcctcataaccagttcatcaagatgatgatcatcttttccatcgccttcatcactgtccttatcttcaaggtctacatgttcaagtgcgtgtggcggtgctacagattgatcaagtgcatgaactcggtggaggagaagaraaactccaagatgctccagaaggtggtcctgccgtcctacgaggaagccctgtctttgccatcgaagaccccagaggggggcccagcaccacccccatactcagaggtgtgaccctcgccaggccccagccccagtgctgggaggggtgragctgcctcataatctgcttttttgctttggtggcccctgtggcctgggtgggccctcccgcccctccctggcaggacaatctgcttgtgtctccctcgctggcctgctcctcctgcagggcctgtgagctgctcacaactgggtcaacgctttaggctgagtcactcctcgggtctctccataattcagcccaacaatgcttggtttatttcaatcagctctgacacttgtttagacgattggccattctaaagttggtgagtttgtcaagcaactatcgacttgatcagttcagccaagcaactgacaaatcaaaaacccacttgtcagttcagtaaaataatttggtcaaacaacagtctattgcattgatttataaatagttgtcagttcacatagcaatttaatcaagtaatcattaattagttaccccctatatataaatatatgtaatcaatttcttcaaatagcttgcttacatgataatcaattagccaaccatgagtcatttagaatagtgataaatagaatacacagaatagtgatgaaattcaatttaaaaaatcacgttagcctccaaaccatttaattcaaatgaacccatcaactggatgccaactctggcgaatgtaggacctctgagtggctgtataattgttaattcaaatgaaattcatttaaacagttgacaaactgtcattcaacaattagctccagkaaataacagttatttcatcataaaacagtcccttcaaacacacaattgttctgctgaagagttgtcatcaacaatccaatgctcacctattcagttgctctgtggtcagtgtggctgcatarcagtggmttccatgaaaggagtcattttagtgatgagctgccagtccattcccaggccaggctgtcgctggccatccattcagtcgattcagtcataggcgaatckgttctgcccgaggcttgtggtcaagcaaaaattcagccctgaaatcaggcacatctgttcgttggactaaacccacaggttagttcagtcaaagcaggcaacccccttgtgggcactgaccctgccactggggtcatggcggttgtggcagctggggaggtttggccccaacagccctcctgtgcctgcttccctgtgtgtcggggtcctccagggagctgacccaraggtggaggccmcggaggcagggtctytggggactgtcggggggtacaragggaraaggctytgcaaragctccctggcaawacccccttgtgtaattgctttgtgtgcgacagggaggaagtttcaataaagcagcaacaagcttc

SEQ ID NO: 9 - DNA, 3655 bp, Homo sapiens
cttcagatagattatatctggagtgaagratcctgccacctaygtatctggcatagtattctgtgtagtgggatgagcagagaacaaaaacaaaataatccagtgagaaaagcccgtaaataaacyttcagaccagagayctattctcyagcttattttaagctcaacttaaaargaagaactgttctctgattcttttcgccttcaatacacttaatgatttaactccaccctmcttcaaaagaaacagcatttcctacttttatactgtctatatgattgatttgcacagctcatctggccagaagagctgagacatccgttcccctacaagaaactctccccgggtggaacaagatggattatcaagtgtcaagtccaatctatgacatcaattattatacatcggagccctgccaaaaaatcaatgtgaagcaaatckcagcccgcctcctgcctccgctctactcactggtgttcatctttggttttgtgggcaacatgctggtcatcctcatccwgataaactgcaaaagkctgaagagcatgactgacatctacctgctcaacctggccatctcygacctgtttttccttcttactgtccccttctgggctcactatgctgccgcccagtgggactttggaaatacaatgtgwcaactcttgacagggctctattttataggcttcttctctggaatcttcttcatcatcctcctgacaatcgataggtacctggctgtcktccatgctgtgtttgctttaaaagccaggacggtcacctttggggtggtgacaagtgtgatcacttgggtggtggctgtgtttgcgtctctcccaggaatmatctttaccagatctcaaaaagaaggtcttcattacacctgcagctctcattttccatacagtcagtatcaattctggaagaatttccagacattaaagatagtcatcttggggctggtcctgccgctgcttgtcatggtcatctgctactcgggaatcctaaaaactctgcttcrgtgtcgaaatgagaagaagaggcacagggctgtgaggcttatcttcaccatcatgattgtttattttctcttctgggctccctacaacattgtccttctcctgaacaccttccaggaattctttggcctgaataattgcagtagctctaacaggttggaccaagctatgcaggtgacagagactcttgggatgacgcactgctgcatcaaccccatcatctatgcctttgtcgkggagaagttcagaaactacctcttagtcttcttccaaaagcacattgccaaacgcttctgcaaatgctgttctattttccagcaagaggctccygagcgagyaagctcagtttwcacccgatccactggggagcargaaatatctgtgggcttgtgacacggactcaagtgggctggtgacccagtcagagttgtgcacatggcttagttttcatacacagcctgggctgggggtggggtgggagaggtcttttttaaaaggaagttactgttatagagggtctaagattcatccatttatttggcatctgtttaaagtagattagatcttttaagcccatcaattatagaaagccaaatcaaaatatgttgatgaaaaatagcaacctttttatctccccttcacatgcatcaagttattgacaaactctcccttcactccgaaagttccttatgtatatttaaaagaaagcctcagagaattgctgattcttgagtttagtgatctgaacagaaataccaaaattatttcagaaatgtacaactttttacctagtacaaggcaacatataggttgtaaatgtgtttaaaacaggtctttgtcttgctatggggagaaaagacatgaatatgattagtaaagaaatgacacttttcatgtgtgatttcccctccaaggtatggttaataagtttcactgacttagaaccaggcgagagacttgtggcctgggagagctggggaagcttcttaaatgagaaggaatttgagttggatcatctattgctggcaaagacagaagcctcactgcaagcactgcatgggcaagcttggctgtagaaggagacagagctggttgggaagacatggggaggaaggacaaggctagatcatgaagaaccttgacggcattgctccgtytaagtcatgagctgagcagggagatcctggttggtgttgcagaaggtttactctgtggccaaaggagggtcaggaaggatgagcatttagggcaaggagaccaccaacagccctcaggtcagggtgaggatggcctctgctaagctcaaggcgtgaggatgggaaggagggaggtattcgtaaggatgggaaggagggaggtattcgtgcagcatatgaggatgcagagtcagcagaactggggtggatttggkttggaagtgagggtcagagaggagtcagagagaatccctagtcttcaagcagattggagaaacccttgaaaagacatcaagcacagaaggaggaggaggaggtttaggtcaagaagaagatggattggtgtaaaaggatgggtctggtttgcagagcttgaacacagtctcacccagactccaggctgtctttcactgaatgcttctgacttcatagatttccttcccatcccagctgaaatactgaggggtctccaggaggagactagatttatgaatacacgaggtatgaggtctaggaacatacttcagctcacacatgagatctaggtgaggattgattacctagtagtcatttcatgggttgttgggaggattctmtgaggcaaccacaggcagcatttagcacatactacacattcaataagcatcaaactcttagttactcattcagggatagcactgagcaaagcattgagcaaaggggtcccatakaggtgagggaagcctgaaaaactaagatgctgcctgcccagtgcacacaagtgtaggtatcattttctgcatttaaccgtcaataggcaaaggggggaagggamatattcatttggaaataagctgccttgagccttaaaacccacaaaagtacaatttaccagcctccgtatttcagactgaatgggggtggggggggcgccttaggtacttattccagatgccttctccagacaaaccagaagcaacagaaaaaatcgtctctccctccctttgaaatgaatataccccttagtgtttgggtatattcatttcaaagggagagagagaggtttttttctgttctktctcatatgattgtgcacatacttgagactgttttgaatttgggggatggctaaaaccatcatagtacaggtaaggtgagggaatagtaagtggtgagaactactcagggaatgaaggtgtcagaataataagaggtgctactgactttctcagcctctgaatatgaacggtgagcattgtggctgtcagcaggaagcaacgaagggaaatgtctttccttttgctcttaagttgtggagagtgcaacagtagcataggaccctaccctctgggccaagtcaaagacattctgacatcttagtatttgcatattcttatgtatgtgaaagttacaaattgcttgaaagaaaatatgcatctaataaaaaacaccttcta

SEQ ID NO: 10 - DNA, 648 bp, Homo sapiens
atggattatcaagtgtcaagtccaatctatgacatcaattattatacatcggagccctgccaaaaaatcaatgtgaagcaaatckcagcccgcctcctgcctccgctctactcactggtgttcatctttggttttgtgggcaacatgctggtcatcctcatccwgataaactgcaaaagkctgaagagcatgactgacatctacctgctcaacctggccatctcygacctgtttttccttcttactgtccccttctgggctcactatgctgccgcccagtgggactttggaaatacaatgtgwcaactcttgacagggctctattttataggcttcttctctggaatcttcttcatcatcctcctgacaatcgataggtacctggctgtcktccatgctgtgtttgctttaaaagccaggacggtcacctttggggtggtgacaagtgtgatcacttgggtggtggctgtgtttgcgtctctcccaggaatmatctttaccagatctcaaaaagaaggtcttcattacacctgcagctctcattttccatacaacattaaagatagtcatcttggggctggtcctgccgctgcttgtcatggtcatctgctactcgggaatcctaaaaactctgcttcrgtgtcgaaa

SEQ ID NO: 11 - DNA, 621 bp, Homo sapiens
rtccccagggaccacatccagcttttcttccctcccaagaaaccagcagggaaggctcagtataaatagcagccaccgctccctggcaggcagggacccgcagctcagctacagcacagatcagcaccatgaagcttctcacgggcctggttttctgctccttggtcctgagtgtcagcagccgaagcttcttttcgttccttggcgaggcttttgatggggctcgggacatgtggagagcctactctgacatgagagaagccaattacatcggctcagacaaatacttccatgctcgggggaactatyatgctgycaaaaggygacctsggggtgcctgggctgcagaagtgatcagcgatgccagaragaatatccygagattctytggccatggtgcggargactcgctggctgatcaggctgccaatgaatggggcaggagtggcaaagaccccaatracttccgacctgctggcctgcctgagaaatactgagcttcctcttcactctgctctcaggagatctggctgtgaggccctcagggcagggatacaaagcggggagagggtacacaatgggtatctaataaatacttaagaggtggaatttgtggaaact

SEQ ID NO: 12 - DNA, 682 bp, Homo sapiens
rtccccagggaccacatccagcttttcttccctcccaagaaaccagcagggaaggctcagtataaatagcagccaccgctccctggcaggcagggacccgcagctcagctacagcacagatcagttatcctggggcatacagccataccattctgaaggtgtcttatctcctctgatctagagagcaccatgaagcttctcacgggcctggttttctgctccttggtcctgagtgtcagcagccgaagcttcttttcgttccttggcgaggcttttgatggggctcgggacatgtggagagcctactcygacatgygagaagcyaattasatcggctcagacaaatacttccatgctcgggggaactargatgctgccyaaaggggayctgggggtgcctgggctgcagaagtgarcagcgatgccagagagaatatccagagattctttggccatggtgcggaggactcgctggctgatcaggctgccaatgaatggggcaggagtggcaaagaccccaatcacttccgacctgctggcctgcctgagaaatactgagcttcctcttcactctgctctcaggagatctggctgtgaggccctcagggcagggatacaaagcggggagagggtacacaatgggtatctaataaatacttaagaggtggaatttgtggaaact

SEQ ID NO: 13 - DNA, 596 bp, Homo sapiens
  misc_feature (1)...(596): n = A,T,C or G, or insertion/deletion polymorphism (see Tables 1-2)
ttccccagggaccacatccagcttttcttccctcccaagaaaccagcagggaaggctcagtataaatagcagccaccgctccctggcaggcagggacccgcagctcagctacagcacagatcagcaccatgaagcttctcacgggcctggttttctgctccttggtcctgagtgtcagcagccgaagcttcttttcgttccttggcgaggctyttgatgyttatgaarctcagscacaccttggcatcacctgaaatacccatgccttcaacrccccagcagngtctgcagnaactggcctggggtgrggcctgggcactgggactttcagtttctctctgggtgattagaaagtgcagccaaggntcacgcctgtaattccagcactttgggaggccaaggtggatgaatcacttgaggtcatgagttccggagcagcctggccaacatggtgaaaccccgtctctactaaaaatactaaaatgtagccaggcgtggtggcaggcacctgtaatcccagctactcaggaggctgaagcacgagaatcacttgaacccgagaagcagaggttgcagtgactagagatcgcaccagt

SEQ ID NO: 14 - DNA, 2371 bp, Homo sapiens
ctccagagaggctgctgctcattgagctgcactcacatgaggatacagactttgtgaagaaggaattggcaacactgaaacctccagaacaaaggctgtcactaaggtcccgctgccttgatggattatacacttgacctcagtgtgacaacagtgaccgactactactaccctgatatcttctcaagcccctgtgatgsggaacttattcagacaaatggcaagttgctccttgctgtcttttattgcctcctgtttgtattcagtcttctgggaaacagcctggtcatcctggtccttgtggtctgcaagaagctgaggagcatcacagatgtatacctcttgaacctggccctgtctgacctgctttttgtcttctccttcccctttcagacctactatctgctggaccagtgggtgtttgggactgtaatgtgcaaagtggtgtctggcttttattacattggcttctacagcagcatgtttttcatcaccctcatgagtgtggacaggtacctggctgttgtccatgccgtgtatgccctaaaggtgaggacgatcaggatgggcacaacgctgtgcctggcagtatggctaaccgccattatggctaccatcccattgctagtgttttaccaagtggcctctgaagatggtgttctacagtgttattcattttacaatcaacagactttgaagtggaagatcttcaccaacttcaaaatgaacattttaggcttgttgatcccattcaccatctttatgttctgctacattaaaatcctgcaccagctgaagaggtgtcaaaaccacaacaagaccaaggccatcaggttggtgctcattgtggtcattgcatctttacttttctgggtcccattcaacgtggttcttttcctcacttccttgcacagtatgcacatcttggatggatgtagcataagccaacagctgacttatgccacccatgtcacagaaatcatttcctttactcactgctgtgtgaaccctgttatctatgcttttgttggggagaagttcaagaaacacctctcagaaatatttcagaaaagttgcagccaaatcttcaactacctaggaagacaaatgcctagggagagctgtgaaaagtcatcatcctgccagcagcactcctcccgttcctccagcgtagactacattttgtgaggatcaatgaagactaaatataaaaaacattttcttgaatggcatgctagtagcagtgagcaaaggtgtgggtgtgaaaggtttccaaaaaaagttcagcatgaaggatgccatatatgttgttgccaacacttggaacacaatgactaaagacatagttgtgcatgcctggcacaacatcaagcctgtgattgtgtttattgatgatgttgaacaagtggtaactttaaaggattctgtatgccaagtgaaaaaaaaagatgtctgacctccttacatatgcaaaaatataccttcagagactgtcagtaggctggaagaagtggatattgaagttttgacatcaatgatgaggctccagttgtctattcattgactgatggtgaaatggctggagtgattctgaatcaaggtgattgtgattatagtgacaatgaagatgatgctattaatactgcataaaaagtgcctgtagatgacatggtgaaaatatttgacaggcttatggaaggactacagcagcaygcattcataacagaacaagaaattatgtcagcttataaaatcaaacagagacttctagacaaaaaccattgttgatgaggcagatgcctctagaagagacgtttaaaagccatcaaacacaatgcctcatcttccctgraggacccacttcytgatccctcaactgtgtctgatgtttcttctcatgtaagaaataaaaaataaaaataaaawaawatatattggtatgtaactacaggaaaaaaataaaaaatatatagtggacagtaacctttcaatcaaaactcagtatcataagtagagactgaaaacttgccgttattgattgttgttattaacagctgatacaggtattctgctgatgctactgctgcctagttaccatgaacacgttttttcactattaatggtgcgtcatattttttacttttaagtacttacgtgtgagtaagtgtaagaaaatgattgcttatcagtagtatcaatgatttactcaatatctgaatcaccttgattcagaaccatttcagctgtttcaccatcagtcaatgaataacagcctcattgatgtcaaaaacttcaatatccacttctttcagcctactgtagactctggaagtatactttttgcatatgtaaggaagtcagactttttttt

SEQ ID NO: 15 - DNA, 2920 bp, Homo sapiens
ttgctggcccgtcggagcgacgccgctcgggtcagtcggcggccggactgggaagatggacgcagctactctgacctacgacactctccggtttgctgagtttgaagattttcctgagacctcagagcccgtttggatactgggtagaaaatacagcattttcacagaaaaggacgagatcttgtctgatgtggcatctagactttggtttacatacaggaaaaactttccagccattgraggttgtcgggacatttcactctccagtaaatgtggcccttggcgttactgagtcctaagaggggggacaggccccacctcggacacaggctggggctgcatgctgcggtgtggacagatgatctttgcccaagccctggtgtgccggcacctaggccgagattggaggtggacacaaaggaagagrcagccagacagctacttcagcgtcctcaacgcattcatcgacaggaaggacagttactactccattcaccagatagcgcaaatgggagttggcgaaggcaagtccataggccagtggtacgggcccaacactgtcgcccaggtcctgaagaagcttgctgtcttcgatacgtggagctccttggcggtccacattgcaatggacaacactgttgtgatggaggaaatcagaaggttgtgcaggaccagcrttccctgtgcaggcgccactgcgtttcctgcagattccgaccggcactgcaayggattccctgccggagctgaggtcaccaacaggccgtcgccatggagacccctggtacttctcattcccctgcgcctggggctcacggacatcaacgaggcctacgtggagacgctgaagcactgcttcatgatgccccagtccctgggcgtcatcggagggaagcccaacagcgcccactacttcatcggctacgttggtgaggagctcatctacctggacccccacaccacgcagccagccgtggagcccactgatggctgcttcatcccggacgagagcttccactgccagcacccgccgtgccgcatgagcatcgcggagcttgacccgtccatcgctgtggggtttttctgtaagactgaagatgacttcartgattggtgccagcaagtcaaaaagctrtctctgctyggaggtgccctgcccatgtttgagctggtggagcwgcagccttcacatctggcctgccccgacgtcctgaacctgtccctaggtgagagctgccaagtccaggtggggtccctcggagattcttctgatgtagagcgactggaaagattcttcgactcagaagatgaagactttgaaatcctgtccctttgaaaatcctggggtcgggggtggcacctgtgagagcctggggctcctggtgccgctgcgtttcatccatcccgcccgctcgcctgccgagggctgcgccccgtgctgcctccccccagagggccacccgctgtgctcgtggactgaggctgcgctgcccgggaggccttactgcttggtgtcagactgcccagctcagagtgcccgtcagggcctgtgcatccgcacgcggagccgtctgttaggagcttccagagygttctctcgacactgccagccccgtgttagcacctgggcctcagtcccacttgctcccaggcgccggttctgtggttggtttggaattaaagtcctgtttgaagttgtcagacacagacatgaatttctkgggcgctccctgagtcagagtctcagaagacctgtgcaggctggcgtgagaggagcggcagccacacygcggccccacgcccaaggaytgggctgctctcgaggggggcgcgcccaccgctgtgtcctctctgcccagcctggcttaccaagggctacctcagtgggagatgaggttggaggaacgaaggcgaggttcctccttgctttggggagaaaagtattcaggaagtgggtgtgtgggaaacctgaagatggcgtgcacaggacacagcgtggkcggcctgggcagaagggcggctggctgtcctggagctgctgctggagcctgccctcagagtgtccctttccagtgctgtggcattctgtggcagcttccccaggtgtggtgacggggggggcggggcctccacctgtgacagycaggcttgagggtggacggcgtgcctctcccaggagccttccccatgtccttgccttgctgagaattgccctcccatgccgctgaggtgttaggtggtttagggccaaaaggggaaaaccacttgagtcttgtggtgtgtggtgggcagacaccacagggtggcatcacctggtggcatttccagaacctcagccccgattccagcacccaccaccgcctgaccctgtgtaacctgctgtcccgggtcccagagtgcactctgccccrctgctctgctgcctgtcctgggaaagtakctttgccccactaggaaatgtaaacaggagggcttggggagcgtgggcacttttctcatgagcagctactgcggcrttggcaggactcgctgctgctgctgctgcttgtgtaggtcggggagcyrgagatccccgaggacgcgcgccggacagtcggcactgaccggcccacctggtagcagaggacacccccagccccccaagcattgaagacatagtgtatttcctcgtatcctttctcccttgggtgtagttggggtggggaagcagggaaggctggtgcgatctccattccttgggctccrcgtccgagttcatggtgcgccgctgtgctgggagctgcagtggkaatgtgtgggacmccttgaccaaaggggagctttgtctcgtgtgttttgaaaaaggcttaatgaagagaatgttgttcattcttagtagtatagtttgcaattcttaatggcaaataataagtttcagtag

SEQ ID NO: 16 - DNA, 2821 bp, Homo sapiens
ttgctggcccgtcggagcgacgccgctcgggtcagtcggcggccggactgggaagatggacgcagctactctgacctacgacactctccggtttgctgagtttgaagattttcctgagacctcagagcccgtttggatactgggtagaaaatacagcattttcacagaaaaggacgagatcttgtctgatgtggcatctagactttggtttacatacaggaaaaactttccagccattggggggacaggccccacctcggacacaggctggggctgcatgctgcggtgtggacagatgatctttgcccaagccctggtgtgccggcacctaggccgagattggaggtggacacaaaggaagagrcagccagacagctacttcagcgtcctcaacgcattcatcgacaggaaggacagttactactccattcaccagatagcgcaaatgggagttggcgaaggcaagtccataggccagtggtacgggcccaacactgtcgcccaggtcctgaagaagcttgctgtcttcgatacgtggagctccttggcggtccacattgcaatggacaacactgttgtgatggaggaaatcagaaggttgtgcaggaccagcrttccctgtgcaggcgccactgcgtttcctgcagattccgaccggcactgcaayggattccctgccggagctgaggtcaccaacaggccgtcgccatggagacccctggtacttctcattcccctgcgcctggggctcacggacatcaacgaggcctacgtggagacgctgaagcactgcttcatgatgccccagtccctgggcgtcatcggagggaagcccaacagcgcccactacttcatcggctacgttggtgaggagctcatctacctggacccccacaccacgcagccagccgtggagcccactgatggctgcttcatcccggacgagagcttccactgccagcacccgccgtgccgcatgagcatcgcggagcttgacccgtccatcgctgtggggtttttctgtaagactgaagatgacttcartgattggtgccagcaagtcaaaaagctrtctctgctyggaggtgccctgcccatgtttgagctggtggagcwgcagccttcacatctggcctgccccgacgtcctgaacctgtccctagattcttctgatgtagagcgactggaaagattcttcgactcagaagatgaagactttgaaatcctgtccctttgaaaatcctggggtcgggggtggcacctgtgagagcctggggctcctggtgccgctgcgtttcatccatcccgcccgctcgcctgccgagggctgcgccccgtgctgcctccccccagagggccacccgctgtgctcgtggactgaggctgcgctgcccgggaggccttactgcttggtgtcagactgcccagctcagagtgcccgtcagggcctgtgcatccgcacgcggagccgtctgttaggagcttccagagygttctctcgacactgccagccccgtgttagcacctgggcctcagtcccacttgctcccaggcgccggttctgtggttggtttggaattaaagtcctgtttgaagttgtcagacacagacatgaatttctkgggcgctccctgagtcagagtctcagaagacctgtgcaggctggcgtgagaggagcggcagccacacygcggccccacgcccaaggaytgggctgctctcgaggggggcgcgcccaccgctgtgtcctctctgcccagcctggcttaccaagggctacctcagtgggagatgaggttggaggaacgaaggcgaggttcctccttgctttggggagaaaagtattcaggaagtgggtgtgtgggaaacctgaagatggcgtgcacaggacacagcgtggkcggcctgggcagaagggcggctggctgtcctggagctgctgctggagcctgccctcagagtgtccctttccagtgctgtggcattctgtggcagcttccccaggtgtggtgacggggggggcggggcctccacctgtgacagycaggcttgagggtggacggcgtgcctctcccaggagccttccccatgtccttgccttgctgagaattgccctcccatgccgctgaggtgttaggtggtttagggccaaaaggggaaaaccacttgagtcttgtggtgtgtggtgggcagacaccacagggtggcatcacctggtggcatttccagaacctcagccccgattccagcacccaccaccgcctgaccctgtgtaacctgctgtcccgggtcccagagtgcactctgccccrctgctctgctgcctgtcctgggaaagtakctttgccccactaggaaatgtaaacaggagggcttggggagcgtgggcacttttctcatgagcagctactgcggcrttggcaggactcgctgctgctgctgctgcttgtgtaggtcggggagcyrgagatccccgaggacgcgcgccggacagtcggcactgaccggcccacctggtagcagaggacacccccagccccccaagcattgaagacatagtgtatttcctcgtatcctttctcccttgggtgtagttggggtggggaagcagggaaggctggtgcgatctccattccttgggctccrcgtccgagttcatggtgcgccgctgtgctgggagctgcagtggkaatgtgtgggacmccttgaccaaaggggagctttgtctcgtgtgttttgaaaaaggcttaatgaagagaatgttgttcattcttagtagtatagtttgcaattcttaatggcaaataataagtttcagtag

SEQ ID NO: 17 - DNA, 2756 bp, Homo sapiens
ctactctgacctacgacactctccggtttgctgagtttgaagattttcctgagacctcagagcccgtttggatactgggtagaaaatacagcattttcacagaaaaggacgagatcttgtctgatgtggcatctagactttggtttacatacaggaaaaactttccagccattggggggacaggccccacctcggacacaggctggggctgcatgctgcggtgtggacagatgatctttgcccaagccctggtgtgccggcacctaggccgagattggaggtggacacaaaggaagagrcagccagacagctacttcagcgtcctcaacgcattcatcgacaggaaggacagttactactccattcaccagatagcgcaaatgggagttggcgaaggcaagtccataggccagtggtacgggcccaacactgtcgcccaggtcctgaagaagcttgctgtcttcgatacgtggagctccttggcggtccacattgcaatggacaacactgttgtgatggaggaaatcagaaggttgtgcaggaccagcrttccctgtgcaggcgccactgcgtttcctgcagattccgaccggcactgcaayggattccctgccggagctgaggtcaccaacaggccgtcgccatggagacccctggtacttctcattcccctgcgcctggggctcacggacatcaacgaggcctacgtggagacgctgaagcactgcttcatgatgccccagtccctgggcgtcatcggagggaagcccaacagcgcccactacttcatcggctacgttggtgaggagctcatctacctggacccccacaccacgcagccagccgtggagcccactgatggctgcttcatcccggacgagagcttccactgccagcacccgccgtgccgcatgagcatcgcggagcttgacccgtccatcgctgtggggtttttctgtaagactgaagatgacttcartgattggtgccagcaagtcaaaaagctrtctctgctyggaggtgccctgcccatgtttgagctggtggagcwgcagccttcacatctggcctgccccgacgtcctgaacctgtccctagattcttctgatgtagagcgactggaaagattcttcgactcagaagatgaagactttgaaatcctgtccctttgaaaatcctggggtcgggggtggcacctgtgagagcctggggctcctggtgccgctgcgtttcatccatcccgcccgctcgcctgccgagggctgcgccccgtgctgcctccccccagagggccacccgctgtgctcgtggactgaggctgcgctgcccgggaggccttactgcttggtgtcagactgcccagctcagagtgcccgtcagggcctgtgcatccgcacgcggagccgtctgttaggagcttccagagygttctctcgacactgccagccccgtgttagcacctgggcctcagtcccacttgctcccaggcgccggttctgtggttggtttggaattaaagtcctgtttgaagttgtcagacacagacatgaatttctkgggcgctccctgagtcagagtctcagaagacctgtgcaggctggcgtgagaggagcggcagccacacygcggccccacgcccaaggaytgggctgctctcgaggggggcgcgcccaccgctgtgtcctctctgcccagcctggcttaccaagggctacctcagtgggagatgaggttggaggaacgaaggcgaggttcctccttgctttggggagaaaagtattcaggaagtgggtgtgtgggaaacctgaagatggcgtgcacaggacacagcgtggkcggcctgggcagaagggcggctggctgtcctggagctgctgctggagcctgccctcagagtgtccctttccagtgctgtggcattctgtggcagcttccccaggtgtggtgacggggggggcggggcctccacctgtgacagycaggcttgagggtggacggcgtgcctctcccaggagccttccccatgtccttgccttgctgagaattgccctcccatgccgctgaggtgttaggtggtttagggccaaaaggggaaaaccacttgagtcttgtggtgtgtggtgggcagacaccacagggtggcatcacctggtggcatttccagaacctcagccccgattccagcacccaccaccgcctgaccctgtgtaacctgctgtcccgggtcccagagtgcactctgccccrctgctctgctgcctgtcctgggaaagtakctttgccccactaggaaatgtaaacaggagggcttggggagcgtgggcacttttctcatgagcagctactgcggcrttggcaggactcgctgctgctgctgctgcttgtgtaggtcggggagcyrgagatccccgaggacgcgcgccggacagtcggcactgaccggcccacctggtagcagaggacacccccagccccccaagcattgaagacatagtgtatttcctcgtatcctttctcccttgggtgtagttggggtggggaagcagggaaggctggtgcgatctccattccttgggctccrcgtccgagttcatggtgcgccgctgtgctgggagctgcagtggkaatgtgtgggacmccttgaccaaaggggagctttgtctcgtgtgttttgaaaaaggcttaatgaagagaatgttgttcattcttagtagtatagtttgcaattcttaatggcaaataataagtttcagtag

SEQ ID NO: 18 - DNA, 2362 bp, Homo sapiens
ttgctggcccgtcggagcgacgccgctcgggtcagtcggcggccggactgggaagatggacgcagctactctgacctacgacactctccggtttgctgagtttgaagattttcctgagacctcagagcccgtttggatactgggtagaaaatacagcattttcacagaaaaggacgagatcttgtctgatgtggcatctagactttggtttacatacaggaaaaactttccagccattggggggacaggccccacctcggacacaggctggggctgcatgctgcggtgtggacagatgatctttgcccaagccctggtgtgccggcacctaggccgagattggaggtggacacaaaggaagagrcagccagacagctacttcagcgtcctcaacgcattcatcgacaggaaggacagttactactccattcaccagatagcgcaaatgggagttggcgaaggcaagtccataggccagtggtacgggcccaacactgtcgcccaggtcctgaagaagcttgctgtcttcgatacgtggagctccttggcggtccacattgcaatggacaacactgttgtgatggaggaaatcagaaggttgtgcaggaccagcrttccctgtgcaggcgccactgcgtttcctgcagattccgaccggcactgcaayggattccctgccggagctgaggtcaccaacaggccgtcgccatggagacccctggtacttctcattcccctgcgcctggggctcacggacatcaacgaggcctacgtggagacgctgaagcactgcttcatgatgccccagtccctgggcgtcatcggagggaagcccaacagcgcccactacttcatcggctacgttggtgaggagctcatctacctggacccccacaccacgcagccagccgtggagcccactgatggctgcttcatcccggacgagagcttccactgccagcacccgccgtgccgcatgagcatcgcggagcttgacccgtccatcgctgtggggtttttctgtaagactgaagatgacttcartgattggtgccagcaagtcaaaaagctrtctctgctyggaggtgccctgcccatgtttgagctggtggagcwgcagccttcacatctggcctgccccgacgtcctgaacctgtccctaggtgagagctgccaagtccaggtggggtccctcggaggtacgatctgtgcccttgcttcyccagtcctggcccccttggttttgaccattaaggtgtgtgtgagcctgagccgtgagcacttggcagtggttcgcctgtgagaccaggtatggagtggagcgtcccctcctccaagcttgcgcccagcagcccaggacccacctcgtcttccccaccagcgctgcctgccsgggcgctgtggagctgggcgtgctaccatggagtcctcaggggtctggagcagacagaacatgcaggctctgtggtgacgcagtcctgggtgggggactggttcacttgggcaccactggccatgggtggcgtagacccctcggaccatggccagcgtgccgcaggagccggcctgggctcgtgcagtgaagtgagtggccgtgagcgcgtcctcctcatcyctgtctccctgtggraaactctacaaacaaggcaatggcaatggaaccactcctgatgaccacgagggtcagacgcgggacagaggcccctcaggcctgagattgtgccggccgccccctgccctcctcaccctgccctgctcctcttctctgctccctccccccatattcgcaggtctgcacaacccccggacctgttcacacccgcatggggacagctgtctgtgggctgcagagcaggcactgctcagtctgccccacgccaagggcccttractcacacccaggtggcccacccaagatgcctgatgcgctatgtcctgttccttctagattcttctgatgtagagcgactggaaagattcttcgactcagaagatgaagactttgaaatcctgtccctttgaaaatcctggggtcgggggtggcacctgtgagagcctggggctcctggtgccgctgcgtttcatccatcccgcccgctcgcctgccgagggctgcgccccgtgctgcctccccccagagggccacccgctgtgctcgtggactgaggctgcgctgcccgggaggccttactgcttggtgtcagactgcccagctcagagtgcccgtcagggcctgtgcatccgcacgcggagccgtctgttaggagcttccagagygttctctcgacactgccagccccgtgttagcacctgggcctcagtcccacttgctcccaggcgccggttctgtggttggtttgga

SEQ ID NO: 19 - DNA, 1117 bp, Homo sapiens
ttgctggcccgtcggagcgacgccgctcgggtcagtcggcggccggactgggaagatggacgcagctactctgacctacgacactctccggtttgctgagtttgaagattttcctgagacctcagagcccgtttggatactgggtagaaaatacagcattttcacagaaaaggacgagatcttgtctgatgtggcatctagactttggtttacatacaggaaaaactttccagccattggggggacaggccccacctcggacacaggctggggctgcatgctgcggtgtggacagatgatctttgcccaagccctggtgtgccggcacctaggccgagattggaggtggacacaaaggaagagrcagccagacagctacttcagcgtcctcaacgcattcatcgacaggaaggacagttactactccattcaccagatagcgcaaatgggagttggcgaaggcaagtccataggccagtggtacgggcccaacactgtcgcccaggtcctgaagaagcttgctgtcttcgatacgtggagctccttggcggtccacattgcaatggacaacactgttgtgatggaggaaatcagaaggttgtgcaggaccagcrttccctgtgcaggcgccactgcgtttcctgcagattccgaccggcactgcaayggattccctgccggagctgaggtcaccaacaggccgtcgccatggagacccctggtacttctcattcccctgcgcctggggctcacggacatcaacgaggcctacgtggagacgctgaagcactgcttcatgatgccccagtccctgggcgtcatcggagggaagcccaacagcgcccactacttcatcggctacgttggtgaggagctcatctacctggacccccacaccacgcagccagccgtggagcccactgatggctgcttcatcccggacgagagcttccactgccagcacccgccgtgccgcatgagcatcgcggagcttgacccgtccatcgctgtggtacgtggcggccacctgagcacacaggcatttggtgctgaatgctgtttgggaatgacgaggaaaactttcggatttttgcgttttttttttcagcatgttgsg

SEQ ID NO: 20 - DNA, 2816 bp, Homo sapiens
atggaggccagtaccatcgatgactcrggacayttactagccaactccccgacttcagacatattttgttccaaaatggcatcttacctttatggagtactctttgctgttggcctctgtgctccaatctactgtgtgtccccggycaatgcccccagtgcatacccccgcccttcctccacaaagagcayccctgcctcacaggtgtattccctcaacaccgactttgccttccgcctataccgcaggctggttttggagaccccgrgtcagaacatcttcttctcccctgtgagtgtctccacttccctggccatgctctcccttggggcccactcagtcaccaagaccsagattctccagggcctgggcttcaacctcacacacacaccagagtctgccatccaccagggcttccagcacctggttcactcactgactgttcycagcaaagacctgaccttgaagatgggaagtgccctcttcgtcmagaaggagctgcagctgcaggcaaatttcttgggcaatgtcaagaggctgtatgaagcagaagtcttttctacagatttctccaacccctccattgcccaggcraggatcaacagccatgtgaaaaagaagacccaagggaaggttgtagacataatccaaggccttgaccttctgacggccatggttctggtgaaycacattttctttaaagccaagtgggaraagccctttcaccytgaatatacaagaaagaacttcccattcctggtgggcgagcaggtcactgtgcawgtccccatgatgcaccagaaagagcagttcgcttttggggtggatacagagctgaactgctttgtgctgcagatggattacaagggagatgccgtggccttctttgtcctccctagcaagggcaagatgaggcaactggaacaggccttgtcagccagaacactgakaaagtggagccactcactccagaaaaggtggatagaggtgttcatccccagattttccatttctgcctcctacaatctggaaaccatcctcccgaagatgggcatccaaaatgyctttgacaaaaatgctgatttttctggaattgcaaagagagactccctgcaggtttctaaagcaacccacaaggctgtgctggatgtcagtgaagagggcactgaggccacagcagctaccaccaccaagttcatagtccgatcgaaggatggyccctcttacttcactgtctccttcaataggaccttcctgatgatgattacaaataaagccacagacgttcccagaattgacctgacaaatattgaccaggttgctgtsatcttcaaacaccattttcctgtgggtagaggtgatgcagtgctgaagacctgggcccctgctcagtgcctttgctctagaatgggtccagcttggctttggctactgggaacagggatcctggcctctgtccactgtcagccccttcttgcccatggagataaaagtctgcaggggcctcaaccccccaggcatcagctctcagagccagcccccgcctaccacagaatcacacccaccattaccaattttgctttgcgtttgtataaagagctggcagcagacgcccccggaaacatcttcttctcgccagtgagcatctccaccaccctggccctgctctctcttggggcccaagctaacacctcagctctgatcctggagggcctgggattcaacctcacagaaacccctgaagccgacatccaccagggcttccggagcctcctccacaccctkgccctgcccagccccaaactcgaactaaaagtaggaaactccctgttcctagacaagcgactaaagyctcggcagcactatttggacagcatcaaggagctttatggagcttttgctttttctgccaacttcacagattctgttacaactgggaggcagattaatgactatttgagaaggcaaacatacgggcaagtcgtggactgcctcccggagttcagccaggacacgttcatggttcttgccaattacatcttcttcaaagccaagtggaagcaccctttcagtcgctaccagacccagaagcaggmaagtttctttgtggatgagaggacttctctccaggtccccatgatgcaccaaaaggaaatgcacagattcctctatgaccaggatttggcttgcaccgtcctccagatagaatacagaggaaatgccttggcgctgctggtcctccctgacccggggaaaatgaagcaggtggaggctgctctgcagccacagaccctgagaaaatggggccaattgctcctgcccagtctgttggatttgcacttgccaaggttttcaatttctggaacatataacctggaagacatacttccccaaattggtctcaccaacatactcaacttagaagctgacttctcaggagtcactgggcagctcaacaaaaccatctccaaggtgtcacacaaggcgatggtggacatgagtgagaaggggaccgaggccggggctgcttcaggcctcctctcccagcccccatctctgaacaccatgtcagacccacatgcccacttcaacaggcctttcctcttgctcctttgggaggtcaccacccagagcttactcttcctgggaaaagttgtcaacccagttgcagggtaaccatggtgggaggccaggagttatcttatctcatcctggaccaaacagataggccagaaccagcctgcatcctggggctgctatgtggttcagttaatcagtgtgccaagattctaataaagttgaccttgggttctgtg

SEQ ID NO: 21 - DNA, 976 bp, Homo sapiens
ctgcccagggaatacagggcaacctggaagtccaactacttccttcagatcatccaatttttyaatcattatctgaaatgtttcattgtagaagcagcaatgtgggctccaagtagatgcagcagatccacatgtccctctgagggaaagccatggtgccaatrggcaagaacaccatgatgtgcaaggccatccaagggcacctggaaaacaacccagctctggaaaaaytgttgcctcatatccagggaaatgtgggctttgcgttcaccaaggaagacctcactaagttcagggacatgctgctgaatagtaaggtgccagctgccacccatgctggtgccattgccccatgtgaagtcactgtcccaggccagaacaccggtctggagcctaagaagacctcctttttccaggctttaagcatcaccactgaaatcctgagtgatgtgcagctratcaagactggtgacaaagtgggagccagtgaagccacactgctgaacatgctgaatgaacatctctcccttctcctttgggatgattatccagcagctgtttgacagtagcagtatctacaaccctgaagtgcttgacatcacataggaaactgcattctcacctcctggagggtgtcygcaatgttgccrgtgtttgcctgcagattggttacccaactgttgcatcagtacctcattctaccatcaatgggtacaagcaagtcctggctttgtctgtggaaactgattgcaccttcccacttgctgaaaaggtcaaggccttcttggccgatccatctgcctttgtggctgctgcccctggggccactgccaccactgctgctcctgctgcagctccagccaaggctgaagccaagaagagttggaggagttggatgagamtatgggatttggcctatttgactaatcaccaaaaggcaaccaactcagccagctttatttgcaaaacaaagaaa

SEQ ID NO: 22 - DNA, 836 bp, Homo sapiens
tctcttaaaacccactggacgttggcacagtgctgggatgactatggagacccaaatgtctcagaatgtatgtcccagaaacctgtggctgcttcaaccattgacagttttgctgctgctggcttctgcagacagtcaagctgcagctcccccaaaggctgtgctgaaacttgagcccccgtggatcaacgtgctccaggaggactctgtgactctgacatgcyrgggggctcgcagccctgagagcgactccattcagtggttccacaatgggaatctcattcccacccacacgcagcccagctacaggttcaaggccaacaacaatgacagcggggagtacacgtgccagactggccagaccagcctcagcgaccctgtgcatctgactgtgctttccgaatggctggtgctccagacccctcacctggagttccaggagggagaaaccatcatgctgaggtgccacagctggaaggacaagcctctggtcaaggtcacattcttccagaatggaaaatcccagaaattctcccrtttggatcccaccttctccatcccacaagcaaaccacagtcacagtggtgattaccactgcacaggaaacataggctacacgctgttctcatccaagcctgtgaccatcactgtccaagtgcccagcatgggcagctcttcaccratggggatcattgtggctgtggtcattgcgactgctgtagcagccattgttgctgctgtagtggccttgatctactgcaggaaaaagcggatttcagctctcccaggagaccctgagtgcagggaaatgggagagaccctccctgagaaaccag

SEQ ID NO: 23 - DNA, 833 bp, Homo sapiens
tctcttaaaacccactggacgttggcacagtgctgggatgactatggagacccaaatgtctcagaatgtatgtcccagaaacctgtggctgcttcaaccattgacagttttgctgctgctggcttctgcagacagtcaagctgctcccccaaaggctgtgctgaaacttgagcccccgtggatcaacgtgctccaggaggactctgtgactctgacatgcyrgggggctcgcagccctgagagcgactccattcagtggttccacaatgggaatctcattcccacccacacgcagcccagctacaggttcaaggccaacaacaatgacagcggggagtacacgtgccagactggccagaccagcctcagcgaccctgtgcatctgactgtgctttccgaatggctggtgctccagacccctcacctggagttccaggagggagaaaccatcatgctgaggtgccacagctggaaggacaagcctctggtcaaggtcacattcttccagaatggaaaatcccagaaattctcccrtttggatcccaccttctccatcccacaagcaaaccacagtcacagtggtgattaccactgcacaggaaacataggctacacgctgttctcatccaagcctgtgaccatcactgtccaagtgcccagcatgggcagctcttcaccratggggatcattgtggctgtggtcattgcgactgctgtagcagccattgttgctgctgtagtggccttgatctactgcaggaaaaagcggatttcagctctcccaggagaccctgagtgcagggaaatgggagagaccctccctgagaaaccag

SEQ ID NO: 24 - DNA, 1083 bp, Homo sapiens
atgagcatccaaaagamgtatctggagggagattttgtctttcctgtgagcagcagcagcttcctacggaccctgctggagccccagctcggatcagcccttctgacagcaatgaatgcttcgtgctgcctgccctctgttcagccaacactgcctaatggctcggagcacctccaagcccctttcttcagcaaccagagcagcagcgccttctgtgagcaggtcttcatcaagcccgagrttttcctgtctctgggcatcgtcagtckgctggaaaacatcctggttatcctggccgtggtcaggaacggcaacctgcactccccgatgtacttctttctctgcagcctggcggtggccgacatgctggtaagtgtgtccaatgccctggagaccatcatgatcgccatcgtccacagcgactacctgaccttcgaggaccagtttatccagcacatggacaacatcttcgactccatgatctgcatctccctggtggcctccatctgcaacctcctggccatcgccgtcgacaggtacgtcaccawcttttacgcgctccgctaccacagcatcatgaccgtgaggaaggccctcaccttgatcgtggccatctgggtctgctgcggcgtctgtggcgtggtgttcatcgtctactcggagagcaaaatggtcattgtgtgcctcatcaccatgttcttcgccatgatgctcctcatgggcaccctctacgtgcacatgttcytctttgcgcggctgcacgtcaagmgcatagcagcactgccacctgccgacggggtggccccacagcaacactcatgcatgaagggggcagtcaccatcaccattctcctgggcgtgttcatcttctgctgggcccccttcttcctccacctggtcctcatcatcacctgccccaccaacccctactgcatctgctacactgcccacttcaacacctacctggtcctcatcatgtgcaactccgtcatcgacccactcatctacgctttccggagcctggaattgcgcaacacctttagggagattctctgtggctgcaacggcatgaacttgggatag

SEQ ID NO: 25 - DNA, 664 bp, Homo sapiens
ataagcagcaaagtctctcacgacaccctggatgaggcggtgcaggaagtcctgcacgggaaccagtgaaagtgccccaagttcctgaagatggtggagttgcagatcagcttgaagaactatgacccccagaargacaagcgcttctcgggcaccgtcaggcttaagtccactccctgtcccaagtgtgggtcctgggggracagcagcactgtggcgagaccaaggccacggatatccccccaagtggacactgaggtgccaaaaaaactcaagaataagaatctggtcaagaagctggccaagaagsatgatgcatttttgccttcagagtctctgataaagcaaatcccacgaatcctcggcataggcctaacaaaggcagtaaagttcccttccctgctcacacacgatgaaaacacggtggccaaagtggatgaggcgaagtccacaatcaagtttcatatgaacatgttatgtttggctgtggctgttggccacgtgaagatgacagacgatgagcttgtgcataacattcacctggctgttaacttcttggtgmcactgctcgagaaaaaactggcagaatgtccgggccttatytatcaagagcaccacgggcaagccccagcgcctatattaaggcatatttgaaaagattcta

SEQ ID NO: 26 - DNA, 1451 bp, Homo sapiens
  misc_feature (1)...(1451): n = A,T,C or G, or insertion/deletion polymorphism (see Tables 1-2)
scraggatgtccttctggctgttccagtactccgcagcaggccgccccagctccgtcaccgcccggaactcccccacgtcgctgtcgaagcgcgcraactcctcccggttgtagatgtatctctccaggaagcgctgtwkccmattaarcgcytagcattcctgccytcccyggraaagytgaatcccagccatgctgattcctctccacwcatttccagtyctagasgcccacagtttcagtctcatctgcctccactcggcctcagttcctcatcactgttcctgtgctcacagtcatcaattatagaccccacaacatgcgccctgaagacagaatgttccatatcagagctgtgatcttgagagccctctccttggctttcctgctgagtytccgmggagctggggccatcaaggcggyccatgtgycaacttatgccgcgtttgtacagacgcatawaccaacaggggagtttatgtttgaatttgatgaagatgagatgttctatgtggatctggacaagaaggagaccgtctggcatstggaggagtttggccaagycttttcctttgagnctcagggcgygctggctaacattgctatattgaayaacaycttgaataccttgatccagcgytycaaccacactcaggccaccyycgatccccctgkggtgaccgtgtttcccaaggascctktgkagctgggccagcccaacaccctcatctgccacatygacaagttcttcccaccagtgrtcwrcgtcasgtggctgtgcaacggggagctggtcactgagggtgtcgctgagagcctcttcctgcccagaacannttacwgmtsccacaagttccattacctgacctttgtgccctcagcasaggacttctatgactgcagggtggagcactggggcttggaccagccgctcctcaagyactrggaygcccaagagccaatccagatgcctgagacaayggaractgtgctcwgtgccctgggcctggtgctgggcctagtcggcatcatcgtgggcaccgtcctcatcataaagtctctgcgttctggccatgacccccgggcccaggggaccctgtgaaatactgryaaggtgacaaaasatctgamcagaagargacttagkagagatrtgaactcchgctgccmwacaaactccatctcagctyttrttctcacttcatgtgaaaactactccagtggctgrcrgaattgctgacccttcaagctctgtccttatccattacctcaaagyagtcattccttagtaaagtttccaacaaatagaaattaatgacactttgrtagcyctaatatggagattatcctttcattgagccttttatcctctgttctcctttgaagaacccctcactgtcaccttcccgaraataccctaagaccaataaatycttcartatttcagagcy

SEQ ID NO: 27 - DNA, 1513 bp, Homo sapiens
tccaggatgtccttctggctgttccagtactccgcagsaggccgccccagctccgtcaccgcccggaactcccccacgtcgctgtcgaagcgcgygaartccycccggttgtagatgtatctctccaggaagcgytgtrtcccattaawcgcgtagcattcctgccgtccctggaaaagcaccttccagcgtcctctttacccagcaacagagaatgtcagctctatgatttctctgataggtgaatcccagccatgctgattrytctccacccattsccagtgmtagaggcrcacagttkcagtctratctgccthcactcgmwctcagttcctcatcactgytcrtgtgctcacagtcatcaattatagaccccacaacrtrcgccctgaagacagaatgttccatatcagagctgtgatcttgagayccctctccttggctttcctgctgagtctccgaggagctggggccatcaargcggyccatgtgtcaacttatgccgcgtttgtacagacgcatagaccaacaggggagtttatgtttgaatttgatgaagatgagrtgttctatgtggatctggacaygaaggrgaccgtctggcytctrgagyrgtttggccaagccttttcctttgaygctcagggcgggctggctaacattgctatattgaacaacaacttgaataccttgarccagcgttccaaccakactcaggccaccaacgatccccctgaggtgaccgtgtttcccaaggagcctgtggagctgggccagcccaacaccctcatctgccacattgacaagttcttcccaccagtgctcaacgtcacgtggctgtgcascggggagctggtcactgagggtgtcgctgagagcctcttcctgcccagaacagattacagcttccacaagttccattacctgacctttgtgccctcagcagaggacttctatgactgcagggtggagcaytggggcttggaccagccgctcctcaarcawtgggaggcccaagagccaatccagatgcctgayacaacggagactgtgctctgtgccctgggcctggtgctgggcctagrcggcathatcgtgggcaccgtcctcatcataaagtctctgcgttctggccatgacccccggrcccagggraccytgtgaaatactgtaaaggtgacaaaatatctgaackgyayaggacttrgragagatctgaactccagctyccctacaayctccatctcagcttttcttctcacttcatgtgaraactactccagtggctgactgaattgctgacccttcaagctctgtccttatccattacctcaaagcagtcattccttagtaaagtttccaacaaatagaaattaatgacactttggtagcactaatatggagattatcctttcattgagccttttatcctctgttctcctttgaagaacccctcactgtcaccttcccgagaataccctaagaccaataaatacttcagtatttcagagcg

SEQ ID NO: 28 - DNA, 1410 bp, Homo sapiens
  misc_feature (1)...(1410): n = A,T,C or G, or insertion/deletion polymorphism (see Tables 1-2)
scraggatgtccttctggctgttccagtactccgcagcaggccgccccagctccgtcaccgcccggaactcccccacgtcgctgtcgaagcgcgcraactcctcccggttgtagatgtatctctccaggaagcgctgtwkccmattaarcgcytagcattcctgccytcccyggraaagygctagaggcccacagtttcagtctcatctgwctccactcggyctcagstcctcatcactgttcctgtgctcacagtcatcaattatagaccccacaacatgcgccctgaagacagaatgttccatatcagagctgtgatcttgagagccctctccttggctttcctgctgagtctccgaggagctggggccatcaaggcggaccatgtgtcaacytatgmcgcgtttgtacagacgcatagaycaacaggygagtttatgtttgaatttgatgaagatgagwtgttctatgtggatctggacaagaaggagaccgtctggcatctggaggagtttggccaagccttttcctttgaggctcagggsgggctggctaacattgctytattgaacaacaanttgaataccytgatccagcgttccaaccacactcyggccyccaacgatccccctgaggtgaycytgtttcccaaggagcctgtyyagctgggccagkccaacaccctcatctgccacastgakaakttcttcccaccagtgctcaacgtcacgtggctgtycaacggggagctggtcactgarggwrtcgctsagagcctcttcctgcccagaacagattacagcttccacaagttccattacctgacctttgtgccnncagcwgmgsacttctatgactgcaggytggrgcactggggwttggaccagccgctcctcaagcactgggaggcccaagagccaatccagatgcctgagacaacggagactgtgctctgtgccctgggcctggtgctgggcctagtcggcatcatcrygggcaccgtcctsatcatamagtctctrcgttctgkccatgarccccgggchcaggggmwcctgtgaaatactgtaaaygtracaaaatatctgaacagaagaggacttaggagagrtrtgaactccagctgccctacaaactccatctcagcttttcttctcayttcatgtgaaaactactccagtggctgactgaattgctgacccttcaagrtctgyccttatccattacctcaaagcagtcattccttagtaaagtttccaacaaatagaaattaatgacactttggtagcactartatggagattatcctttcattyagcctrttatcctctgtyctcrtttyragaacccctcactgtcaccttcccyagaataccctaagaccaataaatacttcagtatttcagagcg

SEQ ID NO: 29 - DNA, 2975 bp, Homo sapiens
tccgaggcttctagtgccacgaaggcctcctgcctgggttgtccttatggcgcctgtgagtttagttctagaaaagatatttgtattttaacttttccatctaacaaacagtagcacaggcatcttagtctggacaacaacgtacaagctgaattcctggctagttccctcattatcaaaccctgacacagtagtaggcgcgagtcaggcagtgtggggacagccccgagttgccgaaagtccccggcccgttttcctcctgtgaagacatagctgcgggtggctgtgctggtggcgttcaagatgtcgaccaagaatttccgagtcagtgacggggactggatttgccctgacaaaaaatgtggaaatgtaaactttgctagaagaaccagctgtaatcgatgtggtcgggttgcagcaatgtgaattgggccagaagatcagagtgtaatatgtgtaatactccaaagtatgctaaattagaagaaagaacaggatatggtggtggttttaatgaaagagaaaatgttgaatayatagaaagagaagaatctgatggtgaatatgatgagtttggacgtaaaaagaaaaaatacagagggaaagcagttggtcctgcatctatattaaaggaagttgaagataaagaatcagagggagaagaagaggatgaggatgaagatctttctaaatataagttagatgaggatgaggatgaagatgacgctgatctctcaaaatataatcttgatgccagtgaagaagaagatagtaataaaaagaaatctaatagacgaagtcgctcaaagtctsgatcttcacattcacgatcttcatcacgctcatcctccccctcaagttcaaggtctaggtccaggtcccgttcaagaagttcttccagttcgcagtcaagatctcgttccagttccagagaacgttcgagatctcgtgggtcgaaatcaagatccagctccaggtcccacaggggctcttcttccccacgaaaaagatcytattcaagttcatcatcttctcctgagaggaacagaaagagaagtcgttctagatcttcttcatctggtgatcgcaaaaaaagacgaacaagatcacggtcacccgaaagacgccacaggtcatcatctggatcatcccattctggttcccgttcaagttcaaaaaagaaataatgtattaaaatttacatcttaaaaaaatccagtacagtgcatgaagcatatttttaaagaagttggtgtcttacttggtcagaagtgctaaatctgctagtagaggtgcatgcctttcattgcttttcaaaacaatacagctgtgtttatttgtgaagttaaaagtaaatagcattttaagccataatgtcccaaaatagatgttctgtcattcattatttacaaccatttgcttcatttaaaaccatttcagctataacaaagtactttgcttcctaatttaaacccatttttgtcatttccaaatacatcctgtccattggctaagacaggattacctaggcttgcctgaactttgggcatggaagaaagactggaaactagttggaaacaacatacttatggaaaagaaagtcagcctttttatgctgttaacagatgtcagagtgattctcaccaaaaaaagttaaactatgttgtaagcagccaactgtaaatgtctattttgaaattccytatgctaagggtgccttagaatcattgtgtctcttttatccagctttacttttttgctccacatttaatgcaaaagaatcttgtgatgtctacaaggagagaagtgggatatattttcctttctgacacataatttggggcaaaaaagaaagtcttaagagtttatcttttctctgctgatacggttgcttgataaagacatctcaaaatgtttaccaatgttttaagaagctttgtgtgatattcttccaaatgtagttaccaaatataatatggtagaaaaggctaaatcatacttaatgagcaaattgaagtaagcttttaaagtatatttctcttttggtgaaaggccaatggagacattgtgaatttaagtgaacatttgcctcaagatgttaactataaacacactgcatacaattttcttctgaataacaaatgaatgcttattgctgcatgatgtaagcaaaagtcattatttttcctattcatttgaaataagttatggcttaaaatgcttttggagtttatttctcaaaattaaaatctggtcacatgagctttagtttgttttctggtttaaaaaataaaaaggtttctcttaacagtatttccagtgacaatgcaaggtaagtatatcaaaggaaatcaacagttgtgcttgggggctttttgttatgggatattgatttcttgttttttttccgtaacattgtctgctgcaatttaaataaaaattacgacattttaagatatttcatagacaaaccaaacaaaaawatatgtttttactttaaagtgaatgtttttctcttcagctgatctaaaaatgaaagcaaratatcttatgtagaaatattttgataatatttttacagtgagctttcccatgtttttatgtcttaagtttctttgctgcgtttatgtaggttgcacaagaacttttactcacttgtaattgtgcctcagactttttgaaagtctaccttctaaattgccccgacgatctagattctacatgttaccattggtttattcttgtgctttctgtatttaaaactttggctgtactaagcaaatgcaaggttataatttagctaatagtagtttacagacaattctgatgattatgatttcatttggtttaactaagctgtactagttcatttcataaggaaatgatactgtagacaaatgtaaataaagcctgtgagtcaagcatcaagtggtgtttgttagaaataaactagagatttttaaactctgatctaa

SEQ ID NO: 30 - DNA, 2217 bp, Homo sapiens
tccgaggcttctagtgccacgaaggcctcctgcctgggttgtccttatggcgcctgtgagtttagttctagaaaagatatttgtattttaacttttccatctaacaaacagtagcacaggcatcttagtctggacaacaacgtacaagctgaattcctggctagttccctcattatcaaaccctgacacagtagtaggcgcgagtcaggcagtgtggggacagccccgagttgccgaaagtccccggcccgttttcctcctgtgaagacatagctgcgggtggctgtgctggtggcgttcaagatgtcgaccaagaatttccgagtcagtgacggggactggatttgccctgacaaaaaatgtggaaatgtaaactttgctagaagaaccagctgtaatcgatgtggtcgggagaaaacaactgaggccaagatgatgaaagctgggggcactgaaataggaaagacacttgcagaaaagagccgaggcctatttagtgctaatgactggcaatgtaaaacttgcagcaatgtgaattgggccagaagatcagagtgtaatatgtgtaatactccaaagtatgctaaattagaagaaagaacaggatatggtggtggttttaatgaaagagaaaatgttgaatayatagaaagagaagaatctgatggtgaatatgatgagtttggacgtaaaaagaaaaaatacagagggaaagcagttggtcctgcatctatattaaaggaagttgaagataaagaatcagagggagaagaagaggatgaggatgaagatctttctaaatataagttagatgaggatgaggatgaagatgacgctgatctctcaaaatataatcttgatgccagtgaagaagaagatagtaataaaaagaaatctaatagacgaagtcgctcaaagtctsgatcttcacattcacgatcttcatcacgctcatcctccccctcaagttcaaggtctaggtccaggtcccgttcaagaagttcttccagttcgcagtcaagatctcgttccagttccagagaacgttcgagatctcgtgggtcgaaatcaagatccagctccaggtcccacaggggctcttcttccccacgaaaaagatcytattcaagttcatcatcttctcctgagaggaacagaaagagaagtcgttctagatcttcttcatctggtgatcgcaaaaaaagacgaacaagatcacggtcacccgaaagacgccacaggtcatcatctggatcatcccattctggttcccgttcaagttcaaaaaagaaataatgtattaaaatttacatcttaaaaaaatccagtacagtgcatgaagcatatttttaaagaagttggtgtcttacttggtcagaagtgctaaatctgctagtagaggtgcatgcctttcattgcttttcaaaacaatacagctgtgtttatttgtgaagttaaaatgcttttggagtttatttctcaaaattaaaatctggtcacatgagctttagtttgttttctggtttaaaaaataaaaaggtttctcttaacagtatttccagtgacaatgcaaggtaagtatatcaaaggaaatcaacagttgtgcttgggggctttttgttatgggatattgatttcttgttttttttccgtaacattgtctgctgcaatttaaataaaaattacgacattttaagatatttcatagacaaaccaaacaaaaawatatgtttttactttaaagtgaatgtttttctcttcagctgatctaaaaatgaaagcaaratatcttatgtagaaatattttgataatatttttacagtgagctttcccatgtttttatgtcttaagtttctttgctgcgtttatgtaggttgcacaagaacttttactcacttgtaattgtgcctcagactttttgaaagtctaccttctaaattgccccgacgatctagattctacatgttaccattggtttattcttgtgctttctgtatttaaaactttggctgtactaagcaaatgcaaggttataatttagctaatagtagtttacagacaattctgatgattatgatttcatttggtttaactaagctgtactagttcatttcataaggaaatgatactgtagacaaatgtaaataaagcctgtgagtcaagcatcaagtggtgtttgttagaaataaactagagatttttaaactctgatctaa

SEQ ID NO: 31 - DNA, 3084 bp, Homo sapiens
tccgaggcttctagtgccacgaaggcctcctgcctgggttgtccttatggcgcctgtgagtttagttctagaaaagatatttgtattttaacttttccatctaacaaacagtagcacaggcatcttagtctggacaacaacgtacaagctgaattcctggctagttccctcattatcaaaccctgacacagtagtaggcgcgagtcaggcagtgtggggacagccccgagttgccgaaagtccccggcccgttttcctcctgtgaagacatagctgcgggtggctgtgctggtggcgttcaagatgtcgaccaagaatttccgagtcagtgacggggactggatttgccctgacaaaaaatgtggaaatgtaaactttgctagaagaaccagctgtaatcgatgtggtcgggagaaaacaactgaggccaagatgatgaaagctgggggcactgaaataggaaagacacttgcagaaaagagccgaggcctatttagtgctaatgactggcaatgtaaaacttgcagcaatgtgaattgggccagaagatcagagtgtaatatgtgtaatactccaaagtatgctaaattagaagaaagaacaggatatggtggtggttttaatgaaagagaaaatgttgaatayatagaaagagaagaatctgatggtgaatatgatgagtttggacgtaaaaagaaaaaatacagagggaaagcagttggtcctgcatctatattaaaggaagttgaagataaagaatcagagggagaagaagaggatgaggatgaagatctttctaaatataagttagatgaggatgaggatgaagatgacgctgatctctcaaaatataatcttgatgccagtgaagaagaagatagtaataaaaagaaatctaatagacgaagtcgctcaaagtctsgatcttcacattcacgatcttcatcacgctcatcctccccctcaagttcaaggtctaggtccaggtcccgttcaagaagttcttccagttcgcagtcaagatctcgttccagttccagagaacgttcgagatctcgtgggtcgaaatcaagatccagctccaggtcccacaggggctcttcttccccacgaaaaagatcytattcaagttcatcatcttctcctgagaggaacagaaagagaagtcgttctagatcttcttcatctggtgatcgcaaaaaaagacgaacaagatcacggtcacccgaaagacgccacaggtcatcatctggatcatcccattctggttcccgttcaagttcaaaaaagaaataatgtattaaaatttacatcttaaaaaaatccagtacagtgcatgaagcatatttttaaagaagttggtgtcttacttggtcagaagtgctaaatctgctagtagaggtgcatgcctttcattgcttttcaaaacaatacagctgtgtttatttgtgaagttaaaagtaaatagcattttaagccataatgtcccaaaatagatgttctgtcattcattatttacaaccatttgcttcatttaaaaccatttcagctataacaaagtactttgcttcctaatttaaacccatttttgtcatttccaaatacatcctgtccattggctaagacaggattacctaggcttgcctgaactttgggcatggaagaaagactggaaactagttggaaacaacatacttatggaaaagaaagtcagcctttttatgctgttaacagatgtcagagtgattctcaccaaaaaaagttaaactatgttgtaagcagccaactgtaaatgtctattttgaaattccytatgctaagggtgccttagaatcattgtgtctcttttatccagctttacttttttgctccacatttaatgcaaaagaatcttgtgatgtctacaaggagagaagtgggatatattttcctttctgacacataatttggggcaaaaaagaaagtcttaagagtttatcttttctctgctgatacggttgcttgataaagacatctcaaaatgtttaccaatgttttaagaagctttgtgtgatattcttccaaatgtagttaccaaatataatatggtagaaaaggctaaatcatacttaatgagcaaattgaagtaagcttttaaagtatatttctcttttggtgaaaggccaatggagacattgtgaatttaagtgaacatttgcctcaagatgttaactataaacacactgcatacaattttcttctgaataacaaatgaatgcttattgctgcatgatgtaagcaaaagtcattatttttcctattcatttgaaataagttatggcttaaaatgcttttggagtttatttctcaaaattaaaatctggtcacatgagctttagtttgttttctggtttaaaaaataaaaaggtttctcttaacagtatttccagtgacaatgcaaggtaagtatatcaaaggaaatcaacagttgtgcttgggggctttttgttatgggatattgatttcttgttttttttccgtaacattgtctgctgcaatttaaataaaaattacgacattttaagatatttcatagacaaaccaaacaaaaawatatgtttttactttaaagtgaatgtttttctcttcagctgatctaaaaatgaaagcaaratatcttatgtagaaatattttgataatatttttacagtgagctttcccatgtttttatgtcttaagtttctttgctgcgtttatgtaggttgcacaagaacttttactcacttgtaattgtgcctcagactttttgaaagtctaccttctaaattgccccgacgatctagattctacatgttaccattggtttattcttgtgctttctgtatttaaaactttggctgtactaagcaaatgcaaggttataatttagctaatagtagtttacagacaattctgatgattatgatttcatttggtttaactaagctgtactagttcatttcataaggaaatgatactgtagacaaatgtaaataaagcctgtgagtcaagcatcaagtggtgtttgttagaaataaactagagatttttaaactctgatctaa

SEQ ID NO: 32 - DNA, 3197 bp, Homo sapiens
tccgaggcttctagtgccacgaaggcctcctgcctgggttgtccttatggcgcctgtgagtttagttctagaaaagatatttgtattttaacttttccatctaacaaacagtagcacaggcatcttagtctggacaacaacgtacaagctgaattcctggctagttccctcattatcaaaccctgacacagtagtaggcgcgagtcaggcagtgtggggacagccccgagttgccgaaagtccccggcccgttttcctcctgtgaagacatagctgcgggtggctgtgctggtggcgttcaagatgtcgaccaagaatttccgagtcagtgacggggactggatttgccctgacaaaaaatgtggaaatgtaaactttgctagaagaaccagctgtaatcgatgtggtcgggagaaaacaactgaggccaagatgatgaaagctgggggcactgaaataggaaagacacttgcagaaaagagccgaggcctatttagtgctaatgactggcaatgtaaaacttgcagcaatgtgaattgggccagaagatcagagtgtaatatgtgtaatactccaaagtatgctaaattagaagaaagaacaggatatggtggtggttttaatgaaagagaaaatgttgaatayatagaaagagaagaatctgatggtgaatatgatgagtttggacgtaaaaagaaaaaatacagagggaaagcagttggtcctgcatctatattaaaggaagttgaagataaagaatcagagggagaagaagaggatgaggatgaagatctttctaaatataagttagatgaggatgaggatgaagatgacgctgatctctcaaaatataatcttgatgccagtgaagaagaagatagtaataaaaagaaatctaatagacgaagtcgctcaaagtctsgatcttcacattcacgatcttcatcacgctcatcctccccctcaagttcaaggtctaggtccaggtcccgttcaagaagttcttccagttcgcagtcaagatctcgttccagttccagagaacgttcgagatctcgtgggtcgaaatcaagatccagctccaggtcccacaggggctcttcttccccacgaaaaagatcytattcaagttcatcatcttctcctgagaggaacagaaagagaagtcgttctagatcttcttcatctggtgatcgcaaaaaaagacgaacaagatcacggtcacccgaaagccaggtgattggtgaaaacactaaacaaccctgagcccagggccaacccctacggaacaccactactttacccagacgccacaggtcatcatctggatcatcccattctggttcccgttcaagttcaaaaaagaaataatgtattaaaatttacatcttaaaaaaatccagtacagtgcatgaagcatatttttaaagaagttggtgtcttacttggtcagaagtgctaaatctgctagtagaggtgcatgcctttcattgcttttcaaaacaatacagctgtgtttatttgtgaagttaaaagtaaatagcattttaagccataatgtcccaaaatagatgttctgtcattcattatttacaaccatttgcttcatttaaaaccatttcagctataacaaagtactttgcttcctaatttaaacccatttttgtcatttccaaatacatcctgtccattggctaagacaggattacctaggcttgcctgaactttgggcatggaagaaagactggaaactagttggaaacaacatacttatggaaaagaaagtcagcctttttatgctgttaacagatgtcagagtgattctcaccaaaaaaagttaaactatgttgtaagcagccaactgtaaatgtctattttgaaattccytatgctaagggtgccttagaatcattgtgtctcttttatccagctttacttttttgctccacatttaatgcaaaagaatcttgtgatgtctacaaggagagaagtgggatatattttcctttctgacacataatttggggcaaaaaagaaagtcttaagagtttatcttttctctgctgatacggttgcttgataaagacatctcaaaatgtttaccaatgttttaagaagctttgtgtgatattcttccaaatgtagttaccaaatataatatggtagaaaaggctaaatcatacttaatgagcaaattgaagtaagcttttaaagtatatttctcttttggtgaaaggccaatggagacattgtgaatttaagtgaacatttgcctcaagatgttaactataaacacactgcatacaattttcttctgaataacaaatgaatgcttattgctgcatgatgtaagcaaaagtcattatttttcctattcatttgaaataagttatggcttaaaatgcttttggagtttatttctcaaaattaaaatctggtcacatgagctttagtttgttttctggtttaaaaaataaaaaggtttctcttaacagtatttccagtgacaatgcaaggtaagtatatcaaaggaaatcaacagttgtgcttgggggctttttgttatgggatattgatttcttgttttttttccgtaacattgtctgctgcaatttaaataaaaattacgacattttaagatatttcatagacaaaccaaacaaaaawatatgtttttactttaaagtgaatgtttttctcttcagctgatctaaaaatgaaagcaaratatcttatgtagaaatattttgataatatttttacagtgagctttcccatgtttttatgtcttaagtttctttgctgcgtttatgtaggttgcacaagaacttttactcacttgtaattgtgcctcagactttttgaaagtctaccttctaaattgccccgacgatctagattctacatgttaccattggtttattcttgtgctttctgtatttaaaactttggctgtactaagcaaatgcaaggttataatttagctaatagtagtttacagacaattctgatgattatgatttcatttggtttaactaagctgtactagttcatttcataaggaaatgatactgtagacaaatgtaaataaagcctgtgagtcaagcatcaagtggtgtttgttagaaataaactagagatttttaaactctgatctaatgttcatttttaaactaattacagttttctgttacctt

SEQ ID NO: 33 - DNA, 3485 bp, Homo sapiens
ctgtggaagctgaggaagcgtcggtgacaggaagaggggtggtgtcacctgtggatgctgaggaagggctggtgacaggaagaggggtggcgttgctgatgagggccgtggtgaaggttttaccagaccctgaaggtgacagagtgtgggtctgggtttgtggagatgtaagcccastggatgtgatcgatggaggtgtgggtgggactgttgagaaggtgtcggttgcctgggacgccaggctgatagtgtcagaccctctgctggttcttgtcctctgagtctgggccatccgggaaatggcggctgtctcctgaggagaggcactgggagaagttgggcttgactgtcctgtcggtctccctgcagtggaggcctcagagagggtgggatgaaaggtgccggggacgatcgaagacgccattcctgtgcttactgggatggcaccatgactggctgaggcggacagcaattcggttgttgactgggttgtgtgactgtccctggaggggtttgatgaaaaccttgtcgtctctcctgaggtggatattccttcgcttcctgaaggtgttgtgccactcgccccggatgaggaaggggtagctgtgcccgctgaggtggttcgtgaccctgaggaggccggttcgctggtctgtgtttgtccagaggcctctgtgctctcagcctggtgggtatgggtcatggctgctgctgtgtcaggtgaggtgctggcagaggctgatgtccattgtccttctgggccccctggtgttgacactacagagttggccagagtaagggcacctgttttggaaagtgacgtgcctcctgagggccccagggtggcatcatggctgctgggtgytgcctgcagtgctgtggtcggggcctgggttgtgtgaccatccccggtgggagctggggcaaaggttgttgctgcacttatggtgggtgcgtcctgaggaacaatttctgagggcgagtgcccactggctgtgaaggaagaacctggggtggtgactgtcttggtgtcagtcatggggkagacggacctcgtggtttgtgattcttgtgtggtctgcggggcttgagtgtgacccctttgggaaacagctggtgattcctgaggagaggtgcttgtggaatgtattgttgaatgatttgttgatggtgccgttgtaatttgttgkgatgtgtgtctatccagcataggtgaagaagatggggatgtggccgtttttatcatctgagtcacactgtagcttgggctgctgagaagagcctctccagtggtccccgtttcttgtgtccattgtgtctgggcgcctgcccctgttgtttttgggagagttgtgctgtgggaggagtatgtggtgggctctcctggttcccctattgctgagaccttagaggggacccttggaatagtgccagctgyccctgtagatggatttcctgtgacaagcctagtggcagcacctgttgatgttgagggcagttctgtttgtgaccaagttgtgtggcctttgctggagaatgaggaaggccatgttgttgtttcatgtagagtaaatatttcttgagacacacctggagagaatgagctcctctcatgaggcygtcctgtggtctctgcaccttcactctgctgggtgtggaaagctgtggatatttttggaggtaragaactgggggagagtgctgttgacagagtgtctgaccaccatatggttgaaactttggaagtgattgcagaaatggttccacttacagatagtgatgtctcctctgtgtttccaagagtagagtctctggagrttggcattctgaacacctttgatgttaccaggaatgtattgctgacactggaaggggatgagrtggttgtttcaccagaagggaatgtctcctgagaaactgttccacttgggttgaatccacttggtgaggataaaacagttgatgttgtaaccggtgtgagggtgttgagggtgttgatttgagatactctggtggtctccacgctctgagtctggtggttcttagaaaaagctgttgtgtcctgagkagaagtccttgagaaagttgctggtgattgtccttctggatcaamtgttactaaggctgctgaggtgactggcataagacttccagtaacaggtactgatgatgtctcccctgggtttccaagagtggagcctgtggaggttgtcactgttatcttctctgatgtcatcatggatgtgtttgtgacactacagagggatgaggtagctgtttcacctgaaggagatgtcttctgagaaacagtccctgtcacattgtgtacacttggagagaaagaaggagttgaagtggttctgtgtgttagggtgctggtttgagattccctggtggtctgcgtgctccgagtccagtggttctgagaagaagctgatgtgtcttggatagaggtcctccaggaagttkttcgtgattgtccttcctgtccagctgttattgagactgctgaggtcactggggtagaactttcagttcctgctgttgatgtctcttctgtgtttccaagagtggagtctgtggaggttgtcattgttatagtctttgatgtcatcatgagtgtgttggtgacactggagggaaatgatgtggtcatttcatctggaggagctgtctcctgcgtaacagtctccatcacattgtgtacacttggggaagaaaaaagagttgatgtcatcatctgcgtgagggtgtcggtttgagctttgctggtggtctccgtgctcttagtctggtggttctgagatgaagctgatatgtcctgattagaggtccttgaagaagctgcagttgattgtccctctagtgtcgctgttgttgagcctgttgaggtgactggggcagsagttttacttccagttattaatgtgtcctctgtggttcctggaaccacatgcggaaggaggcagagacacaggcagctcagggacacccaggggaccctcctccagcgtgcccccttcatggctgcggcaaaagtccccctggctccctggggaagctccacggcccagcagctgcagtgtgaggagcagacgtgagcccgtcccctcaggcggctggcccgaaccaagtgcgtttctccgaaggggccagggaacctgggaagaggacaaaagagggcggggccccacgctaatcacccttttctctcctcagccccaccccactaccccaccaggaaagaaaacaccgatacacccgttgctctgcttctcatcagcctgagctgagtggcgggagggatgggaggagacatgggggaatgggaacaggtcacactggaaatgggtgggccaccctcctagccgggttcctgggtcctctcctccctccccaggggctgcccctgtcccaccagagctttgggctgctgggaagaatggggaagaaagggccccagagggagcgaccttggggctgta

SEQ ID NO: 34 - DNA, 1757 bp, Homo sapiens
tggcgcagagaggacacttccggtctcctagtctgaggttcctgctttaatgaccggggtagtttgagccatttctgcgtcttgcaggacattttgaacgaaccccctttgcttgaggctcgcaaccacccgatgatcgatgatcgtctcaggggaaaagaagccttggcgaagagcagaggtttagaggcacaattctsctttccctggaactgtgtcattcaggactctgcaaattccctaaagtaggaggaaaaatgaccatgtccaaggaggcagtgaccttcaaggatgtggcagtggtcttcactgaggaggagctggggctgctggaccttgcccagaggaagctgtatcgagatgtgatgctggagaacttcaggaacctgctgtcagtggggcatcaaccattccaccgagatactttccactttmtaagggaggaaaagttttggatgatggatatagcaacccaaagrgaagggaattcaggaggcaagatccaacctgagatgaagacttttccagaagcaggaccacatgaagggtggtcctgccagcagatctgggaagaaattgcaagtgatttaaccaggcctcaagactctaccataaagagctctcagttctttgaacagggtgatgcccactcccaggttgaggaaggamtatctataatgcacacaggacagaaaccttccaattgtgggaagtgtaaacaatccttcagtgatatgtccatctttgatcttcctcagcaaatacgctcagcagagaagtctcattcctgtgatgagtgtggaaaaagcttctgttacatctcagcrcttcatattcatcagagagtccacctgggagagaaactctttaagtgtgacgtgtgtggtaaggaattcagtcagagtttacatctgcaaactcatcagagagtccatactggagagaaacctttcaaatgtgaacaatgtgggagaggcttcagatgtagatcagcacttacagttcattgcaaattacacatgggagagaaacattataattgtgaggcatgtgggagggccttcattcatgatttccagcttcagaaacatcagagaattcacacaggggagaagccattcaaatgtgagatatgtagtgtgagcttccgtcttaggtcaagtcttaataggcattgtgtggtccacacaggaaagaaaccaaacagcactggggaatatggaaaargcttcrttcgtaggctggatttgtgtaagcatcagacgatccacacaggagagaaaccatataattgtaaagaatgtgggaagagcttcagacggtcctcctatcttttgatccatcagcgagtccacactggagaaaagccatacaaatgtgacaagtgtgggaagagctacattactaagtcaggtcttgacttgcaccayagagcccacacaggagagagaccttataactgtgatgactgtgggaagagctttagacaggcctcaagtattttgaatcataagagactccattgccgaaaaaaaccattcaaatgtgaggattgtggaaagaagcttgtataccggtcataccgtaaagaccaacaaaaaaaccacagtggagaaaatccatccaaatgtgaagactgtgggaagcgctacaagaggcgcttgaatcttgatataattttatcattatttttaaatgacacaaaccactcaattaaaaaaatgggcaaagggctgggtgcagtgtcatgcctgtaa

SEQ ID NO: 35 - DNA, 2232 bp, Homo sapiens
tggcgcagagaggacacttccggtctcctagtctgaggttcctgctttaatgaccggggtagtttgagccatttctgcgtcttgcaggacattttgaacgaaccccctttgcttgaggctcgcaaccacccgatgatcgatgatcgtctcaggggaaaagaagccttggcgaagagcagaggtttagaggcacaattctsctttccctggaactgtgtcattcaggactctgcaaattccctaaagtaggaggaaaaatgaccatgtccaaggaggcagtgaccttcaaggatgtggcagtggtcttcactgaggaggagctggggctgctggaccttgcccagaggaagctgtatcgagatgtgatgctggagaacttcaggaacctgctgtcagtggggcatcaaccattccaccgagatactttccactttmtaagggaggaaaagttttggatgatggatatagcaacccaaagrgaagggaattcaggaggcaagatccaacctgagatgaagacttttccagaagcaggaccacatgaagggtggtcctgccagcagatctgggaagaaattgcaagtgatttaaccaggcctcaagactctaccataaagagctctcagttctttgaacagggtgatgcccactcccaggttgaggaaggamtatctataatgcacacaggacagaaaccttccaattgtgggaagtgtaaacaatccttcagtgatatgtccatctttgatcttcctcagcaaatacgctcagcagagaagtctcattcctgtgatgagtgtggaaaaagcttctgttacatctcagcrcttcatattcatcagagagtccacctgggagagaaactctttaagtgtgacgtgtgtggtaaggaattcagtcagagtttacatctgcaaactcatcagagagtccatactggagagaaacctttcaaatgtgaacaatgtgggagaggcttcagatgtagatcagcacttacagttcattgcaaattacacatgggagagaaacattataattgtgaggcatgtgggagggccttcattcatgatttccagcttcagaaacatcagagaattcacacaggggagaagccattcaaatgtgagatatgtagtgtgagcttccgtcttaggtcaagtcttaataggcattgtgtggtccacacaggaaagaaaccaaacagcactggggaatatggaaaargcttcrttcgtaggctggatttgtgtaagcatcagacgatccacacaggagagaaaccatataattgtaaagaatgtgggaagagcttcagacggtcctcctatcttttgatccatcagcgagtccacactggagaaaagccatacaaatgtgacaagtgtgggaagagctacattactaagtcaggtcttgacttgcaccayagagcccacacaggagagagaccttataactgtgatgactgtgggaagagctttagacaggcctcaagtattttgaatcataagagactccattgccgaaaaaaaccattcaaatgtgaggattgtggaaagaagcttgtataccggtcataccgtaaagaccaacaaaaaaaccacagtggagaaaatccatccaaatgtgaagactgtgggaagcgctacaagaggcgcttgaatcttgatataattttatcattatttttaaatgacacgtaagtgttgtacatatttatggggtacagtgtgatatttaaatatatgtatatgatgtataatgatcaaatcagtgtaattagcacatttatcacctcaattatctcttttttgtgttgagaaaattaaaaattcattgttccagcagtttgaaaataaattgttgtcgatgatagtcacctttagtgctgcagaacagcagaacttcttcctcttatctacctgtacttttgcatccattagccaacctttggccatcccacctatcccttacccttccctgcctctagagccactgttctcactacttctaagaaatcagctttttaagcttccccatgtgattgaggacagtttgaagttagtgtttcagccatagctcagcataccccagtggtcgtgggactgtcagagcagagaatgctgcagggtttctaacagaagtttgacaattagttattattcaggagacaggtcttagtataagagtttgttcacacactttcaaaacactaatgatgaacatgtc

SEQ ID NO: 36 - DNA, 2322 bp, Homo sapiens
tggcgcagagaggacacttccggtctcctagtctgaggttcctgctttaatgaccggggtagtttgagccatttctgcgtcttgcaggacattttgaacgaaccccctttgcttgaggctcgcaaccacccgatgatcgatgatcgtctcaggggaaaagaagccttggcgaagagcagaggtttagaggcacaattctsctttccctggaactgtgtcattcaggactctgcaaattccctaaagtaggaggaaaaatgaccatgtccaaggaggcagtgaccttcaaggatgtggcagtggtcttcactgaggaggagctggggctgctggaccttgcccagaggaagctgtatcgagatgtgatgctggagaacttcaggaacctgctgtcagtggggcatcaaccattccaccgagatactttccactttmtaagggaggaaaagttttggatgatggatatagcaacccaaagrgaagggaattcaggaggcaagatccaacctgagatgaagacttttccagaagcaggaccacatgaagggtggtcctgccagcagatctgggaagaaattgcaagtgatttaaccaggcctcaagactctaccataaagagctctcagttctttgaacagggtgatgcccactcccaggttgaggaaggamtatctataatgcacacaggacagaaaccttccaattgtgggaagtgtaaacaatccttcagtgatatgtccatctttgatcttcctcagcaaatacgctcagcagagaagtctcattcctgtgatgagtgtggaaaaagcttctgttacatctcagcrcttcatattcatcagagagtccacctgggagagaaactctttaagtgtgacgtgtgtggtaaggaattcagtcagagtttacatctgcaaactcatcagagagtccatactggagagaaacctttcaaatgtgaacaatgtgggagaggcttcagatgtagatcagcacttacagttcattgcaaattacacatgggagagaaacattataattgtgaggcatgtgggagggccttcattcatgatttccagcttcagaaacatcagagaattcacacaggggagaagccattcaaatgtgagatatgtagtgtgagcttccgtcttaggtcaagtcttaataggcattgtgtggtccacacagtaagcatcagacgatccacacaggagagaaaccatataattgtaaagaatgtgggaagagcttcagacggtcctcctatcttttgatccatcagcgagtccacactggagaaaagccatacaaatgtgacaagtgtgggaagagctacattactaagtcaggtcttgacttgcaccayagagcccacacaggagagagaccttataactgtgatgactgtgggaagagctttagacaggcctcaagtattttgaatcataagagactccattgccgaaaaaaaccattcaaatgtgaggattgtggaaagaagcttgtataccggtcataccgtaaagaccaacaaaaaaaccacagtggagaaaatccatccaaatgtgaagactgtgggaagcgctacaagaggcgcttgaatcttgatataattttatcattatttttaaatgacacgtaagtgttgtacatatttatggggtacagtgtgatatttaaatatatgtatatgatgtataatgatcaaatcagtgtaattagcacatttatcacctcaattatctcttttttgtgttgagaaaattaaaaattcattgttccagcagtttgaaaataaattgttgtcgatgatagtcacctttagtgctgcagaacagcagaacttcttcctcttatctacctgtacttttgcatccattagccaacctttggccatcccacctatcccttacccttccctgcctctagagccactgttctcactacttctaagaaatcagctttttaagcttccccatgtgattgaggacagtttgaagttagtgtttcagccatagctcagcataccccagtggtcgtgggactgtcagagcagagaatgctgcagggtttctaacagaagtttgacaattagttattattcaggagacaggtcttagtataagagtttgttcacacactttcaaaacactaatgatgaacatgtcaaaattgatgaccactagaatgtcagccacatgtgtctttgtatttttgctgcatccttacattgcttgagtctggaagattgaggctgcastgacctatggtagtgctactgcactccagccagggcaacagagtgagaccctgtctcca

SEQ ID NO: 37 - DNA, 3572 bp, Homo sapiens
tgtcaacgaatcatccacgcacctgcagctctgctgagagagtgcaagccgtgggaattcagcagctgaatatcaagacctttgaattcaacaagaagttaagacatttatagttgtctaacaacagactgaagattgtggcttggtattcactggcaggtttcagacatttagatctttcttttaatgactaacaccatgcctatctgtggagaagctggcaacatgtcacacctggaaattgtttttcaacattaatactattatttggcagtaatccagattgcttttgccaccaacctgaagacatatagaggcagaaggacaggaataattctatttgmttcctgttttgaaacttccatctgtaaggctatcaaaaggagatgtgagagagggtattgagtctggcctgacaatgcagttcttaaaccaaaggtccattatgcttctcctctctgagaatcctgacttacctcaacaacggagacatggcacagtagccagcttggagacttctcagccaatgctctgagatcaagtcgaagacccaatatacagggttttgagctcatcttcatcattcatatgaggaaataagtggtaaaatccttggaaatacaatgagactcatcagaaacatttacatattttgtagtattgttatgacagcagagggtgatgctccagagctgccagaagaaagggaactgatgacraactgctccaacatgtctctaagaaaggttcccgcagacttgaccccagccacaacgacactggatttatcctataacctcctttttcaactccagagttcagattttcattctgtrtccaaactgagagttttgattctatgccataacagaattcaacagctggatctcaaaacctttgaattcaacaaggagttaagatatttagatttgtctaataacagactgaagagtgtaacttggtatttactggcaggtctcaggtatttagatctttcttttaatgactttgacaccatgcctatctgtgaggaagctggcaacatgtcacacktggaaatcctaggtttgagtggggcaaaaatacaaaaatcagatttccagaaaattgctcatctgcatctaaatactgtcttcttaggattcagaactcttcctcattatgaagaaggtagcctgcccatcttaaacacaacaaaactgcacattgttttaccaatggacacaaatttctgggttcttttgcgtgatggaatcaagacttcaaaaatattagaaatgacaaatmtagatggcaaaagccaatttgtaagttatgaaatgcaacgaaatcttagtttagaaaatgctaagacatcggttctattgcttaataaagttgatttactctgggacgaccttttccttatcttacaatttgtttggcatacatcagtggaacactttcagatccgaaatrtgacttttggtggtaargcttatcttgaccacaattcatttgactactcaaatactgtaatgagaactataaaattggagcatgyacatttcagagtgttttacattcaacaggataaaatctatttgcttttgaccaakatggacatagaaaacctgacaatatcaaatgcacaaatgccacacatgcttttcccgaattatcctacgaaamtcyaatatttaaattttgccaataatatcttaacagrcgagttgtttaaaagaactatccaactgcctcacttgaaaactctcattttgaatggcaataaactggagacactttctttagtaagttgctttgctaacaacacacccttggaacacttggatctgagtcaaaatctatyacaacataaaaatgatgaaaattgctcatggccagaaactgtggtcaatatgaatctgtcatacaataaattgtctgattctgtcttcaggtgcttgcccaaaagtattcaaatacttgacctaaataataaccyaatccaaactgtacctaaagagactattcatctgatggccttacgagaactaaatattgcatttaattttctaactgatctccctggatgcagtcatttcagtagactttcagttctgaacattgaaatgaacttcattctcagcccatctctggattttgttcagagctgccaggaagttaaaactctaaatgcgggaagaaatccattccggtgtacctgtgaattaaaaaatttcattcagcttgaaacatattcagaggtcatgatggttggatggtcagattcatacacctgtgaataccctttaaacctaaggggaactaggttaaaagacgttcatctccacgaattatcttgcaacacagctctgttgattgtcaccattgtggttattatgctagttctggggttggctgtggccttctgctgtctccactttgatctgccctggtatctcaggatgctaggtcaatgcacacaaacatggcacagggttaggaaaacaacccaagaacaactcaagagaaatgtccgattccacgcatttatttcatacagtgaacatgattctctgtgggtgaagaatgaattgatccccaatctagagaaggaagatggttctatcttgatttgcctttatgaaagctactttgaccctggcaaaagcattagtgaaaatattgtaagcttcattgagaaaagctataagtccatctttgttttgtctcccaactttgtccagaatgagtgytgccattatgaattctactttgcccaccacaatctcttccatgaaaattctgatcatataattcttatcttactggaacccattccattctattgcattcccaccaggtatcataaactgaaagctctcctggaaaaaaaagcatacttgraatggcccaaggataggcgtaaatgtgggcttttctgggcaaaccttcgagctgctattaatgttaatgtatragccaccagagaaatgtatgaactgcagacyttcacagagttaaatgaagagtctcgaggttctacaatctctctgatgagaacagattgtctataaaatcccacagtccttgggaagttggggaccacatacactgttgggatgtacattgatacaacctttatgatggcaatttgacaatatttattaaaataaaaaatggttattcccttcatatcagtttctagaaggatttctaagaatgtatcctatagaaacaccttcacaagtttataagggcttatggaaaaaggtgttcatcccaggattgtttataatcatgaaaaatgtggccaggtgcagtggctcactcttgtaatcccagcactatgggaggccaaggtgggtgacccacgaggtcaagagatggagaccatcctggccaacatggtgaaaccctgtctctactaaaaatacaaaaattagctgggcgtgatggtgcacgcctgtagtcccagctacttgggaggctgaggcaggagaatcgcttgaacccgggaggtggcagttgcagtgagctgagatcgagccactgcactccagcctggtgacagagcgagactccatctc

SEQ ID NO: 38 - DNA, 3066 bp, Homo sapiens
tgtcaacgaatcatccacgcacctgcagctctgctgagagagtgcaagccgtgggggttttgagctcatcttcatcattcatatgaggaaataagtggtaaaatccttggaaatacaatgagactcatcagaaacatttacatattttgtagtattgttatgacagcagagggtgatgctccagagctgccagaagaaagggaactgatgaccaactgctccaacatgtctctaagaaaggttcccgcagacttgaccccagccacaacracactggatttatcctataacctcctttttcaactccagagttcagattttcattctgtctccaaactgagagttttgattctatgccataacagaattcaacagctggatctcaaracctttgaattcaacaaggagttaagatatttagatttgtctaataacagactgaagagtgtaacttggtatttactggcaggtctcaggtatttagatctttcttttaatgactttgacaccatgcctatctgtgaggaagctggcaacatgtcacacctggaaatcctaggtttgagtggggcaaaaatacaaaaatcagatttccagaaaattkctcatctgcatctaaatactgtcttcttaggattcagaactcttcctcattatgaagaaggtagcctgcccatcttaaacacaacaaaactgcacattgttttaccaatggacacaaatttctgggttcttttgcgtgatggaatcaagacttcaaaaatattagaaatgacaaatatagatggcaaaagccaatttgtaagttatgaaatgcaacgaaatcttagtttagaamatgctaagacatcggttctattgcttaataaagttgatttactctgggacgaccttttccttatcttacaatttgtttggcatacatcagtggaacactttcagatccgaaatgtgacttttggtggtaaggcttatcttgaccacaattcatttgactactcaaatactrtaatgagaactataaarttggagcatgtacatttcagagtgttttacattcaacaggataaaatctatttgcttttgaccaaaayggacatagaaaacctgacaatatcaaatgcacaaatgccacacatgcttttccckaattatcctacgaaattccaatatttaaattttgccaataatatcttaacagacgagttgtttaaaagaactmtcyaactgcctcacttgaaaactctcattttgaatgrcaataaactggagacactttctttagtaagttgctttgctaacaacacacccttggaacacttggatctgagtcaaaatctattacaacataaaaatgatgaaaattgctcatggccagaaactgtggtcaatatgaatcygtcatacaataaattgtctgattctgtcttcaggtgcttgcccaaaagtattcaaatacttgacctaaataataaccaaatccaaactgtacctaaagagactattcatctgatggccttacgagaactaaataytgcatttaattttctaactgatctccctggatgcagtcatttcagtagactttcagttctgaacattgaaatgaacttcattctcagcccatctctggattttgttcagagctgccaggaagttaaaactctaaatgcgggaagaaatccattccggtgtacctgtgaattaaaaaatttcattcagcttgaaacatattcagaggtcatgatggttggatggtcagattcatacacctgtgaataccctttaaacctaaggggaactaggttaaaagacgttcatctccacgaattatcttgcaacacagctctgttgattgtcaccattgtggttattatgctagttctggggttggctgtggccttctgctgtctccactttgatctgccctggtatctcaggatgctaggtcaatgcacacaaacatggcacagggttaggaaaacaacccaagaacaactcaagagaaatgtccgattccacgcatttatttcatacagtgaacatgattctctgtgggtgaagaatgaattgatccccaatctagagaaggaagatggttctatcttgatttgcctttatgaaagctactttgaccctggcaaaagcattagtgaaaatattgtaagcttcattgagaaaagctataagtccatctttgttttgtctcccaactttgtccagaatgagtggtgccattatgaattctactttgcccaccacaatctcttccatgaaaattctgatcayataattcttatcttactggaacccattccattctattgcattcccaccaggtatcataaactgaaagctctcctggaaaaaaaagcatacttggaatggcccaaggataggcgtaaatgtgggcttttctgggcaaaccttcgagctgctrttaatgttaatgtattagccaccagagaaatgtatgaactgcagacattcacagagttaaatgaagagtctcraggttctacaatctctctgatgagaacagaytgtctataaaatcccacagtccttgggaagttggggaccacatacactgttgggatgtacattgatacaacctttatgatggcaatttgacaatatttattaaaataaaaaatggttattcccttcatatcagtttctagaaggatttctaagaatgtatcctatagaaacaccttcacaagtttataagggcttatggaaaaaggtgttcatcccaggattgtttataatcatgaaaaatgtggccaggtgcagtggctcactcttgtaatcccagcactatgggaggccaaggtgggtgacccacgaggtcaagagatggagaccatcctggccaacatggtgaaaccctgtctctactaaaaatacaaaaattagctgggcgtgatggtgcacgcctgtagtcccagctacttgggaggctgaggcaggagaatcgcttgaacccgggaggtggcagttgcagtgagctgagatcgagccactgcactccagcctggtgacagagcgagactccatctc

SEQ ID NO: 39 - DNA, 360 bp, Homo sapiens
atggcaggcctgatgaccatagtaaccagccttctgttccttggtgtctgtgcccaccacatcatccctacgggctctgtggtcmtcccctytccctgctgcatgttctttgtttccaagagaattcctgagaaccgagtggtcrgctaccagctgtccagcaggagcacatgcctcaaggcaggagtgatcttcaccaccaagaagggccagcagttctgtggcgaccccaagcaggagtgggtccagaggtacatgaagaacctggacgccaagcagaagaaggcttcccctagggccagggcagtggctgtcaagggccctgtccagagatatcctggcaaccaaaccacctgctaa

SEQ ID NO: 40 - DNA, 4576 bp, Homo sapiens
ccgcccggcccgggacccgctcgcgcagacttctcgggcggactgaggacgccgccgctcggggccgcccctgtgctcgccttcagcgcccgctcagcccgccgtccgcgccccggtggcgggcccgacgcccgcattccgcccgcgggccccgcggcccgcgcgctsggcgccctgctygccgggcagaggggaaggcggcggccggctggggatgggcggcccggctgcgccgaggggcgccgggaggctccgcgcgctgctgctggcgctggtggtcgcggggatccccgcgggcgcctacaacctygacccgcagcgccccgtgcacttccagggccccgctgactcgttcttcggctacgcagttctggagcatttccacgacaacacgcgctgggtccttgtgggcgcaccaaaggcagattccaaatacagcccttcagtgaagtctcctggggctgtgtttaagtgccgtgttcacaccaaccctgaccggagatgcacmgaactggacatggctcgagggaagaatcggggcacgtcctgcggaaagacctgccgggaagaccgcgatgatgagtggatgggggtgagcctggcccgrmagcccaaggctgatggccgtgtgttggcctgtgctcatcgctggaagaacatctactatgaagccgaccacatcctaccccatggcttctgctacatcatcccctccaacctccaggccaaaggcaggacrctgatcccttgctatgaagagtataagaagaagtacggagaggaacayggctcctgccaggctgggatagcgggcttcttcacygaggagctggtggtgatgggtgctccagggtcattttattgggctggaaccatcaaagtgctgaaccttacggacaacacctatttaaaactgaacgacgaagtgatcatgaacaggcggtacacctacctgggctacgcagtgaccgctggccacttctctcacccgtccaccattgatgtggtaggaggtgccccacaggacaaaggcatcggcaaggtttatattttcagagctgaccgaagatcaggcaccttaattaagatctttcaagcatcaggtaaaaagatgggctcttacttcggctcctccttgtgcgcagttgacctgaatggggacggcctctctgacctgctggtgggggcccccatgttttctgagatcagggatgagggacaggtcactgtctacatcaacagaggaaatggagccctcgaggagcagctggctctgactggggatggtgcctacaatgcgcactttggagagagcattgccagcctggacgatctggacaatgatgggttcccagatgtggccattggtgcacccaaggaggatgacttcgcaggggcggtctatatctatcatggtgatgccrgtgggatagtccctcagtactcaatgaaactgtctgggcagaagataaatccagtgctccggatgtttggtcagtccatatcgggaggcattgatatggatggaaatggctatcctgatgtcactgttggagccttcatgtccgacagcgtggttcttctcagagcaaggcctgtcattacggtggatgtctccatcttcctcccgggctccatcaacatcacagcgcctcagtgtcacgacggacagcagcctgtgaactgcctgaacgtcaccacctgcttcagcttccatggcaaacacgttccagragagattggcctgaattatgttctgatggctgacgtggccaaaaaggagaagggccagatgcccagggtctactttgtgctgctgggagagaccatgggtcaggtcacagagaagctgcagctgacttacatggaggagacrtgtcgtcactaygtggcccatgtgaagcrgagggtgcaggacgtcatcagcccgatcgtgtttgaagcagcctacagcctcagtgagcatgtgactggagaggaggagagggaactgccgcctctgacaccagttctccgctggaaaaagggacaaaagattgcccaaaagaatcagactgtttttgaaaggaattgccgttcagaggactgtgccgcagacctgcagcttcrgggtaaactgctgctctccagtatggatgagaaaaccctgtatctagctttgggggctgtgaagaacatctccctaaacatctctatctccaacctcggagatgatgcctatgatgccaacgtgtccttcaatgttycccgggagctcytcttcatcaacatgtggcagmaggaggagatgggcatctcctgtgagctgctggaatcggacttcctcaaatgcagcgtgggatttcctttcatgaggtcaaagtcaaagtatgaattcagcgtgatctttgatacaagccacctgtctggggaagaggaagttctcagcttcattgttactgctcagagtggcaacacggagcgctctgaatccctgcatgacaacaccctcgtgctgatggtgccactgatgcacgaggtggacacgtccatcaccggaatcatgtctccaacctcctttgtatatggcgagtccgtggacgcagccaacttcattcagctggatgacctggagtgtcactttcagcccatcaatatcacccttcaggtctacaacactggcccaagcacccttccagggtcatctgtcagcatctctttccctaatcgactctcatctggtggtgcagagatgtttcatgtccaggaaatggtggtgggccaagagaagggaaactgctctttccagaaaaacccaactccctgcatcatccctcaagaacaagaaaatatcttccacacaatatttgcttttttcacaaagtctggaagaaaagtcttggactgtgaaaaaccaggaatttcttgcctaacagcacactgtaactttagtgctcttgctaaagaagaaagtcgtactatagacatttacatgctgctgaacacagaaatactgaaaaaggacagttcgtctgtcatccagttcatgtcccgcgccaaggtgaaggtggatcctgccctaagggtggtggaaatagctcatgggaacccagaagaggtgacggtggtcttcgaggccctgcacaatctggagccccgtggctacgtcgtggggtggatcatcgccatcagtttgttggtgggaatcctcatcttcctgctgctggccgtgctgctctggaagatgggcttctttcgccgaaggtacaaagaaattatcgaagctgagaagaaccggaaagagaatgaagacagttgggactgggtccagaaaaaccagtgagctgccacaccagtcacatgacctgatcactagcctgtcatccttggtctttgtatcttccatatttggaagaaaaaaatcttctccagatttttcggaggccccactgatgctgttctcttcttcattctatcaagcccaggtgccagyctgaggcagccacttcggccaggtcacacgaccggggccagcaccacttcctttaaaratgaactctgaactttggagagtgagctacagagccgagcaatatttatggatgcaacacgcatggtcaaccctcaggggaaaactgttacctaaagtatttttataaatataagccttttatactgattatgtcttttatatttgtatcgatgttttattatttctattaaatagttatataattcactcaagcactgatatctggcctaaaatcttggaagtacatgtccatgaatacaaattttaaaggatgaaaatcttaccgtactttggaacttgctgtttaaaaagacagatgaaataagttgaagaaacctcatgtaatgaatccaccaggctggcagtggtgcatataaactgtgggtgtggcaagaccccgaagacatttcacatctttatcgcctcgatcaagtgtggagtcacatgctaatgtgtgctaaagaactgtaagtgttttttcatatgtacttttcattggaagattcccaacaagaatttggatggaaaacctgatccctagcaagaagtctgctctgtatcacctttatatagcagacatgtcaccctgcttctacacagatgatggatgaaagcttggagcaatgccatgtggtcatctggtaaacctcagaatggcgtctcatcctggacatcctgcatcagagttcacacaccacaaggactaaatccttgtcccctaagcaaagaattgggtctgaatgctgtgagggattgcctttttgtggtaattttcattgagagatcttcatttcccctaccaccctggctgtcccagctagtggtgattgcagattccttcccagagaggacatttaaccgttttaaaaaaaatgtcttagattgggttcccaagaagcagtccctgaaacaaggatttgtgtgcaagtaacttattaaggaagtattcccaggggataccagtaagagagtgggggaagcaggacaaggaaggagacaaagccaggcaaatgtttgtcatttcagggagagctccatgaagtttagcctcagcctgatcagggg

SEQ ID NO: 41 - DNA, 4432 bp, Homo sapiens
gcgggccccgcggcccgcgcgctsggcgccctgctygccgggcagaggggaaggcggcggccggctggggatgggcggcccggctgcgccgaggggcgccgggaggctccgcgcgctgctgctggcgctggtggtcgcggggatccccgcgggcgcctacaacctygacccgcagcgccccgtgcacttccagggccccgctgactcgttcttcggctacgcagttctggagcatttccacgacaacacgcgctgggtccttgtgggcgcaccaaaggcagattccaaatacagcccttcagtgaagtctcctggggctgtgtttaagtgccgtgttcacaccaaccctgaccggagatgcacmgaactggacatggctcgagggaagaatcggggcacgtcctgcggaaagacctgccgggaagaccgcgatgatgagtggatgggggtgagcctggcccgrmagcccaaggctgatggccgtgtgttggcctgtgctcatcgctggaagaacatctactatgaagccgaccacatcctaccccatggcttctgctacatcatcccctccaacctccaggccaaaggcaggacrctgatcccttgctatgaagagtataagaagaagtacggagaggaacayggctcctgccaggctgggatagcgggcttcttcacygaggagctggtggtgatgggtgctccagggtcattttattgggctggaaccatcaaagtgctgaaccttacggacaacacctatttaaaactgaacgacgaagtgatcatgaacaggcggtacacctacctgggctacgcagtgaccgctggccacttctctcacccgtccaccattgatgtggtaggaggtgccccacaggacaaaggcatcggcaaggtttatattttcagagctgaccgaagatcaggcaccttaattaagatctttcaagcatcaggtaaaaagatgggctcttacttcggctcctccttgtgcgcagttgacctgaatggggacggcctctctgacctgctggtgggggcccccatgttttctgagatcagggatgagggacaggtcactgtctacatcaacagaggaaatggagccctcgaggagcagctggctctgactggggatggtgcctacaatgcgcactttggagagagcattgccagcctggacgatctggacaatgatgggttcccagatgtggccattggtgcacccaaggaggatgacttcgcaggggcggtctatatctatcatggtgatgccrgtgggatagtccctcagtactcaatgaaactgtctgggcagaagataaatccagtgctccggatgtttggtcagtccatatcgggaggcattgatatggatggaaatggctatcctgatgtcactgttggagccttcatgtccgacagcgtggttcttctcagagcaaggcctgtcattacggtggatgtctccatcttcctcccgggctccatcaacatcacagcgcctcagtgtcacgacggacagcagcctgtgaactgcctgaacgtcaccacctgcttcagcttccatggcaaacacgttccagragagattggcctgaattatgttctgatggctgacgtggccaaaaaggagaagggccagatgcccagggtctactttgtgctgctgggagagaccatgggtcaggtcacagagaagctgcagctgacttacatggaggagacrtgtcgtcactaygtggcccatgtgaagcrgagggtgcaggacgtcatcagcccgatcgtgtttgaagcagcctacagcctcagtgagcatgtgactggagaggaggagagggaactgccgcctctgacaccagttctccgctggaaaaagggacaaaagattgcccaaaagaatcagactgtttttgaaaggaattgccgttcagaggactgtgccgcagacctgcagcttcrgggtaaactgctgctctccagtatggatgagaaaaccctgtatctagctttgggggctgtgaagaacatctccctaaacatctctatctccaacctcggagatgatgcctatgatgccaacgtgtccttcaatgttycccgggagctcytcttcatcaacatgtggcagmaggaggagatgggcatctcctgtgagctgctggaatcggacttcctcaaatgcagcgtgggatttcctttcatgaggtcaaagtcaaagtatgaattcagcgtgatctttgatacaagccacctgtctggggaagaggaagttctcagcttcattgttactgctcagagtggcaacacggagcgctctgaatccctgcatgacaacaccctcgtgctgatggtgccactgatgcacgaggtggacacgtccatcaccggaatcatgtctccaacctcctttgtatatggcgagtccgtggacgcagccaacttcattcagctggatgacctggagtgtcactttcagcccatcaatatcacccttcaggtctacaacactggcccaagcacccttccagggtcatctgtcagcatctctttccctaatcgactctcatctggtggtgcagagatgtttcatgtccaggaaatggtggtgggccaagagaagggaaactgctctttccagaaaaacccaactccctgcatcatccctcaagaacaagaaaatatcttccacacaatatttgcttttttcacaaagtctggaagaaaagtcttggactgtgaaaaaccaggaatttcttgcctaacagcacactgtaactttagtgctcttgctaaagaagaaagtcgtactatagacatttacatgctgctgaacacagaaatactgaaaaaggacagttcgtctgtcatccagttcatgtcccgcgccaaggtgaaggtggatcctgccctaagggtggtggaaatagctcatgggaacccagaagaggtgacggtggtcttcgaggccctgcacaatctggagccccgtggctacgtcgtggggtggatcatcgccatcagtttgttggtgggaatcctcatcttcctgctgctggccgtgctgctctggaagatgggcttctttcgccgaaggtacaaagaaattatcgaagctgagaagaaccggaaagagaatgaagacagttgggactgggtccagaaaaaccagtgagctgccacaccagtcacatgacctgatcactagcctgtcatccttggtctttgtatcttccatatttggaagaaaaaaatcttctccagatttttcggaggccccactgatgctgttctcttcttcattctatcaagcccaggtgccagyctgaggcagccacttcggccaggtcacacgaccggggccagcaccacttcctttaaaratgaactctgaactttggagagtgagctacagagccgagcaatatttatggatgcaacacgcatggtcaaccctcaggggaaaactgttacctaaagtatttttataaatataagccttttatactgattatgtcttttatatttgtatcgatgttttattatttctattaaatagttatataattcactcaagcactgatatctggcctaaaatcttggaagtacatgtccatgaatacaaattttaaaggatgaaaatcttaccgtactttggaacttgctgtttaaaaagacagatgaaataagttgaagaaacctcatgtaatgaatccaccaggctggcagtggtgcatataaactgtgggtgtggcaagaccccgaagacatttcacatctttatcgcctcgatcaagtgtggagtcacatgctaatgtgtgctaaagaactgtaagtgttttttcatatgtacttttcattggaagattcccaacaagaatttggatggaaaacctgatccctagcaagaagtctgctctgtatcacctttatatagcagacatgtcaccctgcttctacacagatgatggatgaaagcttggagcaatgccatgtggtcatctggtaaacctcagaatggcgtctcatcctggacatcctgcatcagagttcacacaccacaaggactaaatccttgtcccctaagcaaagaattgggtctgaatgctgtgagggattgcctttttgtggtaattttcattgagagatcttcatttcccctaccaccctggctgtcccagctagtggtgattgcagattccttcccagagaggacatttaaccgttttaaaaaaaatgtcttagattgggttcccaagaagcagtccctgaaacaaggatttgtgtgcaagtaacttattaaggaagtattcccaggggataccagtaagagagtgggggaagcaggacaaggaaggagacaaagccaggcaaatgtttgtcatttcagggagagctccatgaagtttagcctcagcctgatcagggg

SEQ ID NO: 42 - DNA, 2437 bp, Homo sapiens
  misc_feature (1)...(2437): n = A,T,C or G, or insertion/deletion polymorphism (see Tables 1-2)
nncgggtcgggctggcgggcggcgcgggtggcggcggcggcatggcggagccgcggggccgagacgaggccccccattcgggtcaccgtcaagacccccaaggacaaggaggaaattgtgatctgcgatcgagcctcggtcaaggagttcaaagaggaaatctcccggaggtttaaggctcagcaggatcagctggtcctgatcttcgcaggcaagatcctcaaggatggggacacactgaaccagcacggaatcaaggacgggctcactgtccatctggtcatcaagacccctcagaaggctcaagatccagctgctgccactgcttcttccccctccacacctgaccctgcctcagcaccctccaccacgcctgcttcacccgccacccctgcccagccctccacctctggcagtgcctcttcagatgctggcagtggaagccggaggagcagtggtggggggccctctccgggggctggggagggatcccccagtgctactgcgtccatactctctggctttgggggcatcctggggctgggcagcctaggcctgggctctgccaacttcatggagctgcagcagcagatgcagcggcagctgatgtccaatcctgagatgctgtcacagatcatggagaaccccctggtccaggatatgatgtctaaccctgatctgatgcgtcacatgattatggccaacccccagatgcagcagttgatggagcggaaccctgagatcagccacatgctcaataaccctgaactcatgaggcagacaatggagcttgctcggaatccagccatgatgcaagagatgatgcggaaccaggaccgggccctgagcaaccttgagagcatccctggagggtataatgccctccgccgcatgtacacggacatccaggagcccatgttcagtgctgcccgggaacagtttggcaacaatcccttctcttccctggccgggaactccgacagctcatcctcccagcctctgcggactgagaatcgagagcccctccctaacccctggagcccctcgccccccacctttaaactttcagtggctgtgcagagtcgagggaggaaccagctctctggtttactggaacatagtcttccatctataccactagggttttgtcttatgtttacttttggtaactctcttccttctttttctccctaccccccaacccctagcccaaccaatgctagaatttctcgctctgaaggaggagcaggtgaaacaggtggtaattttccttctcggcccctattctggttcattcagcactttttggtgggaactgttggaaattccagggtaaggaggaagatgcctgttctccctgtctgaagagggagatgagacagctctctggacaggaattaacaaacgctggagcagcccagaggaaattgatgtgaaagaggagggaatgagattattcggaggaagggaatgggggagacagcctgagtaaaaggcttggaagttggaattarcagtggggagcagaagcactcatagctcttttaggcagaagaatccaggcccgagctggcagaagagacttagagatgctaatggaatttaaactgaaaaaaggagcccaatgaagctaagcgccacgccccacaaggggtcatattggctttagttcctcaagcatatgtgcttatatgcacacacacacacatttccatggacccaggtcttgcttgtgtccccaggcaccagtagtttgagcccccctcaaaagacatgaagggggttggggtctgtgtgagtagtggggaggtgcatgtgtatccacatgtgtgcatacactcttaagttgggtgggaagtggattccttgttggtttctggttcagagtgctctcccaccaccagagacaagtgggtaaaaaggtcagtccattgcaggaatatatatccgggagagctaggtcccttggggctctggatgctgggtaacccagaggtaatgtgggtaccctttctgaagctgtcagggctgtgactagcacccttatcacccctcactgccttgtgggaatagtagagggtttttttcctccagascccctggcctttcagttcttaactatttccctccaggccagaaagttttctttgaggaaggagaggagagggtggcaatgatgcctttgatctggaattggacatttctctgtcagagcacagaggaggctcatatcacctcttccctctcctacttggcccagctgcttggaggaccgaccccatggctgagaatatgacggcaagaggaacagagtttgctccaagtgggaaagggtcccaagcagtccagagaagatgtctgtgtggctttccctccctgcctcccccagctcccacactggcctttgtaaataaatggcgtggtctttgttgtgaga

SEQ ID NO: 43 - DNA, 3524 bp, Homo sapiens
  misc_feature (1)...(3524): n = A,T,C or G, or insertion/deletion polymorphism (see Tables 1-2)
nncgggtcgggctggcgggcggcgcgggtggcggcggcggcatggcggagccgcggggccgagacgaggccccccattcgggtcaccgtcaagacccccaaggacaaggaggaaattgtgatctgcgatcgagcctcggtcaaggagttcaaagaggaaatctcccggaggtttaaggctcagcaggatcagctggtcctgatcttcgcaggcaagatcctcaaggatggggacacactgaaccagcacggaatcaaggacgggctcactgtccatctggtcatcaagacccctcagaaggctcaagatccagctgctgccactgcttcttccccctccacacctgaccctgcctcagcaccctccaccacgcctgcttcacccgccacccctgcccagccctccacctctggcagtgcctcttcagatgctggcagtggaagccggaggagcagtggtggggggccctctccgggggctggggagggatcccccagtgctactgcgtccatactctctggctttgggggcatcctggggctgggcagcctaggcctgggctctgccaacttcatggagctgcagcagcagatgcagcggcagctgatgtccaatcctgagatgctgtcacagatcatggagaaccccctggtccaggatatgatgtctaaccctgatctgatgcgtcacatgattatggccaacccccagatgcagcagttgatggagcggaaccctgagatcagccacatgctcaataaccctgaactcatgaggcagacaatggagcttgctcggaatccagccatgatgcaagagatgatgcggaaccaggaccgggccctgagcaaccttgagagcatccctggagggtataatgccctccgccgcatgtacacggacatccaggagcccatgttcagtgctgcccgggaacagtttggcaacaatcccttctcttccctggccgggaactccgacagctcatcctcccagcctctgcggactgagaatcgagagcccctccctaacccctggagcccctcgccccccacctcccaggcccccgggtccggtggggagggcaccggaggatcggggaccagccaggtgcacccgacagtctcgaacccctttgggatcaatgcggctagcctggggtcagggatgttcaatagcccagaaatgcaagccctcctccagcagatctctgagaacccccagctgatgcagaatgtgatctcagcaccctacatgcgcagcatgatgcagacgcttgcccagaaccccgactttgctgctcagatgatggtgaatgtgccgctcttcgcggggaacccccaactgcaggagcagctccgcctgcagctcccagtcttcctgcagcagatgcagaacccagagtcactctccatccttaccaatccccgagccatgcaggcattgctgcagatccagcagggactacagaccttgcagaccgaggcccctgggctggtacccagccttggctcctttgggatrtcccggaccccagcacmctcagcaggcagcaacgcagggtctacgcccgaggcccccacttcctcaccagccacgccagccacatcttctccaacaggggcttccagygcccagcagcaactcatgcagcagatgatccagcttttggctggaagtggaaactcacaggtgcagacgccagaagtgagatttcagcagcagctggagcagctcaactccatgggcttcatcaatcgtgaggctaacctgcaggccctgattgccacaggaggggacatcaacgcagctatcgagagactgctgggctcccagctctcctaatccctcggcccatgcctcctgcctctcccctccctcgatgtcagcattcggttcttctgtcaatccttaccctctgcagcttgtcctcccttccgtcttctccctcatcctttccaaacagcagggtgactttagaggcatgggctccaaccccttagctctgtctgagaattatggttttactgctacgtctctaacagactcttctctcctggtctccttgagcagtgctacttaaacagttttcacagtttcattgattgactctacctccttgccccacaccacttttgcaatctttaaactttcagtggctgtgcagagtcgagggaggaaccagctctctggtttactggaacatagtcttccatctataccactagggttttgtcttatgtttacttttggtaactctcttccttctttttctccctaccccccaacccctagcccaaccaatgctagaatttctcgctctgaaggaggagcaggtgaaacaggtggtaattttccttctcggcccctattctggttcattcagcactttttggtgggaactgttggaaattccagggtaaggaggaagatgcctgttctccctgtctgaagagggagatgagacagctctctggacaggaattaacaaacgctggagcagcccagaggaaattgatgtgaaagaggagggaatgagattattcggaggaagggaatgggggagacagcctgagtaaaaggcttggaagttggaattarcagtggggagcagaagcactcatagctcttttaggcagaagaatccaggcccgagctggcagaagagacttagagatgctaatggaatttaaactgaaaaaaggagcccaatgaagctaagcgccacgccccacaaggggtcatattggctttagttcctcaagcatatgtgcttatatgcacacacacacacatttccatggacccaggtcttgcttgtgtccccaggcaccagtagtttgagcccccctcaaaagacatgaagggggttggggtctgtgtgagtagtggggaggtgcatgtgtatccacatgtgtgcatacactcttaagttgggtgggaagtggattccttgttggtttctggttcagagtgctctcccaccaccagagacaagtgggtaaaaaggtcagtccattgcaggaatatatatccgggagagctaggtcccttggggctctggatgctgggtaacccagaggtaatgtgggtaccctttctgaagctgtcagggctgtgactagcacccttatcacccctcactgccttgtgggaatagtagagggtttttttcctccagascccctggcctttcagttcttaactatttccctccaggccagaaagttttctttgaggaaggagaggagagggtggcaatgatgcctttgatctggaattggacatttctctgtcagagcacagaggaggctcatatcacctcttccctctcctacttggcccagctgcttggaggaccgaccccatggctgagaatatgacggcaagaggaacagagtttgctccaagtgggaaagggtcccaagcagtccagagaagatgtctgtgtggctttccctccctgcctcccccagctcccacactggcctttgtaaataaatggcgtggtctttgttgtgaga

SEQ ID NO: 44 - DNA, 3465 bp, Homo sapiens
  misc_feature (1)...(3465): n = A,T,C or G, or insertion/deletion polymorphism (see Tables 1-2)
nncgggtcgggctggcgggcggcgcgggtggcggcggcggcatggcggagccgcggggccgagacgaggccccccattcgggtcaccgtcaagacccccaaggacaaggaggaaattgtgatctgcgatcgagcctcggtcaaggagttcaaagaggaaatctcccggaggtttaaggctcagcaggatcagctggtcctgatcttcgcaggcaagatcctcaaggatggggacacactgaaccagcacggaatcaaggacgggctcactgtccatctggtcatcaagacccctcagaaggctcaagatccagctgctgccactgcttcttccccctccacacctgaccctgcctcagcaccctccaccacgcctgcttcacccgccacccctgcccagccctccacctctggcagtgcctcttcagatgctggcagtggaagccggaggagcagtggtggggggccctctccgggggctggggagggatcccccagtgctactgcgtccatactctctggctttgggggcatcctggggctgggcagcctaggcctgggctctgccaacttcatggagctgcagcagcagatgcagcggcagctgatgtccaatcctgagatgctgtcacagatcatggagaaccccctggtccaggatatgatgtctaaccctgatctgatgcgtcacatgattatggccaacccccagatgcagcagttgatggagcggaaccctgagatcagccacatgctcaataaccctgaactcatgaggcagacaatggagcttgctcggaatccagccatgatgcaagagatgatgcggaaccaggaccgggccctgagcaaccttgagagcatccctggagggtataatgccctccgccgcatgtacacggacatccaggagcccatgttcagtgctgcccgggaacagtttggcaacaatcccttctcttccctggccgggaactccgacagctcatcctcccagcctctgcggactgagaatcgagagcccctccctaacccctggagcccctcgccccccacctcccaggcccccgggtccggtggggagggcaccggaggatcggggaccagccaggtgcacccgacagtctcgaacccctttgggatcaatgcggctagcctggggtcagggatgttcaatagcccagaaatgcaagccctcctccagcagatctctgagaacccccagctgatgcagaatgtgatctcagcaccctacatgcgcagcatgatgcagacgcttgcccagaaccccgactttgctgctcagatgatggtgaatgtgccgctcttcgcggggaacccccaactgcaggagcagctccgcctgcagctcccagtcttcctgcagcagatgcagaacccagagtcactctccatccttaccaatccccgagccatgcaggcattgctgcagatccagcagggactacagaccttgcagaccgaggcccctgggctggtacccagccttggctcctttgggatrtcccggaccccagcacmctcagcaggcagcaacgcagggtctacgcccgaggcccccacttcctcaccagccacgccagccacatcttctccaacaggggcttccagygcccagcagcaactcatgcagcagatgatccagcttttggctggaagtggaaactcacaggtgcagacgccagaagtgagatttcagcagcagctggagcagctcaactccatgggcttcatcaatcgtgaggctaacctgcaggccctgattgccacaggaggggacatcaacgcagctatcgagagactgctgggctcccagctctcctaatccctcggcccatgcctcctgcctctcccctccctcgatgtcagcattcggttcttctgtcaatccttaccctctgcagcttgtcctccaaccccttagctctgtctgagaattatggttttactgctacgtctctaacagactcttctctcctggtctccttgagcagtgctacttaaacagttttcacagtttcattgattgactctacctccttgccccacaccacttttgcaatctttaaactttcagtggctgtgcagagtcgagggaggaaccagctctctggtttactggaacatagtcttccatctataccactagggttttgtcttatgtttacttttggtaactctcttccttctttttctccctaccccccaacccctagcccaaccaatgctagaatttctcgctctgaaggaggagcaggtgaaacaggtggtaattttccttctcggcccctattctggttcattcagcactttttggtgggaactgttggaaattccagggtaaggaggaagatgcctgttctccctgtctgaagagggagatgagacagctctctggacaggaattaacaaacgctggagcagcccagaggaaattgatgtgaaagaggagggaatgagattattcggaggaagggaatgggggagacagcctgagtaaaaggcttggaagttggaattarcagtggggagcagaagcactcatagctcttttaggcagaagaatccaggcccgagctggcagaagagacttagagatgctaatggaatttaaactgaaaaaaggagcccaatgaagctaagcgccacgccccacaaggggtcatattggctttagttcctcaagcatatgtgcttatatgcacacacacacacatttccatggacccaggtcttgcttgtgtccccaggcaccagtagtttgagcccccctcaaaagacatgaagggggttggggtctgtgtgagtagtggggaggtgcatgtgtatccacatgtgtgcatacactcttaagttgggtgggaagtggattccttgttggtttctggttcagagtgctctcccaccaccagagacaagtgggtaaaaaggtcagtccattgcaggaatatatatccgggagagctaggtcccttggggctctggatgctgggtaacccagaggtaatgtgggtaccctttctgaagctgtcagggctgtgactagcacccttatcacccctcactgccttgtgggaatagtagagggtttttttcctccagascccctggcctttcagttcttaactatttccctccaggccagaaagttttctttgaggaaggagaggagagggtggcaatgatgcctttgatctggaattggacatttctctgtcagagcacagaggaggctcatatcacctcttccctctcctacttggcccagctgcttggaggaccgaccccatggctgagaatatgacggcaagaggaacagagtttgctccaagtgggaaagggtcccaagcagtccagagaagatgtctgtgtggctttccctccctgcctcccccagctcccacactggcctttgtaaataaatggcgtggtctttgttgtgaga

SEQ ID NO: 45 - DNA, 3691 bp, Homo sapiens
ggaaaagaacgggagtgaaaggacagcagcagcgctggaaggacayttaaccccttcggggagaaaggaatcaacgtgtccgcttggcagtccacgattcaataattatactacatcctcatatttgtcaggcacgcctttggttactttcaaaacagttttctccgttatgcacaattctgtgcgatgaggcgagaggtactattattattatcttgaggaaaccaaggctctgaaaggccacgcagccaaaacccagctccctggaaccgttcttaatagaccattcaggccgcgaccctcggggctataggttcaaagaggaaatctcccggaggtttaaggctcagcaggatcagctggtcctgatcttcgcaggcaagatcctcaaggatggggacacactgaaccagcacggaatcaaggacgggctcactgtccatctggtcatcaagacccctcagaaggctcaagatccagctgctgccactgcttcttccccctccacacctgaccctgcctcagcaccctccaccacgcctgcttcacccgccacccctgcccagccctccacctctggcagtgcctcttcagatgctggcagtggaagccggaggagcagtggtggggggccctctccgggggctggggagggatcccccagtgctactgcgtccatactctctggctttgggggcatcctggggctgggcagcctaggcctgggctctgccaacttcatggagctgcagcagcagatgcagcggcagctgatgtccaatcctgagatgctgtcacagatcatggagaaccccctggtccaggatatgatgtctaaccctgatctgatgcgtcacatgattatggccaacccccagatgcagcagttgatggagcggaaccctgagatcagccacatgctcaataaccctgaactcatgaggcagacaatggagcttgctcggaatccagccatgatgcaagagatgatgcggaaccaggaccgggccctgagcaaccttgagagcatccctggagggtataatgccctccgccgcatgtacacggacatccaggagcccatgttcagtgctgcccgggaacagtttggcaacaatcccttctcttccctggccgggaactccgacagctcatcctcccagcctctgcggactgagaatcgagagcccctccctaacccctggagcccctcgccccccacctcccaggcccccgggtccggtggggagggcaccggaggatcggggaccagccaggtgcacccgacagtctcgaacccctttgggatcaatgcggctagcctggggtcagggatgttcaatagcccagaaatgcaagccctcctccagcagatctctgagaacccccagctgatgcagaatgtgatctcagcaccctacatgcgcagcatgatgcagacgcttgcccagaaccccgactttgctgctcagatgatggtgaatgtgccgctcttcgcggggaacccccaactgcaggagcagctccgcctgcagctcccagtcttcctgcagcagatgcagaacccagagtcactctccatccttaccaatccccgagccatgcaggcattgctgcagatccagcagggactacagaccttgcagaccgaggcccctgggctggtacccagccttggctcctttgggatrtcccggaccccagcacmctcagcaggcagcaacgcagggtctacgcccgaggcccccacttcctcaccagccacgccagccacatcttctccaacaggggcttccagygcccagcagcaactcatgcagcagatgatccagcttttggctggaagtggaaactcacaggtgcagacgccagaagtgagatttcagcagcagctggagcagctcaactccatgggcttcatcaatcgtgaggctaacctgcaggccctgattgccacaggaggggacatcaacgcagctatcgagagactgctgggctcccagctctcctaatccctcggcccatgcctcctgcctctcccctccctcgatgtcagcattcggttcttctgtcaatccttaccctctgcagcttgtcctcccttccgtcttctccctcatcctttccaaacagcagggtgactttagaggcatgggctccaaccccttagctctgtctgagaattatggttttactgctacgtctctaacagactcttctctcctggtctccttgagcagtgctacttaaacagttttcacagtttcattgattgactctacctccttgccccacaccacttttgcaatctttaaactttcagtggctgtgcagagtcgagggaggaaccagctctctggtttactggaacatagtcttccatctataccactagggttttgtcttatgtttacttttggtaactctcttccttctttttctccctaccccccaacccctagcccaaccaatgctagaatttctcgctctgaaggaggagcaggtgaaacaggtggtaattttccttctcggcccctattctggttcattcagcactttttggtgggaactgttggaaattccagggtaaggaggaagatgcctgttctccctgtctgaagagggagatgagacagctctctggacaggaattaacaaacgctggagcagcccagaggaaattgatgtgaaagaggagggaatgagattattcggaggaagggaatgggggagacagcctgagtaaaaggcttggaagttggaattarcagtggggagcagaagcactcatagctcttttaggcagaagaatccaggcccgagctggcagaagagacttagagatgctaatggaatttaaactgaaaaaaggagcccaatgaagctaagcgccacgccccacaaggggtcatattggctttagttcctcaagcatatgtgcttatatgcacacacacacacatttccatggacccaggtcttgcttgtgtccccaggcaccagtagtttgagcccccctcaaaagacatgaagggggttggggtctgtgtgagtagtggggaggtgcatgtgtatccacatgtgtgcatacactcttaagttgggtgggaagtggattccttgttggtttctggttcagagtgctctcccaccaccagagacaagtgggtaaaaaggtcagtccattgcaggaatatatatccgggagagctaggtcccttggggctctggatgctgggtaacccagaggtaatgtgggtaccctttctgaagctgtcagggctgtgactagcacccttatcacccctcactgccttgtgggaatagtagagggtttttttcctccagascccctggcctttcagttcttaactatttccctccaggccagaaagttttctttgaggaaggagaggagagggtggcaatgatgcctttgatctggaattggacatttctctgtcagagcacagaggaggctcatatcacctcttccctctcctacttggcccagctgcttggaggaccgaccccatggctgagaatatgacggcaagaggaacagagtttgctccaagtgggaaagggtcccaagcagtccagagaagatgtctgtgtggctttccctccctgcctcccccagctcccacactggcctttgtaaataaatggcgtggtctttgttgtgaga

SEQ ID NO: 46 - DNA, 1825 bp, Homo sapiens
ggaatgaagcgccttctgcttctgtttttgttctttataacattttcttctgcatttcccttagtcyggatgayggaaaatgaagaaaatrtgcaactggctcaggcatatctcaaccagttctactctcttgaaatagaagggaatcatcttgttcaaagcaagaataggagtctcatagatgacaaaattcgggaaatgcaagcattttttggattgacagtgactggaaractggactcaaacacccttgagatcatgaagacacccaggtgtggggtgcctgatgtgggccagtatggctacaccctccctgggtggagaaaatacaacctcacctacagaataataaactatactccggatatggcacgagctgctgtggatgaggctatccaagaaggtttagaagtgtggagcaaagtcaytccactaaaattcaccaagatttcaaaggggattgcagacatcatgattgcctttaggactcgagtccatggtcggtgtcctcgctattttgatggtcccttgggagtkcttggccatgcctttcctcctggtccgggtctgggtggtgacactcattttgatgaggatgaaaactggaccaaggatggagcaggattcaacttgtttcttgtggctgctcatgaatttggtcatgcactggggctctctcactccaatgatcaaacagccttgatgttcccaaattatgtctccctggatcccagaaaatacccactttctcaggatgatatcaatggaatccagtccatctatggaggtctgcctaaggwacctgctaagccaaaggaacccactataccccatgcctgtgaccctgacttgacttttgacgctatcacaactttccgcagagaagtaatgttctttaaaggcaggcacctatkgaggatctattatgatatcacggatgttgagtttgaattaattgcttcattctggccatctctgccagctgatctgcaagctgcataygagaaccccagagataagattctggtttttaaagatgaaaacttctggatgatcagaggatatgctgtcttgccagattatcccaaatccatccatacattaggttttccaggacgtgtgaagaaaatagatgcagccgtctgtgataagaccacaagaaaaacctacttctttgtgggcatttggtgctggaggtttgatgaaatgacccaaaccatggacaaaggrttcccgcagagagtggtaaaacactttcctggaatcagtatccgtgttgatgctgctttccagtacaaaggattcttctttttcagccgtggatcaaagcaatttgaatacracattaagacaaagaatattacccgaatcatgagaactaatacttggtttcaatgcaaagaaccaaagaactcctsatttggttttgatrtcaacaaggaaaaagcacattcaggaggcataaagatattgtatcataagagtttaagcttgtttatttttggtattgttcatttgctgaaaaacacttctatttatcaataaattcatagacctaaaataaacctcaacaggtcttttaatataaattctgcttcaaaatagaataaaaccattctttaacaacaagttgctggtcctagttctaaatatccaaattcaatggccattttgagctgcctgattcttttaataggaagttattatgtagaaacaaaaatctctgactgtactttaagcctatttcatgctttgtggacttggagaagacatgtcttataactgaatactgaaacatttattaaaccaatctttagcattctat

SEQ ID NO: 47 - DNA, 1751 bp, Homo sapiens
agctccaccctgggagggactgtggcccaggtactrcccgggtgctactttatgggcagcagctcagttgagttagagtctggaagacctcrgaagacctcctgtcctatsaggccctccccatggctttagagacratctgccgaccctctgggagaaaatccagcaagatgcaagccttcagaatctgggatgttaaccagaagaccttctatctgaggaacaaccaactagttgcyggatacttgcaaggaccaaatgtcaatttagaagaaaagatagatgtggtacccattgagcctcatgctctgttcttgggaatccatggagggaagatgtgcctgtcctgtgtcaagtctggtgatgagaccagactccagctggaggcagttaacatcactgacctgagcgagaacagaaagcaggacaagcgcttcgccttcatccgctcagacagyggccccaccaccagttttgagtctgccgcctgccccggttggttcctctgcacagcgatggaagctgaycagccygtcagcctcaccaatatgcctgacgaaggcgtcatggtcaccaaattctacttccaggaggacgagtagtactgcccaggcctgcctgttcccattcttgcatggcaaggactgcagggactgccagtccccctgccccagggctcccggctatgggggcactgaggaccagccattgaggggtggaccctcagaaggcgtcacaasaacctggtcacaggactctgcctyctcttcaactgaccagcctccatgctgcctccagaatggtctttctaatgtgtgaatcagagcacagcagcccctgcacaaagcccttccatgtcgcctctgcattcaggatcaaaccccgaccacctgcccaacctgctctcctcttgccactgcctcttcctccctcattccaccttcccatgccctggatccatcaggccacttgatgacccccaaccaagtggctcccacaccctgttttacaaaaaagaaaagaccagtccatgagggaggtttttaagggtttgtggaaaatgaaaattaggatttcatgatttttttttttcagtccccgtgaaggagagcccttcatttggagattatgttctttcggggagaggctgaggacttaaaatattcctgcatttgtgaaatgatggtgaaagtaagtggtagcttttcccttctttttcttctttttttgtgatgtcccaacttgtaaaaattaaaagttatggtactatgttagccccataattttttttttccttttaaaacacttccataatctggactcctctgtccaggcactgctgcccagcctccaagctccatctccactccagattttttacagctgcctgcagtactttacctcctatcagaagtttctcagctcccaaggctctgagcaaatgtggctcctgggggttctttcttcctctgctgaaggaataaattgctccttgacattgtagagcttctggcacttggagacttgtatgaaagatggctgtgcctctgcctgtctcccccaccrggctgggagctctgcagagcaggaaacatgactcgtatatgtctcaggtccctgcagggccaagcacctagcctcgctcttggcaggtactcagcgaatgaatgctgtatatgttgggtgcaaagttccctacttcctgtgacttcagctctgttttacaataaaatcttgaaaatgcctatatt

SEQ ID NO: 48 - DNA, 1989 bp, Homo sapiens
gggcagctccaccctgggagggactgtggcccaggtactrcccgggtgctactttatgggcagcagctcagttgagttagagtctggaagacctcrgaagacctcctgtcctatsaggccctccccatggctttagctgacttgtatgaagaaggaggtggaggaggaggagaaggtgaagacaatgctgactcaaaggggggattataaaactaatcatcaaagccaagaaggcaagagcaagcatgtaccgctgaaaacacaagataactgcataagtaatgactttcagtgcagattcatagctaacccataaactgctggggcaaaaatcatcttggaaggctctgaacctcaraaaggattcacaagacratctgccgaccctctgggagaaaatccagcaagatgcaagccttcagaatctgggatgttaaccagaagaccttctatctgaggaacaaccaactagttgcyggatacttgcaaggaccaaatgtcaatttagaagaaaagatagatgtggtacccattgagcctcatgctctgttcttgggaatccatggagggaagatgtgcctgtcctgtgtcaagtctggtgatgagaccagactccagctggaggcagttaacatcactgacctgagcgagaacagaaagcaggacaagcgcttcgccttcatccgctcagacagyggccccaccaccagttttgagtctgccgcctgccccggttggttcctctgcacagcgatggaagctgaycagccygtcagcctcaccaatatgcctgacgaaggcgtcatggtcaccaaattctacttccaggaggacgagtagtactgcccaggcctgcctgttcccattcttgcatggcaaggactgcagggactgccagtccccctgccccagggctcccggctatgggggcactgaggaccagccattgaggggtggaccctcagaaggcgtcacaasaacctggtcacaggactctgcctyctcttcaactgaccagcctccatgctgcctccagaatggtctttctaatgtgtgaatcagagcacagcagcccctgcacaaagcccttccatgtcgcctctgcattcaggatcaaaccccgaccacctgcccaacctgctctcctcttgccactgcctcttcctccctcattccaccttcccatgccctggatccatcaggccacttgatgacccccaaccaagtggctcccacaccctgttttacaaaaaagaaaagaccagtccatgagggaggtttttaagggtttgtggaaaatgaaaattaggatttcatgatttttttttttcagtccccgtgaaggagagcccttcatttggagattatgttctttcggggagaggctgaggacttaaaatattcctgcatttgtgaaatgatggtgaaagtaagtggtagcttttcccttctttttcttctttttttgtgatgtcccaacttgtaaaaattaaaagttatggtactatgttagccccataattttttttttccttttaaaacacttccataatctggactcctctgtccaggcactgctgcccagcctccaagctccatctccactccagattttttacagctgcctgcagtactttacctcctatcagaagtttctcagctcccaaggctctgagcaaatgtggctcctgggggttctttcttcctctgctgaaggaataaattgctccttgacattgtagagcttctggcacttggagacttgtatgaaagatggctgtgcctctgcctgtctcccccaccrggctgggagctctgcagagcaggaaacatgactcgtatatgtctcaggtccctgcagggccaagcacctagcctcgctcttggcaggtactcagcgaatgaatgctgtatatgttgggtgcaaagttccctacttcctgtgacttcagctctgttttacaataaaatcttgaaaatgcctatatt

SEQ ID NO: 49 - DNA, 1926 bp, Homo sapiens
gggcagctccaccctgggagggactgtggcccaggtactrcccgggtgctactttatgggcagcagctcagttgagttagagtctggaagacctcrgaagacctcctgtcctatsaggccctccccatggctttagggggattataaaactaatcatcaaagccaagaaggcaagagcaagcatgtaccgctgaaaacacaagataactgcataagtaatgactttcagtgcagattcatagctaacccataaactgctggggcaaaaatcatcttggaaggctctgaacctcaraaaggattcacaagacratctgccgaccctctgggagaaaatccagcaagatgcaagccttcagaatctgggatgttaaccagaagaccttctatctgaggaacaaccaactagttgcyggatacttgcaaggaccaaatgtcaatttagaagaaaagatagatgtggtacccattgagcctcatgctctgttcttgggaatccatggagggaagatgtgcctgtcctgtgtcaagtctggtgatgagaccagactccagctggaggcagttaacatcactgacctgagcgagaacagaaagcaggacaagcgcttcgccttcatccgctcagacagyggccccaccaccagttttgagtctgccgcctgccccggttggttcctctgcacagcgatggaagctgaycagccygtcagcctcaccaatatgcctgacgaaggcgtcatggtcaccaaattctacttccaggaggacgagtagtactgcccaggcctgcctgttcccattcttgcatggcaaggactgcagggactgccagtccccctgccccagggctcccggctatgggggcactgaggaccagccattgaggggtggaccctcagaaggcgtcacaasaacctggtcacaggactctgcctyctcttcaactgaccagcctccatgctgcctccagaatggtctttctaatgtgtgaatcagagcacagcagcccctgcacaaagcccttccatgtcgcctctgcattcaggatcaaaccccgaccacctgcccaacctgctctcctcttgccactgcctcttcctccctcattccaccttcccatgccctggatccatcaggccacttgatgacccccaaccaagtggctcccacaccctgttttacaaaaaagaaaagaccagtccatgagggaggtttttaagggtttgtggaaaatgaaaattaggatttcatgatttttttttttcagtccccgtgaaggagagcccttcatttggagattatgttctttcggggagaggctgaggacttaaaatattcctgcatttgtgaaatgatggtgaaagtaagtggtagcttttcccttctttttcttctttttttgtgatgtcccaacttgtaaaaattaaaagttatggtactatgttagccccataattttttttttccttttaaaacacttccataatctggactcctctgtccaggcactgctgcccagcctccaagctccatctccactccagattttttacagctgcctgcagtactttacctcctatcagaagtttctcagctcccaaggctctgagcaaatgtggctcctgggggttctttcttcctctgctgaaggaataaattgctccttgacattgtagagcttctggcacttggagacttgtatgaaagatggctgtgcctctgcctgtctcccccaccrggctgggagctctgcagagcaggaaacatgactcgtatatgtctcaggtccctgcagggccaagcacctagcctcgctcttggcaggtactcagcgaatgaatgctgtatatgttgggtgcaaagttccctacttcctgtgacttcagctctgttttacaataaaatcttgaaaatgcctatatt

SEQ ID NO: 50 - DNA, 1683 bp, Homo sapiens
gctgacttgtatgaagaaggaggtggaggaggaggagaaggtgaagacaatgctgactcaaaggagacratctgccgaccctctgggagaaaatccagcaagatgcaagccttcagaatctgggatgttaaccagaagaccttctatctgaggaacaaccaactagttgcyggatacttgcaaggaccaaatgtcaatttagaagaaaagatagatgtggtacccattgagcctcatgctctgttcttgggaatccatggagggaagatgtgcctgtcctgtgtcaagtctggtgatgagaccagactccagctggaggcagttaacatcactgacctgagcgagaacagaaagcaggacaagcgcttcgccttcatccgctcagacagyggccccaccaccagttttgagtctgccgcctgccccggttggttcctctgcacagcgatggaagctgaycagccygtcagcctcaccaatatgcctgacgaaggcgtcatggtcaccaaattctacttccaggaggacgagtagtactgcccaggcctgcctgttcccattcttgcatggcaaggactgcagggactgccagtccccctgccccagggctcccggctatgggggcactgaggaccagccattgaggggtggaccctcagaaggcgtcacaasaacctggtcacaggactctgcctyctcttcaactgaccagcctccatgctgcctccagaatggtctttctaatgtgtgaatcagagcacagcagcccctgcacaaagcccttccatgtcgcctctgcattcaggatcaaaccccgaccacctgcccaacctgctctcctcttgccactgcctcttcctccctcattccaccttcccatgccctggatccatcaggccacttgatgacccccaaccaagtggctcccacaccctgttttacaaaaaagaaaagaccagtccatgagggaggtttttaagggtttgtggaaaatgaaaattaggatttcatgatttttttttttcagtccccgtgaaggagagcccttcatttggagattatgttctttcggggagaggctgaggacttaaaatattcctgcatttgtgaaatgatggtgaaagtaagtggtagcttttcccttctttttcttctttttttgtgatgtcccaacttgtaaaaattaaaagttatggtactatgttagccccataattttttttttccttttaaaacacttccataatctggactcctctgtccaggcactgctgcccagcctccaagctccatctccactccagattttttacagctgcctgcagtactttacctcctatcagaagtttctcagctcccaaggctctgagcaaatgtggctcctgggggttctttcttcctctgctgaaggaataaattgctccttgacattgtagagcttctggcacttggagacttgtatgaaagatggctgtgcctctgcctgtctcccccaccrggctgggagctctgcagagcaggaaacatgactcgtatatgtctcaggtccctgcagggccaagcacctagcctcgctcttggcaggtactcagcgaatgaatgctgtatatgttgggtgcaaagttccctacttcctgtgacttcagctctgttttacaataaaatcttgaaaatgcctatatt

SEQ ID NO: 51 - DNA, 1815 bp, Homo sapiens
tgcgaggagggtatttccgcttctygcagtggggyagggtggcagacgcctagcttgggtgagtgactatttctttataaaccacaactctgggcccgcaatggcagtccactgccttgctgcagtcacagaatggaaatctgcagaggcctccgcagtcacctaatcactctcctcctcttcctgttccattcagagacratctgccgaccctctgggagaaaatccagcaagatgcaagccttcagaatctgggatgttaaccagaagaccttctatctgaggaacaaccaactagttgcyggatacttgcaaggaccaaatgtcaatttagaagaaaagatagatgtggtacccattgagcctcatgctctgttcttgggaatccatggagggaagatgtgcctgtcctgtgtcaagtctggtgatgagaccagactccagctggaggcagttaacatcactgacctgagcgagaacagaaagcaggacaagcgcttcgccttcatccgctcagacagyggccccaccaccagttttgagtctgccgcctgccccggttggttcctctgcacagcgatggaagctgaycagccygtcagcctcaccaatatgcctgacgaaggcgtcatggtcaccaaattctacttccaggaggacgagtagtactgcccaggcctgcctgttcccattcttgcatggcaaggactgcagggactgccagtccccctgccccagggctcccggctatgggggcactgaggaccagccattgaggggtggaccctcagaaggcgtcacaasaacctggtcacaggactctgcctyctcttcaactgaccagcctccatgctgcctccagaatggtctttctaatgtgtgaatcagagcacagcagcccctgcacaaagcccttccatgtcgcctctgcattcaggatcaaaccccgaccacctgcccaacctgctctcctcttgccactgcctcttcctccctcattccaccttcccatgccctggatccatcaggccacttgatgacccccaaccaagtggctcccacaccctgttttacaaaaaagaaaagaccagtccatgagggaggtttttaagggtttgtggaaaatgaaaattaggatttcatgatttttttttttcagtccccgtgaaggagagcccttcatttggagattatgttctttcggggagaggctgaggacttaaaatattcctgcatttgtgaaatgatggtgaaagtaagtggtagcttttcccttctttttcttctttttttgtgatgtcccaacttgtaaaaattaaaagttatggtactatgttagccccataattttttttttccttttaaaacacttccataatctggactcctctgtccaggcactgctgcccagcctccaagctccatctccactccagattttttacagctgcctgcagtactttacctcctatcagaagtttctcagctcccaaggctctgagcaaatgtggctcctgggggttctttcttcctctgctgaaggaataaattgctccttgacattgtagagcttctggcacttggagacttgtatgaaagatggctgtgcctctgcctgtctcccccaccrggctgggagctctgcagagcaggaaacatgactcgtatatgtctcaggtccctgcagggccaagcacctagcctcgctcttggcaggtactcagcgaatgaatgctgtatatgttgggtgcaaagttccctacttcctgtgacttcagctctgttttacaataaaatcttgaaaatgcctatatt

SEQ ID NO: 52 - DNA, 2846 bp, Homo sapiens
ccagctgccagggcgccaagactcccagccctctctctgtgcacggcagagtagaggccaagggagggctctgtgccagccccgatgaggacgctgctgaccatcttgactgtgggatccctggctgctcacgcccctgaggacccctcggatctgctccagcacgtgaaattccagtccagcaactttgaaaacatcctgacgtgggacagcgggccrgagggcaccccagacacggtctacagcatcgagtataagacgtacggagagagggactgggtggcaaagaagggctgtcagcggatcacccggaagtcctgcaacctgacggtggagacgggcaacctcacggagctctactatgccagggtcaccgctgtcagtgcgggaggccggtcagccaccaagatgactgacaggttcagctctctgcagcacactaccctcaagccacctgatgtgacctgtatcyccaaagtgagatcgattcagatgattgttcatcctacccccacgccmatccgtgcaggcgatggccaccggctaaccctggaagacatcttccatgacctgttctaccacttagagctccaggtcaaccgcacctaccaaatgcaccttggagggaagcagagagaatatgagttcttyggcctgacccctgacacagagttccttggcaccatcatgatttgcrttcccacctggkccaaggagagtgccccctacatgtgccgagtgaagacacygccagaccggacatggacctactccttctccggagccttcctgttctccatgggcttcctcgtcgcagtactctgctacctgagctacagatatgtcaccaagccgcctgcacctcccaactccctgaacgtccagcgagtcctgactttccagccgctgcgcttcatccaggagcacgtcctgatccctgtctttgacctcagcggccccagcagtctggcccagcctgtccagtactcccagatcagggtgtctggacccagggagccygcaggagctccacagcggcatagcctgtccgagatcacctacttagggcagccagacatctccatcctccagccctccaacgtgccacctccccagatcctctccccactgtcctatgccccaaacgctgcccctgaggtygggcccccatcctatgcacctcaggtgacccccgaagctcaattcccattctacgccccacaggccatctctaaggtccagccttcctcctatgcccctcaagccactccggacagctggcctccctcctatggggtatgcrtggaaggttctggcaaagactcccccactgggacactttctagtcctaaacaccttaggcctaaaggtcagcttcagaaagagccaccagctggaagctgcatgttaggtggcctttctctgcaggaggtgacctccttggctatggaggaatcccaagaagcaaaatcattgcaccagcccctggggatttgcacagacagaacatctgacccaaatgtgctacacagtggggaggaagggacaccacagtacctaaagggccagctccccctcctctcctcagtccagatcgagggccaccccatgtccctccctttgcaacctccttccsgtccatgttccccctcggaccaaggtccaagtccctggggcctgctggagtcccttgtgtgtcccaaggatgaagccaagagcccagcccctgagacctcagacctggagcagcccacagaactggattctcttttcagaggcctggccctgactgtgcagtgggagtcctgaggggaatgggaaaggcttggtgcttcctccctgtccctacccagtgtcacatccttggctgtcaatcccatgcctgcccaygccacacactctgcgatctggcctcagacgggtgcccttgagagaagcagagggagtggcatgcagggcccctgccatgggtgcgctcctcacyggarcaaagcagcatgataaggactgcagcgggggagctctggggagcagcttgtgtagacaagcgcgtgctcgctgagccctgcaaggcagaaatgacagtgcaaggaggaaatgcagggaaactcccgaggtccagagccccacctcctaacaccatggattcaaagtgctcagggaatttgcctctccttgccccattcctggccagtttcacaatctagctcgacagagcatgaggcccctgcctcttctgtcattgttcaaaggtgggaagagagcctggaaaagaaccaggcctggaaaagaaccagaaggaggctgggcagaaccagaacaacctgcacttctgccaaggccagggccagcaggacggcaggactctagggaggggtgtggcctgcagctcattcccagccagggcaactgcctgacgttgcacgatttcagcttcattcctctgatagaacaaagcgaaatgcaggtccaccagggagggagacacacaagccttttctgcaggcaggagtttcagaccctatcctgagaatggggtttgaaaggaaggtgagggctgtggcccctggacgggtacaataacacactgtactgatgtcacaactttgcaagctctgccttgggttcagcccatctgggctcaaattccagcctcaccactcacaagctgtgtgacttcaaacaaatgaaatcagtgcccagaacctcggtttcctcatctgtaatgtggggatcataacacctacctcatggagttgtggtgaagatgaaatgaagtcatgtctttaaagtgcttaatagtgcctggtacatgggcagtgcccaataaacggtagctatttcct

SEQ ID NO: 53 - DNA, 1879 bp, Homo sapiens
actcttcgtcatcacctctcctattcgcctggacaagctcatgtttgcaggagcaccatgtcttgctcgtctcgygcctcctcctccagggctggaggcagcagctcagccagggtgtctgctggtggaagcagcttcagcagtggaagcagatgtggtctggggggcagctcggcccagggcttccgaggaggagccagcagctgcagcctgagtggggggtctagcggtgcttttgggggcagctttggagggggctttggtagctgctcagtagggggtggttttgggggagcttcaggctctgggacaggatttggtgggggttctagctttggyggggtctctggatttggcaggggttctggattctgtgggagttctagattcagcagtggtgctactggaggcttctacagctatggtggtggtatgggaggtggtgttggcgatggggggcttttctctggaggggaaaagcaaaccatgcagaacctcaatgaccgcttggccaattacctagacaaggtcagagccctggaggaggctaacactgatctggagaacaaaatcaaggagtggtatgacaaatatgggcctgggtctggagacggtggatcgggaagagattatagcaaatactattcaataattgaagatctcagaarccagatcattgctgccactgttgaaaatgctgggatcattttgcacattgacaatgccagattggctgctgatgacttcagactgaagtatgagaacgagctgtgtctccggcagagcgtggaggctgacatcaatggcctgcggaaagtcctggatgacctgactatgacccgctctgacctggagatkcagattgagagtttcaccgaggagctagcctacctgaggaagaaccacgaggaggaaatgaagaatatgcaaggaagctctggaggggaggtgaccgtagaaatgaatgctgcgccagggaccgacctgaccaaattactgaatgacatgagggcgcagtacgaggagctggctgagcaaaaccgccgagaggctgaggagcggttcaacaagcagagcgcatcactacaagcacaaatctccactgatgctggggcagccacttctgccaagaatgagataacagaactaaaaygtaccctgcaagccctggaaattgagcttcagtcccaactggccatgaaaagctccctggagggaaccctggctgacacagaagctggctacgtggctcagctgtcagaaattcaaacgcagatcagtgccctggaggaggagatctrccagatcyggggtgagactaaatgccagaacgcagagtacragcaattgctggacatcaagacacgcctggaggtggagatcgagacctaccgccgcctgctcgatggagagggaggtggttctagttttgcagaatttggtggtagaaactcaggatctgtaaacatgggatccagggatctggtatctggtgactcaagatctggaagctgttctggtcaaggacgagattcaagcaagactagagtgactaagacyatcgtagaggagttggtggatggcaaggttgtctcgtctcaagtcagcagtatttctgaggtgaaagttaaataaggaacttccagatcaacaaaagtgtctttcaaagaaaaaaaaatcaagaaggacacaagcgaagaaatggcatcaatctaggyatctttctggataatttcaggaaaagcttcagtcyagaaatggatgactagccaayttttctgcatcttcttatttcctcattagaatgctcttgaaatagctgaattaacaactttgctttaattgtttctatgcttcaataaatttacttttgcaagtt

SEQ ID NO: 54 - DNA, 1592 bp, Homo sapiens
aaggtgatagtggtgatggtggtgaagataactgtgacttgcatgatgtgcattgagtcagactccatggggtctctggttcattctcctgtctgcctattgagcctgccgatgtcacttrggagacagggacttgatatttccttyaggttaatgactryggttctttgtgtcccctccagatttctctacctcagtccctttttttgtggtctctttatagatttcaggtatgctgctgaaagtgggaatcctctacattggtgggcagctggtgaccagtggggctgtaagcagtgggaaccttgtcacatttgttctctaccagatgcagttcacccaggctktggaggtactgctctccatctaccccagagtacagaaggctgtgggctcctcagagaaaatatttgagtacctggaccgcacccctcgctgcccacccagtggtctgttgactcccttacacttggagggccttgtccagttccaagatgtctcctttgcctacccaaaccgcccagatrtcttagtgctacaggggctgacattcaccctacgccctggcgaggtgacggcgctggtgggacccaatgggtctgggaagagcacagtggctgccctgctgcagaatctgtaccagcccaccgggggacagctgctgttggatgggaagccccttccccaatatgagcaccgctacctgcacaggcaggtggctgcagtgggacaagagccacaggtatttggaagaagtcttcaagaaaatattgcctatggcctgacccagaagccaactatggaggaaatcacagctgctgcagtaaagtctggggcccatagtttcatctctggactccctcagggctatgacacagaggtagrcgaggctgggagccagctgtcagggggtcagcracaggcagtggcgttggcccgagcattgatccggaaaccrtgtgtacttatcctggatgatgccaccagtgccctggatgcaaacagccagttacaggtggagcagctcctgtacgaaagccctgagcggtaytcccgctcagtgcttctcatcacccagcacctcagcctggtggagcaggctgaccacatcctctttctggaaggaggcgctatccgggaggggggaacccaccagcagctcatggagaaaaaggggtgctactgggccatggtgcaggctcctgcagatgctccagaatgaaagccttctcagacctgcgcactccatctccctcccttttcttctctctgtggtggagaaccacagctgcagagtakgcagctgcctccaggatgagttacttgaaatttgccttgagtgtgttacctcctttccaagctcytcgtgataatgcagacttcctggagtacaaacacaggatttgtaattccttastgtaacggagtttagagccagggctgatgctttggtgtggccagcactctgaaactgagaaatgttcagaatgtacggaaagatgatcagctattttcaacataactgaaggcatatgctggcccataaacaccctgtaggttcttgatatttataataaaattggtgttttgta

SEQ ID NO: 55 - DNA, 2881 bp, Homo sapiens
gcgagaagggtgtgcgtgatggagaaaattgggcaccagggctgctcccgagattctcagatctgatttccacgcttgctaccaaaatagtctgggcaggccacttttggaagtaggcgttatctagtgagcaggcggccgctttcgatttcgctttcccctaaatggctgagctkctcgccagcgcaggatcagcctgttcctgggactttccgagagccccgccctcgttccctcccccagccgccagtaggggaggactcggcggtacccggagcttcaggccccaccggggcgcggagagtcccagrcccggccgggaccrggacggcgtccgagtgccaatggctagctctaggtgtcccgctccccgcgggtgccgctgcctccccsgagcttctctcgcatggctggggacagtactgctacttctcgccgactgggtgctgctccggaccgcgctgccccgcatattctccctgctggtgcccaccgcgctgccactgctccgggtctgggcggtgggcctgagccgctgggccgtgctctggctgggggcctgcggggtcctcagggcaacggttggctccaagagcgaaaacgcaggtgcccagggctggctggctgctttgaagccattagctgcggcactgggcttggccctgccgggasttgccttgttccgagagctgatctcatggggagcccccgggtccgcggatagcaccaggctactgcactggggaagtcaccctaccgccttcgtygtcagttatgcagcggcactgcccgcagcagccctgtggcacaaactcgggagcctctgggtgcccggcggtcagggcggctctggaaaccctgtgcgtcggcttctaggctgcctgggctcggagacgcgccgcctctcgctgttcctggtcctggtggtcctstcctctcttggggagatggccattccattctttacgggccgcctcactgactggattctacaagatggctcagccgataccttcactcgaaacttaactctcatgtccattctcaccatagccagtgcagtgctggagttcktgggtgacrggatctataacaacaccatgggycacgtgcacagccacttgcagggagaggtgtttggggctgtcctgcgccaggagacggagtttttccaacagaaccagacaggtaacatcatgtytcgggtaacagaggacacgtccaccctgagtgattctctgagtgagaatctgagcttatttctgtggtacctggtgcgaggcctatgtctcttggggatcatgctctggggatcagtgtccctcaccatggtcaccctgrtcaccctgcctctgcttttccttctgcccaagaaggtgggaaaatggtaccagttgctggaagtgcaggtgcgggaatctctggcaaagtccagccaggtggccattgaggytctgtcggccatgcctacagttcgaagctttgccaacgaggagggcgaagcccagaagtttagggaaaagctgcaagaaataaagacactcaaccagaaggaggctgtggcctatgcagtcaactcctggaccactagtatttcaggtatgctgctgaaagtgggaatcctctacattggtgggcagctggtgaccagtggggctgtaagcagtgggaaccttgtcacatttgttctctaccagatgcagttcacccaggctktggaggtactgctctccatctaccccagagtacagaaggctgtgggctcctcagagaaaatatttgagtacctggaccgcacccctcgctgcccacccagtggtctgttgactcccttacacttggagggccttgtccagttccaagatgtctcctttgcctacccaaaccgcccagatrtcttagtgctacaggggctgacattcaccctacgccctggcgaggtgacggcgctggtgggacccaatgggtctgggaagagcacagtggctgccctgctgcagaatctgtaccagcccaccgggggacagctgctgttggatgggaagccccttccccaatatgagcaccgctacctgcacaggcaggtggctgcagtgggacaagagccacaggtatttggaagaagtcttcaactgctgcagtaaagtctggggcccatagtttcatctctggactccctcagggctatgacacagaggtagrcgaggctgggagccagctgtcagggggtcagcracaggcagtggcgttggcccgagcattgatccggaaaccrtgtgtacttatcctggatgatgccaccagtgccctggatgcaaacagccagttacaggtggagcagctcctgtacgaaagccctgagcggtaytcccgctcagtgcttctcatcacccagcacctcagcctggtggagcaggctgaccacatcctctttctggaaggaggcgctatccgggaggggggaacccaccagcagctcatggagaaaaaggggtgctactgggccatggtgcaggctcctgcagatgctccagaatgaaagccttctcagacctgcgcactccatctccctcccttttcttctctctgtggtggagaaccacagctgcagagtakgcagctgcctccaggatgagttacttgaaatttgccttgagtgtgttacctcctttccaagctcytcgtgataatgcagacttcctggagtacaaacacaggatttgtaattccttastgtaacggagtttagagccagggctgatgctttggtgtggccagcactctgaaactgagaaatgttcagaatgtacggaaagatgatcagctattttcaacataactgaaggcatatgctggcccataaacaccctgtaggttcttg

SEQ ID NO: 56 - DNA, 2755 bp, Homo sapiens
gcgagaagggtgtgcgtgatggagaaaattgggcaccagggctgctcccgagattctcagatctgatttccacgcttgctaccaaaatagtctgggcaggccacttttggaagtaggcgttatctagtgagcaggcggccgctttcgatttcgctttcccctaaatggctgagctkctcgccagcgcaggatcagcctgttcctgggactttccgagagccccgccctcgttccctcccccagccgccagtaggggaggactcggcggtacccggagcttcaggccccaccggggcgcggagagtcccagrcccggccgggaccrggacggcgtccgagtgccaatggctagctctaggtgtcccgctccccgcgggtgccgctgcctccccsgagcttctctcgcatggctggggacagtactgctacttctcgccgactgggtgctgctccggaccgcgctgccccgcatattctccctgctggtgcccaccgcgctgccactgctccgggtctgggcggtgggcctgagccgctgggccgtgctctggctgggggcctgcggggtcctcagggcaacggttggctccaagagcgaaaacgcaggtgcccagggctggctggctgctttgaagccattagctgcggcactgggcttggccctgccgggasttgccttgttccgagagctgatctcatggggagcccccgggtccgcggatagcaccaggctactgcactggggaagtcaccctaccgccttcgtygtcagttatgcagcggcactgcccgcagcagccctgtggcacaaactcgggagcctctgggtgcccggcggtcagggcggctctggaaaccctgtgcgtcggcttctaggctgcctgggctcggagacgcgccgcctctcgctgttcctggtcctggtggtcctstcctctcttggggagatggccattccattctttacgggccgcctcactgactggattctacaagatggctcagccgataccttcactcgaaacttaactctcatgtccattctcaccatagccagtgcagtgctggagttcktgggtgacrggatctataacaacaccatgggycacgtgcacagccacttgcagggagaggtgtttggggctgtcctgcgccaggagacggagtttttccaacagaaccagacagttgctggaagtgcaggtgcgggaatctctggcaaagtccagccaggtggccattgaggytctgtcggccatgcctacagttcgaagctttgccaacgaggagggcgaagcccagaagtttagggaaaagctgcaagaaataaagacactcaaccagaaggaggctgtggcctatgcagtcaactcctggaccactagtatttcaggtatgctgctgaaagtgggaatcctctacattggtgggcagctggtgaccagtggggctgtaagcagtgggaaccttgtcacatttgttctctaccagatgcagttcacccaggctktggaggtactgctctccatctaccccagagtacagaaggctgtgggctcctcagagaaaatatttgagtacctggaccgcacccctcgctgcccacccagtggtctgttgactcccttacacttggagggccttgtccagttccaagatgtctcctttgcctacccaaaccgcccagatrtcttagtgctacaggggctgacattcaccctacgccctggcgaggtgacggcgctggtgggacccaatgggtctgggaagagcacagtggctgccctgctgcagaatctgtaccagcccaccgggggacagctgctgttggatgggaagccccttccccaatatgagcaccgctacctgcacaggcaggtggctgcagtgggacaagagccacaggtatttggaagaagtcttcaagaaaatattgcctatggcctgacccagaagccaactatggaggaaatcacagctgctgcagtaaagtctggggcccatagtttcatctctggactccctcagggctatgacacagaggtagrcgaggctgggagccagctgtcagggggtcagcracaggcagtggcgttggcccgagcattgatccggaaaccrtgtgtacttatcctggatgatgccaccagtgccctggatgcaaacagccagttacaggtggagcagctcctgtacgaaagccctgagcggtaytcccgctcagtgcttctcatcacccagcacctcagcctggtggagcaggctgaccacatcctctttctggaaggaggcgctatccgggaggggggaacccaccagcagctcatggagaaaaaggggtgctactgggccatggtgcaggctcctgcagatgctccagaatgaaagccttctcagacctgcgcactccatctccctcccttttcttctctctgtggtggagaaccacagctgcagagtakgcagctgcctccaggatgagttacttgaaatttgccttgagtgtgttacctcctttccaagctcytcgtgataatgcagacttcctggagtacaaacacaggatttgtaattccttastgtaacggagtttagagccagggctgatgctttggtgtggccagcactctgaaactgagaaatgttcagaatgtacggaaagatgatcagctattttcaacataactgaaggcatatgctggcccataaacaccctgtaggttcttgatatttataataaaattggtgttttgta

SEQ ID NO: 57 - DNA, 2811 bp, Homo sapiens
gcgagaagggtgtgcgtgatggagaaaattgggcaccagggctgctcccgagattctcagatctgatttccacgcttgctaccaaaatagtctgggcaggccacttttggaagtaggcgttatctagtgagcaggcggccgctttcgatttcgctttcccctaaatggctgagctkctcgccagcgcaggatcagcctgttcctgggactttccgagagccccgccctcgttccctcccccagccgccagtaggggaggactcggcggtacccggagcttcaggccccaccggggcgcggagagtcccagrcccggccgggaccrggacggcgtccgagtgccaatggctagctctaggtgtcccgctccccgcgggtgccgctgcctccccsgagcttctctcgcatggctggggacagtactgctacttctcgccgactgggtgctgctccggaccgcgctgccccgcatattctccctgctggggtcctcagggcaacggttggctccaagagcgaaaacgcaggtgcccagggctggctggctgctttgaagccattagctgcggcactgggcttggccctgccgggasttgccttgttccgagagctgatctcatggggagcccccgggtccgcggatagcaccaggctactgcactggggaagtcaccctaccgccttcgtygtcagttatgcagcggcactgcccgcagcagccctgtggcacaaactcgggagcctctgggtgcccggcggtcagggcggctctggaaaccctgtgcgtcggcttctaggctgcctgggctcggagacgcgccgcctctcgctgttcctggtcctggtggtcctstcctctcttggggagatggccattccattctttacgggccgcctcactgactggattctacaagatggctcagccgataccttcactcgaaacttaactctcatgtccattctcaccatagccagtgcagtgctggagttcktgggtgacrggatctataacaacaccatgggycacgtgcacagccacttgcagggagaggtgtttggggctgtcctgcgccaggagacggagtttttccaacagaaccagacaggtaacatcatgtytcgggtaacagaggacacgtccaccctgagtgattctctgagtgagaatctgagcttatttctgtggtacctggtgcgaggcctatgtctcttggggatcatgctctggggatcagtgtccctcaccatggtcaccctgrtcaccctgcctctgcttttccttctgcccaagaaggtgggaaaatggtaccagttgctggaagtgcaggtgcgggaatctctggcaaagtccagccaggtggccattgaggytctgtcggccatgcctacagttcgaagctttgccaacgaggagggcgaagcccagaagtttagggaaaagctgcaagaaataaagacactcaaccagaaggaggctgtggcctatgcagtcaactcctggaccactagtatttcaggtatgctgctgaaagtgggaatcctctacattggtgggcagctggtgaccagtggggctgtaagcagtgggaaccttgtcacatttgttctctaccagatgcagttcacccaggctktggaggtactgctctccatctaccccagagtacagaaggctgtgggctcctcagagaaaatatttgagtacctggaccgcacccctcgctgcccacccagtggtctgttgactcccttacacttggagggccttgtccagttccaagatgtctcctttgcctacccaaaccgcccagatrtcttagtgctacaggggctgacattcaccctacgccctggcgaggtgacggcgctggtgggacccaatgggtctgggaagagcacagtggctgccctgctgcagaatctgtaccagcccaccgggggacagctgctgttggatgggaagccccttccccaatatgagcaccgctacctgcacaggcaggtggctgcagtgggacaagagccacaggtatttggaagaagtcttcaagaaaatattgcctatggcctgacccagaagccaactatggaggaaatcacagctgctgcagtaaagtctggggcccatagtttcatctctggactccctcagggctatgacacagaggtagrcgaggctgggagccagctgtcagggggtcagcracaggcagtggcgttggcccgagcattgatccggaaaccrtgtgtacttatcctggatgatgccaccagtgccctggatgcaaacagccagttacaggtggagcagctcctgtacgaaagccctgagcggtaytcccgctcagtgcttctcatcacccagcacctcagcctggtggagcaggctgaccacatcctctttctggaaggaggcgctatccgggaggggggaacccaccagcagctcatggagaaaaaggggtgctactgggccatggtgcaggctcctgcagatgctccagaatgaaagccttctcagacctgcgcactccatctccctcccttttcttctctctgtggtggagaaccacagctgcagagtakgcagctgcctccaggatgagttacttgaaatttgccttgagtgtgttacctcctttccaagctcytcgtgataatgcagacttcctggagtacaaacacaggatttgtaattccttastgtaacggagtttagagccagggctgatgctttggtgtggccagcactctgaaactgagaaatgttcagaatgtacggaaagatgatcagctattttcaacata

SEQ ID NO: 58 - DNA, 2962 bp, Homo sapiens
ggcgagaagggtgtgcgtgatggagaaaattgggcaccagggctgctcccgagattctcagatctgatttccacgcttgctaccaaaatagtctgggcaggccacttttggaagtaggcgttatctagtgagcaggcggccgctttcgatttcgctttcccctaaatggctgagctkctcgccagcgcaggatcagcctgttcctgggactttccgagagccccgccctcgttccctcccccagccgccagtaggggaggactcggcggtacccggagcttcaggccccaccggggcgcggagagtcccagrcccggccgggaccrggacggcgtccgagtgccaatggctagctctaggtgtcccgctccccgcgggtgccgctgcctccccsgagcttctctcgcatggctggggacagtactgctacttctcgccgactgggtgctgctccggaccgcgctgccccgcatattctccctgctggtgcccaccgcgctgccactgctccgggtctgggcggtgggcctgagccgctgggccgtgctctggctgggggcctgcggggtcctcagggcaacggttggctccaagagcgaaaacgcaggtgcccagggctggctggctgctttgaagccattagctgcggcactgggcttggccctgccgggasttgccttgttccgagagctgatctcatggggagcccccgggtccgcggatagcaccaggctactgcactggggaagtcaccctaccgccttcgtygtcagttatgcagcggcactgcccgcagcagccctgtggcacaaactcgggagcctctgggtgcccggcggtcagggcggctctggaaaccctgtgcgtcggcttctaggctgcctgggctcggagacgcgccgcctctcgctgttcctggtcctggtggtcctstcctctcttggggagatggccattccattctttacgggccgcctcactgactggattctacaagatggctcagccgataccttcactcgaaacttaactctcatgtccattctcaccatagccagtgcagtgctggagttcktgggtgacrggatctataacaacaccatgggycacgtgcacagccacttgcagggagaggtgtttggggctgtcctgcgccaggagacggagtttttccaacagaaccagacaggtaacatcatgtytcgggtaacagaggacacgtccaccctgagtgattctctgagtgagaatctgagcttatttctgtggtacctggtgcgaggcctatgtctcttggggatcatgctctggggatcagtgtccctcaccatggtcaccctgrtcaccctgcctctgcttttccttctgcccaagaaggtgggaaaatggtaccagttgctggaagtgcaggtgcgggaatctctggcaaagtccagccaggtggccattgaggytctgtcggccatgcctacagttcgaagctttgccaacgaggagggcgaagcccagaagtttagggaaaagctgcaagaaataaagacactcaaccagaaggaggctgtggcctatgcagtcaactcctggaccactagtatttcaggtatgctgctgaaagtgggaatcctctacattggtgggcagctggtgaccagtggggctgtaagcagtgggaaccttgtcacatttgttctctaccagatgcagttcacccaggctktggaggtactgctctccatctaccccagagtacagaaggctgtgggctcctcagagaaaatatttgagtacctggaccgcacccctcgctgcccacccagtggtctgttgactcccttacacttggagggccttgtccagttccaagatgtctcctttgcctacccaaaccgcccagatrtcttagtgctacaggggctgacattcaccctacgccctggcgaggtgacggcgctggtgggacccaatgggtctgggaagagcacagtggctgccctgctgcagaatctgtaccagcccaccgggggacagctgctgttggatgggaagccccttccccaatatgagcaccgctacctgcacaggcaggtggctgcagtgggacaagagccacaggtatttggaagaagtcttcaagaaaatattgcctatggcctgacccagaagccaactatggaggaaatcacagctgctgcagtaaagtctggggcccatagtttcatctctggactccctcagggctatgacacagaggtagrcgaggctgggagccagctgtcagggggtcagcracaggcagtggcgttggcccgagcattgatccggaaaccrtgtgtacttatcctggatgatgccaccagtgccctggatgcaaacagccagttacaggtggagcagctcctgtacgaaagccctgagcggtaytcccgctcagtgcttctcatcacccagcacctcagcctggtggagcaggctgaccacatcctctttctggaaggaggcgctatccgggaggggggaacccaccagcagctcatggagaaaaaggggtgctactgggccatggtgcaggctcctgcagatgctccagaatgaaagccttctcagacctgcgcactccatctccctcccttttcttctctctgtggtggagaaccacagctgcagagtakgcagctgcctccaggatgagttacttgaaatttgccttgagtgtgttacctcctttccaagctcytcgtgataatgcagacttcctggagtacaaacacaggatttgtaattccttastgtaacggagtttagagccagggctgatgctttggtgtggccagcactctgaaactgagaaatgttcagaatgtacggaaagatgatcagctattttcaacataactgaaggcatatgctggcccataaacaccctgtaggttcttgatatttataataaaattggtgttttgta

SEQ ID NO: 59 - DNA, 2790 bp, Homo sapiens
ggcgagaagggtgtgcgtgatggagaaaattgggcaccagggctgctcccgagattctcagatctgatttccacgcttgctaccaaaatagtctgggcaggccacttttggaagtaggcgttatctagtgagcaggcggccgctttcgatttcgctttcccctaaatggctgagctkctcgccagcgcaggatcagcctgttcctgggactttccgagagccccgccctcgttccctcccccagccgccagtaggggaggactcggcggtacccggagcttcaggccccaccggggcgcggagagtcccagrcccggccgggaccrggacggcgtccgagtgccaatggctagctctaggtgtcccgctccccgcgggtgccgctgcctccccsgagcttctctcgcatggctggggacagtactgctacttctcgccgactgggtgctgctccggaccgcgctgccccgcatattctccctgctggtgcccaccgcgctgccactgctccgggtctgggcggtgggcctgagccgctgggccgtgctctggctgggggcctgcggggtcctcagggcaacggttggctccaagagcgaaaacgcaggtgcccagggctggctggctgctttgaagccattagctgcggcactgggcttggccctgccgggasttgccttgttccgagagctgatctcatggggagcccccgggtccgcggatagcaccaggctactgcactggggaagtcaccctaccgccttcgtygtcagttatgcagcggcactgcccgcagcagccctgtggcacaaactcgggagcctctgggtgcccggcggtcagggcggctctggaaaccctgtgcgtcggcttctaggctgcctgggctcggagacgcgccgcctctcgctgttcctggtcctggtggtcctstcctctcttggggagatggccattccattctttacgggccgcctcactgactggattctacaagatggctcagccgataccttcactcgaaacttaactctcatgtccattctcaccatagccagtgcagtgctggagttcktgggtgacrggatctataacaacaccatgggycacgtgcacagccacttgcagggagaggtgtttggggctgtcctgcgccaggagacggagtttttccaacagaaccagacaggtaacatcatgtytcgggtaacagaggacacgtccaccctgagtgattctctgagtgagaatctgagcttatttctgtggtacctggtgcgaggcctatgtctcttggggatcatgctctggggatcagtgtccctcaccatggtcaccctgrtcaccctgcctctgcttttccttctgcccaagaaggtgggaaaatggtaccagttgctggaagtgcaggtgcgggaatctctggcaaagtccagccaggtggccattgaggytctgtcggccatgcctacagttcgaagctttgccaacgaggagggcgaagcccagaagtttagggaaaagctgcaagaaataaagacactcaaccagaaggaggctgtggcctatgcagtcaactcctggaccactagtatttcaggtatgctgctgaaagtgggaatcctctacattggtgggcagctggtgaccagtggggctgtaagcagtgggaaccttgtcacatttgttctctaccagatgcagttcacccaggctktggaggtactgctctccatctaccccagagtacagaaggctgtgggctcctcagagaaaatatttgagtacctggaccgcacccctcgctgcccacccagtggtctgttgactcccttacacttggagggccttgtccagttccaagatgtctcctttccccttccccaatatgagcaccgctacctgcacaggcaggtggctgcagtgggacaagagccacaggtatttggaagaagtcttcaagaaaatattgcctatggcctgacccagaagccaactatggaggaaatcacagctgctgcagtaaagtctggggcccatagtttcatctctggactccctcagggctatgacacagaggtagrcgaggctgggagccagctgtcagggggtcagcracaggcagtggcgttggcccgagcattgatccggaaaccrtgtgtacttatcctggatgatgccaccagtgccctggatgcaaacagccagttacaggtggagcagctcctgtacgaaagccctgagcggtaytcccgctcagtgcttctcatcacccagcacctcagcctggtggagcaggctgaccacatcctctttctggaaggaggcgctatccgggaggggggaacccaccagcagctcatggagaaaaaggggtgctactgggccatggtgcaggctcctgcagatgctccagaatgaaagccttctcagacctgcgcactccatctccctcccttttcttctctctgtggtggagaaccacagctgcagagtakgcagctgcctccaggatgagttacttgaaatttgccttgagtgtgttacctcctttccaagctcytcgtgataatgcagacttcctggagtacaaacacaggatttgtaattccttastgtaacggagtttagagccagggctgatgctttggtgtggccagcactctgaaactgagaaatgttcagaatgtacggaaagatgatcagctattttcaacataactgaaggcatatgctggcccataaacaccctgtaggttcttgatatttataataaaattggtgttttgt

SEQ ID NO: 60 - DNA, 1515 bp, Homo sapiens
  misc_feature (1)...(1515): n = A,T,C or G, or insertion/deletion polymorphism (see Tables 1-2)
caggagctccctttagcgagtccttcttttcctgactgcagctyttttcattttgccatccttttccagctccatgatggttctgcaggtttctgcggccccccggacagtggctctgacggcgttactgatggtgctgctcacatctgtggtccagggcagggccactccagagaastkcwttttnnagggacggcaggaatgctacgcgtttaatgggacacagcgcttcctggagagatacatctacaascgggaywagytcgcgcgcttcgacagcgacgrgggggagttccgggcggtgacggagctggggcggmctmctgsggagtactggaacagccagaamgacatcctggarragaagcgggcagtgccggarargatgtgcagacacaactacgagdtgrgsgsrcccatgaccctgcagcgccgagtccagrctagggygaatgtttccccctccaagragggycccttgcagcaccacaacctgcttrtctgccacgrgacggatttctacrcaggcagcattcaagtccsatggttcctgaatggacaggaggaaacagctggggtcgtgtccaccaacctgatccgtaatggagactggaccttccagatcwtggtgatgctggaaatgaccccccagcaggyagatgtcyacacctgccaagtggagcacacmagccyggatagtcctgtcaccgtggagtggaaggcacagtctgattctgcccggagtaagacattgacgggagctgggggcttcgtgctggggctcatcatctgtggagtgggcatcttcatgcacaggaggagcaagaaagttcaacgaggatctgcataaacagggttcstgagcycactgaaaagwctattgtgccttaggaaaagcatttgctgtytttcrttygcatytggctccaggacayaccrtcaacmtckwaattggatactgctgccaagaagttgctctgaagtcagtttcratcattctgctctttgattcaaagcactgtttctctcactgggcctccaaccatgttcccttcttcttagcaccacaaataatcaaaacccarcstgactgyttgttttcctttaaaaataygcaccaratcatctcycatcacttttctctgagggttttagtagacagtaggagttaataaagaagttcattttggtttaaacataggaaagaagagaaccatgaaaatggggatatgttaactattgtataatggggcctgttacacatgacactcttctgaattgactgtatttcagtgagctgcccccaaatcaagtttagtgccctcatccatttatgtctcagaccactattcttaactattcaatggtgagcagactgcaaatctgcctgataggacccatattcccacagcactaattcaacatataccttactgagagcatgttttatcattaccaktaagaagttaaatgaacatcagaatttaaaatcataaatataatctaatacacttt

SEQ ID NO: 61 - DNA, 1626 bp, Homo sapiens
  misc_feature (1)...(1626): n = A,T,C or G, or insertion/deletion polymorphism (see Tables 1-2)
caggagctccctttagcgagtccttcttttcctgactgcagctcttttcattttgccatccttttccwgctccatgatggttctgcaggtttctgcggccccsckgwcagtnnctctgacggcgttactgatggtgctgctcacatctgtggtccagggcagggccactccagagaastacctywtcyagggacggcaggaatgctacgrgtttaatgggacacagcgcttcctggagagatacmtcmacasccgggaggagttcgcgcgcttmgacagcgacgtrrgggagttccgggcggtgacrgrgctggggcggcctgctgcggagdacrgsasragccagaaggacatcctggaggagaagrgggcagygccggacaggatgtgcagaracaaytacgagctgggcgggcccatgaccrtgcagcgccragtccagcctaggrtgaatgtttccccctccasgaaggggcccttgcagcaccacaacctgcttgtctgccacgtgacggatttctacccaggcagcattcaagtccgatggttcwtgaatggacaggaggaaacagctggggtcgygtccaccyacctgatccgtaatggagactgmacctyccagatcctggtgatgctggaaatgaccccccagcagggagatgtctacacctgccaagtggagcacaccagcctggatagtcctgtcaccgtggagtggaaggcacagtctgattctgcccggagtaagacattgacgggagctgggggcttcgtgctggggctcstcatcygtggagtgggwatcttcatgcacaggaggagcaagaaagagycacartcygattytgcccggagtaagycatrgacggmagkwgggggcttcgtgctggggctcatcatctgtggagtgggcatcrtcatgcacaggaggagcaagaaagttcaacgaggatctgcataaacagggttcctgagctcactgaaaagactattgtgccttaggaaaagcrtstgctgtytttcgttagcatctggctcyaggacaraccttcaayttccaaattggatactgctgccaagaagttgctctgaagtcagtttctatcattctgctctttgattcaaagcactgtttctctcactgggcctccaaccatgttcccttcttcttagcaccacaaataatcaaaacccaacatgactgtttgttttcctttaaaaatatgcaccaaatcatctctcatcacttttctctgagggttttagtagacagtaggagttaataaagaagttcattttggtttaaacataggaaagaagagaaccatgaaaatggggatatgttaactattgtataatggggcctgttacacatgacactctkctgaattgactgtatttcagtgagctgcccccaaatcaagtttagtgccctcatccatttatgtctcagaccactattcttaactattcaatggtgagcagactgcaaatctgcctgataggacccatattcccacagcactaattcaacatataccttactgagagcatgttttatcattaccattaagaagttaaatgaacatcagaatttaaaatcataaatataatctaatacacttt

SEQ ID NO: 62 - DNA, 1643 bp, Homo sapiens
  misc_feature (1)...(1643): n = A,T,C or G, or insertion/deletion polymorphism (see Tables 1-2)
caggagctccctttagcgagtccttcttttcctgactgcagctyttttcattttgccatccttttccagctccatgatggttctgcaggtttctgcggccccccggacagtggctctgacggcgttactgatggtgctgctcacatctgtggtccagggcagggccactccagagaastkcwttttnnagggacggcaggaatgctacgcgtttaatgggacacagcgcttcctggagagatacatctacaascgggaywagytcgcgcgcttcgacagcgacgrgggggagttccgggcggtgacggagctggggcggmctmctgsggagtactggaacagccagaamgacatcctggarragaagcgggcagtgccggarargatgtgcagacacaactacgagdtgrgsgsrcccatgaccctgcagcgccgagtccagcctagggtgaatgtttccccctccaagaaggggcccttgcagcaccacaacctgcttgtctgccacgtgacggatttctacccaggcagcattcaagtccgatggttcctgaatggacaggaggaaacagctgggstcgtgyccaccaacctwatccgtaatggagackwgaccttccagatcctggtgatgctggaaatgaccccccagcarggagatgtctacacctgccaagtggagcacaccagcctggatagtcctgtcaccgtggagtggaaggcacagtctgattctgcccggagtaaracattgacgggagctgggggcttcgtgctggggctcatcatctgtggagtgggcatcttcatgcacaggaggagcaagaaagaggcacagtctgattctgcccggagtaagacattgacgggagctgggggcttcgtgctggggctcatcatctgtggagtgggcatcttcatgcacaggaggagcaagaaaggtgagaaagcctgcaggttcaacgaggatctgcataaacagggttcctgagctcactgaaaagactattgtgccttaggaaaagcatttgctgtgtttcgttagcatctggctccaggacagaccttcaacttccaaattggatactgctgccaagaagttgctctgaagtcagtttctatcattctgctctttgattcaaagcactgtttctctcactgggcctccaaccatgttcccttcttcttagcaccacaaataatcaaaacccaacatgactgtttgttttcctttaaaaatatgcaccaaatcatctctcatcacttttctctgagggttttagtagacagtaggagttaataaagaagttcattttggtttaaacataggaaagaagagaaccatgaaaatggggatatgttaactattgtataatggggcctgttacacatgacactcttctgaattgactgtatttcagtgagctgcccccaaatcaagtttagtgccctcatccatttatgtctcagaccactattcttaactattcaatggtgagcagactgcaaatctgcctgataggacccatattcccacagcactaattcaacatataccttactgagagcatgttttatcattaccattaagaagttaaatgaacatcagaatttaaaatcataaatataatctaatacacttt

SEQ ID NO: 63 - DNA, 2016 bp, Homo sapiens
  misc_feature (1)...(2016): n = A,T,C or G, or insertion/deletion polymorphism (see Tables 1-2)
caggagctccctttagcgagtccttcttttcctgactgcagctyttttcattttgccatccttttccagctccatgatggttctgcaggtttctgcggccccccggacagtggctctgacggcgttactgatggtgctgctcacatctgtggtccagggcagggccactccagagaastkcwttttnnagggacggcaggaatgctacgcgtttaatgggacacagcgcttcctggagagatacatctacaascgggaywagytcgcgcgcttcgacagcgacgrgggggagttccgggcggtgacggagctggggcggmctmctgsggagtactggaacagccagaamgacatcctggarragaagcgggcagtgccggarargatgtgcagacacaactacgagdtgrgsgsrcccatgaccctgcagcgccgaggctggagtgctgtggcaccatcatggctcactgcagcctcaacctcctgggctcaagtgatcctcctgcctcagcctcccatgtagctagaactacagatacacgtaccaccatgtctggctaatttatttttctttttagagatgggttctcactatgttgcccaggccggtctcaaaaccctgggctcaagtgatcctcatgcctcaacctcccaaagtgctaagattataggcatgaccaccatgcctggccttttctgctttctgaggaggaaaaaggtactggtggcagagatccaaaagaaaagttgccagtggcagtgtggaaattcacctgagaacaacaggacaagctggggcacaaatgcaaagatgcagagggaggcaacacctggtcatctgtgagaccttcatgggacctgaagacgcagcacagaggaggaacttgaaaaaggacgggatttctactactcaagcatgtaggagctcaggatattcttccagrctagggygaatgtttccccctccaagragggycccttgcagcaccacaacctgcttrtctgccacgrgacggatttctacrcaggcagcattcaagtccsatggttcctgaatggacaggaggaaacagctggggtcgtgtccaccaacctgatccgtaatggagactggaccttccagatcwtggtgatgctggaaatgaccccccagcaggyagatgtcyacacctgccaagtggagcacacmagccyggatagtcctgtcaccgtggagtggaaggcacagtctgattctgcccggagtaagacattgacgggagctgggggcttcgtgctggggctcatcatctgtggagtgggcatcttcatgcacaggaggagcaagaaagttcaacgaggatctgcataaacagggttcstgagcycactgaaaagwctattgtgccttaggaaaagcatttgctgtytttcrttygcatytggctccaggacayaccrtcaacmtckwaattggatactgctgccaagaagttgctctgaagtcagtttcratcattctgctctttgattcaaagcactgtttctctcactgggcctccaaccatgttcccttcttcttagcaccacaaataatcaaaacccarcatgactgtttgttttcctttaaaaatatgcaccaaatcatctctcatcacttttctctgagggttttagtagacagtaggagttaataaagaagttcattttggtttaaacataggaaagaagagaaccatgaaaatggggatatgttaactattgtataatggggcctgttacacatgacactcttctgaattgactgtatttcagtgagctgcccccaaatcaagtttagtgccctcatccatttatgtctcagaccactattcttaactattcaatggtgagcagactgcaaatctgcctgataggacccatattcccacagcactaattcaacatataccttactgagagcatgttttatcattaccattaagaagttaaatgaacatcagaatttaaaatcataaatataatctaatacacttt

SEQ ID NO: 64 - DNA, 1840 bp, Homo sapiens
taggcgcgtgccgcgagaacagagtggacggagmgtaggagagaccgaaaaggctgggggtgggagtagcggatttgaagcacttgttggcctacagaggtgtggcaagcagagcacctcagaactcaggcgtactgcccgccgcccgagccstgcgagggccgatagcgagggtgtggcccttatctgcacccagcagagcgccggcggggtacggtcttaggacctcgatctccttctccctcattttctctcatccctacctattgtgggtttccgcaysggccggaccgtggtcgtgctgggcggargcaycagcggcttsgccgccagttaccacctgagccgggccccctgcccccctaaggtggtcctagtggagagcagtgagcgtctgggaggctggattcgctccgttcgaggccctaatggtgctatctttgagcttggacctyggggaattaggccagcgggagccctaggggcccggaccttgcycctggtttctgagcttggcttggattcagaagtgctgcctgtccggggagaccacccagctgcccagaacaggttcctctacgtgggcggtgccctgcmtgccctacccactggcctcagggggctactccgcccttcaccccccttctccaaacctctgttttgggctgggctgaggkagctgaccaagccccsgggcaaagagcctgwtgagactgtgcacagttttgcccagygccgccytggacctgagrtggcgtctctagccatggacagtctctgccgtggagtgtttgyaggcaacagccgtgagstcagcatcaggtcctgctttcccagtctcttcyaagctkagcaaacccatcgttccatatkactgggcctgctgctgggggcagggcggaccccacagccagactcagcactcattcgccaggccttggctgagcgctgragccagtggtcacttcgtggasgtctagagatgtygcctcaggcccttgaaacccacctgactagtaggggggtcagtgttctcagaggccagcsggtctgtgggctcagcctccaggcagaagggcgctrgaaggtatctctaagggacagcagtctggaggctgaccacgttattagtgccattccagcttcartgctcagtgagctgcyccctgctgaggctgcccctctggctcrtgccctgagtgccatcactgcagtgtctgtagctgtggtgaatctgcagtaccaaggagcccatctgcctgtccagggatttggacatttggkgccatcttcagaagatccaggagtcctgggaatcgtgtrtgmcycagttgctttccctgagcaggacgggagcccccctggcctcagagtgactgtgatgctgggaggttcctgrttayagacactggaggctagtggctgtgtcttatctcaggagctgtttcaacagcgggcccaggaagcagctgctacacaattmggactgaaggagatgccgagccactgcttggtccatctacacaagaactgcattccccagtatacactaggtcactggcaaaaactaggtaagttgggaaaacagctgggctgaggagggccaaggacatcagacccccagctaaaacattcctttcatcctttccttccagagtcasctaggyaattcctgactgctcacaggttgccccygactctggctrgagccycctatgagrkagttgctgttaatgactgtatagagagtgggcgccaggcagcagtcagtgtcctgggcacagaacctaacagctgatccccaactctcattcatgaaaataaaaattgctggagcttg

SEQ ID NO: 65 - DNA, 1577 bp, Homo sapiens
tcctggcccctggacggggacctcgctgttccaccagcccatccgtgcacacttagtttcccctaaagcagtttccgcaysggccggaccgtggtcgtgctgggcggargcaycagcggcttsgccgccagttaccacctgagccgggccccctgcccccctaaggtggtcctagtggagagcagtgagcgtctgggaggctggattcgctccgttcgaggccctaatggtgctatctttgagcttggacctyggggaattaggccagcgggagccctaggggcccggaccttgcycctggtttctgagcttggcttggattcagaagtgctgcctgtccggggagaccacccagctgcccagaacaggttcctctacgtgggcggtgccctgcmtgccctacccactggcctcagggggctactccgcccttcaccccccttctccaaacctctgttttgggctgggctgaggkagctgaccaagccccsgggcaaagagcctgwtgagactgtgcacagttttgcccagygccgccytggacctgagtcctagtctcacccttaagrtggcgtctctagccatggacagtctctgccgtggagtgtttgyaggcaacagccgtgagstcagcatcaggtcctgctttcccagtctcttcyaagctkagcaaacccatcgttccatatkactgggcctgctgctgggggcagggcggaccccacagccagactcagcactcattcgccaggccttggctgagcgctgragccagtggtcacttcgtggasgtctagagatgtygcctcaggcccttgaaacccacctgactagtaggggggtcagtgttctcagaggccagcsggtctgtgggctcagcctccaggcagaagggcgctrgaaggtatctctaagggacagcagtctggaggctgaccacgttattagtgccattccagcttcartgctcagtgagctgcyccctgctgaggctgcccctctggctcrtgccctgagtgccatcactgcagtgtctgtagctgtggtgaatctgcagtaccaaggagcccatctgcctgtccagggatttggacatttggkgccatcttcagaagatccaggagtcctgggaatcgtgtrtgmcycagttgctttccctgagcaggacgggagcccccctggcctcagagtgactgtgatgctgggaggttcctgrttayagacactggaggctagtggctgtgtcttatctcaggagctgtttcaacagcgggcccaggaagcagctgctacacaattmggactgaaggagatgccgagccactgcttggtccatctacacaagaactgcattccccagtatacactaggtcactggcaaaaactagagtcasctaggyaattcctgactgctcacaggttgccccygactctggctrgagccycctatgagrkagttgctgttaatgactgtatagagagtgggcgccaggcagcagtcagtgtcctgggcacagaacctaacagctgatccccaactctcattcatgaaaataaaaattgctggagcttggctt

SEQ ID NO: 66 - DNA, 1644 bp, Homo sapiens
taggcgcgtgccgcgagaacagagtggacggagmgtaggagagaccgaaaaggctgggggtgggagtagcggatttgaagcacttgttggcctacagaggtgtggcaagcagagcacctcagaactcaggcgtactgcccgccgcccgagccstgcgagggccgatagcgagggtgtggcccttatctgcacccagcagagcgccggcggggtacggtcttaggacctcgatctccttctccctcattttctctcatccctacctattgtgggtttccgcaysggccggaccgtggtcgtgctgggcggargcaycagcggcttsgccgccagttaccacctgagccgggccccctgcccccctaaggtggtcctagtggagagcagtgagcgtctgggaggctggattcgctccgttcgaggccctaatggtgctatctttgagcttggacctyggggaattaggccagcgggagccctaggggcccggaccttgcycctgggggctactccgcccttcaccccccttctccaaacctctgttttgggctgggctgaggkagctgaccaagccccsgggcaaagagcctgwtgagactgtgcacagttttgcccagygccgccytggacctgagrtggcgtctctagccatggacagtctctgccgtggagtgtttgyaggcaacagccgtgagstcagcatcaggtcctgctttcccagtctcttcyaagctkagcaaacccatcgttccatatkactgggcctgctgctgggggcagggcggaccccacagccagactcagcactcattcgccaggccttggctgagcgctgragccagtggtcacttcgtggasgtctagagatgtygcctcaggcccttgaaacccacctgactagtaggggggtcagtgttctcagaggccagcsggtctgtgggctcagcctccaggcagaagggcgctrgaaggtatctctaagggacagcagtctggaggctgaccacgttattagtgccattccagcttcartgctcagtgagctgcyccctgctgaggctgcccctctggctcrtgccctgagtgccatcactgcagtgtctgtagctgtggtgaatctgcagtaccaaggagcccatctgcctgtccagggatttggacatttggkgccatcttcagaagatccaggagtcctgggaatcgtgtrtgmcycagttgctttccctgagcaggacgggagcccccctggcctcagagtgactgtgatgctgggaggttcctgrttayagacactggaggctagtggctgtgtcttatctcaggagctgtttcaacagcgggcccaggaagcagctgctacacaattmggactgaaggagatgccgagccactgcttggtccatctacacaagaactgcattccccagtatacactaggtcactggcaaaaactagagtcasctaggyaattcctgactgctcacaggttgccccygactctggctrgagccycctatgagrkagttgctgttaatgactgtatagagagtgggcgccaggcagcagtcagtgtcctgggcacagaacctaacagctgatccccaactctcattcatgaaaataaaaattgctggagcttggctt

SEQ ID NO: 67 - DNA, 1760 bp, Homo sapiens
taggcgcgtgccgcgagaacagagtggacggagmgtaggagagaccgaaaaggctgggggtgggagtagcggatttgaagcacttgttggcctacagaggtgtggcaagcagagcacctcagaactcaggcgtactgcccgccgcccgagccstgcgagggccgatagcgagggtgtggcccttatctgcacccagcagagcgccggcggggtacggtcttaggacctcgatctccttctccctcattttctctcatccctacctattgtgggtttccgcaysggccggaccgtggtcgtgctgggcggargcaycagcggcttsgccgccagttaccacctgagccgggccccctgcccccctaaggtggtcctagtggagagcagtgagcgtctgggaggctggattcgctccgttcgaggccctaatggtgctatctttgagcttggacctyggggaattaggccagcgggagccctaggggcccggaccttgcycctggtttctgagcttggcttggattcagaagtgctgcctgtccggggagaccacccagctgcccagaacaggttcctctacgtgggcggtgccctgcmtgccctacccactggcctcagggggctactccgcccttcaccccccttctccaaacctctgttttgggctgggctgaggkagctgaccaagccccsgggcaaagagcctgwtgagactgtgcacagttttgcccagygccgccytggacctgagrtggcgtctctagccatggacagtctctgccgtggagtgtttgyaggcaacagccgtgagstcagcatcaggtcctgctttcccagtctcttcyaagctkagcaaacccatcgttccatatkactgggcctgctgctgggggcagggcggaccccacagccagactcagcactcattcgccaggccttggctgagcgctgragccagtggtcacttcgtggasgtctagagatgtygcctcaggcccttgaaacccacctgactagtaggggggtcagtgttctcagaggccagcsggtctgtgggctcagcctccaggcagaagggcgctrgaaggtatctctaagggacagcagtctggaggctgaccacgttattagtgccattccagcttcartgctcagtgagctgcyccctgctgaggctgcccctctggctcrtgccctgagtgccatcactgcagtgtctgtagctgtggtgaatctgcagtaccaaggagcccatctgcctgtccagggatttggacatttggkgccatcttcagaagatccaggagtcctgggaatcgtgtrtgmcycagttgctttccctgagcaggacgggagcccccctggcctcagagtgactgtgatgctgggaggttcctgrttayagacactggaggctagtggctgtgtcttatctcaggagctgtttcaacagcgggcccaggaagcagctgctacacaattmggactgaaggagatgccgagccactgcttggtccatctacacaagaactgcattccccagtatacactaggtcactggcaaaaactagagtcasctaggyaattcctgactgctcacaggttgccccygactctggctrgagccycctatgagrkagttgctgttaatgactgtatagagagtgggcgccaggcagcagtcagtgtcctgggcacagaacctaacagctgatccccaactctcattcatgaaaataaaaattgctggagcttggctt

SEQ ID NO: 68 - DNA, 1779 bp, Homo sapiens
taggcgcgtgccgcgagaacagagtggacggagmgtaggagagaccgaaaaggctgggggtgggagtagcggatttgaagcacttgttggcctacagaggtgtggcaagcagagcacctcagaactcaggcgtactgcccgccgcccgagccstgcgagggccgatagcgagggtgtggcccttatctgcacccagcagagcgccggcggggtacggtcttaggacctcgatctccttctccctcattttctctcatccctacctattgtgggtttccgcaysggccggaccgtggtcgtgctgggcggargcaycagcggcttsgccgccagttaccacctgagccgggccccctgcccccctaaggtggtcctagtggagagcagtgagcgtctgggaggctggattcgctccgttcgaggccctaatggtgctatctttgagcttggacctyggggaattaggccagcgggagccctaggggcccggaccttgcycctggtttctgagcttggcttggattcagaagtgctgcctgtccggggagaccacccagctgcccagaacaggttcctctacgtgggcggtgccctgcmtgccctacccactggcctcagggggctactccgcccttcaccccccttctccaaacctctgttttgggctgggctgaggkagctgaccaagccccsgggcaaagagcctgwtgagactgtgcacagttttgcccagygccgccytggacctgagtcctagtctcacccttaagrtggcgtctctagccatggacagtctctgccgtggagtgtttgyaggcaacagccgtgagstcagcatcaggtcctgctttcccagtctcttcyaagctkagcaaacccatcgttccatatkactgggcctgctgctgggggcagggcggaccccacagccagactcagcactcattcgccaggccttggctgagcgctgragccagtggtcacttcgtggasgtctagagatgtygcctcaggcccttgaaacccacctgactagtaggggggtcagtgttctcagaggccagcsggtctgtgggctcagcctccaggcagaagggcgctrgaaggtatctctaagggacagcagtctggaggctgaccacgttattagtgccattccagcttcartgctcagtgagctgcyccctgctgaggctgcccctctggctcrtgccctgagtgccatcactgcagtgtctgtagctgtggtgaatctgcagtaccaaggagcccatctgcctgtccagggatttggacatttggkgccatcttcagaagatccaggagtcctgggaatcgtgtrtgmcycagttgctttccctgagcaggacgggagcccccctggcctcagagtgactgtgatgctgggaggttcctgrttayagacactggaggctagtggctgtgtcttatctcaggagctgtttcaacagcgggcccaggaagcagctgctacacaattmggactgaaggagatgccgagccactgcttggtccatctacacaagaactgcattccccagtatacactaggtcactggcaaaaactagagtcasctaggyaattcctgactgctcacaggttgccccygactctggctrgagccycctatgagrkagttgctgttaatgactgtatagagagtgggcgccaggcagcagtcagtgtcctgggcacagaacctaacagctgatccccaactctcattcatgaaaataaaaattgctggagcttggctt

SEQ ID NO: 69 - DNA, 1558 bp, Homo sapiens
tcctggcccctggacggggacctcgctgttccaccagcccatccgtgcacacttagtttcccctaaagcagtttccgcaysggccggaccgtggtcgtgctgggcggargcaycagcggcttsgccgccagttaccacctgagccgggccccctgcccccctaaggtggtcctagtggagagcagtgagcgtctgggaggctggattcgctccgttcgaggccctaatggtgctatctttgagcttggacctyggggaattaggccagcgggagccctaggggcccggaccttgcycctggtttctgagcttggcttggattcagaagtgctgcctgtccggggagaccacccagctgcccagaacaggttcctctacgtgggcggtgccctgcmtgccctacccactggcctcagggggctactccgcccttcaccccccttctccaaacctctgttttgggctgggctgaggkagctgaccaagccccsgggcaaagagcctgwtgagactgtgcacagttttgcccagygccgccytggacctgagrtggcgtctctagccatggacagtctctgccgtggagtgtttgyaggcaacagccgtgagstcagcatcaggtcctgctttcccagtctcttcyaagctkagcaaacccatcgttccatatkactgggcctgctgctgggggcagggcggaccccacagccagactcagcactcattcgccaggccttggctgagcgctgragccagtggtcacttcgtggasgtctagagatgtygcctcaggcccttgaaacccacctgactagtaggggggtcagtgttctcagaggccagcsggtctgtgggctcagcctccaggcagaagggcgctrgaaggtatctctaagggacagcagtctggaggctgaccacgttattagtgccattccagcttcartgctcagtgagctgcyccctgctgaggctgcccctctggctcrtgccctgagtgccatcactgcagtgtctgtagctgtggtgaatctgcagtaccaaggagcccatctgcctgtccagggatttggacatttggkgccatcttcagaagatccaggagtcctgggaatcgtgtrtgmcycagttgctttccctgagcaggacgggagcccccctggcctcagagtgactgtgatgctgggaggttcctgrttayagacactggaggctagtggctgtgtcttatctcaggagctgtttcaacagcgggcccaggaagcagctgctacacaattmggactgaaggagatgccgagccactgcttggtccatctacacaagaactgcattccccagtatacactaggtcactggcaaaaactagagtcasctaggyaattcctgactgctcacaggttgccccygactctggctrgagccycctatgagrkagttgctgttaatgactgtatagagagtgggcgccaggcagcagtcagtgtcctgggcacagaacctaacagctgatccccaactctcattcatgaaaataaaaattgctggagcttggctt

SEQ ID NO: 70 - DNA, 2542 bp, Homo sapiens
agtttacggaagtgtaacgttgaggcccttcttgtgtatctggagaaaatagaggttctgactcctcaggagcaaaaaacataacctgaagagggaggaagtggatttggggttcaccatttcttggggcacacttgattgaaaactgagacttctgaagagaaggccagaagatacaaagacagaccatcccagttgaatgctgtcttccaagaacagaagaaaatgatccaggcccaggaatccataacactggaggatgtggctgtggacttcacttgggaggagtggcaactcctgggcgctgctcagaaggacctgtaccgggaygtgatgttggagaactacagcaacctggtggcagtggggtatcaagccagcaaaccggatgcactcttcaagttggaacaaggagaacaacygtggacaattgaagatggaatccacagtggagcctgttcagacatatggaaagttgatcatgtgctggagcgcttgcagagtgaaagcctggtgaacagaaggaaaccatgtcatgaacatgatgcatttgaaaatattgttcattgcagcaaaagtcagtttctgttagggcaaaatcatgatatatttgacttaygtggaaaaagtttgaaatccaatttaactttagttaaccagagcaaaggctatgaaataaagaactctgttgagtttactggaaatggggactcctttcttcatgctaaccatgaacgacttcatactgcaattaaattccctgcaagtcaaaaactcatcagcactaagtcccaattcatcagtcccaagcatcagaaaacacgaaaattagagaagcatcatgtgtgcagtgaatgtgggaaagccttcatcaagaagtcttggctaactgatcaccaggtaatgcatacaggagagaaaccccacagatgyagtctatgtgagaaagccttctccagaaagttcatgcttactgaacatcagcgaactcatacaggagaaaaaccttatgaatgccctgaatgtggcaaagcctttctcaagaaatcacggctcaacatacatcagaaaacacataccggagagaaaccctatatatgcagtgaatgtggaaaaggcttcatccagaaaggaaatctcattgtacaccagcgaattcatacaggtgagaaaccttatatatgcaatgaatgtggaaaaggcttcattcagaagacgtgtctcatagcacatcagagatttcacacaggaaagacgccctttgtgtgcagtgaatgtggaaaatcctgttctcagaaatcaggtctcattaaacatcaaagaattcacacaggagagaaaccmtttgaatgtagtgaatgtgggaaagcctttagcacaaagcaaaagctcattgtccatcaaaggactcatacaggagagagaccctatggctgtaacragtgtgggaaagcgtttgcgtatatgtcgtgtctggttaagcataagagaatacacacaagggagaaacaagaggcagccaaggtggaaaatcctcctgcagagaggcacagctcattacacaccagtgatgtcatgcaggagaaaaactctgctaacggggcgactacacaagtgccttctgtggcccctcagacatcattaaacatcagyggcctcctcgcaaacaggaacgtagtccttgtgggacagccagtggtcagatgtgcagcctcaggagataacagwggatttgcacaggacagaaaccttgtgaatgcagtgaatgtggttgtgccttccgtgatcaattatgtcttattttatgttacagaaaacccataggaagaaaactcagatctatgtggaaaagggttgagcaaaaatttgtagttcattatgtggccgaaaagcatayactgagagaacatgtataaggctgagatagcctgataaactcatcctattaaaatgtatgctgtgatacacaggcaaatttgatgttaacctaagcacatacacagcaattgctcgactgtgtcaattaaatgagtaaaggaagcccaagtacttttaagtggaggaaatgaagtactgtgaatttttaaaacagatgagataattggtgtygggagtgttgcagtgactgaaaagcttcataaggggcagttggtgggaaagggctaatactgtaatggtggaatgtgggacacatatgtgtcaattcagtttccttagaccagtgccagtgtggaggattaattgaaaaccaggaccataaactttcagaactttgtattatgcagagggatctgtgaaactagtcaatttgtttcattaaacaaatattttaaaattatttcctttgtaccttgtcctgttccaggagctgaggtcaaagaagaaaaagtttgtggtctcctggagagtttgtggggttaattttaagtggtatcattacactcaggcaatctagtcaggcggtgcaaatatctacattaggtgaaatggacatggagtaactgtgtccaggggacgcgataatttattgttcaaggagtag

SEQ ID NO: 71 - DNA, 2488 bp, Homo sapiens
gttctgactcctcaggagcaaaaaacataacctgaagagggaggaagtggatttggggttcaccatttcttggggcacacttgattgaaaactgagacttctgaagagaaggccagaagatacaaagacagaccatcccagttgaatgctgtcttccaagaacagaagaaaatgatccaggcccaggaatccataacactggaggatgtggctgtggacttcacttgggaggagtggcaactcctgggcgctgctcagaaggacctgtaccgggaygtgatgttggagaactacagcaacctggtggcagtggggtatcaagccagcaaaccggatgcactcttcaagttggaacaaggagaacaacygtggacaattgaagatggaatccacagtggagcctgttcagacatatggaaagttgatcatgtgctggagcgcttgcagagtgaaagcctggtgaacagaaggaaaccatgtcatgaacatgatgcatttgaaaatattgttcattgcagcaaaagtcagtttctgttagggcaaaatcatgatatatttgacttaygtggaaaaagtttgaaatccaatttaactttagttaaccagagcaaaggctatgaaataaagaactctgttgagtttactggaaatggggactcctttcttcatgctaaccatgaacgacttcatactgcaattaaattccctgcaagtcaaaaactcatcagcactaagtcccaattcatcagtcccaagcatcagaaaacacgaaaattagagaagcatcatgtgtgcagtgaatgtgggaaagccttcatcaagaagtcttggctaactgatcaccaggtaatgcatacaggagagaaaccccacagatgyagtctatgtgagaaagccttctccagaaagttcatgcttactgaacatcagcgaactcatacaggagaaaaaccttatgaatgccctgaatgtggcaaagcctttctcaagaaatcacggctcaacatacatcagaaaacacataccggagagaaaccctatatatgcagtgaatgtggaaaaggcttcatccagaaaggaaatctcattgtacaccagcgaattcatacaggtgagaaaccttatatatgcaatgaatgtggaaaaggcttcattcagaagacgtgtctcatagcacatcagagatttcacacaggaaagacgccctttgtgtgcagtgaatgtggaaaatcctgttctcagaaatcaggtctcattaaacatcaaagaattcacacaggagagaaaccmtttgaatgtagtgaatgtgggaaagcctttagcacaaagcaaaagctcattgtccatcaaaggactcatacaggagagagaccctatggctgtaacragtgtgggaaagcgtttgcgtatatgtcgtgtctggttaagcataagagaatacacacaagggagaaacaagaggcagccaaggtggaaaatcctcctgcagagaggcacagctcattacacaccagtgatgtcatgcaggagaaaaactctgctaacggggcgactacacaagtgccttctgtggcccctcagacatcattaaacatcagyggcctcctcgcaaacaggaacgtagtccttgtgggacagccagtggtcagatgtgcagcctcaggagataacagwggatttgcacaggacagaaaccttgtgaatgcagtgaatgtggttgtgccttccgtgatcaattatgtcttattttatgttacagaaaacccataggaagaaaactcagatctatgtggaaaagggttgagcaaaaatttgtagttcattatgtggccgaaaagcatayactgagagaacatgtataaggctgagatagcctgataaactcatcctattaaaatgtatgctgtgatacacaggcaaatttgatgttaacctaagcacatacacagcaattgctcgactgtgtcaattaaatgagtaaaggaagcccaagtacttttaagtggaggaaatgaagtactgtgaatttttaaaacagatgagataattggtgtygggagtgttgcagtgactgaaaagcttcataaggggcagttggtgggaaagggctaatactgtaatggtggaatgtgggacacatatgtgtcaattcagtttccttagaccagtgccagtgtggaggattaattgaaaaccaggaccataaactttcagaactttgtattatgcagagggatctgtgaaactagtcaatttgtttcattaaacaaatattttaaaattatttcctttgtaccttgtcctgttccaggagctgaggtcaaagaagaaaaagtttgtggtctcctggagagtttgtggggttaattttaagtggtatcattacactcaggcaatctagtcaggcggtgcaaatatctacattaggtgaaatggacatggagtaactgtgtccaggggacgcgataatttattgttcaaggagtag

SEQ ID NO: 72 - DNA, 1332 bp, Homo sapiens
atgagcggccgagttggagacctgagccccaaacaggcagagaccctggccaagttccgagaaaacgtccaggatgtgcttcctgccctgcccaaccctgatgattatttccttctacgctggctccgaggtgagggcagagctcggaattttgacttgcagaagtcggaggctttgctccgcaagggcactgggagcccagtgggatcttaccactcatttccctttcagtacatggagttccggaagaccatggatattgaccatatccttgattggcagcccccagaggtgatccagaagtacatgcctgggggcctgtgtggctatgaccgtgatggctgccccgtgtggtatgacatcaytgggccacttgatcccaaggggttgctcttctcagtcaccaagcaggacctgctcaagaccaagatgagggactgtgagcgcatcctgcatgagtgtgacctgcagacagagaggctagggaagaagattgagaccatcgtgatgatatttgactgtgagggcctgggactgaaacacttctggaaacctctggtagaagtgtaccaggagttctttggcctccttgaagagaattacccagagaccctgaagttcatgctcatcgtgaaagctaccaaactgttccctgtgggctacaacctcatgaagccattcctgagtgaggacactcrcaggaaaattattgtrttgggaaataactggaaggaaggtttgctgaaactcatcagtcctgaggaactgcctgcccagtttgggggcaccctgactgacccagatgggaaccccaaatgtttaaccaagattaactatggcggggagatccccaagtccatgtacgtgcgggaccaggtgaagactcagtacgagcactcggtgcagatcaaccgcggctcatcacaccaagtggaatacgagatcctatttccaggctgcgttctcaggtggcagttctcatctgayggtgcggacatcggcttyggagttttcctgaagaccaagatgggggagcgacagcgggcaggggagatgacagakgttctacccagccagcgctataacgcccacatggtgcccgaggatgggaacctcacctgctcagaggccggcgtctgtgtgagacaatgggatgtaatgaccattgttctcgatgccagtaaagccatgcctgggcacatgccaagaggagatgtcctaygcttcgacaacacctatagctttgtccacgccaagaaggtcagcttcacagtggaggtcctgctccctgacgagggcatgcagaaatatgataaggagctcacccctgtc

SEQ ID NO: 73 - DNA, 1203 bp, Homo sapiens
atgagcggccgagttggagacctgagccccaaacaggcagagaccctggccaagttccgagaaaacgtccaggatgtgcttcctgccctgcccaaccctgatgattatttccttctacgctggctccgagctcggaattttgacttgcagaagtcggaggctttgctccgcaagtacatggagttccggaagaccatggatattgaccatatccttgattggcagcccccagaggtgatccagaagtacatgcctgggggcctgtgtggctatgaccgtgatggctgccccgtgtggtatgacatcaytgggccacttgatcccaaggggttgctcttctcagtcaccaagcaggacctgctcaagaccaagatgagggactgtgagcgcatcctgcatgagtgtgacctgcagacagagaggctagggaagaagattgagaccatcgtgatgatatttgactgtgagggcctgggactgaaacacttctggaaacctctggtagaagtgtaccaggagttctttggcctccttgaagagaattacccagagaccctgaagttcatgctcatcgtgaaagctaccaaactgttccctgtgggctacaacctcatgaagccattcctgagtgaggacactcrcaggaaaattattgtrttgggaaataactggaaggaaggtttgctgaaactcatcagtcctgaggaactgcctgcccagtttgggggcaccctgactgacccagatgggaaccccaaatgtttaaccaagattaactatggcggggagatccccaagtccatgtacgtgcgggaccaggtgaagactcagtacgagcactcggtgcagatcaaccgcggctcatcacaccaagtggaatacgagatcctatttccaggctgcgttctcaggtggcagttctcatctgayggtgcggacatcggcttyggagttttcctgaagaccaagatgggggagcgacagcgggcaggggagatgacagakgttctacccagccagcgctataacgcccacatggtgcccgaggatgggaacctcacctgctcagaggccggcgtctatgtcctaygcttcgacaacacctatagctttgtccacgccaagaaggtcagcttcacagtggaggtcctgctccctgacgagggcatgcagaaatatgataaggagctcacccctgtctag

SEQ ID NO: 74 - DNA, 1859 bp, Homo sapiens
gtaattgcgagcgagagtgagtggggccgggacccgcagagccgagccgacccttctctcccgggctgcggcagggcagggcggggagctccgcgcaccaacagagccggttctcagggcgctttgctccttgttttttccccggttctgttttctccccttctccggaaggcttgtcaaggggtaggagaaagagacgcaaacacaaaagtggaaaacagttaatgaccagccacggcgtccctgctgtgagctctggccgctgccttccagggctcccgagccacacgctgggsgtgctggctgagggaacatggcttgttggcctcagctgaggttgctgctgtggaagaacctcactttcagaagaagacaaacatgtcagctgctgctggaagtggcctggcctctatttatcttcctgatcctgatctctgttcggctgagctacccaccctatgaacaacatgaatgccattttccaaataaagccatgccctctgcaggaacacttccttgggttcaggggattatctgtaatgccaacaacccctgtttccgttacccgactcctggggaggctcccggagttgttggaaactttaacaaatccattgtggctcgcctgttctcagatgctcggaggcttcttttatacagccagaaagacaccagcatgaaggacatgcgcaaagttctgagaacattacagcagatcaagaaatccagctcaaacttgaagcttcaagatttcctggtggacaatgaaaccttctctgggttcctrtatcacaacctctctctcccaaagtctactgtggacaagatgctgagggctgatgtcattctccacaaggtatttttgcaaggctaccagttacatttgacaagtctgtgcaatggatcaaaatcagaagagatgattcaacttggtgaccaagaagtttctgagctttgtggcctaccaarggagaaactggctgcagcagagcgagtacttcgttccaacatggacatcctgaagccaatcctggtgagyagacttgctcactggagaaacttcaagcactaatgctttcggaatgtgaggcttttccttggacagcatgactttgttttgtagaaaagtacggctggctgggagtttgtgatataatttagttcagtggtattctaagtgttcttagtgttctttcagacttttgggccatctcccaaagggtgaatgggaagaataagctgggtgtggctgagtttaagccaaaagttttttgtgcttgtttcaatcagagaagacctgctttttcatgtttttactattataatactaagcaagagctcatttgaaaacagagttcttcatatttaaaaaaaaaaagtcttgaaaccattgatgggaagatggatatctatttatgtttaaaaacccatcataaagatgacattgtrggctgtcacagttggaaggccctggaattagatgagaccacactatttagcttayttagtaataacattgcaaagaaaaattccgacraagttttttcagcctaggaatcaatagttcagagaagcactctatgagaatacccattcattcttaaccaaaaaatactggtgagcctgagcagtttggtcatcagagtgttttatatagttccagaacaaatatgtctctaggtgttctgagagctctggtgaaattcctctcsctaccccaaacatcatcatttaatatccaggattctggttttctactcaccagatagattctcttaaaaccagggaaagattcctggaggaaggatgtatctggaaagagatgttccttattayaataaaaygaaattgtaatactc

SEQ ID NO: 75 - DNA, 10026 bp, Homo sapiens
tgtcagctgctgctggaagtggcctggcctctatttatcttcctgatcctgatctctgttcggctgagctacccaccctatgaacaacatgaatgccattttccaaataaagccatgccctctgcaggaacacttccttgggttcaggggattatctgtaatgccaacaacccctgtttccgttacccgactcctggggaggctcccggagttgttggaaactttaacaaatccattgtggctcgcctgttctcagatgctcggaggcttcttttatacagccagaaagacaccagcatgaaggacatgcgcaaagttctgagaacattacagcagatcaagaaatccagctcaaacttgaagcttcaagatttcctggtggacaatgaaaccttctctgggttcctrtatcacaacctctctctcccaaagtctactgtggacaagatgctgagggctgatgtcattctccacaaggtatttttgcaaggctaccagttacatttgacaagtctgtgcaatggatcaaaatcagaagagatgattcaacttggtgaccaagaagtttctgagctttgtggcctaccaarggagaaactggctgcagcagagcgagtacttcgttccaacatggacatcctgaagccaatcctgagaacactaaactctacatctcccttcccgagcaaggagctgrctgaagccacaaaaacattgctgcatagtcttgggactctggcccaggagctgttcagcatgagaagctggagtgacatgcgacaggaggtgatgtttctgaccaatgtgaacagctccagctcctccacccaaatctaccaggctgtgtctcgtattgtctgcgggcatccygagggagggggrctgaagatcaagtctctcaactggtatgaggacaacaactacaaagccctctttggaggcaatggcactgaggaagatgctgaaaccttctatgacaactctacaactccttactgcaatgatttgatgaagaatttggagtctagtcctctttcccgcattatctggaaagctctgaagccgctgctcgttgggaagatcctgtatacacctgacactccagccacaaggcaggtcatggctgaggygaacaagaccttccaggaactggctgtgttccatgatctggaaggcmtgtgggaggaactcagccccaagatctggaccttcatggagaacagccaagaaatggaccttgtccggatgctgttggacagcagggacaatgaccacttttgggaacagcagttggatggcttagattggacagcccaagacatcgtggcgtttttggccaagcacccagaggatgtccagtccagtaatggttctgtgtacacctggagagaagctttcaacgagactaaccaggcaatccggaccatatctcgcttcatggagtgtgtcaacctgaacaagctrgaacccatagcaacagaagtctggctcatcaacaagtccatggagctgctggatgagaggaagttctgggctggtattgtgttcactggaattactccaggcagyattgagctgccccatcatgtcaagtacaagatccgaatggacattgacaatgtggagaggacaaataaaatcaaggatgggtactgggaccctggtcctcgagctgacccctttgaggacatgcggtacgtctsggggggcttcgcctacttgcrggatgtggtggagcaggcaatcatcagggtgctgacgggcaccgagaagaaaactggtgtctatatgcaacagatgccctatccctgttasgttgatgacatctttctgcgggtgatgagccggtcaatgcccctcttcatgacgctggcctggatttactcagtggctgtgatcatcaagggcatygtgtatgagaaggaggcrcggctgaaagagaccatgcggatcatgggcctggacaacagcatmctctggtttagctggttcattagtagcctcattcctcttcttgtgagcgctggcctgctagtggtcatcctgaagttaggaaacctgctgccctacagtgatcccagcgtggtgtttgtcttcctgtccgtgtttgctgtggtgacaatcctgcagtgcttcctgattagcacactcttctccagagccaacctggcagcagcctgtgggggcatcatctacttcacgctgtacctgccctacgtcctgtgtgtggcatggcaggactacrtgggcttcmcactcaagatcttcgctagcctgctgtctcctgtggcttttgggtttggctgtgagtactttgccctttttgaggagcagggcattggagtgcagtgggacaacctgtttgagagtcctgtggaggaagatggcttcaatctcaccacttcgrtctccatgatgctgtttracaccttcctctatggggtgatgacctggtacattgaggctgtctttccaggccagtacggaattcccaggccctggtattttccttgcaccaagtcctactggtttggcraggaaagtgatgagaagagccaccctggttccaaccagaagagaatrtcagaaatctgcatggaggaggaacccacccacttgaagctgggcgtgtccattcagaacctggtaaaagtctacygagatgggatgaaggtggctgtcgatggcctggcactgaatttttatgagggccagatcayctccttcctgggccacaatggagygggraagacgaccaccatgtcaatcctgaccgggttgttccccccgacctcgggcacygcctacatcctgggaaaagacattcgctctgagatgagcaccatccggcagaacctgggggtctgtccccagcataacgtgctgtttgacatgctgactgtcgaagaacacatctggttctatgcccgcttgaaagggctctctragaagcacgtgaaggcggagatggagcagatggccctggatgttggtttgccatcaagcaagctgaaaagcaaaacaagccagctgtcaggtggaatgcagagaaagctatctgtggccttggcctttgtcgggggatctaaggtkgtcattctggatgaacccacagctggtgtggacccttactcccgcaggggaatatgggagctgctgctgaaataccgacaaggccgcaccattattctctctacacaccacatggatgaagcggacgtcctggggkacaggattgccatcatctcccatgggaagctgtgctgtgtgggctcctccctgtttctgaagaaccagytgggaacaggctactacctgaccttggtcaagaaagatgtggaatcctccctcagttcctgcagaaacagtagtagcactgtgtcatacctgaaaaaggaggacagtgtttctcagagcagttctgatgctggcctgggcagcgaccatgasagtgacacgctgaccatcgatgtctctgctatctccaacctcatcaggaagcatgtgtctgaagcccggctggtggaagacatagggcatgagctgacctatgtgctgccatatgargctgctaaggagggagcctttgtggaactctttcatgagattgatgaccgrctctcagacctgggcatttctagttatggcatctcagagacgaccctggaagaaatattcctcaaggtggccgaagagagtggggtggatgctgagacctcagatggtaccttgccagcaagacgaaacaggcgggccttcggggacaagcagagctgtcttcgcccgttcactgaagatgatgctgctgatccaaatgattctgacatagacccagaatccagagagacagacttgctcagtgggatggatggcaaaggrtcctaccaggtgaaaggctggaaacttacacagcaacagtttgtggcccttttgtggaagagactgctaattgccagacggagtcggaaaggattttttgctcagattgtcttgccagctgtgtttgtctgcattgcccttgtgttcagcctgatcgtgccaccctttggcaagtaccccagcctggaacttcagccctggatgtacaacgaacagtacacatttgtcagcaatgatgctcctgaggacacgggaaccctggaactcttaaacgccctcaccaaagaccctggcttcgggacccgctgtatggaaggaaacccaatcccagacacrccctgccaggcaggggaggaagagtggaccactgccccagttccccagaccatcatggacctcttccagaatgggaactggacaatgcagaacccttcacctgcatgccagtgtagcagcgacaaaatcaagaagatgctgcctgtgtgtcccccaggkgcaggggggctgcctcctccacaaagaaaacaaaacactgcagatatccttcaggacctgacaggaagaaacatttyggattatctggtgaagacgtatgtgcagatcatagccaaaagcttaaagaacaagatctgggtgaatgagtttaggtatggcggcttttccctgggtgtcagtaatactcaagcacttcctccgagtcaagaagttaatgatgccaycaaacaaatgaagaaacacctaaagctggccaaggacagttctgcagatcgatttctcaacagcttgggaagatttatgacaggactggacaccaraaataatgtcaaggtgtggttcaataacaagggctggcatgcaatcagctctttcctgaatgtcatcaacratgccattctccgggccaacctgcaaaagggagagaaccctagccattatggaattactgctttcaatcatcccctgaatctcaccaagcagcagctctcagaggtggctcygatgaccacatcagtggatgtccttgtgtccatctgtgtcatctttgcaatgtccttcgtcccagccagctttgtcgtattcctgatccaggagcgggtcagcaaagcaaaacacctgcagttcatcagtggagtgaagcctgtcatctactggctctctaattttgtctgggatatgtgcaattacgttgtccctgccacactggtcattatcatcttcatctgcttccagcagaagtcctatgtgtcctccaccaatctgcctgtgctagcccttctacttttgctgtatgggtggtcaatcacacctctcatgtacccagcctcctttgtgttcaagatccccagcacagcctatgtggtgctcaccagcgtgaacctcttcattggcattaatggcagcgtggccacctttgtgctggagctgttcacygacaataagctgaataatatcmatgatatcctgaagtccgtgttcttgatcttcccacatttttgcctgggacgagggctcatcgacatggtgaaaaaccaggcaatggctgatgccctggaaaggtttggggagaatcgctttgtgtcaccattatcttgggacttggtgggaygaaacctcttcgccatggccgtggaaggggtggtgttcttcctcattactgttctgatccagtacagattcttcatcaggcccagacctgtaaatgcaaagctatctcctctgaatgatgaagatgaagatgtgaggcgggaaagacagagaattcttgatggtggaggccagaatgacatcttagaaatcaaggagttgacgaagatatayagaaggaagcggaagcctgctgttgacaggatttgcgtgggcattcctcctggtgagtgctttgggctcctgggagttaatggggctggaaaatcatcaactttcaagatgttaacaggagataccactgttaccagaggagatgctttccttaacaaaaatagtatcttatcaaacatccatgaagtacatcagaacatgggctactgccctcagtttgatgccatcacagagctgttgactgggagagaacacgtggagtyctttgcccttttgagaggagtcccagagaaagaagttggcaaggttggtgagtgggcgattcggaaactgggcctcgtgaagtatggagaaaaatatgctggtaactatagtggaggcaacaaacgcaagctctctacagccatggctttgatcggygggcctcctgtggtgtttctggatgaacccaccacaggcatggatcccaaagcccggcggttcttgtggaattgtgccctaagtgttgtcaaggaggggagatcagtagtgcttacatctcatagtatggaagaatgtgaagctctttgcactaggatggcaatcatggtcaatggaaggttcaggtgccttggcagtgtccagcatctaaaaaataggtttggagatggttatacaatagttgtacgaatagcagggtccaaccyrgacctgaagcctgtccaggatttctttggacttgcatttcctggaagtgttctaaaagagaaacaccggaacatgctacaataccagcttccatcttcattatcttctctggccaggatattcagcatcctctcccagagcaaaaagcgactccacatagaagactactctgtttctcagacaacacttgaccaagtatttgtgaactttgccaaggaccaaagtgatgatgaccacttaaaagacctctcattacacaaaaaccagacagtagtggamgttgcagttctcacatcttttctacaggatgagaaagtgaaagaaagctatgtatgaagaatcctgttcatacggggtggctgaaagtaaagaggaactagactttcctttgcaccatgtgaagtgttgtggagaaaagagccagaagttgatgtgggaagaagtaaactggatactgtactgatactattcaatgcaatgcaattcaatgcaatgaaaacaaaattccattacaggggcagtgcctttgtagcctatgtcttgtatggctctcaagtgaaagacttgaatttagttttttacctatacctatgtgaaactctattatggaacccaatggacatatgggtttgaactcacacttttttttttttttttgttcctgtgtattctcattggggttgcaacaataattcatcaagtaatcatggccagcgattattgatcaaaatcaaaaggtaatgcacatcctcattcactaagccatgccatgcccaggagactggtttcccggtgacacatccattgctggcaatgagtgtgccagagttattagtgccaagtttttcagaaagtttgaagcaccatggtgtgtcatgctcacttttgtgaaagctgctctgctcagagtctatcaacattgaatatcagttgacagaatggtgccatgcgtggctaacatcctgctttgattccctctgataagctgttctggtggcagtaacatgcaacaaaaatgtgggtgtctccaggcacgggaaacttggttccattgttatattgtcctatgcttcgagccatgggtctacagggtcatccttatgagactcttaaatatacttagatcctggtaagaggcaaagaatcaacagccaaactgctggggctgcaagctgctgaagccagggcatgggattaaagagattgtgcgttcaaacctagggaagcctgtgcccatttgtcctgactgtctgctaacatggtacactgcatctcaagatgtttatctgacacaagtgtattatttctggctttttgaattaatctagaaaatgaaaagatggagttgtattttgacaaaaatgtttgtactttttaatgttatttggaattttaagttctatcagtgacttctgaatccttagaatggcctctttgtagaaccctgtggtatagaggagtatggccactgccccactatttttattttcttatgtaagtttgcatatcagtcatgactagtgcctagaaagcaatgtgatggtcaggatctcatgacattatatttgagtttctttcagatcatttaggatactcttaatctcacttcatcaatcaaatattttttgagtgtatgctgtagctgaaagagtatgtacgtacgtataagactagagagatattaagtctcagtacacttcctgtgccatgttattcagctcactggtttacaaatataggttgtcttgtggttgtaggagcccactgtaacaatactgggcagcctttttttttttttttttaattgcaacaatgcaaaagccaagaaagtataagggtcacaagtctaaacaatgaattcttcaacagggaaaacagctagcttgaaaacttgctgaaaaacacaacttgtgtttatggcatttagtaccttcaaataattggctttgcagatattggataccccattaaatctgacagtctcaaatttttcatctcttcaatcactagtcaagaaaaatataaaaacaacaaatacttccatatggagcatttttcagagttttctaacccagtcttatttttctagtcagtaaacatttgtaaaaatactgtttcactaatacttactgttaactgtcttgagagaaaagaaaaatatgagagaactattgtttggggaagttcaagtgatctttcaatatcattactaacttcttccactttttccaraatttgaatattaacgctaaaggtgtaagacttcagatttcaaattaatctttctatattttttaaatttacagaatattatataacccactgctgaaaaagaaaaaaatgattgttttagaagttaaagtcaatattgattttaaatataagtaatgaaggcatatttccaataactagtgatatggcatcgttgcattttacagtatcttcaaaaatacagaatttatagaataatttctcctcatttaatatttttcaaaatcaaagttatggtttcctcattttactaaaatcgtattctaattcttcattatagtaaatctatgagcaactccttacttcggttcctctgatttcaaggccatattttaaaaaatcaaaaggcactgtgaactattttgaagaaaacacaacattttaatacagattgaaaggacctcttctgaagctagaaacaatctatagttatacatcttcattaatactgtgttaccttttaaaatagtaattttttacattttcctgtgtaaacctaattgtggtagaaatttttaccaactctatactcaatcaagcaaaatttctgtatattccctgtggaatgtacctatgtgagtttcagaaattctcaaaatacgtgttcaaaaatttctgcttttgcatctttgggacacctcagaaaacttattaacaactgtgaatatgagaaatacagaagaaaataataagccctctatacataaatgcccagcacaattcattgttaaaaaacaaccaaacctcacactactgtatttcattatctgtactgaaagcaaatgctttgtgactattaaatgttgcacatcattcattcactgtatagtaatcattgactaaagccatttgtctgtgttttcttcttgtggttgtatatatcaggtaaaatattttccaaagagccatgtgtcatgtaatactgaaccactttgatattgagacattaatttgtacccttgttattatctactagtaataatgtaatactgtagaaatattgctctaattcttttcaaaattgttgcatcccccttagaatgtttctatttccataaggatttaggtatgctattatcccttcttataccctaagatgaagctgtttttgtgctctttgttcatcattggccctcattccaagcactttacgctgtctgtaatgggatctatttttgcactggaatatctgagaattgcaaaactagacaaaagtttcacaacagatttytaagttaaatcattttcattaaaaggaaaaaagaaaaaaaattttgtatgtcaataactttatatgaagtattaaaatgcatatttctatgttgtaatataatgagtcacaaaataaagctgtgacagttctgttggtct

SEQ ID NO: 76 - DNA, 1402 bp, Homo sapiens
gtaattgcgagcgagagtgagtggggccgggacccgcagagccgagccgacccttctctcccgggctgcggcagggcagggcggggagctccgcgcaccaacagagccggttctcagggcgctttgctccttgttttttccccggttctgttttctccccttctccggaaggcttgtcaaggggtaggagaaagagacgcaaacacaaaagtggaaaacagttaatgaccagccacggcgtccctgctgtgagctctggccgctgccttccagggctcccgagccacacgctgggsgtgctggctgagggaacatggcttgttggcctcagctgaggttgctgctgtggaagaacctcactttcagaagaagacaaacatgtcagctgctgctggaagtggcctggcctctatttatcttcctgatcctgatctctgttcggctgagctacccaccctatgaacaacatgaatgccattttccaaataaagccatgccctctgcaggaacacttccttgggttcaggggattatctgtaatgccaacaacccctgtttccgttacccgactcctggggaggctcccggagttgttggaaactttaacaaatccattgtggctcgcctgttctcagatgctcggaggcttcttttatacagccagaaagacaccagcatgaaggacatgcgcaaagttctgagaacattacagcagatcaagaaatccagctcaaacttgaagcttcaagatttcctggtggacaatgaaaccttctctgggttcctrtatcacaacctctctctcccaaagtctactgtggacaagatgctgagggctgatgtcattctccacaaggtatttttgcaaggctaccagttacatttgacaagtctgtgcaatggatcaaaatcagaagagatgattcaacttggtgaccaagaagtttctgagctttgtggcctaccaarggagaaactggctgcagcagagcgagtacttcgttccaacatggacatcctgaagccaatcctgatggatgtgacatgtgatgacattgcacatgggcagttaactgtgccaagaagtgcagcagtagcagcaaccggagatgcaaagcccaacatgatggggagagaaactcttctttcaatatgtgcttctgtaccaaaagtggaatttcacgagagacatattttgaaacatttctccttttgtgtgtgcgtgagtgtttccctgtttccagccaagggtattgtgagtttctcctgggcctccttcagaatctgggtgctctggaaagcagtgttttggcaacatggggaaagtatggcagtgtgggagggtcagctgggtctgggtttgaatattgcatttgaatattttaccagcattgatgtcgga

SEQ ID NO: 77 - DNA, 10405 bp, Homo sapiens
gtaattgcgagcgagagtgagtggggccgggacccgcagagccgagccgacccttctctcccgggctgcggcagggcagggcggggagctccgcgcaccaacagagccggttctcagggcgctttgctccttgttttttccccggttctgttttctccccttctccggaaggcttgtcaaggggtaggagaaagagacgcaaacacaaaagtggaaaacagttaatgaccagccacggcgtccctgctgtgagctctggccgctgccttccagggctcccgagccacacgctgggsgtgctggctgagggaacatggcttgttggcctcagctgaggttgctgctgtggaagaacctcactttcagaagaagacaaacatgtcagctgctgctggaagtggcctggcctctatttatcttcctgatcctgatctctgttcggctgagctacccaccctatgaacaacatgaatgccattttccaaataaagccatgccctctgcaggaacacttccttgggttcaggggattatctgtaatgccaacaacccctgtttccgttacccgactcctggggaggctcccggagttgttggaaactttaacaaatccattgtggctcgcctgttctcagatgctcggaggcttcttttatacagccagaaagacaccagcatgaaggacatgcgcaaagttctgagaacattacagcagatcaagaaatccagctcaaacttgaagcttcaagatttcctggtggacaatgaaaccttctctgggttcctrtatcacaacctctctctcccaaagtctactgtggacaagatgctgagggctgatgtcattctccacaaggtatttttgcaaggctaccagttacatttgacaagtctgtgcaatggatcaaaatcagaagagatgattcaacttggtgaccaagaagtttctgagctttgtggcctaccaarggagaaactggctgcagcagagcgagtacttcgttccaacatggacatcctgaagccaatcctgagaacactaaactctacatctcccttcccgagcaaggagctgrctgaagccacaaaaacattgctgcatagtcttgggactctggcccaggagctgttcagcatgagaagctggagtgacatgcgacaggaggtgatgtttctgaccaatgtgaacagctccagctcctccacccaaatctaccaggctgtgtctcgtattgtctgcgggcatccygagggagggggrctgaagatcaagtctctcaactggtatgaggacaacaactacaaagccctctttggaggcaatggcactgaggaagatgctgaaaccttctatgacaactctacaactccttactgcaatgatttgatgaagaatttggagtctagtcctctttcccgcattatctggaaagctctgaagccgctgctcgttgggaagatcctgtatacacctgacactccagccacaaggcaggtcatggctgaggygaacaagaccttccaggaactggctgtgttccatgatctggaaggcmtgtgggaggaactcagccccaagatctggaccttcatggagaacagccaagaaatggaccttgtccggatgctgttggacagcagggacaatgaccacttttgggaacagcagttggatggcttagattggacagcccaagacatcgtggcgtttttggccaagcacccagaggatgtccagtccagtaatggttctgtgtacacctggagagaagctttcaacgagactaaccaggcaatccggaccatatctcgcttcatggagtgtgtcaacctgaacaagctrgaacccatagcaacagaagtctggctcatcaacaagtccatggagctgctggatgagaggaagttctgggctggtattgtgttcactggaattactccaggcagyattgagctgccccatcatgtcaagtacaagatccgaatggacattgacaatgtggagaggacaaataaaatcaaggatgggtactgggaccctggtcctcgagctgacccctttgaggacatgcggtacgtctsggggggcttcgcctacttgcrggatgtggtggagcaggcaatcatcagggtgctgacgggcaccgagaagaaaactggtgtctatatgcaacagatgccctatccctgttasgttgatgacatctttctgcgggtgatgagccggtcaatgcccctcttcatgacgctggcctggatttactcagtggctgtgatcatcaagggcatygtgtatgagaaggaggcrcggctgaaagagaccatgcggatcatgggcctggacaacagcatmctctggtttagctggttcattagtagcctcattcctcttcttgtgagcgctggcctgctagtggtcatcctgaagttaggaaacctgctgccctacagtgatcccagcgtggtgtttgtcttcctgtccgtgtttgctgtggtgacaatcctgcagtgcttcctgattagcacactcttctccagagccaacctggcagcagcctgtgggggcatcatctacttcacgctgtacctgccctacgtcctgtgtgtggcatggcaggactacrtgggcttcmcactcaagatcttcgctagcctgctgtctcctgtggcttttgggtttggctgtgagtactttgccctttttgaggagcagggcattggagtgcagtgggacaacctgtttgagagtcctgtggaggaagatggcttcaatctcaccacttcgrtctccatgatgctgtttracaccttcctctatggggtgatgacctggtacattgaggctgtctttccaggccagtacggaattcccaggccctggtattttccttgcaccaagtcctactggtttggcraggaaagtgatgagaagagccaccctggttccaaccagaagagaatrtcagaaatctgcatggaggaggaacccacccacttgaagctgggcgtgtccattcagaacctggtaaaagtctacygagatgggatgaaggtggctgtcgatggcctggcactgaatttttatgagggccagatcayctccttcctgggccacaatggagygggraagacgaccaccatgtcaatcctgaccgggttgttccccccgacctcgggcacygcctacatcctgggaaaagacattcgctctgagatgagcaccatccggcagaacctgggggtctgtccccagcataacgtgctgtttgacatgctgactgtcgaagaacacatctggttctatgcccgcttgaaagggctctctragaagcacgtgaaggcggagatggagcagatggccctggatgttggtttgccatcaagcaagctgaaaagcaaaacaagccagctgtcaggtggaatgcagagaaagctatctgtggccttggcctttgtcgggggatctaaggtkgtcattctggatgaacccacagctggtgtggacccttactcccgcaggggaatatgggagctgctgctgaaataccgacaaggccgcaccattattctctctacacaccacatggatgaagcggacgtcctggggkacaggattgccatcatctcccatgggaagctgtgctgtgtgggctcctccctgtttctgaagaaccagytgggaacaggctactacctgaccttggtcaagaaagatgtggaatcctccctcagttcctgcagaaacagtagtagcactgtgtcatacctgaaaaaggaggacagtgtttctcagagcagttctgatgctggcctgggcagcgaccatgasagtgacacgctgaccatcgatgtctctgctatctccaacctcatcaggaagcatgtgtctgaagcccggctggtggaagacatagggcatgagctgacctatgtgctgccatatgargctgctaaggagggagcctttgtggaactctttcatgagattgatgaccgrctctcagacctgggcatttctagttatggcatctcagagacgaccctggaagaaatattcctcaaggtggccgaagagagtggggtggatgctgagacctcagatggtaccttgccagcaagacgaaacaggcgggccttcggggacaagcagagctgtcttcgcccgttcactgaagatgatgctgctgatccaaatgattctgacatagacccagaatccagagagacagacttgctcagtgggatggatggcaaaggrtcctaccaggtgaaaggctggaaacttacacagcaacagtttgtggcccttttgtggaagagactgctaattgccagacggagtcggaaaggattttttgctcagattgtcttgccagctgtgtttgtctgcattgcccttgtgttcagcctgatcgtgccaccctttggcaagtaccccagcctggaacttcagccctggatgtacaacgaacagtacacatttgtcagcaatgatgctcctgaggacacgggaaccctggaactcttaaacgccctcaccaaagaccctggcttcgggacccgctgtatggaaggaaacccaatcccagacacrccctgccaggcaggggaggaagagtggaccactgccccagttccccagaccatcatggacctcttccagaatgggaactggacaatgcagaacccttcacctgcatgccagtgtagcagcgacaaaatcaagaagatgctgcctgtgtgtcccccaggkgcaggggggctgcctcctccacaaagaaaacaaaacactgcagatatccttcaggacctgacaggaagaaacatttyggattatctggtgaagacgtatgtgcagatcatagccaaaagcttaaagaacaagatctgggtgaatgagtttaggtatggcggcttttccctgggtgtcagtaatactcaagcacttcctccgagtcaagaagttaatgatgccaycaaacaaatgaagaaacacctaaagctggccaaggacagttctgcagatcgatttctcaacagcttgggaagatttatgacaggactggacaccaraaataatgtcaaggtgtggttcaataacaagggctggcatgcaatcagctctttcctgaatgtcatcaacratgccattctccgggccaacctgcaaaagggagagaaccctagccattatggaattactgctttcaatcatcccctgaatctcaccaagcagcagctctcagaggtggctcygatgaccacatcagtggatgtccttgtgtccatctgtgtcatctttgcaatgtccttcgtcccagccagctttgtcgtattcctgatccaggagcgggtcagcaaagcaaaacacctgcagttcatcagtggagtgaagcctgtcatctactggctctctaattttgtctgggatatgtgcaattacgttgtccctgccacactggtcattatcatcttcatctgcttccagcagaagtcctatgtgtcctccaccaatctgcctgtgctagcccttctacttttgctgtatgggtggtcaatcacacctctcatgtacccagcctcctttgtgttcaagatccccagcacagcctatgtggtgctcaccagcgtgaacctcttcattggcattaatggcagcgtggccacctttgtgctggagctgttcacygacaataagctgaataatatcmatgatatcctgaagtccgtgttcttgatcttcccacatttttgcctgggacgagggctcatcgacatggtgaaaaaccaggcaatggctgatgccctggaaaggtttggggagaatcgctttgtgtcaccattatcttgggacttggtgggaygaaacctcttcgccatggccgtggaaggggtggtgttcttcctcattactgttctgatccagtacagattcttcatcaggcccagacctgtaaatgcaaagctatctcctctgaatgatgaagatgaagatgtgaggcgggaaagacagagaattcttgatggtggaggccagaatgacatcttagaaatcaaggagttgacgaagatatayagaaggaagcggaagcctgctgttgacaggatttgcgtgggcattcctcctggtgagtgctttgggctcctgggagttaatggggctggaaaatcatcaactttcaagatgttaacaggagataccactgttaccagaggagatgctttccttaacaaaaatagtatcttatcaaacatccatgaagtacatcagaacatgggctactgccctcagtttgatgccatcacagagctgttgactgggagagaacacgtggagtyctttgcccttttgagaggagtcccagagaaagaagttggcaaggttggtgagtgggcgattcggaaactgggcctcgtgaagtatggagaaaaatatgctggtaactatagtggaggcaacaaacgcaagctctctacagccatggctttgatcggygggcctcctgtggtgtttctggatgaacccaccacaggcatggatcccaaagcccggcggttcttgtggaattgtgccctaagtgttgtcaaggaggggagatcagtagtgcttacatctcatagtatggaagaatgtgaagctctttgcactaggatggcaatcatggtcaatggaaggttcaggtgccttggcagtgtccagcatctaaaaaataggtttggagatggttatacaatagttgtacgaatagcagggtccaaccyrgacctgaagcctgtccaggatttctttggacttgcatttcctggaagtgttctaaaagagaaacaccggaacatgctacaataccagcttccatcttcattatcttctctggccaggatattcagcatcctctcccagagcaaaaagcgactccacatagaagactactctgtttctcagacaacacttgaccaagtatttgtgaactttgccaaggaccaaagtgatgatgaccacttaaaagacctctcattacacaaaaaccagacagtagtggamgttgcagttctcacatcttttctacaggatgagaaagtgaaagaaagctatgtatgaagaatcctgttcatacggggtggctgaaagtaaagaggaactagactttcctttgcaccatgtgaagtgttgtggagaaaagagccagaagttgatgtgggaagaagtaaactggatactgtactgatactattcaatgcaatgcaattcaatgcaatgaaaacaaaattccattacaggggcagtgcctttgtagcctatgtcttgtatggctctcaagtgaaagacttgaatttagttttttacctatacctatgtgaaactctattatggaacccaatggacatatgggtttgaactcacacttttttttttttttttgttcctgtgtattctcattggggttgcaacaataattcatcaagtaatcatggccagcgattattgatcaaaatcaaaaggtaatgcacatcctcattcactaagccatgccatgcccaggagactggtttcccggtgacacatccattgctggcaatgagtgtgccagagttattagtgccaagtttttcagaaagtttgaagcaccatggtgtgtcatgctcacttttgtgaaagctgctctgctcagagtctatcaacattgaatatcagttgacagaatggtgccatgcgtggctaacatcctgctttgattccctctgataagctgttctggtggcagtaacatgcaacaaaaatgtgggtgtctccaggcacgggaaacttggttccattgttatattgtcctatgcttcgagccatgggtctacagggtcatccttatgagactcttaaatatacttagatcctggtaagaggcaaagaatcaacagccaaactgctggggctgcaagctgctgaagccagggcatgggattaaagagattgtgcgttcaaacctagggaagcctgtgcccatttgtcctgactgtctgctaacatggtacactgcatctcaagatgtttatctgacacaagtgtattatttctggctttttgaattaatctagaaaatgaaaagatggagttgtattttgacaaaaatgtttgtactttttaatgttatttggaattttaagttctatcagtgacttctgaatccttagaatggcctctttgtagaaccctgtggtatagaggagtatggccactgccccactatttttattttcttatgtaagtttgcatatcagtcatgactagtgcctagaaagcaatgtgatggtcaggatctcatgacattatatttgagtttctttcagatcatttaggatactcttaatctcacttcatcaatcaaatattttttgagtgtatgctgtagctgaaagagtatgtacgtacgtataagactagagagatattaagtctcagtacacttcctgtgccatgttattcagctcactggtttacaaatataggttgtcttgtggttgtaggagcccactgtaacaatactgggcagcctttttttttttttttttaattgcaacaatgcaaaagccaagaaagtataagggtcacaagtctaaacaatgaattcttcaacagggaaaacagctagcttgaaaacttgctgaaaaacacaacttgtgtttatggcatttagtaccttcaaataattggctttgcagatattggataccccattaaatctgacagtctcaaatttttcatctcttcaatcactagtcaagaaaaatataaaaacaacaaatacttccatatggagcatttttcagagttttctaacccagtcttatttttctagtcagtaaacatttgtaaaaatactgtttcactaatacttactgttaactgtcttgagagaaaagaaaaatatgagagaactattgtttggggaagttcaagtgatctttcaatatcattactaacttcttccactttttccaraatttgaatattaacgctaaaggtgtaagacttcagatttcaaattaatctttctatattttttaaatttacagaatattatataacccactgctgaaaaagaaaaaaatgattgttttagaagttaaagtcaatattgattttaaatataagtaatgaaggcatatttccaataactagtgatatggcatcgttgcattttacagtatcttcaaaaatacagaatttatagaataatttctcctcatttaatatttttcaaaatcaaagttatggtttcctcattttactaaaatcgtattctaattcttcattatagtaaatctatgagcaactccttacttcggttcctctgatttcaaggccatattttaaaaaatcaaaaggcactgtgaactattttgaagaaaacacaacattttaatacagattgaaaggacctcttctgaagctagaaacaatctatagttatacatcttcattaatactgtgttaccttttaaaatagtaattttttacattttcctgtgtaaacctaattgtggtagaaatttttaccaactctatactcaatcaagcaaaatttctgtatattccctgtggaatgtacctatgtgagtttcagaaattctcaaaatacgtgttcaaaaatttctgcttttgcatctttgggacacctcagaaaacttattaacaactgtgaatatgagaaatacagaagaaaataataagccctctatacataaatgcccagcacaattcattgttaaaaaacaaccaaacctcacactactgtatttcattatctgtactgaaagcaaatgctttgtgactattaaatgttgcacatcattcattcactgtatagtaatcattgactaaagccatttgtctgtgttttcttcttgtggttgtatatatcaggtaaaatattttccaaagagccatgtgtcatgtaatactgaaccactttgatattgagacattaatttgtacccttgttattatctactagtaataatgtaatactgtagaaatattgctctaattcttttcaaaattgttgcatcccccttagaatgtttctatttccataaggatttaggtatgctattatcccttcttataccctaagatgaagctgtttttgtgctctttgttcatcattggccctcattccaagcactttacgctgtctgtaatgggatctatttttgcactggaatatctgagaattgcaaaactagacaaaagtttcacaacagatttytaagttaaatcattttcattaaaaggaaaaaagaaaaaaaattttgtatgtcaataactttatatgaagtattaaaatgcatatttctatgttgtaatataatgagtcacaaaataaagctgtgacagttctgttggtct

SEQ ID NO: 78 - DNA, 10247 bp, Homo sapiens
gtaattgcgagcgagagtgagtggggccgggacccgcagagccgagccgacccttctctcccgggctgcggcagggcagggcggggagctccgcgcaccaacagagccggttctcagggcgctttgctccttgttttttccccggttctgttttctccccttctccggaaggcttgtcaaggggtaggagaaagagacgcaaacacaaaagtggaaaacagtgtcagctgctgctggaagtggcctggcctctatttatcttcctgatcctgatctctgttcggctgagctacccaccctatgaacaacatgaatgccattttccaaataaagccatgccctctgcaggaacacttccttgggttcaggggattatctgtaatgccaacaacccctgtttccgttacccgactcctggggaggctcccggagttgttggaaactttaacaaatccattgtggctcgcctgttctcagatgctcggaggcttcttttatacagccagaaagacaccagcatgaaggacatgcgcaaagttctgagaacattacagcagatcaagaaatccagctcaaacttgaagcttcaagatttcctggtggacaatgaaaccttctctgggttcctrtatcacaacctctctctcccaaagtctactgtggacaagatgctgagggctgatgtcattctccacaaggtatttttgcaaggctaccagttacatttgacaagtctgtgcaatggatcaaaatcagaagagatgattcaacttggtgaccaagaagtttctgagctttgtggcctaccaarggagaaactggctgcagcagagcgagtacttcgttccaacatggacatcctgaagccaatcctgagaacactaaactctacatctcccttcccgagcaaggagctgrctgaagccacaaaaacattgctgcatagtcttgggactctggcccaggagctgttcagcatgagaagctggagtgacatgcgacaggaggtgatgtttctgaccaatgtgaacagctccagctcctccacccaaatctaccaggctgtgtctcgtattgtctgcgggcatccygagggagggggrctgaagatcaagtctctcaactggtatgaggacaacaactacaaagccctctttggaggcaatggcactgaggaagatgctgaaaccttctatgacaactctacaactccttactgcaatgatttgatgaagaatttggagtctagtcctctttcccgcattatctggaaagctctgaagccgctgctcgttgggaagatcctgtatacacctgacactccagccacaaggcaggtcatggctgaggygaacaagaccttccaggaactggctgtgttccatgatctggaaggcmtgtgggaggaactcagccccaagatctggaccttcatggagaacagccaagaaatggaccttgtccggatgctgttggacagcagggacaatgaccacttttgggaacagcagttggatggcttagattggacagcccaagacatcgtggcgtttttggccaagcacccagaggatgtccagtccagtaatggttctgtgtacacctggagagaagctttcaacgagactaaccaggcaatccggaccatatctcgcttcatggagtgtgtcaacctgaacaagctrgaacccatagcaacagaagtctggctcatcaacaagtccatggagctgctggatgagaggaagttctgggctggtattgtgttcactggaattactccaggcagyattgagctgccccatcatgtcaagtacaagatccgaatggacattgacaatgtggagaggacaaataaaatcaaggatgggtactgggaccctggtcctcgagctgacccctttgaggacatgcggtacgtctsggggggcttcgcctacttgcrggatgtggtggagcaggcaatcatcagggtgctgacgggcaccgagaagaaaactggtgtctatatgcaacagatgccctatccctgttasgttgatgacatctttctgcgggtgatgagccggtcaatgcccctcttcatgacgctggcctggatttactcagtggctgtgatcatcaagggcatygtgtatgagaaggaggcrcggctgaaagagaccatgcggatcatgggcctggacaacagcatmctctggtttagctggttcattagtagcctcattcctcttcttgtgagcgctggcctgctagtggtcatcctgaagttaggaaacctgctgccctacagtgatcccagcgtggtgtttgtcttcctgtccgtgtttgctgtggtgacaatcctgcagtgcttcctgattagcacactcttctccagagccaacctggcagcagcctgtgggggcatcatctacttcacgctgtacctgccctacgtcctgtgtgtggcatggcaggactacrtgggcttcmcactcaagatcttcgctagcctgctgtctcctgtggcttttgggtttggctgtgagtactttgccctttttgaggagcagggcattggagtgcagtgggacaacctgtttgagagtcctgtggaggaagatggcttcaatctcaccacttcgrtctccatgatgctgtttracaccttcctctatggggtgatgacctggtacattgaggctgtctttccaggccagtacggaattcccaggccctggtattttccttgcaccaagtcctactggtttggcraggaaagtgatgagaagagccaccctggttccaaccagaagagaatrtcagaaatctgcatggaggaggaacccacccacttgaagctgggcgtgtccattcagaacctggtaaaagtctacygagatgggatgaaggtggctgtcgatggcctggcactgaatttttatgagggccagatcayctccttcctgggccacaatggagygggraagacgaccaccatgtcaatcctgaccgggttgttccccccgacctcgggcacygcctacatcctgggaaaagacattcgctctgagatgagcaccatccggcagaacctgggggtctgtccccagcataacgtgctgtttgacatgctgactgtcgaagaacacatctggttctatgcccgcttgaaagggctctctragaagcacgtgaaggcggagatggagcagatggccctggatgttggtttgccatcaagcaagctgaaaagcaaaacaagccagctgtcaggtggaatgcagagaaagctatctgtggccttggcctttgtcgggggatctaaggtkgtcattctggatgaacccacagctggtgtggacccttactcccgcaggggaatatgggagctgctgctgaaataccgacaaggccgcaccattattctctctacacaccacatggatgaagcggacgtcctggggkacaggattgccatcatctcccatgggaagctgtgctgtgtgggctcctccctgtttctgaagaaccagytgggaacaggctactacctgaccttggtcaagaaagatgtggaatcctccctcagttcctgcagaaacagtagtagcactgtgtcatacctgaaaaaggaggacagtgtttctcagagcagttctgatgctggcctgggcagcgaccatgasagtgacacgctgaccatcgatgtctctgctatctccaacctcatcaggaagcatgtgtctgaagcccggctggtggaagacatagggcatgagctgacctatgtgctgccatatgargctgctaaggagggagcctttgtggaactctttcatgagattgatgaccgrctctcagacctgggcatttctagttatggcatctcagagacgaccctggaagaaatattcctcaaggtggccgaagagagtggggtggatgctgagacctcagatggtaccttgccagcaagacgaaacaggcgggccttcggggacaagcagagctgtcttcgcccgttcactgaagatgatgctgctgatccaaatgattctgacatagacccagaatccagagagacagacttgctcagtgggatggatggcaaaggrtcctaccaggtgaaaggctggaaacttacacagcaacagtttgtggcccttttgtggaagagactgctaattgccagacggagtcggaaaggattttttgctcagattgtcttgccagctgtgtttgtctgcattgcccttgtgttcagcctgatcgtgccaccctttggcaagtaccccagcctggaacttcagccctggatgtacaacgaacagtacacatttgtcagcaatgatgctcctgaggacacgggaaccctggaactcttaaacgccctcaccaaagaccctggcttcgggacccgctgtatggaaggaaacccaatcccagacacrccctgccaggcaggggaggaagagtggaccactgccccagttccccagaccatcatggacctcttccagaatgggaactggacaatgcagaacccttcacctgcatgccagtgtagcagcgacaaaatcaagaagatgctgcctgtgtgtcccccaggkgcaggggggctgcctcctccacaaagaaaacaaaacactgcagatatccttcaggacctgacaggaagaaacatttyggattatctggtgaagacgtatgtgcagatcatagccaaaagcttaaagaacaagatctgggtgaatgagtttaggtatggcggcttttccctgggtgtcagtaatactcaagcacttcctccgagtcaagaagttaatgatgccaycaaacaaatgaagaaacacctaaagctggccaaggacagttctgcagatcgatttctcaacagcttgggaagatttatgacaggactggacaccaraaataatgtcaaggtgtggttcaataacaagggctggcatgcaatcagctctttcctgaatgtcatcaacratgccattctccgggccaacctgcaaaagggagagaaccctagccattatggaattactgctttcaatcatcccctgaatctcaccaagcagcagctctcagaggtggctcygatgaccacatcagtggatgtccttgtgtccatctgtgtcatctttgcaatgtccttcgtcccagccagctttgtcgtattcctgatccaggagcgggtcagcaaagcaaaacacctgcagttcatcagtggagtgaagcctgtcatctactggctctctaattttgtctgggatatgtgcaattacgttgtccctgccacactggtcattatcatcttcatctgcttccagcagaagtcctatgtgtcctccaccaatctgcctgtgctagcccttctacttttgctgtatgggtggtcaatcacacctctcatgtacccagcctcctttgtgttcaagatccccagcacagcctatgtggtgctcaccagcgtgaacctcttcattggcattaatggcagcgtggccacctttgtgctggagctgttcacygacaataagctgaataatatcmatgatatcctgaagtccgtgttcttgatcttcccacatttttgcctgggacgagggctcatcgacatggtgaaaaaccaggcaatggctgatgccctggaaaggtttggggagaatcgctttgtgtcaccattatcttgggacttggtgggaygaaacctcttcgccatggccgtggaaggggtggtgttcttcctcattactgttctgatccagtacagattcttcatcaggcccagacctgtaaatgcaaagctatctcctctgaatgatgaagatgaagatgtgaggcgggaaagacagagaattcttgatggtggaggccagaatgacatcttagaaatcaaggagttgacgaagatatayagaaggaagcggaagcctgctgttgacaggatttgcgtgggcattcctcctggtgagtgctttgggctcctgggagttaatggggctggaaaatcatcaactttcaagatgttaacaggagataccactgttaccagaggagatgctttccttaacaaaaatagtatcttatcaaacatccatgaagtacatcagaacatgggctactgccctcagtttgatgccatcacagagctgttgactgggagagaacacgtggagtyctttgcccttttgagaggagtcccagagaaagaagttggcaaggttggtgagtgggcgattcggaaactgggcctcgtgaagtatggagaaaaatatgctggtaactatagtggaggcaacaaacgcaagctctctacagccatggctttgatcggygggcctcctgtggtgtttctggatgaacccaccacaggcatggatcccaaagcccggcggttcttgtggaattgtgccctaagtgttgtcaaggaggggagatcagtagtgcttacatctcatagtatggaagaatgtgaagctctttgcactaggatggcaatcatggtcaatggaaggttcaggtgccttggcagtgtccagcatctaaaaaataggtttggagatggttatacaatagttgtacgaatagcagggtccaaccyrgacctgaagcctgtccaggatttctttggacttgcatttcctggaagtgttctaaaagagaaacaccggaacatgctacaataccagcttccatcttcattatcttctctggccaggatattcagcatcctctcccagagcaaaaagcgactccacatagaagactactctgtttctcagacaacacttgaccaagtatttgtgaactttgccaaggaccaaagtgatgatgaccacttaaaagacctctcattacacaaaaaccagacagtagtggamgttgcagttctcacatcttttctacaggatgagaaagtgaaagaaagctatgtatgaagaatcctgttcatacggggtggctgaaagtaaagaggaactagactttcctttgcaccatgtgaagtgttgtggagaaaagagccagaagttgatgtgggaagaagtaaactggatactgtactgatactattcaatgcaatgcaattcaatgcaatgaaaacaaaattccattacaggggcagtgcctttgtagcctatgtcttgtatggctctcaagtgaaagacttgaatttagttttttacctatacctatgtgaaactctattatggaacccaatggacatatgggtttgaactcacacttttttttttttttttgttcctgtgtattctcattggggttgcaacaataattcatcaagtaatcatggccagcgattattgatcaaaatcaaaaggtaatgcacatcctcattcactaagccatgccatgcccaggagactggtttcccggtgacacatccattgctggcaatgagtgtgccagagttattagtgccaagtttttcagaaagtttgaagcaccatggtgtgtcatgctcacttttgtgaaagctgctctgctcagagtctatcaacattgaatatcagttgacagaatggtgccatgcgtggctaacatcctgctttgattccctctgataagctgttctggtggcagtaacatgcaacaaaaatgtgggtgtctccaggcacgggaaacttggttccattgttatattgtcctatgcttcgagccatgggtctacagggtcatccttatgagactcttaaatatacttagatcctggtaagaggcaaagaatcaacagccaaactgctggggctgcaagctgctgaagccagggcatgggattaaagagattgtgcgttcaaacctagggaagcctgtgcccatttgtcctgactgtctgctaacatggtacactgcatctcaagatgtttatctgacacaagtgtattatttctggctttttgaattaatctagaaaatgaaaagatggagttgtattttgacaaaaatgtttgtactttttaatgttatttggaattttaagttctatcagtgacttctgaatccttagaatggcctctttgtagaaccctgtggtatagaggagtatggccactgccccactatttttattttcttatgtaagtttgcatatcagtcatgactagtgcctagaaagcaatgtgatggtcaggatctcatgacattatatttgagtttctttcagatcatttaggatactcttaatctcacttcatcaatcaaatattttttgagtgtatgctgtagctgaaagagtatgtacgtacgtataagactagagagatattaagtctcagtacacttcctgtgccatgttattcagctcactggtttacaaatataggttgtcttgtggttgtaggagcccactgtaacaatactgggcagcctttttttttttttttttaattgcaacaatgcaaaagccaagaaagtataagggtcacaagtctaaacaatgaattcttcaacagggaaaacagctagcttgaaaacttgctgaaaaacacaacttgtgtttatggcatttagtaccttcaaataattggctttgcagatattggataccccattaaatctgacagtctcaaatttttcatctcttcaatcactagtcaagaaaaatataaaaacaacaaatacttccatatggagcatttttcagagttttctaacccagtcttatttttctagtcagtaaacatttgtaaaaatactgtttcactaatacttactgttaactgtcttgagagaaaagaaaaatatgagagaactattgtttggggaagttcaagtgatctttcaatatcattactaacttcttccactttttccaraatttgaatattaacgctaaaggtgtaagacttcagatttcaaattaatctttctatattttttaaatttacagaatattatataacccactgctgaaaaagaaaaaaatgattgttttagaagttaaagtcaatattgattttaaatataagtaatgaaggcatatttccaataactagtgatatggcatcgttgcattttacagtatcttcaaaaatacagaatttatagaataatttctcctcatttaatatttttcaaaatcaaagttatggtttcctcattttactaaaatcgtattctaattcttcattatagtaaatctatgagcaactccttacttcggttcctctgatttcaaggccatattttaaaaaatcaaaaggcactgtgaactattttgaagaaaacacaacattttaatacagattgaaaggacctcttctgaagctagaaacaatctatagttatacatcttcattaatactgtgttaccttttaaaatagtaattttttacattttcctgtgtaaacctaattgtggtagaaatttttaccaactctatactcaatcaagcaaaatttctgtatattccctgtggaatgtacctatgtgagtttcagaaattctcaaaatacgtgttcaaaaatttctgcttttgcatctttgggacacctcagaaaacttattaacaactgtgaatatgagaaatacagaagaaaataataagccctctatacataaatgcccagcacaattcattgttaaaaaacaaccaaacctcacactactgtatttcattatctgtactgaaagcaaatgctttgtgactattaaatgttgcacatcattcattcactgtatagtaatcattgactaaagccatttgtctgtgttttcttcttgtggttgtatatatcaggtaaaatattttccaaagagccatgtgtcatgtaatactgaaccactttgatattgagacattaatttgtacccttgttattatctactagtaataatgtaatactgtagaaatattgctctaattcttttcaaaattgttgcatcccccttagaatgtttctatttccataaggatttaggtatgctattatcccttcttataccctaagatgaagctgtttttgtgctctttgttcatcattggccctcattccaagcactttacgctgtctgtaatgggatctatttttgcactggaatatctgagaattgcaaaactagacaaaagtttcacaacagatttytaagttaaatcattttcattaaaaggaaaaaagaaaaaaaattttgtatgtcaataactttatatgaagtattaaaatgcatatttctatgttgtaatataatgagtcacaaaataaagctgtgacagttctgttggtct

SEQ ID NO: 79 - DNA, 1402 bp, Homo sapiens
ggtggtgtaatccgataactttattttaattgaaaatggaggcataacatgtcctagaaaaataaagatttaggatacaaaggagacacagcggcagggctgcccccagggatgagggaatctttggtctgggccggataatgaggacaagggcttgagtcgaggggagctggtgaaggaagacccccgtctccccacagctgccccaccccccgcccctggcaggaaatgccacactggggagggtctccagtctcaggggcgcggggctgcctgtcctccaccttcggattccaggcagttgtgacaacaccagctatcggcagagctattaatagtgtttcagggagtgacagggagagggctctgggggctggaagtccggccctggggcagggtgttccgcttacagctagtaccaagtggagggggcagggcccctgagtcaggaccctgagtcccccacgtatatggcagggcacagcatggggagggctgtaacagagaggcctcccatccaaagggggatggagacctggacaggaggtggccggggatacaacccccagcaccaccagggcttggagaggccacccaggcagaaggatgtggtgactggggtcttcagcaaccgcatttctggggctcccccctcccattcctgtccctgyrtcttcagcaccaatgtcgggagaggccacggggccacactgggtcacagttccaagggctcctccacaggcaccgactggagctgggtcagaaccttggcctcagcttccaacccctcgtcaacctcaccccctgcggtggcccccaggagcagcccctcagggtcggggtctggcagcctcagcayggtgtggggggcctgtgtccccagccccttttccgcttccagcagcccctctgttcctgcgcttagttccagccctgctgaccagacaggcacggccgcgggtgacaacatcagcccctctggtgggggcgccgggaagttgggcaggaggccaggggagtcaggggagaaggrcaggctggtgctggaggtggtggcagcggcggggggtggctgctgtgcagaaagggtgcctagggcgtgagcctctgggagagcagggctgggggccaccgggaggcctccctcaggcacggagatggccgtctctggcttcagtggcaaggtagccatgttttgcaactttgggaagttcctccctccctctcttcctccctcgggctttccccagcctcctcccccacctgtccccccttttcgcccccactccccgctcttctcgatcttctttctggccgaccctgcgccccacgccgggaaggcgagatccagctctccactcgggtctctgtccccttgtgtgtgtccgtccccctcccgtct

SEQ ID NO: 80 - DNA, 949 bp, Homo sapiens
atgtgtgaccagcagaagcagccacagttccctccatcttgtgtgaaaggttcgggactaggggctgggcagggtagcaatggtgcctctgtgaaatgcccagttccatgccagacccaaactgtctgtgtgacaggccctgctccatgccctactcaaacttatgtgaagtaccaagttccatgccagactcaaacctacgtgaagtgcccagctccctgccagaggacctatgtgaaatacccaacaccctgccaaacctatgtgaagtgcccagctccctgccagacaacctatgtaaaatgcccaactccctgccaaacctacgtgaagtgcccagctccctgccagatgacctacatcaaaagtccagctmcctgccagacccagacgtgctatgtccagggtgcttctccttgccagagctattatgttcaagctcctgcaagtggctcaacctcccagtactgtgtcactgacccatgctctgcrccctgttccaccagctactgctgtctggctccccggaccttcggggtgagtcccctgagacgctggattcagcggccccagaactgcaacacaggatcatctggctgctgtgagaattcgggaagctctggatgctgtggttctgggggctgtggctgcagctgtggatgtggcagctctgggtgctgctgtttgggaattatccccatgaggtcccgaggtcctgcatgctgtgaccatgaggatgactgctgctgctaaacatacgacagctcaactccagaatgcactgccccgctaccccttctggaacatgcaccagcttctggccccctctctgttagtgccagtgatgtagaacctcatcactttgcctctgtgctttgcttctctaccaaggcagcctgccagagttagtacagtccccaaactttggcatgaataaagctctgaatgc

SEQ ID NO: 81 - DNA, 2246 bp, Homo sapiens
gcagtgcgcaggcgtgagcggtcgggccccgacgcgcgcgggtctcgtttggagcgggagtgagttcctgagcgagtggacccggcagcgggcgataggggggccaggtgcctccacagtyagccatggcagcgctgcgctacgcggggctggacgacacggacagtgaggacgagctgcctccgggctgggaggagagaaccaccaaggacggctgggtttactacgccaatcacaccgaggagaagactcagtgggaacatccaaaaactggaaaaagaaaacgagtggcaggagatttgccatacggatgggaacaagaaactgatgagaacggacaagtgttttttgttgaccatataaataaaagaaccacctacttggacccaagactggcgtttactgtggatgataatcygaccaagccaaccacccggcaaagatacgacggcagcaccactgccatggaaattctscagggccgggatttcactggcaaagtggttgtggtcactggagctaattcaggaatagggttcgaaaccgccaagtcttttgccctccatggtgcacatgtgaycttggcctgcaggaacatggcaagggcgagtgaagcagtgtcacgcattttagaagaatggcataaagccaaggtagaarcaatgaccctggacctcgctctgctccgtagcgtgcagcattttgctgaagcattcaaggccaagaatgtgcctcttcatgtgcttgtgtgcaacgcagcaacttttgctstaccctggagtctcaccaaagatggcctggagaccacctttcaagtgaatcatctggggcacttctaccttgtccagctcctccaggatgttttgtgccgctcagctcctgcccgtgtcattgtggtctcctcagagtcccatcggtggagatttacagatattaacgactccttgggaaaastggacttcagtygcctctctscaacaaaaaacgactattgggcgatgctggcttataacaggtccaagctctgcaacatcctcttctccaacgagctgcaccgtcgcctctccccacrcggggtcacgtcgaacgcagtgcatcctggaaatatgatgtactccaacattcatcgcagctggtgggtgtacacactgctgtttaccttggcgaggcctttcaccaagtccatgcaacagggagctgccaccaccgtgtactgtgctgctgtcccagaactggagggtctgggagggatgtacttcaacaactgctgccgctgcatgccctcaccagaagctcagagcgaagagacggcccggaccctgtgggcgctcagcgagaggctgatccaagaacggcttggcagccagtcyggctaagtggagctcagagcggatgggcacacacacccgccctgtgtgtgtcccctcacgcaagtgccagggctgggycccttccaaatgtccctccaacacagatccgcaagagtaaaggaaataagagcaktcacaacagagtgaaaaatcttaagtaccaatgggaagcagggaattcctggggtaaagtatcacttttctggggctgggctaggcataggtctctttgctttctggtgstggcctgtttgaaagtaaaaacctgsttggygtgtaggttccgtatctccctggagaagcaccagcaattctctttcttttactgttatagaatagcctgaggtcccctcgtcccatccagctaccaccacgrccaccactgcagccrggggctggccttctcctacttagggaagaaaaagcaagtgttcactgctccttgctgcattgatccaggagataattgtttcattcatcctgaccaagactgagccagcttrgcaactgctggggagacaaatctcagaaccttgtcccagccagtgaggatgacagtgacacccagagggagtagaatacgcagaactaccaggtggcaaagtacttgtcatagactcctttgctaatgctatrcaaaaaattctttagagattataacaaatttttcaaatcattccttagataccttgaaaggcaggaagggaagcgtatatacttaagaatacacaggatattttggggggcagagaataaaacgttagttaatccctttgtctgtcaatcacagtctcagttctcttgctttcacattgtacttaaacctcctgctgtgcctcgcatcctaygcttaataaaagaacatgcttgaatatc

SEQ ID NO: 82 - DNA, 3107 bp, Homo sapiens
aaagcagtggtgttttaccactctgcagagaaagctaaggttgctaaccaaacaaaataactttacactgacaatgccaatttttacatttctttcagaacaagggacactcaaactaccagagaaacggaccaatggactgcgaagaactcctaaacaggtggatccaggtttaccaaagatgcaggtcattaggaactattctggaacaccacccccagctctgcatgaaggacccyctttacasctccaggccggggataccgttgaacttctgaaaggagatgcacacagtctgttttggcagggcagaaatttagcatctggagaggttggattttttccaagtgatgcagtcaagccttgcccatgtgtgcccaaaccagtagattattcttgccaaccctggtatgctggagcaatggaaagattgcaagcagagaccgaacttattaatagggtaaatagtacttaccttgtgaggcacaggaccaaagagtcaggagaatatgcaattagcattaagtacaataatgaagcaaagcacatcaagattttaacaagagatggcttttttcacattgcagaaaatagaaaatttaaaagtttaatggarcttgtggagtactacaagcatcattctctcaaggaagggttcagaaccttagatacaactctgcagtttccatacaaggagccagaacattcagctggacagaggggtaatagagcaggcaacagcttgttaagtccaaaagtgctgggcattgccatcgctcggtatgacttctgtgcaagagatatgagagagttgtccttgttgaaaggagatgtggtgaagatttacacaaagatgagtgcaaatggctggtggagaggagaagtaaatggcagggtgggctggtttccatccacatatgtggaagaggatgaataaattcaaatcccgtgttgcaccctgcaccaaaaatttcagagaagggataaatagaagcctgcacagcatcgtgaattaactraagtgtttaaaaagctgcatttctggctgttcaacatcctccctccttagcccctcctaagtcttaatgctgagatttctaaagatgctggtactgacagattaatggcttgcctagagctgtgcaagaaacagcctgccagtctgtcattgtcagggaccagggcaaaaccaagagctgttcttcccagaagagccctgcaaacacattggttcgtgcttccctttacttcttctggtcagataccatgaatgccagtcatcagtaaatcttaatacacttttgctttattctcacatgccattcaccagattatttgatggtacaaagaagcagaagtgtaattttccttttcccagcatgacgaaaaattggagttctgccatttgagcagcttactggaaagatccagccttacttgtcttaaattgtccaacaaggtgactcattgccyggcaaacacttttaccctcagatgttactcatgatattataaaatatgaggccagtgctcaggtttgcatcataagtgagctatccctgaagggttttaattacttatttggtgtcctgattatatttgcaaacttctttataaaaggtgaaaaaagcacacaaaagagagggtgtcttcatattaaaccttcacaaccttcatgatttcataggattattttggaaatatagcacttgactttatgaaaggatctgggctaggtatattargggtagttgccaataacctgaagaagctggcatwgtttacagaaacagatcaagggctataatttatgtcattttatagcagcagtatctattaatacatgccttttcctcccatccacctcccccgcacacacacaaagatgacctgggacatgatttttttattcccacattttcttggagcacaaacaactttgttgaggattttggaaggaaagcacaactgggtcctttattcatttctgggacagaaagagggtcagtggacttttgtgggcctccagcttctctcagagtctccccctctgcagcccatcctgggagtgtattaactggagggaagatgggtcttgcagtacatttgttttgcccagccatcactcttttttgtgaggagcctaaatacattcttcctggggtccagagtccccattcaaggcagtcaagttaagacactaacttggccctttcctgatggaaatatttcctccatagcagaagttgtgttctgacaagactgmgwgagttacatgttgggaaaaaaaagaagcattaacttagtagaactgaaccaggagcattaagttctgaaattttgaatcatctctgaaatgaagcaggtgtagcctgccctctcatcaatccgtctgggtgccagaactcaaggttcagtggacacatccccctgttagagaccctcatgggctaggacttttcatctaggatagattcaagacctttacctcagaattatgtaaactgtgattgtgttttagaaaaattattatttgctaaaaccatttaagtctttgtatatgtgtaaatgatcacaaaaatgtattttataaaatgttctgtacaataaagttacacctcaaagtgtactcttggaatggattctttcctgtaaagtcttatctgcgactctgtctcgggaatgttttgtctgttgccgtcagccgaactttgttatggagggagcagcctcacacaagcagaaacactcctgtggatggtattgtagcatgtattgtttattttagtcaatagaccctctccttataaatggtgtttagtcttcctgttgcatttcatgggcctgggggtttcctagcagaggatattggagcccctttttgtgacattaccaattacatctttgtccacgtttaatactttgttttggaaaatttaaatgctgcagatttgtgtagagttctaataccaaagacagaagtaaatgttttccatatactttgtcttgcctgtatgcagccctygtgtaatayggtgaattagagtggtatttcactttgtattattttgtaaatatgtcaatrtaataaatagtgactaaattga

SEQ ID NO: 83 - DNA, 4768 bp, Homo sapiens
cggccgcatccttgccgcccgccccggcccagccgcgtcccggagccgtcgggcatggagccgtggaagcagtgcgcgcagtggctcatccattgcaaggtgctgcccaccaaccaccgggtgacctgggactcggctcaggtgttcgaccttgcgcagaccctccgcgatggagtcctgctctgccagctgcttaacaacctccgggcgcactccatcaacctgaaggagatcaacctgaggccgcagatgtcccagtttctctgtttgaagaacataaggacatttctcacggcctgttgtgagacgtttggaatgaggaaaagtgaacttttcgaggcatttgacytgtttgatgttcgtgactttggaaaggttatagaaacattatcacgactttctcgaacacctatagcattggccacaggaatcaggcccttcccaacagaagaaagcattaatgatgaaracatctacaaaggccttcctgatttaatagatgaaacccttgtggaagatgaagaagatctctatgactgtgtttatggggaagatgaaggtggagaagtctatgaggacttaatgaaggcagaggaagcacatcagcccaaatgtccagaaaatgatatacgaagttgttgtctagcagaaattaagcagacagaagaaaaatatacagaaactttggagtcaatagaaaartatttcatggcaccactaaaaagatttctgacagcagcagaatttgattcagtattcatcaacattcctgaacttgtaaaacttcatcggaacctaatgcaagagattcatgattccattgtaaataaaaatgaccagaacttgtaccaagtttttattaactacaaggaaagattggttatttacgggcagtactgcagtggagtggagtcagccatctctagtttagactacatttctaagwcaaaagaagatgtcaaactgaaattagaggaatgttccaaaagagcaaataatgggaaatttactcttcgagacttgcttgtggttcctatgcaacgtgttttaaagtaccaccttctcctccaggaactggtcaaacataccactgatccgactgagaaggcaaatctgaaactggctcttgatgccatgaaggacttggcacaatatgtgaatgaagtgaaaagagataatgagacccttcrtgaaattaaacagtttcagctatctatagagaatttgaaccaaccagttttgctttttggacgacctcagggagatggtgaaattcgaataaccactctagacaagcataccaaacaagaaaggcatatcttcttatttgatttggcagtgatcgtatgtaagagaaaaggtgataactatgaaatgaaggaaataatagatcttcagcagtacaagatagccaataatcctacaaccgataaagaaaacaaaaagtggtcttatggcttctacctcatccatacccaaggacaaaatgggttagaattttattgcaaaacaaaagatttaaagaagaaatggctagaacagtttgaaatggctttgtctaacataagrccagactatgcagactccaatttccacgacttcaagatgcataccttcactcgagtcacatcctgcaaagtctgccagatgctcctgaggggaacattttatcaaggctatttatgttttaagtgtggagcgagagcacacaaagaatgtttgggaagagtagacaattgtggcagagttaattctggtgaacaagggacactcaaactaccagagaaacggaccaatggactgcgaagaactcctaaacaggtggatccaggtttaccaaagatgcaggtcattaggaactattctggaacaccacccccagctctgcatgaaggacccyctttacasctccaggccggggataccgttgaacttctgaaaggagatgcacacagtctgttttggcagggcagaaatttagcatctggagaggttggattttttccaagtgatgcagtcaagccttgcccatgtgtgcccaaaccagtagattattcttgccaaccctggtatgctggagcaatggaaagattgcaagcagagaccgaacttattaatagggtaaatagtacttaccttgtgaggcacaggaccaaagagtcaggagaatatgcaattagcattaagtacaataatgaagcaaagcacatcaagattttaacaagagatggcttttttcacattgcagaaaatagaaaatttaaaagtttaatggarcttgtggagtactacaagcatcattctctcaaggaagggttcagaaccttagatacaactctgcagtttccatacaaggagccagaacattcagctggacagaggggtaatagagcaggcaacagcttgttaagtccaaaagtgctgggcattgccatcgctcggtatgacttctgtgcaagagatatgagagagttgtccttgttgaaaggagatgtggtgaagatttacacaaagatgagtgcaaatggctggtggagaggagaagtaaatggcagggtgggctggtttccatccacatatgtggaagaggatgaataaattcaaatcccgtgttgcaccctgcaccaaaaatttcagagaagggataaatagaagcctgcacagcatcgtgaattaactraagtgtttaaaaagctgcatttctggctgttcaacatcctccctccttagcccctcctaagtcttaatgctgagatttctaaagatgctggtactgacagattaatggcttgcctagagctgtgcaagaaacagcctgccagtctgtcattgtcagggaccagggcaaaaccaagagctgttcttcccagaagagccctgcaaacacattggttcgtgcttccctttacttcttctggtcagataccatgaatgccagtcatcagtaaatcttaatacacttttgctttattctcacatgccattcaccagattatttgatggtacaaagaagcagaagtgtaattttccttttcccagcatgacgaaaaattggagttctgccatttgagcagcttactggaaagatccagccttacttgtcttaaattgtccaacaaggtgactcattgccyggcaaacacttttaccctcagatgttactcatgatattataaaatatgaggccagtgctcaggtttgcatcataagtgagctatccctgaagggttttaattacttatttggtgtcctgattatatttgcaaacttctttataaaaggtgaaaaaagcacacaaaagagagggtgtcttcatattaaaccttcacaaccttcatgatttcataggattattttggaaatatagcacttgactttatgaaaggatctgggctaggtatattargggtagttgccaataacctgaagaagctggcatwgtttacagaaacagatcaagggctataatttatgtcattttatagcagcagtatctattaatacatgccttttcctcccatccacctcccccgcacacacacaaagatgacctgggacatgatttttttattcccacattttcttggagcacaaacaactttgttgaggattttggaaggaaagcacaactgggtcctttattcatttctgggacagaaagagggtcagtggacttttgtgggcctccagcttctctcagagtctccccctctgcagcccatcctgggagtgtattaactggagggaagatgggtcttgcagtacatttgttttgcccagccatcactcttttttgtgaggagcctaaatacattcttcctggggtccagagtccccattcaaggcagtcaagttaagacactaacttggccctttcctgatggaaatatttcctccatagcagaagttgtgttctgacaagactgmgwgagttacatgttgggaaaaaaaagaagcattaacttagtagaactgaaccaggagcattaagttctgaaattttgaatcatctctgaaatgaagcaggtgtagcctgccctctcatcaatccgtctgggtgccagaactcaaggttcagtggacacatccccctgttagagaccctcatgggctaggacttttcatctaggatagattcaagacctttacctcagaattatgtaaactgtgattgtgttttagaaaaattattatttgctaaaaccatttaagtctttgtatatgtgtaaatgatcacaaaaatgtattttataaaatgttctgtacaataaagttacacctcaaagtgtactcttggaatggattctttcctgtaaagtcttatctgcgactctgtctcgggaatgttttgtctgttgccgtcagccgaactttgttatggagggagcagcctcacacaagcagaaacactcctgtggatggtattgtagcatgtattgtttattttagtcaatagaccctctccttataaatggtgtttagtcttcctgttgcatttcatgggcctgggggtttcctagcagaggatattggagcccctttttgtgacattaccaattacatctttgtccacgtttaatactttgttttggaaaatttaaatgctgcagatttgtgtagagttctaataccaaagacagaagtaaatgttttccatatactttgtcttgcctgtatgcagccctygtgtaatayggtgaattagagtggtatttcactttgtattattttgtaaatatgtcaatrtaataaatagtgactaaattga

SEQ ID NO: 84 - DNA, 8517 bp, Homo sapiens
gtgaatcttatccttcttrtccacagggaatttgccaaagagagagagagagtggagaaccgaagggctttcatgaagctgcggcgccagcagcagattgagcgtgagctgaatggctaccgtgcctggatagacaaagcagaggaagtcatgctcgctgaagaaaataaaaatgctggaacatcmgccttagaagtgcttcgaagggcaaccatcaagaggagccggacagaggccatgactcgagactccagtgatgagcactgtgttgatatctcctctgtgggcacacctctggcccgagccagtatcaaaagtkcaaaggtagacggggtctcttatttccggcacaaggaaaggcttctgcgcatctccattcgccacatggttaaatcccaggtgttttactggattgtgctgagccttgtggcactcaacactgcctgtgtggccattgtccatcacaaccagccccagtggctcacccacctcctctactatgcagaatttctgtttctgggactcttcctcttggagatgtccctgaagatgtatggcatggggcctcgcctttattttcactcttcattcaactgctttgattttggggtcacagtgggcagtatctttgaagtggtctgggcaatcttcagacctggtacgtcttttggaatcagtgtcttgcgagccctccggcttctaagaatatttaaaataaccaagtattgggcttccctacggaatttggtggtctccttgatgagctcaatgaagtctatcatcagtttgcttttcctcctcttcctcttcatcgttgtctttgctctcctaggaatgcagttatttggaggcaggtttaactttaatgatgggactccttcggcaaattttgataccttccctgcagccatcatgactgtgttccagatcctgacgggtgaggactggaatgaggtgatgtacaatgggatccgctcccagggtggggtcagctcaggcatgtggtctgccatctacttcattgtgctcaccttgtttggcaactacacgctactgaatgtgttcttggctatcgctgtggataatctcgccaacgcccaggaactgaccaaggatgaacaggaggaagaagaggccttcaaccagaaacatgcactgcagaaggccaaggaggtcagcccgatgtctgcacccaacatgccttcgatcgaaagagacagaaggagaagacaccacatgtcgatgtgggagccacgcagcagccacctgagggagcggaggcgccggcaccacatgtccgtgtgggagcagcgtaccagccagctgaggaagcacatgcagatgtccagccaggaggccctcaacagagaggaggcgccgaccatgaacccgctcaaccccctcaacccgctcagctccctcaacccgctcaatgcccaccccagcctttatcggcgacccagggccattgagggcctggccctgggcctggccctggagaagttcgaggaggagcgcatcagccgtggggggtccctcaagggggawggaggggaccgatccagtgccctggacaaccagaggacccctttgtccctgggccagcgggagccaccatggctggccaggccctgtcatggaaactgtgacccgactcagcaggaggcagggggaggagaggctgtggtgacctttgaggaccgggccaggcacaggcagagccaacggcgcagccggcatcgccgcgtcaggacagaaggcaaggagtcctcttcagcctcccggagcaggtctgccagccaggaacgcagtctggatgaagccatgcccactgaaggggagaaggaccatgagctcaggggcaaccatggtgccaaggagccaacgatccaagaagagagagcccaggatttaaggaggaccaacagtctgatggtgtccagaggctccgggctggcaggaggccttgatgaggctgacacccccctagtcctgccccatcctgagctggaagtggggaagcacgtggtgctgacggagcaggagccagaaggcagcagtgagcaggccctgctggggaatgtgcagctagacatgggccgggtcatcagccagagcgagcctgacctctcctgcatcacggccaacacggacaaggccaccaccgagagcaccagcgtcaccgtcgccatccccgacgtggaccccttggtggactcaaccgtggtgcacattagcaacaagacggatggggaagccagtcccttgaaggaggcagagatcagagaggatgaggaggaggtggagaagaagaagcagaagaaggagaagcgtgagacaggcaaagccatggtgccccacagctcaatgttcatcttcagcaccaccaacccgatccggagggcctgccactacatygtgaacctgcgctactttgagatgtgcatcctcctggtgattgcagccagcagcatcgccctggcggcagaggaccccgtcctgaccaactcggagcgcaacaaagtcctgaggtattttgactatgtgttcacgggcgtgttcacctttgagatggttataaagatgatagaccaaggcttgatcctgcaggatgggtcctacttccgagacttgtggaacatcctggactttgtggtggtcgttggcgcattggtggcctttgctctggcaaccaacaaaggacgggacatcaagaccatcaagtctctgcgggtgctccgagttctaaggccactgaaaaccatcaagcgcttgcccaagctcaaggccgtcttcgactgcgtagtgacctccttgaagaatgtcttcaacatactcattgtgtacaagctcttcatgttcatctttgctgtcatcgcagttcagctcttcaagggaaagttcttttattgcacggacagttccaaggacacagagaaggagtgcataggcaactatgtagatcaygagaaaaacaagatggaggtgaagggccgggaatggaagcgccatgaattccactacgacaacattatctgggccctgctgaccctcttcaccgtctccacaggggaaggatggcctcaagttctgcagcactctgtagatgtgacagaggaagaccgaggcccaagccgcagcaaccgcatggagatgtctatcttttatgtrgtctactttgtggtcttccccttcttctttgtcaatatctttgtggctctcatcatcatcaccttccaggagcaaggggataagatgatggaggagtgcagcctggagaagaatgagagggcgtgcatcgacttcgccatcagcgccaaacctctcacccgctacatgccgcagaacagacacaccttccagtaccgcgtgtggcactttgtggtgtctccgtcctttgagtacaccattatggccatgatcgccttgaatactgttgtgctgatgatgaagtattattctgctccctgtacctatgagctggccctgaagtacctgaatatcgccttcaccatggtgttttccctggaatgtgtcctgaaggtcatcgcttttggctttttgaactatttccgagacacctggaatatctttgacttcatcaccgtgattggcagtatcacagaaattatcctgacagacagcaagctggtgaacaccagtggcttcaatatgagctttctgaagctcttccgagctgcccgcctcataaagctcctgcgtcagggctataccatacgcattttgctgtggacctttgtgcagtcctttaaggccctcccttatgtctgccttttaattgccatgcttttcttcatttatgccatcattgggatgcaggtatttggaaacataaaattagacgaggagagtcacatcaaccggcacaacaacttccggagtttctttgggtccctaatgctactcttcaggagtgccacaggtgaggcctggcaggagattatgctgtcatgccttggggagaagggctgtgagcctgacaccaccgcaccatcagggcagaacgagaaygaacgctgcggcaccgatctggcctacgtgtactttgtctccttcatcttcttctgctccttcttgatgctcaacctgtttgtggccgtcatcatggacaactttgagtacctgactcgggactcctccatcctggggcctcaccacttggacgagtttgtccgcgtctgggcagaatatgaccgagcagcatgtggccgcatccattacactgagatgtatgaaatgctgactctcatgtcacctccgctaggcctcggcaagagatgtccctccaaagtggcatataagaggttggtcctgatgaacatgccagtagctgaggacatgacggtccacttcacctccacacttatggctctgatccggacagctctggacattaaaattgccaaaggtggtgcagacaggcagcagctagactcagagctacaaaaggagaccctagccatctggcctcacctatcccagaagatgctggatctgcttgtgcccatgcccaaagcctctgacctgactgtgggcaaaatctatgcagcaatgatgatcatggactactataagcagagtaaggtgaagaagcagaggcagcagctggaggaacagaaaaatgcccccatgttccagcgcatggagccttcatctctgcctcaggagatcattgctaatgccaaagccctgccttacctccagcaggaccccgtttcaggcctgagtggccggagtggatacccttcgatgagtccmctctctccccaggatatattccarttggcttgtatggaccccrccgatgacggacagttccaagaacggcagtctctggtggtgacagaccctagctccatgagacgttcattttccactattcgggataagcgttcaaattcctcgtggttggaggaattctccatggagcgaagcagtgaaaatacctacaagtcccgtcgccggagttaccactcctccttgcggctgtcagcccaccgcctgaactctgattcaggccacaagtctgacactcaccgctcagggggcagggagcggggacgatcaaaagagcgaaagcatcttctctctcctgatgtctcccgctgcaattcagaagagcgagggacccaggctgactgggagtccccagagcgccgtcaatccaggtcacccagtgagggcaggtcacagacgcccaacagacagggcacaggttccctaagtgagagctccatcccctctgtctctgacaccagcaccccaagaagaagtcgtcrgcagctcccacccgtcccgccaaagccccggcccctcctttcctacagctccctgattcgacacgcgggcagcatctctccacctgctgatggaagygaggagggctccccgctgacctcccaagctctggagagcaacaatgcttgcctgaccgagtcttccaactctccgcacccccagcagagccaacatgcctccccacagcgctacatctccgagccctacttggccctgcacgaagactcccacgcctcagactgtggtgaggaggagacgctcactttygaagcagccgtggctactagcctgggccgttccaacaccatcggctcagccccacccctgcggcatagctggcagatgcccaacgggcactatcggcggcggaggcgcggggggcctgggccaggcatgatgtgtggggctgtcaacaacctgctaagtgacacggaagaagatgacaaatgctagaggctgctcccccctccgatgcatgctcttctctcacatggagaaaaccaagacagaattgggaagccagtgcggcccgggggggaggaagagggaaaaggaagatggaaggacaccatgcattatcagagaagaggaagtaaaggacaatcagaacaccagtcaaacccaccaaattgctttattcccctttgcaagatgggcactgccatagtyctgcctctttgctggggaaagaaaccaggaacgtggagggttattactgcgggagaagggacacgaggatggctttgcttccccttgccccttcccacttttctaaaagctgtggagggatctagctggcctatgtctacactcagtgccctgagaagcctggaagactttctggctcttaactggggagtagtggagaccataggagaggactctcctccctcaccagctcttacgcctcagccagcaccactgccaccagggcaactgcagcagcatctcatgcataaccctgtggcttgcttcccccagggcagcacaggctaagtcaggaacatcggatgccagggagggaggagaaagccgaagcgaaaggggtcagggtgctgaggcaacagcagcaagggctggtctggacaagaaaagccatagcccggcagcccctaccatgagggagacagagaaacagaactggtggtgctggggggtatagccccccatccttgaggcctgtcacccacacagtaggtgctgagagttaggacaggtcaggaagtcccccagggtccacaaaggtgcctgaggctctggtaagggtgaagataaaagtatttaacaaccgctatggcatcaatgtaagtggagtttggtcctagtgccggagcccatgctattccaggcattggctctttagatgccagtcatgggggaaccctgagggtgtgggtagagtagcaggggccacctaagagattaaaaacagagtctgttttccaaccagtgtggaagcaattaaatatrcgtaacagtgctacggccacaccagcacctcctggctgaaggtcagcccacactctggtccatgaggcagcaaggccagtgctgtgccaagcccggtaaggccaagtgccgaggcccagccttccctgccactcctctgagagggcagaacacacatatccaagtaggctacccaccactgggtagggatttctgtaaagatgggaaaggctgatagattgaaataagcttctgtgaaagtctggatttactgaggacctcccctgaggagggaccgttgggaccgcagattctgcagctggtgtggggttcaggtcagtttgtcaggatgctttaaggtgattagtaaatatacctcagcttagacttgggctgctccttctagcaaagcaggctccagtggggcctcatcatacaggatgacaagactggggccctgttcaccttgaacatgcccctgggccaagatggggcttcacccctccccagagtaagagctggggctgacagtcccaccctgtcattcctaatagcccaaacgcagaagcactgagcaagagagccctttcttgccaagccagtgctcttttggtatatggcatacagctccattggaggggacacatcactggctttatctggtggaaatgtacctttcccttaagttcctccttagtgccatcacagcaggtgaatgggtgccctacggggccctccttcccccaccaggaacagatggaacctgccacccaggatcctgatctgccctgcactgagcactcagtggataaacactcctccagcccagacacactcctcctcttgggcaggagcaatccagagttgttatttttcttagaaggagcctcttttccctctattttttaaattgaaatataatagctgcatcagccctgaaaagccaaattcaaccacatggctggagaatcatttgtcatggccccgccttctcttctgatactaatggagcttcatgacccacggtcagcccccaaaccaaagttgtcccaacagaggaggccagtgaggcagagacagagctctcccactctcagaccctcttttgtcttcattttcctctcccacttagcacatgtgtgcttgagggtggctgggaatgtgatatacagcaccctgatcctaacaggtgtgattgttacgtaagacgctgatactgggccttgtattgcttttaaagtttcctctgctcagcatcatttcatgccaaagtgctgctatgggctgctttgtgtgcacaaaattgctttttccacctcggaaatgcagctttccctagggggaggcctacaacaggacgaccattctgagccagtgagtctattgcatggtgttttgagaaagggaattttagtgacaccttatgccatttcaagaggagaaatgcaggctggcagagcaatttccagaaatggaatttgcctgcaaatagtataaacaacactaaatttactgtgccaggaaatcttcctgaactccttgaactcatacacacaggtatttgagtcctgaataaagtgttggaaagcactgcagatgcggtcacctgactgaccacctgggttttctattaccagtgaatttcttttattcaccttcccttgaccaagaaattgggtttcttttccctcagcctgcacttactcttctattaagaccagaaaataaaataattttccgttgagtcam

SEQ ID NO: 85 - DNA, 10102 bp, Homo sapiens
gatgcgtggactgagcccagaccgcaggctgcccgagcccgccccctgcccggctgcggggagccctgagcccaggtccgcgggccgccgccaacgccacgtcctggccctgccggaagaagaggcatggcggccccagcagtgcgctctgctcgaggccgacgcctcggacgaggtgggcatgctgccggcttccccgcgcgccgcctctggcttcgacaacttcttccaggtgcaggagggcgagggccagggctgggagggcgccatggcactggaggcgggctccagccctttcctgccggtgagccccgaggtcatgaagcggcggcgcgggggcctcatcgagcagcgcgacatcatcaaggcccacgaggcgcacaagatgcagagcaccccgcaggcccggcgcaaggaatgggagatggctcgcttcggggaggcggtggtcgccaggccagggtccggcgatggagactcggaccagagcaggaaccggcaaggaacccccgtgccggcctcggggcaggcggccgcctacaagcagacgaaagcacagagggcgcggactatggctttgtacaaccccattcccgtccggcagaactgtttcaccgtcaacagatccctgttcatcttcggagaagataacattgtcaggaaatatgccaagaagctcatcgattggccccatttgagtacatgatcctggccaccatcattgccaactgcatcgtcctggccctggagcagcatcttcctgaggatgacaagacccccatgtcccgaagactggagaagacagaaccttatttcattgggatcttttgctttgaagctgggatcaaaattgtggccctggggttcatcttccataagggctcttacctccgcaatggctggaatgtcatggacttcatcgtsgtcctcagtggcatcctggccactgcaggaacccacttcaatactcacgtggacctgaggaccctccgggctgtgcgtgtcctgcggcctttgaagctcgtgtcagggatacctagcctgcagattgtgttgaagtccatcatgaaggccatggtacctcttctgcagattggccttctgctcttctttgccatcctgatgtttgctatcattggtttggagttctacagtggcaagttacatcgagcrtgcttcatgaacaattcaggtattctagaaggatttgacccccctcacccatgtggtgtgcagggctgcccagctggttatgaatgcaaggactggatcggccccaatgatgggatcacccagtttgataacatcctttttgctgtgctgactgtcttccagtgcatcaccatggaagggtggaccactgtgctgtacaataccaatgatgccttaggagccacctggaattggctgtacttcatccccctcatcatcattggatccttctttgttctcaacctagtcctgggagtgctttccggggaatttgccaaagagagagagagagtggagaaccgaagggctttcatgaagctgcggcgccagcagcagattgagcgtgagctgaatggctaccgtgcctggatagacaaagcagaggaagtcatgctcgctgaagaaaataaaaatgctggaacatcmgccttagaagtgcttcgaagggcaaccatcaagaggagccggacagaggccatgactcgagactccagtgatgagcactgtgttgatatctcctctgtgggcacacctctggcccgagccagtatcaaaagtkcaaaggtagacggggtctcttatttccggcacaaggaaaggcttctgcgcatctccattcgccacatggttaaatcccaggtgttttactggattgtgctgagccttgtggcactcaacactgcctgtgtggccattgtccatcacaaccagccccagtggctcacccacctcctctactatgcagaatttctgtttctgggactcttcctcttggagatgtccctgaagatgtatggcatggggcctcgcctttattttcactcttcattcaactgctttgattttggggtcacagtgggcagtatctttgaagtggtctgggcaatcttcagacctggtacgtcttttggaatcagtgtcttgcgagccctccggcttctaagaatatttaaaataaccaagtattgggcttccctacggaatttggtggtctccttgatgagctcaatgaagtctatcatcagtttgcttttcctcctcttcctcttcatcgttgtctttgctctcctaggaatgcagttatttggaggcaggtttaactttaatgatgggactccttcggcaaattttgataccttccctgcagccatcatgactgtgttccagatcctgacgggtgaggactggaatgaggtgatgtacaatgggatccgctcccagggtggggtcagctcaggcatgtggtctgccatctacttcattgtgctcaccttgtttggcaactacacgctactgaatgtgttcttggctatcgctgtggataatctcgccaacgcccaggaactgaccaaggatgaacaggaggaagaagaggccttcaaccagaaacatgcactgcagaaggccaaggaggtcagcccgatgtctgcacccaacatgccttcgatcgaaagagacagaaggagaagacaccacatgtcgatgtgggagccacgcagcagccacctgagggagcggaggcgccggcaccacatgtccgtgtgggagcagcgtaccagccagctgaggaagcacatgcagatgtccagccaggaggccctcaacagagaggaggcgccgaccatgaacccgctcaaccccctcaacccgctcagctccctcaacccgctcaatgcccaccccagcctttatcggcgacccagggccattgagggcctggccctgggcctggccctggagaagttcgaggaggagcgcatcagccgtggggggtccctcaagggggawggaggggaccgatccagtgccctggacaaccagaggacccctttgtccctgggccagcgggagccaccatggctggccaggccctgtcatggaaactgtgacccgactcagcaggaggcagggggaggagaggctgtggtgacctttgaggaccgggccaggcacaggcagagccaacggcgcagccggcatcgccgcgtcaggacagaaggcaaggagtcctcttcagcctcccggagcaggtctgccagccaggaacgcagtctggatgaagccatgcccactgaaggggagaaggaccatgagctcaggggcaaccatggtgccaaggagccaacgatccaagaagagagagcccaggatttaaggaggaccaacagtctgatggtgtccagaggctccgggctggcaggaggccttgatgaggctgacacccccctagtcctgccccatcctgagctggaagtggggaagcacgtggtgctgacggagcaggagccagaaggcagcagtgagcaggccctgctggggaatgtgcagctagacatgggccgggtcatcagccagagcgagcctgacctctcctgcatcacggccaacacggacaaggccaccaccgagagcaccagcgtcaccgtcgccatccccgacgtggaccccttggtggactcaaccgtggtgcacattagcaacaagacggatggggaagccagtcccttgaaggaggcagagatcagagaggatgaggaggaggtggagaagaagaagcagaagaaggagaagcgtgagacaggcaaagccatggtgccccacagctcaatgttcatcttcagcaccaccaacccgatccggagggcctgccactacatygtgaacctgcgctactttgagatgtgcatcctcctggtgattgcagccagcagcatcgccctggcggcagaggaccccgtcctgaccaactcggagcgcaacaaagtcctgaggtattttgactatgtgttcacgggcgtgttcacctttgagatggttataaagatgatagaccaaggcttgatcctgcaggatgggtcctacttccgagacttgtggaacatcctggactttgtggtggtcgttggcgcattggtggcctttgctctggcgtaaaaccaacaaaggacgggacatcaagaccatcaagtctctgcgggtgctccgagttctaaggccactgaaaaccatcaagcgcttgcccaagctcaaggccgtcttcgactgcgtagtgacctccttgaagaatgtcttcaacatactcattgtgtacaagctcttcatgttcatctttgctgtcatcgcagttcagctcttcaagggaaagttcttttattgcacggacagttccaaggacacagagaaggagtgcataggcaactatgtagatcaygagaaaaacaagatggaggtgaagggccgggaatggaagcgccatgaattccactacgacaacattatctgggccctgctgaccctcttcaccgtctccacaggggaaggatggcctcaagttctgcagcactctgtagatgtgacagaggaagaccgaggcccaagccgcagcaaccgcatggagatgtctatcttttatgtrgtctactttgtggtcttccccttcttctttgtcaatatctttgtggctctcatcatcatcaccttccaggagcaaggggataagatgatggaggagtgcagcctggagaagaatgagagggcgtgcatcgacttcgccatcagcgccaaacctctcacccgctacatgccgcagaacagacacaccttccagtaccgcgtgtggcactttgtggtgtctccgtcctttgagtacaccattatggccatgatcgccttgaatactgttgtgctgatgatgaagtattattctgctccctgtacctatgagctggccctgaagtacctgaatatcgccttcaccatggtgttttccctggaatgtgtcctgaaggtcatcgcttttggctttttgaactatttccgagacacctggaatatctttgacttcatcaccgtgattggcagtatcacagaaattatcctgacagacagcaagctggtgaacaccagtggcttcaatatgagctttctgaagctcttccgagctgcccgcctcataaagctcctgcgtcagggctataccatacgcattttgctgtggacctttgtgcagtcctttaaggccctcccttatgtctgccttttaattgccatgcttttcttcatttatgccatcattgggatgcaggtatttggaaacataaaattagacgaggagagtcacatcaaccggcacaacaacttccggagtttctttgggtccctaatgctactcttcaggagtgccacaggtgaggcctggcaggagattatgctgtcatgccttggggagaagggctgtgagcctgacaccaccgcaccatcagggcagaacgagaaygaacgctgcggcaccgatctggcctacgtgtactttgtctccttcatcttcttctgctccttcttgatgctcaacctgtttgtggccgtcatcatggacaactttgagtacctgactcgggactcctccatcctggggcctcaccacttggacgagtttgtccgcgtctgggcagaatatgaccgagcagcatgtggccgcatccattacactgagatgtatgaaatgctgactctcatgtcacctccgctaggcctcggcaagagatgtccctccaaagtggcatataagaggttggtcctgatgaacatgccagtagctgaggacatgacggtccacttcacctccacacttatggctctgatccggacagctctggacattaaaattgccaaaggtggtgcagacaggcagcagctagactcagagctacaaaaggagaccctagccatctggcctcacctatcccagaagatgctggatctgcttgtgcccatgcccaaagcctctgacctgactgtgggcaaaatctatgcagcaatgatgatcatggactactataagcagagtaaggtgaagaagcagaggcagcagctggaggaacagaaaaatgcccccatgttccagcgcatggagccttcatctctgcctcaggagatcattgctaatgccaaagccctgccttacctccagcaggaccccgtttcaggcctgagtggccggagtggatacccttcgatgagtccmctctctccccaggatatattccarttggcttgtatggaccccrccgatgacggacagttccaagaacggcagtctctggagccagaggttagtgaattaaaaagcgtgcagccctctaaccatggcatctaccttccttcggacacccaggagcatgcgggatctgggagggcatcttctatgccacgtctgactgtggatccccaggtggtgacagaccctagctccatgagacgttcattttccactattcgggataagcgttcaaattcctcgtggttggaggaattctccatggagcgaagcagtgaaaatacctacaagtcccgtcgccggagttaccactcctccttgcggctgtcagcccaccgcctgaactctgattcaggccacaagtctgacactcaccgctcagggggcagggagcggggacgatcaaaagagcgaaagcatcttctctctcctgatgtctcccgctgcaattcagaagagcgagggacccaggctgactgggagtccccagagcgccgtcaatccaggtcacccagtgagggcaggtcacagacgcccaacagacagggcacaggttccctaagtgagagctccatcccctctgtctctgacaccagcaccccaagaagaagtcgtcrgcagctcccacccgtcccgccaaagccccggcccctcctttcctacagctccctgattcgacacgcgggcagcatctctccacctgctgatggaagygaggagggctccccgctgacctcccaagctctggagagcaacaatgcttgcctgaccgagtcttccaactctccgcacccccagcagagccaacatgcctccccacagcgctacatctccgagccctacttggccctgcacgaagactcccacgcctcagactgtggtgaggaggagacgctcactttygaagcagccgtggctactagcctgggccgttccaacaccatcggctcagccccacccctgcggcatagctggcagatgcccaacgggcactatcggcggcggaggcgcggggggcctgggccaggcatgatgtgtggggctgtcaacaacctgctaagtgacacggaagaagatgacaaatgctagaggctgctcccccctccgatgcatgctcttctctcacatggagaaaaccaagacagaattgggaagccagtgcggcccgggggggaggaagagggaaaaggaagatggaaggacaccatgcattatcagagaagaggaagtaaaggacaatcagaacaccagtcaaacccaccaaattgctttattcccctttgcaagatgggcactgccatagtyctgcctctttgctggggaaagaaaccaggaacgtggagggttattactgcgggagaagggacacgaggatggctttgcttccccttgccccttcccacttttctaaaagctgtggagggatctagctggcctatgtctacactcagtgccctgagaagcctggaagactttctggctcttaactggggagtagtggagaccataggagaggactctcctccctcaccagctcttacgcctcagccagcaccactgccaccagggcaactgcagcagcatctcatgcataaccctgtggcttgcttcccccagggcagcacaggctaagtcaggaacatcggatgccagggagggaggagaaagccgaagcgaaaggggtcagggtgctgaggcaacagcagcaagggctggtctggacaagaaaagccatagcccggcagcccctaccatgagggagacagagaaacagaactggtggtgctggggggtatagccccccatccttgaggcctgtcacccacacagtaggtgctgagagttaggacaggtcaggaagtcccccagggtccacaaaggtgcctgaggctctggtaagggtgaagataaaagtatttaacaaccgctatggcatcaatgtaagtggagtttggtcctagtgccggagcccatgctattccaggcattggctctttagatgccagtcatgggggaaccctgagggtgtgggtagagtagcaggggccacctaagagattaaaaacagagtctgttttccaaccagtgtggaagcaattaaatatrcgtaacagtgctacggccacaccagcacctcctggctgaaggtcagcccacactctggtccatgaggcagcaaggccagtgctgtgccaagcccggtaaggccaagtgccgaggcccagccttccctgccactcctctgagagggcagaacacacatatccaagtaggctacccaccactgggtagggatttctgtaaagatgggaaaggctgatagattgaaataagcttctgtgaaagtctggatttactgaggacctcccctgaggagggaccgttgggaccgcagattctgcagctggtgtggggttcaggtcagtttgtcaggatgctttaaggtgattagtaaatatacctcagcttagacttgggctgctccttctagcaaagcaggctccagtggggcctcatcatacaggatgacaagactggggccctgttcaccttgaacatgcccctgggccaagatggggcttcacccctccccagagtaagagctggggctgacagtcccaccctgtcattcctaatagcccaaacgcagaagcactgagcaagagagccctttcttgccaagccagtgctcttttggtatatggcatacagctccattggaggggacacatcactggctttatctggtggaaatgtacctttcccttaagttcctccttagtgccatcacagcaggtgaatgggtgccctacggggccctccttcccccaccaggaacagatggaacctgccacccaggatcctgatctgccctgcactgagcactcagtggataaacactcctccagcccagacacactcctcctcttgggcaggagcaatccagagttgttatttttcttagaaggagcctcttttccctctattttttaaattgaaatataatagctgcatcagccctgaaaagccaaattcaaccacatggctggagaatcatttgtcatggccccgccttctcttctgatactaatggagcttcatgacccacggtcagcccccaaaccaaagttgtcccaacagaggaggccagtgaggcagagacagagctctcccactctcagaccctcttttgtcttcattttcctctcccacttagcacatgtgtgcttgagggtggctgggaatgtgatatacagcaccctgatcctaacaggtgtgattgttacgtaagacgctgatactgggccttgtattgcttttaaagtttcctctgctcagcatcatttcatgccaaagtgctgctatgggctgctttgtgtgcacaaaattgctttttccacctcggaaatgcagctttccctagggggaggcctacaacaggacgaccattctgagccagtgagtctattgcatggtgttttgagaaagggaattttagtgacaccttatgccatttcaagaggagaaatgcaggctggcagagcaatttccagaaatggaatttgcctgcaaatagtataaacaacactaaatttactgtgccaggaaatcttcctgaactccttgaactcatacacacaggtatttgagtcctgaataaagtgttggaaagcactgcagatgcggtcacctgactgaccacctgggttttctattaccagtgaatttcttttattcaccttcccttgaccaagaaattgggtttcttttccctcagcctgcacttactcttctattaagaccagaaaataaaataattttccgttgagtcam

SEQ ID NO: 86 - DNA, 10103 bp, Homo sapiens
gatgcgtggactgagcccagaccgcaggctgcccgagcccgccccctgcccggctgcggggagccctgagcccaggtccgcgggccgccgccaacgccacgtcctggccctgccggaagaagaggcatggcggccccagcagtgcgctctgctcgaggccgacgcctcggacgaggtgggcatgctgccggcttccccgcgcgccgcctctggcttcgacaacttcttccaggtgcaggagggcgagggccagggctgggagggcgccatggcactggaggcgggctccagccctttcctgccggtgagccccgaggtcatgaagcggcggcgcgggggcctcatcgagcagcgcgacatcatcaaggcccacgaggcgcacaagatgcagagcaccccgcaggcccggcgcaaggaatgggagatggctcgcttcggggaggcggtggtcgccaggccagggtccggcgatggagactcggaccagagcaggaaccggcaaggaacccccgtgccggcctcggggcaggcggccgcctacaagcagacgaaagcacagagggcgcggactatggctttgtacaaccccattcccgtccggcagaactgtttcaccgtcaacagatccctgttcatcttcggagaagataacattgtcaggaaatatgccaagaagctcatcgattggccgccatttgagtacatgatcctggccaccatcattgccaactgcatcgtcctggccctggagcagcatcttcctgaggatgacaagacccccatgtcccgaagactggagaagacagaaccttatttcattgggatcttttgctttgaagctgggatcaaaattgtggccctggggttcatcttccataagggctcttacctccgcaatggctggaatgtcatggacttcatcgtsgtcctcagtggcatcctggccactgcaggaacccacttcaatactcacgtggacctgaggaccctccgggctgtgcgtgtcctgcggcctttgaagctcgtgtcagggatacctagcctgcagattgtgttgaagtccatcatgaaggccatggtacctcttctgcagattggccttctgctcttctttgccatcctgatgtttgctatcattggtttggagttctacagtggcaagttacatcgagcrtgcttcatgaacaattcaggtattctagaaggatttgacccccctcacccatgtggtgtgcagggctgcccagctggttatgaatgcaaggactggatcggccccaatgatgggatcacccagtttgataacatcctttttgctgtgctgactgtcttccagtgcatcaccatggaagggtggaccactgtgctgtacaataccaatgatgccttaggagccacctggaattggctgtacttcatccccctcatcatcattggatccttctttgttctcaacctagtcctgggagtgctttccggggaatttgccaaagagagagagagagtggagaaccgaagggctttcatgaagctgcggcgccagcagcagattgagcgtgagctgaatggctaccgtgcctggatagacaaagcagaggaagtcatgctcgctgaagaaaataaaaatgctggaacatcmgccttagaagtgcttcgaagggcaaccatcaagaggagccggacagaggccatgactcgagactccagtgatgagcactgtgttgatatctcctctgtgggcacacctctggcccgagccagtatcaaaagtkcaaaggtagacggggtctcttatttccggcacaaggaaaggcttctgcgcatctccattcgccacatggttaaatcccaggtgttttactggattgtgctgagccttgtggcactcaacactgcctgtgtggccattgtccatcacaaccagccccagtggctcacccacctcctctactatgcagaatttctgtttctgggactcttcctcttggagatgtccctgaagatgtatggcatggggcctcgcctttattttcactcttcattcaactgctttgattttggggtcacagtgggcagtatctttgaagtggtctgggcaatcttcagacctggtacgtcttttggaatcagtgtcttgcgagccctccggcttctaagaatatttaaaataaccaagtattgggcttccctacggaatttggtggtctccttgatgagctcaatgaagtctatcatcagtttgcttttcctcctcttcctcttcatcgttgtctttgctctcctaggaatgcagttatttggaggcaggtttaactttaatgatgggactccttcggcaaattttgataccttccctgcagccatcatgactgtgttccagatcctgacgggtgaggactggaatgaggtgatgtacaatgggatccgctcccagggtggggtcagctcaggcatgtggtctgccatctacttcattgtgctcaccttgtttggcaactacacgctactgaatgtgttcttggctatcgctgtggataatctcgccaacgcccaggaactgaccaaggatgaacaggaggaagaagaggccttcaaccagaaacatgcactgcagaaggccaaggaggtcagcccgatgtctgcacccaacatgccttcgatcgaaagagacagaaggagaagacaccacatgtcgatgtgggagccacgcagcagccacctgagggagcggaggcgccggcaccacatgtccgtgtgggagcagcgtaccagccagctgaggaagcacatgcagatgtccagccaggaggccctcaacagagaggaggcgccgaccatgaacccgctcaaccccctcaacccgctcagctccctcaacccgctcaatgcccaccccagcctttatcggcgacccagggccattgagggcctggccctgggcctggccctggagaagttcgaggaggagcgcatcagccgtggggggtccctcaagggggawggaggggaccgatccagtgccctggacaaccagaggacccctttgtccctgggccagcgggagccaccatggctggccaggccctgtcatggaaactgtgacccgactcagcaggaggcagggggaggagaggctgtggtgacctttgaggaccgggccaggcacaggcagagccaacggcgcagccggcatcgccgcgtcaggacagaaggcaaggagtcctcttcagcctcccggagcaggtctgccagccaggaacgcagtctggatgaagccatgcccactgaaggggagaaggaccatgagctcaggggcaaccatggtgccaaggagccaacgatccaagaagagagagcccaggatttaaggaggaccaacagtctgatggtgtccagaggctccgggctggcaggaggccttgatgaggctgacacccccctagtcctgccccatcctgagctggaagtggggaagcacgtggtgctgacggagcaggagccagaaggcagcagtgagcaggccctgctggggaatgtgcagctagacatgggccgggtcatcagccagagcgagcctgacctctcctgcatcacggccaacacggacaaggccaccaccgagagcaccagcgtcaccgtcgccatccccgacgtggaccccttggtggactcaaccgtggtgcacattagcaacaagacggatggggaagccagtcccttgaaggaggcagagatcagagaggatgaggaggaggtggagaagaagaagcagaagaaggagaagcgtgagacaggcaaagccatggtgccccacagctcaatgttcatcttcagcaccaccaacccgatccggagggcctgccactacatygtgaacctgcgctactttgagatgtgcatcctcctggtgattgcagccagcagcatcgccctggcggcagaggaccccgtcctgaccaactcggagcgcaacaaagtcctgaggtattttgactatgtgttcacgggcgtgttcacctttgagatggttataaagatgatagaccaaggcttgatcctgcaggatgggtcctacttccgagacttgtggaacatcctggactttgtggtggtcgttggcgcattggtggcctttgctctggcgtaaaaccaacaaaggacgggacatcaagaccatcaagtctctgcgggtgctccgagttctaaggccactgaaaaccatcaagcgcttgcccaagctcaaggccgtcttcgactgcgtagtgacctccttgaagaatgtcttcaacatactcattgtgtacaagctcttcatgttcatctttgctgtcatcgcagttcagctcttcaagggaaagttcttttattgcacggacagttccaaggacacagagaaggagtgcataggcaactatgtagatcaygagaaaaacaagatggaggtgaagggccgggaatggaagcgccatgaattccactacgacaacattatctgggccctgctgaccctcttcaccgtctccacaggggaaggatggcctcaagttctgcagcactctgtagatgtgacagaggaagaccgaggcccaagccgcagcaaccgcatggagatgtctatcttttatgtrgtctactttgtggtcttccccttcttctttgtcaatatctttgtggctctcatcatcatcaccttccaggagcaaggggataagatgatggaggagtgcagcctggagaagaatgagagggcgtgcatcgacttcgccatcagcgccaaacctctcacccgctacatgccgcagaacagacacaccttccagtaccgcgtgtggcactttgtggtgtctccgtcctttgagtacaccattatggccatgatcgccttgaatactgttgtgctgatgatgaagtattattctgctccctgtacctatgagctggccctgaagtacctgaatatcgccttcaccatggtgttttccctggaatgtgtcctgaaggtcatcgcttttggctttttgaactatttccgagacacctggaatatctttgacttcatcaccgtgattggcagtatcacagaaattatcctgacagacagcaagctggtgaacaccagtggcttcaatatgagctttctgaagctcttccgagctgcccgcctcataaagctcctgcgtcagggctataccatacgcattttgctgtggacctttgtgcagtcctttaaggccctcccttatgtctgccttttaattgccatgcttttcttcatttatgccatcattgggatgcaggtatttggaaacataaaattagacgaggagagtcacatcaaccggcacaacaacttccggagtttctttgggtccctaatgctactcttcaggagtgccacaggtgaggcctggcaggagattatgctgtcatgccttggggagaagggctgtgagcctgacaccaccgcaccatcagggcagaacgagaaygaacgctgcggcaccgatctggcctacgtgtactttgtctccttcatcttcttctgctccttcttgatgctcaacctgtttgtggccgtcatcatggacaactttgagtacctgactcgggactcctccatcctggggcctcaccacttggacgagtttgtccgcgtctgggcagaatatgaccgagcagcatgtggccgcatccattacactgagatgtatgaaatgctgactctcatgtcacctccgctaggcctcggcaagagatgtccctccaaagtggcatataagaggttggtcctgatgaacatgccagtagctgaggacatgacggtccacttcacctccacacttatggctctgatccggacagctctggacattaaaattgccaaaggtggtgcagacaggcagcagctagactcagagctacaaaaggagaccctagccatctggcctcacctatcccagaagatgctggatctgcttgtgcccatgcccaaagcctctgacctgactgtgggcaaaatctatgcagcaatgatgatcatggactactataagcagagtaaggtgaagaagcagaggcagcagctggaggaacagaaaaatgcccccatgttccagcgcatggagccttcatctctgcctcaggagatcattgctaatgccaaagccctgccttacctccagcaggaccccgtttcaggcctgagtggccggagtggatacccttcgatgagtccmctctctccccaggatatattccarttggcttgtatggaccccrccgatgacggacagttccaagaacggcagtctctggagccagaggttagtgaattaaaaagcgtgcagccctctaaccatggcatctaccttccttcggacacccaggagcatgcgggatctgggagggcatcttctatgccacgtctgactgtggatccccaggtggtgacagaccctagctccatgagacgttcattttccactattcgggataagcgttcaaattcctcgtggttggaggaattctccatggagcgaagcagtgaaaatacctacaagtcccgtcgccggagttaccactcctccttgcggctgtcagcccaccgcctgaactctgattcaggccacaagtctgacactcaccgctcagggggcagggagcggggacgatcaaaagagcgaaagcatcttctctctcctgatgtctcccgctgcaattcagaagagcgagggacccaggctgactgggagtccccagagcgccgtcaatccaggtcacccagtgagggcaggtcacagacgcccaacagacagggcacaggttccctaagtgagagctccatcccctctgtctctgacaccagcaccccaagaagaagtcgtcrgcagctcccacccgtcccgccaaagccccggcccctcctttcctacagctccctgattcgacacgcgggcagcatctctccacctgctgatggaagygaggagggctccccgctgacctcccaagctctggagagcaacaatgcttgcctgaccgagtcttccaactctccgcacccccagcagagccaacatgcctccccacagcgctacatctccgagccctacttggccctgcacgaagactcccacgcctcagactgtggtgaggaggagacgctcactttygaagcagccgtggctactagcctgggccgttccaacaccatcggctcagccccacccctgcggcatagctggcagatgcccaacgggcactatcggcggcggaggcgcggggggcctgggccaggcatgatgtgtggggctgtcaacaacctgctaagtgacacggaagaagatgacaaatgctagaggctgctcccccctccgatgcatgctcttctctcacatggagaaaaccaagacagaattgggaagccagtgcggcccgggggggaggaagagggaaaaggaagatggaaggacaccatgcattatcagagaagaggaagtaaaggacaatcagaacaccagtcaaacccaccaaattgctttattcccctttgcaagatgggcactgccatagtyctgcctctttgctggggaaagaaaccaggaacgtggagggttattactgcgggagaagggacacgaggatggctttgcttccccttgccccttcccacttttctaaaagctgtggagggatctagctggcctatgtctacactcagtgccctgagaagcctggaagactttctggctcttaactggggagtagtggagaccataggagaggactctcctccctcaccagctcttacgcctcagccagcaccactgccaccagggcaactgcagcagcatctcatgcataaccctgtggcttgcttcccccagggcagcacaggctaagtcaggaacatcggatgccagggagggaggagaaagccgaagcgaaaggggtcagggtgctgaggcaacagcagcaagggctggtctggacaagaaaagccatagcccggcagcccctaccatgagggagacagagaaacagaactggtggtgctggggggtatagccccccatccttgaggcctgtcacccacacagtaggtgctgagagttaggacaggtcaggaagtcccccagggtccacaaaggtgcctgaggctctggtaagggtgaagataaaagtatttaacaaccgctatggcatcaatgtaagtggagtttggtcctagtgccggagcccatgctattccaggcattggctctttagatgccagtcatgggggaaccctgagggtgtgggtagagtagcaggggccacctaagagattaaaaacagagtctgttttccaaccagtgtggaagcaattaaatatrcgtaacagtgctacggccacaccagcacctcctggctgaaggtcagcccacactctggtccatgaggcagcaaggccagtgctgtgccaagcccggtaaggccaagtgccgaggcccagccttccctgccactcctctgagagggcagaacacacatatccaagtaggctacccaccactgggtagggatttctgtaaagatgggaaaggctgatagattgaaataagcttctgtgaaagtctggatttactgaggacctcccctgaggagggaccgttgggaccgcagattctgcagctggtgtggggttcaggtcagtttgtcaggatgctttaaggtgattagtaaatatacctcagcttagacttgggctgctccttctagcaaagcaggctccagtggggcctcatcatacaggatgacaagactggggccctgttcaccttgaacatgcccctgggccaagatggggcttcacccctccccagagtaagagctggggctgacagtcccaccctgtcattcctaatagcccaaacgcagaagcactgagcaagagagccctttcttgccaagccagtgctcttttggtatatggcatacagctccattggaggggacacatcactggctttatctggtggaaatgtacctttcccttaagttcctccttagtgccatcacagcaggtgaatgggtgccctacggggccctccttcccccaccaggaacagatggaacctgccacccaggatcctgatctgccctgcactgagcactcagtggataaacactcctccagcccagacacactcctcctcttgggcaggagcaatccagagttgttatttttcttagaaggagcctcttttccctctattttttaaattgaaatataatagctgcatcagccctgaaaagccaaattcaaccacatggctggagaatcatttgtcatggccccgccttctcttctgatactaatggagcttcatgacccacggtcagcccccaaaccaaagttgtcccaacagaggaggccagtgaggcagagacagagctctcccactctcagaccctcttttgtcttcattttcctctcccacttagcacatgtgtgcttgagggtggctgggaatgtgatatacagcaccctgatcctaacaggtgtgattgttacgtaagacgctgatactgggccttgtattgcttttaaagtttcctctgctcagcatcatttcatgccaaagtgctgctatgggctgctttgtgtgcacaaaattgctttttccacctcggaaatgcagctttccctagggggaggcctacaacaggacgaccattctgagccagtgagtctattgcatggtgttttgagaaagggaattttagtgacaccttatgccatttcaagaggagaaatgcaggctggcagagcaatttccagaaatggaatttgcctgcaaatagtataaacaacactaaatttactgtgccaggaaatcttcctgaactccttgaactcatacacacaggtatttgagtcctgaataaagtgttggaaagcactgcagatgcggtcacctgactgaccacctgggttttctattaccagtgaatttcttttattcaccttcccttgaccaagaaattgggtttcttttccctcagcctgcacttactcttctattaagaccagaaaataaaataattttccgttgagtcam

SEQ ID NO: 87 - DNA, 9974 bp, Homo sapiens
gatgcgtggactgagcccagaccgcaggctgcccgagcccgccccctgcccggctgcggggagccctgagcccaggtccgcgggccgccgccaacgccacgtcctggccctgccggaagaagaggcatggcggccccagcagtgcgctctgctcgaggccgacgcctcggacgaggtgggcatgctgccggcttccccgcgcgccgcctctggcttcgacaacttcttccaggtgcaggagggcgagggccagggctgggagggcgccatggcactggaggcgggctccagccctttcctgccggtgagccccgaggtcatgaagcggcggcgcgggggcctcatcgagcagcgcgacatcatcaaggcccacgaggcgcacaagatgcagagcaccccgcaggcccggcgcaaggaatgggagatggctcgcttcggggaggcggtggtcgccaggccagggtccggcgatggagactcggaccagagcaggaaccggcaaggaacccccgtgccggcctcggggcaggcggccgcctacaagcagacgaaagcacagagggcgcggactatggctttgtacaaccccattcccgtccggcagaactgtttcaccgtcaacagatccctgttcatcttcggagaagataacattgtcaggaaatatgccaagaagctcatcgattggccgccatttgagtacatgatcctggccaccatcattgccaactgcatcgtcctggccctggagcagcatcttcctgaggatgacaagacccccatgtcccgaagactggagaagacagaaccttatttcattgggatcttttgctttgaagctgggatcaaaattgtggccctggggttcatcttccataagggctcttacctccgcaatggctggaatgtcatggacttcatcgtsgtcctcagtggcatcctggccactgcaggaacccacttcaatactcacgtggacctgaggaccctccgggctgtgcgtgtcctgcggcctttgaagctcgtgtcagggatacctagcctgcagattgtgttgaagtccatcatgaaggccatggtacctcttctgcagattggccttctgctcttctttgccatcctgatgtttgctatcattggtttggagttctacagtggcaagttacatcgagcrtgcttcatgaacaattcaggtattctagaaggatttgacccccctcacccatgtggtgtgcagggctgcccagctggttatgaatgcaaggactggatcggccccaatgatgggatcacccagtttgataacatcctttttgctgtgctgactgtcttccagtgcatcaccatggaagggtggaccactgtgctgtacaataccaatgatgccttaggagccacctggaattggctgtacttcatccccctcatcatcattggatccttctttgttctcaacctagtcctgggagtgctttccggggaatttgccaaagagagagagagagtggagaaccgaagggctttcatgaagctgcggcgccagcagcagattgagcgtgagctgaatggctaccgtgcctggatagacaaagcagaggaagtcatgctcgctgaagaaaataaaaatgctggaacatcmgccttagaagtgcttcgaagggcaaccatcaagaggagccggacagaggccatgactcgagactccagtgatgagcactgtgttgatatctcctctgtgggcacacctctggcccgagccagtatcaaaagtkcaaaggtagacggggtctcttatttccggcacaaggaaaggcttctgcgcatctccattcgccacatggttaaatcccaggtgttttactggattgtgctgagccttgtggcactcaacactgcctgtgtggccattgtccatcacaaccagccccagtggctcacccacctcctctactatgcagaatttctgtttctgggactcttcctcttggagatgtccctgaagatgtatggcatggggcctcgcctttattttcactcttcattcaactgctttgattttggggtcacagtgggcagtatctttgaagtggtctgggcaatcttcagacctggtacgtcttttggaatcagtgtcttgcgagccctccggcttctaagaatatttaaaataaccaagtattgggcttccctacggaatttggtggtctccttgatgagctcaatgaagtctatcatcagtttgcttttcctcctcttcctcttcatcgttgtctttgctctcctaggaatgcagttatttggaggcaggtttaactttaatgatgggactccttcggcaaattttgataccttccctgcagccatcatgactgtgttccagatcctgacgggtgaggactggaatgaggtgatgtacaatgggatccgctcccagggtggggtcagctcaggcatgtggtctgccatctacttcattgtgctcaccttgtttggcaactacacgctactgaatgtgttcttggctatcgctgtggataatctcgccaacgcccaggaactgaccaaggatgaacaggaggaagaagaggccttcaaccagaaacatgcactgcagaaggccaaggaggtcagcccgatgtctgcacccaacatgccttcgatcgaaagagacagaaggagaagacaccacatgtcgatgtgggagccacgcagcagccacctgagggagcggaggcgccggcaccacatgtccgtgtgggagcagcgtaccagccagctgaggaagcacatgcagatgtccagccaggaggccctcaacagagaggaggcgccgaccatgaacccgctcaaccccctcaacccgctcagctccctcaacccgctcaatgcccaccccagcctttatcggcgacccagggccattgagggcctggccctgggcctggccctggagaagttcgaggaggagcgcatcagccgtggggggtccctcaagggggawggaggggaccgatccagtgccctggacaaccagaggacccctttgtccctgggccagcgggagccaccatggctggccaggccctgtcatggaaactgtgacccgactcagcaggaggcagggggaggagaggctgtggtgacctttgaggaccgggccaggcacaggcagagccaacggcgcagccggcatcgccgcgtcaggacagaaggcaaggagtcctcttcagcctcccggagcaggtctgccagccaggaacgcagtctggatgaagccatgcccactgaaggggagaaggaccatgagctcaggggcaaccatggtgccaaggagccaacgatccaagaagagagagcccaggatttaaggaggaccaacagtctgatggtgtccagaggctccgggctggcaggaggccttgatgaggctgacacccccctagtcctgccccatcctgagctggaagtggggaagcacgtggtgctgacggagcaggagccagaaggcagcagtgagcaggccctgctggggaatgtgcagctagacatgggccgggtcatcagccagagcgagcctgacctctcctgcatcacggccaacacggacaaggccaccaccgagagcaccagcgtcaccgtcgccatccccgacgtggaccccttggtggactcaaccgtggtgcacattagcaacaagacggatggggaagccagtcccttgaaggaggcagagatcagagaggatgaggaggaggtggagaagaagaagcagaagaaggagaagcgtgagacaggcaaagccatggtgccccacagctcaatgttcatcttcagcaccaccaacccgatccggagggcctgccactacatygtgaacctgcgctactttgagatgtgcatcctcctggtgattgcagccagcagcatcgccctggcggcagaggaccccgtcctgaccaactcggagcgcaacaaagtcctgaggtattttgactatgtgttcacgggcgtgttcacctttgagatggttataaagatgatagaccaaggcttgatcctgcaggatgggtcctacttccgagacttgtggaacatcctggactttgtggtggtcgttggcgcattggtggcctttgctctggcgtaaaaccaacaaaggacgggacatcaagaccatcaagtctctgcgggtgctccgagttctaaggccactgaaaaccatcaagcgcttgcccaagctcaaggccgtcttcgactgcgtagtgacctccttgaagaatgtcttcaacatactcattgtgtacaagctcttcatgttcatctttgctgtcatcgcagttcagctcttcaagggaaagttcttttattgcacggacagttccaaggacacagagaaggagtgcataggcaactatgtagatcaygagaaaaacaagatggaggtgaagggccgggaatggaagcgccatgaattccactacgacaacattatctgggccctgctgaccctcttcaccgtctccacaggggaaggatggcctcaagttctgcagcactctgtagatgtgacagaggaagaccgaggcccaagccgcagcaaccgcatggagatgtctatcttttatgtrgtctactttgtggtcttccccttcttctttgtcaatatctttgtggctctcatcatcatcaccttccaggagcaaggggataagatgatggaggagtgcagcctggagaagaatgagagggcgtgcatcgacttcgccatcagcgccaaacctctcacccgctacatgccgcagaacagacacaccttccagtaccgcgtgtggcactttgtggtgtctccgtcctttgagtacaccattatggccatgatcgccttgaatactgttgtgctgatgatgaagtattattctgctccctgtacctatgagctggccctgaagtacctgaatatcgccttcaccatggtgttttccctggaatgtgtcctgaaggtcatcgcttttggctttttgaactatttccgagacacctggaatatctttgacttcatcaccgtgattggcagtatcacagaaattatcctgacagacagcaagctggtgaacaccagtggcttcaatatgagctttctgaagctcttccgagctgcccgcctcataaagctcctgcgtcagggctataccatacgcattttgctgtggacctttgtgcagtcctttaaggccctcccttatgtctgccttttaattgccatgcttttcttcatttatgccatcattgggatgcaggtatttggaaacataaaattagacgaggagagtcacatcaaccggcacaacaacttccggagtttctttgggtccctaatgctactcttcaggagtgccacaggtgaggcctggcaggagattatgctgtcatgccttggggagaagggctgtgagcctgacaccaccgcaccatcagggcagaacgagaaygaacgctgcggcaccgatctggcctacgtgtactttgtctccttcatcttcttctgctccttcttgatgctcaacctgtttgtggccgtcatcatggacaactttgagtacctgactcgggactcctccatcctggggcctcaccacttggacgagtttgtccgcgtctgggcagaatatgaccgagcagcatgtggccgcatccattacactgagatgtatgaaatgctgactctcatgtcacctccgctaggcctcggcaagagatgtccctccaaagtggcatataagaggttggtcctgatgaacatgccagtagctgaggacatgacggtccacttcacctccacacttatggctctgatccggacagctctggacattaaaattgccaaaggtggtgcagacaggcagcagctagactcagagctacaaaaggagaccctagccatctggcctcacctatcccagaagatgctggatctgcttgtgcccatgcccaaagcctctgacctgactgtgggcaaaatctatgcagcaatgatgatcatggactactataagcagagtaaggtgaagaagcagaggcagcagctggaggaacagaaaaatgcccccatgttccagcgcatggagccttcatctctgcctcaggagatcattgctaatgccaaagccctgccttacctccagcaggaccccgtttcaggcctgagtggccggagtggatacccttcgatgagtccmctctctccccaggatatattccarttggcttgtatggaccccrccgatgacggacagttccaagaacggcagtctctggtggtgacagaccctagctccatgagacgttcattttccactattcgggataagcgttcaaattcctcgtggttggaggaattctccatggagcgaagcagtgaaaatacctacaagtcccgtcgccggagttaccactcctccttgcggctgtcagcccaccgcctgaactctgattcaggccacaagtctgacactcaccgctcagggggcagggagcggggacgatcaaaagagcgaaagcatcttctctctcctgatgtctcccgctgcaattcagaagagcgagggacccaggctgactgggagtccccagagcgccgtcaatccaggtcacccagtgagggcaggtcacagacgcccaacagacagggcacaggttccctaagtgagagctccatcccctctgtctctgacaccagcaccccaagaagaagtcgtcrgcagctcccacccgtcccgccaaagccccggcccctcctttcctacagctccctgattcgacacgcgggcagcatctctccacctgctgatggaagygaggagggctccccgctgacctcccaagctctggagagcaacaatgcttgcctgaccgagtcttccaactctccgcacccccagcagagccaacatgcctccccacagcgctacatctccgagccctacttggccctgcacgaagactcccacgcctcagactgtggtgaggaggagacgctcactttygaagcagccgtggctactagcctgggccgttccaacaccatcggctcagccccacccctgcggcatagctggcagatgcccaacgggcactatcggcggcggaggcgcggggggcctgggccaggcatgatgtgtggggctgtcaacaacctgctaagtgacacggaagaagatgacaaatgctagaggctgctcccccctccgatgcatgctcttctctcacatggagaaaaccaagacagaattgggaagccagtgcggcccgggggggaggaagagggaaaaggaagatggaaggacaccatgcattatcagagaagaggaagtaaaggacaatcagaacaccagtcaaacccaccaaattgctttattcccctttgcaagatgggcactgccatagtyctgcctctttgctggggaaagaaaccaggaacgtggagggttattactgcgggagaagggacacgaggatggctttgcttccccttgccccttcccacttttctaaaagctgtggagggatctagctggcctatgtctacactcagtgccctgagaagcctggaagactttctggctcttaactggggagtagtggagaccataggagaggactctcctccctcaccagctcttacgcctcagccagcaccactgccaccagggcaactgcagcagcatctcatgcataaccctgtggcttgcttcccccagggcagcacaggctaagtcaggaacatcggatgccagggagggaggagaaagccgaagcgaaaggggtcagggtgctgaggcaacagcagcaagggctggtctggacaagaaaagccatagcccggcagcccctaccatgagggagacagagaaacagaactggtggtgctggggggtatagccccccatccttgaggcctgtcacccacacagtaggtgctgagagttaggacaggtcaggaagtcccccagggtccacaaaggtgcctgaggctctggtaagggtgaagataaaagtatttaacaaccgctatggcatcaatgtaagtggagtttggtcctagtgccggagcccatgctattccaggcattggctctttagatgccagtcatgggggaaccctgagggtgtgggtagagtagcaggggccacctaagagattaaaaacagagtctgttttccaaccagtgtggaagcaattaaatatrcgtaacagtgctacggccacaccagcacctcctggctgaaggtcagcccacactctggtccatgaggcagcaaggccagtgctgtgccaagcccggtaaggccaagtgccgaggcccagccttccctgccactcctctgagagggcagaacacacatatccaagtaggctacccaccactgggtagggatttctgtaaagatgggaaaggctgatagattgaaataagcttctgtgaaagtctggatttactgaggacctcccctgaggagggaccgttgggaccgcagattctgcagctggtgtggggttcaggtcagtttgtcaggatgctttaaggtgattagtaaatatacctcagcttagacttgggctgctccttctagcaaagcaggctccagtggggcctcatcatacaggatgacaagactggggccctgttcaccttgaacatgcccctgggccaagatggggcttcacccctccccagagtaagagctggggctgacagtcccaccctgtcattcctaatagcccaaacgcagaagcactgagcaagagagccctttcttgccaagccagtgctcttttggtatatggcatacagctccattggaggggacacatcactggctttatctggtggaaatgtacctttcccttaagttcctccttagtgccatcacagcaggtgaatgggtgccctacggggccctccttcccccaccaggaacagatggaacctgccacccaggatcctgatctgccctgcactgagcactcagtggataaacactcctccagcccagacacactcctcctcttgggcaggagcaatccagagttgttatttttcttagaaggagcctcttttccctctattttttaaattgaaatataatagctgcatcagccctgaaaagccaaattcaaccacatggctggagaatcatttgtcatggccccgccttctcttctgatactaatggagcttcatgacccacggtcagcccccaaaccaaagttgtcccaacagaggaggccagtgaggcagagacagagctctcccactctcagaccctcttttgtcttcattttcctctcccacttagcacatgtgtgcttgagggtggctgggaatgtgatatacagcaccctgatcctaacaggtgtgattgttacgtaagacgctgatactgggccttgtattgcttttaaagtttcctctgctcagcatcatttcatgccaaagtgctgctatgggctgctttgtgtgcacaaaattgctttttccacctcggaaatgcagctttccctagggggaggcctacaacaggacgaccattctgagccagtgagtctattgcatggtgttttgagaaagggaattttagtgacaccttatgccatttcaagaggagaaatgcaggctggcagagcaatttccagaaatggaatttgcctgcaaatagtataaacaacactaaatttactgtgccaggaaatcttcctgaactccttgaactcatacacacaggtatttgagtcctgaataaagtgttggaaagcactgcagatgcggtcacctgactgaccacctgggttttctattaccagtgaatttcttttattcaccttcccttgaccaagaaattgggtttcttttccctcagcctgcacttactcttctattaagaccagaaaataaaataattttccgttgagtcam

SEQ ID NO: 88 - DNA, 8646 bp, Homo sapiens
gtgaatcttatccttcttrtccacagggaatttgccaaagagagagagagagtggagaaccgaagggctttcatgaagctgcggcgccagcagcagattgagcgtgagctgaatggctaccgtgcctggatagacaaagcagaggaagtcatgctcgctgaagaaaataaaaatgctggaacatcmgccttagaagtgcttcgaagggcaaccatcaagaggagccggacagaggccatgactcgagactccagtgatgagcactgtgttgatatctcctctgtgggcacacctctggcccgagccagtatcaaaagtkcaaaggtagacggggtctcttatttccggcacaaggaaaggcttctgcgcatctccattcgccacatggttaaatcccaggtgttttactggattgtgctgagccttgtggcactcaacactgcctgtgtggccattgtccatcacaaccagccccagtggctcacccacctcctctactatgcagaatttctgtttctgggactcttcctcttggagatgtccctgaagatgtatggcatggggcctcgcctttattttcactcttcattcaactgctttgattttggggtcacagtgggcagtatctttgaagtggtctgggcaatcttcagacctggtacgtcttttggaatcagtgtcttgcgagccctccggcttctaagaatatttaaaataaccaagtattgggcttccctacggaatttggtggtctccttgatgagctcaatgaagtctatcatcagtttgcttttcctcctcttcctcttcatcgttgtctttgctctcctaggaatgcagttatttggaggcaggtttaactttaatgatgggactccttcggcaaattttgataccttccctgcagccatcatgactgtgttccagatcctgacgggtgaggactggaatgaggtgatgtacaatgggatccgctcccagggtggggtcagctcaggcatgtggtctgccatctacttcattgtgctcaccttgtttggcaactacacgctactgaatgtgttcttggctatcgctgtggataatctcgccaacgcccaggaactgaccaaggatgaacaggaggaagaagaggccttcaaccagaaacatgcactgcagaaggccaaggaggtcagcccgatgtctgcacccaacatgccttcgatcgaaagagacagaaggagaagacaccacatgtcgatgtgggagccacgcagcagccacctgagggagcggaggcgccggcaccacatgtccgtgtgggagcagcgtaccagccagctgaggaagcacatgcagatgtccagccaggaggccctcaacagagaggaggcgccgaccatgaacccgctcaaccccctcaacccgctcagctccctcaacccgctcaatgcccaccccagcctttatcggcgacccagggccattgagggcctggccctgggcctggccctggagaagttcgaggaggagcgcatcagccgtggggggtccctcaagggggawggaggggaccgatccagtgccctggacaaccagaggacccctttgtccctgggccagcgggagccaccatggctggccaggccctgtcatggaaactgtgacccgactcagcaggaggcagggggaggagaggctgtggtgacctttgaggaccgggccaggcacaggcagagccaacggcgcagccggcatcgccgcgtcaggacagaaggcaaggagtcctcttcagcctcccggagcaggtctgccagccaggaacgcagtctggatgaagccatgcccactgaaggggagaaggaccatgagctcaggggcaaccatggtgccaaggagccaacgatccaagaagagagagcccaggatttaaggaggaccaacagtctgatggtgtccagaggctccgggctggcaggaggccttgatgaggctgacacccccctagtcctgccccatcctgagctggaagtggggaagcacgtggtgctgacggagcaggagccagaaggcagcagtgagcaggccctgctggggaatgtgcagctagacatgggccgggtcatcagccagagcgagcctgacctctcctgcatcacggccaacacggacaaggccaccaccgagagcaccagcgtcaccgtcgccatccccgacgtggaccccttggtggactcaaccgtggtgcacattagcaacaagacggatggggaagccagtcccttgaaggaggcagagatcagagaggatgaggaggaggtggagaagaagaagcagaagaaggagaagcgtgagacaggcaaagccatggtgccccacagctcaatgttcatcttcagcaccaccaacccgatccggagggcctgccactacatygtgaacctgcgctactttgagatgtgcatcctcctggtgattgcagccagcagcatcgccctggcggcagaggaccccgtcctgaccaactcggagcgcaacaaagtcctgaggtattttgactatgtgttcacgggcgtgttcacctttgagatggttataaagatgatagaccaaggcttgatcctgcaggatgggtcctacttccgagacttgtggaacatcctggactttgtggtggtcgttggcgcattggtggcctttgctctggcaaccaacaaaggacgggacatcaagaccatcaagtctctgcgggtgctccgagttctaaggccactgaaaaccatcaagcgcttgcccaagctcaaggccgtcttcgactgcgtagtgacctccttgaagaatgtcttcaacatactcattgtgtacaagctcttcatgttcatctttgctgtcatcgcagttcagctcttcaagggaaagttcttttattgcacggacagttccaaggacacagagaaggagtgcataggcaactatgtagatcaygagaaaaacaagatggaggtgaagggccgggaatggaagcgccatgaattccactacgacaacattatctgggccctgctgaccctcttcaccgtctccacaggggaaggatggcctcaagttctgcagcactctgtagatgtgacagaggaagaccgaggcccaagccgcagcaaccgcatggagatgtctatcttttatgtrgtctactttgtggtcttccccttcttctttgtcaatatctttgtggctctcatcatcatcaccttccaggagcaaggggataagatgatggaggagtgcagcctggagaagaatgagagggcgtgcatcgacttcgccatcagcgccaaacctctcacccgctacatgccgcagaacagacacaccttccagtaccgcgtgtggcactttgtggtgtctccgtcctttgagtacaccattatggccatgatcgccttgaatactgttgtgctgatgatgaagtattattctgctccctgtacctatgagctggccctgaagtacctgaatatcgccttcaccatggtgttttccctggaatgtgtcctgaaggtcatcgcttttggctttttgaactatttccgagacacctggaatatctttgacttcatcaccgtgattggcagtatcacagaaattatcctgacagacagcaagctggtgaacaccagtggcttcaatatgagctttctgaagctcttccgagctgcccgcctcataaagctcctgcgtcagggctataccatacgcattttgctgtggacctttgtgcagtcctttaaggccctcccttatgtctgccttttaattgccatgcttttcttcatttatgccatcattgggatgcaggtatttggaaacataaaattagacgaggagagtcacatcaaccggcacaacaacttccggagtttctttgggtccctaatgctactcttcaggagtgccacaggtgaggcctggcaggagattatgctgtcatgccttggggagaagggctgtgagcctgacaccaccgcaccatcagggcagaacgagaaygaacgctgcggcaccgatctggcctacgtgtactttgtctccttcatcttcttctgctccttcttgatgctcaacctgtttgtggccgtcatcatggacaactttgagtacctgactcgggactcctccatcctggggcctcaccacttggacgagtttgtccgcgtctgggcagaatatgaccgagcagcatgtggccgcatccattacactgagatgtatgaaatgctgactctcatgtcacctccgctaggcctcggcaagagatgtccctccaaagtggcatataagaggttggtcctgatgaacatgccagtagctgaggacatgacggtccacttcacctccacacttatggctctgatccggacagctctggacattaaaattgccaaaggtggtgcagacaggcagcagctagactcagagctacaaaaggagaccctagccatctggcctcacctatcccagaagatgctggatctgcttgtgcccatgcccaaagcctctgacctgactgtgggcaaaatctatgcagcaatgatgatcatggactactataagcagagtaaggtgaagaagcagaggcagcagctggaggaacagaaaaatgcccccatgttccagcgcatggagccttcatctctgcctcaggagatcattgctaatgccaaagccctgccttacctccagcaggaccccgtttcaggcctgagtggccggagtggatacccttcgatgagtccmctctctccccaggatatattccarttggcttgtatggaccccrccgatgacggacagttccaagaacggcagtctctggagccagaggttagtgaattaaaaagcgtgcagccctctaaccatggcatctaccttccttcggacacccaggagcatgcgggatctgggagggcatcttctatgccacgtctgactgtggatccccaggtggtgacagaccctagctccatgagacgttcattttccactattcgggataagcgttcaaattcctcgtggttggaggaattctccatggagcgaagcagtgaaaatacctacaagtcccgtcgccggagttaccactcctccttgcggctgtcagcccaccgcctgaactctgattcaggccacaagtctgacactcaccgctcagggggcagggagcggggacgatcaaaagagcgaaagcatcttctctctcctgatgtctcccgctgcaattcagaagagcgagggacccaggctgactgggagtccccagagcgccgtcaatccaggtcacccagtgagggcaggtcacagacgcccaacagacagggcacaggttccctaagtgagagctccatcccctctgtctctgacaccagcaccccaagaagaagtcgtcrgcagctcccacccgtcccgccaaagccccggcccctcctttcctacagctccctgattcgacacgcgggcagcatctctccacctgctgatggaagygaggagggctccccgctgacctcccaagctctggagagcaacaatgcttgcctgaccgagtcttccaactctccgcacccccagcagagccaacatgcctccccacagcgctacatctccgagccctacttggccctgcacgaagactcccacgcctcagactgtggtgaggaggagacgctcactttygaagcagccgtggctactagcctgggccgttccaacaccatcggctcagccccacccctgcggcatagctggcagatgcccaacgggcactatcggcggcggaggcgcggggggcctgggccaggcatgatgtgtggggctgtcaacaacctgctaagtgacacggaagaagatgacaaatgctagaggctgctcccccctccgatgcatgctcttctctcacatggagaaaaccaagacagaattgggaagccagtgcggcccgggggggaggaagagggaaaaggaagatggaaggacaccatgcattatcagagaagaggaagtaaaggacaatcagaacaccagtcaaacccaccaaattgctttattcccctttgcaagatgggcactgccatagtyctgcctctttgctggggaaagaaaccaggaacgtggagggttattactgcgggagaagggacacgaggatggctttgcttccccttgccccttcccacttttctaaaagctgtggagggatctagctggcctatgtctacactcagtgccctgagaagcctggaagactttctggctcttaactggggagtagtggagaccataggagaggactctcctccctcaccagctcttacgcctcagccagcaccactgccaccagggcaactgcagcagcatctcatgcataaccctgtggcttgcttcccccagggcagcacaggctaagtcaggaacatcggatgccagggagggaggagaaagccgaagcgaaaggggtcagggtgctgaggcaacagcagcaagggctggtctggacaagaaaagccatagcccggcagcccctaccatgagggagacagagaaacagaactggtggtgctggggggtatagccccccatccttgaggcctgtcacccacacagtaggtgctgagagttaggacaggtcaggaagtcccccagggtccacaaaggtgcctgaggctctggtaagggtgaagataaaagtatttaacaaccgctatggcatcaatgtaagtggagtttggtcctagtgccggagcccatgctattccaggcattggctctttagatgccagtcatgggggaaccctgagggtgtgggtagagtagcaggggccacctaagagattaaaaacagagtctgttttccaaccagtgtggaagcaattaaatatrcgtaacagtgctacggccacaccagcacctcctggctgaaggtcagcccacactctggtccatgaggcagcaaggccagtgctgtgccaagcccggtaaggccaagtgccgaggcccagccttccctgccactcctctgagagggcagaacacacatatccaagtaggctacccaccactgggtagggatttctgtaaagatgggaaaggctgatagattgaaataagcttctgtgaaagtctggatttactgaggacctcccctgaggagggaccgttgggaccgcagattctgcagctggtgtggggttcaggtcagtttgtcaggatgctttaaggtgattagtaaatatacctcagcttagacttgggctgctccttctagcaaagcaggctccagtggggcctcatcatacaggatgacaagactggggccctgttcaccttgaacatgcccctgggccaagatggggcttcacccctccccagagtaagagctggggctgacagtcccaccctgtcattcctaatagcccaaacgcagaagcactgagcaagagagccctttcttgccaagccagtgctcttttggtatatggcatacagctccattggaggggacacatcactggctttatctggtggaaatgtacctttcccttaagttcctccttagtgccatcacagcaggtgaatgggtgccctacggggccctccttcccccaccaggaacagatggaacctgccacccaggatcctgatctgccctgcactgagcactcagtggataaacactcctccagcccagacacactcctcctcttgggcaggagcaatccagagttgttatttttcttagaaggagcctcttttccctctattttttaaattgaaatataatagctgcatcagccctgaaaagccaaattcaaccacatggctggagaatcatttgtcatggccccgccttctcttctgatactaatggagcttcatgacccacggtcagcccccaaaccaaagttgtcccaacagaggaggccagtgaggcagagacagagctctcccactctcagaccctcttttgtcttcattttcctctcccacttagcacatgtgtgcttgagggtggctgggaatgtgatatacagcaccctgatcctaacaggtgtgattgttacgtaagacgctgatactgggccttgtattgcttttaaagtttcctctgctcagcatcatttcatgccaaagtgctgctatgggctgctttgtgtgcacaaaattgctttttccacctcggaaatgcagctttccctagggggaggcctacaacaggacgaccattctgagccagtgagtctattgcatggtgttttgagaaagggaattttagtgacaccttatgccatttcaagaggagaaatgcaggctggcagagcaatttccagaaatggaatttgcctgcaaatagtataaacaacactaaatttactgtgccaggaaatcttcctgaactccttgaactcatacacacaggtatttgagtcctgaataaagtgttggaaagcactgcagatgcggtcacctgactgaccacctgggttttctattaccagtgaatttcttttattcaccttcccttgaccaagaaattgggtttcttttccctcagcctgcacttactcttctattaagaccagaaaataaaataattttccgttgagtcam

SEQ ID NO: 89 - DNA, 9917 bp, Homo sapiens
gatgcgtggactgagcccagaccgcaggctgcccgagcccgccccctgcccggctgcggggagccctgagcccaggtccgcgggccgccgccaacgccacgtcctggccctgccggaagaagaggcatggcggccccagcagtgcgctctgctcgaggccgacgcctcggacgaggtgggcatgctgccggcttccccgcgcgccgcctctggcttcgacaacttcttccaggtgcaggagggcgagggccagggctgggagggcgccatggcactggaggcgggctccagccctttcctgccggtgagccccgaggtcatgaagcggcggcgcgggggcctcatcgagcagcgcgacatcatcaaggcccacgaggcgcacaagatgcagagcaccccgcaggcccggcgcaaggaatgggagatggctcgcttcggggaggcggtggtcgccaggccagggtccggcgatggagactcggaccagagcaggaaccggcaaggaacccccgtgccggcctcggggcaggcggccgcctacaagcagacgaaagcacagagggcgcggactatggctttgtacaaccccattcccgtccggcagaactgtttcaccgtcaacagatccctgttcatcttcggagaagataacattgtcaggaaatatgccaagaagctcatcgattggccgccatttgagtacatgatcctggccaccatcattgccaactgcatcgtcctggccctggagcagcatcttcctgaggatgacaagacccccatgtcccgaagactggagaagacagaaccttatttcattgggatcttttgctttgaagctgggatcaaaattgtggccctggggttcatcttccataagggctcttacctccgcaatggctggaatgtcatggacttcatcgtsgtcctcagtggcatcctggccactgcaggaacccacttcaatactcacgtggacctgaggaccctccgggctgtgcgtgtcctgcggcctttgaagctcgtgtcagggatacctagcctgcagattgtgttgaagtccatcatgaaggccatggtacctcttctgcagattggccttctgctcttctttgccatcctgatgtttgctatcattggtttggagttctacagtggcaagttacatcgagcrtgcttcatgaacaattcaggtattctagaaggatttgacccccctcacccatgtggtgtgcagggctgcccagctggttatgaatgcaaggactggatcggccccaatgatgggatcacccagtttgataacatcctttttgctgtgctgactgtcttccagtgcatcaccatggaagggtggaccactgtgctgtacaataccaatgatgccttaggagccacctggaattggctgtacttcatccccctcatcatcattggatccttctttgttctcaacctagtcctgggagtgctttccggggaatttgccaaagagagagagagagtggagaaccgaagggctttcatgaagctgcggcgccagcagcagattgagcgtgagctgaatggctaccgtgcctggatagacaaagcagaggaagtcatgctcgctgaagaaaataaaaatgctggaacatcmgccttagaagtgcttcgaagggcaaccatcaagaggagccggacagaggccatgactcgagactccagtgatgagcactgtgttgatatctcctctgtgggcacacctctggcccgagccagtatcaaaagtkcaaaggtagacggggtctcttatttccggcacaaggaaaggcttctgcgcatctccattcgccacatggttaaatcccaggtgttttactggattgtgctgagccttgtggcactcaacactgcctgtgtggccattgtccatcacaaccagccccagtggctcacccacctcctctactatgcagaatttctgtttctgggactcttcctcttggagatgtccctgaagatgtatggcatggggcctcgcctttattttcactcttcattcaactgctttgattttggggtcacagtgggcagtatctttgaagtggtctgggcaatcttcagacctggtacgtcttttggaatcagtgtcttgcgagccctccggcttctaagaatatttaaaataaccaagtattgggcttccctacggaatttggtggtctccttgatgagctcaatgaagtctatcatcagtttgcttttcctcctcttcctcttcatcgttgtctttgctctcctaggaatgcagttatttggaggcaggtttaactttaatgatgggactccttcggcaaattttgataccttccctgcagccatcatgactgtgttccagatcctgacgggtgaggactggaatgaggtgatgtacaatgggatccgctcccagggtggggtcagctcaggcatgtggtctgccatctacttcattgtgctcaccttgtttggcaactacacgctactgaatgtgttcttggctatcgctgtggataatctcgccaacgcccaggaactgaccaaggatgaacaggaggaagaagaggccttcaaccagaaacatgcactgcagaaggccaaggaggtcagcccgatgtctgcacccaacatgccttcgatcgagagggagcggaggcgccggcaccacatgtccgtgtgggagcagcgtaccagccagctgaggaagcacatgcagatgtccagccaggaggccctcaacagagaggaggcgccgaccatgaacccgctcaaccccctcaacccgctcagctccctcaacccgctcaatgcccaccccagcctttatcggcgacccagggccattgagggcctggccctgggcctggccctggagaagttcgaggaggagcgcatcagccgtggggggtccctcaagggggawggaggggaccgatccagtgccctggacaaccagaggacccctttgtccctgggccagcgggagccaccatggctggccaggccctgtcatggaaactgtgacccgactcagcaggaggcagggggaggagaggctgtggtgacctttgaggaccgggccaggcacaggcagagccaacggcgcagccggcatcgccgcgtcaggacagaaggcaaggagtcctcttcagcctcccggagcaggtctgccagccaggaacgcagtctggatgaagccatgcccactgaaggggagaaggaccatgagctcaggggcaaccatggtgccaaggagccaacgatccaagaagagagagcccaggatttaaggaggaccaacagtctgatggtgtccagaggctccgggctggcaggaggccttgatgaggctgacacccccctagtcctgccccatcctgagctggaagtggggaagcacgtggtgctgacggagcaggagccagaaggcagcagtgagcaggccctgctggggaatgtgcagctagacatgggccgggtcatcagccagagcgagcctgacctctcctgcatcacggccaacacggacaaggccaccaccgagagcaccagcgtcaccgtcgccatccccgacgtggaccccttggtggactcaaccgtggtgcacattagcaacaagacggatggggaagccagtcccttgaaggaggcagagatcagagaggatgaggaggaggtggagaagaagaagcagaagaaggagaagcgtgagacaggcaaagccatggtgccccacagctcaatgttcatcttcagcaccaccaacccgatccggagggcctgccactacatygtgaacctgcgctactttgagatgtgcatcctcctggtgattgcagccagcagcatcgccctggcggcagaggaccccgtcctgaccaactcggagcgcaacaaagtcctgaggtattttgactatgtgttcacgggcgtgttcacctttgagatggttataaagatgatagaccaaggcttgatcctgcaggatgggtcctacttccgagacttgtggaacatcctggactttgtggtggtcgttggcgcattggtggcctttgctctggcgtaaaaccaacaaaggacgggacatcaagaccatcaagtctctgcgggtgctccgagttctaaggccactgaaaaccatcaagcgcttgcccaagctcaaggccgtcttcgactgcgtagtgacctccttgaagaatgtcttcaacatactcattgtgtacaagctcttcatgttcatctttgctgtcatcgcagttcagctcttcaagggaaagttcttttattgcacggacagttccaaggacacagagaaggagtgcataggcaactatgtagatcaygagaaaaacaagatggaggtgaagggccgggaatggaagcgccatgaattccactacgacaacattatctgggccctgctgaccctcttcaccgtctccacaggggaaggatggcctcaagttctgcagcactctgtagatgtgacagaggaagaccgaggcccaagccgcagcaaccgcatggagatgtctatcttttatgtrgtctactttgtggtcttccccttcttctttgtcaatatctttgtggctctcatcatcatcaccttccaggagcaaggggataagatgatggaggagtgcagcctggagaagaatgagagggcgtgcatcgacttcgccatcagcgccaaacctctcacccgctacatgccgcagaacagacacaccttccagtaccgcgtgtggcactttgtggtgtctccgtcctttgagtacaccattatggccatgatcgccttgaatactgttgtgctgatgatgaagtattattctgctccctgtacctatgagctggccctgaagtacctgaatatcgccttcaccatggtgttttccctggaatgtgtcctgaaggtcatcgcttttggctttttgaactatttccgagacacctggaatatctttgacttcatcaccgtgattggcagtatcacagaaattatcctgacagacagcaagctggtgaacaccagtggcttcaatatgagctttctgaagctcttccgagctgcccgcctcataaagctcctgcgtcagggctataccatacgcattttgctgtggacctttgtgcagtcctttaaggccctcccttatgtctgccttttaattgccatgcttttcttcatttatgccatcattgggatgcaggtatttggaaacataaaattagacgaggagagtcacatcaaccggcacaacaacttccggagtttctttgggtccctaatgctactcttcaggagtgccacaggtgaggcctggcaggagattatgctgtcatgccttggggagaagggctgtgagcctgacaccaccgcaccatcagggcagaacgagaaygaacgctgcggcaccgatctggcctacgtgtactttgtctccttcatcttcttctgctccttcttgatgctcaacctgtttgtggccgtcatcatggacaactttgagtacctgactcgggactcctccatcctggggcctcaccacttggacgagtttgtccgcgtctgggcagaatatgaccgagcagcatgtggccgcatccattacactgagatgtatgaaatgctgactctcatgtcacctccgctaggcctcggcaagagatgtccctccaaagtggcatataagaggttggtcctgatgaacatgccagtagctgaggacatgacggtccacttcacctccacacttatggctctgatccggacagctctggacattaaaattgccaaaggtggtgcagacaggcagcagctagactcagagctacaaaaggagaccctagccatctggcctcacctatcccagaagatgctggatctgcttgtgcccatgcccaaagcctctgacctgactgtgggcaaaatctatgcagcaatgatgatcatggactactataagcagagtaaggtgaagaagcagaggcagcagctggaggaacagaaaaatgcccccatgttccagcgcatggagccttcatctctgcctcaggagatcattgctaatgccaaagccctgccttacctccagcaggaccccgtttcaggcctgagtggccggagtggatacccttcgatgagtccmctctctccccaggatatattccarttggcttgtatggaccccrccgatgacggacagttccaagaacggcagtctctggtggtgacagaccctagctccatgagacgttcattttccactattcgggataagcgttcaaattcctcgtggttggaggaattctccatggagcgaagcagtgaaaatacctacaagtcccgtcgccggagttaccactcctccttgcggctgtcagcccaccgcctgaactctgattcaggccacaagtctgacactcaccgctcagggggcagggagcggggacgatcaaaagagcgaaagcatcttctctctcctgatgtctcccgctgcaattcagaagagcgagggacccaggctgactgggagtccccagagcgccgtcaatccaggtcacccagtgagggcaggtcacagacgcccaacagacagggcacaggttccctaagtgagagctccatcccctctgtctctgacaccagcaccccaagaagaagtcgtcrgcagctcccacccgtcccgccaaagccccggcccctcctttcctacagctccctgattcgacacgcgggcagcatctctccacctgctgatggaagygaggagggctccccgctgacctcccaagctctggagagcaacaatgcttgcctgaccgagtcttccaactctccgcacccccagcagagccaacatgcctccccacagcgctacatctccgagccctacttggccctgcacgaagactcccacgcctcagactgtggtgaggaggagacgctcactttygaagcagccgtggctactagcctgggccgttccaacaccatcggctcagccccacccctgcggcatagctggcagatgcccaacgggcactatcggcggcggaggcgcggggggcctgggccaggcatgatgtgtggggctgtcaacaacctgctaagtgacacggaagaagatgacaaatgctagaggctgctcccccctccgatgcatgctcttctctcacatggagaaaaccaagacagaattgggaagccagtgcggcccgggggggaggaagagggaaaaggaagatggaaggacaccatgcattatcagagaagaggaagtaaaggacaatcagaacaccagtcaaacccaccaaattgctttattcccctttgcaagatgggcactgccatagtyctgcctctttgctggggaaagaaaccaggaacgtggagggttattactgcgggagaagggacacgaggatggctttgcttccccttgccccttcccacttttctaaaagctgtggagggatctagctggcctatgtctacactcagtgccctgagaagcctggaagactttctggctcttaactggggagtagtggagaccataggagaggactctcctccctcaccagctcttacgcctcagccagcaccactgccaccagggcaactgcagcagcatctcatgcataaccctgtggcttgcttcccccagggcagcacaggctaagtcaggaacatcggatgccagggagggaggagaaagccgaagcgaaaggggtcagggtgctgaggcaacagcagcaagggctggtctggacaagaaaagccatagcccggcagcccctaccatgagggagacagagaaacagaactggtggtgctggggggtatagccccccatccttgaggcctgtcacccacacagtaggtgctgagagttaggacaggtcaggaagtcccccagggtccacaaaggtgcctgaggctctggtaagggtgaagataaaagtatttaacaaccgctatggcatcaatgtaagtggagtttggtcctagtgccggagcccatgctattccaggcattggctctttagatgccagtcatgggggaaccctgagggtgtgggtagagtagcaggggccacctaagagattaaaaacagagtctgttttccaaccagtgtggaagcaattaaatatrcgtaacagtgctacggccacaccagcacctcctggctgaaggtcagcccacactctggtccatgaggcagcaaggccagtgctgtgccaagcccggtaaggccaagtgccgaggcccagccttccctgccactcctctgagagggcagaacacacatatccaagtaggctacccaccactgggtagggatttctgtaaagatgggaaaggctgatagattgaaataagcttctgtgaaagtctggatttactgaggacctcccctgaggagggaccgttgggaccgcagattctgcagctggtgtggggttcaggtcagtttgtcaggatgctttaaggtgattagtaaatatacctcagcttagacttgggctgctccttctagcaaagcaggctccagtggggcctcatcatacaggatgacaagactggggccctgttcaccttgaacatgcccctgggccaagatggggcttcacccctccccagagtaagagctggggctgacagtcccaccctgtcattcctaatagcccaaacgcagaagcactgagcaagagagccctttcttgccaagccagtgctcttttggtatatggcatacagctccattggaggggacacatcactggctttatctggtggaaatgtacctttcccttaagttcctccttagtgccatcacagcaggtgaatgggtgccctacggggccctccttcccccaccaggaacagatggaacctgccacccaggatcctgatctgccctgcactgagcactcagtggataaacactcctccagcccagacacactcctcctcttgggcaggagcaatccagagttgttatttttcttagaaggagcctcttttccctctattttttaaattgaaatataatagctgcatcagccctgaaaagccaaattcaaccacatggctggagaatcatttgtcatggccccgccttctcttctgatactaatggagcttcatgacccacggtcagcccccaaaccaaagttgtcccaacagaggaggccagtgaggcagagacagagctctcccactctcagaccctcttttgtcttcattttcctctcccacttagcacatgtgtgcttgagggtggctgggaatgtgatatacagcaccctgatcctaacaggtgtgattgttacgtaagacgctgatactgggccttgtattgcttttaaagtttcctctgctcagcatcatttcatgccaaagtgctgctatgggctgctttgtgtgcacaaaattgctttttccacctcggaaatgcagctttccctagggggaggcctacaacaggacgaccattctgagccagtgagtctattgcatggtgttttgagaaagggaattttagtgacaccttatgccatttcaagaggagaaatgcaggctggcagagcaatttccagaaatggaatttgcctgcaaatagtataaacaacactaaatttactgtgccaggaaatcttcctgaactccttgaactcatacacacaggtatttgagtcctgaataaagtgttggaaagcactgcagatgcggtcacctgactgaccacctgggttttctattaccagtgaatttcttttattcaccttcccttgaccaagaaattgggtttcttttccctcagcctgcacttactcttctattaagaccagaaaataaaataattttccgttgagtcam

SEQ ID NO: 90 - DNA, 8460 bp, Homo sapiens
gtgaatcttatccttcttrtccacagggaatttgccaaagagagagagagagtggagaaccgaagggctttcatgaagctgcggcgccagcagcagattgagcgtgagctgaatggctaccgtgcctggatagacaaagcagaggaagtcatgctcgctgaagaaaataaaaatgctggaacatcmgccttagaagtgcttcgaagggcaaccatcaagaggagccggacagaggccatgactcgagactccagtgatgagcactgtgttgatatctcctctgtgggcacacctctggcccgagccagtatcaaaagtkcaaaggtagacggggtctcttatttccggcacaaggaaaggcttctgcgcatctccattcgccacatggttaaatcccaggtgttttactggattgtgctgagccttgtggcactcaacactgcctgtgtggccattgtccatcacaaccagccccagtggctcacccacctcctctactatgcagaatttctgtttctgggactcttcctcttggagatgtccctgaagatgtatggcatggggcctcgcctttattttcactcttcattcaactgctttgattttggggtcacagtgggcagtatctttgaagtggtctgggcaatcttcagacctggtacgtcttttggaatcagtgtcttgcgagccctccggcttctaagaatatttaaaataaccaagtattgggcttccctacggaatttggtggtctccttgatgagctcaatgaagtctatcatcagtttgcttttcctcctcttcctcttcatcgttgtctttgctctcctaggaatgcagttatttggaggcaggtttaactttaatgatgggactccttcggcaaattttgataccttccctgcagccatcatgactgtgttccagatcctgacgggtgaggactggaatgaggtgatgtacaatgggatccgctcccagggtggggtcagctcaggcatgtggtctgccatctacttcattgtgctcaccttgtttggcaactacacgctactgaatgtgttcttggctatcgctgtggataatctcgccaacgcccaggaactgaccaaggatgaacaggaggaagaagaggccttcaaccagaaacatgcactgcagaaggccaaggaggtcagcccgatgtctgcacccaacatgccttcgatcgagagggagcggaggcgccggcaccacatgtccgtgtgggagcagcgtaccagccagctgaggaagcacatgcagatgtccagccaggaggccctcaacagagaggaggcgccgaccatgaacccgctcaaccccctcaacccgctcagctccctcaacccgctcaatgcccaccccagcctttatcggcgacccagggccattgagggcctggccctgggcctggccctggagaagttcgaggaggagcgcatcagccgtggggggtccctcaagggggawggaggggaccgatccagtgccctggacaaccagaggacccctttgtccctgggccagcgggagccaccatggctggccaggccctgtcatggaaactgtgacccgactcagcaggaggcagggggaggagaggctgtggtgacctttgaggaccgggccaggcacaggcagagccaacggcgcagccggcatcgccgcgtcaggacagaaggcaaggagtcctcttcagcctcccggagcaggtctgccagccaggaacgcagtctggatgaagccatgcccactgaaggggagaaggaccatgagctcaggggcaaccatggtgccaaggagccaacgatccaagaagagagagcccaggatttaaggaggaccaacagtctgatggtgtccagaggctccgggctggcaggaggccttgatgaggctgacacccccctagtcctgccccatcctgagctggaagtggggaagcacgtggtgctgacggagcaggagccagaaggcagcagtgagcaggccctgctggggaatgtgcagctagacatgggccgggtcatcagccagagcgagcctgacctctcctgcatcacggccaacacggacaaggccaccaccgagagcaccagcgtcaccgtcgccatccccgacgtggaccccttggtggactcaaccgtggtgcacattagcaacaagacggatggggaagccagtcccttgaaggaggcagagatcagagaggatgaggaggaggtggagaagaagaagcagaagaaggagaagcgtgagacaggcaaagccatggtgccccacagctcaatgttcatcttcagcaccaccaacccgatccggagggcctgccactacatygtgaacctgcgctactttgagatgtgcatcctcctggtgattgcagccagcagcatcgccctggcggcagaggaccccgtcctgaccaactcggagcgcaacaaagtcctgaggtattttgactatgtgttcacgggcgtgttcacctttgagatggttataaagatgatagaccaaggcttgatcctgcaggatgggtcctacttccgagacttgtggaacatcctggactttgtggtggtcgttggcgcattggtggcctttgctctggcaaccaacaaaggacgggacatcaagaccatcaagtctctgcgggtgctccgagttctaaggccactgaaaaccatcaagcgcttgcccaagctcaaggccgtcttcgactgcgtagtgacctccttgaagaatgtcttcaacatactcattgtgtacaagctcttcatgttcatctttgctgtcatcgcagttcagctcttcaagggaaagttcttttattgcacggacagttccaaggacacagagaaggagtgcataggcaactatgtagatcaygagaaaaacaagatggaggtgaagggccgggaatggaagcgccatgaattccactacgacaacattatctgggccctgctgaccctcttcaccgtctccacaggggaaggatggcctcaagttctgcagcactctgtagatgtgacagaggaagaccgaggcccaagccgcagcaaccgcatggagatgtctatcttttatgtrgtctactttgtggtcttccccttcttctttgtcaatatctttgtggctctcatcatcatcaccttccaggagcaaggggataagatgatggaggagtgcagcctggagaagaatgagagggcgtgcatcgacttcgccatcagcgccaaacctctcacccgctacatgccgcagaacagacacaccttccagtaccgcgtgtggcactttgtggtgtctccgtcctttgagtacaccattatggccatgatcgccttgaatactgttgtgctgatgatgaagtattattctgctccctgtacctatgagctggccctgaagtacctgaatatcgccttcaccatggtgttttccctggaatgtgtcctgaaggtcatcgcttttggctttttgaactatttccgagacacctggaatatctttgacttcatcaccgtgattggcagtatcacagaaattatcctgacagacagcaagctggtgaacaccagtggcttcaatatgagctttctgaagctcttccgagctgcccgcctcataaagctcctgcgtcagggctataccatacgcattttgctgtggacctttgtgcagtcctttaaggccctcccttatgtctgccttttaattgccatgcttttcttcatttatgccatcattgggatgcaggtatttggaaacataaaattagacgaggagagtcacatcaaccggcacaacaacttccggagtttctttgggtccctaatgctactcttcaggagtgccacaggtgaggcctggcaggagattatgctgtcatgccttggggagaagggctgtgagcctgacaccaccgcaccatcagggcagaacgagaaygaacgctgcggcaccgatctggcctacgtgtactttgtctccttcatcttcttctgctccttcttgatgctcaacctgtttgtggccgtcatcatggacaactttgagtacctgactcgggactcctccatcctggggcctcaccacttggacgagtttgtccgcgtctgggcagaatatgaccgagcagcatgtggccgcatccattacactgagatgtatgaaatgctgactctcatgtcacctccgctaggcctcggcaagagatgtccctccaaagtggcatataagaggttggtcctgatgaacatgccagtagctgaggacatgacggtccacttcacctccacacttatggctctgatccggacagctctggacattaaaattgccaaaggtggtgcagacaggcagcagctagactcagagctacaaaaggagaccctagccatctggcctcacctatcccagaagatgctggatctgcttgtgcccatgcccaaagcctctgacctgactgtgggcaaaatctatgcagcaatgatgatcatggactactataagcagagtaaggtgaagaagcagaggcagcagctggaggaacagaaaaatgcccccatgttccagcgcatggagccttcatctctgcctcaggagatcattgctaatgccaaagccctgccttacctccagcaggaccccgtttcaggcctgagtggccggagtggatacccttcgatgagtccmctctctccccaggatatattccarttggcttgtatggaccccrccgatgacggacagttccaagaacggcagtctctggtggtgacagaccctagctccatgagacgttcattttccactattcgggataagcgttcaaattcctcgtggttggaggaattctccatggagcgaagcagtgaaaatacctacaagtcccgtcgccggagttaccactcctccttgcggctgtcagcccaccgcctgaactctgattcaggccacaagtctgacactcaccgctcagggggcagggagcggggacgatcaaaagagcgaaagcatcttctctctcctgatgtctcccgctgcaattcagaagagcgagggacccaggctgactgggagtccccagagcgccgtcaatccaggtcacccagtgagggcaggtcacagacgcccaacagacagggcacaggttccctaagtgagagctccatcccctctgtctctgacaccagcaccccaagaagaagtcgtcrgcagctcccacccgtcccgccaaagccccggcccctcctttcctacagctccctgattcgacacgcgggcagcatctctccacctgctgatggaagygaggagggctccccgctgacctcccaagctctggagagcaacaatgcttgcctgaccgagtcttccaactctccgcacccccagcagagccaacatgcctccccacagcgctacatctccgagccctacttggccctgcacgaagactcccacgcctcagactgtggtgaggaggagacgctcactttygaagcagccgtggctactagcctgggccgttccaacaccatcggctcagccccacccctgcggcatagctggcagatgcccaacgggcactatcggcggcggaggcgcggggggcctgggccaggcatgatgtgtggggctgtcaacaacctgctaagtgacacggaagaagatgacaaatgctagaggctgctcccccctccgatgcatgctcttctctcacatggagaaaaccaagacagaattgggaagccagtgcggcccgggggggaggaagagggaaaaggaagatggaaggacaccatgcattatcagagaagaggaagtaaaggacaatcagaacaccagtcaaacccaccaaattgctttattcccctttgcaagatgggcactgccatagtyctgcctctttgctggggaaagaaaccaggaacgtggagggttattactgcgggagaagggacacgaggatggctttgcttccccttgccccttcccacttttctaaaagctgtggagggatctagctggcctatgtctacactcagtgccctgagaagcctggaagactttctggctcttaactggggagtagtggagaccataggagaggactctcctccctcaccagctcttacgcctcagccagcaccactgccaccagggcaactgcagcagcatctcatgcataaccctgtggcttgcttcccccagggcagcacaggctaagtcaggaacatcggatgccagggagggaggagaaagccgaagcgaaaggggtcagggtgctgaggcaacagcagcaagggctggtctggacaagaaaagccatagcccggcagcccctaccatgagggagacagagaaacagaactggtggtgctggggggtatagccccccatccttgaggcctgtcacccacacagtaggtgctgagagttaggacaggtcaggaagtcccccagggtccacaaaggtgcctgaggctctggtaagggtgaagataaaagtatttaacaaccgctatggcatcaatgtaagtggagtttggtcctagtgccggagcccatgctattccaggcattggctctttagatgccagtcatgggggaaccctgagggtgtgggtagagtagcaggggccacctaagagattaaaaacagagtctgttttccaaccagtgtggaagcaattaaatatrcgtaacagtgctacggccacaccagcacctcctggctgaaggtcagcccacactctggtccatgaggcagcaaggccagtgctgtgccaagcccggtaaggccaagtgccgaggcccagccttccctgccactcctctgagagggcagaacacacatatccaagtaggctacccaccactgggtagggatttctgtaaagatgggaaaggctgatagattgaaataagcttctgtgaaagtctggatttactgaggacctcccctgaggagggaccgttgggaccgcagattctgcagctggtgtggggttcaggtcagtttgtcaggatgctttaaggtgattagtaaatatacctcagcttagacttgggctgctccttctagcaaagcaggctccagtggggcctcatcatacaggatgacaagactggggccctgttcaccttgaacatgcccctgggccaagatggggcttcacccctccccagagtaagagctggggctgacagtcccaccctgtcattcctaatagcccaaacgcagaagcactgagcaagagagccctttcttgccaagccagtgctcttttggtatatggcatacagctccattggaggggacacatcactggctttatctggtggaaatgtacctttcccttaagttcctccttagtgccatcacagcaggtgaatgggtgccctacggggccctccttcccccaccaggaacagatggaacctgccacccaggatcctgatctgccctgcactgagcactcagtggataaacactcctccagcccagacacactcctcctcttgggcaggagcaatccagagttgttatttttcttagaaggagcctcttttccctctattttttaaattgaaatataatagctgcatcagccctgaaaagccaaattcaaccacatggctggagaatcatttgtcatggccccgccttctcttctgatactaatggagcttcatgacccacggtcagcccccaaaccaaagttgtcccaacagaggaggccagtgaggcagagacagagctctcccactctcagaccctcttttgtcttcattttcctctcccacttagcacatgtgtgcttgagggtggctgggaatgtgatatacagcaccctgatcctaacaggtgtgattgttacgtaagacgctgatactgggccttgtattgcttttaaagtttcctctgctcagcatcatttcatgccaaagtgctgctatgggctgctttgtgtgcacaaaattgctttttccacctcggaaatgcagctttccctagggggaggcctacaacaggacgaccattctgagccagtgagtctattgcatggtgttttgagaaagggaattttagtgacaccttatgccatttcaagaggagaaatgcaggctggcagagcaatttccagaaatggaatttgcctgcaaatagtataaacaacactaaatttactgtgccaggaaatcttcctgaactccttgaactcatacacacaggtatttgagtcctgaataaagtgttggaaagcactgcagatgcggtcacctgactgaccacctgggttttctattaccagtgaatttcttttattcaccttcccttgaccaagaaattgggtttcttttccctcagcctgcacttactcttctattaagaccagaaaataaaataattttccgttgagtcam

SEQ ID NO: 91 - DNA, 864 bp, Homo sapiens
tttgcagggcaaagcccaacaccttcccccactggtaagaattaatatttatatttttactaattttattttcttgttgcaaagtttatatatttaactacaattttctattattaacactgaaattatttttaaggataaattttataatcatgagtgattcttgacattcacttgttcttaaactttctgcttatacgttatagagtttaataactacctaaacatgttattaaatttgtatatatattttgtgtataaatagtaacttttcccaaacttgacagtaaatcacacaacaggtttctactctcttttaatattttaagactataaaaaaatgcatttaaattagataacaaaattttatagtctgaaagcaggttaacagctgtctatgtatgttatagatatgtagataacagatttgcatatgtctatatttctttaagagtatgttgcttttttcaatggtatgcaaaacctttgagactattgagatatttttaaataataattttcaaattctactgaacacttcaatagtccttataaatgtcttaatcatgagataaatttaaaacacagagatgctgcaaataaattcatacatagtacatacaaaataagagaaaaaattaaattgcagatggttaaatatcacatcacttaactgatgttactgaaaatgtattttcctgcataatcatatggttgacagtatgcattaagaaggtaagtaaaacaatgaagacaattttgatttaatatggtaatgcacaattccaactaacgtacattcaacagatcatgaaattgggttattaaaatgaatatttttgtcattaaataaaaattcygtcc

SEQ ID NO: 92 - DNA, 5292 bp, Homo sapiens
ggaaattgttcytcgtctgataagacaacagtggagaaaggacgcatgctgtttcttagggacacggctgacttccagatatgaccatgtatttgtggcttaaactcttggcatttggctttgcctttctggacacagaagtatttgtgacagggcaaagcccaacaccttcccccactggattgactacagcaaagatgcccagtgttccactttcaagtgaccccttacctrctcacaccactgcattctcaccsgcaagcacctttgaaagagaaaatgacttctcagagaccacaacttctcttagtccagacaatacttccacccaagtatccccggactctttggataatgctagtgcttttaataccacaggtgtttcatcagtacagacgcctcaccttcccacgcacgcagactcgcagacgccctctgctggaactsacacgcagacattcagcggctccgccgccaatgcaaaactcaaccctaccccaggcagcaatgctatctcagatgtcccaggagagaggagtacagccagcacctttcctacagacccagtttccccattgacaaccaccctcagccttgcacaccacagctctgctgccttacctgcacgcacctccaacaccaccatcacagcgaacrcctcagatgcctaccttaatgcctctgaaacaaccactctgagcccttctggaagcgctgtcatttcaaccacaacaatagctactactccatctaagccaacatgtgatgaaaaatatgcaaacatcactgtggattacttatataacaaggaaactaaattatttacagcaaagctaaatgttaatgagaatgtggaatgtggaaacaatacttgcacaaacaatgaggtgcataaccttacagaatgtaaaaatgcgtctgtttccatatctcataattcatgtactgctcctgataagacattamtattagatgtgccaccaggggttgaaaagtttcagttacatgattgtacacaagttgaaaaagcagatactactatttgtttaaaatggaaaaatattraaacctttacttgtgatacacagaatattacctacagatttcartgtggtaatatgatatttgataataaagaaattaaattagaaaaccttgaacccgaacatgagtataagtgtgactcagaaatactctataataaccacaagtttactaacgcaagtaaaattattaaaacagattttgggagtccaggagagcctcagattattttttgtagaagtgaagctgcacatcaaggagtaattacctggaatccccctcaaagatcatttcataattttaycctctgttatataaaagagacagaaaaagattgcctcaatctggataaaaacctgatcaaatatgatttgcaaaatttaaaaccttatacgaaatatgttttatcattacatgcctacatcattgcaaaagtgcaacgtaatggaagtgctgcaatgtgtcatttcacaactaaaagtgctcctccaagccaggtctggaacatgactgtctccatgacatcagataatagtatgcatgtcaagtgtaggcctcccagggaccgtaatggcccccatgaacgttaccatttggaagttgaagctggaaatactctggttagaaatgagtcgcataagaattgcgatttccgtgtaaaagatcttcaatattcaacagactacacttttaaggcctattttcacaatggagactatcctggagaaccctttattttacatcattcaacatcttataattctaaggcactgatagcatttctggcatttctgattattgtgacatcaatagccctgcttgttgttctctacaaaatctatgatctacataagaaaagatcctgcaatttagatgaacagcaggagcttgttgaaagggatgatgaaaaacaactgatgaatgtggagccaatccatgcagatattttgttggaaacttataagaggaagattgctgatgaaggaagactttttctggctgaatttcagagcatcccgcgggtgttcagcaagtttcctataaaggaagctcgaaagccctttaaccagaataaaaaccgttatgttgacattcttccttatgattataaccgtgttgaactctctgagataaacggagatgcagggtcaaactacataaatgccagctatattgatggtttcaaagaacccaggaaatacattgctgcacaaggtcccagggatgaaactgttgatgatttctggaggatgatttgggaacagaaagccacagttattgtcatggtcactcgatgtgaagaaggaaacaggaacaagtgtgcagaatactggccgtcaatggaagagggyactcgggcttttggagatgttgttgtaaagatcaaccagcacaaaagatgtccagattacatcattcagaaattgaacattgtaaataaaaaagaaaaagcaactggaagagaggtgactcacattcagttcaccagctggccagaccacggggtgcctgaggatcctcacttgctcctcaaactgagaaggagagtgaatgccttcagcaatttcttcagtggtcccattgtggtgcactgcagtgctggtgttgggcgcacaggaacctatatcggaattgatgccatgctagaaggcctggaagccgagaacaaagtggatgtttatggttatgttgtcaagctaaggcgacagagatgcctgatggttcaagtagaggcccagtacatcttgatccatcaggctttggtggaatacaatcagtttggagaaacagaagtgaatttgtctgaattacatccatatctacataacatgaagaaaagggatccacccagtgagccgtctccactagaggctgaattccagagacttccttcatataggagctggaggacacagcacattggaaatcaagaagaaaataaaagtaaaaacaggaattctaatgtcatcccatatgactataacagagtgccacttaaacatgagctggaaatgagtaaagagagtgagcatgattcagatgaatcctctgatgatgacagtgattcagaggaaccaagcaaatacatcaatgcatcttttataatgagctactggaaacctgaagtgatgattgctgctcagggaccactgaaggagaccattggtgacttttggcagatgatcttccaaagaaaagtcaaagttattgttatgctgacagaactgaaacatggagaccaggaaatctgtgctcagtactggggagaaggaaagcaaacatatggagatattgaagttgacctgaaagacacagacaaatcttcaacttatacccttcgtgtctttgaactgagacattccaagaggaaagactctcgaactgtgtaccagtaccaatatacaaactggagtgtggagcagcttcctgcagaacccaaggaattaatctctatgattcaggtcgtcaaacaaaaacttccccagaagaattcctctgaagggaacaagcatcacaagagtacacctctactcattcactgcagggatggatctcagcaaacgggaatattttgtgctttgttaaatctcttagaaagtgcggaaacagaagaggtagtggatatttttcaagtggtaaaagctctacgcaaagctaggccaggcatggtttccacattcgagcaatatcaattcctatatgacgtcattgccagcacctaccctgctcagaatggacaagtaaagaaaaacaaccatcaagaagataaaattgaatttgataatgaagtggacaaagtaaagcaggatgctaaytgtgttaatccacttggtgccccagaaaagctccctgaagcaaaggaacaggctgaaggttctgaacccacgmgtggcactgaggggccagaacattctgtcaatggtcctgcaagtccagctttaaatcaaggttcataggaaaagacataaatgaggaaactccaamcctcctgttagctgttatttctatttttgtagaagtaggaagtgaaaataggtatacagtggattaattaaatgcagcgaaccaatatttgtagaagggttatattttactactgtggaaaaatatttaagatagttttgccagaacagtttgtacagacgtatgcttattttaaaattttatctcttattcagtaaaaaacaacttctttgtaatcgttatgtgtgtatatgtatgtgtgtatgggtgtgtgtttgtgtgagagacagagaaagagagagaattctttcaagtgaatctaaaagcttttgcttttcctttgtttttatgaagaaaaaatacattttatattagaagtgttaacttagcttgaaggatctgtttttaaaaatcataaactgtgtgcagactcaataaaatcatgtacatttctgaaatgacctcaagatgtcctccttgttctactcatatatatctatcttatatagtttactattttacttctagagatagtacataaaggtggtatgtgtgtgtatgctactacaaaaaagttgttaactaaattaacattgggaaatcttatattccatatattagcatttagtccaatgtctttttaagcttatttaattaaaaaatttccagtgagcttatcatgctgtctttacatggggttttcaattttgcatgctcgattattccctgtacaatatttaaaatttattgcttgatacttttgacaacaaattaggttttgtacaattgaacttaaataaatgtcattaaaataaataaatgcaatatgtattaatattcattgtataaaaatagaagaatacaaacatatttgttaaatatttacatatgaaatttaatatagctatttttatggaatttttcattgatatgaaaaatatgatattgcatatgcatagttcccatgttaaatcccattcataactttcattaaagcatttactttgaatttctccaatgcttagaatgtttttaccaggaatggatgtcgctaatcataataaaattcaaccattatttttttcttgtttataatacattgtgttatatgttcaaatatgaaatgtgtatgcacctattgaaatatgtttaatgcatttattaacatttgcaggacacttttacaggccccaattatccaatagtctaataattgtttaagatctagaaaaaaaaaatcaagaatagtggtatttttcatgaagtaataaaaactcgttttgg

SEQ ID NO: 93 - DNA, 5148 bp, Homo sapiens
ggaaattgttcytcgtctgataagacaacagtggagaaaggacgcatgctgtttcttagggacacggctgacttccagatatgaccatgtatttgtggcttaaactcttggcatttggctttgcctttctggacacagaagtatttgtgacagggcaaagcccaacaccttcccccactggattgactacagcaaagatgcccagtgttccactttcaagtgaccccttacctrctcacaccactgcattctcaccsgcaagcacctttgaaagagaaaatgacttctcagagaccacaacttctcttagtccagacaatacttccacccaagtatccccggactctttggataatgctagtgcttttaataccacaggtgtttcatcagtacagacgcctcaccttcccacgcacgcagactcgcagacgccctctgctggaactsacacgcagacattcagcggctccgccgccaatgcaaaactcaaccctaccccaggcagcaatgctatctcagatgcctaccttaatgcctctgaaacaaccactctgagcccttctggaagcgctgtcatttcaaccacaacaatagctactactccatctaagccaacatgtgatgaaaaatatgcaaacatcactgtggattacttatataacaaggaaactaaattatttacagcaaagctaaatgttaatgagaatgtggaatgtggaaacaatacttgcacaaacaatgaggtgcataaccttacagaatgtaaaaatgcgtctgtttccatatctcataattcatgtactgctcctgataagacattamtattagatgtgccaccaggggttgaaaagtttcagttacatgattgtacacaagttgaaaaagcagatactactatttgtttaaaatggaaaaatattraaacctttacttgtgatacacagaatattacctacagatttcartgtggtaatatgatatttgataataaagaaattaaattagaaaaccttgaacccgaacatgagtataagtgtgactcagaaatactctataataaccacaagtttactaacgcaagtaaaattattaaaacagattttgggagtccaggagagcctcagattattttttgtagaagtgaagctgcacatcaaggagtaattacctggaatccccctcaaagatcatttcataattttaycctctgttatataaaagagacagaaaaagattgcctcaatctggataaaaacctgatcaaatatgatttgcaaaatttaaaaccttatacgaaatatgttttatcattacatgcctacatcattgcaaaagtgcaacgtaatggaagtgctgcaatgtgtcatttcacaactaaaagtgctcctccaagccaggtctggaacatgactgtctccatgacatcagataatagtatgcatgtcaagtgtaggcctcccagggaccgtaatggcccccatgaacgttaccatttggaagttgaagctggaaatactctggttagaaatgagtcgcataagaattgcgatttccgtgtaaaagatcttcaatattcaacagactacacttttaaggcctattttcacaatggagactatcctggagaaccctttattttacatcattcaacatcttataattctaaggcactgatagcatttctggcatttctgattattgtgacatcaatagccctgcttgttgttctctacaaaatctatgatctacataagaaaagatcctgcaatttagatgaacagcaggagcttgttgaaagggatgatgaaaaacaactgatgaatgtggagccaatccatgcagatattttgttggaaacttataagaggaagattgctgatgaaggaagactttttctggctgaatttcagagcatcccgcgggtgttcagcaagtttcctataaaggaagctcgaaagccctttaaccagaataaaaaccgttatgttgacattcttccttatgattataaccgtgttgaactctctgagataaacggagatgcagggtcaaactacataaatgccagctatattgatggtttcaaagaacccaggaaatacattgctgcacaaggtcccagggatgaaactgttgatgatttctggaggatgatttgggaacagaaagccacagttattgtcatggtcactcgatgtgaagaaggaaacaggaacaagtgtgcagaatactggccgtcaatggaagagggyactcgggcttttggagatgttgttgtaaagatcaaccagcacaaaagatgtccagattacatcattcagaaattgaacattgtaaataaaaaagaaaaagcaactggaagagaggtgactcacattcagttcaccagctggccagaccacggggtgcctgaggatcctcacttgctcctcaaactgagaaggagagtgaatgccttcagcaatttcttcagtggtcccattgtggtgcactgcagtgctggtgttgggcgcacaggaacctatatcggaattgatgccatgctagaaggcctggaagccgagaacaaagtggatgtttatggttatgttgtcaagctaaggcgacagagatgcctgatggttcaagtagaggcccagtacatcttgatccatcaggctttggtggaatacaatcagtttggagaaacagaagtgaatttgtctgaattacatccatatctacataacatgaagaaaagggatccacccagtgagccgtctccactagaggctgaattccagagacttccttcatataggagctggaggacacagcacattggaaatcaagaagaaaataaaagtaaaaacaggaattctaatgtcatcccatatgactataacagagtgccacttaaacatgagctggaaatgagtaaagagagtgagcatgattcagatgaatcctctgatgatgacagtgattcagaggaaccaagcaaatacatcaatgcatcttttataatgagctactggaaacctgaagtgatgattgctgctcagggaccactgaaggagaccattggtgacttttggcagatgatcttccaaagaaaagtcaaagttattgttatgctgacagaactgaaacatggagaccaggaaatctgtgctcagtactggggagaaggaaagcaaacatatggagatattgaagttgacctgaaagacacagacaaatcttcaacttatacccttcgtgtctttgaactgagacattccaagaggaaagactctcgaactgtgtaccagtaccaatatacaaactggagtgtggagcagcttcctgcagaacccaaggaattaatctctatgattcaggtcgtcaaacaaaaacttccccagaagaattcctctgaagggaacaagcatcacaagagtacacctctactcattcactgcagggatggatctcagcaaacgggaatattttgtgctttgttaaatctcttagaaagtgcggaaacagaagaggtagtggatatttttcaagtggtaaaagctctacgcaaagctaggccaggcatggtttccacattcgagcaatatcaattcctatatgacgtcattgccagcacctaccctgctcagaatggacaagtaaagaaaaacaaccatcaagaagataaaattgaatttgataatgaagtggacaaagtaaagcaggatgctaaytgtgttaatccacttggtgccccagaaaagctccctgaagcaaaggaacaggctgaaggttctgaacccacgmgtggcactgaggggccagaacattctgtcaatggtcctgcaagtccagctttaaatcaaggttcataggaaaagacataaatgaggaaactccaamcctcctgttagctgttatttctatttttgtagaagtaggaagtgaaaataggtatacagtggattaattaaatgcagcgaaccaatatttgtagaagggttatattttactactgtggaaaaatatttaagatagttttgccagaacagtttgtacagacgtatgcttattttaaaattttatctcttattcagtaaaaaacaacttctttgtaatcgttatgtgtgtatatgtatgtgtgtatgggtgtgtgtttgtgtgagagacagagaaagagagagaattctttcaagtgaatctaaaagcttttgcttttcctttgtttttatgaagaaaaaatacattttatattagaagtgttaacttagcttgaaggatctgtttttaaaaatcataaactgtgtgcagactcaataaaatcatgtacatttctgaaatgacctcaagatgtcctccttgttctactcatatatatctatcttatatagtttactattttacttctagagatagtacataaaggtggtatgtgtgtgtatgctactacaaaaaagttgttaactaaattaacattgggaaatcttatattccatatattagcatttagtccaatgtctttttaagcttatttaattaaaaaatttccagtgagcttatcatgctgtctttacatggggttttcaattttgcatgctcgattattccctgtacaatatttaaaatttattgcttgatacttttgacaacaaattaggttttgtacaattgaacttaaataaatgtcattaaaataaataaatgcaatatgtattaatattcattgtataaaaatagaagaatacaaacatatttgttaaatatttacatatgaaatttaatatagctatttttatggaatttttcattgatatgaaaaatatgatattgcatatgcatagttcccatgttaaatcccattcataactttcattaaagcatttactttgaatttctccaatgcttagaatgtttttaccaggaatggatgtcgctaatcataataaaattcaaccattatttttttcttgtttataatacattgtgttatatgttcaaatatgaaatgtgtatgcacctattgaaatatgtttaatgcatttattaacatttgcaggacacttttacaggccccaattatccaatagtctaataattgtttaagatctagaaaaaaaaaatcaagaatagtggtatttttcatgaagtaataaaaactcgttttgg

SEQ ID NO: 94 - DNA, 5139 bp, Homo sapiens
ggcaaagcccaacaccttcccccactggattgactacagcaaagatgcccagtgttccactttcaagtgaccccttacctrctcacaccactgcattctcaccsgcaagcacctttgaaagagaaaatgacttctcagagaccacaacttctcttagtccagacaatacttccacccaagtatccccggactctttggataatgctagtgcttttaataccacaggtgtttcatcagtacagacgcctcaccttcccacgcacgcagactcgcagacgccctctgctggaactsacacgcagacattcagcggctccgccgccaatgcaaaactcaaccctaccccaggcagcaatgctatctcagatgtcccaggagagaggagtacagccagcacctttcctacagacccagtttccccattgacaaccaccctcagccttgcacaccacagctctgctgccttacctgcacgcacctccaacaccaccatcacagcgaacrcctcagatgcctaccttaatgcctctgaaacaaccactctgagcccttctggaagcgctgtcatttcaaccacaacaatagctactactccatctaagccaacatgtgatgaaaaatatgcaaacatcactgtggattacttatataacaaggaaactaaattatttacagcaaagctaaatgttaatgagaatgtggaatgtggaaacaatacttgcacaaacaatgaggtgcataaccttacagaatgtaaaaatgcgtctgtttccatatctcataattcatgtactgctcctgataagacattamtattagatgtgccaccaggggttgaaaagtttcagttacatgattgtacacaagttgaaaaagcagatactactatttgtttaaaatggaaaaatattraaacctttacttgtgatacacagaatattacctacagatttcartgtggtaatatgatatttgataataaagaaattaaattagaaaaccttgaacccgaacatgagtataagtgtgactcagaaatactctataataaccacaagtttactaacgcaagtaaaattattaaaacagattttgggagtccaggagagcctcagattattttttgtagaagtgaagctgcacatcaaggagtaattacctggaatccccctcaaagatcatttcataattttaycctctgttatataaaagagacagaaaaagattgcctcaatctggataaaaacctgatcaaatatgatttgcaaaatttaaaaccttatacgaaatatgttttatcattacatgcctacatcattgcaaaagtgcaacgtaatggaagtgctgcaatgtgtcatttcacaactaaaagtgctcctccaagccaggtctggaacatgactgtctccatgacatcagataatagtatgcatgtcaagtgtaggcctcccagggaccgtaatggcccccatgaacgttaccatttggaagttgaagctggaaatactctggttagaaatgagtcgcataagaattgcgatttccgtgtaaaagatcttcaatattcaacagactacacttttaaggcctattttcacaatggagactatcctggagaaccctttattttacatcattcaacatcttataattctaaggcactgatagcatttctggcatttctgattattgtgacatcaatagccctgcttgttgttctctacaaaatctatgatctacataagaaaagatcctgcaatttagatgaacagcaggagcttgttgaaagggatgatgaaaaacaactgatgaatgtggagccaatccatgcagatattttgttggaaacttataagaggaagattgctgatgaaggaagactttttctggctgaatttcagagcatcccgcgggtgttcagcaagtttcctataaaggaagctcgaaagccctttaaccagaataaaaaccgttatgttgacattcttccttatgattataaccgtgttgaactctctgagataaacggagatgcagggtcaaactacataaatgccagctatattgatggtttcaaagaacccaggaaatacattgctgcacaaggtcccagggatgaaactgttgatgatttctggaggatgatttgggaacagaaagccacagttattgtcatggtcactcgatgtgaagaaggaaacaggaacaagtgtgcagaatactggccgtcaatggaagagggyactcgggcttttggagatgttgttgtaaagatcaaccagcacaaaagatgtccagattacatcattcagaaattgaacattgtaaataaaaaagaaaaagcaactggaagagaggtgactcacattcagttcaccagctggccagaccacggggtgcctgaggatcctcacttgctcctcaaactgagaaggagagtgaatgccttcagcaatttcttcagtggtcccattgtggtgcactgcagtgctggtgttgggcgcacaggaacctatatcggaattgatgccatgctagaaggcctggaagccgagaacaaagtggatgtttatggttatgttgtcaagctaaggcgacagagatgcctgatggttcaagtagaggcccagtacatcttgatccatcaggctttggtggaatacaatcagtttggagaaacagaagtgaatttgtctgaattacatccatatctacataacatgaagaaaagggatccacccagtgagccgtctccactagaggctgaattccagagacttccttcatataggagctggaggacacagcacattggaaatcaagaagaaaataaaagtaaaaacaggaattctaatgtcatcccatatgactataacagagtgccacttaaacatgagctggaaatgagtaaagagagtgagcatgattcagatgaatcctctgatgatgacagtgattcagaggaaccaagcaaatacatcaatgcatcttttataatgagctactggaaacctgaagtgatgattgctgctcagggaccactgaaggagaccattggtgacttttggcagatgatcttccaaagaaaagtcaaagttattgttatgctgacagaactgaaacatggagaccaggaaatctgtgctcagtactggggagaaggaaagcaaacatatggagatattgaagttgacctgaaagacacagacaaatcttcaacttatacccttcgtgtctttgaactgagacattccaagaggaaagactctcgaactgtgtaccagtaccaatatacaaactggagtgtggagcagcttcctgcagaacccaaggaattaatctctatgattcaggtcgtcaaacaaaaacttccccagaagaattcctctgaagggaacaagcatcacaagagtacacctctactcattcactgcagggatggatctcagcaaacgggaatattttgtgctttgttaaatctcttagaaagtgcggaaacagaagaggtagtggatatttttcaagtggtaaaagctctacgcaaagctaggccaggcatggtttccacattcgagcaatatcaattcctatatgacgtcattgccagcacctaccctgctcagaatggacaagtaaagaaaaacaaccatcaagaagataaaattgaatttgataatgaagtggacaaagtaaagcaggatgctaaytgtgttaatccacttggtgccccagaaaagctccctgaagcaaaggaacaggctgaaggttctgaacccacgmgtggcactgaggggccagaacattctgtcaatggtcctgcaagtccagctttaaatcaaggttcataggaaaagacataaatgaggaaactccaamcctcctgttagctgttatttctatttttgtagaagtaggaagtgaaaataggtatacagtggattaattaaatgcagcgaaccaatatttgtagaagggttatattttactactgtggaaaaatatttaagatagttttgccagaacagtttgtacagacgtatgcttattttaaaattttatctcttattcagtaaaaaacaacttctttgtaatcgttatgtgtgtatatgtatgtgtgtatgggtgtgtgtttgtgtgagagacagagaaagagagagaattctttcaagtgaatctaaaagcttttgcttttcctttgtttttatgaagaaaaaatacattttatattagaagtgttaacttagcttgaaggatctgtttttaaaaatcataaactgtgtgcagactcaataaaatcatgtacatttctgaaatgacctcaagatgtcctccttgttctactcatatatatctatcttatatagtttactattttacttctagagatagtacataaaggtggtatgtgtgtgtatgctactacaaaaaagttgttaactaaattaacattgggaaatcttatattccatatattagcatttagtccaatgtctttttaagcttatttaattaaaaaatttccagtgagcttatcatgctgtctttacatggggttttcaattttgcatgctcgattattccctgtacaatatttaaaatttattgcttgatacttttgacaacaaattaggttttgtacaattgaacttaaataaatgtcattaaaataaataaatgcaatatgtattaatattcattgtataaaaatagaagaatacaaacatatttgttaaatatttacatatgaaatttaatatagctatttttatggaatttttcattgatatgaaaaatatgatattgcatatgcatagttcccatgttaaatcccattcataactttcattaaagcatttactttgaatttctccaatgcttagaatgtttttaccaggaatggatgtcgctaatcataataaaattcaaccattatttttttcttgtttataatacattgtgttatatgttcaaatatgaaatgtgtatgcacctattgaaatatgtttaatgcatttattaacatttgcaggacacttttacaggccccaattatccaatagtctaataattgtttaagatctagaaaaaaaaaatcaagaatagtggtatttttcatgaagtaataaaaactcgttttgg

SEQ ID NO: 95 - DNA, 4663 bp, Homo sapiens
tttgcagggcaaagcccaacaccttcccccactgatgcctaccttaatgcctctgaaacaaccactctgagcccttctggaagcgctgtcatttcaaccacaacaatagctactactccatctaagccaacatgtgatgaaaaatatgcaaacatcactgtggattacttatataacaaggaaactaaattatttacagcaaagctaaatgttaatgagaatgtggaatgtggaaacaatacttgcacaaacaatgaggtgcataaccttacagaatgtaaaaatgcgtctgtttccatatctcataattcatgtactgctcctgataagacattamtattagatgtgccaccaggggttgaaaagtttcagttacatgattgtacacaagttgaaaaagcagatactactatttgtttaaaatggaaaaatattraaacctttacttgtgatacacagaatattacctacagatttcartgtggtaatatgatatttgataataaagaaattaaattagaaaaccttgaacccgaacatgagtataagtgtgactcagaaatactctataataaccacaagtttactaacgcaagtaaaattattaaaacagattttgggagtccaggagagcctcagattattttttgtagaagtgaagctgcacatcaaggagtaattacctggaatccccctcaaagatcatttcataattttaycctctgttatataaaagagacagaaaaagattgcctcaatctggataaaaacctgatcaaatatgatttgcaaaatttaaaaccttatacgaaatatgttttatcattacatgcctacatcattgcaaaagtgcaacgtaatggaagtgctgcaatgtgtcatttcacaactaaaagtgctcctccaagccaggtctggaacatgactgtctccatgacatcagataatagtatgcatgtcaagtgtaggcctcccagggaccgtaatggcccccatgaacgttaccatttggaagttgaagctggaaatactctggttagaaatgagtcgcataagaattgcgatttccgtgtaaaagatcttcaatattcaacagactacacttttaaggcctattttcacaatggagactatcctggagaaccctttattttacatcattcaacatcttataattctaaggcactgatagcatttctggcatttctgattattgtgacatcaatagccctgcttgttgttctctacaaaatctatgatctacataagaaaagatcctgcaatttagatgaacagcaggagcttgttgaaagggatgatgaaaaacaactgatgaatgtggagccaatccatgcagatattttgttggaaacttataagaggaagattgctgatgaaggaagactttttctggctgaatttcagagcatcccgcgggtgttcagcaagtttcctataaaggaagctcgaaagccctttaaccagaataaaaaccgttatgttgacattcttccttatgattataaccgtgttgaactctctgagataaacggagatgcagggtcaaactacataaatgccagctatattgatggtttcaaagaacccaggaaatacattgctgcacaaggtcccagggatgaaactgttgatgatttctggaggatgatttgggaacagaaagccacagttattgtcatggtcactcgatgtgaagaaggaaacaggaacaagtgtgcagaatactggccgtcaatggaagagggyactcgggcttttggagatgttgttgtaaagatcaaccagcacaaaagatgtccagattacatcattcagaaattgaacattgtaaataaaaaagaaaaagcaactggaagagaggtgactcacattcagttcaccagctggccagaccacggggtgcctgaggatcctcacttgctcctcaaactgagaaggagagtgaatgccttcagcaatttcttcagtggtcccattgtggtgcactgcagtgctggtgttgggcgcacaggaacctatatcggaattgatgccatgctagaaggcctggaagccgagaacaaagtggatgtttatggttatgttgtcaagctaaggcgacagagatgcctgatggttcaagtagaggcccagtacatcttgatccatcaggctttggtggaatacaatcagtttggagaaacagaagtgaatttgtctgaattacatccatatctacataacatgaagaaaagggatccacccagtgagccgtctccactagaggctgaattccagagacttccttcatataggagctggaggacacagcacattggaaatcaagaagaaaataaaagtaaaaacaggaattctaatgtcatcccatatgactataacagagtgccacttaaacatgagctggaaatgagtaaagagagtgagcatgattcagatgaatcctctgatgatgacagtgattcagaggaaccaagcaaatacatcaatgcatcttttataatgagctactggaaacctgaagtgatgattgctgctcagggaccactgaaggagaccattggtgacttttggcagatgatcttccaaagaaaagtcaaagttattgttatgctgacagaactgaaacatggagaccaggaaatctgtgctcagtactggggagaaggaaagcaaacatatggagatattgaagttgacctgaaagacacagacaaatcttcaacttatacccttcgtgtctttgaactgagacattccaagaggaaagactctcgaactgtgtaccagtaccaatatacaaactggagtgtggagcagcttcctgcagaacccaaggaattaatctctatgattcaggtcgtcaaacaaaaacttccccagaagaattcctctgaagggaacaagcatcacaagagtacacctctactcattcactgcagggatggatctcagcaaacgggaatattttgtgctttgttaaatctcttagaaagtgcggaaacagaagaggtagtggatatttttcaagtggtaaaagctctacgcaaagctaggccaggcatggtttccacattcgagcaatatcaattcctatatgacgtcattgccagcacctaccctgctcagaatggacaagtaaagaaaaacaaccatcaagaagataaaattgaatttgataatgaagtggacaaagtaaagcaggatgctaaytgtgttaatccacttggtgccccagaaaagctccctgaagcaaaggaacaggctgaaggttctgaacccacgmgtggcactgaggggccagaacattctgtcaatggtcctgcaagtccagctttaaatcaaggttcataggaaaagacataaatgaggaaactccaamcctcctgttagctgttatttctatttttgtagaagtaggaagtgaaaataggtatacagtggattaattaaatgcagcgaaccaatatttgtagaagggttatattttactactgtggaaaaatatttaagatagttttgccagaacagtttgtacagacgtatgcttattttaaaattttatctcttattcagtaaaaaacaacttctttgtaatcgttatgtgtgtatatgtatgtgtgtatgggtgtgtgtttgtgtgagagacagagaaagagagagaattctttcaagtgaatctaaaagcttttgcttttcctttgtttttatgaagaaaaaatacattttatattagaagtgttaacttagcttgaaggatctgtttttaaaaatcataaactgtgtgcagactcaataaaatcatgtacatttctgaaatgacctcaagatgtcctccttgttctactcatatatatctatcttatatagtttactattttacttctagagatagtacataaaggtggtatgtgtgtgtatgctactacaaaaaagttgttaactaaattaacattgggaaatcttatattccatatattagcatttagtccaatgtctttttaagcttatttaattaaaaaatttccagtgagcttatcatgctgtctttacatggggttttcaattttgcatgctcgattattccctgtacaatatttaaaatttattgcttgatacttttgacaacaaattaggttttgtacaattgaacttaaataaatgtcattaaaataaataaatgcaatatgtattaatattcattgtataaaaatagaagaatacaaacatatttgttaaatatttacatatgaaatttaatatagctatttttatggaatttttcattgatatgaaaaatatgatattgcatatgcatagttcccatgttaaatcccattcataactttcattaaagcatttactttgaatttctccaatgcttagaatgtttttaccaggaatggatgtcgctaatcataataaaattcaaccattatttttttcttgtttataatacattgtgttatatgttcaaatatgaaatgtgtatgcacctattgaaatatgtttaatgcatttattaacatttgcaggacacttttacaggccccaattatccaatagtctaataattgtttaagatctagaaaaaaaaaatcaagaatagtggtatttttcatgaagtaataaaaactcgttttgg

SEQ ID NO: 96 - DNA, 4995 bp, Homo sapiens
ggcaaagcccaacaccttcccccactggattgactacagcaaagatgcccagtgttccactttcaagtgaccccttacctrctcacaccactgcattctcaccsgcaagcacctttgaaagagaaaatgacttctcagagaccacaacttctcttagtccagacaatacttccacccaagtatccccggactctttggataatgctagtgcttttaataccacaggtgtttcatcagtacagacgcctcaccttcccacgcacgcagactcgcagacgccctctgctggaactsacacgcagacattcagcggctccgccgccaatgcaaaactcaaccctaccccaggcagcaatgctatctcagatgcctaccttaatgcctctgaaacaaccactctgagcccttctggaagcgctgtcatttcaaccacaacaatagctactactccatctaagccaacatgtgatgaaaaatatgcaaacatcactgtggattacttatataacaaggaaactaaattatttacagcaaagctaaatgttaatgagaatgtggaatgtggaaacaatacttgcacaaacaatgaggtgcataaccttacagaatgtaaaaatgcgtctgtttccatatctcataattcatgtactgctcctgataagacattamtattagatgtgccaccaggggttgaaaagtttcagttacatgattgtacacaagttgaaaaagcagatactactatttgtttaaaatggaaaaatattraaacctttacttgtgatacacagaatattacctacagatttcartgtggtaatatgatatttgataataaagaaattaaattagaaaaccttgaacccgaacatgagtataagtgtgactcagaaatactctataataaccacaagtttactaacgcaagtaaaattattaaaacagattttgggagtccaggagagcctcagattattttttgtagaagtgaagctgcacatcaaggagtaattacctggaatccccctcaaagatcatttcataattttaycctctgttatataaaagagacagaaaaagattgcctcaatctggataaaaacctgatcaaatatgatttgcaaaatttaaaaccttatacgaaatatgttttatcattacatgcctacatcattgcaaaagtgcaacgtaatggaagtgctgcaatgtgtcatttcacaactaaaagtgctcctccaagccaggtctggaacatgactgtctccatgacatcagataatagtatgcatgtcaagtgtaggcctcccagggaccgtaatggcccccatgaacgttaccatttggaagttgaagctggaaatactctggttagaaatgagtcgcataagaattgcgatttccgtgtaaaagatcttcaatattcaacagactacacttttaaggcctattttcacaatggagactatcctggagaaccctttattttacatcattcaacatcttataattctaaggcactgatagcatttctggcatttctgattattgtgacatcaatagccctgcttgttgttctctacaaaatctatgatctacataagaaaagatcctgcaatttagatgaacagcaggagcttgttgaaagggatgatgaaaaacaactgatgaatgtggagccaatccatgcagatattttgttggaaacttataagaggaagattgctgatgaaggaagactttttctggctgaatttcagagcatcccgcgggtgttcagcaagtttcctataaaggaagctcgaaagccctttaaccagaataaaaaccgttatgttgacattcttccttatgattataaccgtgttgaactctctgagataaacggagatgcagggtcaaactacataaatgccagctatattgatggtttcaaagaacccaggaaatacattgctgcacaaggtcccagggatgaaactgttgatgatttctggaggatgatttgggaacagaaagccacagttattgtcatggtcactcgatgtgaagaaggaaacaggaacaagtgtgcagaatactggccgtcaatggaagagggyactcgggcttttggagatgttgttgtaaagatcaaccagcacaaaagatgtccagattacatcattcagaaattgaacattgtaaataaaaaagaaaaagcaactggaagagaggtgactcacattcagttcaccagctggccagaccacggggtgcctgaggatcctcacttgctcctcaaactgagaaggagagtgaatgccttcagcaatttcttcagtggtcccattgtggtgcactgcagtgctggtgttgggcgcacaggaacctatatcggaattgatgccatgctagaaggcctggaagccgagaacaaagtggatgtttatggttatgttgtcaagctaaggcgacagagatgcctgatggttcaagtagaggcccagtacatcttgatccatcaggctttggtggaatacaatcagtttggagaaacagaagtgaatttgtctgaattacatccatatctacataacatgaagaaaagggatccacccagtgagccgtctccactagaggctgaattccagagacttccttcatataggagctggaggacacagcacattggaaatcaagaagaaaataaaagtaaaaacaggaattctaatgtcatcccatatgactataacagagtgccacttaaacatgagctggaaatgagtaaagagagtgagcatgattcagatgaatcctctgatgatgacagtgattcagaggaaccaagcaaatacatcaatgcatcttttataatgagctactggaaacctgaagtgatgattgctgctcagggaccactgaaggagaccattggtgacttttggcagatgatcttccaaagaaaagtcaaagttattgttatgctgacagaactgaaacatggagaccaggaaatctgtgctcagtactggggagaaggaaagcaaacatatggagatattgaagttgacctgaaagacacagacaaatcttcaacttatacccttcgtgtctttgaactgagacattccaagaggaaagactctcgaactgtgtaccagtaccaatatacaaactggagtgtggagcagcttcctgcagaacccaaggaattaatctctatgattcaggtcgtcaaacaaaaacttccccagaagaattcctctgaagggaacaagcatcacaagagtacacctctactcattcactgcagggatggatctcagcaaacgggaatattttgtgctttgttaaatctcttagaaagtgcggaaacagaagaggtagtggatatttttcaagtggtaaaagctctacgcaaagctaggccaggcatggtttccacattcgagcaatatcaattcctatatgacgtcattgccagcacctaccctgctcagaatggacaagtaaagaaaaacaaccatcaagaagataaaattgaatttgataatgaagtggacaaagtaaagcaggatgctaaytgtgttaatccacttggtgccccagaaaagctccctgaagcaaaggaacaggctgaaggttctgaacccacgmgtggcactgaggggccagaacattctgtcaatggtcctgcaagtccagctttaaatcaaggttcataggaaaagacataaatgaggaaactccaamcctcctgttagctgttatttctatttttgtagaagtaggaagtgaaaataggtatacagtggattaattaaatgcagcgaaccaatatttgtagaagggttatattttactactgtggaaaaatatttaagatagttttgccagaacagtttgtacagacgtatgcttattttaaaattttatctcttattcagtaaaaaacaacttctttgtaatcgttatgtgtgtatatgtatgtgtgtatgggtgtgtgtttgtgtgagagacagagaaagagagagaattctttcaagtgaatctaaaagcttttgcttttcctttgtttttatgaagaaaaaatacattttatattagaagtgttaacttagcttgaaggatctgtttttaaaaatcataaactgtgtgcagactcaataaaatcatgtacatttctgaaatgacctcaagatgtcctccttgttctactcatatatatctatcttatatagtttactattttacttctagagatagtacataaaggtggtatgtgtgtgtatgctactacaaaaaagttgttaactaaattaacattgggaaatcttatattccatatattagcatttagtccaatgtctttttaagcttatttaattaaaaaatttccagtgagcttatcatgctgtctttacatggggttttcaattttgcatgctcgattattccctgtacaatatttaaaatttattgcttgatacttttgacaacaaattaggttttgtacaattgaacttaaataaatgtcattaaaataaataaatgcaatatgtattaatattcattgtataaaaatagaagaatacaaacatatttgttaaatatttacatatgaaatttaatatagctatttttatggaatttttcattgatatgaaaaatatgatattgcatatgcatagttcccatgttaaatcccattcataactttcattaaagcatttactttgaatttctccaatgcttagaatgtttttaccaggaatggatgtcgctaatcataataaaattcaaccattatttttttcttgtttataatacattgtgttatatgttcaaatatgaaatgtgtatgcacctattgaaatatgtttaatgcatttattaacatttgcaggacacttttacaggccccaattatccaatagtctaataattgtttaagatctagaaaaaaaaaatcaagaatagtggtatttttcatgaagtaataaaaactcgttttgg

SEQ ID NO: 97 - DNA, 4733 bp, Homo sapiens
tgccgcgggcggctggcccagctggaggaagcggcggcggcggccacgatgagtgcgggcgacgcagtgtgcaccggctggctcgttaagtcgccccccgagaggaagctacagcgctacgcctggcgcaagcgctggtttgtcctccggcgaggccgcatgagcggcaaccccgatgtcttggagtactacaggaacaagcactccagcaagcccatccgggtgatagacctcagcgagtgtgcagtgtggaagcatgtgggccccagctttgttcggaaggaatttcagaataatttcgtgttcattgtcaagactacttcccgtacattctacctggtggccaaaactgagcaagaaatgcaggtgtgggtgcacagcatcagtcaggtctgcaaccttggccacctggaggatggtgcagattccatggagagcctctcttacacgccctcctccctgcagccatcctctgccagctcccttcttaccgcccatgctgccagctcctctttgccaagagatgacccaaacactaatgccgtagccactgaggaaaccagaagtgagtcagagcttctcttccttccagattatctggttttgtccaactgcgagactggaagactgcaccataccagtctacccaccagatgtgatagctggtcaaactcagaccgttcrttggaacaggcttcatttgatgatgtttttgttgactgcctgcagccgctcccctccagtcatttggtccacycctcatgccatggcagtggagctcaggaggtgccatcctcgaggcctcaggctgccctgatctggagtagagaaatcaatgggccacccagggaccacttgtcttcttcaccattgctggaaagttccttaagttccaccattcaggtagataaaaatcaaggttccttaccctgtggagcaaaagaactagacattatgtccaacactccacctccccgcccccctaagccaagccatctgtctgaacggcgccaagaggagtggagtacacacagtggtagcaagaagccagaatgcactctggttccaagaagaatctccctctctggtttagacaacatgagaacctggaaagctgatgtagaaggccaatccttaagacaccgagacaagcggcttagtttgaatttgccatgcaggttctccccgatgtaccccacagcttcagccagtatcgaagacagctatgtgcccatgagcccccaggctggtgcctctggtcttggaccccactgcagccctgatgactacattccaatgaactcaggaagcatctcaagcccgttgcctgagctgcctgcaaacctggaacctcccccagtgaatagagatctcaagcctcagaggaaatcacggccacctcctctggacctgagaaacctctcgatcatccgggaacatgcatctcttaccaggacccgcactgtgccttgcagtcgaaccagctttctctctccagaaagaaatggtattaattctgcaagattttttgctaatcctgtttccagagaagacgaagaaagctacatcgaaatggaggagcaccgaacagccagttccctgagcagtggtgcccttacgtggacaaagaaattcagcctagattatttggccctggacttcaattcagcatcaccagcccccatgcagcagaaacttctcctttcagaagaacaaagagtagactatgtccaagtggatgagcagaagacacaggctctccagagcacaaaacaggagtggacggatgaaaggcaatccaaagtatgagaggtgcgggcttgtgccatgtgtgaaacagggaagcttggggctcagtttgagttttttcttttttttttttttttgtccactaaaaacacactgatggtcaacacaggtcaaaaccaagagagaatgtgtagttttcaaggtcttggccagaacctttaggaaagaagacctgtttatacattgaaggaagaaaagaaggaagcagttgccttccggagggggctctgagagaatctagcctcccctctgtcctattggagcaaagattggagtgagtgttgccaccaacaggattttatcgtttgactccaatacctgaaattctgacttctctcctgtgcttcaatgagaatgataaattatcctagcaaaggggcctctggagaccatcttgttccagcctctgaagacagttgaggagatcaagcccagcaatggtggcagaatcttactccacagacttcagcagactagtcatttcaatacccaaagaaagacaagtgacaggggcaatggatctcaggctctgagataagtatatcagatgacactggtggctctaaggatattgcaattaagcagctacctgtagccaggtattctgctgctcttggccttttcccacgcatcgtctcgtgtcttctccgaaagaccttggaagataggcctggaagagactgttgatgccactttgaagaaaagaacactgagaactagaggagggaacactttgcccaagattactcacaaagccaagacccagagtccagcttagagaatagagttgttcaggctgccaattgcaagctcattcctctacctcatacttcctctgaggattttgacaaaatggattaattgggtgagccttggagacatgtgggaaacacctgcagacacaaaatgagtagtcatcctgtctccctttcaatagggatctgaacaggtgttttgatacttgaaagatgtgcatgtcaagtgagggtttctttctgcgatgttcaactggaactctcccatcagtagttacaattagaaatacctactgatggttagtctgaaggccattctcatggtcacctatacagtgtgtttccctgtgagctagcagacacaatgaccaggaaaaaacctatgaattccattcttaggtttcccagccaattgctcccttctgctttagaagtgactaggtactgagagtacaaacactcccactttataatgaaggcgtcatgtcaccccttcctttacaggtcctggggtccaggagacccagaatgaaggtgtcagttgggcatgaagtgttatttagtgtccattcttgatccttctgagcacctacagctggaaactaagcagatactggtcctgcattctgactgagattgtgtcttctttatgaggatagatcaaattggcagtcaggcccatgatagtcagtgcagttggggcagttgtagactttgctacaggatttcagggtttccaatcaccccacaggtaagtgaatgccaaagtcttcttttttcagaccatacaagaagtcattttgattttcaaagaagccgttttgattttcaaagaagcaggttctggtgacattattttcttccttggacaaagtggggggaaatttctaagtattttaactgagttcagggtccttagtgagcctggacagagcaaggagagggctccccactccctaagccccacagccagctctgcatcaccacacacagccagagcctgtgaggagctgccttcttccccatgtgacttgcaaagagtctcaggcaagaaaccagggcttcaaactgctagttcccatggagggtagttccctcgtgtggagcacttgtgttaggatcactgattatctgacaaaggctggtgcagaaaaaaaattgtaggcccaagtgtcaagaaccacaccagattggagatagaaaagaatagctgaaattatgtcagtrgtgaaatgtcactccattgacccaccgaaaaaagaaaagaaatctgtttctaccaaacatttccagaaacgtatttatagcatgaagaaacacacatgggtagtgtgacctgtttggatgtgattacttaaaaatggaatgctctgaataggcactctctacattaaaggtatggaaggcgataggggtcagaattttaaaaatttaattttgaaaaaggtgactcacccctcatttccagagtgtaggcaattatgtcctgctttgataaaactgctagaggatggctatgcaaaagcataacgattcaaggaaacaaagtacaggtagtttttgasctgacagcagcaaaggcaccataagtcaaaatattggttttggtggagatgatcgatgtgtgtgtgtgagagagagctatgtttctaaccaagggcctaatgtttgttacagaaatgatcccagagacctacaagatgtgggaatcagcataacagggcaatgcagcaattaaccccacatcgttttctgtagttcctttttgtttcattttcttctgtctcacctcgttagaaaattcctcccagtcaggggtcgtccagtgcaggacgggggacccaagggtctcaagcctgcaagtccagaaggtgacaaacccaggagcactgggagttaagctttccttggggagggaagagccttgatgtccagcacacagcctggctataaagacacgaagcgacctacccactgtacagtccacttcacaggatcagctgaatcatgacctttaaaagttccgagttgaaactgaaggctctcctcagacctggctttttcctcagtccctgttcataccatctctgcacccacaatcacactgatttttcaaattcattttgtttttgctgtttcatttctggcattaataaaagtcttataagg

SEQ ID NO: 98 - DNA, 3446 bp, Homo sapiens
agcgagagagggagcgtggagagctggagcagccgccaccgccgccgccgagggagccccgggacggcagcccctgggcgcagggtgcgctgttctcggagtccgacccagggcgactcacgcccactggtgcgacccggacagcctgggactgacccgccggcccaggcgaggctgcagccagagggctgggaagggatcgcgctcgcggcatccagaggcggccaggcggaggcgagggagcaggttagagggacaaagagctttgcagacgtccccggcgtcctgcgagcgccagcggccgggacgaggcggccgggagcccgggaagagcccgtggatgttctgcgcgcggcctgggagccgccgccgccgccgcctcagcgagaggaggaatgcaccggccgcgccgccgcgggacgcgcccgccgctcctggcgctgctggccgcgctgctgctggccgcacgcggggctgctgcccaaggtaagagcttttcagaaacagagctgtcagtcagtgctgaattagtgcctacctcatcatggaacatctcaagtgaactcaacaaagattcttacctgaccctygatgaaccaatgaataacatcaccacgtctctgggccagacagcagaactgcactgcaaagtctctgggaatccacctcccaccatccgctggttcaaaaatgatgctcctgtggtccaggagccccggaggctctcctttcggtccaccatctatggctctcggctgcggattagaaacctcgacaccacagacacaggctacttccagtgcgtggcaacaaacggcaaggaggtggtttcttccactggagtcttgtttgtcaagtttggcccccctcccactgcaagtccaggatactcagatgagtatgaagaagatggattctgtcagccatacagagggattgcatgtgcaagatttattggcaaccgcaccgtctatatggagtctttgcacatgcaaggggaaatagaaaatcagatcacagctgccttcactatgattggcacttccagtcacttatctgataagtgttctcagttcgccattccttccctgtgccactatgccttcccgtactgcgatgaaacttcatccgtcccaaagccccgtgacttgtgtcgcgatgaatgtgaaatcctggagaatgtcctgtgtcaaacagagtacatttttgcaagatcaaatcccatgattctgatgaggctgaaactgccaaactgtgaagatctcccccagccagagagcccagaagctgcgaactgtatccggattggaattcccatggcagatcctataaataaaaatcacaagtgttataacagcacaggtgtggactaccgggggaccgtcagtgtgaccaaatcagggcgccagtgccagccatggaattcccagtatccccacacacacactttcacygcccttcgtttcccagagctgaatggaggccattcctactgccgcaacccagggaatcaaaaggaagctccctggtgcttcaccttggatgaaaactttaagtctgatctgtgtgacatcccagcktgcgattcaaaggattccaaggagaagaataaaatggaaatcctgtacatactagtgccaagtgtggccattcccctggccattgctttactcttcttcttcatttgcgtctgtcggaataaccagaagtcatcgtcggcaccagtccagaggcaaccaaaacacgtcagaggtcaaaatgtrgagatgtcaatgctgaatgcatataaacccaagagcaaggctaaagagctacctctttctgctgtacgctttatggaagaattgggtgagtgtgcctttggaaaaatctataaaggccatctctatctcccaggcatggaccatgctcagctggttgctatcaagaccttgaaagactataacaacccccagcaatggayggaatttcaacaagaagcctccctaatggcagaactgcaccaccccaatattgtctgccttctaggtgccgtcactcaggaacaacctgtgtgcatgctttttgagtatattaatcagggggatctccatgagttcctcatcatgagatccccacactctgatgttggctgcagcagtgatgaagatgggactgtgaaatccagcctggaccacggagattttctgcacattgcaattcagattgcagctggcatggaatacctgtctagtcacttctttgtccacaaggaccttgcagctcgcaatattttaatcggagagcaacttcatgtaaagatttcagacttggggctttccagagaaatttactcygctgattactacagggtccagagtaagtccttgctgcccattcgctggatgccccctgaagccatcatgtatggcaaattctcttctgattcagatatctggtcctttggggttgtcttgtgggagattttcagttttggactccagccatattatggattcagtaaccaggaagtgattgagatggtgagaaaacggcagctcttaccatgctctgaagactgcccacccagaatgtacagcctcatgacagagtgctggaatgagattccttctaggagaccaagatttaaagatattcacgtccggcttcggtcctgggagggactctcaagtcacacaagctctactactccttcagggggaaatgccaccacacagacaacctccctcagtgccagcccagtgagtaatctcagtaaccccagatatcctaattacatgttcccgagccagggtattacaccacagggccagattgctggtttcattggcccgccaatacctcagaaccagcgattcattcccatcaatggatacccaatacctcctggatatgcagcgtttccagctgcccactaccagccaacaggtcctcccagagtgattcagcactgcccacctcccaagagtcggtccccaagcagtgccagtgggtcgactagcactggccatgtgactagcttgccctcatcaggatccaatcaggaagcaaatattcctttactaccacacatgtcaattccaaatcatcctggtggaatgggtatcaccgtttttggcaacaaatctcaaaaaccctacaaaattgactcaaagcaagcatctttactaggagacgccaatattcatggacacaccgaatctatgatttctgcagaactgtaaaatgcacaacttttgtaaatgtggtatacaggacaaactagacggccgtagaaaagatttatattcmaatgtttttattaaagtaaggttctcatttagcagacatcgcaacaagtaccttctgtgaagtttcactgtgtcttaccaagcaggacagacactcggccagaaaaaaaaaaaaaaaaaaaaaacaagcaaacaaaaacattgtgggatgtgcac

SEQ ID NO: 99 - DNA, 1996 bp, Homo sapiens
aacaggcggcgcgcgcccttcccggaaactcccgcctggccaccataaaagcgccggccctccgcttccccgcgagacgaaacttcccgtcccggcggctctggcacccagggtccggcctgcgccttcccgccaggcctggacactggttcaacacctgtgacttcatgtgtgcgcgccggccacacctgcrgtcacacctgtagccccctctgccaagagatccataccgaggcagcgtcggtggctacaagccctcagtccacacctgtggacacctgtgacacctggccacacgacctgtggccgcggcctggcgtctgctgcgacaggagcccttacctcccctgttataacacctgaccgccayctaactgcccctgcagaaggagcaatggccttggctcctgagagggcagccccacgcgtgctgttcggagagtggctccttggagagatcagcagcggctgctatgaggggctgcagtggctggacgaggcccgcacctgtttccgcgtgccctggaagcacttcgcgcgcaaggacctgagcgaggccgacgcgcgcatyttcaaggcctgggctgtggcccgcggcaggtggccgcctagcagcaggggaggtggcccgccccccgaggctgagactgcggagcgcgccggctggaaaaccaacttccgctgcgcactgcgcagcacgcgtcgcttcgtgatgctgcgrgataactcgggggacccggccgacccgcacaaggtgtacgcgctcagccgggagctgtgctggcgagaaggcccaggcacggaccagactgaggcagaggcccccgcagctgtcccaccaccacagggtgggcccccagggccattcytggcacacacrcatgctggactccaagccccaggccccctccctgccccagctggtgacragggggacctcctgctccaggcagtgcaacagagctgcctggcagaccatctgctgacagcgtcatggggggcagatccagtcccaaccaaggctcctggagagggacaagaagggcttcccctgactggggcctgtgctggaggcccagggctccctgctggggagctgtacgggtgggcagtagagacgacccccagccccgggccccagcccgcggcactaacgacaggcgaggccgcggccccagagtccccgcaccaggcagagccgtacctgtcaccctccccaagcgcctgcaccgcggtgcaagagcccagcccaggggcgctggacgtgaccatcatgtacaagggccgcacggtgctgcagaaggtggtgggacacccgagctgcacgttcctatacggccccccagacccagctgtccgggccacagacccccagcaggtagcattccccagccctgccgagctcccggaycagaagcagctgcgctacacggaggaactgctgcggcacgtggcccctgggttgcacctggagcttcgggggccacagctgtgggcccggcgcatgggcaagtgcaaggtgtactgggaggtgggcggmcccccaggctccgccagcccctccaccccagcctgcctgctgcctcggaactgtgacacccccatcttcgacttcagagtcttcttccragagctggtggaattccgggcacggcagcgccgtggctccccacgctataccatctacctgggcttcgggcaggacctgtcagctgggaggcccaaggagaagagcctggtcctggtgaagctggaaccctggctgtgccgagtgcacctagagggcacgcagcgtgagggtgtgtcttccctggatagcagcagcctcagcctctgcctgtccagcgccaacagcctctatgacracatcgagtgcttccttatggagctggagcagcccgcctagaacccagtctaatgagaactccagaaagctggagcagcccacctagagctggccgcggccgcccagtctaataaaaagaactccagaaca

SEQ ID NO: 100 - DNA, 1909 bp, Homo sapiens
aacaggcggcgcgcgcccttcccggaaactcccgcctggccaccataaaagcgccggccctccgcttccccgcgagacgaaacttcccgtcccggcggctctggcacccagggtccggcctgcgccttcccgccaggcctggacactggttcaacacctgtgacttcatgtgtgcgcgccggccacacctgcrgtcacacctgtagccccctctgccaagagatccataccgaggcagcgtcggtggctacaagccctcagtccacacctgtggacacctgtgacacctggccacacgacctgtggccgcggcctggcgtctgctgcgacaggagcccttacctcccctgttataacacctgaccgccayctaactgcccctgcagaaggagcaatggccttggctcctgagagggcagccccacgcgtgctgttcggagagtggctccttggagagatcagcagcggctgctatgaggggctgcagtggctggacgaggcccgcacctgtttccgcgtgccctggaagcacttcgcgcgcaaggacctgagcgaggccgacgcgcgcatyttcaaggcctgggctgtggcccgcggcaggtggccgcctagcagcaggggaggtggcccgccccccgaggctgagactgcggagcgcgccggctggaaaaccaacttccgctgcgcactgcgcagcacgcgtcgcttcgtgatgctgcgrgataactcgggggacccggccgacccgcacaaggtgtacgcgctcagccgggagctgtgctggcgagaaggcccaggcacggaccagactgaggcagaggcccccgcagctgtcccaccaccacagggtgggcccccagggccattcytggcacacacrcatgctggactccaagccccaggccccctccctgccccagctggtgacragggggacctcctgctccaggcagtgcaacagagctgcctggcagaccatctgctgacagcgtcatggggggcagatccagtcccaaccaaggctcctggagagggacaagaagggcttcccctgactggggcctgtgctggaggcgaggccgcggccccagagtccccgcaccaggcagagccgtacctgtcaccctccccaagcgcctgcaccgcggtgcaagagcccagcccaggggcgctggacgtgaccatcatgtacaagggccgcacggtgctgcagaaggtggtgggacacccgagctgcacgttcctatacggccccccagacccagctgtccgggccacagacccccagcaggtagcattccccagccctgccgagctcccggaycagaagcagctgcgctacacggaggaactgctgcggcacgtggcccctgggttgcacctggagcttcgggggccacagctgtgggcccggcgcatgggcaagtgcaaggtgtactgggaggtgggcggmcccccaggctccgccagcccctccaccccagcctgcctgctgcctcggaactgtgacacccccatcttcgacttcagagtcttcttccragagctggtggaattccgggcacggcagcgccgtggctccccacgctataccatctacctgggcttcgggcaggacctgtcagctgggaggcccaaggagaagagcctggtcctggtgaagctggaaccctggctgtgccgagtgcacctagagggcacgcagcgtgagggtgtgtcttccctggatagcagcagcctcagcctctgcctgtccagcgccaacagcctctatgacracatcgagtgcttccttatggagctggagcagcccgcctagaacccagtctaatgagaactccagaaagctggagcagcccacctagagctggccgcggccgcccagtctaataaaaagaactccagaaca

SEQ ID NO: 101 - DNA, 2129 bp, Homo sapiens
taaaagcgccggccctccgcttccccgcgagacgaaacttcccgtcccggcggctctggcacccaggtactggggaccccagacccacgcggtgcaggccgggagcgagagcctccgtgggggctccgygaccccggaggggtagagccaagagctgggggagcctgagagatgagggtcgggcggggagggaggcggaggcggaggcggggttccgcggagctgagaaccggacggggtgggatcgaggagggtgcgaagcgccactgtttaggtttcgctttcccgggagcctgacccgcccctgacgtcgcctttcccgtctccgcagggtccggcctgcgccttcccgccaggcctggacactggttcaacacctgtgacttcatgtgtgcgcgccggccacacctgcrgtcacacctgtagccccctctgccaagagatccataccgaggcagcgtcggtggctacaagccctcagtccacacctgtggacacctgtgacacctggccacacgacctgtggccgcggcctggcgtctgctgcgacaggagcccttacctcccctgttataacacctgaccgccayctaactgcccctgcagaaggagcaatggccttggctcctgagagggcagccccacgcgtgctgttcggagagtggctccttggagagatcagcagcggctgctatgaggggctgcagtggctggacgaggcccgcacctgtttccgcgtgccctggaagcacttcgcgcgcaaggacctgagcgaggccgacgcgcgcatyttcaaggcctgggctgtggcccgcggcaggtggccgcctagcagcaggggaggtggcccgccccccgaggctgagactgcggagcgcgccggctggaaaaccaacttccgctgcgcactgcgcagcacgcgtcgcttcgtgatgctgcgrgataactcgggggacccggccgacccgcacaaggtgtacgcgctcagccgggagctgtgctggcgagaaggcccaggcacggaccagactgaggcagaggcccccgcagctgtcccaccaccacagggtgggcccccagggccattcytggcacacacrcatgctggactccaagccccaggccccctccctgccccagctggtgacragggggacctcctgctccaggcagtgcaacagagctgcctggcagaccatctgctgacagcgtcatggggggcagatccagtcccaaccaaggctcctggagagggacaagaagggcttcccctgactggggcctgtgctggaggcgaggccgcggccccagagtccccgcaccaggcagagccgtacctgtcaccctccccaagcgcctgcaccgcggtgcaagagcccagcccaggggcgctggacgtgaccatcatgtacaagggccgcacggtgctgcagaaggtggtgggacacccgagctgcacgttcctatacggccccccagacccagctgtccgggccacagacccccagcaggtagcattccccagccctgccgagctcccggaycagaagcagctgcgctacacggaggaactgctgcggcacgtggcccctgggttgcacctggagcttcgggggccacagctgtgggcccggcgcatgggcaagtgcaaggtgtactgggaggtgggcggmcccccaggctccgccagcccctccaccccagcctgcctgctgcctcggaactgtgacacccccatcttcgacttcagagtcttcttccragagctggtggaattccgggcacggcagcgccgtggctccccacgctataccatctacctgggcttcgggcaggacctgtcagctgggaggcccaaggagaagagcctggtcctggtgaagctggaaccctggctgtgccgagtgcacctagagggcacgcagcgtgagggtgtgtcttccctggatagcagcagcctcagcctctgcctgtccagcgccaacagcctctatgacracatcgagtgcttccttatggagctggagcagcccgcctagaacccagtctaatgagaactccagaaagctggagcagcccacctagagctggccgcggccgcccagtctaataaaaagaactccagaaca

SEQ ID NO: 102 - DNA, 2301 bp, Homo sapiens
taaaagcgccggccctccgcttccccgcgagacgaaacttcccgtcccggcggctctggcacccaggtactggggaccccagacccacgcggtgcaggccgggagcgagagcctccgtgggggctccgygaccccggaggggtagagccaagagctgggggagcctgagagatgagggtcgggcggggagggaggcggaggcggaggcggggttccgcggagctgagaaccggacggggtgggatcgaggagggtgcgaagcgccactgtttaggtttcgctttcccgggagcctgacccgcccctgacgtcgcctttcccgtctccgcagggtccggcctgcgccttcccgccaggcctggacactggttcaacacctgtgacttcatgtgtgcgcgccggccacacctgcrgtcacacctgtagccccctctgccaagagatccataccgaggcagcgtcggtggctacaagccctcagtccacacctgtggacacctgtgacacctggccacacgacctgtggccgcggcctggcgtctgctgcgacaggagcccttacctcccctgttataacacctgaccgccayctaactgcccctgcagaaggagcaatggccttggctcctgagaggtaagagcccggcccaccctctccagatgccagtccccgagcgccctgcagccggccctgactctccgcggccgggcacccgcagggcagccccacgcgtgctgttcggagagtggctccttggagagatcagcagcggctgctatgaggggctgcagtggctggacgaggcccgcacctgtttccgcgtgccctggaagcacttcgcgcgcaaggacctgagcgaggccgacgcgcgcatyttcaaggcctgggctgtggcccgcggcaggtggccgcctagcagcaggggaggtggcccgccccccgaggctgagactgcggagcgcgccggctggaaaaccaacttccgctgcgcactgcgcagcacgcgtcgcttcgtgatgctgcgrgataactcgggggacccggccgacccgcacaaggtgtacgcgctcagccgggagctgtgctggcgagaaggcccaggcacggaccagactgaggcagaggcccccgcagctgtcccaccaccacagggtgggcccccagggccattcytggcacacacrcatgctggactccaagccccaggccccctccctgccccagctggtgacragggggacctcctgctccaggcagtgcaacagagctgcctggcagaccatctgctgacagcgtcatggggggcagatccagtcccaaccaaggctcctggagagggacaagaagggcttcccctgactggggcctgtgctggaggcccagggctccctgctggggagctgtacgggtgggcagtagagacgacccccagccccgggccccagcccgcggcactaacgacaggcgaggccgcggccccagagtccccgcaccaggcagagccgtacctgtcaccctccccaagcgcctgcaccgcggtgcaagagcccagcccaggggcgctggacgtgaccatcatgtacaagggccgcacggtgctgcagaaggtggtgggacacccgagctgcacgttcctatacggccccccagacccagctgtccgggccacagacccccagcaggtagcattccccagccctgccgagctcccggaycagaagcagctgcgctacacggaggaactgctgcggcacgtggcccctgggttgcacctggagcttcgggggccacagctgtgggcccggcgcatgggcaagtgcaaggtgtactgggaggtgggcggmcccccaggctccgccagcccctccaccccagcctgcctgctgcctcggaactgtgacacccccatcttcgacttcagagtcttcttccragagctggtggaattccgggcacggcagcgccgtggctccccacgctataccatctacctgggcttcgggcaggacctgtcagctgggaggcccaaggagaagagcctggtcctggtgaagctggaaccctggctgtgccgagtgcacctagagggcacgcagcgtgagggtgtgtcttccctggatagcagcagcctcagcctctgcctgtccagcgccaacagcctctatgacracatcgagtgcttccttatggagctggagcagcccgcctagaacccagtctaatgagaactccagaaagctggagcagcccacctagagctggccgcggccgcccagtctaataaaaagaactccagaaca

SEQ ID NO: 103 - DNA, 1659 bp, Homo sapiens
ggtccggcctgcgccttcccgccaggcctggacactggttcaacacctgtgacttcatgtgtgcgcgccggccacacctgcrgtcacacctgtagccccctctgccaagagatccataccgaggcagcgtcggtggctacaagccctcagtccacacctgtggacacctgtgacacctggccacacgacctgtggccgcggcctggcgtctgctgcgacaggagcccttacctcccctgttataacacctgaccgccayctaactgcccctgcagaaggagcaatggccttggctcctgagagggcagccccacgcgtgctgttcggagagtggctccttggagagatcagcagcggctgctatgaggggctgcagtggctggacgaggcccgcacctgtttccgcgtgccctggaagcacttcgcgcgcaaggacctgagcgaggccgacgcgcgcatyttcaaggcctgggctgtggcccgcggcaggtggccgcctagcagcaggggaggtggcccgccccccgaggctgagactgcggagcgcgccggctggaaaaccaacttccgctgcgcactgcgcagcacgcgtcgcttcgtgatgctgcgrgataactcgggggacccggccgacccgcacaaggtgtacgcgctcagccgggagctgtgctggcgagaaggcccaggcacggaccagactgaggcagaggcccccgcagctgtcccaccaccacaggcccagggctccctgctggggagctgtacgggtgggcagtagagacgacccccagccccgggccccagcccgcggcactaacgacaggcgaggccgcggccccagagtccccgcaccaggcagagccgtacctgtcaccctccccaagcgcctgcaccgcggtgcaagagcccagcccaggggcgctggacgtgaccatcatgtacaagggccgcacggtgctgcagaaggtggtgggacacccgagctgcacgttcctatacggccccccagacccagctgtccgggccacagacccccagcaggtagcattccccagccctgccgagctcccggaycagaagcagctgcgctacacggaggaactgctgcggcacgtggcccctgggttgcacctggagcttcgggggccacagctgtgggcccggcgcatgggcaagtgcaaggtgtactgggaggtgggcggmcccccaggctccgccagcccctccaccccagcctgcctgctgcctcggaactgtgacacccccatcttcgacttcagagtcttcttccragagctggtggaattccgggcacggcagcgccgtggctccccacgctataccatctacctgggcttcgggcaggacctgtcagctgggaggcccaaggagaagagcctggtcctggtgaagctggaaccctggctgtgccgagtgcacctagagggcacgcagcgtgagggtgtgtcttccctggatagcagcagcctcagcctctgcctgtccagcgccaacagcctctatgacracatcgagtgcttccttatggagctggagcagcccgcctagaacccagtctaatgagaactccagaaagctggagcagcccacctagagctggccgcggccgcccagtctaataaaaagaactccagaaca

SEQ ID NO: 104 - DNA, 1503 bp, Homo sapiens
tccgcagggtccggcctgcgccttcccgccaggcctggacactggttcaacacctgtgacttcatgtgtgcgcgccggccacacctgcrgtcacacctgtagccccctctgccaagagatccataccgaggcagcgtcggtggctacaagccctcagtccacacctgtggacacctgtgacacctgaccgccayctaactgcccctgcagaaggagcaatggccttggctcctgagagggcagccccacgcgtgctgttcggagagtggctccttggagagatcagcagcggctgctatgaggggctgcagtggctggacgaggcccgcacctgtttccgcgtgccctggaagcacgtggcccgccccccgaggctgagactgcggagcgcgccggctggaaaaccaacttccgctgcgcactgcgcagcacgcgtcgcttcgtgatgctgcgrgataactcgggggacccggccgacccgcacaaggtgtacgcgctcagccgggagctgtgctggcgagaaggcccaggcacggaccagactgaggcagaggcccccgcagctgtcccaccaccacaggcccagggctccctgctggggagctgtacgggtgggcagtagagacgacccccagccccgggccccagcccgcggcactaacgacaggcgaggccgcggccccagagtccccgcaccaggcagagccgtacctgtcaccctccccaagcgcctgcaccgcggtgcaagagcccagcccaggggcgctggacgtgaccatcatgtacaagggccgcacggtgctgcagaaggtggtgggacacccgagctgcacgttcctatacggccccccagacccagctgtccgggccacagacccccagcaggtagcattccccagccctgccgagctcccggaycagaagcagctgcgctacacggaggaactgctgcggcacgtggcccctgggttgcacctggagcttcgggggccacagctgtgggcccggcgcatgggcaagtgcaaggtgtactgggaggtgggcggmcccccaggctccgccagcccctccaccccagcctgcctgctgcctcggaactgtgacacccccatcttcgacttcagagtcttcttccragagctggtggaattccgggcacggcagcgccgtggctccccacgctataccatctacctgggcttcgggcaggacctgtcagctgggaggcccaaggagaagagcctggtcctggtgaagctggaaccctggctgtgccgagtgcacctagagggcacgcagcgtgagggtgtgtcttccctggatagcagcagcctcagcctctgcctgtccagcgccaacagcctctatgacracatcgagtgcttccttatggagctggagcagcccgcctagaacccagtctaatgagaactccagaaagctggagcagcccacctagagctggccgcggccgcccagtctaataaaaagaactccagaaca

SEQ ID NO: 105 - DNA, 1733 bp, Homo sapiens
tccgcagggtccggcctgcgccttcccgccaggcctggacactggttcaacacctgtgacttcatgtgtgcgcgccggccacacctgcrgtcacacctgtagccccctctgccaagagatccataccgaggcagcgtcggtggctacaagccctcagtccacacctgtggacacctgtgacacctgaccgccayctaactgcccctgcagaaggagcaatggccttggctcctgagagggcagccccacgcgtgctgttcggagagtggctccttggagagatcagcagcggctgctatgaggggctgcagtggctggacgaggcccgcacctgtttccgcgtgccctggaagcacttcgcgcgcaaggacctgagcgaggccgacgcgcgcatyttcaaggcctgggctgtggcccgcggcaggtggccgcctagcagcaggggaggtggcccgccccccgaggctgagactgcggagcgcgccggctggaaaaccaacttccgctgcgcactgcgcagcacgcgtcgcttcgtgatgctgcgrgataactcgggggacccggccgacccgcacaaggtgtacgcgctcagccgggagctgtgctggcgagaaggcccaggcacggaccagactgaggcagaggcccccgcagctgtcccaccaccacagggtgggcccccagggccattcytggcacacacrcatgctggactccaagccccaggccccctccctgccccagctggtgacragggggacctcctgctccaggcagtgcaacagagctgcctggcagaccatctgctgacagcgtcatggggggcagatccagtcccaaccaaggctcctggagagggacaagaagggcttcccctgactggggcctgtgctggaggcgaggccgcggccccagagtccccgcaccaggcagagccgtacctgtcaccctccccaagcgcctgcaccgcggtgcaagagcccagcccaggggcgctggacgtgaccatcatgtacaagggccgcacggtgctgcagaaggtggtgggacacccgagctgcacgttcctatacggccccccagacccagctgtccgggccacagacccccagcaggtagcattccccagccctgccgagctcccggaycagaagcagctgcgctacacggaggaactgctgcggcacgtggcccctgggttgcacctggagcttcgggggccacagctgtgggcccggcgcatgggcaagtgcaaggtgtactgggaggtgggcggmcccccaggctccgccagcccctccaccccagcctgcctgctgcctcggaactgtgacacccccatcttcgacttcagagtcttcttccragagctggtggaattccgggcacggcagcgccgtggctccccacgctataccatctacctgggcttcgggcaggacctgtcagctgggaggcccaaggagaagagcctggtcctggtgaagctggaaccctggctgtgccgagtgcacctagagggcacgcagcgtgagggtgtgtcttccctggatagcagcagcctcagcctctgcctgtccagcgccaacagcctctatgacracatcgagtgcttccttatggagctggagcagcccgcctagaacccagtctaatgagaactccagaaagctggagcagcccacctagagctggccgcggccgcccagtctaataaaaagaactccagaaca

SEQ ID NO: 106 - DNA, 1885 bp, Homo sapiens
ggtccggcctgcgccttcccgccaggcctggacactggttcaacacctgtgacttcatgtgtgcgcgccggccacacctgcrgtcacacctgtagccccctctgccaagagatccataccgaggcagcgtcggtggctacaagccctcagtccacacctgtggacacctgtgacacctggccacacgacctgtggccgcggcctggcgtctgctgcgacaggagcccttacctcccctgttataacacctgaccgccayctaactgcccctgcagaaggagcaatggccttggctcctgagagggcagccccacgcgtgctgttcggagagtggctccttggagagatcagcagcggctgctatgaggggctgcagtggctggacgaggcccgcacctgtttccgcgtgccctggaagcacttcgcgcgcaaggacctgagcgaggccgacgcgcgcatyttcaaggcctgggctgtggcccgcggcaggtggccgcctagcagcaggggaggtggcccgccccccgaggctgagactgcggagcgcgccggctggaaaaccaacttccgctgcgcactgcgcagcacgcgtcgcttcgtgatgctgcgrgataactcgggggacccggccgacccgcacaaggtgtacgcgctcagccgggagctgtgctggcgagaaggcccaggcacggaccagactgaggcagaggcccccgcagctgtcccaccaccacagggtgggcccccagggccattcytggcacacacrcatgctggactccaagccccaggccccctccctgccccagctggtgacragggggacctcctgctccaggcagtgcaacagagctgcctggcagaccatctgctgacagcgtcatggggggcagatccagtcccaaccaaggctcctggagagggacaagaagggcttcccctgactggggcctgtgctggaggcccagggctccctgctggggagctgtacgggtgggcagtagagacgacccccagccccgggccccagcccgcggcactaacgacaggcgaggccgcggccccagagtccccgcaccaggcagagccgtacctgtcaccctccccaagcgcctgcaccgcggtgcaagagcccagcccaggggcgctggacgtgaccatcatgtacaagggccgcacggtgctgcagaaggtggtgggacacccgagctgcacgttcctatacggccccccagacccagctgtccgggccacagacccccagcaggtagcattccccagccctgccgagctcccggaycagaagcagctgcgctacacggaggaactgctgcggcacgtggcccctgggttgcacctggagcttcgggggccacagctgtgggcccggcgcatgggcaagtgcaaggtgtactgggaggtgggcggmcccccaggctccgccagcccctccaccccagcctgcctgctgcctcggaactgtgacacccccatcttcgacttcagagtcttcttccragagctggtggaattccgggcacggcagcgccgtggctccccacgctataccatctacctgggcttcgggcaggacctgtcagctgggaggcccaaggagaagagcctggtcctggtgaagctggaaccctggctgtgccgagtgcacctagagggcacgcagcgtgagggtgtgtcttccctggatagcagcagcctcagcctctgcctgtccagcgccaacagcctctatgacracatcgagtgcttccttatggagctggagcagcccgcctagaacccagtctaatgagaactccagaaagctggagcagcccacctagagctggccgcggccgcccagtctaataaaaagaactccagaaca

SEQ ID NO: 107 - DNA, 1798 bp, Homo sapiens
ggtccggcctgcgccttcccgccaggcctggacactggttcaacacctgtgacttcatgtgtgcgcgccggccacacctgcrgtcacacctgtagccccctctgccaagagatccataccgaggcagcgtcggtggctacaagccctcagtccacacctgtggacacctgtgacacctggccacacgacctgtggccgcggcctggcgtctgctgcgacaggagcccttacctcccctgttataacacctgaccgccayctaactgcccctgcagaaggagcaatggccttggctcctgagagggcagccccacgcgtgctgttcggagagtggctccttggagagatcagcagcggctgctatgaggggctgcagtggctggacgaggcccgcacctgtttccgcgtgccctggaagcacttcgcgcgcaaggacctgagcgaggccgacgcgcgcatyttcaaggcctgggctgtggcccgcggcaggtggccgcctagcagcaggggaggtggcccgccccccgaggctgagactgcggagcgcgccggctggaaaaccaacttccgctgcgcactgcgcagcacgcgtcgcttcgtgatgctgcgrgataactcgggggacccggccgacccgcacaaggtgtacgcgctcagccgggagctgtgctggcgagaaggcccaggcacggaccagactgaggcagaggcccccgcagctgtcccaccaccacagggtgggcccccagggccattcytggcacacacrcatgctggactccaagccccaggccccctccctgccccagctggtgacragggggacctcctgctccaggcagtgcaacagagctgcctggcagaccatctgctgacagcgtcatggggggcagatccagtcccaaccaaggctcctggagagggacaagaagggcttcccctgactggggcctgtgctggaggcgaggccgcggccccagagtccccgcaccaggcagagccgtacctgtcaccctccccaagcgcctgcaccgcggtgcaagagcccagcccaggggcgctggacgtgaccatcatgtacaagggccgcacggtgctgcagaaggtggtgggacacccgagctgcacgttcctatacggccccccagacccagctgtccgggccacagacccccagcaggtagcattccccagccctgccgagctcccggaycagaagcagctgcgctacacggaggaactgctgcggcacgtggcccctgggttgcacctggagcttcgggggccacagctgtgggcccggcgcatgggcaagtgcaaggtgtactgggaggtgggcggmcccccaggctccgccagcccctccaccccagcctgcctgctgcctcggaactgtgacacccccatcttcgacttcagagtcttcttccragagctggtggaattccgggcacggcagcgccgtggctccccacgctataccatctacctgggcttcgggcaggacctgtcagctgggaggcccaaggagaagagcctggtcctggtgaagctggaaccctggctgtgccgagtgcacctagagggcacgcagcgtgagggtgtgtcttccctggatagcagcagcctcagcctctgcctgtccagcgccaacagcctctatgacracatcgagtgcttccttatggagctggagcagcccgcctagaacccagtctaatgagaactccagaaagctggagcagcccacctagagctggccgcggccgcccagtctaataaaaagaactccagaaca

SEQ ID NO: 108 - DNA, 1495 bp, Homo sapiens
tccgcagggtccggcctgcgccttcccgccaggcctggacactggttcaacacctgtgacttcatgtgtgcgcgccggccacacctgcrgtcacacctgtagccccctctgccaagagatccataccgaggcagcgtcggtggctacaagccctcagtccacacctgtggacacctgtgacacctgaccgccayctaactgcccctgcagaaggagcaatggccttggctcctgagagggcagccccacgcgtgctgttcggagagtggctccttggagagatcagcagcggctgctatgaggggctgcagtggctggacgaggcccgcacctgtttccgcgtgccctggaagcacttcgcgcgcaaggacctgagcgaggccgacgcgcgcatyttcaaggcctgggctgtggcccgcggcaggtggccgcctagcagcaggggaggtggcccgccccccgaggctgagactgcggagcgcgccggctggaaaaccaacttccgctgcgcactgcgcagcacgcgtcgcttcgtgatgctgcgrgataactcgggggacccggccgacccgcacaaggtgtacgcgctcagccgggagctgtgctggcgagaaggcccaggcacggaccagactgaggcagaggcccccgcagctgtcccaccaccacaggcccagggctccctgctggggagctgtacgggtgggcagtagagacgacccccagccccgggccccagcccgcggcactaacgacaggcgaggccgcggccccagagtccccgcaccaggcagagccgtacctgtcaccctccccaagcgcctgcaccgcggtgcaagagcccagcccaggggcgctggacgtgaccatcatgtacaagggccgcacggtgctgcagaaggtggtgggacacccgagctgcacgttcctatacggccccccagacccagctgtccgggccacagacccccagcaggtagcattccccagccctgccgagctcccggaycagaagcagctgcgctacacggaggaactgctgcggcacgtggcccctgggttgcacctggagcttcgggggccacagctgtgggcccggcgcatgggcaagtgcaaggtgtactgggaggtgggcggmcccccaggctccgccagcccctccaccccacttcgacttcagagtcttcttccragagctggtggaattccgggcacggcagcgccgtggctccccacgctataccatctacctgggcttcgggcaggacctgtcagctgggaggcccaaggagaagagcctggtcctggtgaagctggaaccctggctgtgccgagtgcacctagagggcacgcagcgtgagggtgtgtcttccctggatagcagcagcctcagcctctgcctgtccagcgccaacagcctctatgacracatcgagtgcttccttatggagctggagcagcccgcctagaacccagtctaatgagaactccagaa

SEQ ID NO: 109 - DNA, 1770 bp, Homo sapiens
aacaggcggcgcgcgcccttcccggaaactcccgcctggccaccataaaagcgccggccctccgcttccccgcgagacgaaacttcccgtcccggcggctctggcacccagggtccggcctgcgccttcccgccaggcctggacactggttcaacacctgtgacttcatgtgtgcgcgccggccacacctgcrgtcacacctgtagccccctctgccaagagatccataccgaggcagcgtcggtggctacaagccctcagtccacacctgtggacacctgtgacacctggccacacgacctgtggccgcggcctggcgtctgctgcgacaggagcccttacctcccctgttataacacctgaccgccayctaactgcccctgcagaaggagcaatggccttggctcctgagagggcagccccacgcgtgctgttcggagagtggctccttggagagatcagcagcggctgctatgaggggctgcagtggctggacgaggcccgcacctgtttccgcgtgccctggaagcacttcgcgcgcaaggacctgagcgaggccgacgcgcgcatyttcaaggcctgggctgtggcccgcggcaggtggccgcctagcagcaggggaggtggcccgccccccgaggctgagactgcggagcgcgccggctggaaaaccaacttccgctgcgcactgcgcagcacgcgtcgcttcgtgatgctgcgrgataactcgggggacccggccgacccgcacaaggtgtacgcgctcagccgggagctgtgctggcgagaaggcccaggcacggaccagactgaggcagaggcccccgcagctgtcccaccaccacaggcccagggctccctgctggggagctgtacgggtgggcagtagagacgacccccagccccgggccccagcccgcggcactaacgacaggcgaggccgcggccccagagtccccgcaccaggcagagccgtacctgtcaccctccccaagcgcctgcaccgcggtgcaagagcccagcccaggggcgctggacgtgaccatcatgtacaagggccgcacggtgctgcagaaggtggtgggacacccgagctgcacgttcctatacggccccccagacccagctgtccgggccacagacccccagcaggtagcattccccagccctgccgagctcccggaycagaagcagctgcgctacacggaggaactgctgcggcacgtggcccctgggttgcacctggagcttcgggggccacagctgtgggcccggcgcatgggcaagtgcaaggtgtactgggaggtgggcggmcccccaggctccgccagcccctccaccccagcctgcctgctgcctcggaactgtgacacccccatcttcgacttcagagtcttcttccragagctggtggaattccgggcacggcagcgccgtggctccccacgctataccatctacctgggcttcgggcaggacctgtcagctgggaggcccaaggagaagagcctggtcctggtgaagctggaaccctggctgtgccgagtgcacctagagggcacgcagcgtgagggtgtgtcttccctggatagcagcagcctcagcctctgcctgtccagcgccaacagcctctatgacracatcgagtgcttccttatggagctggagcagcccgcctagaacccagtctaatgagaactccagaaagctggagcagcccacctagagctggccgcggccgcccagtctaataaaaagaactccagaaca

SEQ ID NO: 110 - DNA, 8226 bp, Homo sapiens
ggcggggcggggacagcccggcgggtctctcctcccccgcgccccgggcctccagaggggcgggaggggaccgtcccatataagccccggctcccggcgctcggacgcccgcgccggctgtgctgcacagggggaggagagggaaccccaggcgcgagcgggaagaggggacctgcagccacaacttctctggtcctctgcatcccttctgtccctccacccgtccccttccccaccctctggcccccaccttcttggaggcgacaacccccgggaggcattagaagggatttttcccgcaggttgcgaagggaagcaaacttggtggcaacttgcctcccggtgcgggcgtctctcccccaccgtctcaacatgcttaggggtccggggcccgggctgctgctgctggccgtccwgtgcctggggacagcggtgccctccacgggagcctcgaagagcaagaggcaggctcagcaaatggttcagccccagtccccggtggctgtcagtcaaagcaagcccggttgttatgacaatggaaaacactatcagataaatcaacagtgggagcggacctacctaggcaatgcgttggtttgtacttgttatggaggaagccgaggttttaactgcgagagtaaacctgaagctgaagagacttgctttgacaagtacactgggaacacttaccgagtgggtgacacttatgagcgtcctaaagactccatgatctgggactgtacctgcatyggggctgggcgagggagaataagctgtaccatcgcaaaccgctgccatgaagggggtcagtcctacaagattggtgacacctggaggagaccacatgagactggtggttacatgttagagtgtgtgtgtcttggtaatggaaaaggagaatggacctgcaagcccatagctgagaagtgttttgatcatgctgctgggacttcctatgtggtcggagaaacgtgggagaagccctaccaaggctggatgatggtagattgtacttgcctgggagaaggcagcggacgcatcacttgcacttctagaaatagatgcaacgatcaggacacaaggacatcctatagaattggagacacctggagcaagaaggataatcgaggaaacctgctccagtgcatctgcacaggcaacggccgaggagagtggaagtgtgagaggcacacctctgtgcagaccacatcgagcggatctggccccttcaccgatgttcgtgcagctgtttaccaaccgcagcctcacccccagcctcctccctatggccactgtgtcacagacagtggtgtggtctactctgtggggatgcagtggctgaagacacaaggaaataagcaaatgctttgcacgtgcctgggcaacggagtcagctgccaagagacagctgtaacccagacttacggtggcaactcaaatggagagccatgtgtcttaccattcacctacaatggcaggacgttctactcctgcaccacagaagggcgacaggacggacatctttggtgcagcacaacttcgaattatgagcaggaccagaaatactctttctgcacagaccacactgttttggttcagactcgaggaggaaattccaatggtgccttgtgccacttccccttcctatacaacaaccacaattacactgattgcacttctgagggcagaagagacaacatgaagtggtgtgggaccacacagaactatgatgccgaccagaagtttgggttctgccccatggctgcccacgaggaaatctgcacaaccaatgaaggggtcatgtaccgcattggagatcagtgggataagcagcatgacatgggtcacatgatgaggtgcacgtgtgttgggaatggtcgtggggaatggacatgcattgcctactcgcagcttcgagatcagtgcattgttgatgacatcacttacaatgtgaacgacacattccacaagcgtcatgaagaggggcacatgctgaactgtacatgcttcggtcagggtcggggcaggtggaagtgtgatcccgtcgaccaatgccaggattcagagactgggacgttttatcaaattggagattcatgggagaagtatgtgcatggtgtcagataccagtgctactgctatggccgtggcattggggagtggcattgccaacctttacagacctatccaagctcaagtggtcctgtcgaagtatttatcactgagactccgagtcagcccaactcccaccccatccagtggaatgcaccacagccatctcacatttccaagtacattctcaggtggagacctaaaaattctgtaggccgttggaaggaagctaccataccaggccacttaaactcctacaccatcaaaggcctgaagcctggtgtggtatacgagggccagctcatcagcatccagcagtacggccaccaagaagtgactcgctttgacttcaccaccaccagcaccagcacacctgtgaccagtatgtacacaaccaccctcatgcctcctacccccgaggttcctagagctaggctctcctgaggcaatgctttccttctcaattcatattcttccaggaggggcaccaacgttttttaaaatgatgttggcgacgaggacggtaaattttctagatgactgaaggctgactttcccctttctgtgactctctaggcaacaccgtgacaggagagacgactcccttttctcctcttgtggccacttctgaatctgtgaccgaaatcacagccagtagctttgtggtctcctgggtctcagcttccgacaccgtgtcgggattccgggtggaatatgagctgagtgaggagggagatgagccacagtacctggatcttccaagcacagccacttctgtgaacatccctgacctgcttcctggccgaaaatacattgtaaatgtctatcagatatctgaggatggggagcagagtttgatcctgtctacttcacaaacaacagcgcctgatgccccwcctgacmcgactgtggaccaagttgatgacacctcaattgttgttcgctggagcagaccccaggctcccatcacagggtacagaatagtctattcgccatcagtagaaggtagcagcacagaactcaaccttcctgaaactgcaaactccgtcaccctcagtgacttgcaacctggtgttcagtataacatcactatctatgctgtggaagaaaatcaagaaagtacacctgttgtcattcaacaagaaaccactggcaccccacgctcagatacagtgccctctcccagggacctgcagtttgtggaagtgacagacgtgaaggtcaccatcatgtggacaccgcctgagagtgcagtgaccggctaccgtgtggatgtgatccccgtcaacctgcctggcgagcacgggcagaggctgcccatcagcaggaacacctttgcagaagtcaccgggctgtcccctggggtcacctattacttcaaagtctttgcagtgagccatgggagggagagcaagcctctgactgctcaacagacaaccaaactggatgctcccactaacctccagtttgtcaatgaaactgattctactgtcctggtgagatggactccacctcgggcccagataacaggataccgactgaccgtgggccttacccgaagaggmcagcccaggcagtacaatrtgggtccctctgtctccaagtacccmctgaggaatctgcagcctgcatctgagtacaccgtatccctcgtggccataaagggcaaccaagagagccccaaagccactggagtctttaccacactgcagcctgggagctctattccaccttacaacaccgaggtgactgagaccaccattgtgatcacatggacgcctgctccaagaattggttttaagctgggtgtacgaccaagccagggaggagaggcaccacgagaagtgacttcagactcaggaagcatcgttgtgtccggcttgactccaggagtagaatacgtctacaccatccaagtcctgagagatggacaggaaagagatgcgccaattgtaaacaaagtggtgacaccattgtctccaccaacaaacttgcatctggaggcaaaccctgacactggagtgctcacagtctcctgggagaggagcaccaccccagacattactggttatagaattaccacaacccctacaaacggccagcagggaaattctttggaagaagtggtccatgctgatcagagctcctgcacttttgataacctgagtcccggcctggagtacaatgtcagtgtttacactgtcaaggatgacaaggaaagtgtccctatctctgataccatcatcccagctgttcctcctcccactgacctgcgattcaccaacattggtccagacaccatgcgtgtcacctgggctccacccccatccattgatttaaccaacttcctggtgcgttactcacctgtgaaaaatgaggaagatgttgcagagttgtcaatttctccttcagacaatgcagtggtcttaacaaatctcctgcctggtacagaatatgtagtgagtgtctccagtgtctacgaacaacatgagagcacacctcttagaggaagacagaaaacaggtcttgattccccaactggcattgacttttctgatattactgccaactcttttactgtgcactggattgctcctcgagccaccatcactggctacaggatccgccatcatcccgagcacttcagtgggagacctcgagaagatcgggtgccccactctcggaattccatcaccctcaccaacctcactccaggcacagagtatgtggtcagcatcgttgctcttaatggcagagaggaaagtcccttattgattggccaacaatcaacagtttctgatgttccgagggacctggaagttgttgctgcgacccccaccagcctactgatcagctgggatgctcctgctgtcacagtgagatattacaggatcacttacggagaracaggaggaaatagccctgtccaggagttcactgtgcctgggagcaagtctacagctaccatcagcggccttaaacctggagttgattataccatcactgtgtatgctgtcactggccgtggagacagccccgcaagcagcaagccaatttccattaattaccgaacagaaattgacaaaccatcccagatgcaagtgaccgatgttcaggacaacagcattagtgtcaagtggctgccttcaagttcccctgttactggttacagagtaaccaccactcccaaaaatggaccaggaccaacaaaaactaaaactgcaggtccagatcaaacagaaatgactattgaaggcttgcagcccacagtggagtatgtggttagtgtctatgatggaatccatgagctattccctgcacctgatggtgaagaagacactgcagagctgcaaggcctcagaccgggttctgagtacacagtcagtgtggttgccttgcacgatgatatggagagccagcccctgattggaacccagtccacagctattcctgcaccaactgacctgaagttcactcaggtcacacccacaagcctgagcgcccagtggacaccacccaatgttcagctcactggatatcgagtgcgggtgacccccaaggagaagaccggaccaatgaaagaaatcaaccttgctcctgacagctcatccgtggttgtatcaggacttatggtggccaccaaatatgaagtgagtgtctatgctcttaaggacactttgacaagcagaccagctcagggwgttgtcaccactctggagaatgtcagcccaccaagaagggctcgtgtgacagatgctactgagaccaccatcaccattagctggagaaccaagactgagacgatcactggcttccaagttgatgccgttccagccaatggccagactccaatccagagaaccatcaagccagatgtcagaagctacaccatcacaggtttacaaccaggcactgactacaagatctacctgtacaccttgaatgacaatgctcggagctcccctgtggtcatcgacgcctccactgccattgatgcaccatccaacctgcgtttcctggccaccacacccaattccttgctggtatcatggcagccgccacgtgccaggattaccggctacatcatcaagtatgagaagcctgggtctcctcccagagaagtggtccctcggccccgccctggtgtcacagaggctactattactggcctggaaccgggaaccgaatatacaatttatgtcattgccctgaagaataatcagaagagcgagcccctgattggaaggaaaaagacagttcaaaagacccctttcgtcacccaccctgggtatgacactggaaatggtattcagcttcctggcacttctggtcagcaacccagtgttgggcaacaaatgatctttgaggaacatggttttaggcggaccacaccgcccacaacggccacccccataaggcataggccaagaccatacccgccgaatgtaggacaagaagctctctctcagacaaccrtctcatgggccccattccaggacacttctgagtacatcatttcatgtcatcctgttggcactgatgaagaacccttacagttcagggttcctggaacttctaccagtgccactctgacaggcctcaccagaggtgccacctacaacrtcatagtggaggcactgaaagaccagcagaggcataaggttcrggaagaggttgttaccgtgggcaactctgtcaacgaaggcttgaaccaacctacggatgactcgtgctttgacccctacacagtttcccattatgccgttggagatgagtgggaacgaatgtctgaatcaggctttaaactgttgtgccagtgcttaggctttggaagtggtcatttcagatgtgattcatctagatggtgccatgacaatggtgtgaactacaagattggagagaagtgggaccgtcagggagaaaatggccagatgatgagctgcacatgtcttgggaacggaaaaggagaattcaagtgtgaccctcatgaggcaacgtgttaygatgatgggaagacataccacgtaggagaacagtggcagaaggaatatctcggtgccatttgctcctgcacatgctttggaggccagcggggctggcgctgtgacaactgccgcagacctgggggtgaacccagtcccgaaggcactactggccagtcctacaaccagtattctcagagataccatcagagaacaaacactaatgttaattgcccaattgagtgcttcatgcctttagatgtacaggctgacagagaagattcccgagagtaaatcatctttccaatccagaggaacaagcatgtctctctgccaagatccatctaaactggagtgatgttagcagacccagcttagagttcttctttctttcttaagccctttgctctggaggaagttctcyagcttcagctcaactcacagcttctccaagcatcaccctgggagtttcctgagggttttctcataaatgagggctgcacattgcctgttctgcttcgaagtattcaataccgctcagtattttaaatgaagtgattctaagatttggtttgggatcaataggaaagcatatgcagccaaccaagatgcaaatgttttgaaatgattgtctggcccgcaatactgtaggaacaagcatgatcttgttactgtgatattttaaatatccacagtactcactttttccaaatgatcctagtaattgcctagaaatatctttctcttacctgttatttatcaatttttcccagtatttttatacggaaaaarttgtattgaaaacacttagtatgcagttgataagaggaatttggtataattatggtgggtgattattttttatactgtatgtgccaaagctttactactgtggaaagacaactgttttaataaaagatttacattccacaacttgaagttcatctatttgatataagacaccttcgggggaaataattcctgtgaatattctttttcaattcagcaaacatttgaaaatctatgatgtgcaagtctaattgttgatttcagtacaagattttctaaatcagttgctacaaaaactgattggtttttgtcacttcatctcttcactaatggagatagcttt

SEQ ID NO: 111 - DNA, 2443 bp, Homo sapiens
ggcggggcggggacagcccggcgggtctctcctcccccgcgccccgggcctccagaggggcgggaggggaccgtcccatataagccccggctcccggcgctcggacgcccgcgccggctgtgctgcacagggggaggagagggaaccccaggcgcgagcgggaagaggggacctgcagccacaacttctctggtcctctgcatcccttctgtccctccacccgtccccttccccaccctctggcccccaccttcttggaggcgacaacccccgggaggcattagaagggatttttcccgcaggttgcgaagggaagcaaacttggtggcaacttgcctcccggtgcgggcgtctctcccccaccgtctcaacatgcttaggggtccggggcccgggctgctgctgctggccgtccwgtgcctggggacagcggtgccctccacgggagcctcgaagagcaagaggcaggctcagcaaatggttcagccccagtccccggtggctgtcagtcaaagcaagcccggttgttatgacaatggaaaacactatcagataaatcaacagtgggagcggacctacctaggcaatgcgttggtttgtacttgttatggaggaagccgaggttttaactgcgagagtaaacctgaagctgaagagacttgctttgacaagtacactgggaacacttaccgagtgggtgacacttatgagcgtcctaaagactccatgatctgggactgtacctgcatyggggctgggcgagggagaataagctgtaccatcgcaaaccgctgccatgaagggggtcagtcctacaagattggtgacacctggaggagaccacatgagactggtggttacatgttagagtgtgtgtgtcttggtaatggaaaaggagaatggacctgcaagcccatagctgagaagtgttttgatcatgctgctgggacttcctatgtggtcggagaaacgtgggagaagccctaccaaggctggatgatggtagattgtacttgcctgggagaaggcagcggacgcatcacttgcacttctagaaatagatgcaacgatcaggacacaaggacatcctatagaattggagacacctggagcaagaaggataatcgaggaaacctgctccagtgcatctgcacaggcaacggccgaggagagtggaagtgtgagaggcacacctctgtgcagaccacatcgagcggatctggccccttcaccgatgttcgtgcagctgtttaccaaccgcagcctcacccccagcctcctccctatggccactgtgtcacagacagtggtgtggtctactctgtggggatgcagtggctgaagacacaaggaaataagcaaatgctttgcacgtgcctgggcaacggagtcagctgccaagagacagctgtaacccagacttacggtggcaactcaaatggagagccatgtgtcttaccattcacctacaatggcaggacgtgcagcacaacttcgaattatgagcaggaccagaaatactctttctgcacagaccacactgttttggttcagactcgaggaggaaattccaatggtgccttgtgccacttccccttcctatacaacaaccacaattacactgattgcacttctgagggcagaagagacaacatgaagtggtgtgggaccacacagaactatgatgccgaccagaagtttgggttctgccccatggctgcccacgaggaaatctgcacaaccaatgaaggggtcatgtaccgcattggagatcagtgggataagcagcatgacatgggtcacatgatgaggtgcacgtgtgttgggaatggtcgtggggaatggacatgcattgcctactcgcagcttcgagatcagtgcattgttgatgacatcacttacaatgtgaacgacacattccacaagcgtcatgaagaggggcacatgctgaactgtacatgcttcggtcagggtcggggcaggtggaagtgtgatcccgtcgaccaatgccaggattcagagactgggacgttttatcaaattggagattcatgggagaagtatgtgcatggtgtcagataccagtgctactgctatggccgtggcattggggagtggcattgccaacctttacagacctatccaagctcaagtggtcctgtcgaagtatttatcactgagactccgagtcagcccaactcccaccccatccagtggaatgcaccacagccatctcacatttccaagtacattctcaggtggagacctgtgagtatcccacccagaaaccttggatactgagtctcctaatcttatcaattctgatggtttctttttttcccagcttttgagccaacaactctgattaactattcctatagcatttactatatttgtttagtgaacaaacaatatgtggtcaattaaattgacttgtagactg

SEQ ID NO: 112 - DNA, 8332 bp, Homo sapiens
ggcggggcggggacagcccggcgggtctctcctcccccgcgccccgggcctccagaggggcgggaggggaccgtcccatataagccccggctcccggcgctcggacgcccgcgccggctgtgctgcacagggggaggagagggaaccccaggcgcgagcgggaagaggggacctgcagccacaacttctctggtcctctgcatcccttctgtccctccacccgtccccttccccaccctctggcccccaccttcttggaggcgacaacccccgggaggcattagaagggatttttcccgcaggttgcgaagggaagcaaacttggtggcaacttgcctcccggtgcgggcgtctctcccccaccgtctcaacatgcttaggggtccggggcccgggctgctgctgctggccgtccwgtgcctggggacagcggtgccctccacgggagcctcgaagagcaagaggcaggctcagcaaatggttcagccccagtccccggtggctgtcagtcaaagcaagcccggttgttatgacaatggaaaacactatcagataaatcaacagtgggagcggacctacctaggcaatgcgttggtttgtacttgttatggaggaagccgaggttttaactgcgagagtaaacctgaagctgaagagacttgctttgacaagtacactgggaacacttaccgagtgggtgacacttatgagcgtcctaaagactccatgatctgggactgtacctgcatyggggctgggcgagggagaataagctgtaccatcgcaaaccgctgccatgaagggggtcagtcctacaagattggtgacacctggaggagaccacatgagactggtggttacatgttagagtgtgtgtgtcttggtaatggaaaaggagaatggacctgcaagcccatagctgagaagtgttttgatcatgctgctgggacttcctatgtggtcggagaaacgtgggagaagccctaccaaggctggatgatggtagattgtacttgcctgggagaaggcagcggacgcatcacttgcacttctagaaatagatgcaacgatcaggacacaaggacatcctatagaattggagacacctggagcaagaaggataatcgaggaaacctgctccagtgcatctgcacaggcaacggccgaggagagtggaagtgtgagaggcacacctctgtgcagaccacatcgagcggatctggccccttcaccgatgttcgtgcagctgtttaccaaccgcagcctcacccccagcctcctccctatggccactgtgtcacagacagtggtgtggtctactctgtggggatgcagtggctgaagacacaaggaaataagcaaatgctttgcacgtgcctgggcaacggagtcagctgccaagagacagctgtaacccagacttacggtggcaactcaaatggagagccatgtgtcttaccattcacctacaatggcaggacgttctactcctgcaccacagaagggcgacaggacggacatctttggtgcagcacaacttcgaattatgagcaggaccagaaatactctttctgcacagaccacactgttttggttcagactcgaggaggaaattccaatggtgccttgtgccacttccccttcctatacaacaaccacaattacactgattgcacttctgagggcagaagagacaacatgaagtggtgtgggaccacacagaactatgatgccgaccagaagtttgggttctgccccatggctgcccacgaggaaatctgcacaaccaatgaaggggtcatgtaccgcattggagatcagtgggataagcagcatgacatgggtcacatgatgaggtgcacgtgtgttgggaatggtcgtggggaatggacatgcattgcctactcgcagcttcgagatcagtgcattgttgatgacatcacttacaatgtgaacgacacattccacaagcgtcatgaagaggggcacatgctgaactgtacatgcttcggtcagggtcggggcaggtggaagtgtgatcccgtcgaccaatgccaggattcagagactgggacgttttatcaaattggagattcatgggagaagtatgtgcatggtgtcagataccagtgctactgctatggccgtggcattggggagtggcattgccaacctttacagacctatccaagctcaagtggtcctgtcgaagtatttatcactgagactccgagtcagcccaactcccaccccatccagtggaatgcaccacagccatctcacatttccaagtacattctcaggtggagacctaaaaattctgtaggccgttggaaggaagctaccataccaggccacttaaactcctacaccatcaaaggcctgaagcctggtgtggtatacgagggccagctcatcagcatccagcagtacggccaccaagaagtgactcgctttgacttcaccaccaccagcaccagcacacctgtgaccagcaacaccgtgacaggagagacgactcccttttctcctcttgtggccacttctgaatctgtgaccgaaatcacagccagtagctttgtggtctcctgggtctcagcttccgacaccgtgtcgggattccgggtggaatatgagctgagtgaggagggagatgagccacagtacctggatcttccaagcacagccacttctgtgaacatccctgacctgcttcctggccgaaaatacattgtaaatgtctatcagatatctgaggatggggagcagagtttgatcctgtctacttcacaaacaacagcgcctgatgccccwcctgacmcgactgtggaccaagttgatgacacctcaattgttgttcgctggagcagaccccaggctcccatcacagggtacagaatagtctattcgccatcagtagaaggtagcagcacagaactcaaccttcctgaaactgcaaactccgtcaccctcagtgacttgcaacctggtgttcagtataacatcactatctatgctgtggaagaaaatcaagaaagtacacctgttgtcattcaacaagaaaccactggcaccccacgctcagatacagtgccctctcccagggacctgcagtttgtggaagtgacagacgtgaaggtcaccatcatgtggacaccgcctgagagtgcagtgaccggctaccgtgtggatgtgatccccgtcaacctgcctggcgagcacgggcagaggctgcccatcagcaggaacacctttgcagaagtcaccgggctgtcccctggggtcacctattacttcaaagtctttgcagtgagccatgggagggagagcaagcctctgactgctcaacagacaaccaaactggatgctcccactaacctccagtttgtcaatgaaactgattctactgtcctggtgagatggactccacctcgggcccagataacaggataccgactgaccgtgggccttacccgaagaggmcagcccaggcagtacaatrtgggtccctctgtctccaagtacccmctgaggaatctgcagcctgcatctgagtacaccgtatccctcgtggccataaagggcaaccaagagagccccaaagccactggagtctttaccacactgcagcctgggagctctattccaccttacaacaccgaggtgactgagaccaccattgtgatcacatggacgcctgctccaagaattggttttaagctgggtgtacgaccaagccagggaggagaggcaccacgagaagtgacttcagactcaggaagcatcgttgtgtccggcttgactccaggagtagaatacgtctacaccatccaagtcctgagagatggacaggaaagagatgcgccaattgtaaacaaagtggtgacaccattgtctccaccaacaaacttgcatctggaggcaaaccctgacactggagtgctcacagtctcctgggagaggagcaccaccccagacattactggttatagaattaccacaacccctacaaacggccagcagggaaattctttggaagaagtggtccatgctgatcagagctcctgcacttttgataacctgagtcccggcctggagtacaatgtcagtgtttacactgtcaaggatgacaaggaaagtgtccctatctctgataccatcatcccagctgttcctcctcccactgacctgcgattcaccaacattggtccagacaccatgcgtgtcacctgggctccacccccatccattgatttaaccaacttcctggtgcgttactcacctgtgaaaaatgaggaagatgttgcagagttgtcaatttctccttcagacaatgcagtggtcttaacaaatctcctgcctggtacagaatatgtagtgagtgtctccagtgtctacgaacaacatgagagcacacctcttagaggaagacagaaaacaggtcttgattccccaactggcattgacttttctgatattactgccaactcttttactgtgcactggattgctcctcgagccaccatcactggctacaggatccgccatcatcccgagcacttcagtgggagacctcgagaagatcgggtgccccactctcggaattccatcaccctcaccaacctcactccaggcacagagtatgtggtcagcatcgttgctcttaatggcagagaggaaagtcccttattgattggccaacaatcaacagtttctgatgttccgagggacctggaagttgttgctgcgacccccaccagcctactgatcagctgggatgctcctgctgtcacagtgagatattacaggatcacttacggagaracaggaggaaatagccctgtccaggagttcactgtgcctgggagcaagtctacagctaccatcagcggccttaaacctggagttgattataccatcactgtgtatgctgtcactggccgtggagacagccccgcaagcagcaagccaatttccattaattaccgaacagaaattgacaaaccatcccagatgcaagtgaccgatgttcaggacaacagcattagtgtcaagtggctgccttcaagttcccctgttactggttacagagtaaccaccactcccaaaaatggaccaggaccaacaaaaactaaaactgcaggtccagatcaaacagaaatgactattgaaggcttgcagcccacagtggagtatgtggttagtgtctatgctcagaatccaagcggagagagtcagcctctggttcagactgcagtaaccaacattgatcgccctaaaggactggcattcactgatgtggatgtcgattccatcaaaattgcttgggaaagcccacaggggcaagtttccaggtacagggtgacctactckagccctgaggatggaatccatgagctattccctgcacctgatggtgaagaagacactgcagagctgcaaggcctcagaccgggttctgagtacacagtcagtgtggttgccttgcacgatgatatggagagccagcccctgattggaacccagtccacagctattcctgcaccaactgacctgaagttcactcaggtcacacccacaagcctgagcgcccagtggacaccacccaatgttcagctcactggatatcgagtgcgggtgacccccaaggagaagaccggaccaatgaaagaaatcaaccttgctcctgacagctcatccgtggttgtatcaggacttatggtggccaccaaatatgaagtgagtgtctatgctcttaaggacactttgacaagcagaccagctcagggwgttgtcaccactctggagaatgtcagcccaccaagaagggctcgtgtgacagatgctactgagaccaccatcaccattagctggagaaccaagactgagacgatcactggcttccaagttgatgccgttccagccaatggccagactccaatccagagaaccatcaagccagatgtcagaagctacaccatcacaggtttacaaccaggcactgactacaagatctacctgtacaccttgaatgacaatgctcggagctcccctgtggtcatcgacgcctccactgccattgatgcaccatccaacctgcgtttcctggccaccacacccaattccttgctggtatcatggcagccgccacgtgccaggattaccggctacatcatcaagtatgagaagcctgggtctcctcccagagaagtggtccctcggccccgccctggtgtcacagaggctactattactggcctggaaccgggaaccgaatatacaatttatgtcattgccctgaagaataatcagaagagcgagcccctgattggaaggaaaaagacagacgagcttccccaactggtaacccttccacaccccaatcttcatggaccagagatcttggatgttccttccacagttcaaaagacccctttcgtcacccaccctgggtatgacactggaaatggtattcagcttcctggcacttctggtcagcaacccagtgttgggcaacaaatgatctttgaggaacatggttttaggcggaccacaccgcccacaacggccacccccataaggcataggccaagaccatacccgccgaatgtaggacaagaagctctctctcagacaaccrtctcatgggccccattccaggacacttctgagtacatcatttcatgtcatcctgttggcactgatgaagaacccttacagttcagggttcctggaacttctaccagtgccactctgacaggcctcaccagaggtgccacctacaacrtcatagtggaggcactgaaagaccagcagaggcataaggttcrggaagaggttgttaccgtgggcaactctgtcaacgaaggcttgaaccaacctacggatgactcgtgctttgacccctacacagtttcccattatgccgttggagatgagtgggaacgaatgtctgaatcaggctttaaactgttgtgccagtgcttaggctttggaagtggtcatttcagatgtgattcatctagatggtgccatgacaatggtgtgaactacaagattggagagaagtgggaccgtcagggagaaaatggccagatgatgagctgcacatgtcttgggaacggaaaaggagaattcaagtgtgaccctcatgaggcaacgtgttaygatgatgggaagacataccacgtaggagaacagtggcagaaggaatatctcggtgccatttgctcctgcacatgctttggaggccagcggggctggcgctgtgacaactgccgcagacctgggggtgaacccagtcccgaaggcactactggccagtcctacaaccagtattctcagagataccatcagagaacaaacactaatgttaattgcccaattgagtgcttcatgcctttagatgtacaggctgacagagaagattcccgagagtaaatcatctttccaatccagaggaacaagcatgtctctctgccaagatccatctaaactggagtgatgttagcagacccagcttagagttcttctttctttcttaagccctttgctctggaggaagttctcyagcttcagctcaactcacagcttctccaagcatcaccctgggagtttcctgagggttttctcataaatgagggctgcacattgcctgttctgcttcgaagtattcaataccgctcagtattttaaatgaagtgattctaagatttggtttgggatcaataggaaagcatatgcagccaaccaagatgcaaatgttttgaaatgatatgaccaaaattttaagtaggaaagtcacccaaacacttctgctttcacttaagtgtctggcccgcaatactgtaggaacaagcatgatcttgttactgtgatattttaaatatccacagtactcactttttccaaatgatcctagtaattgcctagaaatatctttctcttacctgttatttatcaatttttcccagtatttttatacggaaaaarttgtattgaaaacacttagtatgcagttgataagaggaatttggtataattatggtgggtgattattttttatactgtatgtgccaaagctttactactgtggaaagacaactgttttaataaaagatttacattccacaacttgaagttcatctatttgatataagacaccttcgggggaaataattcctgtgaatattctttttcaattcagcaaacatttgaaaatctatgatgtgcaagtctaattgttgatttcagtacaagattttctaaatcagttgctacaaaaactgattggtttttgtcacttcatctcttcactaatggagatagcttt

SEQ ID NO: 113 - DNA, 7935 bp, Homo sapiens
ggcggggcggggacagcccggcgggtctctcctcccccgcgccccgggcctccagaggggcgggaggggaccgtcccatataagccccggctcccggcgctcggacgcccgcgccggctgtgctgcacagggggaggagagggaaccccaggcgcgagcgggaagaggggacctgcagccacaacttctctggtcctctgcatcccttctgtccctccacccgtccccttccccaccctctggcccccaccttcttggaggcgacaacccccgggaggcattagaagggatttttcccgcaggttgcgaagggaagcaaacttggtggcaacttgcctcccggtgcgggcgtctctcccccaccgtctcaacatgcttaggggtccggggcccgggctgctgctgctggccgtccwgtgcctggggacagcggtgccctccacgggagcctcgaagagcaagaggcaggctcagcaaatggttcagccccagtccccggtggctgtcagtcaaagcaagcccggttgttatgacaatggaaaacactatcagataaatcaacagtgggagcggacctacctaggcaatgcgttggtttgtacttgttatggaggaagccgaggttttaactgcgagagtaaacctgaagctgaagagacttgctttgacaagtacactgggaacacttaccgagtgggtgacacttatgagcgtcctaaagactccatgatctgggactgtacctgcatyggggctgggcgagggagaataagctgtaccatcgcaaaccgctgccatgaagggggtcagtcctacaagattggtgacacctggaggagaccacatgagactggtggttacatgttagagtgtgtgtgtcttggtaatggaaaaggagaatggacctgcaagcccatagctgagaagtgttttgatcatgctgctgggacttcctatgtggtcggagaaacgtgggagaagccctaccaaggctggatgatggtagattgtacttgcctgggagaaggcagcggacgcatcacttgcacttctagaaatagatgcaacgatcaggacacaaggacatcctatagaattggagacacctggagcaagaaggataatcgaggaaacctgctccagtgcatctgcacaggcaacggccgaggagagtggaagtgtgagaggcacacctctgtgcagaccacatcgagcggatctggccccttcaccgatgttcgtgcagctgtttaccaaccgcagcctcacccccagcctcctccctatggccactgtgtcacagacagtggtgtggtctactctgtggggatgcagtggctgaagacacaaggaaataagcaaatgctttgcacgtgcctgggcaacggagtcagctgccaagagacagctgtaacccagacttacggtggcaactcaaatggagagccatgtgtcttaccattcacctacaatggcaggacgttctactcctgcaccacagaagggcgacaggacggacatctttggtgcagcacaacttcgaattatgagcaggaccagaaatactctttctgcacagaccacactgttttggttcagactcgaggaggaaattccaatggtgccttgtgccacttccccttcctatacaacaaccacaattacactgattgcacttctgagggcagaagagacaacatgaagtggtgtgggaccacacagaactatgatgccgaccagaagtttgggttctgccccatggctgcccacgaggaaatctgcacaaccaatgaaggggtcatgtaccgcattggagatcagtgggataagcagcatgacatgggtcacatgatgaggtgcacgtgtgttgggaatggtcgtggggaatggacatgcattgcctactcgcagcttcgagatcagtgcattgttgatgacatcacttacaatgtgaacgacacattccacaagcgtcatgaagaggggcacatgctgaactgtacatgcttcggtcagggtcggggcaggtggaagtgtgatcccgtcgaccaatgccaggattcagagactgggacgttttatcaaattggagattcatgggagaagtatgtgcatggtgtcagataccagtgctactgctatggccgtggcattggggagtggcattgccaacctttacagacctatccaagctcaagtggtcctgtcgaagtatttatcactgagactccgagtcagcccaactcccaccccatccagtggaatgcaccacagccatctcacatttccaagtacattctcaggtggagacctaaaaattctgtaggccgttggaaggaagctaccataccaggccacttaaactcctacaccatcaaaggcctgaagcctggtgtggtatacgagggccagctcatcagcatccagcagtacggccaccaagaagtgactcgctttgacttcaccaccaccagcaccagcacacctgtgaccagcaacaccgtgacaggagagacgactcccttttctcctcttgtggccacttctgaatctgtgaccgaaatcacagccagtagctttgtggtctcctgggtctcagcttccgacaccgtgtcgggattccgggtggaatatgagctgagtgaggagggagatgagccacagtacctggatcttccaagcacagccacttctgtgaacatccctgacctgcttcctggccgaaaatacattgtaaatgtctatcagatatctgaggatggggagcagagtttgatcctgtctacttcacaaacaacagcgcctgatgccccwcctgacmcgactgtggaccaagttgatgacacctcaattgttgttcgctggagcagaccccaggctcccatcacaggtcagctaaaatagtctattcgccatcagtagaaggtagcagcacagaactcaaccttcctgaaactgcaaactccgtcaccctcagtgacttgcaacctggtgttcagtataacatcactatctatgctgtggaagaaaatcaagaaagtacacctgttgtcattcaacaagaaaccactggcaccccacgctcagatacagtgccctctcccagggacctgcagtttgtggaagtgacagacgtgaaggtcaccatcatgtggacaccgcctgagagtgcagtgaccggctaccgtgtggatgtgatccccgtcaacctgcctggcgagcacgggcagaggctgcccatcagcaggaacacctttgcagaagtcaccgggctgtcccctggggtcacctattacttcaaagtctttgcagtgagccatgggagggagagcaagcctctgactgctcaacagacaaccaaactggatgctcccactaacctccagtttgtcaatgaaactgattctactgtcctggtgagatggactccacctcgggcccagataacaggataccgactgaccgtgggccttacccgaagaggmcagcccaggcagtacaatrtgggtccctctgtctccaagtacccmctgaggaatctgcagcctgcatctgagtacaccgtatccctcgtggccataaagggcaaccaagagagccccaaagccactggagtctttaccacactgcagcctgggagctctattccaccttacaacaccgaggtgactgagaccaccattgtgatcacatggacgcctgctccaagaattggttttaagctgggtgtacgaccaagccagggaggagaggcaccacgagaagtgacttcagactcaggaagcatcgttgtgtccggcttgactccaggagtagaatacgtctacaccatccaagtcctgagagatggacaggaaagagatgcgccaattgtaaacaaagtggtgacaccattgtctccaccaacaaacttgcatctggaggcaaaccctgacactggagtgctcacagtctcctgggagaggagcaccaccccagacattactggttatagaattaccacaacccctacaaacggccagcagggaaattctttggaagaagtggtccatgctgatcagagctcctgcacttttgataacctgagtcccggcctggagtacaatgtcagtgtttacactgtcaaggatgacaaggaaagtgtccctatctctgataccatcatcccagctgttcctcctcccactgacctgcgattcaccaacattggtccagacaccatgcgtgtcacctgggctccacccccatccattgatttaaccaacttcctggtgcgttactcacctgtgaaaaatgaggaagatgttgcagagttgtcaatttctccttcagacaatgcagtggtcttaacaaatctcctgcctggtacagaatatgtagtgagtgtctccagtgtctacgaacaacatgagagcacacctcttagaggaagacagaaaacaggtcttgattccccaactggcattgacttttctgatattactgccaactcttttactgtgcactggattgctcctcgagccaccatcactggctacaggatccgccatcatcccgagcacttcagtgggagacctcgagaagatcgggtgccccactctcggaattccatcaccctcaccaacctcactccaggcacagagtatgtggtcagcatcgttgctcttaatggcagagaggaaagtcccttattgattggccaacaatcaacagtttctgatgttccgagggacctggaagttgttgctgcgacccccaccagcctactgatcagctgggatgctcctgctgtcacagtgagatattacaggatcacttacggagaracaggaggaaatagccctgtccaggagttcactgtgcctgggagcaagtctacagctaccatcagcggccttaaacctggagttgattataccatcactgtgtatgctgtcactggccgtggagacagccccgcaagcagcaagccaatttccattaattaccgaacagaaattgacaaaccatcccagatgcaagtgaccgatgttcaggacaacagcattagtgtcaagtggctgccttcaagttcccctgttactggttacagagtaaccaccactcccaaaaatggaccaggaccaacaaaaactaaaactgcaggtccagatcaaacagaaatgactattgaaggcttgcagcccacagtggagtatgtggttagtgtctatgctcagaatccaagcggagagagtcagcctctggttcagactgcagtaaccactattcctgcaccaactgacctgaagttcactcaggtcacacccacaagcctgagcgcccagtggacaccacccaatgttcagctcactggatatcgagtgcgggtgacccccaaggagaagaccggaccaatgaaagaaatcaaccttgctcctgacagctcatccgtggttgtatcaggacttatggtggccaccaaatatgaagtgagtgtctatgctcttaaggacactttgacaagcagaccagctcagggwgttgtcaccactctggagaatgtcagcccaccaagaagggctcgtgtgacagatgctactgagaccaccatcaccattagctggagaaccaagactgagacgatcactggcttccaagttgatgccgttccagccaatggccagactccaatccagagaaccatcaagccagatgtcagaagctacaccatcacaggtttacaaccaggcactgactacaagatctacctgtacaccttgaatgacaatgctcggagctcccctgtggtcatcgacgcctccactgccattgatgcaccatccaacctgcgtttcctggccaccacacccaattccttgctggtatcatggcagccgccacgtgccaggattaccggctacatcatcaagtatgagaagcctgggtctcctcccagagaagtggtccctcggccccgccctggtgtcacagaggctactattactggcctggaaccgggaaccgaatatacaatttatgtcattgccctgaagaataatcagaagagcgagcccctgattggaaggaaaaagacagttcaaaagacccctttcgtcacccaccctgggtatgacactggaaatggtattcagcttcctggcacttctggtcagcaacccagtgttgggcaacaaatgatctttgaggaacatggttttaggcggaccacaccgcccacaacggccacccccataaggcataggccaagaccatacccgccgaatgtaggacaagaagctctctctcagacaaccrtctcatgggccccattccaggacacttctgagtacatcatttcatgtcatcctgttggcactgatgaagaacccttacagttcagggttcctggaacttctaccagtgccactctgacaggcctcaccagaggtgccacctacaacrtcatagtggaggcactgaaagaccagcagaggcataaggttcrggaagaggttgttaccgtgggcaactctgtcaacgaaggcttgaaccaacctacggatgactcgtgctttgacccctacacagtttcccattatgccgttggagatgagtgggaacgaatgtctgaatcaggctttaaactgttgtgccagtgcttaggctttggaagtggtcatttcagatgtgattcatctagatggtgccatgacaatggtgtgaactacaagattggagagaagtgggaccgtcagggagaaaatggccagatgatgagctgcacatgtcttgggaacggaaaaggagaattcaagtgtgaccctcatgaggcaacgtgttaygatgatgggaagacataccacgtaggagaacagtggcagaaggaatatctcggtgccatttgctcctgcacatgctttggaggccagcggggctggcgctgtgacaactgccgcagacctgggggtgaacccagtcccgaaggcactactggccagtcctacaaccagtattctcagagataccatcagagaacaaacactaatgttaattgcccaattgagtgcttcatgcctttagatgtacaggctgacagagaagattcccgagagtaaatcatctttccaatccagaggaacaagcatgtctctctgccaagatccatctaaactggagtgatgttagcagacccagcttagagttcttctttctttcttaagccctttgctctggaggaagttctcyagcttcagctcaactcacagcttctccaagcatcaccctgggagtttcctgagggttttctcataaatgagggctgcacattgcctgttctgcttcgaagtattcaataccgctcagtattttaaatgaagtgattctaagatttggtttgggatcaataggaaagcatatgcagccaaccaagatgcaaatgttttgaaatgattgtctggcccgcaatactgtaggaacaagcatgatcttgttactgtgatattttaaatatccacagtactcactttttccaaatgatcctagtaattgcctagaaatatctttctcttacctgttatttatcaatttttcccagtatttttatacggaaaaarttgtattgaaaacacttagtatgcagttgataagaggaatttggtataattatggtgggtgattattttttatactgtatgtgccaaagctttactactgtggaaagacaactgttttaataaaagatttacattccacaacttgaagttcatctatttgatataagacaccttcgggggaaataattcctgtgaatattctttttcaattcagcaaacatttgaaaatctatgatgtgcaagtctaattgttgatttcagtacaagattttctaaatcagttgctacaaaaactgattggtttttgtcacttcatctcttcactaatggagatagcttt

SEQ ID NO: 114 - DNA, 8013 bp, Homo sapiens
ggcggggcggggacagcccggcgggtctctcctcccccgcgccccgggcctccagaggggcgggaggggaccgtcccatataagccccggctcccggcgctcggacgcccgcgccggctgtgctgcacagggggaggagagggaaccccaggcgcgagcgggaagaggggacctgcagccacaacttctctggtcctctgcatcccttctgtccctccacccgtccccttccccaccctctggcccccaccttcttggaggcgacaacccccgggaggcattagaagggatttttcccgcaggttgcgaagggaagcaaacttggtggcaacttgcctcccggtgcgggcgtctctcccccaccgtctcaacatgcttaggggtccggggcccgggctgctgctgctggccgtccwgtgcctggggacagcggtgccctccacgggagcctcgaagagcaagaggcaggctcagcaaatggttcagccccagtccccggtggctgtcagtcaaagcaagcccggttgttatgacaatggaaaacactatcagataaatcaacagtgggagcggacctacctaggcaatgcgttggtttgtacttgttatggaggaagccgaggttttaactgcgagagtaaacctgaagctgaagagacttgctttgacaagtacactgggaacacttaccgagtgggtgacacttatgagcgtcctaaagactccatgatctgggactgtacctgcatyggggctgggcgagggagaataagctgtaccatcgcaaaccgctgccatgaagggggtcagtcctacaagattggtgacacctggaggagaccacatgagactggtggttacatgttagagtgtgtgtgtcttggtaatggaaaaggagaatggacctgcaagcccatagctgagaagtgttttgatcatgctgctgggacttcctatgtggtcggagaaacgtgggagaagccctaccaaggctggatgatggtagattgtacttgcctgggagaaggcagcggacgcatcacttgcacttctagaaatagatgcaacgatcaggacacaaggacatcctatagaattggagacacctggagcaagaaggataatcgaggaaacctgctccagtgcatctgcacaggcaacggccgaggagagtggaagtgtgagaggcacacctctgtgcagaccacatcgagcggatctggccccttcaccgatgttcgtgcagctgtttaccaaccgcagcctcacccccagcctcctccctatggccactgtgtcacagacagtggtgtggtctactctgtggggatgcagtggctgaagacacaaggaaataagcaaatgctttgcacgtgcctgggcaacggagtcagctgccaagagacagctgtaacccagacttacggtggcaactcaaatggagagccatgtgtcttaccattcacctacaatggcaggacgttctactcctgcaccacagaagggcgacaggacggacatctttggtgcagcacaacttcgaattatgagcaggaccagaaatactctttctgcacagaccacactgttttggttcagactcgaggaggaaattccaatggtgccttgtgccacttccccttcctatacaacaaccacaattacactgattgcacttctgagggcagaagagacaacatgaagtggtgtgggaccacacagaactatgatgccgaccagaagtttgggttctgccccatggctgcccacgaggaaatctgcacaaccaatgaaggggtcatgtaccgcattggagatcagtgggataagcagcatgacatgggtcacatgatgaggtgcacgtgtgttgggaatggtcgtggggaatggacatgcattgcctactcgcagcttcgagatcagtgcattgttgatgacatcacttacaatgtgaacgacacattccacaagcgtcatgaagaggggcacatgctgaactgtacatgcttcggtcagggtcggggcaggtggaagtgtgatcccgtcgaccaatgccaggattcagagactgggacgttttatcaaattggagattcatgggagaagtatgtgcatggtgtcagataccagtgctactgctatggccgtggcattggggagtggcattgccaacctttacagacctatccaagctcaagtggtcctgtcgaagtatttatcactgagactccgagtcagcccaactcccaccccatccagtggaatgcaccacagccatctcacatttccaagtacattctcaggtggagacctaaaaattctgtaggccgttggaaggaagctaccataccaggccacttaaactcctacaccatcaaaggcctgaagcctggtgtggtatacgagggccagctcatcagcatccagcagtacggccaccaagaagtgactcgctttgacttcaccaccaccagcaccagcacacctgtgaccagcaacaccgtgacaggagagacgactcccttttctcctcttgtggccacttctgaatctgtgaccgaaatcacagccagtagctttgtggtctcctgggtctcagcttccgacaccgtgtcgggattccgggtggaatatgagctgagtgaggagggagatgagccacagtacctggatcttccaagcacagccacttctgtgaacatccctgacctgcttcctggccgaaaatacattgtaaatgtctatcagatatctgaggatggggagcagagtttgatcctgtctacttcacaaacaacagcgcctgatgccccwcctgacmcgactgtggaccaagttgatgacacctcaattgttgttcgctggagcagaccccaggctcccatcacaggtcagctaaaatagtctattcgccatcagtagaaggtagcagcacagaactcaaccttcctgaaactgcaaactccgtcaccctcagtgacttgcaacctggtgttcagtataacatcactatctatgctgtggaagaaaatcaagaaagtacacctgttgtcattcaacaagaaaccactggcaccccacgctcagatacagtgccctctcccagggacctgcagtttgtggaagtgacagacgtgaaggtcaccatcatgtggacaccgcctgagagtgcagtgaccggctaccgtgtggatgtgatccccgtcaacctgcctggcgagcacgggcagaggctgcccatcagcaggaacacctttgcagaagtcaccgggctgtcccctggggtcacctattacttcaaagtctttgcagtgagccatgggagggagagcaagcctctgactgctcaacagacaaccaaactggatgctcccactaacctccagtttgtcaatgaaactgattctactgtcctggtgagatggactccacctcgggcccagataacaggataccgactgaccgtgggccttacccgaagaggmcagcccaggcagtacaatrtgggtccctctgtctccaagtacccmctgaggaatctgcagcctgcatctgagtacaccgtatccctcgtggccataaagggcaaccaagagagccccaaagccactggagtctttaccacactgcagcctgggagctctattccaccttacaacaccgaggtgactgagaccaccattgtgatcacatggacgcctgctccaagaattggttttaagctgggtgtacgaccaagccagggaggagaggcaccacgagaagtgacttcagactcaggaagcatcgttgtgtccggcttgactccaggagtagaatacgtctacaccatccaagtcctgagagatggacaggaaagagatgcgccaattgtaaacaaagtggtgacaccattgtctccaccaacaaacttgcatctggaggcaaaccctgacactggagtgctcacagtctcctgggagaggagcaccaccccagacattactggttatagaattaccacaacccctacaaacggccagcagggaaattctttggaagaagtggtccatgctgatcagagctcctgcacttttgataacctgagtcccggcctggagtacaatgtcagtgtttacactgtcaaggatgacaaggaaagtgtccctatctctgataccatcatcccagctgttcctcctcccactgacctgcgattcaccaacattggtccagacaccatgcgtgtcacctgggctccacccccatccattgatttaaccaacttcctggtgcgttactcacctgtgaaaaatgaggaagatgttgcagagttgtcaatttctccttcagacaatgcagtggtcttaacaaatctcctgcctggtacagaatatgtagtgagtgtctccagtgtctacgaacaacatgagagcacacctcttagaggaagacagaaaacaggtcttgattccccaactggcattgacttttctgatattactgccaactcttttactgtgcactggattgctcctcgagccaccatcactggctacaggatccgccatcatcccgagcacttcagtgggagacctcgagaagatcgggtgccccactctcggaattccatcaccctcaccaacctcactccaggcacagagtatgtggtcagcatcgttgctcttaatggcagagaggaaagtcccttattgattggccaacaatcaacagtttctgatgttccgagggacctggaagttgttgctgcgacccccaccagcctactgatcagctgggatgctcctgctgtcacagtgagatattacaggatcacttacggagaracaggaggaaatagccctgtccaggagttcactgtgcctgggagcaagtctacagctaccatcagcggccttaaacctggagttgattataccatcactgtgtatgctgtcactggccgtggagacagccccgcaagcagcaagccaatttccattaattaccgaacagaaattgacaaaccatcccagatgcaagtgaccgatgttcaggacaacagcattagtgtcaagtggctgccttcaagttcccctgttactggttacagagtaaccaccactcccaaaaatggaccaggaccaacaaaaactaaaactgcaggtccagatcaaacagaaatgactattgaaggcttgcagcccacagtggagtatgtggttagtgtctatgctcagaatccaagcggagagagtcagcctctggttcagactgcagtaaccaacattgatcgccctaaaggactggcattcactgatgtggatgtcgattccatcaaaattgcttgggaaagcccacaggggcaagtttccaggtacagggtgacctactckagccctgaggatggaatccatgagctattccctgcacctgatggtgaagaagacactgcagagctgcaaggcctcagaccgggttctgagtacacagtcagtgtggttgccttgcacgatgatatggagagccagcccctgattggaacccagtccacagctattcctgcaccaactgacctgaagttcactcaggtcacacccacaagcctgagcgcccagtggacaccacccaatgttcagctcactggatatcgagtgcgggtgacccccaaggagaagaccggaccaatgaaagaaatcaaccttgctcctgacagctcatccgtggttgtatcaggacttatggtggccaccaaatatgaagtgagtgtctatgctcttaaggacactttgacaagcagaccagctcagggwgttgtcaccactctggagaatgtcagcccaccaagaagggctcgtgtgacagatgctactgagaccaccatcaccattagctggagaaccaagactgagacgatcactggcttccaagttgatgccgttccagccaatggccagactccaatccagagaaccatcaagccagatgtcagaagctacaccatcacaggtttacaaccaggcactgactacaagatctacctgtacaccttgaatgacaatgctcggagctcccctgtggtcatcgacgcctccactgccattgatgcaccatccaacctgcgtttcctggccaccacacccaattccttgctggtatcatggcagccgccacgtgccaggattaccggctacatcatcaagtatgagaagcctgggtctcctcccagagaagtggtccctcggccccgccctggtgtcacagaggctactattactggcctggaaccgggaaccgaatatacaatttatgtcattgccctgaagaataatcagaagagcgagcccctgattggaaggaaaaagacaggacaagaagctctctctcagacaaccrtctcatgggccccattccaggacacttctgagtacatcatttcatgtcatcctgttggcactgatgaagaacccttacagttcagggttcctggaacttctaccagtgccactctgacaggcctcaccagaggtgccacctacaacrtcatagtggaggcactgaaagaccagcagaggcataaggttcrggaagaggttgttaccgtgggcaactctgtcaacgaaggcttgaaccaacctacggatgactcgtgctttgacccctacacagtttcccattatgccgttggagatgagtgggaacgaatgtctgaatcaggctttaaactgttgtgccagtgcttaggctttggaagtggtcatttcagatgtgattcatctagatggtgccatgacaatggtgtgaactacaagattggagagaagtgggaccgtcagggagaaaatggccagatgatgagctgcacatgtcttgggaacggaaaaggagaattcaagtgtgaccctcatgaggcaacgtgttaygatgatgggaagacataccacgtaggagaacagtggcagaaggaatatctcggtgccatttgctcctgcacatgctttggaggccagcggggctggcgctgtgacaactgccgcagacctgggggtgaacccagtcccgaaggcactactggccagtcctacaaccagtattctcagagataccatcagagaacaaacactaatgttaattgcccaattgagtgcttcatgcctttagatgtacaggctgacagagaagattcccgagagtaaatcatctttccaatccagaggaacaagcatgtctctctgccaagatccatctaaactggagtgatgttagcagacccagcttagagttcttctttctttcttaagccctttgctctggaggaagttctcyagcttcagctcaactcacagcttctccaagcatcaccctgggagtttcctgagggttttctcataaatgagggctgcacattgcctgttctgcttcgaagtattcaataccgctcagtattttaaatgaagtgattctaagatttggtttgggatcaataggaaagcatatgcagccaaccaagatgcaaatgttttgaaatgattgtctggcccgcaatactgtaggaacaagcatgatcttgttactgtgatattttaaatatccacagtactcactttttccaaatgatcctagtaattgcctagaaatatctttctcttacctgttatttatcaatttttcccagtatttttatacggaaaaarttgtattgaaaacacttagtatgcagttgataagaggaatttggtataattatggtgggtgattattttttatactgtatgtgccaaagctttactactgtggaaagacaactgttttaataaaagatttacattccacaacttgaagttcatctatttgatataagacaccttcgggggaaataattcctgtgaatattctttttcaattcagcaaacatttgaaaatctatgatgtgcaagtctaattgttgatttcagtacaagattttctaaatcagttgctacaaaaactgattggtttttgtcacttcatctcttcactaatggagatagcttt

SEQ ID NO: 115 - DNA, 6510 bp, Homo sapiens
ggcggggcggggacagcccggcgggtctctcctcccccgcgccccgggcctccagaggggcgggaggggaccgtcccatataagccccggctcccggcgctcggacgcccgcgccggctgtgctgcacagggggaggagagggaaccccaggcgcgagcgggaagaggggacctgcagccacaacttctctggtcctctgcatcccttctgtccctccacccgtccccttccccaccctctggcccccaccttcttggaggcgacaacccccgggaggcattagaagggatttttcccgcaggttgcgaagggaagcaaacttggtggcaacttgcctcccggtgcgggcgtctctcccccaccgtctcaacatgcttaggggtccggggcccgggctgctgctgctggccgtccwgtgcctggggacagcggtgccctccacgggagcctcgaagagcaagaggcaggctcagcaaatggttcagccccagtccccggtggctgtcagtcaaagcaagcccggttgttatgacaatggaaaacactatcagataaatcaacagtgggagcggacctacctaggcaatgcgttggtttgtacttgttatggaggaagccgaggttttaactgcgagagtaaacctgaagctgaagagacttgctttgacaagtacactgggaacacttaccgagtgggtgacacttatgagcgtcctaaagactccatgatctgggactgtacctgcatyggggctgggcgagggagaataagctgtaccatcgcaaaccgctgccatgaagggggtcagtcctacaagattggtgacacctggaggagaccacatgagactggtggttacatgttagagtgtgtgtgtcttggtaatggaaaaggagaatggacctgcaagcccatagctgagaagtgttttgatcatgctgctgggacttcctatgtggtcggagaaacgtgggagaagccctaccaaggctggatgatggtagattgtacttgcctgggagaaggcagcggacgcatcacttgcacttctagaaatagatgcaacgatcaggacacaaggacatcctatagaattggagacacctggagcaagaaggataatcgaggaaacctgctccagtgcatctgcacaggcaacggccgaggagagtggaagtgtgagaggcacacctctgtgcagaccacatcgagcggatctggccccttcaccgatgttcgtgcagctgtttaccaaccgcagcctcacccccagcctcctccctatggccactgtgtcacagacagtggtgtggtctactctgtggggatgcagtggctgaagacacaaggaaataagcaaatgctttgcacgtgcctgggcaacggagtcagctgccaagagacagctgtaacccagacttacggtggcaactcaaatggagagccatgtgtcttaccattcacctacaatggcaggacgttctactcctgcaccacagaagggcgacaggacggacatctttggtgcagcacaacttcgaattatgagcaggaccagaaatactctttctgcacagaccacactgttttggttcagactcgaggaggaaattccaatggtgccttgtgccacttccccttcctatacaacaaccacaattacactgattgcacttctgagggcagaagagacaacatgaagtggtgtgggaccacacagaactatgatgccgaccagaagtttgggttctgccccatggctgcccacgaggaaatctgcacaaccaatgaaggggtcatgtaccgcattggagatcagtgggataagcagcatgacatgggtcacatgatgaggtgcacgtgtgttgggaatggtcgtggggaatggacatgcattgcctactcgcagcttcgagatcagtgcattgttgatgacatcacttacaatgtgaacgacacattccacaagcgtcatgaagaggggcacatgctgaactgtacatgcttcggtcagggtcggggcaggtggaagtgtgatcccgtcgaccaatgccaggattcagagactgggacgttttatcaaattggagattcatgggagaagtatgtgcatggtgtcagataccagtgctactgctatggccgtggcattggggagtggcattgccaacctttacagacctatccaagctcaagtggtcctgtcgaagtatttatcactgagactccgagtcagcccaactcccaccccatccagtggaatgcaccacagccatctcacatttccaagtacattctcaggtggagacctaaaaattctgtaggccgttggaaggaagctaccataccaggccacttaaactcctacaccatcaaaggcctgaagcctggtgtggtatacgagggccagctcatcagcatccagcagtacggccaccaagaagtgactcgctttgacttcaccaccaccagcaccagcacacctgtgaccagcaacaccgtgacaggagagacgactcccttttctcctcttgtggccacttctgaatctgtgaccgaaatcacagccagtagctttgtggtctcctgggtctcagcttccgacaccgtgtcgggattccgggtggaatatgagctgagtgaggagggagatgagccacagtacctggatcttccaagcacagccacttctgtgaacatccctgacctgcttcctggccgaaaatacattgtaaatgtctatcagatatctgaggatggggagcagagtttgatcctgtctacttcacaaacaacagcgcctgatgccccwcctgacmcgactgtggaccaagttgatgacacctcaattgttgttcgctggagcagaccccaggctcccatcacagggtacagaatagtctattcgccatcagtagaaggtagcagcacagaactcaaccttcctgaaactgcaaactccgtcaccctcagtgacttgcaacctggtgttcagtataacatcactatctatgctgtggaagaaaatcaagaaagtacacctgttgtcattcaacaagaaaccactggcaccccacgctcagatacagtgccctctcccagggacctgcagtttgtggaagtgacagacgtgaaggtcaccatcatgtggacaccgcctgagagtgcagtgaccggctaccgtgtggatgtgatccccgtcaacctgcctggcgagcacgggcagaggctgcccatcagcaggaacactctttgcagtgagccatgggagggagagcaagcctctgactgctcaacagacaaccaaactggatgctcccactaacctccagtttgtcaatgaaactgattctactgtcctggtgagatggactccacctcgggcccagataacaggataccgactgaccgtgggccttacccgaagaggmcagcccaggcagtacaatrtgggtccctctgtctccaagtacccmctgaggaatctgcagcctgcatctgagtacaccgtatccctcgtggccataaagggcaaccaagagagccccaaagccactggagtctttaccacactgcagcctgggagctctattccaccttacaacaccgaggtgactgagaccaccattgtgatcacatggacgcctgctccaagaattggttttaagctgggtgtacgaccaagccagggaggagaggcaccacgagaagtgacttcagactcaggaagcatcgttgtgtccggcttgactccaggagtagaatacgtctacaccatccaagtcctgagagatggacaggaaagagatgcgccaattgtaaacaaagtggtgacaccattgtctccaccaacaaacttgcatctggaggcaaaccctgacactggagtgctcacagtctcctgggagaggagcaccaccccagacattactggttatagaattaccacaacccctacaaacggccagcagggaaattctttggaagaagtggtccatgctgatcagagctcctgcacttttgataacctgagtcccggcctggagtacaatgtcagtgtttacactgtcaaggatgacaaggaaagtgtccctatctctgataccatcatcccagctgttcctcctcccactgacctgcgattcaccaacattggtccagacaccatgcgtgtcacctgggctccacccccatccattgatttaaccaacttcctggtgcgttactcacctgtgaaaaatgaggaagatgttgcagagttgtcaatttctccttcagacaatgcagtggtcttaacaaatctcctgcctggtacagaatatgtagtgagtgtctccagtgtctacgaacaacatgagagcacacctcttagaggaagacagaaaacaggtcttgattccccaactggcattgacttttctgatattactgccaactcttttactgtgcactggattgctcctcgagccaccatcactggctacaggatccgccatcatcccgagcacttcagtgggagacctcgagaagatcgggtgccccactctcggaattccatcaccctcaccaacctcactccaggcacagagtatgtggtcagcatcgttgctcttaatggcagagaggaaagtcccttattgattggccaacaatcaacagtttctgatgttccgagggacctggaagttgttgctgcgacccccaccagcctactgatcagctgggatgctcctgctgtcacagtgagatattacaggatcacttacggagaracaggaggaaatagccctgtccaggagttcactgtgcctgggagcaagtctacagctaccatcagcggccttaaacctggagttgattataccatcactgtgtatgctgtcactggccgtggagacagccccgcaagcagcaagccaatttccattaattaccgaacagaaattgacaaaccatcccagatgcaagtgaccgatgttcaggacaacagcattagtgtcaagtggctgccttcaagttcccctgttactggttacagagtaaccaccactcccaaaaatggaccaggaccaacaaaaactaaaactgcaggtccagatcaaacagaaatgactattgaaggcttgcagcccacagtggagtatgtggttagtgtctatgctcagaatccaagcggagagagtcagcctctggttcagactgcagtaaccaacattgatcgccctaaaggactggcattcactgatgtggatgtcgattccatcaaaattgcttgggaaagcccacaggggcaagtttccaggtacagggtgacctactckagccctgaggatggaatccatgagctattccctgcacctgatggtgaagaagacactgcagagctgcaaggcctcagaccgggttctgagtacacagtcagtgtggttgccttgcacgatgatatggagagccagcccctgattggaacccagtccacagctattcctgcaccaactgacctgaagttcactcaggtcacacccacaagcctgagcgcccagtggacaccacccaatgttcagctcactggatatcgagtgcgggtgacccccaaggagaagaccggaccaatgaaagaaatcaaccttgctcctgacagctcatccgtggttgtatcaggacttatggtggccaccaaatatgaagtgagtgtctatgctcttaaggacactttgacaagcagaccagctcagggwgttgtcaccactctggagaatgtcagcccaccaagaagggctcgtgtgacagatgctactgagaccaccatcaccattagctggagaaccaagactgagacgatcactggcttccaagttgatgccgttccagccaatggccagactccaatccagagaaccatcaagccagatgtcagaagctacaccatcacaggtttacaaccaggcactgactacaagatctacctgtacaccttgaatgacaatgctcggagctcccctgtggtcatcgacgcctccactgccattgatgcaccatccaacctgcgtttcctggccaccacacccaattccttgctggtatcatggcagccgccacgtgccaggattaccggctacatcatcaagtatgagaagcctgggtctcctcccagagaagtggtccctcggccccgccctggtgtcacagaggctactattactggtattgctgcttccatgctgtcattttccttcttactacctaggacacatgaagtccttagcaaactcccacagcgtctttgatactgtgtcatgagaatgcgaaactctgttcctgataacctcaaaaagcattctctgtgtaggagtggtagagcctaatacatcccaaaaggcatgagtgaaggaaaatgcaatttcaagactgtactaatggcatgactagactcatgttttcctttcgctgcaagtttgccagatacctgtcaattcagtcctggagaaagatatttttcaaagcatac

SEQ ID NO: 116 - DNA, 8371 bp, Homo sapiens
ggcggggcggggacagcccggcgggtctctcctcccccgcgccccgggcctccagaggggcgggaggggaccgtcccatataagccccggctcccggcgctcggacgcccgcgccggctgtgctgcacagggggaggagagggaaccccaggcgcgagcgggaagaggggacctgcagccacaacttctctggtcctctgcatcccttctgtccctccacccgtccccttccccaccctctggcccccaccttcttggaggcgacaacccccgggaggcattagaagggatttttcccgcaggttgcgaagggaagcaaacttggtggcaacttgcctcccggtgcgggcgtctctcccccaccgtctcaacatgcttaggggtccggggcccgggctgctgctgctggccgtccwgtgcctggggacagcggtgccctccacgggagcctcgaagagcaagaggcaggctcagcaaatggttcagccccagtccccggtggctgtcagtcaaagcaagcccggttgttatgacaatggaaaacactatcagataaatcaacagtgggagcggacctacctaggcaatgcgttggtttgtacttgttatggaggaagccgaggttttaactgcgagagtaaacctgaagctgaagagacttgctttgacaagtacactgggaacacttaccgagtgggtgacacttatgagcgtcctaaagactccatgatctgggactgtacctgcatyggggctgggcgagggagaataagctgtaccatcgcaaaccgctgccatgaagggggtcagtcctacaagattggtgacacctggaggagaccacatgagactggtggttacatgttagagtgtgtgtgtcttggtaatggaaaaggagaatggacctgcaagcccatagctgagaagtgttttgatcatgctgctgggacttcctatgtggtcggagaaacgtgggagaagccctaccaaggctggatgatggtagattgtacttgcctgggagaaggcagcggacgcatcacttgcacttctagaaatagatgcaacgatcaggacacaaggacatcctatagaattggagacacctggagcaagaaggataatcgaggaaacctgctccagtgcatctgcacaggcaacggccgaggagagtggaagtgtgagaggcacacctctgtgcagaccacatcgagcggatctggccccttcaccgatgttcgtgcagctgtttaccaaccgcagcctcacccccagcctcctccctatggccactgtgtcacagacagtggtgtggtctactctgtggggatgcagtggctgaagacacaaggaaataagcaaatgctttgcacgtgcctgggcaacggagtcagctgccaagagacagctgtaacccagacttacggtggcaactcaaatggagagccatgtgtcttaccattcacctacaatggcaggacgttctactcctgcaccacagaagggcgacaggacggacatctttggtgcagcacaacttcgaattatgagcaggaccagaaatactctttctgcacagaccacactgttttggttcagactcgaggaggaaattccaatggtgccttgtgccacttccccttcctatacaacaaccacaattacactgattgcacttctgagggcagaagagacaacatgaagtggtgtgggaccacacagaactatgatgccgaccagaagtttgggttctgccccatggctgcccacgaggaaatctgcacaaccaatgaaggggtcatgtaccgcattggagatcagtgggataagcagcatgacatgggtcacatgatgaggtgcacgtgtgttgggaatggtcgtggggaatggacatgcattgcctactcgcagcttcgagatcagtgcattgttgatgacatcacttacaatgtgaacgacacattccacaagcgtcatgaagaggggcacatgctgaactgtacatgcttcggtcagggtcggggcaggtggaagtgtgatcccgtcgaccaatgccaggattcagagactgggacgttttatcaaattggagattcatgggagaagtatgtgcatggtgtcagataccagtgctactgctatggccgtggcattggggagtggcattgccaacctttacagacctatccaagctcaagtggtcctgtcgaagtatttatcactgagactccgagtcagcccaactcccaccccatccagtggaatgcaccacagccatctcacatttccaagtacattctcaggtggagacctaaaaattctgtaggccgttggaaggaagctaccataccaggccacttaaactcctacaccatcaaaggcctgaagcctggtgtggtatacgagggccagctcatcagcatccagcagtacggccaccaagaagtgactcgctttgacttcaccaccaccagcaccagcacacctgtgaccagcaacaccgtgacaggagagacgactcccttttctcctcttgtggccacttctgaatctgtgaccgaaatcacagccagtagctttgtggtctcctgggtctcagcttccgacaccgtgtcgggattccgggtggaatatgagctgagtgaggagggagatgagccacagtacctggatcttccaagcacagccacttctgtgaacatccctgacctgcttcctggccgaaaatacattgtaaatgtctatcagatatctgaggatggggagcagagtttgatcctgtctacttcacaaacaacagcgcctgatgccccwcctgacmcgactgtggaccaagttgatgacacctcaattgttgttcgctggagcagaccccaggctcccatcacagggtacagaatagtctattcgccatcagtagaaggtagcagcacagaactcaaccttcctgaaactgcaaactccgtcaccctcagtgacttgcaacctggtgttcagtataacatcactatctatgctgtggaagaaaatcaagaaagtacacctgttgtcattcaacaagaaaccactggcaccccacgctcagatacagtgccctctcccagggacctgcagtttgtggaagtgacagacgtgaaggtcaccatcatgtggacaccgcctgagagtgcagtgaccggctaccgtgtggatgtgatccccgtcaacctgcctggcgagcacgggcagaggctgcccatcagcaggaacacctttgcagaagtcaccgggctgtcccctggggtcacctattacttcaaagtctttgcagtgagccatgggagggagagcaagcctctgactgctcaacagacaaccaaactggatgctcccactaacctccagtttgtcaatgaaactgattctactgtcctggtgagatggactccacctcgggcccagataacaggataccgactgaccgtgggccttacccgaagaggmcagcccaggcagtacaatrtgggtccctctgtctccaagtacccmctgaggaatctgcagcctgcatctgagtacaccgtatccctcgtggccataaagggcaaccaagagagccccaaagccactggagtctttaccacactgcagcctgggagctctattccaccttacaacaccgaggtgactgagaccaccattgtgatcacatggacgcctgctccaagaattggttttaagctgggtgtacgaccaagccagggaggagaggcaccacgagaagtgacttcagactcaggaagcatcgttgtgtccggcttgactccaggagtagaatacgtctacaccatccaagtcctgagagatggacaggaaagagatgcgccaattgtaaacaaagtggtgacaccattgtctccaccaacaaacttgcatctggaggcaaaccctgacactggagtgctcacagtctcctgggagaggagcaccaccccagacattactggttatagaattaccacaacccctacaaacggccagcagggaaattctttggaagaagtggtccatgctgatcagagctcctgcacttttgataacctgagtcccggcctggagtacaatgtcagtgtttacactgtcaaggatgacaaggaaagtgtccctatctctgataccatcatcccagctgttcctcctcccactgacctgcgattcaccaacattggtccagacaccatgcgtgtcacctgggctccacccccatccattgatttaaccaacttcctggtgcgttactcacctgtgaaaaatgaggaagatgttgcagagttgtcaatttctccttcagacaatgcagtggtcttaacaaatctcctgcctggtacagaatatgtagtgagtgtctccagtgtctacgaacaacatgagagcacacctcttagaggaagacagaaaacaggtcttgattccccaactggcattgacttttctgatattactgccaactcttttactgtgcactggattgctcctcgagccaccatcactggctacaggatccgccatcatcccgagcacttcagtgggagacctcgagaagatcgggtgccccactctcggaattccatcaccctcaccaacctcactccaggcacagagtatgtggtcagcatcgttgctcttaatggcagagaggaaagtcccttattgattggccaacaatcaacagtttctgatgttccgagggacctggaagttgttgctgcgacccccaccagcctactgatcagctgggatgctcctgctgtcacagtgagatattacaggatcacttacggagaracaggaggaaatagccctgtccaggagttcactgtgcctgggagcaagtctacagctaccatcagcggccttaaacctggagttgattataccatcactgtgtatgctgtcactggccgtggagacagccccgcaagcagcaagccaatttccattaattaccgaacagaaattgacaaaccatcccagatgcaagtgaccgatgttcaggacaacagcattagtgtcaagtggctgccttcaagttcccctgttactggttacagagtaaccaccactcccaaaaatggaccaggaccaacaaaaactaaaactgcaggtccagatcaaacagaaatgactattgaaggcttgcagcccacagtggagtatgtggttagtgtctatgctcagaatccaagcggagagagtcagcctctggttcagactgcagtaaccaacattgatcgccctaaaggactggcattcactgatgtggatgtcgattccatcaaaattgcttgggaaagcccacaggggcaagtttccaggtacagggtgacctactckagccctgaggatggaatccatgagctattccctgcacctgatggtgaagaagacactgcagagctgcaaggcctcagaccgggttctgagtacacagtcagtgtggttgccttgcacgatgatatggagagccagcccctgattggaacccagtccacagctattcctgcaccaactgacctgaagttcactcaggtcacacccacaagcctgagcgcccagtggacaccacccaatgttcagctcactggatatcgagtgcgggtgacccccaaggagaagaccggaccaatgaaagaaatcaaccttgctcctgacagctcatccgtggttgtatcaggacttatggtggccaccaaatatgaagtgagtgtctatgctcttaaggacactttgacaagcagaccagctcagggwgttgtcaccactctggagaatgtcagcccaccaagaagggctcgtgtgacagatgctactgagaccaccatcaccattagctggagaaccaagactgagacgatcactggcttccaagttgatgccgttccagccaatggccagactccaatccagagaaccatcaagccagatgtcagaagctacaccatcacaggtttacaaccaggcactgactacaagatctacctgtacaccttgaatgacaatgctcggagctcccctgtggtcatcgacgcctccactgccattgatgcaccatccaacctgcgtttcctggccaccacacccaattccttgctggtatcatggcagccgccacgtgccaggattaccggctacatcatcaagtatgagaagcctgggtctcctcccagagaagtggtccctcggccccgccctggtgtcacagaggctactattactggcctggaaccgggaaccgaatatacaatttatgtcattgccctgaagaataatcagaagagcgagcccctgattggaaggaaaaagacagacgagcttccccaactggtaacccttccacaccccaatcttcatggaccagagatcttggatgttccttccacagttcaaaagacccctttcgtcacccaccctgggtatgacactggaaatggtattcagcttcctggcacttctggtcagcaacccagtgttgggcaacaaatgatctttgaggaacatggttttaggcggaccacaccgcccacaacggccacccccataaggcataggccaagaccatacccgccgaatgtaggtgaggaaatccaaattggtcacatccccagggaagatgtagactatcacctgtacccacacggtccggkactcaatccaaatgcctctacaggacaagaagctctctctcagacaaccrtctcatgggccccattccaggacacttctgagtacatcatttcatgtcatcctgttggcactgatgaagaacccttacagttcagggttcctggaacttctaccagtgccactctgacaggcctcaccagaggtgccacctacaacrtcatagtggaggcactgaaagaccagcagaggcataaggttcrggaagaggttgttaccgtgggcaactctgtcaacgaaggcttgaaccaacctacggatgactcgtgctttgacccctacacagtttcccattatgccgttggagatgagtgggaacgaatgtctgaatcaggctttaaactgttgtgccagtgcttaggctttggaagtggtcatttcagatgtgattcatctagatggtgccatgacaatggtgtgaactacaagattggagagaagtgggaccgtcagggagaaaatggccagatgatgagctgcacatgtcttgggaacggaaaaggagaattcaagtgtgaccctcatgaggcaacgtgttaygatgatgggaagacataccacgtaggagaacagtggcagaaggaatatctcggtgccatttgctcctgcacatgctttggaggccagcggggctggcgctgtgacaactgccgcagacctgggggtgaacccagtcccgaaggcactactggccagtcctacaaccagtattctcagagataccatcagagaacaaacactaatgttaattgcccaattgagtgcttcatgcctttagatgtacaggctgacagagaagattcccgagagtaaatcatctttccaatccagaggaacaagcatgtctctctgccaagatccatctaaactggagtgatgttagcagacccagcttagagttcttctttctttcttaagccctttgctctggaggaagttctcyagcttcagctcaactcacagcttctccaagcatcaccctgggagtttcctgagggttttctcataaatgagggctgcacattgcctgttctgcttcgaagtattcaataccgctcagtattttaaatgaagtgattctaagatttggtttgggatcaataggaaagcatatgcagccaaccaagatgcaaatgttttgaaatgattgtctggcccgcaatactgtaggaacaagcatgatcttgttactgtgatattttaaatatccacagtactcactttttccaaatgatcctagtaattgcctagaaatatctttctcttacctgttatttatcaatttttcccagtatttttatacggaaaaarttgtattgaaaacacttagtatgcagttgataagaggaatttggtataattatggtgggtgattattttttatactgtatgtgccaaagctttactactgtggaaagacaactgttttaataaaagatttacattccacaacttgaagttcatctatttgatataagacaccttcgggggaaataattcctgtgaatattctttttcaattcagcaaacatttgaaaatctatgatgtgcaagtctaattgttgatttcagtacaagattttctaaatcagttgctacaaaaactgattggtttttgtcacttcatctcttcactaatggagatagcttt

SEQ ID NO: 117 - DNA, 2488 bp, Homo sapiens
ggcggggcggggacagcccggcgggtctctcctcccccgcgccccgggcctccagaggggcgggaggggaccgtcccatataagccccggctcccggcgctcggacgcccgcgccggctgtgctgcacagggggaggagagggaaccccaggcgcgagcgggaagaggggacctgcagccacaacttctctggtcctctgcatcccttctgtccctccacccgtccccttccccaccctctggcccccaccttcttggaggcgacaacccccgggaggcattagaagggatttttcccgcaggttgcgaagggaagcaaacttggtggcaacttgcctcccggtgcgggcgtctctcccccaccgtctcaacatgcttaggggtccggggcccgggctgctgctgctggccgtccwgtgcctggggacagcggtgccctccacgggagcctcgaagagcaagaggcaggctcagcaaatggttcagccccagtccccggtggctgtcagtcaaagcaagcccggttgttatgacaatggaaaacactatcagataaatcaacagtgggagcggacctacctaggcaatgcgttggtttgtacttgttatggaggaagccgaggttttaactgcgagagtaaacctgaagctgaagagacttgctttgacaagtacactgggaacacttaccgagtgggtgacacttatgagcgtcctaaagactccatgatctgggactgtacctgcatyggggctgggcgagggagaataagctgtaccatcgcaaaccgctgccatgaagggggtcagtcctacaagattggtgacacctggaggagaccacatgagactggtggttacatgttagagtgtgtgtgtcttggtaatggaaaaggagaatggacctgcaagcccatagctgagaagtgttttgatcatgctgctgggacttcctatgtggtcggagaaacgtgggagaagccctaccaaggctggatgatggtagattgtacttgcctgggagaaggcagcggacgcatcacttgcacttctagaaatagatgcaacgatcaggacacaaggacatcctatagaattggagacacctggagcaagaaggataatcgaggaaacctgctccagtgcatctgcacaggcaacggccgaggagagtggaagtgtgagaggcacacctctgtgcagaccacatcgagcggatctggccccttcaccgatgttcgtgcagctgtttaccaaccgcagcctcacccccagcctcctccctatggccactgtgtcacagacagtggtgtggtctactctgtggggatgcagtggctgaagacacaaggaaataagcaaatgctttgcacgtgcctgggcaacggagtcagctgccaagagacagctgtaacccagacttacggtggcaactcaaatggagagccatgtgtcttaccattcacctacaatggcaggacgttctactcctgcaccacagaagggcgacaggacggacatctttggtgcagcacaacttcgaattatgagcaggaccagaaatactctttctgcacagaccacactgttttggttcagactcgaggaggaaattccaatggtgccttgtgccacttccccttcctatacaacaaccacaattacactgattgcacttctgagggcagaagagacaacatgaagtggtgtgggaccacacagaactatgatgccgaccagaagtttgggttctgccccatggctgcccacgaggaaatctgcacaaccaatgaaggggtcatgtaccgcattggagatcagtgggataagcagcatgacatgggtcacatgatgaggtgcacgtgtgttgggaatggtcgtggggaatggacatgcattgcctactcgcagcttcgagatcagtgcattgttgatgacatcacttacaatgtgaacgacacattccacaagcgtcatgaagaggggcacatgctgaactgtacatgcttcggtcagggtcggggcaggtggaagtgtgatcccgtcgaccaatgccaggattcagagactgggacgttttatcaaattggagattcatgggagaagtatgtgcatggtgtcagataccagtgctactgctatggccgtggcattggggagtggcattgccaacctttacagacctatccaagctcaagtggtcctgtcgaagtatttatcactgagactccgagtcagcccaactcccaccccatccagtggaatgcaccacagccatctcacatttccaagtacattctcaggtggagacctgtgagtatcccacccagaaaccttggatactgagtctcctaatcttatcaattctgatggtttctttttttcccagcttttgagccaacaactctgattaactattcctatagcatttactatatttgtttagtgaacaaacaatatgtggtcaattaaattgacttgtagactg

SEQ ID NO: 118 - DNA, 7823 bp, Homo sapiens
ggcggggcggggacagcccggcgggtctctcctcccccgcgccccgggcctccagaggggcgggaggggaccgtcccatataagccccggctcccggcgctcggacgcccgcgccggctgtgctgcacagggggaggagagggaaccccaggcgcgagcgggaagaggggacctgcagccacaacttctctggtcctctgcatcccttctgtccctccacccgtccccttccccaccctctggcccccaccttcttggaggcgacaacccccgggaggcattagaagggatttttcccgcaggttgcgaagggaagcaaacttggtggcaacttgcctcccggtgcgggcgtctctcccccaccgtctcaacatgcttaggggtccggggcccgggctgctgctgctggccgtccwgtgcctggggacagcggtgccctccacgggagcctcgaagagcaagaggcaggctcagcaaatggttcagccccagtccccggtggctgtcagtcaaagcaagcccggttgttatgacaatggaaaacactatcagataaatcaacagtgggagcggacctacctaggcaatgcgttggtttgtacttgttatggaggaagccgaggttttaactgcgagagtaaacctgaagctgaagagacttgctttgacaagtacactgggaacacttaccgagtgggtgacacttatgagcgtcctaaagactccatgatctgggactgtacctgcatyggggctgggcgagggagaataagctgtaccatcgcaaaccgctgccatgaagggggtcagtcctacaagattggtgacacctggaggagaccacatgagactggtggttacatgttagagtgtgtgtgtcttggtaatggaaaaggagaatggacctgcaagcccatagctgagaagtgttttgatcatgctgctgggacttcctatgtggtcggagaaacgtgggagaagccctaccaaggctggatgatggtagattgtacttgcctgggagaaggcagcggacgcatcacttgcacttctagaaatagatgcaacgatcaggacacaaggacatcctatagaattggagacacctggagcaagaaggataatcgaggaaacctgctccagtgcatctgcacaggcaacggccgaggagagtggaagtgtgagaggcacacctctgtgcagaccacatcgagcggatctggccccttcaccgatgttcgtgcagctgtttaccaaccgcagcctcacccccagcctcctccctatggccactgtgtcacagacagtggtgtggtctactctgtggggatgcagtggctgaagacacaaggaaataagcaaatgctttgcacgtgcctgggcaacggagtcagctgccaagagacagctgtaacccagacttacggtggcaactcaaatggagagccatgtgtcttaccattcacctacaatggcaggacgttctactcctgcaccacagaagggcgacaggacggacatctttggtgcagcacaacttcgaattatgagcaggaccagaaatactctttctgcacagaccacactgttttggttcagactcgaggaggaaattccaatggtgccttgtgccacttccccttcctatacaacaaccacaattacactgattgcacttctgagggcagaagagacaacatgaagtggtgtgggaccacacagaactatgatgccgaccagaagtttgggttctgccccatggctgcccacgaggaaatctgcacaaccaatgaaggggtcatgtaccgcattggagatcagtgggataagcagcatgacatgggtcacatgatgaggtgcacgtgtgttgggaatggtcgtggggaatggacatgcattgcctactcgcagcttcgagatcagtgcattgttgatgacatcacttacaatgtgaacgacacattccacaagcgtcatgaagaggggcacatgctgaactgtacatgcttcggtcagggtcggggcaggtggaagtgtgatcccgtcgaccaatgccaggattcagagactgggacgttttatcaaattggagattcatgggagaagtatgtgcatggtgtcagataccagtgctactgctatggccgtggcattggggagtggcattgccaacctttacagacctatccaagctcaagtggtcctgtcgaagtatttatcactgagactccgagtcagcccaactcccaccccatccagtggaatgcaccacagccatctcacatttccaagtacattctcaggtggagacctaaaaattctgtaggccgttggaaggaagctaccataccaggccacttaaactcctacaccatcaaaggcctgaagcctggtgtggtatacgagggccagctcatcagcatccagcagtacggccaccaagaagtgactcgctttgacttcaccaccaccagcaccagcacacctgtgaccagcaacaccgtgacaggagagacgactcccttttctcctcttgtggccacttctgaatctgtgaccgaaatcacagccagtagctttgtggtctcctgggtctcagcttccgacaccgtgtcgggattccgggtggaatatgagctgagtgaggagggagatgagccacagtacctggatcttccaagcacagccacttctgtgaacatccctgacctgcttcctggccgaaaatacattgtaaatgtctatcagatatctgaggatggggagcagagtttgatcctgtctacttcacaaacaacagcgcctgatgccccwcctgacmcgactgtggaccaagttgatgacacctcaattgttgttcgctggagcagaccccaggctcccatcacagggtacagaatagtctattcgccatcagtagaaggtagcagcacagaactcaaccttcctgaaactgcaaactccgtcaccctcagtgacttgcaacctggtgttcagtataacatcactatctatgctgtggaagaaaatcaagaaagtacacctgttgtcattcaacaagaaaccactggcaccccacgctcagatacagtgccctctcccagggacctgcagtttgtggaagtgacagacgtgaaggtcaccatcatgtggacaccgcctgagagtgcagtgaccggctaccgtgtggatgtgatccccgtcaacctgcctggcgagcacgggcagaggctgcccatcagcaggaacactctttgcagtgagccatgggagggagagcaagcctctgactgctcaacagacaaccaaactggatgctcccactaacctccagtttgtcaatgaaactgattctactgtcctggtgagatggactccacctcgggcccagataacaggataccgactgaccgtgggccttacccgaagaggmcagcccaggcagtacaatrtgggtccctctgtctccaagtacccmctgaggaatctgcagcctgcatctgagtacaccgtatccctcgtggccataaagggcaaccaagagagccccaaagccactggagtctttaccacactgcagcctgggagctctattccaccttacaacaccgaggtgactgagaccaccattgtgatcacatggacgcctgctccaagaattggttttaagctgggtgtacgaccaagccagggaggagaggcaccacgagaagtgacttcagactcaggaagcatcgttgtgtccggcttgactccaggagtagaatacgtctacaccatccaagtcctgagagatggacaggaaagagatgcgccaattgtaaacaaagtggtgacaccattgtctccaccaacaaacttgcatctggaggcaaaccctgacactggagtgctcacagtctcctgggagaggagcaccaccccagacattactggttatagaattaccacaacccctacaaacggccagcagggaaattctttggaagaagtggtccatgctgatcagagctcctgcacttttgataacctgagtcccggcctggagtacaatgtcagtgtttacactgtcaaggatgacaaggaaagtgtccctatctctgataccatcatcccagaggtgccccaactcactgacytaagctttgttgatataacygattcaagcatcggcctgaggtggaccccgctaaactcttccaccattattgggtaccgcatcacagtagttgcggcaggagaaggtatccctatttttgaagattttgtggactcctcagtaggatactacacagtcacagggctggagccgggcattgactatgatatcagcgttatcactctcattaatggcggcgagagtgcccctactacactgacacaacaaacggctgttcctcctcccactgacctgcgattcaccaacattggtccagacaccatgcgtgtcacctgggctccacccccatccattgatttaaccaacttcctggtgcgttactcacctgtgaaaaatgaggaagatgttgcagagttgtcaatttctccttcagacaatgcagtggtcttaacaaatctcctgcctggtacagaatatgtagtgagtgtctccagtgtctacgaacaacatgagagcacacctcttagaggaagacagaaaacaggtcttgattccccaactggcattgacttttctgatattactgccaactcttttactgtgcactggattgctcctcgagccaccatcactggctacaggatccgccatcatcccgagcacttcagtgggagacctcgagaagatcgggtgccccactctcggaattccatcaccctcaccaacctcactccaggcacagagtatgtggtcagcatcgttgctcttaatggcagagaggaaagtcccttattgattggccaacaatcaacagtttctgatgttccgagggacctggaagttgttgctgcgacccccaccagcctactgatcagctgggatgctcctgctgtcacagtgagatattacaggatcacttacggagaracaggaggaaatagccctgtccaggagttcactgtgcctgggagcaagtctacagctaccatcagcggccttaaacctggagttgattataccatcactgtgtatgctgtcactggccgtggagacagccccgcaagcagcaagccaatttccattaattaccgaacagaaattgacaaaccatcccagatgcaagtgaccgatgttcaggacaacagcattagtgtcaagtggctgccttcaagttcccctgttactggttacagagtaaccaccactcccaaaaatggaccaggaccaacaaaaactaaaactgcaggtccagatcaaacagaaatgactattgaaggcttgcagcccacagtggagtatgtggttagtgtctatgctcagaatccaagcggagagagtcagcctctggttcagactgcagtaaccaacattgatcgccctaaaggactggcattcactgatgtggatgtcgattccatcaaaattgcttgggaaagcccacaggggcaagtttccaggtacagggtgacctactckagccctgaggatggaatccatgagctattccctgcacctgatggtgaagaagacactgcagagctgcaaggcctcagaccgggttctgagtacacagtcagtgtggttgccttgcacgatgatatggagagccagcccctgattggaacccagtccacagctattcctgcaccaactgacctgaagttcactcaggtcacacccacaagcctgagcgcccagtggacaccacccaatgttcagctcactggatatcgagtgcgggtgacccccaaggagaagaccggaccaatgaaagaaatcaaccttgctcctgacagctcatccgtggttgtatcaggacttatggtggccaccaaatatgaagtgagtgtctatgctcttaaggacactttgacaagcagaccagctcagggwgttgtcaccactctggagaatgtcagcccaccaagaagggctcgtgtgacagatgctactgagaccaccatcaccattagctggagaaccaagactgagacgatcactggcttccaagttgatgccgttccagccaatggccagactccaatccagagaaccatcaagccagatgtcagaagctacaccatcacaggtttacaaccaggcactgactacaagatctacctgtacaccttgaatgacaatgctcggagctcccctgtggtcatcgacgcctccactgccattgatgcaccatccaacctgcgtttcctggccaccacacccaattccttgctggtatcatggcagccgccacgtgccaggattaccggctacatcatcaagtatgagaagcctgggtctcctcccagagaagtggtccctcggccccgccctggtgtcacagaggctactattactggcctggaaccgggaaccgaatatacaatttatgtcattgccctgaagaataatcagaagagcgagcccctgattggaaggaaaaagacaggatggtgccatgacaatggtgtgaactacaagattggagagaagtgggaccgtcagggagaaaatggccagatgatgagctgcacatgtcttgggaacggaaaaggagaattcaagtgtgaccctcatgaggcaacgtgttaygatgatgggaagacataccacgtaggagaacagtggcagaaggaatatctcggtgccatttgctcctgcacatgctttggaggccagcggggctggcgctgtgacaactgccgcagacctgggggtgaacccagtcccgaaggcactactggccagtcctacaaccagtattctcagagataccatcagagaacaaacactaatgttaattgcccaattgagtgcttcatgcctttagatgtacaggctgacagagaagattcccgagagtaaatcatctttccaatccagaggaacaagcatgtctctctgccaagatccatctaaactggagtgatgttagcagacccagcttagagttcttctttctttcttaagccctttgctctggaggaagttctcyagcttcagctcaactcacagcttctccaagcatcaccctgggagtttcctgagggttttctcataaatgagggctgcacattgcctgttctgcttcgaagtattcaataccgctcagtattttaaatgaagtgattctaagatttggtttgggatcaataggaaagcatatgcagccaaccaagatgcaaatgttttgaaatgattgtctggcccgcaatactgtaggaacaagcatgatcttgttactgtgatattttaaatatccacagtactcactttttccaaatgatcctagtaattgcctagaaatatctttctcttacctgttatttatcaatttttcccagtatttttatacggaaaaarttgtattgaaaacacttagtatgcagttgataagaggaatttggtataattatggtgggtgattattttttatactgtatgtgccaaagctttactactgtggaaagacaactgttttaataaaagatttacattccacaacttgaagttcatctatttgatataagacaccttcgggggaaataattcctgtgaatattctttttcaattcagcaaacatttgaaaatctatgatgtgcaagtctaattgttgatttcagtacaagattttctaaatcagttgctacaaaaactgattggtttttgtcacttcatctcttcactaatggagatagcttt

SEQ ID NO: 119 - DNA, 7848 bp, Homo sapiens
ggcggggcggggacagcccggcgggtctctcctcccccgcgccccgggcctccagaggggcgggaggggaccgtcccatataagccccggctcccggcgctcggacgcccgcgccggctgtgctgcacagggggaggagagggaaccccaggcgcgagcgggaagaggggacctgcagccacaacttctctggtcctctgcatcccttctgtccctccacccgtccccttccccaccctctggcccccaccttcttggaggcgacaacccccgggaggcattagaagggatttttcccgcaggttgcgaagggaagcaaacttggtggcaacttgcctcccggtgcgggcgtctctcccccaccgtctcaacatgcttaggggtccggggcccgggctgctgctgctggccgtccwgtgcctggggacagcggtgccctccacgggagcctcgaagagcaagaggcaggctcagcaaatggttcagccccagtccccggtggctgtcagtcaaagcaagcccggttgttatgacaatggaaaacactatcagataaatcaacagtgggagcggacctacctaggcaatgcgttggtttgtacttgttatggaggaagccgaggttttaactgcgagagtaaacctgaagctgaagagacttgctttgacaagtacactgggaacacttaccgagtgggtgacacttatgagcgtcctaaagactccatgatctgggactgtacctgcatyggggctgggcgagggagaataagctgtaccatcgcaaaccgctgccatgaagggggtcagtcctacaagattggtgacacctggaggagaccacatgagactggtggttacatgttagagtgtgtgtgtcttggtaatggaaaaggagaatggacctgcaagcccatagctgagaagtgttttgatcatgctgctgggacttcctatgtggtcggagaaacgtgggagaagccctaccaaggctggatgatggtagattgtacttgcctgggagaaggcagcggacgcatcacttgcacttctagaaatagatgcaacgatcaggacacaaggacatcctatagaattggagacacctggagcaagaaggataatcgaggaaacctgctccagtgcatctgcacaggcaacggccgaggagagtggaagtgtgagaggcacacctctgtgcagaccacatcgagcggatctggccccttcaccgatgttcgtgcagctgtttaccaaccgcagcctcacccccagcctcctccctatggccactgtgtcacagacagtggtgtggtctactctgtggggatgcagtggctgaagacacaaggaaataagcaaatgctttgcacgtgcctgggcaacggagtcagctgccaagagacagctgtaacccagacttacggtggcaactcaaatggagagccatgtgtcttaccattcacctacaatggcaggacgttctactcctgcaccacagaagggcgacaggacggacatctttggtgcagcacaacttcgaattatgagcaggaccagaaatactctttctgcacagaccacactgttttggttcagactcgaggaggaaattccaatggtgccttgtgccacttccccttcctatacaacaaccacaattacactgattgcacttctgagggcagaagagacaacatgaagtggtgtgggaccacacagaactatgatgccgaccagaagtttgggttctgccccatggctgcccacgaggaaatctgcacaaccaatgaaggggtcatgtaccgcattggagatcagtgggataagcagcatgacatgggtcacatgatgaggtgcacgtgtgttgggaatggtcgtggggaatggacatgcattgcctactcgcagcttcgagatcagtgcattgttgatgacatcacttacaatgtgaacgacacattccacaagcgtcatgaagaggggcacatgctgaactgtacatgcttcggtcagggtcggggcaggtggaagtgtgatcccgtcgaccaatgccaggattcagagactgggacgttttatcaaattggagattcatgggagaagtatgtgcatggtgtcagataccagtgctactgctatggccgtggcattggggagtggcattgccaacctttacagacctatccaagctcaagtggtcctgtcgaagtatttatcactgagactccgagtcagcccaactcccaccccatccagtggaatgcaccacagccatctcacatttccaagtacattctcaggtggagacctaaaaattctgtaggccgttggaaggaagctaccataccaggccacttaaactcctacaccatcaaaggcctgaagcctggtgtggtatacgagggccagctcatcagcatccagcagtacggccaccaagaagtgactcgctttgacttcaccaccaccagcaccagcacacctgtgaccagcaacaccgtgacaggagagacgactcccttttctcctcttgtggccacttctgaatctgtgaccgaaatcacagccagtagctttgtggtctcctgggtctcagcttccgacaccgtgtcgggattccgggtggaatatgagctgagtgaggagggagatgagccacagtacctggatcttccaagcacagccacttctgtgaacatccctgacctgcttcctggccgaaaatacattgtaaatgtctatcagatatctgaggatggggagcagagtttgatcctgtctacttcacaaacaacagcgcctgatgccccwcctgacmcgactgtggaccaagttgatgacacctcaattgttgttcgctggagcagaccccaggctcccatcacaggtcagctaaaatagtctattcgccatcagtagaaggtagcagcacagaactcaaccttcctgaaactgcaaactccgtcaccctcagtgacttgcaacctggtgttcagtataacatcactatctatgctgtggaagaaaatcaagaaagtacacctgttgtcattcaacaagaaaccactggcaccccacgctcagatacagtgccctctcccagggacctgcagtttgtggaagtgacagacgtgaaggtcaccatcatgtggacaccgcctgagagtgcagtgaccggctaccgtgtggatgtgatccccgtcaacctgcctggcgagcacgggcagaggctgcccatcagcaggaacacctttgcagaagtcaccgggctgtcccctggggtcacctattacttcaaagtctttgcagtgagccatgggagggagagcaagcctctgactgctcaacagacaaccaaactggatgctcccactaacctccagtttgtcaatgaaactgattctactgtcctggtgagatggactccacctcgggcccagataacaggataccgactgaccgtgggccttacccgaagaggmcagcccaggcagtacaatrtgggtccctctgtctccaagtacccmctgaggaatctgcagcctgcatctgagtacaccgtatccctcgtggccataaagggcaaccaagagagccccaaagccactggagtctttaccacactgcagcctgggagctctattccaccttacaacaccgaggtgactgagaccaccattgtgatcacatggacgcctgctccaagaattggttttaagctgggtgtacgaccaagccagggaggagaggcaccacgagaagtgacttcagactcaggaagcatcgttgtgtccggcttgactccaggagtagaatacgtctacaccatccaagtcctgagagatggacaggaaagagatgcgccaattgtaaacaaagtggtgacaccattgtctccaccaacaaacttgcatctggaggcaaaccctgacactggagtgctcacagtctcctgggagaggagcaccaccccagacattactggttatagaattaccacaacccctacaaacggccagcagggaaattctttggaagaagtggtccatgctgatcagagctcctgcacttttgataacctgagtcccggcctggagtacaatgtcagtgtttacactgtcaaggatgacaaggaaagtgtccctatctctgataccatcatcccagctgttcctcctcccactgacctgcgattcaccaacattggtccagacaccatgcgtgtcacctgggctccacccccatccattgatttaaccaacttcctggtgcgttactcacctgtgaaaaatgaggaagatgttgcagagttgtcaatttctccttcagacaatgcagtggtcttaacaaatctcctgcctggtacagaatatgtagtgagtgtctccagtgtctacgaacaacatgagagcacacctcttagaggaagacagaaaacaggtcttgattccccaactggcattgacttttctgatattactgccaactcttttactgtgcactggattgctcctcgagccaccatcactggctacaggatccgccatcatcccgagcacttcagtgggagacctcgagaagatcgggtgccccactctcggaattccatcaccctcaccaacctcactccaggcacagagtatgtggtcagcatcgttgctcttaatggcagagaggaaagtcccttattgattggccaacaatcaacagtttctgatgttccgagggacctggaagttgttgctgcgacccccaccagcctactgatcagctgggatgctcctgctgtcacagtgagatattacaggatcacttacggagaracaggaggaaatagccctgtccaggagttcactgtgcctgggagcaagtctacagctaccatcagcggccttaaacctggagttgattataccatcactgtgtatgctgtcactggccgtggagacagccccgcaagcagcaagccaatttccattaattaccgaacagaaattgacaaaccatcccagatgcaagtgaccgatgttcaggacaacagcattagtgtcaagtggctgccttcaagttcccctgttactggttacagagtaaccaccactcccaaaaatggaccaggaccaacaaaaactaaaactgcaggtccagatcaaacagaaatgactattgaaggcttgcagcccacagtggagtatgtggttagtgtctatgctcagaatccaagcggagagagtcagcctctggttcagactgcagtaaccaacattgatcgccctaaaggactggcattcactgatgtggatgtcgattccatcaaaattgcttgggaaagcccacaggggcaagtttccaggtacagggtgacctactckagccctgaggatggaatccatgagctattccctgcacctgatggtgaagaagacactgcagagctgcaaggcctcagaccgggttctgagtacacagtcagtgtggttgccttgcacgatgatatggagagccagcccctgattggaacccagtccacagctattcctgcaccaactgacctgaagttcactcaggtcacacccacaagcctgagcgcccagtggacaccacccaatgttcagctcactggatatcgagtgcgggtgacccccaaggagaagaccggaccaatgaaagaaatcaaccttgctcctgacagctcatccgtggttgtatcaggacttatggtggccaccaaatatgaagtgagtgtctatgctcttaaggacactttgacaagcagaccagctcagggwgttgtcaccactctggagaatgtcagcccaccaagaagggctcgtgtgacagatgctactgagaccaccatcaccattagctggagaaccaagactgagacgatcactggcttccaagttgatgccgttccagccaatggccagactccaatccagagaaccatcaagccagatgtcagaagctacaccatcacaggtttacaaccaggcactgactacaagatctacctgtacaccttgaatgacaatgctcggagctcccctgtggtcatcgacgcctccactgccattgatgcaccatccaacctgcgtttcctggccaccacacccaattccttgctggtatcatggcagccgccacgtgccaggattaccggctacatcatcaagtatgagaagcctgggtctcctcccagagaagtggtccctcggccccgccctggtgtcacagaggctactattactggcctggaaccgggaaccgaatatacaatttatgtcattgccctgaagaataatcagaagagcgagcccctgattggaaggaaaaagacaggacaagaagctctctctcagacaaccrtctcatgggccccattccaggacacttctgagtacatcatttcatgtcatcctgttggcactgatgaagaacccttacagttcagggttcctggaacttctaccagtgccactctgacaggcctcaccagaggtgccacctacaacrtcatagtggaggcactgaaagaccagcagaggcataaggttcrggaagaggttgttaccgtgggcaactctggatggtgccatgacaatggtgtgaactacaagattggagagaagtgggaccgtcagggagaaaatggccagatgatgagctgcacatgtcttgggaacggaaaaggagaattcaagtgtgaccctcatgaggcaacgtgttaygatgatgggaagacataccacgtaggagaacagtggcagaaggaatatctcggtgccatttgctcctgcacatgctttggaggccagcggggctggcgctgtgacaactgccgcagacctgggggtgaacccagtcccgaaggcactactggccagtcctacaaccagtattctcagagataccatcagagaacaaacactaatgttaattgcccaattgagtgcttcatgcctttagatgtacaggctgacagagaagattcccgagagtaaatcatctttccaatccagaggaacaagcatgtctctctgccaagatccatctaaactggagtgatgttagcagacccagcttagagttcttctttctttcttaagccctttgctctggaggaagttctcyagcttcagctcaactcacagcttctccaagcatcaccctgggagtttcctgagggttttctcataaatgagggctgcacattgcctgttctgcttcgaagtattcaataccgctcagtattttaaatgaagtgattctaagatttggtttgggatcaataggaaagcatatgcagccaaccaagatgcaaatgttttgaaatgattgtctggcccgcaatactgtaggaacaagcatgatcttgttactgtgatattttaaatatccacagtactcactttttccaaatgatcctagtaattgcctagaaatatctttctcttacctgttatttatcaatttttcccagtatttttatacggaaaaarttgtattgaaaacacttagtatgcagttgataagaggaatttggtataattatggtgggtgattattttttatactgtatgtgccaaagctttactactgtggaaagacaactgttttaataaaagatttacattccacaacttgaagttcatctatttgatataagacaccttcgggggaaataattcctgtgaatattctttttcaattcagcaaacatttgaaaatctatgatgtgcaagtctaattgttgatttcagtacaagattttctaaatcagttgctacaaaaactgattggtttttgtcacttcatctcttcactaatggagatagcttt

SEQ ID NO: 120 - DNA, 8155 bp, Homo sapiens
ggcggggcggggacagcccggcgggtctctcctcccccgcgccccgggcctccagaggggcgggaggggaccgtcccatataagccccggctcccggcgctcggacgcccgcgccggctgtgctgcacagggggaggagagggaaccccaggcgcgagcgggaagaggggacctgcagccacaacttctctggtcctctgcatcccttctgtccctccacccgtccccttccccaccctctggcccccaccttcttggaggcgacaacccccgggaggcattagaagggatttttcccgcaggttgcgaagggaagcaaacttggtggcaacttgcctcccggtgcgggcgtctctcccccaccgtctcaacatgcttaggggtccggggcccgggctgctgctgctggccgtccwgtgcctggggacagcggtgccctccacgggagcctcgaagagcaagaggcaggctcagcaaatggttcagccccagtccccggtggctgtcagtcaaagcaagcccggttgttatgacaatggaaaacactatcagataaatcaacagtgggagcggacctacctaggcaatgcgttggtttgtacttgttatggaggaagccgaggttttaactgcgagagtaaacctgaagctgaagagacttgctttgacaagtacactgggaacacttaccgagtgggtgacacttatgagcgtcctaaagactccatgatctgggactgtacctgcatyggggctgggcgagggagaataagctgtaccatcgcaaaccgctgccatgaagggggtcagtcctacaagattggtgacacctggaggagaccacatgagactggtggttacatgttagagtgtgtgtgtcttggtaatggaaaaggagaatggacctgcaagcccatagctgagaagtgttttgatcatgctgctgggacttcctatgtggtcggagaaacgtgggagaagccctaccaaggctggatgatggtagattgtacttgcctgggagaaggcagcggacgcatcacttgcacttctagaaatagatgcaacgatcaggacacaaggacatcctatagaattggagacacctggagcaagaaggataatcgaggaaacctgctccagtgcatctgcacaggcaacggccgaggagagtggaagtgtgagaggcacacctctgtgcagaccacatcgagcggatctggccccttcaccgatgttcgtgcagctgtttaccaaccgcagcctcacccccagcctcctccctatggccactgtgtcacagacagtggtgtggtctactctgtggggatgcagtggctgaagacacaaggaaataagcaaatgctttgcacgtgcctgggcaacggagtcagctgccaagagacagctgtaacccagacttacggtggcaactcaaatggagagccatgtgtcttaccattcacctacaatggcaggacgttctactcctgcaccacagaagggcgacaggacggacatctttggtgcagcacaacttcgaattatgagcaggaccagaaatactctttctgcacagaccacactgttttggttcagactcgaggaggaaattccaatggtgccttgtgccacttccccttcctatacaacaaccacaattacactgattgcacttctgagggcagaagagacaacatgaagtggtgtgggaccacacagaactatgatgccgaccagaagtttgggttctgccccatggctgcccacgaggaaatctgcacaaccaatgaaggggtcatgtaccgcattggagatcagtgggataagcagcatgacatgggtcacatgatgaggtgcacgtgtgttgggaatggtcgtggggaatggacatgcattgcctactcgcagcttcgagatcagtgcattgttgatgacatcacttacaatgtgaacgacacattccacaagcgtcatgaagaggggcacatgctgaactgtacatgcttcggtcagggtcggggcaggtggaagtgtgatcccgtcgaccaatgccaggattcagagactgggacgttttatcaaattggagattcatgggagaagtatgtgcatggtgtcagataccagtgctactgctatggccgtggcattggggagtggcattgccaacctttacagacctatccaagctcaagtggtcctgtcgaagtatttatcactgagactccgagtcagcccaactcccaccccatccagtggaatgcaccacagccatctcacatttccaagtacattctcaggtggagacctaaaaattctgtaggccgttggaaggaagctaccataccaggccacttaaactcctacaccatcaaaggcctgaagcctggtgtggtatacgagggccagctcatcagcatccagcagtacggccaccaagaagtgactcgctttgacttcaccaccaccagcaccagcacacctgtgaccagcaacaccgtgacaggagagacgactcccttttctcctcttgtggccacttctgaatctgtgaccgaaatcacagccagtagctttgtggtctcctgggtctcagcttccgacaccgtgtcgggattccgggtggaatatgagctgagtgaggagggagatgagccacagtacctggatcttccaagcacagccacttctgtgaacatccctgacctgcttcctggccgaaaatacattgtaaatgtctatcagatatctgaggatggggagcagagtttgatcctgtctacttcacaaacaacagcgcctgatgccccwcctgacmcgactgtggaccaagttgatgacacctcaattgttgttcgctggagcagaccccaggctcccatcacagggtacagaatagtctattcgccatcagtagaaggtagcagcacagaactcaaccttcctgaaactgcaaactccgtcaccctcagtgacttgcaacctggtgttcagtataacatcactatctatgctgtggaagaaaatcaagaaagtacacctgttgtcattcaacaagaaaccactggcaccccacgctcagatacagtgccctctcccagggacctgcagtttgtggaagtgacagacgtgaaggtcaccatcatgtggacaccgcctgagagtgcagtgaccggctaccgtgtggatgtgatccccgtcaacctgcctggcgagcacgggcagaggctgcccatcagcaggaacacctttgcagaagtcaccgggctgtcccctggggtcacctattacttcaaagtctttgcagtgagccatgggagggagagcaagcctctgactgctcaacagacaaccaaactggatgctcccactaacctccagtttgtcaatgaaactgattctactgtcctggtgagatggactccacctcgggcccagataacaggataccgactgaccgtgggccttacccgaagaggmcagcccaggcagtacaatrtgggtccctctgtctccaagtacccmctgaggaatctgcagcctgcatctgagtacaccgtatccctcgtggccataaagggcaaccaagagagccccaaagccactggagtctttaccacactgcagcctgggagctctattccaccttacaacaccgaggtgactgagaccaccattgtgatcacatggacgcctgctccaagaattggttttaagctgggtgtacgaccaagccagggaggagaggcaccacgagaagtgacttcagactcaggaagcatcgttgtgtccggcttgactccaggagtagaatacgtctacaccatccaagtcctgagagatggacaggaaagagatgcgccaattgtaaacaaagtggtgacaccattgtctccaccaacaaacttgcatctggaggcaaaccctgacactggagtgctcacagtctcctgggagaggagcaccaccccagacattactggttatagaattaccacaacccctacaaacggccagcagggaaattctttggaagaagtggtccatgctgatcagagctcctgcacttttgataacctgagtcccggcctggagtacaatgtcagtgtttacactgtcaaggatgacaaggaaagtgtccctatctctgataccatcatcccagctgttcctcctcccactgacctgcgattcaccaacattggtccagacaccatgcgtgtcacctgggctccacccccatccattgatttaaccaacttcctggtgcgttactcacctgtgaaaaatgaggaagatgttgcagagttgtcaatttctccttcagacaatgcagtggtcttaacaaatctcctgcctggtacagaatatgtagtgagtgtctccagtgtctacgaacaacatgagagcacacctcttagaggaagacagaaaacaggtcttgattccccaactggcattgacttttctgatattactgccaactcttttactgtgcactggattgctcctcgagccaccatcactggctacaggatccgccatcatcccgagcacttcagtgggagacctcgagaagatcgggtgccccactctcggaattccatcaccctcaccaacctcactccaggcacagagtatgtggtcagcatcgttgctcttaatggcagagaggaaagtcccttattgattggccaacaatcaacagtttctgatgttccgagggacctggaagttgttgctgcgacccccaccagcctactgatcagctgggatgctcctgctgtcacagtgagatattacaggatcacttacggagaracaggaggaaatagccctgtccaggagttcactgtgcctgggagcaagtctacagctaccatcagcggccttaaacctggagttgattataccatcactgtgtatgctgtcactggccgtggagacagccccgcaagcagcaagccaatttccattaattaccgaacagaaattgacaaaccatcccagatgcaagtgaccgatgttcaggacaacagcattagtgtcaagtggctgccttcaagttcccctgttactggttacagagtaaccaccactcccaaaaatggaccaggaccaacaaaaactaaaactgcaggtccagatcaaacagaaatgactattgaaggcttgcagcccacagtggagtatgtggttagtgtctatgctcagaatccaagcggagagagtcagcctctggttcagactgcagtaaccactattcctgcaccaactgacctgaagttcactcaggtcacacccacaagcctgagcgcccagtggacaccacccaatgttcagctcactggatatcgagtgcgggtgacccccaaggagaagaccggaccaatgaaagaaatcaaccttgctcctgacagctcatccgtggttgtatcaggacttatggtggccaccaaatatgaagtgagtgtctatgctcttaaggacactttgacaagcagaccagctcagggwgttgtcaccactctggagaatgtcagcccaccaagaagggctcgtgtgacagatgctactgagaccaccatcaccattagctggagaaccaagactgagacgatcactggcttccaagttgatgccgttccagccaatggccagactccaatccagagaaccatcaagccagatgtcagaagctacaccatcacaggtttacaaccaggcactgactacaagatctacctgtacaccttgaatgacaatgctcggagctcccctgtggtcatcgacgcctccactgccattgatgcaccatccaacctgcgtttcctggccaccacacccaattccttgctggtatcatggcagccgccacgtgccaggattaccggctacatcatcaagtatgagaagcctgggtctcctcccagagaagtggtccctcggccccgccctggtgtcacagaggctactattactggcctggaaccgggaaccgaatatacaatttatgtcattgccctgaagaataatcagaagagcgagcccctgattggaaggaaaaagacagacgagcttccccaactggtaacccttccacaccccaatcttcatggaccagagatcttggatgttccttccacagttcaaaagacccctttcgtcacccaccctgggtatgacactggaaatggtattcagcttcctggcacttctggtcagcaacccagtgttgggcaacaaatgatctttgaggaacatggttttaggcggaccacaccgcccacaacggccacccccataaggcataggccaagaccatacccgccgaatgtaggtgaggaaatccaaattggtcacatccccagggaagatgtagactatcacctgtacccacacggtccggkactcaatccaaatgcctctacaggacaagaagctctctctcagacaaccrtctcatgggccccattccaggacacttctgagtacatcatttcatgtcatcctgttggcactgatgaagaacccttacagttcagggttcctggaacttctaccagtgccactctgacaggcctcaccagaggtgccacctacaacrtcatagtggaggcactgaaagaccagcagaggcataaggttcrggaagaggttgttaccgtgggcaactctgtcaacgaaggcttgaaccaacctacggatgactcgtgctttgacccctacacagtttcccattatgccgttggagatgagtgggaacgaatgtctgaatcaggctttaaactgttgtgccagtgcttaggctttggaagtggtcatttcagatgtgattcatctagatggtgccatgacaatggtgtgaactacaagattggagagaagtgggaccgtcagggagaaaatggccagatgatgagctgcacatgtcttgggaacggaaaaggagaattcaagtgtgaccctcatgaggcaacgtgttaygatgatgggaagacataccacgtaggagaacagtggcagaaggaatatctcggtgccatttgctcctgcacatgctttggaggccagcggggctggcgctgtgacaactgccgcagacctgggggtgaacccagtcccgaaggcactactggccagtcctacaaccagtattctcagagataccatcagagaacaaacactaatgttaattgcccaattgagtgcttcatgcctttagatgtacaggctgacagagaagattcccgagagtaaatcatctttccaatccagaggaacaagcatgtctctctgccaagatccatctaaactggagtgatgttagcagacccagcttagagttcttctttctttcttaagccctttgctctggaggaagttctcyagcttcagctcaactcacagcttctccaagcatcaccctgggagtttcctgagggttttctcataaatgagggctgcacattgcctgttctgcttcgaagtattcaataccgctcagtattttaaatgaagtgattctaagatttggtttgggatcaataggaaagcatatgcagccaaccaagatgcaaatgttttgaaatgatatgaccaaaattttaagtaggaaagtcacccaaacacttctgctttcacttaagtgtctggcccgcaatactgtaggaacaagcatgatcttgttactgtgatattttaaatatccacagtactcactttttccaaatgatcctagtaattgcctagaaatatctttctcttacctgttatttatcaatttttcccagtatttttatacggaaaaarttgtattgaaaacacttagtatgcagttgataagaggaatttggtataattatggtgggtgattattttttatactgtatgtgccaaagctttactactgtggaaagacaactgttttaataaaagatttacattccacaacttgaagttcatctatttgatataagacaccttcgggggaaataattcctgtgaatattctttttcaattcagcaaacatttgaaaatctatgatgtgcaagtctaattgttgatttcagtacaagattttctaaatcagttgctacaaaaactgattggtttttgtcacttcatctcttcactaatggagatagcttt

SEQ ID NO: 121 - DNA, 3160 bp, Homo sapiens
agtcccggcctggagtacaatgtcagtgtttacactgtcaaggatgacaaggaaagaggaaatagccctgtccaggagttcactgtgcctgggagcaagtctacagctaccatcagcggccttaaacctggagttgattataccatcactgtgtatgctgtcactggccgtggagacagccccgcaagcagcaagccaatttccattaattaccgaacagaaattgacaaaccatcccagatgcaagtgaccgatgttcaggacaacagcattagtgtcaagtggctgccttcaagttcccctgttactggttacagagtaaccaccactcccaaaaatggaccaggaccaacaaaaactaaaactgcaggtccagatcaaacagaaatgactattgaaggcttgcagcccacagtggagtatgtggttagtgtctatgctcagaatccaagcggagagagtcagcctctggttcagactgcagtaaccactattcctgcaccaactgacctgaagttcactcaggtcacacccacaagcctgagcgcccagtggacaccacccaatgttcagctcactggatatcgagtgcgggtgacccccaaggagaagaccggaccaatgaaagaaatcaaccttgctcctgacagctcatccgtggttgtatcaggacttatggtggccaccaaatatgaagtgagtgtctatgctcttaaggacactttgacaagcagaccagctcagggwgttgtcaccactctggagaatgtcagcccaccaagaagggctcgtgtgacagatgctactgagaccaccatcaccattagctggagaaccaagactgagacgatcactggcttccaagttgatgccgttccagccaatggccagactccaatccagagaaccatcaagccagatgtcagaagctacaccatcacaggtttacaaccaggcactgactacaagatctacctgtacaccttgaatgacaatgctcggagctcccctgtggtcatcgacgcctccactgccattgatgcaccatccaacctgcgtttcctggccaccacacccaattccttgctggtatcatggcagccgccacgtgccaggattaccggctacatcatcaagtatgagaagcctgggtctcctcccagagaagtggtccctcggccccgccctggtgtcacagaggctactattactggcctggaaccgggaaccgaatatacaatttatgtcattgccctgaagaataatcagaagagcgagcccctgattggaaggaaaaagacagttcaaaagacccctttcgtcacccaccctgggtatgacactggaaatggtattcagcttcctggcacttctggtcagcaacccagtgttgggcaacaaatgatctttgaggaacatggttttaggcggaccacaccgcccacaacggccacccccataaggcataggccaagaccatacccgccgaatgtaggacaagaagctctctctcagacaaccrtctcatgggccccattccaggacacttctgagtacatcatttcatgtcatcctgttggcactgatgaagaacccttacagttcagggttcctggaacttctaccagtgccactctgacaggcctcaccagaggtgccacctacaacrtcatagtggaggcactgaaagaccagcagaggcataaggttcrggaagaggttgttaccgtgggcaactctgtcaacgaaggcttgaaccaacctacggatgactcgtgctttgacccctacacagtttcccattatgccgttggagatgagtgggaacgaatgtctgaatcaggctttaaactgttgtgccagtgcttaggctttggaagtggtcatttcagatgtgattcatctagatggtgccatgacaatggtgtgaactacaagattggagagaagtgggaccgtcagggagaaaatggccagatgatgagctgcacatgtcttgggaacggaaaaggagaattcaagtgtgaccctcatgaggcaacgtgttaygatgatgggaagacataccacgtaggagaacagtggcagaaggaatatctcggtgccatttgctcctgcacatgctttggaggccagcggggctggcgctgtgacaactgccgcagacctgggggtgaacccagtcccgaaggcactactggccagtcctacaaccagtattctcagagataccatcagagaacaaacactaatgttaattgcccaattgagtgcttcatgcctttagatgtacaggctgacagagaagattcccgagagtaaatcatctttccaatccagaggaacaagcatgtctctctgccaagatccatctaaactggagtgatgttagcagacccagcttagagttcttctttctttcttaagccctttgctctggaggaagttctcyagcttcagctcaactcacagcttctccaagcatcaccctgggagtttcctgagggttttctcataaatgagggctgcacattgcctgttctgcttcgaagtattcaataccgctcagtattttaaatgaagtgattctaagatttggtttgggatcaataggaaagcatatgcagccaaccaagatgcaaatgttttgaaatgattgtctggcccgcaatactgtaggaacaagcatgatcttgttactgtgatattttaaatatccacagtactcactttttccaaatgatcctagtaattgcctagaaatatctttctcttacctgttatttatcaatttttcccagtatttttatacggaaaaarttgtattgaaaacacttagtatgcagttgataagaggaatttggtataattatggtgggtgattattttttatactgtatgtgccaaagctttactactgtggaaagacaactgttttaataaaagatttacattccacaacttgaagttcatctatttgatataagacaccttcgggggaaataattcctgtgaatattctttttcaattcagcaaacatttgaaaatctatgatgtgcaagtctaattgttgatttcagtacaagattttctaaatcagttgctacaaaaactgattggtttttgtcacttcatctcttcactaatggagatagcttt

SEQ ID NO: 122 - DNA, 7959 bp, Homo sapiens
ggcggggcggggacagcccggcgggtctctcctcccccgcgccccgggcctccagaggggcgggaggggaccgtcccatataagccccggctcccggcgctcggacgcccgcgccggctgtgctgcacagggggaggagagggaaccccaggcgcgagcgggaagaggggacctgcagccacaacttctctggtcctctgcatcccttctgtccctccacccgtccccttccccaccctctggcccccaccttcttggaggcgacaacccccgggaggcattagaagggatttttcccgcaggttgcgaagggaagcaaacttggtggcaacttgcctcccggtgcgggcgtctctcccccaccgtctcaacatgcttaggggtccggggcccgggctgctgctgctggccgtccwgtgcctggggacagcggtgccctccacgggagcctcgaagagcaagaggcaggctcagcaaatggttcagccccagtccccggtggctgtcagtcaaagcaagcccggttgttatgacaatggaaaacactatcagataaatcaacagtgggagcggacctacctaggcaatgcgttggtttgtacttgttatggaggaagccgaggttttaactgcgagagtaaacctgaagctgaagagacttgctttgacaagtacactgggaacacttaccgagtgggtgacacttatgagcgtcctaaagactccatgatctgggactgtacctgcatyggggctgggcgagggagaataagctgtaccatcgcaaaccgctgccatgaagggggtcagtcctacaagattggtgacacctggaggagaccacatgagactggtggttacatgttagagtgtgtgtgtcttggtaatggaaaaggagaatggacctgcaagcccatagctgagaagtgttttgatcatgctgctgggacttcctatgtggtcggagaaacgtgggagaagccctaccaaggctggatgatggtagattgtacttgcctgggagaaggcagcggacgcatcacttgcacttctagaaatagatgcaacgatcaggacacaaggacatcctatagaattggagacacctggagcaagaaggataatcgaggaaacctgctccagtgcatctgcacaggcaacggccgaggagagtggaagtgtgagaggcacacctctgtgcagaccacatcgagcggatctggccccttcaccgatgttcgtgcagctgtttaccaaccgcagcctcacccccagcctcctccctatggccactgtgtcacagacagtggtgtggtctactctgtggggatgcagtggctgaagacacaaggaaataagcaaatgctttgcacgtgcctgggcaacggagtcagctgccaagagacagctgtaacccagacttacggtggcaactcaaatggagagccatgtgtcttaccattcacctacaatggcaggacgttctactcctgcaccacagaagggcgacaggacggacatctttggtgcagcacaacttcgaattatgagcaggaccagaaatactctttctgcacagaccacactgttttggttcagactcgaggaggaaattccaatggtgccttgtgccacttccccttcctatacaacaaccacaattacactgattgcacttctgagggcagaagagacaacatgaagtggtgtgggaccacacagaactatgatgccgaccagaagtttgggttctgccccatggctgcccacgaggaaatctgcacaaccaatgaaggggtcatgtaccgcattggagatcagtgggataagcagcatgacatgggtcacatgatgaggtgcacgtgtgttgggaatggtcgtggggaatggacatgcattgcctactcgcagcttcgagatcagtgcattgttgatgacatcacttacaatgtgaacgacacattccacaagcgtcatgaagaggggcacatgctgaactgtacatgcttcggtcagggtcggggcaggtggaagtgtgatcccgtcgaccaatgccaggattcagagactgggacgttttatcaaattggagattcatgggagaagtatgtgcatggtgtcagataccagtgctactgctatggccgtggcattggggagtggcattgccaacctttacagacctatccaagctcaagtggtcctgtcgaagtatttatcactgagactccgagtcagcccaactcccaccccatccagtggaatgcaccacagccatctcacatttccaagtacattctcaggtggagacctaaaaattctgtaggccgttggaaggaagctaccataccaggccacttaaactcctacaccatcaaaggcctgaagcctggtgtggtatacgagggccagctcatcagcatccagcagtacggccaccaagaagtgactcgctttgacttcaccaccaccagcaccagcacacctgtgaccagtatgtacacaaccaccctcatgcctcctacccccgaggttcctagagctaggctctcctgaggcaatgctttccttctcaattcatattcttccaggaggggcaccaacgttttttaaaatgatgttggcgacgaggacggtaaattttctagatgactgaaggctgactttcccctttctgtgactctctaggcaacaccgtgacaggagagacgactcccttttctcctcttgtggccacttctgaatctgtgaccgaaatcacagccagtagctttgtggtctcctgggtctcagcttccgacaccgtgtcgggattccgggtggaatatgagctgagtgaggagggagatgagccacagtacctggatcttccaagcacagccacttctgtgaacatccctgacctgcttcctggccgaaaatacattgtaaatgtctatcagatatctgaggatggggagcagagtttgatcctgtctacttcacaaacaacagcgcctgatgccccwcctgacmcgactgtggaccaagttgatgacacctcaattgttgttcgctggagcagaccccaggctcccatcacagggtacagaatagtctattcgccatcagtagaaggtagcagcacagaactcaaccttcctgaaactgcaaactccgtcaccctcagtgacttgcaacctggtgttcagtataacatcactatctatgctgtggaagaaaatcaagaaagtacacctgttgtcattcaacaagaaaccactggcaccccacgctcagatacagtgccctctcccagggacctgcagtttgtggaagtgacagacgtgaaggtcaccatcatgtggacaccgcctgagagtgcagtgaccggctaccgtgtggatgtgatccccgtcaacctgcctggcgagcacgggcagaggctgcccatcagcaggaacacctttgcagaagtcaccgggctgtcccctggggtcacctattacttcaaagtctttgcagtgagccatgggagggagagcaagcctctgactgctcaacagacaaccaaactggatgctcccactaacctccagtttgtcaatgaaactgattctactgtcctggtgagatggactccacctcgggcccagataacaggataccgactgaccgtgggccttacccgaagaggmcagcccaggcagtacaatrtgggtccctctgtctccaagtacccmctgaggaatctgcagcctgcatctgagtacaccgtatccctcgtggccataaagggcaaccaagagagccccaaagccactggagtctttaccacactgcagcctgggagctctattccaccttacaacaccgaggtgactgagaccaccattgtgatcacatggacgcctgctccaagaattggttttaagctgggtgtacgaccaagccagggaggagaggcaccacgagaagtgacttcagactcaggaagcatcgttgtgtccggcttgactccaggagtagaatacgtctacaccatccaagtcctgagagatggacaggaaagagatgcgccaattgtaaacaaagtggtgacaccattgtctccaccaacaaacttgcatctggaggcaaaccctgacactggagtgctcacagtctcctgggagaggagcaccaccccagacattactggttatagaattaccacaacccctacaaacggccagcagggaaattctttggaagaagtggtccatgctgatcagagctcctgcacttttgataacctgagtcccggcctggagtacaatgtcagtgtttacactgtcaaggatgacaaggaaagtgtccctatctctgataccatcatcccagctgttcctcctcccactgacctgcgattcaccaacattggtccagacaccatgcgtgtcacctgggctccacccccatccattgatttaaccaacttcctggtgcgttactcacctgtgaaaaatgaggaagatgttgcagagttgtcaatttctccttcagacaatgcagtggtcttaacaaatctcctgcctggtacagaatatgtagtgagtgtctccagtgtctacgaacaacatgagagcacacctcttagaggaagacagaaaacaggtcttgattccccaactggcattgacttttctgatattactgccaactcttttactgtgcactggattgctcctcgagccaccatcactggctacaggatccgccatcatcccgagcacttcagtgggagacctcgagaagatcgggtgccccactctcggaattccatcaccctcaccaacctcactccaggcacagagtatgtggtcagcatcgttgctcttaatggcagagaggaaagtcccttattgattggccaacaatcaacagtttctgatgttccgagggacctggaagttgttgctgcgacccccaccagcctactgatcagctgggatgctcctgctgtcacagtgagatattacaggatcacttacggagaracaggaggaaatagccctgtccaggagttcactgtgcctgggagcaagtctacagctaccatcagcggccttaaacctggagttgattataccatcactgtgtatgctgtcactggccgtggagacagccccgcaagcagcaagccaatttccattaattaccgaacagaaattgacaaaccatcccagatgcaagtgaccgatgttcaggacaacagcattagtgtcaagtggctgccttcaagttcccctgttactggttacagagtaaccaccactcccaaaaatggaccaggaccaacaaaaactaaaactgcaggtccagatcaaacagaaatgactattgaaggcttgcagcccacagtggagtatgtggttagtgtctatgctcagaatccaagcggagagagtcagcctctggttcagactgcagtaaccaacattgatcgccctaaaggactggcattcactgatgtggatgtcgattccatcaaaattgcttgggaaagcccacaggggcaagtttccaggtacagggtgacctactckagccctgaggatggaatccatgagctattccctgcacctgatggtgaagaagacactgcagagctgcaaggcctcagaccgggttctgagtacacagtcagtgtggttgccttgcacgatgatatggagagccagcccctgattggaacccagtccacagctattcctgcaccaactgacctgaagttcactcaggtcacacccacaagcctgagcgcccagtggacaccacccaatgttcagctcactggatatcgagtgcgggtgacccccaaggagaagaccggaccaatgaaagaaatcaaccttgctcctgacagctcatccgtggttgtatcaggacttatggtggccaccaaatatgaagtgagtgtctatgctcttaaggacactttgacaagcagaccagctcagggwgttgtcaccactctggagaatgtcagcccaccaagaagggctcgtgtgacagatgctactgagaccaccatcaccattagctggagaaccaagactgagacgatcactggcttccaagttgatgccgttccagccaatggccagactccaatccagagaaccatcaagccagatgtcagaagctacaccatcacaggtttacaaccaggcactgactacaagatctacctgtacaccttgaatgacaatgctcggagctcccctgtggtcatcgacgcctccactgccattgatgcaccatccaacctgcgtttcctggccaccacacccaattccttgctggtatcatggcagccgccacgtgccaggattaccggctacatcatcaagtatgagaagcctgggtctcctcccagagaagtggtccctcggccccgccctggtgtcacagaggctactattactggcctggaaccgggaaccgaatatacaatttatgtcattgccctgaagaataatcagaagagcgagcccctgattggaaggaaaaagacagtcaacgaaggcttgaaccaacctacggatgactcgtgctttgacccctacacagtttcccattatgccgttggagatgagtgggaacgaatgtctgaatcaggctttaaactgttgtgccagtgcttaggctttggaagtggtcatttcagatgtgattcatctagatggtgccatgacaatggtgtgaactacaagattggagagaagtgggaccgtcagggagaaaatggccagatgatgagctgcacatgtcttgggaacggaaaaggagaattcaagtgtgaccctcatgaggcaacgtgttaygatgatgggaagacataccacgtaggagaacagtggcagaaggaatatctcggtgccatttgctcctgcacatgctttggaggccagcggggctggcgctgtgacaactgccgcagacctgggggtgaacccagtcccgaaggcactactggccagtcctacaaccagtattctcagagataccatcagagaacaaacactaatgttaattgcccaattgagtgcttcatgcctttagatgtacaggctgacagagaagattcccgagagtaaatcatctttccaatccagaggaacaagcatgtctctctgccaagatccatctaaactggagtgatgttagcagacccagcttagagttcttctttctttcttaagccctttgctctggaggaagttctcyagcttcagctcaactcacagcttctccaagcatcaccctgggagtttcctgagggttttctcataaatgagggctgcacattgcctgttctgcttcgaagtattcaataccgctcagtattttaaatgaagtgattctaagatttggtttgggatcaataggaaagcatatgcagccaaccaagatgcaaatgttttgaaatgattgtctggcccgcaatactgtaggaacaagcatgatcttgttactgtgatattttaaatatccacagtactcactttttccaaatgatcctagtaattgcctagaaatatctttctcttacctgttatttatcaatttttcccagtatttttatacggaaaaarttgtattgaaaacacttagtatgcagttgataagaggaatttggtataattatggtgggtgattattttttatactgtatgtgccaaagctttactactgtggaaagacaactgttttaataaaagatttacattccacaacttgaagttcatctatttgatataagacaccttcgggggaaataattcctgtgaatattctttttcaattcagcaaacatttgaaaatctatgatgtgcaagtctaattgttgatttcagtacaagattttctaaatcagttgctacaaaaactgattggtttttgtcacttcatctcttcactaatggagatagcttt

SEQ ID NO: 123 - DNA, 8278 bp, Homo sapiens
ggcggggcggggacagcccggcgggtctctcctcccccgcgccccgggcctccagaggggcgggaggggaccgtcccatataagccccggctcccggcgctcggacgcccgcgccggctgtgctgcacagggggaggagagggaaccccaggcgcgagcgggaagaggggacctgcagccacaacttctctggtcctctgcatcccttctgtccctccacccgtccccttccccaccctctggcccccaccttcttggaggcgacaacccccgggaggcattagaagggatttttcccgcaggttgcgaagggaagcaaacttggtggcaacttgcctcccggtgcgggcgtctctcccccaccgtctcaacatgcttaggggtccggggcccgggctgctgctgctggccgtccwgtgcctggggacagcggtgccctccacgggagcctcgaagagcaagaggcaggctcagcaaatggttcagccccagtccccggtggctgtcagtcaaagcaagcccggttgttatgacaatggaaaacactatcagataaatcaacagtgggagcggacctacctaggcaatgcgttggtttgtacttgttatggaggaagccgaggttttaactgcgagagtaaacctgaagctgaagagacttgctttgacaagtacactgggaacacttaccgagtgggtgacacttatgagcgtcctaaagactccatgatctgggactgtacctgcatyggggctgggcgagggagaataagctgtaccatcgcaaaccgctgccatgaagggggtcagtcctacaagattggtgacacctggaggagaccacatgagactggtggttacatgttagagtgtgtgtgtcttggtaatggaaaaggagaatggacctgcaagcccatagctgagaagtgttttgatcatgctgctgggacttcctatgtggtcggagaaacgtgggagaagccctaccaaggctggatgatggtagattgtacttgcctgggagaaggcagcggacgcatcacttgcacttctagaaatagatgcaacgatcaggacacaaggacatcctatagaattggagacacctggagcaagaaggataatcgaggaaacctgctccagtgcatctgcacaggcaacggccgaggagagtggaagtgtgagaggcacacctctgtgcagaccacatcgagcggatctggccccttcaccgatgttcgtgcagctgtttaccaaccgcagcctcacccccagcctcctccctatggccactgtgtcacagacagtggtgtggtctactctgtggggatgcagtggctgaagacacaaggaaataagcaaatgctttgcacgtgcctgggcaacggagtcagctgccaagagacagctgtaacccagacttacggtggcaactcaaatggagagccatgtgtcttaccattcacctacaatggcaggacgttctactcctgcaccacagaagggcgacaggacggacatctttggtgcagcacaacttcgaattatgagcaggaccagaaatactctttctgcacagaccacactgttttggttcagactcgaggaggaaattccaatggtgccttgtgccacttccccttcctatacaacaaccacaattacactgattgcacttctgagggcagaagagacaacatgaagtggtgtgggaccacacagaactatgatgccgaccagaagtttgggttctgccccatggctgcccacgaggaaatctgcacaaccaatgaaggggtcatgtaccgcattggagatcagtgggataagcagcatgacatgggtcacatgatgaggtgcacgtgtgttgggaatggtcgtggggaatggacatgcattgcctactcgcagcttcgagatcagtgcattgttgatgacatcacttacaatgtgaacgacacattccacaagcgtcatgaagaggggcacatgctgaactgtacatgcttcggtcagggtcggggcaggtggaagtgtgatcccgtcgaccaatgccaggattcagagactgggacgttttatcaaattggagattcatgggagaagtatgtgcatggtgtcagataccagtgctactgctatggccgtggcattggggagtggcattgccaacctttacagacctatccaagctcaagtggtcctgtcgaagtatttatcactgagactccgagtcagcccaactcccaccccatccagtggaatgcaccacagccatctcacatttccaagtacattctcaggtggagacctaaaaattctgtaggccgttggaaggaagctaccataccaggccacttaaactcctacaccatcaaaggcctgaagcctggtgtggtatacgagggccagctcatcagcatccagcagtacggccaccaagaagtgactcgctttgacttcaccaccaccagcaccagcacacctgtgaccagcaacaccgtgacaggagagacgactcccttttctcctcttgtggccacttctgaatctgtgaccgaaatcacagccagtagctttgtggtctcctgggtctcagcttccgacaccgtgtcgggattccgggtggaatatgagctgagtgaggagggagatgagccacagtacctggatcttccaagcacagccacttctgtgaacatccctgacctgcttcctggccgaaaatacattgtaaatgtctatcagatatctgaggatggggagcagagtttgatcctgtctacttcacaaacaacagcgcctgatgccccwcctgacmcgactgtggaccaagttgatgacacctcaattgttgttcgctggagcagaccccaggctcccatcacagggtacagaatagtctattcgccatcagtagaaggtagcagcacagaactcaaccttcctgaaactgcaaactccgtcaccctcagtgacttgcaacctggtgttcagtataacatcactatctatgctgtggaagaaaatcaagaaagtacacctgttgtcattcaacaagaaaccactggcaccccacgctcagatacagtgccctctcccagggacctgcagtttgtggaagtgacagacgtgaaggtcaccatcatgtggacaccgcctgagagtgcagtgaccggctaccgtgtggatgtgatccccgtcaacctgcctggcgagcacgggcagaggctgcccatcagcaggaacacctttgcagaagtcaccgggctgtcccctggggtcacctattacttcaaagtctttgcagtgagccatgggagggagagcaagcctctgactgctcaacagacaaccaaactggatgctcccactaacctccagtttgtcaatgaaactgattctactgtcctggtgagatggactccacctcgggcccagataacaggataccgactgaccgtgggccttacccgaagaggmcagcccaggcagtacaatrtgggtccctctgtctccaagtacccmctgaggaatctgcagcctgcatctgagtacaccgtatccctcgtggccataaagggcaaccaagagagccccaaagccactggagtctttaccacactgcagcctgggagctctattccaccttacaacaccgaggtgactgagaccaccattgtgatcacatggacgcctgctccaagaattggttttaagctgggtgtacgaccaagccagggaggagaggcaccacgagaagtgacttcagactcaggaagcatcgttgtgtccggcttgactccaggagtagaatacgtctacaccatccaagtcctgagagatggacaggaaagagatgcgccaattgtaaacaaagtggtgacaccattgtctccaccaacaaacttgcatctggaggcaaaccctgacactggagtgctcacagtctcctgggagaggagcaccaccccagacattactggttatagaattaccacaacccctacaaacggccagcagggaaattctttggaagaagtggtccatgctgatcagagctcctgcacttttgataacctgagtcccggcctggagtacaatgtcagtgtttacactgtcaaggatgacaaggaaagtgtccctatctctgataccatcatcccagctgttcctcctcccactgacctgcgattcaccaacattggtccagacaccatgcgtgtcacctgggctccacccccatccattgatttaaccaacttcctggtgcgttactcacctgtgaaaaatgaggaagatgttgcagagttgtcaatttctccttcagacaatgcagtggtcttaacaaatctcctgcctggtacagaatatgtagtgagtgtctccagtgtctacgaacaacatgagagcacacctcttagaggaagacagaaaacaggtcttgattccccaactggcattgacttttctgatattactgccaactcttttactgtgcactggattgctcctcgagccaccatcactggctacaggatccgccatcatcccgagcacttcagtgggagacctcgagaagatcgggtgccccactctcggaattccatcaccctcaccaacctcactccaggcacagagtatgtggtcagcatcgttgctcttaatggcagagaggaaagtcccttattgattggccaacaatcaacagtttctgatgttccgagggacctggaagttgttgctgcgacccccaccagcctactgatcagctgggatgctcctgctgtcacagtgagatattacaggatcacttacggagaracaggaggaaatagccctgtccaggagttcactgtgcctgggagcaagtctacagctaccatcagcggccttaaacctggagttgattataccatcactgtgtatgctgtcactggccgtggagacagccccgcaagcagcaagccaatttccattaattaccgaacagaaattgacaaaccatcccagatgcaagtgaccgatgttcaggacaacagcattagtgtcaagtggctgccttcaagttcccctgttactggttacagagtaaccaccactcccaaaaatggaccaggaccaacaaaaactaaaactgcaggtccagatcaaacagaaatgactattgaaggcttgcagcccacagtggagtatgtggttagtgtctatgctcagaatccaagcggagagagtcagcctctggttcagactgcagtaaccaacattgatcgccctaaaggactggcattcactgatgtggatgtcgattccatcaaaattgcttgggaaagcccacaggggcaagtttccaggtacagggtgacctactckagccctgaggatggaatccatgagctattccctgcacctgatggtgaagaagacactgcagagctgcaaggcctcagaccgggttctgagtacacagtcagtgtggttgccttgcacgatgatatggagagccagcccctgattggaacccagtccacagctattcctgcaccaactgacctgaagttcactcaggtcacacccacaagcctgagcgcccagtggacaccacccaatgttcagctcactggatatcgagtgcgggtgacccccaaggagaagaccggaccaatgaaagaaatcaaccttgctcctgacagctcatccgtggttgtatcaggacttatggtggccaccaaatatgaagtgagtgtctatgctcttaaggacactttgacaagcagaccagctcagggwgttgtcaccactctggagaatgtcagcccaccaagaagggctcgtgtgacagatgctactgagaccaccatcaccattagctggagaaccaagactgagacgatcactggcttccaagttgatgccgttccagccaatggccagactccaatccagagaaccatcaagccagatgtcagaagctacaccatcacaggtttacaaccaggcactgactacaagatctacctgtacaccttgaatgacaatgctcggagctcccctgtggtcatcgacgcctccactgccattgatgcaccatccaacctgcgtttcctggccaccacacccaattccttgctggtatcatggcagccgccacgtgccaggattaccggctacatcatcaagtatgagaagcctgggtctcctcccagagaagtggtccctcggccccgccctggtgtcacagaggctactattactggcctggaaccgggaaccgaatatacaatttatgtcattgccctgaagaataatcagaagagcgagcccctgattggaaggaaaaagacagacgagcttccccaactggtaacccttccacaccccaatcttcatggaccagagatcttggatgttccttccacagttcaaaagacccctttcgtcacccaccctgggtatgacactggaaatggtattcagcttcctggcacttctggtcagcaacccagtgttgggcaacaaatgatctttgaggaacatggttttaggcggaccacaccgcccacaacggccacccccataaggcataggccaagaccatacccgccgaatgtaggacaagaagctctctctcagacaaccrtctcatgggccccattccaggacacttctgagtacatcatttcatgtcatcctgttggcactgatgaagaacccttacagttcagggttcctggaacttctaccagtgccactctgacaggcctcaccagaggtgccacctacaacrtcatagtggaggcactgaaagaccagcagaggcataaggttcrggaagaggttgttaccgtgggcaactctgtcaacgaaggcttgaaccaacctacggatgactcgtgctttgacccctacacagtttcccattatgccgttggagatgagtgggaacgaatgtctgaatcaggctttaaactgttgtgccagtgcttaggctttggaagtggtcatttcagatgtgattcatctagatggtgccatgacaatggtgtgaactacaagattggagagaagtgggaccgtcagggagaaaatggccagatgatgagctgcacatgtcttgggaacggaaaaggagaattcaagtgtgaccctcatgaggcaacgtgttaygatgatgggaagacataccacgtaggagaacagtggcagaaggaatatctcggtgccatttgctcctgcacatgctttggaggccagcggggctggcgctgtgacaactgccgcagacctgggggtgaacccagtcccgaaggcactactggccagtcctacaaccagtattctcagagataccatcagagaacaaacactaatgttaattgcccaattgagtgcttcatgcctttagatgtacaggctgacagagaagattcccgagagtaaatcatctttccaatccagaggaacaagcatgtctctctgccaagatccatctaaactggagtgatgttagcagacccagcttagagttcttctttctttcttaagccctttgctctggaggaagttctcyagcttcagctcaactcacagcttctccaagcatcaccctgggagtttcctgagggttttctcataaatgagggctgcacattgcctgttctgcttcgaagtattcaataccgctcagtattttaaatgaagtgattctaagatttggtttgggatcaataggaaagcatatgcagccaaccaagatgcaaatgttttgaaatgattgtctggcccgcaatactgtaggaacaagcatgatcttgttactgtgatattttaaatatccacagtactcactttttccaaatgatcctagtaattgcctagaaatatctttctcttacctgttatttatcaatttttcccagtatttttatacggaaaaarttgtattgaaaacacttagtatgcagttgataagaggaatttggtataattatggtgggtgattattttttatactgtatgtgccaaagctttactactgtggaaagacaactgttttaataaaagatttacattccacaacttgaagttcatctatttgatataagacaccttcgggggaaataattcctgtgaatattctttttcaattcagcaaacatttgaaaatctatgatgtgcaagtctaattgttgatttcagtacaagattttctaaatcagttgctacaaaaactgattggtttttgtcacttcatctcttcactaatggagatagcttt

SEQ ID NO: 124 - DNA, 1123 bp, Homo sapiens
gggaactatcagctcctggcatctgtaaggatgctgtccatgctgaggacaatgaccagactctgcttcctgttattcttctctgtggccaccagtgggtgcagtgcagcagcagcctcttctcttgagatgctctcgagggaattcgaaacctgtgccttctccttttcttccctgcctagaagctgcaaagaaatcaaggaacgctgccatagtgcaggtgatggcctgtattttctccgcaccaagaatggtgttgtctaccagaccttctgtgacatgacttctgggggtggcggctggaccctggtggccagcgtgcacgagaatgacatgcrtgggaagtgcacggtgggtgatcgctggtccagtcagcagggcaacaaagcagactacccagagggggatggcaactgggccaactacaacacctttggatctgcagaggcggccacgagcgatgactacaagaaccctggctactacgacatccaggccaaggacctgggcatctggcatgtgcccaacaagtcccccatgcagcattggagaaacagcgccctgctgaggtaccgcaccaacactggcttcctccagagactgggacataatctgtttggcatctaccagaaatacccagtgaaatacagatcagggaaatgttggaatgacaatggcccagccatacctgtggtctatgactttggtgatgctaagaagactgcatcttattactcaccgtatggtcaacgggaatttgttgcaggattcgttcagttccgggtgtttaataacgagagagcagccaacgccctttgtgctgggataaaagttactggctgtaacactgagcatcactgcatcggtggaggagggttcttcccacagggcaaaccccgtcagtgtggggacttctccgcctttgactgggatggatatggaactcacgttaagagcagctgcagtcgggagataacggaggcggctgtactcttgttctatagatgagacagagctctgcggtgtcagggcgagaacccatcttccaaccccggctatttggagacggaaaaactggaattctaacaaggaggagaggagactaaatcacatcaatttgcaa

SEQ ID NO: 125 - DNA, 6025 bp, Homo sapiens
cgcagggagatttggacgctccggcctgggaggtgcgtcagatccgagctcgccatccagtttcctctccactagtccccccagttggagatctgggaccaacaaggcaccatggcgcagaagggccaactcagtgacgatgagaagttcctctttgtggacaaaaacttcatcaacagcccagtggcccaggctgactgggccgccaagagactcgtctgggtcccctcggagaagcagggcttygaggcagccagcattaaggaggagaagggggatgaggtggttgtggagctggtggagaatggcaagaaggtcacggttgggaaagatgacatccagaagatgaacccacccaagttctccaaggtggaggacatggcggagctgacgtgcctcaacgaagcctccgtgctacacaacctgagggagcggtacttctcagggctaatatatacgtactctggcctcttctgcgtggtggtcaacccctataaacacctgcccatctactcggagaagatcgtygacatgtacaagggcaagaagaggcacgagatgccrcctcacatctacgccatcgcagacacggcctaccggagcatgcttcaagatcgggaggaccagtccattctatgcacaggcgagtctggagccgggaaaaccgaaaacaccaagaaggtcattcagtacctggccgtggtggcctcctcccacaagggcaagaaagacacaagtatcacgggagagctggaaaagcagcttctacaagcaaacccgattctggaggctttcggcaacgccaaaacagtgaagaacgacaactcctcacgattcggcaaattcatccgcatcaacttcgacgtcacgggttacatcgtgggagccaacattgagacctayctgctagaaaaatcacgggcaattcgccaagccagagacgagaggacattccacatcttttactacatgattgctggagccaaggagaagatgagaagtgacttgcttttggagggcttcaacaactacaccttcctctccaatggctttgtgcccatcccagcagcccaggatgatgagatgttccaggaaacygtggaggccatggcaatcatgggtttcagcgaggaggagcagctatccatattgaaggtggtatcatcggtcctgcagcttggaaatatcgtcttcaagaaggaaagaaacacagaccaggcgtccatgccagataacacagctgctcagaaagtttgccacctcatgggaattaatgtgacagatttcaccagatccatcctcactcctcgtatcaaggttgggcgagatgtggtacagaaagctcagacaaaagaacaggctgactttgctgtagaggctttggccaaggcaacatatgagcgccttttccgctggatactcacccgcgtgaacaaagccctggacaagacccatcggcaaggggcttccttcctggggatcctggatatagctggatttgagatctttgaggtgaactccttcgagcarctgtgcatcaactacaccaacgagaagctgcagcagctcttcaaccacaccatgttcatcctggagcaggaggagtaccagcgcgagggcatcgagtggaacttcatcgactttgggctggacctacagccctgcatcgagctcatcgagcgaccgaacaaccctccaggtgtgctggccctgctggacgaggaatgctggttccccaaagccacggacaagtctttcgtggagaagctgtgcacggagcagggcagccaccccaagttccagaagcccaagcagctcaaggacaagactgagttctccatcatccattatgcygggaaggtggactataatgcgagtgcctggctgaccaagaatatggacccgctgaatgacaacgtgacttccctgctcaatgcctcctccgacaagtttgtggccgacctgtggaaggacgtggaccgcatcgtgggcctggaccagatggccaagatgacggagagctcgctgcccagcgcctccaagaccaagaagggcatgttccgcacagtggggcagctgtacaaggagcagctgggcaagctgatgaccacgctacgcaacaccacgcccaacttcgtgcgctgcatcatccccaaccacgagaagaggtcyggcaagctggatgcgttyctggtgctggagcagctgcggtgcaatggggtgctggaaggcattcgcatctgccggcagggcttccccaaccggatcgtcttccaggagttccgccaacgctacgagatcctggcggcgaatgccatycccaaaggcttcatggacgggaagcaggcctgcattctcatgatcaaagccctggaacttgaccccaacttatacaggatagggcagagcaaaatcttcttccgaactggcgtcctggcccacctagaggaggagcgagatttgaagatcaccgatgtcatcatggccttccaggcgatgtgtcgtggctacttggccagaaaggcttttgccaagaggcagcagcagctgaccgccatgaaggtgattcagaggaactgcgcygcctacctcaagctgcggaactggcagtggtggaggcttttcaccaaagtgaagccactgctgcaggtgacacggcaggaggaggagatgcaggccaaggaggatgaactgcagaagrccaaggagcggcagcagaaggcagagaatgagcttaaggagctggaacagaagcactygcagctgaccgaggagaagaacctgctacaggaacagctgcaggcagagacagagctgtatgcagaggctgaggagatgcgggtgcggctggcggccaagaagcaggagctggaggagatactgcatgagatggaggcccgcctggaggaggaggaagacaggggccagcagctacaggctgaaaggaagaagatggcccagcagatgctggaccttgaagaacagctggaggaggaggaagctgccaggcagaagctgcaacttgagaaggtcacggctgaggccaagatcaagaaactggaggatgagatcctggtcatggatgatcagaacaataaactatcaaaagaacgaaaactccttgaggagaggattagtgacttaacgacaaatcttgcagaagaggaagaaaaggccaagaatcttaccaagctgaaaaacaagcatgaatctatgatttcagaactggaagtgcggctaaagaaggaagagaagagccgacaggagctggagaagctgaaacggaagctggagggtgatgccagcgacttccacgagcagatcgctgacctccaggcgcagatcgcagagctcaagatgcagctggccaagaaggaggaggagctgcaggcggccctggccaggcttgacgatgaaatcrctcagaagaacaatgccctgaagaagatccgggagctggagggccacatctcagacctccaggaggacctggactcagagcgggccgccaggaacaaggctgaaaagcagaagcgagacctcggcgaggagctggaggccctaaagacagagctggaagacacactggacagcacagccactcagcaggagctcagggccaagagggagcaggaggtgacggtgctgaagaaggccctggatgaagagacgcggtcccatgaggctcaggtccaggagatgaggcagaaacacgcacaggcggtggaggagctcacagagcagcttgagcagttcaagagggccaaggcgaacctagacaagaataagcagacgctggagaaagagaacrcagacctggccggggagctgcgggtcctgggccaggccaagcaggaggtggaacataagaagaagaagctggaggcgcaggtgcaggagctgcagtccaagtgcagcgatggggagcgggcccgggcggagctcaatgacaaagtccacaagctgcagaatgaagttgagagcgtcacagggatgcttaacgaggccgaggggaaggccattaagctggccaaggacrtggcgtccctcagttcccagctccaggacacccaggagytgcttcaagaagaaacccggcagaagctcaacgtgtctacgaagctgcgccagctggaggaggagcggaacagcctgcaagaccagctggacgaggagatggaggccaagcagaacctggagcgccacatctccactctcaacatccagctctccgactcgaagaagaagctgcaggactttgccagcaccgtggaagctctggaagaggggaagaagaggttccagaaggagatcgagaacctcacccagcagtacgaggagaaggcggccgcktatgataaactggaaaagaccaagaacaggcttcagcaggagctggacgacctggttgttgatttggacaaccagcggcaactcgtgtccaacctggaaaagaagcagaggaaatttgatcagttgttagccgaggagaaaaacatctcttccaaataygcggatgagagggacagagctgaggcagaagccagggagaaggaaaccaaggccctgtccctggctcgggcccttgaagaggccttggaagccaaagaggaactcgagcggaccaacaaartgctcaaagccgaaatggaagacctggtcagctccaaggatgacgtgggcaagaacgtccatgagctggagaagtccaagcgggccctggagacccagatggaggagatgaagacgcagctggaagagctggaggacgagctgcaagccacggaggacgccaaactgcggctggaagtcaacatgcaggcgctcaagggccagttcgaaagggatctccaagcccgggacgagcagaatgaggagaaraggaggcaactgcagagacagcttcacgagtatgagacggaactggaagacgagcgaaagcaacgtgccctggcagctgcagcaaagaagmagctggaaggggacctgaaagacctggagcttcaggccgactctgccatcaaggggagggaggaagccatcaagcagctacgcaaactgcaggctcagatgaaggactttcaaagagagctggaagatgcccgtgcctccagagatgagatctttgccacagccaaagagaatgagaagaaagccaagagcttggaagcagacctcatgcagctacaagaggacctcgccgccgctgagagggctcgcaaacaagcggacctcgagaaggaggaactggcagaggagctggccagtagcctgtcgggaaggaacgcactccaggacgagaagcgccgcctggaggcccggatcgcccagctggaggaggagctggaggaggagcagggcaacatggaggccatgagcgaccgggtccgcaaagccacacagcaggccgagcagctcagcaacgagctggccacagagcgcagcacggcccagaagaatgagagtgcccggcagcagctygagcggcagaacaaggagctccggagcaagctccacgagatggagggggccgtcaagtccaagttcaartccaccatcgcggcgctggaggccaagattgcacagctrgaggagcaggtcgagcaggaggccagagagaaacaggcggccaccaagtcgctgaagcagaaagacaagaagctgaaggaaatcttgctgcaggtggaggacgagcgcaagatggccgagcagtacaaggagcaggcagagaaaggcaatgccagggtcaagcagctcaagaggcagctggaggaggcagaggaggagtcccagcgcatcaacgccaaccgcaggaagctgcagcgggagctggatgaggccacggagagcaacgaggccatgggccgcgaggtgaacgcactcaagagcaagctcaggcgaggaaacgagacctctttcgttccttctagaaggtctggaggacgtagagttattcaatggaaccaaggccagtgaataagcaabtttctacagttttgcaccacggcaagaaaaccaaaaacca

SEQ ID NO: 126 - DNA, 6187 bp, Homo sapiens
cgcagggagatttggacgctccggcctgggaggtgcgtcagatccgagctcgccatccagtttcctctccactagtccccccagttggagatctgggaccaacaaggcaccatggcgcagaagggccaactcagtgacgatgagaagttcctctttgtggacaaaaacttcatcaacagcccagtggcccaggctgactgggccgccaagagactcgtctgggtcccctcggagaagcagggcttygaggcagccagcattaaggaggagaagggggatgaggtggttgtggagctggtggagaatggcaagaaggtcacggttgggaaagatgacatccagaagatgaacccacccaagttctccaaggtggaggacatggcggagctgacgtgcctcaacgaagcctccgtgctacacaacctgagggagcggtacttctcagggctaatatatacgtactctggcctcttctgcgtggtggtcaacccctataaacacctgcccatctactcggagaagatcgtygacatgtacaagggcaagaagaggcacgagatgccrcctcacatctacgccatcgcagacacggcctaccggagcatgcttcaagatcgggaggaccagtccattctatgcacaggcgagtctggagccgggaaaaccgaaaacaccaagaaggtcattcagtacctggccgtggtggcctcctcccacaagggcaagaaagacacaagtatcacgggagagctggaaaagcagcttctacaagcaaacccgattctggaggctttcggcaacgccaaaacagtgaagaacgacaactcctcacgattcggcaaattcatccgcatcaacttcgacgtcacgggttacatcgtgggagccaacattgagacctayctgctagaaaaatcacgggcaattcgccaagccagagacgagaggacattccacatcttttactacatgattgctggagccaaggagaagatgagaagtgacttgcttttggagggcttcaacaactacaccttcctctccaatggctttgtgcccatcccagcagcccaggatgatgagatgttccaggaaacygtggaggccatggcaatcatgggtttcagcgaggaggagcagctatccatattgaaggtggtatcatcggtcctgcagcttggaaatatcgtcttcaagaaggaaagaaacacagaccaggcgtccatgccagataacacagctgctcagaaagtttgccacctcatgggaattaatgtgacagatttcaccagatccatcctcactcctcgtatcaaggttgggcgagatgtggtacagaaagctcagacaaaagaacaggctgactttgctgtagaggctttggccaaggcaacatatgagcgccttttccgctggatactcacccgcgtgaacaaagccctggacaagacccatcggcaaggggcttccttcctggggatcctggatatagctggatttgagatctttgaggtgaactccttcgagcarctgtgcatcaactacaccaacgagaagctgcagcagctcttcaaccacaccatgttcatcctggagcaggaggagtaccagcgcgagggcatcgagtggaacttcatcgactttgggctggacctacagccctgcatcgagctcatcgagcgaccgaacaaccctccaggtgtgctggccctgctggacgaggaatgctggttccccaaagccacggacaagtctttcgtggagaagctgtgcacggagcagggcagccaccccaagttccagaagcccaagcagctcaaggacaagactgagttctccatcatccattatgcygggaaggtggactataatgcgagtgcctggctgaccaagaatatggacccgctgaatgacaacgtgacttccctgctcaatgcctcctccgacaagtttgtggccgacctgtggaaggacgtggaccgcatcgtgggcctggaccagatggccaagatgacggagagctcgctgcccagcgcctccaagaccaagaagggcatgttccgcacagtggggcagctgtacaaggagcagctgggcaagctgatgaccacgctacgcaacaccacgcccaacttcgtgcgctgcatcatccccaaccacgagaagaggtcyggcaagctggatgcgttyctggtgctggagcagctgcggtgcaatggggtgctggaaggcattcgcatctgccggcagggcttccccaaccggatcgtcttccaggagttccgccaacgctacgagatcctggcggcgaatgccatycccaaaggcttcatggacgggaagcaggcctgcattctcatgatcaaagccctggaacttgaccccaacttatacaggatagggcagagcaaaatcttcttccgaactggcgtcctggcccacctagaggaggagcgagatttgaagatcaccgatgtcatcatggccttccaggcgatgtgtcgtggctacttggccagaaaggcttttgccaagaggcagcagcagctgaccgccatgaaggtgattcagaggaactgcgcygcctacctcaagctgcggaactggcagtggtggaggcttttcaccaaagtgaagccactgctgcaggtgacacggcaggaggaggagatgcaggccaaggaggatgaactgcagaagrccaaggagcggcagcagaaggcagagaatgagcttaaggagctggaacagaagcactygcagctgaccgaggagaagaacctgctacaggaacagctgcaggcagagacagagctgtatgcagaggctgaggagatgcgggtgcggctggcggccaagaagcaggagctggaggagatactgcatgagatggaggcccgcctggaggaggaggaagacaggggccagcagctacaggctgaaaggaagaagatggcccagcagatgctggaccttgaagaacagctggaggaggaggaagctgccaggcagaagctgcaacttgagaaggtcacggctgaggccaagatcaagaaactggaggatgagatcctggtcatggatgatcagaacaataaactatcaaaagaacgaaaactccttgaggagaggattagtgacttaacgacaaatcttgcagaagaggaagaaaaggccaagaatcttaccaagctgaaaaacaagcatgaatctatgatttcagaactggaagtgcggctaaagaaggaagagaagagccgacaggagctggagaagctgaaacggaagctggagggtgatgccagcgacttccacgagcagatcgctgacctccaggcgcagatcgcagagctcaagatgcagctggccaagaaggaggaggagctgcaggcggccctggccaggcttgacgatgaaatcrctcagaagaacaatgccctgaagaagatccgggagctggagggccacatctcagacctccaggaggacctggactcagagcgggccgccaggaacaaggctgaaaagcagaagcgagacctcggcgaggagctggaggccctaaagacagagctggaagacacactggacagcacagccactcagcaggagctcagggccaagagggagcaggaggtgacggtgctgaagaaggccctggatgaagagacgcggtcccatgaggctcaggtccaggagatgaggcagaaacacgcacaggcggtggaggagctcacagagcagcttgagcagttcaagagggccaaggcgaacctagacaagaataagcagacgctggagaaagagaacrcagacctggccggggagctgcgggtcctgggccaggccaagcaggaggtggaacataagaagaagaagctggaggcgcaggtgcaggagctgcagtccaagtgcagcgatggggagcgggcccgggcggagctcaatgacaaagtccacaagctgcagaatgaagttgagagcgtcacagggatgcttaacgaggccgaggggaaggccattaagctggccaaggacrtggcgtccctcagttcccagctccaggacacccaggagytgcttcaagaagaaacccggcagaagctcaacgtgtctacgaagctgcgccagctggaggaggagcggaacagcctgcaagaccagctggacgaggagatggaggccaagcagaacctggagcgccacatctccactctcaacatccagctctccgactcgaagaagaagctgcaggactttgccagcaccgtggaagctctggaagaggggaagaagaggttccagaaggagatcgagaacctcacccagcagtacgaggagaaggcggccgcktatgataaactggaaaagaccaagaacaggcttcagcaggagctggacgacctggttgttgatttggacaaccagcggcaactcgtgtccaacctggaaaagaagcagaggaaatttgatcagttgttagccgaggagaaaaacatctcttccaaataygcggatgagagggacagagctgaggcagaagccagggagaaggaaaccaaggccctgtccctggctcgggcccttgaagaggccttggaagccaaagaggaactcgagcggaccaacaaartgctcaaagccgaaatggaagacctggtcagctccaaggatgacgtgggcaagaacgtccatgagctggagaagtccaagcgggccctggagacccagatggaggagatgaagacgcagctggaagagctggaggacgagctgcaagccacggaggacgccaaactgcggctggaagtcaacatgcaggcgctcaagggccagttcgaaagggatctccaagcccgggacgagcagaatgaggagaaraggaggcaactgcagagacagcttcacgagtatgagacggaactggaagacgagcgaaagcaacgtgccctggcagctgcagcaaagaagmagctggaaggggacctgaaagacctggagcttcaggccgactctgccatcaaggggagggaggaagccatcaagcagctacgcaaactgcaggctcagatgaaggactttcaaagagagctggaagatgcccgtgcctccagagatgagatctttgccacagccaaagagaatgagaagaaagccaagagcttggaagcagacctcatgcagctacaagaggacctcgccgccgctgagagggctcgcaaacaagcggacctcgagaaggaggaactggcagaggagctggccagtagcctgtcgggaaggaacgcactccaggacgagaagcgccgcctggaggcccggatcgcccagctggaggaggagctggaggaggagcagggcaacatggaggccatgagcgaccgggtccgcaaagccacacagcaggccgagcagctcagcaacgagctggccacagagcgcagcacggcccagaagaatgagagtgcccggcagcagctygagcggcagaacaaggagctccggagcaagctccacgagatggagggggccgtcaagtccaagttcaartccaccatcgcggcgctggaggccaagattgcacagctrgaggagcaggtcgagcaggaggccagagagaaacaggcggccaccaagtcgctgaagcagaaagacaagaagctgaaggaaatcttgctgcaggtggaggacgagcgcaagatggccgagcagtacaaggagcaggcagagaaaggcaatgccagggtcaagcagctcaagaggcagctggaggaggcagaggaggagtcccagcgcatcaacgccaaccgcaggaagctgcagcgggagctggatgaggccacggagagcaacgaggccatgggccgcgaggtgaacgcactcaagagcaagctcagagggccccccccacaggaaacttcgcagtgatgcaccaggcgaggaaacgagacctctttcgttccttctagaaggtctggaggacgtagagttattgaaaatgcagatggttctgaggaggaaacggacactcgagacgcagacttcaatggaaccaaggccagtgaataagcaabtttctacagttttgcaccacggcaagaaaaccaaaaaccaaaacaaacaaacaaaaaaaacccaacaacaacccagaacaaagctcccgggttcaagcgattctcctgcctca

SEQ ID NO: 127 - DNA, 6925 bp, Homo sapiens
cgcagggagatttggacgctccggcctgggaggtgcgtcagatccgagctcgccatccagtttcctctccactagtccccccagttggagatctgggaccaacaaggcaccatggcgcagaagggccaactcagtgacgatgagaagttcctctttgtggacaaaaacttcatcaacagcccagtggcccaggctgactgggccgccaagagactcgtctgggtcccctcggagaagcagggcttygaggcagccagcattaaggaggagaagggggatgaggtggttgtggagctggtggagaatggcaagaaggtcacggttgggaaagatgacatccagaagatgaacccacccaagttctccaaggtggaggacatggcggagctgacgtgcctcaacgaagcctccgtgctacacaacctgagggagcggtacttctcagggctaatatatacgtactctggcctcttctgcgtggtggtcaacccctataaacacctgcccatctactcggagaagatcgtygacatgtacaagggcaagaagaggcacgagatgccrcctcacatctacgccatcgcagacacggcctaccggagcatgcttcaagatcgggaggaccagtccattctatgcacaggcgagtctggagccgggaaaaccgaaaacaccaagaaggtcattcagtacctggccgtggtggcctcctcccacaagggcaagaaagacacaagtatcacgggagagctggaaaagcagcttctacaagcaaacccgattctggaggctttcggcaacgccaaaacagtgaagaacgacaactcctcacgattcggcaaattcatccgcatcaacttcgacgtcacgggttacatcgtgggagccaacattgagacctayctgctagaaaaatcacgggcaattcgccaagccagagacgagaggacattccacatcttttactacatgattgctggagccaaggagaagatgagaagtgacttgcttttggagggcttcaacaactacaccttcctctccaatggctttgtgcccatcccagcagcccaggatgatgagatgttccaggaaacygtggaggccatggcaatcatgggtttcagcgaggaggagcagctatccatattgaaggtggtatcatcggtcctgcagcttggaaatatcgtcttcaagaaggaaagaaacacagaccaggcgtccatgccagataacacagctgctcagaaagtttgccacctcatgggaattaatgtgacagatttcaccagatccatcctcactcctcgtatcaaggttgggcgagatgtggtacagaaagctcagacaaaagaacaggctgactttgctgtagaggctttggccaaggcaacatatgagcgccttttccgctggatactcacccgcgtgaacaaagccctggacaagacccatcggcaaggggcttccttcctggggatcctggatatagctggatttgagatctttgaggtgaactccttcgagcarctgtgcatcaactacaccaacgagaagctgcagcagctcttcaaccacaccatgttcatcctggagcaggaggagtaccagcgcgagggcatcgagtggaacttcatcgactttgggctggacctacagccctgcatcgagctcatcgagcgaccgaacaaccctccaggtgtgctggccctgctggacgaggaatgctggttccccaaagccacggacaagtctttcgtggagaagctgtgcacggagcagggcagccaccccaagttccagaagcccaagcagctcaaggacaagactgagttctccatcatccattatgcygggaaggtggactataatgcgagtgcctggctgaccaagaatatggacccgctgaatgacaacgtgacttccctgctcaatgcctcctccgacaagtttgtggccgacctgtggaaggacgtggaccgcatcgtgggcctggaccagatggccaagatgacggagagctcgctgcccagcgcctccaagaccaagaagggcatgttccgcacagtggggcagctgtacaaggagcagctgggcaagctgatgaccacgctacgcaacaccacgcccaacttcgtgcgctgcatcatccccaaccacgagaagaggtcyggcaagctggatgcgttyctggtgctggagcagctgcggtgcaatggggtgctggaaggcattcgcatctgccggcagggcttccccaaccggatcgtcttccaggagttccgccaacgctacgagatcctggcggcgaatgccatycccaaaggcttcatggacgggaagcaggcctgcattctcatgatcaaagccctggaacttgaccccaacttatacaggatagggcagagcaaaatcttcttccgaactggcgtcctggcccacctagaggaggagcgagatttgaagatcaccgatgtcatcatggccttccaggcgatgtgtcgtggctacttggccagaaaggcttttgccaagaggcagcagcagctgaccgccatgaaggtgattcagaggaactgcgcygcctacctcaagctgcggaactggcagtggtggaggcttttcaccaaagtgaagccactgctgcaggtgacacggcaggaggaggagatgcaggccaaggaggatgaactgcagaagrccaaggagcggcagcagaaggcagagaatgagcttaaggagctggaacagaagcactygcagctgaccgaggagaagaacctgctacaggaacagctgcaggcagagacagagctgtatgcagaggctgaggagatgcgggtgcggctggcggccaagaagcaggagctggaggagatactgcatgagatggaggcccgcctggaggaggaggaagacaggggccagcagctacaggctgaaaggaagaagatggcccagcagatgctggaccttgaagaacagctggaggaggaggaagctgccaggcagaagctgcaacttgagaaggtcacggctgaggccaagatcaagaaactggaggatgagatcctggtcatggatgatcagaacaataaactatcaaaagaacgaaaactccttgaggagaggattagtgacttaacgacaaatcttgcagaagaggaagaaaaggccaagaatcttaccaagctgaaaaacaagcatgaatctatgatttcagaactggaagtgcggctaaagaaggaagagaagagccgacaggagctggagaagctgaaacggaagctggagggtgatgccagcgacttccacgagcagatcgctgacctccaggcgcagatcgcagagctcaagatgcagctggccaagaaggaggaggagctgcaggcggccctggccaggcttgacgatgaaatcrctcagaagaacaatgccctgaagaagatccgggagctggagggccacatctcagacctccaggaggacctggactcagagcgggccgccaggaacaaggctgaaaagcagaagcgagacctcggcgaggagctggaggccctaaagacagagctggaagacacactggacagcacagccactcagcaggagctcagggccaagagggagcaggaggtgacggtgctgaagaaggccctggatgaagagacgcggtcccatgaggctcaggtccaggagatgaggcagaaacacgcacaggcggtggaggagctcacagagcagcttgagcagttcaagagggccaaggcgaacctagacaagaataagcagacgctggagaaagagaacrcagacctggccggggagctgcgggtcctgggccaggccaagcaggaggtggaacataagaagaagaagctggaggcgcaggtgcaggagctgcagtccaagtgcagcgatggggagcgggcccgggcggagctcaatgacaaagtccacaagctgcagaatgaagttgagagcgtcacagggatgcttaacgaggccgaggggaaggccattaagctggccaaggacrtggcgtccctcagttcccagctccaggacacccaggagytgcttcaagaagaaacccggcagaagctcaacgtgtctacgaagctgcgccagctggaggaggagcggaacagcctgcaagaccagctggacgaggagatggaggccaagcagaacctggagcgccacatctccactctcaacatccagctctccgactcgaagaagaagctgcaggactttgccagcaccgtggaagctctggaagaggggaagaagaggttccagaaggagatcgagaacctcacccagcagtacgaggagaaggcggccgcktatgataaactggaaaagaccaagaacaggcttcagcaggagctggacgacctggttgttgatttggacaaccagcggcaactcgtgtccaacctggaaaagaagcagaggaaatttgatcagttgttagccgaggagaaaaacatctcttccaaataygcggatgagagggacagagctgaggcagaagccagggagaaggaaaccaaggccctgtccctggctcgggcccttgaagaggccttggaagccaaagaggaactcgagcggaccaacaaartgctcaaagccgaaatggaagacctggtcagctccaaggatgacgtgggcaagaacgtccatgagctggagaagtccaagcgggccctggagacccagatggaggagatgaagacgcagctggaagagctggaggacgagctgcaagccacggaggacgccaaactgcggctggaagtcaacatgcaggcgctcaagggccagttcgaaagggatctccaagcccgggacgagcagaatgaggagaaraggaggcaactgcagagacagcttcacgagtatgagacggaactggaagacgagcgaaagcaacgtgccctggcagctgcagcaaagaagmagctggaaggggacctgaaagacctggagcttcaggccgactctgccatcaaggggagggaggaagccatcaagcagctacgcaaactgcaggctcagatgaaggactttcaaagagagctggaagatgcccgtgcctccagagatgagatctttgccacagccaaagagaatgagaagaaagccaagagcttggaagcagacctcatgcagctacaagaggacctcgccgccgctgagagggctcgcaaacaagcggacctcgagaaggaggaactggcagaggagctggccagtagcctgtcgggaaggaacgcactccaggacgagaagcgccgcctggaggcccggatcgcccagctggaggaggagctggaggaggagcagggcaacatggaggccatgagcgaccgggtccgcaaagccacacagcaggccgagcagctcagcaacgagctggccacagagcgcagcacggcccagaagaatgagagtgcccggcagcagctygagcggcagaacaaggagctccggagcaagctccacgagatggagggggccgtcaagtccaagttcaartccaccatcgcggcgctggaggccaagattgcacagctrgaggagcaggtcgagcaggaggccagagagaaacaggcggccaccaagtcgctgaagcagaaagacaagaagctgaaggaaatcttgctgcaggtggaggacgagcgcaagatggccgagcagtacaaggagcaggcagagaaaggcaatgccagggtcaagcagctcaagaggcagctggaggaggcagaggaggagtcccagcgcatcaacgccaaccgcaggaagctgcagcgggagctggatgaggccacggagagcaacgaggccatgggccgcgaggtgaacgcactcaagagcaagctcagagggccccccccacaggaaacttcgcagtgatgcaccaggcgaggaaacgagacctctttcgttccttctagaaggtctggaggacgtagagttattgaaaatgcagatggttctgaggaggaaacggacactcgagacgcagacttcaatggaaccaaggccagtgaataagcaabtttctacagttttgcaccacggcaagaaaaccaaaaaccaaaacaaacaaacaaaaaaaacccaacaacaacccagaacaaagcaaaacccagcagactgtacttagcattgtctaaatccattctcaaattccaaatatcacagacacccctcacacaaggaatataaaaaccaccaccctccagcctgggcaacgtagtaaaacctcatctatacaagaatttaaaaataagctgggcgtggtggtacacacctgtggtcccagctactagggaggctgagccaggaagaacgctccarcccaggacttcgaggctgcaatgagctataattgcatcattgcactccagcctgggcaacagagaccctgtctcaaccaccaccaccaccaccacccctactacccctgtattsaaggtaaaaattgaagtttgtatgatgtaagagatgagaaaaacccaacaggaaacacagacacatcctccagttctatcaatggattgtgcagacactgagtttttagaaaaacatatccacggtaaccggtccctggcaattctgtttacatgaaatggggagaaagtcaccgaaatgggtgccgccggcccccactcccaattcattccctaacctgcaaacctttccaacttctcacgtcaggcctttgagaattctttccccctctcctggtttccacacctcagacacgcacagttcaccaagtgccttctgtagtyacatgaattgaaaaggagacgctgctcccacggaggggagcaggaatgctgcactgtttacaccctgactgtgcttaaaaacactttcactaataaatggttataaatcacaa

SEQ ID NO: 128 - DNA, 6185 bp, Homo sapiens
cgcagggagatttggacgctccggcctgggaggtgcgtcagatccgagctcgccatccagtttcctctccactagtccccccagttggagatctgggaccaacaaggcaccatggcgcagaagggccaactcagtgacgatgagaagttcctctttgtggacaaaaacttcatcaacagcccagtggcccaggctgactgggccgccaagagactcgtctgggtcccctcggagaagcagggcttygaggcagccagcattaaggaggagaagggggatgaggtggttgtggagctggtggagaatggcaagaaggtcacggttgggaaagatgacatccagaagatgaacccacccaagttctccaaggtggaggacatggcggagctgacgtgcctcaacgaagcctccgtgctacacaacctgagggagcggtacttctcagggctaatatatacgtactctggcctcttctgcgtggtggtcaacccctataaacacctgcccatctactcggagaagatcgtygacatgtacaagggcaagaagaggcacgagatgccrcctcacatctacgccatcgcagacacggcctaccggagcatgcttcaagatcgggaggaccagtccattctatgcacaggcgagtctggagccgggaaaaccgaaaacaccaagaaggtcattcagtacctggccgtggtggcctcctcccacaagggcaagaaagacacaattttagggagagctggaaaagcagcttctacaagcaaacccgattctggaggctttcggcaacgccaaaacagtgaagaacgacaactcctcacgattcggcaaattcatccgcatcaacttcgacgtcacgggttacatcgtgggagccaacattgagacctayctgctagaaaaatcacgggcaattcgccaagccagagacgagaggacattccacatcttttactacatgattgctggagccaaggagaagatgagaagtgacttgcttttggagggcttcaacaactacaccttcctctccaatggctttgtgcccatcccagcagcccaggatgatgagatgttccaggaaacygtggaggccatggcaatcatgggtttcagcgaggaggagcagctatccatattgaaggtggtatcatcggtcctgcagcttggaaatatcgtcttcaagaaggaaagaaacacagaccaggcgtccatgccagataacacagctgctcagaaagtttgccacctcatgggaattaatgtgacagatttcaccagatccatcctcactcctcgtatcaaggttgggcgagatgtggtacagaaagctcagacaaaagaacaggctgactttgctgtagaggctttggccaaggcaacatatgagcgccttttccgctggatactcacccgcgtgaacaaagccctggacaagacccatcggcaaggggcttccttcctggggatcctggatatagctggatttgagatctttgaggtgaactccttcgagcarctgtgcatcaactacaccaacgagaagctgcagcagctcttcaaccacaccatgttcatcctggagcaggaggagtaccagcgcgagggcatcgagtggaacttcatcgactttgggctggacctacagccctgcatcgagctcatcgagcgaccgaacaaccctccaggtgtgctggccctgctggacgaggaatgctggttccccaaagccacggacaagtctttcgtggagaagctgtgcacggagcagggcagccaccccaagttccagaagcccaagcagctcaaggacaagactgagttctccatcatccattatgcygggaaggtggactataatgcgagtgcctggctgaccaagaatatggacccgctgaatgacaacgtgacttccctgctcaatgcctcctccgacaagtttgtggccgacctgtggaaggacgtggaccgcatcgtgggcctggaccagatggccaagatgacggagagctcgctgcccagcgcctccaagaccaagaagggcatgttccgcacagtggggcagctgtacaaggagcagctgggcaagctgatgaccacgctacgcaacaccacgcccaacttcgtgcgctgcatcatccccaaccacgagaagaggtcyggcaagctggatgcgttyctggtgctggagcagctgcggtgcaatggggtgctggaaggcattcgcatctgccggcagggcttccccaaccggatcgtcttccaggagttccgccaacgctacgagatcctggcggcgaatgccatycccaaaggcttcatggacgggaagcaggcctgcattctcatgatcaaagccctggaacttgaccccaacttatacaggatagggcagagcaaaatcttcttccgaactggcgtcctggcccacctagaggaggagcgagatttgaagatcaccgatgtcatcatggccttccaggcgatgtgtcgtggctacttggccagaaaggcttttgccaagaggcagcagcagctgaccgccatgaaggtgattcagaggaactgcgcygcctacctcaagctgcggaactggcagtggtggaggcttttcaccaaagtgaagccactgctgcaggtgacacggcaggaggaggagatgcaggccaaggaggatgaactgcagaagrccaaggagcggcagcagaaggcagagaatgagcttaaggagctggaacagaagcactygcagctgaccgaggagaagaacctgctacaggaacagctgcaggcagagacagagctgtatgcagaggctgaggagatgcgggtgcggctggcggccaagaagcaggagctggaggagatactgcatgagatggaggcccgcctggaggaggaggaagacaggggccagcagctacaggctgaaaggaagaagatggcccagcagatgctggaccttgaagaacagctggaggaggaggaagctgccaggcagaagctgcaacttgagaaggtcacggctgaggccaagatcaagaaactggaggatgagatcctggtcatggatgatcagaacaataaactatcaaaagaacgaaaactccttgaggagaggattagtgacttaacgacaaatcttgcagaagaggaagaaaaggccaagaatcttaccaagctgaaaaacaagcatgaatctatgatttcagaactggaagtgcggctaaagaaggaagagaagagccgacaggagctggagaagctgaaacggaagctggagggtgatgccagcgacttccacgagcagatcgctgacctccaggcgcagatcgcagagctcaagatgcagctggccaagaaggaggaggagctgcaggcggccctggccaggcttgacgatgaaatcrctcagaagaacaatgccctgaagaagatccgggagctggagggccacatctcagacctccaggaggacctggactcagagcgggccgccaggaacaaggctgaaaagcagaagcgagacctcggcgaggagctggaggccctaaagacagagctggaagacacactggacagcacagccactcagcaggagctcagggccaagagggagcaggaggtgacggtgctgaagaaggccctggatgaagagacgcggtcccatgaggctcaggtccaggagatgaggcagaaacacgcacaggcggtggaggagctcacagagcagcttgagcagttcaagagggccaaggcgaacctagacaagaataagcagacgctggagaaagagaacrcagacctggccggggagctgcgggtcctgggccaggccaagcaggaggtggaacataagaagaagaagctggaggcgcaggtgcaggagctgcagtccaagtgcagcgatggggagcgggcccgggcggagctcaatgacaaagtccacaagctgcagaatgaagttgagagcgtcacagggatgcttaacgaggccgaggggaaggccattaagctggccaaggacrtggcgtccctcagttcccagctccaggacacccaggagytgcttcaagaagaaacccggcagaagctcaacgtgtctacgaagctgcgccagctggaggaggagcggaacagcctgcaagaccagctggacgaggagatggaggccaagcagaacctggagcgccacatctccactctcaacatccagctctccgactcgaagaagaagctgcaggactttgccagcaccgtggaagctctggaagaggggaagaagaggttccagaaggagatcgagaacctcacccagcagtacgaggagaaggcggccgcktatgataaactggaaaagaccaagaacaggcttcagcaggagctggacgacctggttgttgatttggacaaccagcggcaactcgtgtccaacctggaaaagaagcagaggaaatttgatcagttgttagccgaggagaaaaacatctcttccaaataygcggatgagagggacagagctgaggcagaagccagggagaaggaaaccaaggccctgtccctggctcgggcccttgaagaggccttggaagccaaagaggaactcgagcggaccaacaaartgctcaaagccgaaatggaagacctggtcagctccaaggatgacgtgggcaagaacgtccatgagctggagaagtccaagcgggccctggagacccagatggaggagatgaagacgcagctggaagagctggaggacgagctgcaagccacggaggacgccaaactgcggctggaagtcaacatgcaggcgctcaagggccagttcgaaagggatctccaagcccgggacgagcagaatgaggagaaraggaggcaactgcagagacagcttcacgagtatgagacggaactggaagacgagcgaaagcaacgtgccctggcagctgcagcaaagaagmagctggaaggggacctgaaagacctggagcttcaggccgactctgccatcaaggggagggaggaagccatcaagcagctacgcaaactgcaggctcagatgaaggactttcaaagagagctggaagatgcccgtgcctccagagatgagatctttgccacagccaaagagaatgagaagaaagccaagagcttggaagcagacctcatgcagctacaagaggacctcgccgccgctgagagggctcgcaaacaagcggacctcgagaaggaggaactggcagaggagctggccagtagcctgtcgggaaggaacgcactccaggacgagaagcgccgcctggaggcccggatcgcccagctggaggaggagctggaggaggagcagggcaacatggaggccatgagcgaccgggtccgcaaagccacacagcaggccgagcagctcagcaacgagctggccacagagcgcagcacggcccagaagaatgagagtgcccggcagcagctygagcggcagaacaaggagctccggagcaagctccacgagatggagggggccgtcaagtccaagttcaartccaccatcgcggcgctggaggccaagattgcacagctrgaggagcaggtcgagcaggaggccagagagaaacaggcggccaccaagtcgctgaagcagaaagacaagaagctgaaggaaatcttgctgcaggtggaggacgagcgcaagatggccgagcagtacaaggagcaggcagagaaaggcaatgccagggtcaagcagctcaagaggcagctggaggaggcagaggaggagtcccagcgcatcaacgccaaccgcaggaagctgcagcgggagctggatgaggccacggagagcaacgaggccatgggccgcgaggtgaacgcactcaagagcaagctcagagggccccccccacaggaaacttcgcagtgatgcaccaggcgaggaaacgagacctctttcgttccttctagaaggtctggaggacgtagagttattgaaaatgcagatggttctgaggaggaaacggacactcgagacgcagacttcaatggaaccaaggccagtgaataagcaabtttctacagttttgcaccacggcaagaaaaccaaaaaccaaaacaaacaaacaaaaaaaacccaacaacaacccagaacaaagctcccgggttcaagcgattctcctgcctca

SEQ ID NO: 129 - DNA, 6148 bp, Homo sapiens
cgcagggagatttggacgctccggcctgggaggtgcgtcagatccgagctcgccatccagtttcctctccactagtccccccagttggagatctgggaccaacaaggcaccatggcgcagaagggccaactcagtgacgatgagaagttcctctttgtggacaaaaacttcatcaacagcccagtggcccaggctgactgggccgccaagagactcgtctgggtcccctcggagaagcagggcttygaggcagccagcattaaggaggagaagggggatgaggtggttgtggagctggtggagaatggcaagaaggtcacggttgggaaagatgacatccagaagatgaacccacccaagttctccaaggtggaggacatggcggagctgacgtgcctcaacgaagcctccgtgctacacaacctgagggagcggtacttctcagggctaatatatacgtactctggcctcttctgcgtggtggtcaacccctataaacacctgcccatctactcggagaagatcgtygacatgtacaagggcaagaagaggcacgagatgccrcctcacatctacgccatcgcagacacggcctaccggagcatgcttcaagatcgggaggaccagtccattctatgcacaggcgagtctggagccgggaaaaccgaaaacaccaagaaggtcattcagtacctggccgtggtggcctcctcccacaagggcaagaaagacacaagtatcacgggagagctggaaaagcagcttctacaagcaaacccgattctggaggctttcggcaacgccaaaacagtgaagaacgacaactcctcacgattcggcaaattcatccgcatcaacttcgacgtcacgggttacatcgtgggagccaacattgagacctayctgctagaaaaatcacgggcaattcgccaagccagagacgagaggacattccacatcttttactacatgattgctggagccaaggagaagatgagaagtgacttgcttttggagggcttcaacaactacaccttcctctccaatggctttgtgcccatcccagcagcccaggatgatgagatgttccaggaaacygtggaggccatggcaatcatgggtttcagcgaggaggagcagctatccatattgaaggtggtatcatcggtcctgcagcttggaaatatcgtcttcaagaaggaaagaaacacagaccaggcgtccatgccagataacacagctgctcagaaagtttgccacctcatgggaattaatgtgacagatttcaccagatccatcctcactcctcgtatcaaggttgggcgagatgtggtacagaaagctcagacaaaagaacaggctgactttgctgtagaggctttggccaaggcaacatatgagcgccttttccgctggatactcacccgcgtgaacaaagccctggacaagacccatcggcaaggggcttccttcctggggatcctggatatagctggatttgagatctttgaggtgaactccttcgagcarctgtgcatcaactacaccaacgagaagctgcagcagctcttcaaccacaccatgttcatcctggagcaggaggagtaccagcgcgagggcatcgagtggaacttcatcgactttgggctggacctacagccctgcatcgagctcatcgagcgaccgaacaaccctccaggtgtgctggccctgctggacgaggaatgctggttccccaaagccacggacaagtctttcgtggagaagctgtgcacggagcagggcagccaccccaagttccagaagcccaagcagctcaaggacaagactgagttctccatcatccattatgcygggaaggtggactataatgcgagtgcctggctgaccaagaatatggacccgctgaatgacaacgtgacttccctgctcaatgcctcctccgacaagtttgtggccgacctgtggaaggacgtggaccgcatcgtgggcctggaccagatggccaagatgacggagagctcgctgcccagcgcctccaagaccaagaagggcatgttccgcacagtggggcagctgtacaaggagcagctgggcaagctgatgaccacgctacgcaacaccacgcccaacttcgtgcgctgcatcatccccaaccacgagaagaggtcyggcaagctggatgcgttyctggtgctggagcagctgcggtgcaatggggtgctggaaggcattcgcatctgccggcagggcttccccaaccggatcgtcttccaggagttccgccaacgctacgagatcctggcggcgaatgccatycccaaaggcttcatggacgggaagcaggcctgcattctcatgatcaaagccctggaacttgaccccaacttatacaggatagggcagagcaaaatcttcttccgaactggcgtcctggcccacctagaggaggagcgagatttgaagatcaccgatgtcatcatggccttccaggcgatgtgtcgtggctacttggccagaaaggcttttgccaagaggcagcagcagctgaccgccatgaaggtgattcagaggaactgcgcygcctacctcaagctgcggaactggcagtggtggaggcttttcaccaaagtgaagccactgctgcaggtgacacggcaggaggaggagatgcaggccaaggaggatgaactgcagaagrccaaggagcggcagcagaaggcagagaatgagcttaaggagctggaacagaagcactygcagctgaccgaggagaagaacctgctacaggaacagctgcaggcagagacagagctgtatgcagaggctgaggagatgcgggtgcggctggcggccaagaagcaggagctggaggagatactgcatgagatggaggcccgcctggaggaggaggaagacaggggccagcagctacaggctgaaaggaagaagatggcccagcagatgctggaccttgaagaacagctggaggaggaggaagctgccaggcagaagctgcaacttgagaaggtcacggctgaggccaagatcaagaaactggaggatgagatcctggtcatggatgatcagaacaataaactatcaaaagaacgaaaactccttgaggagaggattagtgacttaacgacaaatcttgcagaagaggaagaaaaggccaagaatcttaccaagctgaaaaacaagcatgaatctatgatttcagaactggaagtgcggctaaagaaggaagagaagagccgacaggagctggagaagctgaaacggaagctggagggtgatgccagcgacttccacgagcagatcgctgacctccaggcgcagatcgcagagctcaagatgcagctggccaagaaggaggaggagctgcaggcggccctggccaggcttgacgatgaaatcrctcagaagaacaatgccctgaagaagatccgggagctggagggccacatctcagacctccaggaggacctggactcagagcgggccgccaggaacaaggctgaaaagcagaagcgagacctcggcgaggagctggaggccctaaagacagagctggaagacacactggacagcacagccactcagcaggagctcagggccaagagggagcaggaggtgacggtgctgaagaaggccctggatgaagagacgcggtcccatgaggctcaggtccaggagatgaggcagaaacacgcacaggcggtggaggagctcacagagcagcttgagcagttcaagagggccaaggcgaacctagacaagaataagcagacgctggagaaagagaacrcagacctggccggggagctgcgggtcctgggccaggccaagcaggaggtggaacataagaagaagaagctggaggcgcaggtgcaggagctgcagtccaagtgcagcgatggggagcgggcccgggcggagctcaatgacaaagtccacaagctgcagaatgaagttgagagcgtcacagggatgcttaacgaggccgaggggaaggccattaagctggccaaggacrtggcgtccctcagttcccagctccaggacacccaggagytgcttcaagaagaaacccggcagaagctcaacgtgtctacgaagctgcgccagctggaggaggagcggaacagcctgcaagaccagctggacgaggagatggaggccaagcagaacctggagcgccacatctccactctcaacatccagctctccgactcgaagaagaagctgcaggactttgccagcaccgtggaagctctggaagaggggaagaagaggttccagaaggagatcgagaacctcacccagcagtacgaggagaaggcggccgcktatgataaactggaaaagaccaagaacaggcttcagcaggagctggacgacctggttgttgatttggacaaccagcggcaactcgtgtccaacctggaaaagaagcagaggaaatttgatcagttgttagccgaggagaaaaacatctcttccaaataygcggatgagagggacagagctgaggcagaagccagggagaaggaaaccaaggccctgtccctggctcgggcccttgaagaggccttggaagccaaagaggaactcgagcggaccaacaaartgctcaaagccgaaatggaagacctggtcagctccaaggatgacgtgggcaagaacgtccatgagctggagaagtccaagcgggccctggagacccagatggaggagatgaagacgcagctggaagagctggaggacgagctgcaagccacggaggacgccaaactgcggctggaagtcaacatgcaggcgctcaagggccagttcgaaagggatctccaagcccgggacgagcagaatgaggagaaraggaggcaactgcagagacagcttcacgagtatgagacggaactggaagacgagcgaaagcaacgtgccctggcagctgcagcaaagaagmagctggaaggggacctgaaagacctggagcttcaggccgactctgccatcaaggggagggaggaagccatcaagcagctacgcaaactgcaggctcagatgaaggactttcaaagagagctggaagatgcccgtgcctccagagatgagatctttgccacagccaaagagaatgagaagaaagccaagagcttggaagcagacctcatgcagctacaagaggacctcgccgccgctgagagggctcgcaaacaagcggacctcgagaaggaggaactggcagaggagctggccagtagcctgtcgggaaggaacgcactccaggacgagaagcgccgcctggaggcccggatcgcccagctggaggaggagctggaggaggagcagggcaacatggaggccatgagcgaccgggtccgcaaagccacacagcaggccgagcagctcagcaacgagctggccacagagcgcagcacggcccagaagaatgagagtgcccggcagcagctygagcggcagaacaaggagctccggagcaagctccacgagatggagggggccgtcaagtccaagttcaartccaccatcgcggcgctggaggccaagattgcacagctrgaggagcaggtcgagcaggaggccagagagaaacaggcggccaccaagtcgctgaagcagaaagacaagaagctgaaggaaatcttgctgcaggtggaggacgagcgcaagatggccgagcagtacaaggagcaggcagagaaaggcaatgccagggtcaagcagctcaagaggcagctggaggaggcagaggaggagtcccagcgcatcaacgccaaccgcaggaagctgcagcgggagctggatgaggccacggagagcaacgaggccatgggccgcgaggtgaacgcactcaagagcaagctcaggcgaggaaacgagacctctttcgttccttctagaaggtctggaggacgtagagttattgaaaatgcagatggttctgaggaggaaacggacactcgagacgcagacttcaatggaaccaaggccagtgaataagcaabtttctacagttttgcaccacggcaagaaaaccaaaaaccaaaacaaacaaacaaaaaaaacccaacaacaacccagaacaaagctcccgggttcaagcgattctcctgcctca

SEQ ID NO: 130 - DNA, 4239 bp, Homo sapiens
cgcagggagatttggacgctccggcctgggaggtgcgtcagatccgagctcgccatccagtttcctctccactagtccccccagttggagatctgggaccaacaaggcaccatggcgcagaagggccaactcagtgacgatgagaagttcctctttgtggacaaaaacttcatcaacagcccagtggcccaggctgactgggccgccaagagactcgtctgggtcccctcggagaagcagggcttygaggcagccagcattaaggaggagaagggggatgaggtggttgtggagctggtggagaatggcaagaaggtcacggttgggaaagatgacatccagaagatgaacccacccaagttctccaaggtggaggacatggcggagctgacgtgcctcaacgaagcctccgtgctacacaacctgagggagcggtacttctcagggctaatatatacgtactctggcctcttctgcgtggtggtcaacccctataaacacctgcccatctactcggagaagatcgtygacatgtacaagggcaagaagaggcacgagatgccrcctcacatctacgccatcgcagacacggcctaccggagcatgcttcaagatcgggaggaccagtccattctatgcacaggcgagtctggagccgggaaaaccgaaaacaccaagaaggtcattcagtacctggccgtggtggcctcctcccacaagggcaagaaagacacaagtatcacgggagagctggaaaagcagcttctacaagcaaacccgattctggaggctttcggcaacgccaaaacagtgaagaacgacaactcctcacgattcggcaaattcatccgcatcaacttcgacgtcacgggttacatcgtgggagccaacattgagacctayctgctagaaaaatcacgggcaattcgccaagccagagacgagaggacattccacatcttttactacatgattgctggagccaaggagaagatgagaagtgacttgcttttggagggcttcaacaactacaccttcctctccaatggctttgtgcccatcccagcagcccaggatgatgagatgttccaggaaacygtggaggccatggcaatcatgggtttcagcgaggaggagcagctatccatattgaaggtggtatcatcggtcctgcagcttggaaatatcgtcttcaagaaggaaagaaacacagaccaggcgtccatgccagataacacagctgctcagaaagtttgccacctcatgggaattaatgtgacagatttcaccagatccatcctcactcctcgtatcaaggttgggcgagatgtggtacagaaagctcagacaaaagaacaggctgactttgctgtagaggctttggccaaggcaacatatgagcgccttttccgctggatactcacccgcgtgaacaaagccctggacaagacccatcggcaaggggcttccttcctggggatcctggatatagctggatttgagatctttgaggtgaactccttcgagcarctgtgcatcaactacaccaacgagaagctgcagcagctcttcaaccacaccatgttcatcctggagcaggaggagtaccagcgcgagggcatcgagtggaacttcatcgactttgggctggacctacagccctgcatcgagctcatcgagcgaccgaacaaccctccaggtgtgctggccctgctggacgaggaatgctggttccccaaagccacggacaagtctttcgtggagaagctgtgcacggagcagggcagccaccccaagttccagaagcccaagcagctcaaggacaagactgagttctccatcatccattatgcygggaaggtggactataatgcgagtgcctggctgaccaagaatatggacccgctgaatgacaacgtgacttccctgctcaatgcctcctccgacaagtttgtggccgacctgtggaaggacgtggaccgcatcgtgggcctggaccagatggccaagatgacggagagctcgctgcccagcgcctccaagaccaagaagggcatgttccgcacagtggggcagctgtacaaggagcagctgggcaagctgatgaccacgctacgcaacaccacgcccaacttcgtgcgctgcatcatccccaaccacgagaagaggtcyggcaagctggatgcgttyctggtgctggagcagctgcggtgcaatggggtgctggaaggcattcgcatctgccggcagggcttccccaaccggatcgtcttccaggagttccgccaacgctacgagatcctggcggcgaatgccatycccaaaggcttcatggacgggaagcaggcctgcattctcatgatcaaagccctggaacttgaccccaacttatacaggatagggcagagcaaaatcttcttccgaactggcgtcctggcccacctagaggaggagcgagatttgaagatcaccgatgtcatcatggccttccaggcgatgtgtcgtggctacttggccagaaaggcttttgccaagaggcagcagcagctgaccgccatgaaggtgattcagaggaactgcgcygcctacctcaagctgcggaactggcagtggtggaggcttttcaccaaagtgaagccactgctgcaggtgacacggcaggaggaggagatgcaggccaaggaggatgaactgcagaagrccaaggagcggcagcagaaggcagagaatgagcttaaggagctggaacagaagcactygcagctgaccgaggagaagaacctgctacaggaacagctgcaggcagagacagagctgtatgcagaggctgaggagatgcgggtgcggctggcggccaagaagcaggagctggaggagatactgcatgagatggaggcccgcctggaggaggaggaagacaggggccagcagctacaggctgaaaggaagaagatggcccagcagatgctggaccttgaagaacagctggaggaggaggaagctgccaggcagaagctgcaacttgagaaggtcacggctgaggccaagatcaagaaactggaggatgagatcctggtcatggatgatcagaacaataaactatcaaaagaacgaaaactccttgaggagaggattagtgacttaacgacaaatcttgcagaagaggaagaaaaggccaagaatcttaccaagctgaaaaacaagcatgaatctatgatttcagaactggaagtgcggctaaagaaggaagagaagagccgacaggagctggagaagctgaaacggaagctggagggtgatgccagcgacttccacgagcagatcgctgacctccaggcgcagatcgcagagctcaagatgcagctggccaagaaggaggaggagctgcaggcggccctggccaggcttgacgatgaaatcrctcagaagaacaatgccctgaagaagatccgggagctggagggccacatctcagacctccaggaggacctggactcagagcgggccgccaggaacaaggctgaaaagcagaagcgagacctcggcgaggagctggaggccctaaagacagagctggaagacacactggacagcacagccactcagcaggagctcagggccaagagggagcaggaggtgacggtgctgaagaaggccctggatgaagagacgcggtcccatgaggctcaggtccaggagatgaggcagaaacacgcacaggcggtggaggagctcacagagcagcttgagcagttcaagagggccaaggcgaacctagacaagaataagcagacgctggagaaagagaacrcagacctggccggggagctgcgggtcctgggccaggccaagcaggaggtggaacataagaagaagaagctggaggcgcaggtgcagacactgagtttttagaaaaacatatccacggtaaccggtccctggcaattctgtttacatgaaatggggagaaagtcaccgaaatgggtgccgccggcccccactcccaattcattccctaacctgcaaacctttccaacttctcacgtcaggcctttgagaattctttccccctctcctggtttccacacctcagacacgcacagttcaccaagtgccttctgtagtyacatgaattgaaaaggagacgctgctcccacggaggggagcaggaatgctgcactgtttacaccctgactgtgcttaaaaacactttcactaataaatggttataaatcacaa

SEQ ID NO: 131 - DNA, 6886 bp, Homo sapiens
cgcagggagatttggacgctccggcctgggaggtgcgtcagatccgagctcgccatccagtttcctctccactagtccccccagttggagatctgggaccaacaaggcaccatggcgcagaagggccaactcagtgacgatgagaagttcctctttgtggacaaaaacttcatcaacagcccagtggcccaggctgactgggccgccaagagactcgtctgggtcccctcggagaagcagggcttygaggcagccagcattaaggaggagaagggggatgaggtggttgtggagctggtggagaatggcaagaaggtcacggttgggaaagatgacatccagaagatgaacccacccaagttctccaaggtggaggacatggcggagctgacgtgcctcaacgaagcctccgtgctacacaacctgagggagcggtacttctcagggctaatatatacgtactctggcctcttctgcgtggtggtcaacccctataaacacctgcccatctactcggagaagatcgtygacatgtacaagggcaagaagaggcacgagatgccrcctcacatctacgccatcgcagacacggcctaccggagcatgcttcaagatcgggaggaccagtccattctatgcacaggcgagtctggagccgggaaaaccgaaaacaccaagaaggtcattcagtacctggccgtggtggcctcctcccacaagggcaagaaagacacaagtatcacgggagagctggaaaagcagcttctacaagcaaacccgattctggaggctttcggcaacgccaaaacagtgaagaacgacaactcctcacgattcggcaaattcatccgcatcaacttcgacgtcacgggttacatcgtgggagccaacattgagacctayctgctagaaaaatcacgggcaattcgccaagccagagacgagaggacattccacatcttttactacatgattgctggagccaaggagaagatgagaagtgacttgcttttggagggcttcaacaactacaccttcctctccaatggctttgtgcccatcccagcagcccaggatgatgagatgttccaggaaacygtggaggccatggcaatcatgggtttcagcgaggaggagcagctatccatattgaaggtggtatcatcggtcctgcagcttggaaatatcgtcttcaagaaggaaagaaacacagaccaggcgtccatgccagataacacagctgctcagaaagtttgccacctcatgggaattaatgtgacagatttcaccagatccatcctcactcctcgtatcaaggttgggcgagatgtggtacagaaagctcagacaaaagaacaggctgactttgctgtagaggctttggccaaggcaacatatgagcgccttttccgctggatactcacccgcgtgaacaaagccctggacaagacccatcggcaaggggcttccttcctggggatcctggatatagctggatttgagatctttgaggtgaactccttcgagcarctgtgcatcaactacaccaacgagaagctgcagcagctcttcaaccacaccatgttcatcctggagcaggaggagtaccagcgcgagggcatcgagtggaacttcatcgactttgggctggacctacagccctgcatcgagctcatcgagcgaccgaacaaccctccaggtgtgctggccctgctggacgaggaatgctggttccccaaagccacggacaagtctttcgtggagaagctgtgcacggagcagggcagccaccccaagttccagaagcccaagcagctcaaggacaagactgagttctccatcatccattatgcygggaaggtggactataatgcgagtgcctggctgaccaagaatatggacccgctgaatgacaacgtgacttccctgctcaatgcctcctccgacaagtttgtggccgacctgtggaaggacgtggaccgcatcgtgggcctggaccagatggccaagatgacggagagctcgctgcccagcgcctccaagaccaagaagggcatgttccgcacagtggggcagctgtacaaggagcagctgggcaagctgatgaccacgctacgcaacaccacgcccaacttcgtgcgctgcatcatccccaaccacgagaagaggtcyggcaagctggatgcgttyctggtgctggagcagctgcggtgcaatggggtgctggaaggcattcgcatctgccggcagggcttccccaaccggatcgtcttccaggagttccgccaacgctacgagatcctggcggcgaatgccatycccaaaggcttcatggacgggaagcaggcctgcattctcatgatcaaagccctggaacttgaccccaacttatacaggatagggcagagcaaaatcttcttccgaactggcgtcctggcccacctagaggaggagcgagatttgaagatcaccgatgtcatcatggccttccaggcgatgtgtcgtggctacttggccagaaaggcttttgccaagaggcagcagcagctgaccgccatgaaggtgattcagaggaactgcgcygcctacctcaagctgcggaactggcagtggtggaggcttttcaccaaagtgaagccactgctgcaggtgacacggcaggaggaggagatgcaggccaaggaggatgaactgcagaagrccaaggagcggcagcagaaggcagagaatgagcttaaggagctggaacagaagcactygcagctgaccgaggagaagaacctgctacaggaacagctgcaggcagagacagagctgtatgcagaggctgaggagatgcgggtgcggctggcggccaagaagcaggagctggaggagatactgcatgagatggaggcccgcctggaggaggaggaagacaggggccagcagctacaggctgaaaggaagaagatggcccagcagatgctggaccttgaagaacagctggaggaggaggaagctgccaggcagaagctgcaacttgagaaggtcacggctgaggccaagatcaagaaactggaggatgagatcctggtcatggatgatcagaacaataaactatcaaaagaacgaaaactccttgaggagaggattagtgacttaacgacaaatcttgcagaagaggaagaaaaggccaagaatcttaccaagctgaaaaacaagcatgaatctatgatttcagaactggaagtgcggctaaagaaggaagagaagagccgacaggagctggagaagctgaaacggaagctggagggtgatgccagcgacttccacgagcagatcgctgacctccaggcgcagatcgcagagctcaagatgcagctggccaagaaggaggaggagctgcaggcggccctggccaggcttgacgatgaaatcrctcagaagaacaatgccctgaagaagatccgggagctggagggccacatctcagacctccaggaggacctggactcagagcgggccgccaggaacaaggctgaaaagcagaagcgagacctcggcgaggagctggaggccctaaagacagagctggaagacacactggacagcacagccactcagcaggagctcagggccaagagggagcaggaggtgacggtgctgaagaaggccctggatgaagagacgcggtcccatgaggctcaggtccaggagatgaggcagaaacacgcacaggcggtggaggagctcacagagcagcttgagcagttcaagagggccaaggcgaacctagacaagaataagcagacgctggagaaagagaacrcagacctggccggggagctgcgggtcctgggccaggccaagcaggaggtggaacataagaagaagaagctggaggcgcaggtgcaggagctgcagtccaagtgcagcgatggggagcgggcccgggcggagctcaatgacaaagtccacaagctgcagaatgaagttgagagcgtcacagggatgcttaacgaggccgaggggaaggccattaagctggccaaggacrtggcgtccctcagttcccagctccaggacacccaggagytgcttcaagaagaaacccggcagaagctcaacgtgtctacgaagctgcgccagctggaggaggagcggaacagcctgcaagaccagctggacgaggagatggaggccaagcagaacctggagcgccacatctccactctcaacatccagctctccgactcgaagaagaagctgcaggactttgccagcaccgtggaagctctggaagaggggaagaagaggttccagaaggagatcgagaacctcacccagcagtacgaggagaaggcggccgcktatgataaactggaaaagaccaagaacaggcttcagcaggagctggacgacctggttgttgatttggacaaccagcggcaactcgtgtccaacctggaaaagaagcagaggaaatttgatcagttgttagccgaggagaaaaacatctcttccaaataygcggatgagagggacagagctgaggcagaagccagggagaaggaaaccaaggccctgtccctggctcgggcccttgaagaggccttggaagccaaagaggaactcgagcggaccaacaaartgctcaaagccgaaatggaagacctggtcagctccaaggatgacgtgggcaagaacgtccatgagctggagaagtccaagcgggccctggagacccagatggaggagatgaagacgcagctggaagagctggaggacgagctgcaagccacggaggacgccaaactgcggctggaagtcaacatgcaggcgctcaagggccagttcgaaagggatctccaagcccgggacgagcagaatgaggagaaraggaggcaactgcagagacagcttcacgagtatgagacggaactggaagacgagcgaaagcaacgtgccctggcagctgcagcaaagaagmagctggaaggggacctgaaagacctggagcttcaggccgactctgccatcaaggggagggaggaagccatcaagcagctacgcaaactgcaggctcagatgaaggactttcaaagagagctggaagatgcccgtgcctccagagatgagatctttgccacagccaaagagaatgagaagaaagccaagagcttggaagcagacctcatgcagctacaagaggacctcgccgccgctgagagggctcgcaaacaagcggacctcgagaaggaggaactggcagaggagctggccagtagcctgtcgggaaggaacgcactccaggacgagaagcgccgcctggaggcccggatcgcccagctggaggaggagctggaggaggagcagggcaacatggaggccatgagcgaccgggtccgcaaagccacacagcaggccgagcagctcagcaacgagctggccacagagcgcagcacggcccagaagaatgagagtgcccggcagcagctygagcggcagaacaaggagctccggagcaagctccacgagatggagggggccgtcaagtccaagttcaartccaccatcgcggcgctggaggccaagattgcacagctrgaggagcaggtcgagcaggaggccagagagaaacaggcggccaccaagtcgctgaagcagaaagacaagaagctgaaggaaatcttgctgcaggtggaggacgagcgcaagatggccgagcagtacaaggagcaggcagagaaaggcaatgccagggtcaagcagctcaagaggcagctggaggaggcagaggaggagtcccagcgcatcaacgccaaccgcaggaagctgcagcgggagctggatgaggccacggagagcaacgaggccatgggccgcgaggtgaacgcactcaagagcaagctcaggcgaggaaacgagacctctttcgttccttctagaaggtctggaggacgtagagttattgaaaatgcagatggttctgaggaggaaacggacactcgagacgcagacttcaatggaaccaaggccagtgaataagcaabtttctacagttttgcaccacggcaagaaaaccaaaaaccaaaacaaacaaacaaaaaaaacccaacaacaacccagaacaaagcaaaacccagcagactgtacttagcattgtctaaatccattctcaaattccaaatatcacagacacccctcacacaaggaatataaaaaccaccaccctccagcctgggcaacgtagtaaaacctcatctatacaagaatttaaaaataagctgggcgtggtggtacacacctgtggtcccagctactagggaggctgagccaggaagaacgctccarcccaggacttcgaggctgcaatgagctataattgcatcattgcactccagcctgggcaacagagaccctgtctcaaccaccaccaccaccaccacccctactacccctgtattsaaggtaaaaattgaagtttgtatgatgtaagagatgagaaaaacccaacaggaaacacagacacatcctccagttctatcaatggattgtgcagacactgagtttttagaaaaacatatccacggtaaccggtccctggcaattctgtttacatgaaatggggagaaagtcaccgaaatgggtgccgccggcccccactcccaattcattccctaacctgcaaacctttccaacttctcacgtcaggcctttgagaattctttccccctctcctggtttccacacctcagacacgcacagttcaccaagtgccttctgtagtyacatgaattgaaaaggagacgctgctcccacggaggggagcaggaatgctgcactgtttacaccctgactgtgcttaaaaacactttcactaataaatggttataaatcacaa

SEQ ID NO: 132 - DNA, 850 bp, Homo sapiens
agtcgctgtacatctcatggttgctaagaaacggagcttccacaaaccagatagaggttctccagcttttctttgattgtctctgctttagcgtctctaaatccggtcaccatgtcggacyccgaaggcgagaccttgcgaagcacctttccctcttatatggscgaaggcgagcggctctacctgtgcggggaattttctaaagccgcgcagagcttcagcaacgctctttaccttcaggatggagacaagaactgcctggttgctcgctcaaagtgcttcctgaagatgggagacttggagagatccctgaaggatgctgaggcttcgctccagagtgacccagctttctgtaaggggattttgcaaaaggctgagacactgtacaccatgggagactttgagtttgccttggtattctatcatcgaggctacaagctgaggcctgatcrggaattcagagttggcattcagaaagcccaggaagccatcaacaactcagtgggaagtccttcttccattaagctggagaacaaaggggacctctccttcttaagcaagcaggctgagaatataaaagcccagcagaagcctcagcccatgaaacacctcttacaccccaccaagggagagcccaagtggaaggcctcgctcaagagtgagaagactgtccgccagcttctgggggagctctacgtggacaaagagtatttggagaagctcctattggatgaaggtttcggacactttgttggcacggggccttgggggaaaggaaatctgggtggatgcttcatgcatgagctgaaggcagaacctgtcatataatattagctgacgtgtacctgtg

SEQ ID NO: 133 - DNA, 2295 bp, Homo sapiens
agtcgctgtacatctcatggttgctaagaaacggagcttccacaaaccagatagaggttctccagcttttctttgattgtctctgctttagcgtctctaaatccggtcaccatgtcggacyccgaaggcgagaccttgcgaagcacctttccctcttatatggscgaaggcgagcggctctacctgtgcggggaattttctaaagccgcgcagagcttcagcaacgctctttaccttcaggatggagacaagaactgcctggttgctcgctcaaagtgcttcctgaagatgggagacttggagagatccctgaaggatgctgaggcttcgctccagagtgacccagctttctgtaaggggattttgcaaaaggctgagacactgtacaccatgggagactttgagtttgccttggtattctatcatcgaggctacaagctgaggcctgatcrggaattcagagttggcattcagaaagcccaggaagccatcaacaactcagtgggaagtccttcttccattaagctggagaacaaaggggacctctccttcttaagcaagcaggctgagaatataaaagcccagcagaagcctcagcccatgaaacacctcttacaccccaccaagggagagcccaagtggaaggcctcgctcaagagtgagaagactgtccgccagcttctgggggagctctacgtggacaaagagtatttggagaagctcctattggatgaagacctgatcaaaggcaccatgaagggyggcctgactgtggaggacctcatcatgacgggcatcaactacctggatactcacagcaacttctggaggcagcagaagccgatctacgccagggagcgggaccggaagctgatgcaagagaaatggctgcgggaccacaaacgccgtccctcacagacagcccattacatcctcaagagcctggaggacattgatatgttgctcacaagtggcagtgctgaagggagtcttcagaaagctgagaaagtgctgaagaaggtactggaatggaacaaggaagaggtacccaacaaggatgaactggttggaaacttgtatagctgcatagggaatgcccagattgagctggggcagatggaggcagccctgcagagccacagaaaggacctggagatcgccaaggaatatgaccttcctgatgcaaaatcgagagcccttgacaacattggcagagtttttgccagagttgggaaattccagcaagccattgacacgtgggaagaaaagatccctctggcaaaaaccaccctggagaagacctggctgttccacgagatcggccgctgctacttggagctggaccaggcctggcaggcccagaattatggcgagaagtcccagcagwgtgccgaggaggaaggggacattgagtggcaactgaatgccagtgttctggtggcccaggcacaagtgaagctgagagacttcgagtcagccgtgaacaattttgagaaggccctggagagagcaaagcttgtgcataacaacgaggcgcagcaggccatcatcagtgccttggacgatgccaacaagggtatcatcagagaactgaggaaaaccaactacgtggagaatctcaaagaaaaaagcgagggagaagcttcactgtatgaagatagaataataacaagagagaaggacatgaggagagtgagagatgagcccgagaaggtggtgaagcagtgggaccatagtgaggatgagaaagagacagatgaggacgatgaggcttttggggaagctctgcagagcccagcaagcggaaagcagagtgtggaagcaggaaaagccagaagcgatttgggagcagttgccaagggcctgtcaggagaattaggcacaagatcaggagaaacaggcaggaagctactagaagctggcagaagagagtcaagagaaatttataggaggccttcgggagaattagagcaaagactctcaggagaattcagcagacaggaaccagaagaactaaagaaactttcagaagtgggcagaagagagccagaagaactgggaaaaacacaatttggagaaataggagaaacgaaaaaaacaggaaatgagatggaaaaggaatatgaatgaagccatcggtagagatgaggatcaggaagctggtgttcagagggatcatgggattttattaaactggattttcaagcgatttgtctgttataggaaaaatgagggttttacttctgctgctttccatcactattttgccattaaataggtgtctttcactcttgc

SEQ ID NO: 134 - DNA, 3026 bp, Homo sapiens
gaagcatctacaaaggaggaatagtcaaagcagcagcggcggcggcggcggcggcagcagcagcagcagcaggagaccttctctgatggatgacctctgtgaagcaaatggcacttttgccatcagcttatttaaaatattgggggaagaggacaactcaagaaaygtattcttctctcccatgagcatctcctctgccctggccatggtcttcatgggggcaaagggaagcactgcagcccagatgtcccaggcactttgtttatacaaagacggagatattcaccraggtttccagtcacttctcagtgaagttaacagaactggcactcagtacttgcttagaactgccaacagactctttggagaaaagacgtgtgatttccttccagactttaaagaatactgtcagaagttctatcaggcagagctggaggagttgtcctttgctgaagacactgaagagtgcaggaagcatataaatgactgggtggcagagaagactgaaggtaagatttcagaggtactggatgctgggacagtcgatcccctgacaaasctrgtccttgtgaatgccatttatttcaagggaaagtggaatgagcaatttgacagaaagtacacaaggggaatgctctttaaaaccaacgaggaaaaaaagacagtgcagatgatgtttaaggaagctaagtttaaaatggggtatgyggatgaggtacacacccaggtcctggagctgccctatgtggaagaggagctgagcatggtcattctgcttcccgatgacaacacggacctcgccgtggtggaaaaagcacttacatatgagaaattcaaagcctggacaaattcagaaaagttgacaaaaagtaaggttcaagttttccttcccagattaaagctggaggagagttatgacttggagcctttccttcgaagattaggaatgatcgatgcttttgacgaagccaaggcagacttttctggaatgtcarctgagaagaatgtgcctctgtccaaggttgcycacaagtgcttcgtggaggtcaatgaggaaggcacagaggctgccgcagccactgctgtggtcaggaattcccgrtgcagcagaatggagccaagattctgtgcagaccacccttttcttttcttcatcaggcrccacaaaaccaactgcatcttgttctgtggcaggttctcttctccgtaaagaggagcaattgctgtacataccctcctttccttctacctatcttgccttaattaacattccctgtgacctagttggtgcagtggcttgaatgccaaaataaagcgtgtgcactggatagtgtgtgaaagtctttgctgaaagttccagagccattgagaataactgaggccgcagatgcatgaaatttgggcctgggaaggctatgctggttttggagtgtttggggtgcctgccattgcctctgccttcacctaagtctgtgcccattgtttcaggggatcttatggagcatctcagggcttcaggagccagccctctatgtgctcttccatccgcccggctctgcccaccaccactgccaggctgaacaggggactagtgcccaggtgacactgcacacaaagccaagggcaaaccctatagagtaaagctgcagccaccctgtgtctcatgtgcagctgaaatagtgatctgcttctgtcactgtcacatagacagccctgcatgccccctgtctcacacagtttgtaatgaagacagctccttctcatctttccataagcctgagatacaagttcagggactcagcaatgcactttaggactgagctaggaggcaaatatctgaagcttgctatgctgttctttccattccttttccctctgaaacacacaaaataccaaaggaacttacrcaacacaccactgagtcctctaactaatcatatgtgctcagacacagctcaagcacaccccttagttaagaaagaacctccatatacattaatttttttctgcctaaaaataaaattgcgttgtggcagcaatttggaaactacagcaaagtctccaaaaaaattgaagtcacccacaattccaacacacagcaatcactgctgttaatagtgatatacatccttccctattatgtgtatgcaaatagaaatttataagcattttactacaagttaatcatatccttcagtagcttatttcttcccttatgaaaaacctcccttaagatctttccaggtcatcaatttgatgtgcatagtattccactgtgtggctggatttctataattgaatctaattttagacagtttgagtaattaaaattatttctattaacaaataatagattgctaataatatatattrtgctgttttggatatactaaatatttgctcacatccttaatatattttttaaaattcctaacaatagtactgttgagataaaagttgagcacattttgagacttcttccaaattggtccctagaaagttacactggtttgtactctcacttatgtcactgtttataccaccactgactgctgcctgctttattatttctttaatgagttggactgaacagtggttaatcctgactctgtttttgactgacagttaacagttacatgaaccattcatattacagctcttacttaaatttgaccaagccaggatatatctgttaggccacattcatttagggatcatgttttccaaagcaggtttgggcaaaattaatccacaggactgaaaggtatacatctgtgagttttgttctcacttccacctctaatttgaagaacactttaattgacacagaatacatttcacatatttaacctctacaataagttctgacacattttccatgaaacaaaccatcgctatattcaagataatgaacctatctatcatactcccaaattccttcttgcatctttgtaatttctcactcttccttctccctctccccgtcccatcccaaccactgatctgctcaggcaactaccaatctt

SEQ ID NO: 135 - DNA, 640 bp, Homo sapiens
agacatctctattcccgcctctccgacccggtctcacttcgctcctgggcagctgcgcggagaactggggctcaccgtcatggatgctctatcagaagcaaatggcacatttgcattaaaccttttgaaaaagctaggggaaaacaactcaaacaacttatttttttccccatgagcatatcatcagccttggccatggttttcatgggggcaaagggaaacactgcagctcagatgtctcaggcactttgttttagtaaaatcggaggtgaagatggagatattcatcgaggttttcagtcacttcttgttgcaattaacagaactgacactgaatatgtgcttagaactgccaacgggctctttggagaaaartcttatgatttcctcacaggttttacagattcctgtggcaaattctaccaagcaacgataaaacagctagactttgtgaatgatacagagaagtccacaacacgtgtaaactcctgggttgctgataaaactaaaggtgaaaatatattgttattctatttcgataatattttaaacagttttatagtcagttctttacaaaactgtcaaatataaaaaggagtccttttttctctaaacaactatgcaaacattaaaacctttw

SEQ ID NO: 136 - DNA, 3263 bp, Homo sapiens
acccggtctcacttcgctcctgggcagctgcgcggagaactggggcactttgttttagtaaaatcggaggtgaagatggagatattcatcgaggttttcagtcacttcttgttgcaattaacagaactgacactgaatatgtgcttagaactgccaacgggctctttggagaaaartcttatgatttcctcacaggttttacagattcctgtggcaaattctaccaagcaacgataaaacagctagactttgtgaatgatacagagaagtccacaacacgtgtaaactcctgggttgctgataaaactaaagaccttctctgatggatgacctctgtgaagcaaatggcacttttgccatcagcttatttaaaatattgggggaagaggacaactcaagaaaygtattcttctctcccatgagcatctcctctgccctggccatggtcttcatgggggcaaagggaagcactgcagcccagatgtcccaggcactttgtttatacaaagacggagatattcaccraggtttccagtcacttctcagtgaagttaacagaactggcactcagtacttgcttagaactgccaacagactctttggagaaaagacgtgtgatttccttccagactttaaagaatactgtcagaagttctatcaggcagagctggaggagttgtcctttgctgaagacactgaagagtgcaggaagcatataaatgactgggtggcagagaagactgaaggtaagatttcagaggtactggatgctgggacagtcgatcccctgacaaasctrgtccttgtgaatgccatttatttcaagggaaagtggaatgagcaatttgacagaaagtacacaaggggaatgctctttaaaaccaacgaggaaaaaaagacagtgcagatgatgtttaaggaagctaagtttaaaatggggtatgyggatgaggtacacacccaggtcctggagctgccctatgtggaagaggagctgagcatggtcattctgcttcccgatgacaacacggacctcgccgtggtggaaaaagcacttacatatgagaaattcaaagcctggacaaattcagaaaagttgacaaaaagtaaggttcaagttttccttcccagattaaagctggaggagagttatgacttggagcctttccttcgaagattaggaatgatcgatgcttttgacgaagccaaggcagacttttctggaatgtcarctgagaagaatgtgcctctgtccaaggttgcycacaagtgcttcgtggaggtcaatgaggaaggcacagaggctgccgcagccactgctgtggtcaggaattcccgrtgcagcagaatggagccaagattctgtgcagaccacccttttcttttcttcatcaggcrccacaaaaccaactgcatcttgttctgtggcaggttctcttctccgtaaagaggagcaattgctgtacataccctcctttccttctacctatcttgccttaattaacattccctgtgacctagttggtgcagtggcttgaatgccaaaataaagcgtgtgcactggatagtgtgtgaaagtctttgctgaaagttccagagccattgagaataactgaggccgcagatgcatgaaatttgggcctgggaaggctatgctggttttggagtgtttggggtgcctgccattgcctctgccttcacctaagtctgtgcccattgtttcaggggatcttatggagcatctcagggcttcaggagccagccctctatgtgctcttccatccgcccggctctgcccaccaccactgccaggctgaacaggggactagtgcccaggtgacactgcacacaaagccaagggcaaaccctatagagtaaagctgcagccaccctgtgtctcatgtgcagctgaaatagtgatctgcttctgtcactgtcacatagacagccctgcatgccccctgtctcacacagtttgtaatgaagacagctccttctcatctttccataagcctgagatacaagttcagggactcagcaatgcactttaggactgagctaggaggcaaatatctgaagcttgctatgctgttctttccattccttttccctctgaaacacacaaaataccaaaggaacttacrcaacacaccactgagtcctctaactaatcatatgtgctcagacacagctcaagcacaccccttagttaagaaagaacctccatatacattaatttttttctgcctaaaaataaaattgcgttgtggcagcaatttggaaactacagcaaagtctccaaaaaaattgaagtcacccacaattccaacacacagcaatcactgctgttaatagtgatatacatccttccctattatgtgtatgcaaatagaaatttataagcattttactacaagttaatcatatccttcagtagcttatttcttcccttatgaaaaacctcccttaagatctttccaggtcatcaatttgatgtgcatagtattccactgtgtggctggatttctataattgaatctaattttagacagtttgagtaattaaaattatttctattaacaaataatagattgctaataatatatattrtgctgttttggatatactaaatatttgctcacatccttaatatattttttaaaattcctaacaatagtactgttgagataaaagttgagcacattttgagacttcttccaaattggtccctagaaagttacactggtttgtactctcacttatgtcactgtttataccaccactgactgctgcctgctttattatttctttaatgagttggactgaacagtggttaatcctgactctgtttttgactgacagttaacagttacatgaaccattcatattacagctcttacttaaatttgaccaagccaggatatatctgttaggccacattcatttagggatcatgttttccaaagcaggtttgggcaaaattaatccacaggactgaaaggtatacatctgtgagttttgttctcacttccacctctaatttgaagaacactttaattgacacagaatacatttcacatatttaacctctacaataagttctgacacattttccatgaaacaaaccatcgctatattcaagataatgaacctatctatcatactcccaaattccttcttgcatctttgtaatttctcactcttccttctccctctccccgtcccatcccaaccactgatctgctcaggcaactaccaatctw

SEQ ID NO: 137 - DNA, 11200 bp, Homo sapiens
ggcagttagggcaactggaaggctgggagctgaaatcacctgaagtctcattcactcacatgtctgatggttgatattgtctatcagattcttttttgtctccttctctgcaagaggctggcaccagatcacctcctgagtagagcagacattccaaaggatgtcctgccaacaataatggaaagctggatacaactgaatatgtaaaatgatgttaatgaagaattgaagagcactgtatctagttttctgctctccccttattttgaatcaaacccaggcatcctatcatttcatctataaagactttagttcctaaaagtggaattgctggatcaaagggtaaaggcataggcaattytagagcatttagatttaatgtgatggacaggaatgaaccatgaagccacgagtgtttgatttttaaattgtgatattccactaaatgagaaatgaccaggacttcacagagatttcatgaaaggagggccacaaaggaagaacccagagcaggccggtgagaggcactctaagagctttccaatatccgtcttcggagcgcacgggaatccgccgagctctgcgtgcaggcccttttttcttttgaggttcacattttttgaaattttacgccagggcttttgtaatttcctcccccgcccgctggcggtcctggagtcgctcggggctttaggccggttatgcaacgtgtaccgctcggggctgccggctgcacctccgccgcgcctcgccgctcactgcgctagacccggcgccccgcgtctcgcttcgcgggcagtcagggggccggcgctctgtcgaggtctccagctagagcagggagcccgagcccgagggagtccccggagccgacgaagggcttattagaccctgactcttttctgaggcgcgcagattttgtctttgatcactccctctccgcgggtctacggccgcgcgctttcggcgccggcgatggggagaagacggaggctgtgtctccagctctacttcctgtggctgggctgtgtggtgctctgggcgcagggcacggccggccagcctcagcctcctccgcccaagccgccccggccccagccgccgccgcaacaggttcggtccgctacagcaggctctgaaggcgggtttctagcgcccgagtatcgcgaggagggtgccgcagtggccagccgcgtccgccggcgaggacagcaggacgtgctccgagggcccaacgtgtgcggctccagattccactcctactgctgccctggatggaagacgctccctggaggaaaccagtgcattgtcccgatttgtagaaatagttgtggagatggattttgttcccgtcctaacatgtgtacttgttccagtgggcaaatatcatcaacctgtggatcaaaatcaattcagcagtgcagtgtgagatgcatgaatggtgggacctgtgcagatgaccactgccagtgccagaaaggatatattggaacttattgtggacaacctgtctgtgaaaatggatgtcagaatggtggacgttgcatcggacccaaccgctgtgcttgtgtttatgggttcactggtccacagtgtgaaagagattacaggacaggcccgtgtttcactcaggtcaacaaccagatgtgccaagggcagctgacaggcattgtctgcacgaagactctgtgctgtgccaccattggacgggcgtggggccatccctgtgagatgtgtccagcccagcctcagccctgccgacggggtttcatccccaacatccgcactggagcttgccaagatgttgatgaatgccaggctatcccagggatatgccaaggaggaaactgtatcaatacagtgggctcttttgaatgcagatgccctgctggtcacaaacagagtgaaactactcagaaatgtgaagacattgatgagtgcagcatcattcctgggatatgtgaaactggtgaatgttccaacaccgtgggaagctatttttgtgtttgtccacgtggatatgtaacctcaacagatggctctcgatgcatcgatcagagaacaggcatgtgtttctcgggcctggtgaatggccgctgtgcacaagagctcccggggagaatgacgaaaatgcagtgctgctgtgagcctggccgctgctggggcatcggaaccattcctgaagcctgtcctgtcagaggttctgaggaatatcgcagactttgcatggatggacttccaatgggaggaattccagggagtgctggttccagacctggaggcactgggggaaatggctttgccccaagtggcaatggcaatggctatggcccaggagggacaggcttcatccccatccctggaggcaatggcttttctcctggcgttgggggagccggtgtgggggccgggggacagggacctatcatcactggactaacaattctgaaccagacaatagatatctgtaagcatcatgctaacctttgtttaaatggacgctgtataccaactgtctcaagctaccgatgtgaatgcaacatgggttataagcaggatgcaaatgsagattgtatagatgttgatgaatgcacatcaaatccctgcactaatggagattgtgttaacacacctggttcctattattgtaaatgtcatgctggattccagaggactcctaccaagcaagcatgcattgatattgatgagtgcatccagaatggggttctttgtaaaaacggtcgatgcgtgaacacagatggaagtttccagtgcatttgcaatgccggctttgaattaactacagatggaaaaaactgtgttgatcatgatgaatgtacaactaccaacatgtgtttgaatggaatgtgcatcaatgaagatggcagcttcaagtgcatctgcaaaccaggatttgtcttggctccaaatgggcgttactgtactgatgttgatgaatgccagaccccaggaatctgcatgaatgggcactgcatcaacagtgaagggtccttccgctgtgactgtcccccaggcctggctgtgggcatggatggacgtgtgtgtgttgatactcacatgcgcagtacctgctatggaggaatcaagaaaggagtgtgtgtgcgtcctttccccggtgcagtgaccaagtccgaatgctgctgtgccaatccagactatggttttggagaaccctgccagccatgccctgcaaaaaattcagctgaattccacggcctttgtagtagtggagtaggtatcactgtggatggaagagatatcaatgaatgtgctttggatcctgatatatgtgccaatgggatttgtgaaaacttacgtggtagttaccgttgtaattgcaacagtggctatgaaccagatgcctctggaagaaactgtattgacattgatgaatgtttagtaaacagactgctttgtgataacggattgtgccgaaacacgccaggaagttacagctgtacgtgcccaccagggtatgtgttcaggactgagacagagacctgtgaagatataaatgaatgtgaaagcaacccatgtgtcaatggggcctgcagaaacaaccttggatctttcaattgtgaatgttcgcccggcagcaaactcagctccacaggattgatctgtattgacagcctgaaggggacctgttggctcaacatccaggacagccgctgtgaggtgaatattaatggagccactctgaaatctgaatgctgtgccaccctcggagcygcctgggggagcccctgtgagcggtgtgaactagatacagcttgcccaagagggcttgccaggattaaaggtgttacgtgtgaagatgttaatgagtgtgaggtgttccctggcrtttgtccaaatggacgctgtgtcaacagtaagggatcttttcattgcgagtgccctgaaggccttacgttggatgggactggccgtgtatgtttggatattcgcatggagcagtgttacttraagtgggatgaagatgaatgcatccaccccgttcctggaaagttccgcatggatgcctgctgctgtgctgtcggggcggcttggggcaccgagtgtgaggagtgccccaaacctggcaccaaggaataygagacgctgtgcccccgcgggkctgrctttgctaaccgaggggatgttcttactgggcggccattttacaaagacatcaatgaatgcaaagcatttcctgggatgtgcacttatgggaagtgcagaaatacaaycggaagcttcaaatgccgttgcaatagtggctttgctctagacatggaggaaagaaactgcacggacatcgacgagtgcaggatttctcctgacctctgtggcagtggaatctgcgtcaatacaccgggcagctttgagtgcgagtkcttcgaaggctatgaaagtggcttcatgatgatgaagaactgcatggacattgacgaatgtgaacgtaaccctctcctttgtaggggtggcacctgtgtgaacactgagkgcagctttcagtgtgactgcccactgggacacgagctgtcaccatcccgtgaggactgkgtggatattaatgaatgctccctgagtgacaatctctgcagaaatggaaaatgtgtgaacatgattggaacctatcagtgctcttgcaatcctggatatcaggctacgccagaccgccagggcygtacagatattgatgaatgtatgataatgaacggaggctgtgayacccagtgsacaaattcagagggaagctacgaatgcagcygcagtgagggttatgccctgatgccagatgggagatcgtgtgcagacattgatgaatgtgaaaacaatcctgatatctgtgatggcggccagtgtaccaacattcctggagagtatcgctgcctctgctatgatggcttcatggcttccatggacatgaaaacatgcattgatgtcaatgaatgtgacctaaattcaaatatctgcatgtttggggaatgtgagaacacaaagggatccttcatttgccactgtcagctgggttactcagtgaagaaggggaccacaggatgtacmgatgtggatgagtgtgaaattggtgctcataactgcgacatgcatgcctcatgtctgaatatcccaggaagcttcaagtgtagctgcagagaaggctggattggaaayggcatcaagtgtattgatctggacgaatgttctaatggaacccaccagtgtagcatcaatgctcagtgtgtaaataccccgggctcatamcgctstgcctgctccgaaggtttcactggtgatggctttacctgctcagatgttgatgagtgtgcagaaaacataaacctctgtgagaacggacagtgccttaatgtcccgggtgcatatcgctgcgagtgtgagatgggcttcactccagcctcagacagcagatcctgccaagatattgatgaatgctccttccawaacatttgtgtctttggaacatgtaataacctgcctggaatgtttcattgcatctgcgatgatggttatgaattggacagaacaggagggaactgtacagatattgatgagtgtgcagatcctataaactgtgtcaatggcctatgtgtcaacacgcctggtcgctatgagtgtaactgcccacccgattttcagttgaacccaactggtgtgggttgtgttgacaaccgtgtgggcaactgctacctgaagtttggacctcgaggagatgggagtctgtcttgcaacaccgagatcggggtgggcgtcagtcgctcttcatgctgctgctctctgggaaaggcctggggaaacccctgtgagacatgcccccctgtcaatagcactgaatattacaccctgtgtcccggaggtgaaggcttcagacctaaccccatcacaatcattttagaagacattgacgaatgccaggagttaccaggtctctgccagggtggaaactgcatcaacacttttgggagcttccagtgtgagtgcccacaaggctactacctcagcgaggatacccgcatctgtgaagatattgatgagtgttttgcacatcctggtgtgtgtgggcctgggacctgctataacaccctgggaaattacacctgcatttgcccacctgagtacatgcaggtcaatggaggccacaactgcatggacatgagaaaaagcttttgctaccgaagctataatggaaccacttgtgagaatgagttgcctttcaatgtgacaaaaaggatgtgctgctgcacatataatgtgggcaaagcctggaacaaaccttgtgaaccatgcccaactccaggaacagctgactttaaaaccatatgtggaaatattcctggattcacctttgacattcacacaggaaaagctgttgacattgatgaatgtaaagagattccaggcatttgtgcaaatggtgtgtgcattaaccagattggcagtttccgytgtgaatgccctacaggattcagttacaatgacctgctgttggtttgtgaagatatagatgagtgcagcaatggtgataatctctgccagcggaatgcagactgcatcaatagtcctggtagttaccgctgtgaatgtgccgcgggtttcaaactttcacccaatggggcctgtgtagatcgcaatgaatgtttagaaattcctaacgtttgcagtcatggcttgtgtgttgatctgcaaggaagttaccagtgcatctgccacaatggctttaaggcttctcaggaccagaccatgtgcatggatgttgatgagtgcgagcggcayccatgtggaaatggaacttgtaaaaacaccgttggatcctataactgtctgtgctacccagggtttgaactcactcataataatgattgcctggacatagatgagtgcagttccttttttggtcaggtgtgcagaaatggacgttgttttaatgaaattggttctttcaagtgtctatgtaacgaaggttatgaacttaccccagatggcaaaaactgtatagacactaatgagtgtgtcgcccttcccggctcttgctctcctggtacctgtcagaatttggagggatccttcagatgcatctgtcccccagggtatgaagtaaaaagcgagaactgcattgatataaatgaatgtgatgaagatcccaacatttgtctttttggttcctgtactaatactccagggggcttccagtgcctctgccccsctggctttgtactatctgataatggacggagatgctttgatactcgccagagcttctgcttcacaaattttgaaaatggaaagtgttctgtacccaaagctttcaacaccacaaaagcaaaatgctgctgtagtaagatgccaggagagggctggggggacccctgtgagctgtgccccaaagacgatgaagttgcatttcaggatttgtgtccatatggccatggaactgtccctagtcttcatgatacacgtgaagatgtcaatgagtgtcttgagagcccaggcatttgttcaaatggtcaatgtatcaacaccgacggatcttttcgctgtgaatgtccaatgggctacaaccttgaytacactggagtacgctgtgtggatactgatgagtgttcaatcggcaatccgtgtggaaatggtacatgcaccaatgttattgggagttttgaatgcaattgcaatgaaggctytgagccagggcccatgatgaattatatcaacgaatgtgcccagaacccactgctgtgtgctttccgctgcatgaacacttttgggtcctatgaatgcaygtgcccgattggctatgccctcagggaagatcaaaagatgtgcaaagatctggatgaatgtgctgaagggttacacgactgtgaatctaggggcatgrtgtgtaagaatctaatcggcaccttcatgtgcatctgccctcctggaatggcccgaaggcccgatggagaaggctgtgtagatgaaaatgaatgcaggaccaagccaggaatctgtgaaaatggacgttgtgttaacattattggaagctatagatgtgagtgtaatgaaggattccagtcaagttcttcaggcactgaatgccttgacaatcgacagggtctctgctttgcagaggtactgcagacaatatgtcaaatggcatccagyagtcgcaatctcgtcactaagtcagaatgctgctgtgatggtgggcgaggctggggccaccagtgcgagctttgcccacttmctggaactgcccaktacaaaaagatatgtcctcatggcccaggatatacaactgatggaagagatattgatgaatgtaaggtaatgccaaacctctgcaccaatggtcagtgcatcaataccatgggctcattccgatgcttctgcaaggttggctacaccacagacatcagtggaacctcttgtatagaccttgatgaatgctcccagtccccgaaaccatgcaactacatctgcaagaacactgaggggagttatcagtgttcatgtccgagggggtatgtcctgcaagaggatggaaagacatgcaargaccttgatgaatgtcaaacaaagcagcataactgccagttcctctgtgtcaacaccctgggggggtttacctgtaaatgtccacctggtttcacacagcatcacactgcttgtatcgacaacaacgaatgtgggtctcaaccttygctttgtggagcaaagggaatctgtcaaaacactccaggcagtttcagctgtgaatgccaaagagggttctctcttgatgccacyggactgaactgtgaagatgttgatgaatgtgatgggaaccacaggtgccaacacggctgccagaacatcctgggtggctacagatgtggctgcccccaaggctacatccagcactaccagtggaatcagtgtgtcgatgagaatgaatgctccaatcccaatgcctgtggctctgcttcctgctacaacaccctggggagttacaagtgcgcctgcccctcggggttctccttcgaccagttctccagtgcctgccacgacgtgaatgagtgctcgtcctccaagaacccctgcaattacggctgctctaacacggaggggggctacctytgtggctgcccccctgggtattacagagtgggacaaggccactgtgtctcaggaatgggatttaacaaggggcagtacctgtcactggatacagaggtcgatgaggaaaatgctctgtccccagaagcatgctacgagtgcaaaatcaacggctatyctaagaaagacagcaggcagaagagaagtattcatgaacctgatcccactgctgttgaacagatcagcctagagagtgtcgacatggacagccccgtcaacatgaagttcaacctctcccacctcggctctaaggagcacatcctggaactaaggcccgccatccagcccctcaacaaccacatccgttatgtcatctctcaagggaacgatgacagcgtcttccgcatccaccaaaggaatgggctcagctacttgcacacggccaagaagaagctcatgcccggcacatacacactggaaatcactagcatccctctctacaagaagaaggagcttaagaaactggaagagagcaatgaggatgactacctcctaggggagcttggggaggctctcagaatgaggctgcagattcagctstattaaccsttcacagacttgggcccaggctcaaatcctagcacagccagtctgcagaagcatttgaaaagtcaaggactaattttaaagaggaaaaataataataactcttgtttctttcctcyctgtcttagactttgaatgttgaccctcacagggagggataatttagactctggtatggccaaagatttgagcacaaaggcaaccgtggttactgtattttttatataacttcattttaaaatatattaaaagaaacctaaatgttcaagatatcagcatatggcactaaatgcacaaaaataatgtgagctttttttttttttcctgttagcagtctgtaacactttgggtattaatatatggagaaatgaacaaactatgtaaacaaaaagggaaactcacttgtttttctttagatttataaatttgagctattttttttagaggtgctttttaaaaatccaatagatacaagagatgtttcctttggttttctgccagtcatccagctgatacacacctgatgattttaaagaaagccacacagagctgaatgggcagtgtaatcaataatttaaaaracatgaatgtcattagatcctttataacgtagatcgaagccaaagcagctcatttgtgacaacatttcatatcaccagacacaccaggcaacagaagwtgaagcacaaccactgtagcaaaataccttgactgcttgtgagaccattagcattgcaggccaaaccgtactgtatttccttctcataacctcaaggaaccatatgtgctacccacaacacctcattcttacccagggtgcgctgcgtcctcatggtactgtaggcagctgaagaaccgccgttcccttgaaagggaacacctggcattctgtggtgtttcgtgctgtcttaaataatggtgcatttattatgttcaagttatttcaggattgccatatgtgcaaacaaatcatgcaatgcagccaaggaatatatgttgttgttgttgttttaaacccattttttttttagaattttcattaatactgtagttatacaccatatgcctcattttatcatagcctattgtgtatgaaagatgtttgtacaatgaattgatgtttagtttgctttagtcatttaaaaagatattgtaccaggatgtgctattaagagcacgtatccattattcttctcaacccaagaacctgtttcctggaccartgaccaaacctcatatgtgaaatggccaaagcacatgcaggctcctggttgttcctctcaaacctgygctgaccaaagattagtaaccagttatacccagtattttgaggttttattgtttttttaataactaaaaaraaaaaaggaacagtgtaaatttgtaatcaagagtttgtgaggaaaaacttatggtttttggttttgtttgtttttgtaggtctgtgtatcaaatatgacacttttcttgcaataaagcttattttggggta

SEQ ID NO: 138 - DNA, 11260 bp, Homo sapiens
ggcagttagggcaactggaaggctgggagctgaaatcacctgaagtctcattcactcacatgtctgatggttgatattgtctatcagattcttttttgtctccttctctgcaagaggctggcaccagatcacctcctgagtagagcagacattccaaaggatgtcctgccaacaataatggaaagctggatacaactgaatatgtaaaatgatgttaatgaagaattgaagagcactgtatctagttttctgctctccccttattttgaatcaaacccaggcatcctatcatttcatctataaagactttagttcctaaaagtggaattgctggatcaaagggtaaaggcataggcaattytagagcatttagatttaatgtgatggacaggaatgaaccatgaagccacgagtgtttgatttttaaattgtgatattccactaaatgagaaatgaccaggacttcacagagatttcatgaaaggagggccacaaaggaagaacccagagcaggccggtgagaggcactctaagagctttccaatatccgtcttcggagcgcacgggaatccgccgagctctgcgtgcaggcccttttttcttttgaggttcacattttttgaaattttacgccagggcttttgtaatttcctcccccgcccgctggcggtcctggagtcgctcggggctttaggccggttatgcaacgtgtaccgctcggggctgccggctgcacctccgccgcgcctcgccgctcactgcgctagacccggcgccccgcgtctcgcttcgcgggcagtcagggggccggcgctctgtcgaggtctccagctagagcagggagcccgagcccgagggagtccccggagccgacgaagggcttattagaccctgactcttttctgaggcgcgcagattttgtctttgatcactccctctccgcgggtctacggccgcgcgctttcggcgccggcgatggggagaagacggaggctgtgtctccagctctacttcctgtggctgggctgtgtggtgctctgggcgcagggcacggccggccagcctcagcctcctccgcccaagccgccccggccccagccgccgccgcaacaggttcggtccgctacagcaggctctgaaggcgggtttctagcgcccgagtatcgcgaggagggtgccgcagtggccagccgcgtccgccggcgaggacagcaggacgtgctccgagggcccaacgtgtgcggctccagattccactcctactgctgccctggatggaagacgctccctggaggaaaccagtgcattgtcccgatttgtagaaatagttgtggagatggattttgttcccgtcctaacatgtgtacttgttccagtgggcaaatatcatcaacctgtggatcaaaatcaattcagcagtgcagtgtgagatgcatgaatggtgggacctgtgcagatgaccactgccagtgccagaaaggatatattggaacttattgtggacaacctgtctgtgaaaatggatgtcagaatggtggacgttgcatcggacccaaccgctgtgcttgtgtttatgggttcactggtccacagtgtgaaagagattacaggacaggcccgtgtttcactcaggtcaacaaccagatgtgccaagggcagctgacaggcattgtctgcacgaagactctgtgctgtgccaccattggacgggcgtggggccatccctgtgagatgtgtccagcccagcctcagccctgccgacggggtttcatccccaacatccgcactggagcttgccaagatgttgatgaatgccaggctatcccagggatatgccaaggaggaaactgtatcaatacagtgggctcttttgaatgcagatgccctgctggtcacaaacagagtgaaactactcagaaatgtgaagacattgatgagtgcagcatcattcctgggatatgtgaaactggtgaatgttccaacaccgtgggaagctatttttgtgtttgtccacgtggatatgtaacctcaacagatggctctcgatgcatcgatcagagaacaggcatgtgtttctcgggcctggtgaatggccgctgtgcacaagagctcccggggagaatgacgaaaatgcagtgctgctgtgagcctggccgctgctggggcatcggaaccattcctgaagcctgtcctgtcagaggttctgaggaatatcgcagactttgcatggatggacttccaatgggaggaattccagggagtgctggttccagacctggaggcactgggggaaatggctttgccccaagtggcaatggcaatggctatggcccaggagggacaggcttcatccccatccctggaggcaatggcttttctcctggcgttgggggagccggtgtgggggccgggggacagggacctatcatcactggactaacaattctgaaccagacaatagatatctgtaagcatcatgctaacctttgtttaaatggacgctgtataccaactgtctcaagctaccgatgtgaatgcaacatgggttataagcaggatgcaaatgsagattgtatagatgttgatgaatgcacatcaaatccctgcactaatggagattgtgttaacacacctggttcctattattgtaaatgtcatgctggattccagaggactcctaccaagcaagcatgcattgatattgatgagtgcatccagaatggggttctttgtaaaaacggtcgatgcgtgaacacagatggaagtttccagtgcatttgcaatgccggctttgaattaactacagatggaaaaaactgtgttgatcatgatgaatgtacaactaccaacatgtgtttgaatggaatgtgcatcaatgaagatggcagcttcaagtgcatctgcaaaccaggatttgtcttggctccaaatgggcgttactgtactgatgttgatgaatgccagaccccaggaatctgcatgaatgggcactgcatcaacagtgaagggtccttccgctgtgactgtcccccaggcctggctgtgggcatggatggacgtgtgtgtgttgatactcacatgcgcagtacctgctatggaggaatcaagaaaggagtgtgtgtgcgtcctttccccggtgcagtgaccaagtccgaatgctgctgtgccaatccagactatggttttggagaaccctgccagccatgccctgcaaaaaattcagctgaattccacggcctttgtagtagtggagtaggtatcactgtggatggaagagatatcaatgaatgtgctttggatcctgatatatgtgccaatgggatttgtgaaaacttacgtggtagttaccgttgtaattgcaacagtggctatgaaccagatgcctctggaagaaactgtattgacattgatgaatgtttagtaaacagactgctttgtgataacggattgtgccgaaacacgccaggaagttacagctgtacgtgcccaccagggtatgtgttcaggactgagacagagacctgtgaagatataaatgaatgtgaaagcaacccatgtgtcaatggggcctgcagaaacaaccttggatctttcaattgtgaatgttcgcccggcagcaaactcagctccacaggattgatctgtattgacagcctgaaggggacctgttggctcaacatccaggacagccgctgtgaggtgaatattaatggagccactctgaaatctgaatgctgtgccaccctcggagcygcctgggggagcccctgtgagcggtgtgaactagatacagcttgcccaagagggcttgccaggattaaaggtgttacgtgtgaagatgttaatgagtgtgaggtgttccctggcrtttgtccaaatggacgctgtgtcaacagtaagggatcttttcattgcgagtgccctgaaggccttacgttggatgggactggccgtgtatgtttggatattcgcatggagcagtgttacttraagtgggatgaagatgaatgcatccaccccgttcctggaaagttccgcatggatgcctgctgctgtgctgtcggggcggcttggggcaccgagtgtgaggagtgccccaaacctggcaccaaggaataygagacgctgtgcccccgcgggkctgrctttgctaaccgaggggatgttcttactgggcggccattttacaaagacatcaatgaatgcaaagcatttcctgggatgtgcacttatgggaagtgcagaaatacaaycggaagcttcaaatgccgttgcaatagtggctttgctctagacatggaggaaagaaactgcacggacatcgacgagtgcaggatttctcctgacctctgtggcagtggaatctgcgtcaatacaccgggcagctttgagtgcgagtkcttcgaaggctatgaaagtggcttcatgatgatgaagaactgcatggacattgacgaatgtgaacgtaaccctctcctttgtaggggtggcacctgtgtgaacactgagkgcagctttcagtgtgactgcccactgggacacgagctgtcaccatcccgtgaggactgkgtggatattaatgaatgctccctgagtgacaatctctgcagaaatggaaaatgtgtgaacatgattggaacctatcagtgctcttgcaatcctggatatcaggctacgccagaccgccagggcygtacagatattgatgaatgtatgataatgaacggaggctgtgayacccagtgsacaaattcagagggaagctacgaatgcagcygcagtgagggttatgccctgatgccagatgggagatcgtgtgcagacattgatgaatgtgaaaacaatcctgatatctgtgatggcggccagtgtaccaacattcctggagagtatcgctgcctctgctatgatggcttcatggcttccatggacatgaaaacatgcattgatgtcaatgaatgtgacctaaattcaaatatctgcatgtttggggaatgtgagaacacaaagggatccttcatttgccactgtcagctgggttactcagtgaagaaggggaccacaggatgtacmgatgtggatgagtgtgaaattggtgctcataactgcgacatgcatgcctcatgtctgaatatcccaggaagcttcaagtgtagctgcagagaaggctggattggaaayggcatcaagtgtattgatctggacgaatgttctaatggaacccaccagtgtagcatcaatgctcagtgtgtaaataccccgggctcatamcgctstgcctgctccgaaggtttcactggtgatggctttacctgctcagatgttgatgagtgtgcagaaaacataaacctctgtgagaacggacagtgccttaatgtcccgggtgcatatcgctgcgagtgtgagatgggcttcactccagcctcagacagcagatcctgccaagatattgatgaatgctccttccawaacatttgtgtctttggaacatgtaataacctgcctggaatgtttcattgcatctgcgatgatggttatgaattggacagaacaggagggaactgtacagatattgatgagtgtgcagatcctataaactgtgtcaatggcctatgtgtcaacacgcctggtcgctatgagtgtaactgcccacccgattttcagttgaacccaactggtgtgggttgtgttgacaaccgtgtgggcaactgctacctgaagtttggacctcgaggagatgggagtctgtcttgcaacaccgagatcggggtgggcgtcagtcgctcttcatgctgctgctctctgggaaaggcctggggaaacccctgtgagacatgcccccctgtcaatagcactgaatattacaccctgtgtcccggaggtgaaggcttcagacctaaccccatcacaatcattttagaagacattgacgaatgccaggagttaccaggtctctgccagggtggaaactgcatcaacacttttgggagcttccagtgtgagtgcccacaaggctactacctcagcgaggatacccgcatctgtgaagatattgatgagtgttttgcacatcctggtgtgtgtgggcctgggacctgctataacaccctgggaaattacacctgcatttgcccacctgagtacatgcaggtcaatggaggccacaactgcatggacatgagaaaaagcttttgctaccgaagctataatggaaccacttgtgagaatgagttgcctttcaatgtgacaaaaaggatgtgctgctgcacatataatgtgggcaaagcctggaacaaaccttgtgaaccatgcccaactccaggaacagctgactttaaaaccatatgtggaaatattcctggattcacctttgacattcacacaggaaaagctgttgacattgatgaatgtaaagagattccaggcatttgtgcaaatggtgtgtgcattaaccagattggcagtttccgytgtgaatgccctacaggattcagttacaatgacctgctgttggtttgtgaagatatagatgagtgcagcaatggtgataatctctgccagcggaatgcagactgcatcaatagtcctggtagttaccgctgtgaatgtgccgcgggtttcaaactttcacccaatggggcctgtgtagatcgcaatgaatgtttagaaattcctaacgtttgcagtcatggcttgtgtgttgatctgcaaggaagttaccagtgcatctgccacaatggctttaaggcttctcaggaccagaccatgtgcatggatgttgatgagtgcgagcggcayccatgtggaaatggaacttgtaaaaacaccgttggatcctataactgtctgtgctacccagggtttgaactcactcataataatgattgcctggacatagatgagtgcagttccttttttggtcaggtgtgcagaaatggacgttgttttaatgaaattggttctttcaagtgtctatgtaacgaaggttatgaacttaccccagatggcaaaaactgtatagacactaatgagtgtgtcgcccttcccggctcttgctctcctggtacctgtcagaatttggagggatccttcagatgcatctgtcccccagggtatgaagtaaaaagcgagaactgcattgatataaatgaatgtgatgaagatcccaacatttgtctttttggttcctgtactaatactccagggggcttccagtgcctctgccccsctggctttgtactatctgataatggacggagatgctttgatactcgccagagcttctgcttcacaaattttgaaaatggaaagtgttctgtacccaaagctttcaacaccacaaaagcaaaatgctgctgtagtaagatgccaggagagggctggggggacccctgtgagctgtgccccaaagacgatgaagttgcatttcaggatttgtgtccatatggccatggaactgtccctagtcttcatgatacacgtgaagatgtcaatgagtgtcttgagagcccaggcatttgttcaaatggtcaatgtatcaacaccgacggatcttttcgctgtgaatgtccaatgggctacaaccttgaytacactggagtacgctgtgtggatactgatgagtgttcaatcggcaatccgtgtggaaatggtacatgcaccaatgttattgggagttttgaatgcaattgcaatgaaggctytgagccagggcccatgatgaattgtgaagatatcaacgaatgtgcccagaacccactgctgtgtgctttccgctgcatgaacacttttgggtcctatgaatgcaygtgcccgattggctatgccctcagggaagatcaaaagatgtgcaaagatctggatgaatgtgctgaagggttacacgactgtgaatctaggggcatgrtgtgtaagaatctaatcggcaccttcatgtgcatctgccctcctggaatggcccgaaggcccgatggagaaggctgtgtagatgaaaatgaatgcaggaccaagccaggaatctgtgaaaatggacgttgtgttaacattattggaagctatagatgtgagtgtaatgaaggattccagtcaagttcttcaggcactgaatgccttgacaatcgacagggtctctgctttgcagaggtactgcagacaatatgtcaaatggcatccagyagtcgcaatctcgtcactaagtcagaatgctgctgtgatggtgggcgaggctggggccaccagtgcgagctttgcccacttmctggaactgcccaktacaaaaagatatgtcctcatggcccaggatatacaactgatggaagagatattgatgaatgtaaggtaatgccaaacctctgcaccaatggtcagtgcatcaataccatgggctcattccgatgcttctgcaaggttggctacaccacagacatcagtggaacctcttgtatagaccttgatgaatgctcccagtccccgaaaccatgcaactacatctgcaagaacactgaggggagttatcagtgttcatgtccgagggggtatgtcctgcaagaggatggaaagacatgcaargaccttgatgaatgtcaaacaaagcagcataactgccagttcctctgtgtcaacaccctgggggggtttacctgtaaatgtccacctggtttcacacagcatcacactgcttgtatcgacaacaacgaatgtgggtctcaaccttygctttgtggagcaaagggaatctgtcaaaacactccaggcagtttcagctgtgaatgccaaagagggttctctcttgatgccacyggactgaactgtgaagatgttgatgaatgtgatgggaaccacaggtgccaacacggctgccagaacatcctgggtggctacagatgtggctgcccccaaggctacatccagcactaccagtggaatcagtgtgtcgatgagaatgaatgctccaatcccaatgcctgtggctctgcttcctgctacaacaccctggggagttacaagtgcgcctgcccctcggggttctccttcgaccagttctccagtgcctgccacgacgtgaatgagtgctcgtcctccaagaacccctgcaattacggctgctctaacacggaggggggctacctytgtggctgcccccctgggtattacagagtgggacaaggccactgtgtctcaggaatgggatttaacaaggggcagtacctgtcactggatacagaggtcgatgaggaaaatgctctgtccccagaagcatgctacgagtgcaaaatcaacggctatyctaagaaagacagcaggcagaagagaagtattcatgaacctgatcccactgctgttgaacagatcagcctagagagtgtcgacatggacagccccgtcaacatgaagttcaacctctcccacctcggctctaaggagcacatcctggaactaaggcccgccatccagcccctcaacaaccacatccgttatgtcatctctcaagggaacgatgacagcgtcttccgcatccaccaaaggaatgggctcagctacttgcacacggccaagaagaagctcatgcccggcacatacacactggaaatcactagcatccctctctacaagaagaaggagcttaagaaactggaagagagcaatgaggatgactacctcctaggggagcttggggaggctctcagaatgaggctgcagattcagctstattaaccsttcacagacttgggcccaggctcaaatcctagcacagccagtctgcagaagcatttgaaaagtcaaggactaattttaaagaggaaaaataataataactcttgtttctttcctcyctgtcttagactttgaatgttgaccctcacagggagggataatttagactctggtatggccaaagatttgagcacaaaggcaaccgtggttactgtattttttatataacttcattttaaaatatattaaaagaaacctaaatgttcaagatatcagcatatggcactaaatgcacaaaaataatgtgagctttttttttttttcctgttagcagtctgtaacactttgggtattttgctatagttgctaattaaaaaaatatagatgtttatttatttttaatgcagtaatatatggagaaatgaacaaactatgtaaacaaaaagggaaactcacttgtttttctttagatttataaatttgagctattttttttagaggtgctttttaaaaatccaatagatacaagagatgtttcctttggttttctgccagtcatccagctgatacacacctgatgattttaaagaaagccacacagagctgaatgggcagtgtaatcaataatttaaaaracatgaatgtcattagatcctttataacgtagatcgaagccaaagcagctcatttgtgacaacatttcatatcaccagacacaccaggcaacagaagwtgaagcacaaccactgtagcaaaataccttgactgcttgtgagaccattagcattgcaggccaaaccgtactgtatttccttctcataacctcaaggaaccatatgtgctacccacaacacctcattcttacccagggtgcgctgcgtcctcatggtactgtaggcagctgaagaaccgccgttcccttgaaagggaacacctggcattctgtggtgtttcgtgctgtcttaaataatggtgcatttattatgttcaagttatttcaggattgccatatgtgcaaacaaatcatgcaatgcagccaaggaatatatgttgttgttgttgttttaaacccattttttttttagaattttcattaatactgtagttatacaccatatgcctcattttatcatagcctattgtgtatgaaagatgtttgtacaatgaattgatgtttagtttgctttagtcatttaaaaagatattgtaccaggatgtgctattaagagcacgtatccattattcttctcaacccaagaacctgtttcctggaccartgaccaaacctcatatgtgaaatggccaaagcacatgcaggctcctggttgttcctctcaaacctgygctgaccaaagattagtaaccagttatacccagtattttgaggttttattgtttttttaataactaaaaaraaaaaaggaacagtgtaaatttgtaatcaagagtttgtgaggaaaaacttatggtttttggttttgtttgtttttgtaggtctgtgtatcaaatatgacacttttcttgcaataaagcttattttggggta

SEQ ID NO: 139 - DNA, 8828 bp, Homo sapiens
ggcagttagggcaactggaaggctgggagctgaaatcacctgaagtctcattcactcacatgtctgatggttgatattgtctatcagattcttttttgtctccttctctgcaagaggctggcaccagatcacctcctgagtagagcagacattccaaaggatgtcctgccaacaataatggaaagctggatacaactgaatatgtaaaatgatgttaatgaagaattgaagagcactgtatctagttttctgctctccccttattttgaatcaaacccaggcatcctatcatttcatctataaagactttagttcctaaaagtggaattgctggatcaaagggtaaaggcataggcaattytagagcatttagatttaatgtgatggacaggaatgaaccatgaagccacgagtgtttgatttttaaattgtgatattccactaaatgagaaatgaccaggacttcacagagatttcatgaaaggagggccacaaaggaagaacccagagcaggccggtgagaggcactctaagagctttccaatatccgtcttcggagcgcacgggaatccgccgagctctgcgtgcaggcccttttttcttttgaggttcacattttttgaaattttacgccagggcttttgtaatttcctcccccgcccgctggcggtcctggagtcgctcggggctttaggccggttatgcaacgtgtaccgctcggggctgccggctgcacctccgccgcgcctcgccgctcactgcgctagacccggcgccccgcgtctcgcttcgcgggcagtcagggggccggcgctctgtcgaggtctccagctagagcagggagcccgagcccgagggagtccccggagccgacgaagggcttattagaccctgactcttttctgaggcgcgcagattttgtctttgatcactccctctccgcgggtctacggccgcgcgctttcggcgccggcgatggggagaagacggaggctgtgtctccagctctacttcctgtggctgggctgtgtggtgctctgggcgcagggcacggccggccagcctcagcctcctccgcccaagccgccccggccccagccgccgccgcaacaggttcggtccgctacagcaggctctgaaggcgggtttctagcgcccgagtatcgcgaggagggtgccgcagtggccagccgcgtccgccggcgaggacagcaggacgtgctccgagggcccaacgtgtgcggctccagattccactcctactgctgccctggatggaagacgctccctggaggaaaccagtgcattgtcccgatttgtagaaatagttgtggagatggattttgttcccgtcctaacatgtgtacttgttccagtgggcaaatatcatcaacctgtggatcaaaatcaattcagcagtgcagtgtgagatgcatgaatggtgggacctgtgcagatgaccactgccagtgccagaaaggatatattggaacttattgtggacaacctgtctgtgaaaatggatgtcagaatggtggacgttgcatcggacccaaccgctgtgcttgtgtttatgggttcactggtccacagtgtgaaagagattacaggacaggcccgtgtttcactcaggtcaacaaccagatgtgccaagggcagctgacaggcattgtctgcacgaagactctgtgctgtgccaccattggacgggcgtggggccatccctgtgagatgtgtccagcccagcctcagccctgccgacggggtttcatccccaacatccgcactggagcttgccaagatgttgatgaatgccaggctatcccagggatatgccaaggaggaaactgtatcaatacagtgggctcttttgaatgcagatgccctgctggtcacaaacagagtgaaactactcagaaatgtgaagacattgatgagtgcagcatcattcctgggatatgtgaaactggtgaatgttccaacaccgtgggaagctatttttgtgtttgtccacgtggatatgtaacctcaacagatggctctcgatgcatcgatcagagaacaggcatgtgtttctcgggcctggtgaatggccgctgtgcacaagagctcccggggagaatgacgaaaatgcagtgctgctgtgagcctggccgctgctggggcatcggaaccattcctgaagcctgtcctgtcagaggttctgaggaatatcgcagactttgcatggatggacttccaatgggaggaattccagggagtgctggttccagacctggaggcactgggggaaatggctttgccccaagtggcaatggcaatggctatggcccaggagggacaggcttcatccccatccctggaggcaatggcttttctcctggcgttgggggagccggtgtgggggccgggggacagggacctatcatcactggactaacaattctgaaccagacaatagatatctgtaagcatcatgctaacctttgtttaaatggacgctgtataccaactgtctcaagctaccgatgtgaatgcaacatgggttataagcaggatgcaaatgsagattgtatagatgttgatgaatgcacatcaaatccctgcactaatggagattgtgttaacacacctggttcctattattgtaaatgtcatgctggattccagaggactcctaccaagcaagcatgcattgatattgatgagtgcatccagaatggggttctttgtaaaaacggtcgatgcgtgaacacagatggaagtttccagtgcatttgcaatgccggctttgaattaactacagatggaaaaaactgtgttgatcatgatgaatgtacaactaccaacatgtgtttgaatggaatgtgcatcaatgaagatggcagcttcaagtgcatctgcaaaccaggatttgtcttggctccaaatgggcgttactgtactgatgttgatgaatgccagaccccaggaatctgcatgaatgggcactgcatcaacagtgaagggtccttccgctgtgactgtcccccaggcctggctgtgggcatggatggacgtgtgtgtgttgatactcacatgcgcagtacctgctatggaggaatcaagaaaggagtgtgtgtgcgtcctttccccggtgcagtgaccaagtccgaatgctgctgtgccaatccagactatggttttggagaaccctgccagccatgccctgcaaaaaattcagctgaattccacggcctttgtagtagtggagtaggtatcactgtggatggaagagatatcaatgaatgtgctttggatcctgatatatgtgccaatgggatttgtgaaaacttacgtggtagttaccgttgtaattgcaacagtggctatgaaccagatgcctctggaagaaactgtattgacattgatgaatgtttagtaaacagactgctttgtgataacggattgtgccgaaacacgccaggaagttacagctgtacgtgcccaccagggtatgtgttcaggactgagacagagacctgtgaagatataaatgaatgtgaaagcaacccatgtgtcaatggggcctgcagaaacaaccttggatctttcaattgtgaatgttcgcccggcagcaaactcagctccacaggattgatctgtattgacagcctgaaggggacctgttggctcaacatccaggacagccgctgtgaggtgaatattaatggagccactctgaaatctgaatgctgtgccaccctcggagcygcctgggggagcccctgtgagcggtgtgaactagatacagcttgcccaagagggcttgccaggattaaaggtgttacgtgtgaagatgttaatgagtgtgaggtgttccctggcrtttgtccaaatggacgctgtgtcaacagtaagggatcttttcattgcgagtgccctgaaggccttacgttggatgggactggccgtgtatgtttggatattcgcatggagcagtgttacttraagtgggatgaagatgaatgcatccaccccgttcctggaaagttccgcatggatgcctgctgctgtgctgtcggggcggcttggggcaccgagtgtgaggagtgccccaaacctggcaccaaggaataygagacgctgtgcccccgcgggkctgrctttgctaaccgaggggatgttcttactgggcggccattttacaaagacatcaatgaatgcaaagcatttcctgggatgtgcacttatgggaagtgcagaaatacaaycggaagcttcaaatgccgttgcaatagtggctttgctctagacatggaggaaagaaactgcacggacatcgacgagtgcaggatttctcctgacctctgtggcagtggaatctgcgtcaatacaccgggcagctttgagtgcgagtkcttcgaaggctatgaaagtggcttcatgatgatgaagaactgcatggacattgacgaatgtgaacgtaaccctctcctttgtaggggtggcacctgtgtgaacactgagkgcagctttcagtgtgactgcccactgggacacgagctgtcaccatcccgtgaggactgkgtggatattaatgaatgctccctgagtgacaatctctgcagaaatggaaaatgtgtgaacatgattggaacctatcagtgctcttgcaatcctggatatcaggctacgccagaccgccagggcygtacagatattgatgaatgtatgataatgaacggaggctgtgayacccagtgsacaaattcagagggaagctacgaatgcagcygcagtgagggttatgccctgatgccagatgggagatcgtgtgcagacattgatgaatgtgaaaacaatcctgatatctgtgatggcggccagtgtaccaacattcctggagagtatcgctgcctctgctatgatggcttcatggcttccatggacatgaaaacatgcattgatgtcaatgaatgtgacctaaattcaaatatctgcatgtttggggaatgtgagaacacaaagggatccttcatttgccactgtcagctgggttactcagtgaagaaggggaccacaggatgtacmgatgtggatgagtgtgaaattggtgctcataactgcgacatgcatgcctcatgtctgaatatcccaggaagcttcaagtgtagctgcagagaaggctggattggaaayggcatcaagtgtattgatctggacgaatgttctaatggaacccaccagtgtagcatcaatgctcagtgtgtaaataccccgggctcatamcgctstgcctgctccgaaggtttcactggtgatggctttacctgctcagatgttgatgagtgtgcagaaaacataaacctctgtgagaacggacagtgccttaatgtcccgggtgcatatcgctgcgagtgtgagatgggcttcactccagcctcagacagcagatcctgccaagatattgatgaatgctccttccawaacatttgtgtctttggaacatgtaataacctgcctggaatgtttcattgcatctgcgatgatggttatgaattggacagaacaggagggaactgtacagatattgatgagtgtgcagatcctataaactgtgtcaatggcctatgtgtcaacacgcctggtcgctatgagtgtaactgcccacccgattttcagttgaacccaactggtgtgggttgtgttgacaaccgtgtgggcaactgctacctgaagtttggacctcgaggagatgggagtctgtcttgcaacaccgagatcggggtgggcgtcagtcgctcttcatgctgctgctctctgggaaaggcctggggaaacccctgtgagacatgcccccctgtcaatagcactgaatattacaccctgtgtcccggaggtgaaggcttcagacctaaccccatcacaatcattttagaagacattgacgaatgccaggagttaccaggtctctgccagggtggaaactgcatcaacacttttgggagcttccagtgtgagtgcccacaaggctactacctcagcgaggatacccgcatctgtgaagatattgatgagtgttttgcacatcctggtgtgtgtgggcctgggacctgctataacaccctgggaaattacacctgcatttgcccacctgagtacatgcaggtcaatggaggccacaactgcatggacatgagaaaaagcttttgctaccgaagctataatggaaccacttgtgagaatgagttgcctttcaatgtgacaaaaaggatgtgctgctgcacatataatgtgggcaaagcctggaacaaaccttgtgaaccatgcccaactccaggaacagctgactttaaaaccatatgtggaaatattcctggattcacctttgacattcacacaggaaaagctgttgacattgatgaatgtaaagagattccaggcatttgtgcaaatggtgtgtgcattaaccagattggcagtttccgytgtgaatgccctacaggattcagttacaatgacctgctgttggtttgtgaagatatagatgagtgcagcaatggtgataatctctgccagcggaatgcagactgcatcaatagtcctggtagttaccgctgtgaatgtgccgcgggtttcaaactttcacccaatggggcctgtgtagatcgcaatgaatgtttagaaattcctaacgtttgcagtcatggcttgtgtgttgatctgcaaggaagttaccagtgcatctgccacaatggctttaaggcttctcaggaccagaccatgtgcatggatgttgatgagtgcgagcggcayccatgtggaaatggaacttgtaaaaacaccgttggatcctataactgtctgtgctacccagggtttgaactcactcataataatgattgcctggacatagatgagtgcagttccttttttggtcaggtgtgcagaaatggacgttgttttaatgaaattggttctttcaagtgtctatgtaacgaaggttatgaacttaccccagatggcaaaaactgtatagacactaatgagtgtgtcgcccttcccggctcttgctctcctggtacctgtcagaatttggagggatccttcagatgcatctgtcccccagggtatgaagtaaaaagcgagaactgcattgatataaatgaatgtgatgaagatcccaacatttgtctttttggttcctgtactaatactccagggggcttccagtgcctctgccccsctggctttgtactatctgataatggacggagatgctttgatactcgccagagcttctgcttcacaaattttgaaaatggaaagtgttctgtacccaaagctttcaacaccacaaaagcaaaatgctgctgtagtaagatgccaggagagggctggggggacccctgtgagctgtgccccaaagacgatgaagttgcatttcaggatttgtgtccatatggccatggaactgtccctagtcttcatgatacacgtgaagatgtcaatgagtgtcttgagagcccaggcatttgttcaaatggtcaatgtatcaacaccgacggatcttttcgctgtgaatgtccaatgggctacaaccttgaytacactggagtacgctgtgtggatactgatgagtgttcaatcggcaatccgtgtggaaatggtacatgcaccaatgttattgggagttttgaatgcaattgcaatgaaggctytgagccagggcccatgatgaattgtgaagatatcaacgaatgtgcccagaacccactgctgtgtgctttccgctgcatgaacacttttgggtcctatgaatgcaygtgcccgattggctatgccctcagggaagatcaaaagatgtgcaaagatctggatgaatgtgctgaagggttacacgactgtgaatctaggggcatgrtgtgtaagaatctaatcggcaccttcatgtgcatctgccctcctggaatggcccgaaggcccgatggagaaggctgtgtagatgaaaatgaatgcaggaccaagccaggaatctgtgaaaatggacgttgtgttaacattattggaagctatagatgtgagtgtaatgaaggattccagtcaagttcttcaggcactgaatgccttgacaatcgacagggtctctgctttgcagaggtactgcagacaatatgtcaaatggcatccagyagtcgcaatctcgtcactaagtcagaatgctgctgtgatggtgggcgaggctggggccaccagtgcgagctttgcccacttmctggaactgcccaktacaaaaagatatgtcctcatggcccaggatatacaactgatggaagagatattgatgaatgtaaggtaatgccaaacctctgcaccaatggtcagtgcatcaataccatgggctcattccgatgcttctgcaaggttggctacaccacagacatcagtggaacctcttgtatagaccttgatgaatgctcccagtccccgaaaccatgcaactacatctgcaagaacactgaggggagttatcagtgttcatgtccgagggggtatgtcctgcaagaggatggaaagacatgcaargaccttgatgaatgtcaaacaaagcagcataactgccagttcctctgtgtcaacaccctgggggggtttacctgtaaatgtccacctggtttcacacagcatcacactgcttgtatcgacaacaacgaatgtgggtctcaaccttygctttgtggagcaaagggaatctgtcaaaacactccaggcagtttcagctgtgaatgccaaagagggttctctcttgatgccacyggactgaactgtgaaggttagttgatttg

SEQ ID NO: 140 - DNA, 5839 bp, Homo sapiens
ggcagttagggcaactggaaggctgggagctgaaatcacctgaagtctcattcactcacatgtctgatggttgatattgtctatcagattcttttttgtctccttctctgcaagaggctggcaccagatcacctcctgagtagagcagacattccaaaggatgtcctgccaacaataatggaaagctggatacaactgaatatgtaaaatgatgttaatgaagaattgaagagcactgtatctagttttctgctctccccttattttgaatcaaacccaggcatcctatcatttcatctataaagactttagttcctaaaagtggaattgctggatcaaagggtaaaggcataggcaattytagagcatttagatttaatgtgatggacaggaatgaaccatgaagccacgagtgtttgatttttaaattgtgatattccactaaatgagaaatgaccaggacttcacagagatttcatgaaaggagggccacaaaggaagaacccagagcaggccggtgagaggcactctaagagctttccaatatccgtcttcggagcgcacgggaatccgccgagctctgcgtgcaggcccttttttcttttgaggttcacattttttgaaattttacgccagggcttttgtaatttcctcccccgcccgctggcggtcctggagtcgctcggggctttaggccggttatgcaacgtgtaccgctcggggctgccggctgcacctccgccgcgcctcgccgctcactgcgctagacccggcgccccgcgtctcgcttcgcgggcagtcagggggccggcgctctgtcgaggtctccagctagagcagggagcccgagcccgagggagtccccggagccgacgaagggcttattagaccctgactcttttctgaggcgcgcagattttgtctttgatcactccctctccgcgggtctacggccgcgcgctttcggcgccggcgatggggagaagacggaggctgtgtctccagctctacttcctgtggctgggctgtgtggtgctctgggcgcagggcacggccggccagcctcagcctcctccgcccaagccgccccggccccagccgccgccgcaacaggttcggtccgctacagcaggctctgaaggcgggtttctagcgcccgagtatcgcgaggagggtgccgcagtggccagccgcgtccgccggcgaggacagcaggacgtgctccgagggcccaacgtgtgcggctccagattccactcctactgctgccctggatggaagacgctccctggaggaaaccagtgcattgtcccgatttgtagaaatagttgtggagatggattttgttcccgtcctaacatgtgtacttgttccagtgggcaaatatcatcaacctgtggatcaaaatcaattcagcagtgcagtgtgagatgcatgaatggtgggacctgtgcagatgaccactgccagtgccagaaaggatatattggaacttattgtggacaacctgtctgtgaaaatggatgtcagaatggtggacgttgcatcggacccaaccgctgtgcttgtgtttatgggttcactggtccacagtgtgaaagagattacaggacaggcccgtgtttcactcaggtcaacaaccagatgtgccaagggcagctgacaggcattgtctgcacgaagactctgtgctgtgccaccattggacgggcgtggggccatccctgtgagatgtgtccagcccagcctcagccctgccgacggggtttcatccccaacatccgcactggagcttgccaagatgttgatgaatgccaggctatcccagggatatgccaaggaggaaactgtatcaatacagtgggctcttttgaatgcagatgccctgctggtcacaaacagagtgaaactactcagaaatgtgaagacattgatgagtgcagcatcattcctgggatatgtgaaactggtgaatgttccaacaccgtgggaagctatttttgtgtttgtccacgtggatatgtaacctcaacagatggctctcgatgcatcgatcagagaacaggcatgtgtttctcgggcctggtgaatggccgctgtgcacaagagctcccggggagaatgacgaaaatgcagtgctgctgtgagcctggccgctgctggggcatcggaaccattcctgaagcctgtcctgtcagaggttctgaggaatatcgcagactttgcatggatggacttccaatgggaggaattccagggagtgctggttccagacctggaggcactgggggaaatggctttgccccaagtggcaatggcaatggctatggcccaggagggacaggcttcatccccatccctggaggcaatggcttttctcctggcgttgggggagccggtgtgggggccgggggacagggacctatcatcactggactaacaattctgaaccagacaatagatatctgtaagcatcatgctaacctttgtttaaatggacgctgtataccaactgtctcaagctaccgatgtgaatgcaacatgggttataagcaggatgcaaatgsagattgtatagatgttgatgaatgcacatcaaatccctgcactaatggagattgtgttaacacacctggttcctattattgtaaatgtcatgctggattccagaggactcctaccaagcaagcatgcattgatattgatgagtgcatccagaatggggttctttgtaaaaacggtcgatgcgtgaacacagatggaagtttccagtgcatttgcaatgccggctttgaattaactacagatggaaaaaactgtgttgatcatgatgaatgtacaactaccaacatgtgtttgaatggaatgtgcatcaatgaagatggcagcttcaagtgcatctgcaaaccaggatttgtcttggctccaaatgggcgttactgtactgatgttgatgaatgccagaccccaggaatctgcatgaatgggcactgcatcaacagtgaagggtccttccgctgtgactgtcccccaggcctggctgtgggcatggatggacgtgtgtgtgttgatactcacatgcgcagtacctgctatggaggaatcaagaaaggagtgtgtgtgcgtcctttccccggtgcagtgaccaagtccgaatgctgctgtgccaatccagactatggttttggagaaccctgccagccatgccctgcaaaaaattcagctgaattccacggcctttgtagtagtggagtaggtatcactgtggatggaagagatatcaatgaatgtgctttggatcctgatatatgtgccaatgggatttgtgaaaacttacgtggtagttaccgttgtaattgcaacagtggctatgaaccagatgcctctggaagaaactgtattgacattgatgaatgtttagtaaacagactgctttgtgataacggattgtgccgaaacacgccaggaagttacagctgtacgtgcccaccagggtatgtgttcaggactgagacagagacctgtgaagatataaatgaatgtgaaagcaacccatgtgtcaatggggcctgcagaaacaaccttggatctttcaattgtgaatgttcgcccggcagcaaactcagctccacaggattgatctgtattgacagcctgaaggggacctgttggctcaacatccaggacagccgctgtgaggtgaatattaatggagccactctgaaatctgaatgctgtgccaccctcggagcygcctgggggagcccctgtgagcggtgtgaactagatacagcttgcccaagagggcttgccaggattaaaggtgttacgtgtgaagatgttaatgagtgtgaggtgttccctggcrtttgtccaaatggacgctgtgtcaacagtaagggatcttttcattgcgagtgccctgaaggccttacgttggatgggactggccgtgtatgtttggatattcgcatggagcagtgttacttraagtgggatgaagatgaatgcatccaccccgttcctggaaagttccgcatggatgcctgctgctgtgctgtcggggcggcttggggcaccgagtgtgaggagtgccccaaacctggcaccaaggaataygagacgctgtgcccccgcgggkctgrctttgctaaccgaggggatgttcttactgggcggccattttacaaagacatcaatgaatgcaaagcatttcctgggatgtgcacttatgggaagtgcagaaatacaaycggaagcttcaaatgccgttgcaatagtggctttgctctagacatggaggaaagaaactgcacggacatcgacgagtgcaggatttctcctgacctctgtggcagtggaatctgcgtcaatacaccgggcagctttgagtgcgagtkcttcgaaggctatgaaagtggcttcatgatgatgaagaactgcatggacattgacgaatgtgaacgtaaccctctcctttgtaggggtggcacctgtgtgaacactgagkgcagctttcagtgtgactgcccactgggacacgagctgtcaccatcccgtgaggactgkgtggatattaatgaatgctccctgagtgacaatctctgcagaaatggaaaatgtgtgaacatgattggaacctatcagtgctcttgcaatcctggatatcaggctacgccagaccgccagggcygtacagatattgatgaatgtatgataatgaacggaggctgtgayacccagtgsacaaattcagagggaagctacgaatgcagcygcagtgagggttatgccctgatgccagatgggagatcgtgtgcagacattgatgaatgtgaaaacaatcctgatatctgtgatggcggccagtgtaccaacattcctggagagtatcgctgcctctgctatgatggcttcatggcttccatggacatgaaaacatgcattgatgtcaatgaatgtgacctaaattcaaatatctgcatgtttggggaatgtgagaacacaaagggatccttcatttgccactgtcagctgggttactcagtgaagaaggggaccacaggatgtacmgatgtggatgagtgtgaaattggtgctcataactgcgacatgcatgcctcatgtctgaatatcccaggaagcttcaagtgtagctgcagagaaggctggattggaaayggcatcaagtgtattgatctggacgaatgttctaatggaacccaccagtgtagcatcaatgctcagtgtgtaaataccccgggctcatamcgctstgcctgctccgaaggtttcactggtgatggctttacctgctcagatgttgatgagtgtgcagaaaacataaacctctgtgagaacggacagtgccttaatgtcccgggtgcatatcgctgcgagtgtgagatgggcttcactccagcctcagacagcagatcctgccaaggtgggtcaccaggattccaactcattttcaagttggatcaaccacagtaaatgaaaccacaacaagggctggaacaagctccacctggaagcagaatacatagcacatgctgcactataaaagtcattcgtttaagcgtggattattttgccgaatgaataatgatgatggcggctttcatctcttatgaagttttccyggccaagagccagtagttggaagtttggatcattcttttttcttttttaaccatttcttctcttctttctcttttttatcactaaatkaatgacatgtggagaaactattcagcttttaaagtatgctccattacttgtctcaactaccactatttattgtgtttatcaaaatcataaaaagctcatttttggc

SEQ ID NO: 141 - DNA, 10724 bp, Homo sapiens
ctttccaatatccgtcttcggagcgcacgggaatccgccgagctctgcgtgcaggcccttttttcttttgaggttcacattttttgaaattttacgccagggcttttgtaatttcctcccccgcccgctggcggtcctggagtcgctcggggctttaggccggttatgcaacgtgtaccgctcggggctgccggctgcacctccgccgcgcctcgccgctcactgcgctagacccggcgccccgcgtctcgcttcgcgggcagtcagggggccggcgctctgtcgaggtctccagctagagcagggagcccgagcccgagggagtccccggagccgacgaagggcttattagaccctgactcttttctgaggcgcgcagattttgtctttgatcactccctctccgcgggtctacggccgcgcgctttcggcgccggcgatggggagaagacggaggctgtgtctccagctctacttcctgtggctgggctgtgtggtgctctgggcgcagggcacggccggccagcctcagcctcctccgcccaagccgccccggccccagccgccgccgcaacaggttcggtccgctacagcaggctctgaaggcgggtttctagcgcccgagtatcgcgaggagggtgccgcagtggccagccgcgtccgccggcgaggacagcaggacgtgctccgagggcccaacgtgtgcggctccagattccactcctactgctgccctggatggaagacgctccctggaggaaaccagtgcattgtcccgatttgtagaaatagttgtggagatggattttgttcccgtcctaacatgtgtacttgttccagtgggcaaatatcatcaacctgtggatcaaaatcaattcagcagtgcagtgtgagatgcatgaatggtgggacctgtgcagatgaccactgccagtgccagaaaggatatattggaacttattgtggacaacctgtctgtgaaaatggatgtcagaatggtggacgttgcatcggacccaaccgctgtgcttgtgtttatgggttcactggtccacagtgtgaaagagattacaggacaggcccgtgtttcactcaggtcaacaaccagatgtgccaagggcagctgacaggcattgtctgcacgaagactctgtgctgtgccaccattggacgggcgtggggccatccctgtgagatgtgtccagcccagcctcagccctgccgacggggtttcatccccaacatccgcactggagcttgccaagatgttgatgaatgccaggctatcccagggatatgccaaggaggaaactgtatcaatacagtgggctcttttgaatgcagatgccctgctggtcacaaacagagtgaaactactcagaaatgtgaagacattgatgagtgcagcatcattcctgggatatgtgaaactggtgaatgttccaacaccgtgggaagctatttttgtgtttgtccacgtggatatgtaacctcaacagatggctctcgatgcatcgatcagagaacaggcatgtgtttctcgggcctggtgaatggccgctgtgcacaagagctcccggggagaatgacgaaaatgcagtgctgctgtgagcctggccgctgctggggcatcggaaccattcctgaagcctgtcctgtcagaggttctgaggaatatcgcagactttgcatggatggacttccaatgggaggaattccagggagtgctggttccagacctggaggcactgggggaaatggctttgccccaagtggcaatggcaatggctatggcccaggagggacaggcttcatccccatccctggaggcaatggcttttctcctggcgttgggggagccggtgtgggggccgggggacagggacctatcatcactggactaacaattctgaaccagacaatagatatctgtaagcatcatgctaacctttgtttaaatggacgctgtataccaactgtctcaagctaccgatgtgaatgcaacatgggttataagcaggatgcaaatgsagattgtatagatgttgatgaatgcacatcaaatccctgcactaatggagattgtgttaacacacctggttcctattattgtaaatgtcatgctggattccagaggactcctaccaagcaagcatgcattgatattgatgagtgcatccagaatggggttctttgtaaaaacggtcgatgcgtgaacacagatggaagtttccagtgcatttgcaatgccggctttgaattaactacagatggaaaaaactgtgttgatcatgatgaatgtacaactaccaacatgtgtttgaatggaatgtgcatcaatgaagatggcagcttcaagtgcatctgcaaaccaggatttgtcttggctccaaatgggcgttactgtactgatgttgatgaatgccagaccccaggaatctgcatgaatgggcactgcatcaacagtgaagggtccttccgctgtgactgtcccccaggcctggctgtgggcatggatggacgtgtgtgtgttgatactcacatgcgcagtacctgctatggaggaatcaagaaaggagtgtgtgtgcgtcctttccccggtgcagtgaccaagtccgaatgctgctgtgccaatccagactatggttttggagaaccctgccagccatgccctgcaaaaaattcagctgaattccacggcctttgtagtagtggagtaggtatcactgtggatggaagagatatcaatgaatgtgctttggatcctgatatatgtgccaatgggatttgtgaaaacttacgtggtagttaccgttgtaattgcaacagtggctatgaaccagatgcctctggaagaaactgtattgacattgatgaatgtttagtaaacagactgctttgtgataacggattgtgccgaaacacgccaggaagttacagctgtacgtgcccaccagggtatgtgttcaggactgagacagagacctgtgaagatataaatgaatgtgaaagcaacccatgtgtcaatggggcctgcagaaacaaccttggatctttcaattgtgaatgttcgcccggcagcaaactcagctccacaggattgatctgtattgacagcctgaaggggacctgttggctcaacatccaggacagccgctgtgaggtgaatattaatggagccactctgaaatctgaatgctgtgccaccctcggagcygcctgggggagcccctgtgagcggtgtgaactagatacagcttgcccaagagggcttgccaggattaaaggtgttacgtgtgaagatgttaatgagtgtgaggtgttccctggcrtttgtccaaatggacgctgtgtcaacagtaagggatcttttcattgcgagtgccctgaaggccttacgttggatgggactggccgtgtatgtttggatattcgcatggagcagtgttacttraagtgggatgaagatgaatgcatccaccccgttcctggaaagttccgcatggatgcctgctgctgtgctgtcggggcggcttggggcaccgagtgtgaggagtgccccaaacctggcaccaaggaataygagacgctgtgcccccgcgggkctgrctttgctaaccgaggggatgttcttactgggcggccattttacaaagacatcaatgaatgcaaagcatttcctgggatgtgcacttatgggaagtgcagaaatacaaycggaagcttcaaatgccgttgcaatagtggctttgctctagacatggaggaaagaaactgcacggacatcgacgagtgcaggatttctcctgacctctgtggcagtggaatctgcgtcaatacaccgggcagctttgagtgcgagtkcttcgaaggctatgaaagtggcttcatgatgatgaagaactgcatggacattgacgaatgtgaacgtaaccctctcctttgtaggggtggcacctgtgtgaacactgagkgcagctttcagtgtgactgcccactgggacacgagctgtcaccatcccgtgaggactgkgtggatattaatgaatgctccctgagtgacaatctctgcagaaatggaaaatgtgtgaacatgattggaacctatcagtgctcttgcaatcctggatatcaggctacgccagaccgccagggcygtacagatattgatgaatgtatgataatgaacggaggctgtgayacccagtgsacaaattcagagggaagctacgaatgcagcygcagtgagggttatgccctgatgccagatgggagatcgtgtgcagacattgatgaatgtgaaaacaatcctgatatctgtgatggcggccagtgtaccaacattcctggagagtatcgctgcctctgctatgatggcttcatggcttccatggacatgaaaacatgcattgatgtcaatgaatgtgacctaaattcaaatatctgcatgtttggggaatgtgagaacacaaagggatccttcatttgccactgtcagctgggttactcagtgaagaaggggaccacaggatgtacmgatgtggatgagtgtgaaattggtgctcataactgcgacatgcatgcctcatgtctgaatatcccaggaagcttcaagtgtagctgcagagaaggctggattggaaayggcatcaagtgtattgatctggacgaatgttctaatggaacccaccagtgtagcatcaatgctcagtgtgtaaataccccgggctcatamcgctstgcctgctccgaaggtttcactggtgatggctttacctgctcagatgttgatgagtgtgcagaaaacataaacctctgtgagaacggacagtgccttaatgtcccgggtgcatatcgctgcgagtgtgagatgggcttcactccagcctcagacagcagatcctgccaagatattgatgaatgctccttccawaacatttgtgtctttggaacatgtaataacctgcctggaatgtttcattgcatctgcgatgatggttatgaattggacagaacaggagggaactgtacagatattgatgagtgtgcagatcctataaactgtgtcaatggcctatgtgtcaacacgcctggtcgctatgagtgtaactgcccacccgattttcagttgaacccaactggtgtgggttgtgttgacaaccgtgtgggcaactgctacctgaagtttggacctcgaggagatgggagtctgtcttgcaacaccgagatcggggtgggcgtcagtcgctcttcatgctgctgctctctgggaaaggcctggggaaacccctgtgagacatgcccccctgtcaatagcactgaatattacaccctgtgtcccggaggtgaaggcttcagacctaaccccatcacaatcattttagaagacattgacgaatgccaggagttaccaggtctctgccagggtggaaactgcatcaacacttttgggagcttccagtgtgagtgcccacaaggctactacctcagcgaggatacccgcatctgtgaagatattgatgagtgttttgcacatcctggtgtgtgtgggcctgggacctgctataacaccctgggaaattacacctgcatttgcccacctgagtacatgcaggtcaatggaggccacaactgcatggacatgagaaaaagcttttgctaccgaagctataatggaaccacttgtgagaatgagttgcctttcaatgtgacaaaaaggatgtgctgctgcacatataatgtgggcaaagcctggaacaaaccttgtgaaccatgcccaactccaggaacagctgactttaaaaccatatgtggaaatattcctggattcacctttgacattcacacaggaaaagctgttgacattgatgaatgtaaagagattccaggcatttgtgcaaatggtgtgtgcattaaccagattggcagtttccgytgtgaatgccctacaggattcagttacaatgacctgctgttggtttgtgaagatatagatgagtgcagcaatggtgataatctctgccagcggaatgcagactgcatcaatagtcctggtagttaccgctgtgaatgtgccgcgggtttcaaactttcacccaatggggcctgtgtagatcgcaatgaatgtttagaaattcctaacgtttgcagtcatggcttgtgtgttgatctgcaaggaagttaccagtgcatctgccacaatggctttaaggcttctcaggaccagaccatgtgcatggatgttgatgagtgcgagcggcayccatgtggaaatggaacttgtaaaaacaccgttggatcctataactgtctgtgctacccagggtttgaactcactcataataatgattgcctggacatagatgagtgcagttccttttttggtcaggtgtgcagaaatggacgttgttttaatgaaattggttctttcaagtgtctatgtaacgaaggttatgaacttaccccagatggcaaaaactgtatagacactaatgagtgtgtcgcccttcccggctcttgctctcctggtacctgtcagaatttggagggatccttcagatgcatctgtcccccagggtatgaagtaaaaagcgagaactgcattgatataaatgaatgtgatgaagatcccaacatttgtctttttggttcctgtactaatactccagggggcttccagtgcctctgccccsctggctttgtactatctgataatggacggagatgctttgatactcgccagagcttctgcttcacaaattttgaaaatggaaagtgttctgtacccaaagctttcaacaccacaaaagcaaaatgctgctgtagtaagatgccaggagagggctggggggacccctgtgagctgtgccccaaagacgatgaagttgcatttcaggatttgtgtccatatggccatggaactgtccctagtcttcatgatacacgtgaagatgtcaatgagtgtcttgagagcccaggcatttgttcaaatggtcaatgtatcaacaccgacggatcttttcgctgtgaatgtccaatgggctacaaccttgaytacactggagtacgctgtgtggatactgatgagtgttcaatcggcaatccgtgtggaaatggtacatgcaccaatgttattgggagttttgaatgcaattgcaatgaaggctytgagccagggcccatgatgaattgtgaagatatcaacgaatgtgcccagaacccactgctgtgtgctttccgctgcatgaacacttttgggtcctatgaatgcaygtgcccgattggctatgccctcagggaagatcaaaagatgtgcaaagatctggatgaatgtgctgaagggttacacgactgtgaatctaggggcatgrtgtgtaagaatctaatcggcaccttcatgtgcatctgccctcctggaatggcccgaaggcccgatggagaaggctgtgtagatgaaaatgaatgcaggaccaagccaggaatctgtgaaaatggacgttgtgttaacattattggaagctatagatgtgagtgtaatgaaggattccagtcaagttcttcaggcactgaatgccttgacaatcgacagggtctctgctttgcagaggtactgcagacaatatgtcaaatggcatccagyagtcgcaatctcgtcactaagtcagaatgctgctgtgatggtgggcgaggctggggccaccagtgcgagctttgcccacttmctggaactgcccaktacaaaaagatatgtcctcatggcccaggatatacaactgatggaagagatattgatgaatgtaaggtaatgccaaacctctgcaccaatggtcagtgcatcaataccatgggctcattccgatgcttctgcaaggttggctacaccacagacatcagtggaacctcttgtatagaccttgatgaatgctcccagtccccgaaaccatgcaactacatctgcaagaacactgaggggagttatcagtgttcatgtccgagggggtatgtcctgcaagaggatggaaagacatgcaargaccttgatgaatgtcaaacaaagcagcataactgccagttcctctgtgtcaacaccctgggggggtttacctgtaaatgtccacctggtttcacacagcatcacactgcttgtatcgacaacaacgaatgtgggtctcaaccttygctttgtggagcaaagggaatctgtcaaaacactccaggcagtttcagctgtgaatgccaaagagggttctctcttgatgccacyggactgaactgtgaagatgttgatgaatgtgatgggaaccacaggtgccaacacggctgccagaacatcctgggtggctacagatgtggctgcccccaaggctacatccagcactaccagtggaatcagtgtgtcgatgagaatgaatgctccaatcccaatgcctgtggctctgcttcctgctacaacaccctggggagttacaagtgcgcctgcccctcggggttctccttcgaccagttctccagtgcctgccacgacgtgaatgagtgctcgtcctccaagaacccctgcaattacggctgctctaacacggaggggggctacctytgtggctgcccccctgggtattacagagtgggacaaggccactgtgtctcaggaatgggatttaacaaggggcagtacctgtcactggatacagaggtcgatgaggaaaatgctctgtccccagaagcatgctacgagtgcaaaatcaacggctatyctaagaaagacagcaggcagaagagaagtattcatgaacctgatcccactgctgttgaacagatcagcctagagagtgtcgacatggacagccccgtcaacatgaagttcaacctctcccacctcggctctaaggagcacatcctggaactaaggcccgccatccagcccctcaacaaccacatccgttatgtcatctctcaagggaacgatgacagcgtcttccgcatccaccaaaggaatgggctcagctacttgcacacggccaagaagaagctcatgcccggcacatacacactggaaatcactagcatccctctctacaagaagaaggagcttaagaaactggaagagagcaatgaggatgactacctcctaggggagcttggggaggctctcagaatgaggctgcagattcagctstattaaccsttcacagacttgggcccaggctcaaatcctagcacagccagtctgcagaagcatttgaaaagtcaaggactaattttaaagaggaaaaataataataactcttgtttctttcctcyctgtcttagactttgaatgttgaccctcacagggagggataatttagactctggtatggccaaagatttgagcacaaaggcaaccgtggttactgtattttttatataacttcattttaaaatatattaaaagaaacctaaatgttcaagatatcagcatatggcactaaatgcacaaaaataatgtgagctttttttttttttcctgttagcagtctgtaacactttgggtattttgctatagttgctaattaaaaaaatatagatgtttatttatttttaatgcagtaatatatggagaaatgaacaaactatgtaaacaaaaagggaaactcacttgtttttctttagatttataaatttgagctattttttttagaggtgctttttaaaaatccaatagatacaagagatgtttcctttggttttctgccagtcatccagctgatacacacctgatgattttaaagaaagccacacagagctgaatgggcagtgtaatcaataatttaaaaracatgaatgtcattagatcctttataacgtagatcgaagccaaagcagctcatttgtgacaacatttcatatcaccagacacaccaggcaacagaagwtgaagcacaaccactgtagcaaaataccttgactgcttgtgagaccattagcattgcaggccaaaccgtactgtatttccttctcataacctcaaggaaccatatgtgctacccacaacacctcattcttacccagggtgcgctgcgtcctcatggtactgtaggcagctgaagaaccgccgttcccttgaaagggaacacctggcattctgtggtgtttcgtgctgtcttaaataatggtgcatttattatgttcaagttatttcaggattgccatatgtgcaaacaaatcatgcaatgcagccaaggaatatatgttgttgttgttgttttaaacccattttttttttagaattttcattaatactgtagttatacaccatatgcctcattttatcatagcctattgtgtatgaaagatgtttgtacaatgaattgatgtttagtttgctttagtcatttaaaaagatattgtaccaggatgtgctattaagagcacgtatccattattcttctcaacccaagaacctgtttcctggaccartgaccaaacctcatatgtgaaatggccaaagcacatgcaggctcctggttgttcctctcaaacctgygctgaccaaagattagtaaccagttatacccagtattttgaggttttattgtttttttaataactaaaaaraaaaaaggaacagtgtaaatttgtaatcaagagtttgtgaggaaaaacttatggtttttggttttgtttgtttttgtaggtctgtgtatcaaatatgacacttttcttgcaataaagcttattttggggta

SEQ ID NO: 142 - DNA, 4058 bp, Homo sapiens
  misc_feature (1)...(4058): n = A,T,C or G, or insertion/deletion polymorphism (see Tables 1-2)
ggttgcagtgagccgacatcacgccactgctctccagcttggggaacagagcaaacctccgtctcaaaaaaaaaaaaaaaaatctagggaagttgaaaacattttgcagtcaaagctatctttgctrtctgcatcttgaaataaaataaacattcatacatgtaacctcattaatctgattagagatagtgataagtactgggacagacataaacagggtgctgtgataagaagtcacagggagggcccgcattagttgaggggggtcagagaaggcttctgaagtgtttctggtgcaaatgcttggaaaagggagagctgggagtgtatcccagggctgaggccaatggaggattgcagaagagggagaggggataggaggggaatgttagagggataagcaggggaattggctcttttcttcattttcttaaattaaactttttattttcagataattaaagatttacacacagctggaagaaatcatagagaagccgggcgtggtggctcatgcctataatcccagcacttttggaggctgaggcgggcagatcacttgagatcaggagttcgagaccagcctggtgccttggcatctcccaatggggtggctttgctctgggctcctgttccctgtgagctgcctggtcctgctgcaggtggcaagctctgggaacatgaaggtcttgcaggagcccacctgcgtctccgactacatgagcatctctacttgcgagtggaagatgaatggtcccaccaattgcagcaccgagctccgcctgttgtaccagctggtttttctgctctccgaagcccacacgtgtntccctgagaacaacggaggcgcggggtgcgtgtgccacctgctcatggatgacgtggtcagtgcggataactatacactggacctgtgggctgggcagcagctgctgtggaagggctccttcaagcccagcgagcatgtgaaacccagggccccaggaaacctgacagktcacaccaatgtctccgacactctgctgctgacctggagcaacccgtatccccctgacaattacctgtataatcatctcacctatgcagtcaacatttggagtgaaaaygacccggcagatttcagaatctataacgtgacctacctagaaccctccctccgcatcgcagccagcaccctgaagtctgggatttcctacagggcacgggtgagggcctgggctcagtgctataacaccacctggagtgagtggagccccagcaccaagtggcacaactcctacagggagcccttcgagcagcacctcctgctgggcgtcagcgtttcctgcattgtcatcctggccgtctgcctgttgtgctatgtcagcatcacsaagattaagaaagaatggtgggatcagattcccaacccagcccgcagccgcctsgtggctataataatccaggatgctcaggggtcacagtgggagaagcggtcccgaggccaggaaccagccaagtgcccacactggaagaattgtcttaccaagctcttgccctgtttyctggagcacaacatgaaaagggatgaagatcctcacaaggctgccaaagagatgcctttccagggctctggaaaatcagcatggtgcccagtggagatcagcaagacagtcctctggccagagagcatcagcgtggtgcgatgtgtggagttgtttgaggccccggtggagtgtgaggaggaggaggaggtagaggaagaaaaagggagcttctgtgcatcgcctgagagcagcagggatgacttccaggagggaagggmgggcattgtggcccggctaacagagagcctgttcctggacctkctyggagaggagaatgggggcttttgccagcaggacatgggggagtcaygyctyctyccaccttygggaagtacgagtgctcacatgccctgggatgagttcccaagtgcagggcccaaggaggcacctccctggggcaaggagcagcctctccacctggagccaagtcctcctgccagcccgacccagagtccagacaacctgacttgcacagagacgcccctcgtcatcgcaggcaaccctgcttaccgcagcttcagcaacyccctgagccagtcaccgtgtcccagagagctgggtccagacccactgctggccagacacctggaggaagtagaacccgagatgccctgtgtcccccagctctctgagccaaccactgtgccccaacctgagccagaaacctgggagcagatcctccgccgaaatgtcctccagcatggggcagctgcagcccccgtctcggcccccaccagtggctatcrggagtttrtacatgcggtggagcagggtggcacccaggccagtgcggtggtgggcttgggtcccccaggagaggctggttacaaggccttctcaagcctgcttgccagcagtgctgtgtccccagagaaatgtgggtttggggctagcagtggggaagaggggtataagcctttccaagacctcattcctggctgccctggggaccctgccccagtccctgtccccttgttcacctttggactggacagggagccacctcgcagtccgcagagctcacatctcccaagcagctccycagagcacctgggtctggagccgggggaaaaggtagaggacatgccaaagcccccacttccccaggagcaggccacagacccccttgtggacagcctgggcagtggcattgtctactcagcccttacctgccacctgtgcggccacctgaaacagtgtcatggccaggaggatggtggccagacccctgtcatggccagtccttgctgtggctgctgctgtggagacaggkcctcgccccctacaacccccctgagggccccagacccctctccaggtggggttccactggaggccagtctgtgtccggcctccctggcaccctcgggcatcycagagaagagtaaatcctcatcatccttccatcctgccccyggcaatgctcagagctcaagccagacccccaaaatcgtgaactttgtctccgtgggacccacatacatgagggtctcttaggtgcaygycctcttgttgctgagtctgcagatgaggactagggcttatycatgcctgggaaatgccacctcctggaaggcagccaggstggcagatttccaaaagacttgaagaaccatggtatgaaggtgattggccccactgacgttggcctaacactgggctgcagagactggaccccgcccagcattgggctgggctcgccacatcccatgagagtagagggcactgggtcgccgtgccccacggcaggcccctgcaggaaaactgargcccttgggmacctcgacttgtgaacgagttgttggctgctccctccacagcttctgcagcagactgtccctgttgtaactgcccaaggcatgttttgcccaccagatcatggcccacrtggaggcccacctgcctctgtctcactgaactagaagccgagcctagaaactaacacagccatcaagggaatgacttgggcggccttgggaaatcgatgagaaattgaacttcagggagggtggtcattgcctagaggtgctcattcatttaacagagcttccttaggttgatgctggaggcagaatcccggctgtcaaggggtgttcagttaaggggagcaacagaggacatgaaaaattgctrtgactaaagcagggacaatttgctgccaaacacccatgcccagctgtatggctgggggctcctcgtatgcatgsaacccccagaataaatatgctcagccaycctgtgggccgggcaatccagacagcaggcataaggcaccagttaccctgcatgttggcccagacctcaggtgctagggaaggcgggaaccttgggttgagtaatgctcgtctgtgtgttttagtttcatcacctgttatctgtgtttgctgaggagagtggaacagaaggggtggagttttgtataaataaagtttctttgtctctttattttttatgtattaaccaaacatacct

SEQ ID NO: 143 - DNA, 3039 bp, Homo sapiens
cggcaaccgctccggcaacgccaaccgctccgctgcgcgcaggctgggctgcaggctctcggctgcagcgctggatgtggcagctctgggcctccctctgctgcctgctggtgttggccaatgcccggagcaggccctctttccatcccstgtcggatgagctggtcaactatgtcaacaaacggaataccacgtggcaggccgggcacaacttctacaacgtggacatgrgctacttgaagaggctatgtggtaccttcctgggtgggcccaagccaccccagagagttatgtttaccgaggacctgaagctgcctgcaagcttygatgcacgggaacaatggccacagtgtcccaccatcaaagagatcagagaccagggctcctgtggctcctgctgggccttcggggctgtggaagccatctctgaccggatctgcatccacaccaatgcgcacrtcagcgtggaggtgtcggcggaggacctgctcacvtgctgtggcagcatgtgtggggacggctgtaatggtggctatcctgctgaagcttggaacttctggacaagaaaaggcctggtttctggtggcctctatgaatcccatgtagggtgcagaccgtactccatccctccctgtgagcaccacgtcaacggctcycggcccccatgcacgggggagggagatacccccaagtgtagcaagatctgtgagcctggctacagcccgacctacaaacaggacaagcactacggatacaattcctacagcgtctccaatarcgagaaggacatcatggccgagatctacaaaaacggccccgtggagggagctttctctgtgtattcggacttcctgctctacaagtcaggagtgtaccaacacgtcaccggagagatgatgggtggccatgccatccgcatcctgggctggggagtggagaatggcacaccctactggctggttgccaactcctggaacactgactggggtgacaatggcttctttaaaatactcagaggacaggatcactgtggaatcgaatcagaagtggtggctggaattccacgcaccgatcagtactgggaaaagatctaatctgccgtgggcctgtcgtgccagtcctgggggcgagatsggggtagaaatgcattttattytttaagttcacgtaagatacaagtttcagrcagggtctgaaggactggattggccaaacatcagacctgtcttccaaggagaccaagtcctggctacatcccagcctgtggttacagtgcagrcaggccaygtgagccaccgctgccagcacagagcgtccttccccctgtagactagtgccgtagggagtacctgytgccccagctgactgtggccccctccgtgatccatccatctccagggagcaagacagagacscaggaatggaaagcggagttcctaacrggatraaasttcccccatcagttcccccagtacctccaagcaagtagctttccacatttgtcacagaaatcagaggagagayggtgttgggagccctttggagaaygccagtctcccaggccccctgcatctatcgagtttgcaatgtcacaacctctctgatsttgtgctcagcatgattctttaatagaagttttattttttcgtgcactctgctaatcatgtgggtgagccagtggaacagcgggagacctgtgctagttttacagattgcctcctwatgacgcggctcaaaaggaaaccaagtggtcaggagttgtttctgacccmctgatctctactaccacwaggaraatagtttaggagaaacsagcttttactgtttttgaaaaattacagcttcmccctgtcaagttaacaaggaatgcctgtgccaataaaagktttctccaacttgaagtctactctgatgggatctcagatcctttgtcactgcctatagacttgtagctgctgtctctctttgtccctgcagagaatcaygtcctggaactgcatgttcttgcgactcttgggacttcatcttaacttctcgctgccccagccatgttttcaaccatggcatccctcccccaattagttccctgtcatcctcgtcaaccttctctgtaagtgcctggtaarcttgcccttgcttaagaactcaaaacatagctgtgctctatttttttgttgttgttgtgactgacagagtgagattccgtctcccrggctggagtgcagtggcgccttctcagctcactgcaacctgcagcctcctagattcaagcgattctcctgcttcagccttccgagtagctgggatgacaggcactcaccaatatgcctgggtaatttttgtatttttaagtacatacaggatttcaccatgttggccaggctagtttcaaactccyggcctcaggtggtctgcctgcctcagcctcccaaagtgttgggattacaggygtgagccactgggccctgcctgtaytttttatcagccacaaatccagcaacaagctgaggattcagctcataaaacaggyttggtgtcttggtgatctcacataaccaagatgctaccccgtggggaaccacatccccctggatgccctccagccttggtttgggctggagtcagggcctgkatacagtattttgaatttgtatgccactggtttgcattgctggtcaggaactctagtgctttgcatagccctggtttagaaacatgttatagcagttcttggtatagagcaaactagaagaaccagcaatcattccactgtcctgccaaggtacacctcagtactccccttcccaactgaagtggtatgaggctrgctctttccaaaagcattcaagtttggcttctgatgtgactcagaatttaggaaccagatgctagatcaaataagctctgaaaatctgaggaacattgtaggaaaggtttgttaagcatctcttaagtgccatgatgagcataacagccggccgtsgtggctcrcgcctgtaakcccagcactttgggaggccaaggtgggaggatgacaag

SEQ ID NO: 144 - DNA, 3193 bp, Homo sapiens
tagggccggggctggcccaggctacggcggctgcagggctccggcaaccgctccggcaacgccaaccgctccgctgcgcgcaggctgggctgcaggctctcggctgcagcgctgggctggtgtgcagtggtgcgaccacggctcacggcagcctcagccacccagatgtaagcgatytggttcccacctcagcctcccgagtagtgratctmggatcyggcttccaacatgtggcagctctgggcctccctctgctgcctgctggtgttggccaatgcccggagcaggccctctttccatcccstgtcggatgagctggtcaactatgtcaacaaacggaataccacgtggcaggccgggcacaacttctacaacgtggacatgrgctacttgaagaggctatgtggtaccttcctgggtgggcccaagccaccccagagagttatgtttaccgaggacctgaagctgcctgcaagcttygatgcacgggaacaatggccacagtgtcccaccatcaaagagatcagagaccagggctcctgtggctcctgctgggccttcggggctgtggaagccatctctgaccggatctgcatccacaccaatgcgcacrtcagcgtggaggtgtcggcggaggacctgctcacvtgctgtggcagcatgtgtggggacggctgtaatggtggctatcctgctgaagcttggaacttctggacaagaaaaggcctggtttctggtggcctctatgaatcccatgtagggtgcagaccgtactccatccctccctgtgagcaccacgtcaacggctcycggcccccatgcacgggggagggagatacccccaagtgtagcaagatctgtgagcctggctacagcccgacctacaaacaggacaagcactacggatacaattcctacagcgtctccaatarcgagaaggacatcatggccgagatctacaaaaacggccccgtggagggagctttctctgtgtattcggacttcctgctctacaagtcaggagtgtaccaacacgtcaccggagagatgatgggtggccatgccatccgcatcctgggctggggagtggagaatggcacaccctactggctggttgccaactcctggaacactgactggggtgacaatggcttctttaaaatactcagaggacaggatcactgtggaatcgaatcagaagtggtggctggaattccacgcaccgatcagtactgggaaaagatctaatctgccgtgggcctgtcgtgccagtcctgggggcgagatsggggtagaaatgcattttattytttaagttcacgtaagatacaagtttcagrcagggtctgaaggactggattggccaaacatcagacctgtcttccaaggagaccaagtcctggctacatcccagcctgtggttacagtgcagrcaggccaygtgagccaccgctgccagcacagagcgtccttccccctgtagactagtgccgtagggagtacctgytgccccagctgactgtggccccctccgtgatccatccatctccagggagcaagacagagacscaggaatggaaagcggagttcctaacrggatraaasttcccccatcagttcccccagtacctccaagcaagtagctttccacatttgtcacagaaatcagaggagagayggtgttgggagccctttggagaaygccagtctcccaggccccctgcatctatcgagtttgcaatgtcacaacctctctgatsttgtgctcagcatgattctttaatagaagttttattttttcgtgcactctgctaatcatgtgggtgagccagtggaacagcgggagacctgtgctagttttacagattgcctcctwatgacgcggctcaaaaggaaaccaagtggtcaggagttgtttctgacccmctgatctctactaccacwaggaraatagtttaggagaaacsagcttttactgtttttgaaaaattacagcttcmccctgtcaagttaacaaggaatgcctgtgccaataaaagktttctccaacttgaagtctactctgatgggatctcagatcctttgtcactgcctatagacttgtagctgctgtctctctttgtccctgcagagaatcaygtcctggaactgcatgttcttgcgactcttgggacttcatcttaacttctcgctgccccagccatgttttcaaccatggcatccctcccccaattagttccctgtcatcctcgtcaaccttctctgtaagtgcctggtaarcttgcccttgcttaagaactcaaaacatagctgtgctctatttttttgttgttgttgtgactgacagagtgagattccgtctcccrggctggagtgcagtggcgccttctcagctcactgcaacctgcagcctcctagattcaagcgattctcctgcttcagccttccgagtagctgggatgacaggcactcaccaatatgcctgggtaatttttgtatttttaagtacatacaggatttcaccatgttggccaggctagtttcaaactccyggcctcaggtggtctgcctgcctcagcctcccaaagtgttgggattacaggygtgagccactgggccctgcctgtaytttttatcagccacaaatccagcaacaagctgaggattcagctcataaaacaggyttggtgtcttggtgatctcacataaccaagatgctaccccgtggggaaccacatccccctggatgccctccagccttggtttgggctggagtcagggcctgkatacagtattttgaatttgtatgccactggtttgcattgctggtcaggaactctagtgctttgcatagccctggtttagaaacatgttatagcagttcttggtatagagcaaactagaagaaccagcaatcattccactgtcctgccaaggtacacctcagtactccccttcccaactgaagtggtatgaggctrgctctttccaaaagcattcaagtttggcttctgatgtgactcagaatttaggaaccagatgctagatcaaataagctctgaaaatctgaggaacattgtaggaaaggtttgttaagcatctcttaagtgccatgatgagcataacagccggccgtsgtggctcrcgcctgtaakcccagcactttgggaggccaaggtgggaggatgacaag

SEQ ID NO: 145 - DNA, 2988 bp, Homo sapiens
acttagggccggggctggcccaggctacggcggcaaccgctccggcaacgccaaccgctccgctgcgcgcaggctgggctgcaggctctcggctgcagcgctgggtgratctmggatcyggcttccaacatgtggcagctctgggcctccctctgctgcctgctggtgttggccaatgcccggagcaggccctctttccatcccstgtcggatgagctggtcaactatgtcaacaaacggaataccacgtggcaggccgggcacaacttctacaacgtggacatgrgctacttgaagaggctatgtggtaccttcctgggtgggcccaagccaccccagagagttatgtttaccgaggacctgaagctgcctgcaagcttygatgcacgggaacaatggccacagtgtcccaccatcaaagagatcagagaccagggctcctgtggctcctgctgggccttcggggctgtggaagccatctctgaccggatctgcatccacaccaatgcgcacrtcagcgtggaggtgtcggcggaggacctgctcacvtgctgtggcagcatgtgtggggacggctgtaatggtggctatcctgctgaagcttggaacttctggacaagaaaaggcctggtttctggtggcctctatgaatcccatgtagggtgcagaccgtactccatccctccctgtgagcaccacgtcaacggctcycggcccccatgcacgggggagggagatacccccaagtgtagcaagatctgtgagcctggctacagcccgacctacaaacaggacaagcactacggatacaattcctacagcgtctccaatarcgagaaggacatcatggccgagatctacaaaaacggccccgtggagggagctttctctgtgtattcggacttcctgctctacaagtcaggagtgtaccaacacgtcaccggagagatgatgggtggccatgccatccgcatcctgggctggggagtggagaatggcacaccctactggctggttgccaactcctggaacactgactggggtgacaatggcttctttaaaatactcagaggacaggatcactgtggaatcgaatcagaagtggtggctggaattccacgcaccgatcagtactgggaaaagatctaatctgccgtgggcctgtcgtgccagtcctgggggcgagatsgggagaatcaygtcctggaactgcatgttcttgcgactcttgggacttcatcttaacttctcgctgccccagccatgttttcaaccatggcatccctcccccaattagttccctgtcatcctcgtcaaccttctctgtaagtgcctggtaarcttgcccttgcttaagaactcaaaacatagctgtgctctatttttttgttgttgttgtgactgacagagtgagattccgtctcccrggctggagtgcagtggcgccttctcagctcactgcaacctgcagcctcctagattcaagcgattctcctgcttcagccttccgagtagctgggatgacaggcactcaccaatatgcctgggtaatttttgtatttttaagtacatacaggatttcaccatgttggccaggctagtttcaaactccyggcctcaggtggtctgcctgcctcagcctcccaaagtgttgggattacaggygtgagccactgggccctgcctgtaytttttatcagccacaaatccagcaacaagctgaggattcagctcataaaacaggyttggtgtcttggtgatctcacataaccaagatgctaccccgtggggaaccacatccccctggatgccctccagccttggtttgggctggagtcagggcctgkatacagtattttgaatttgtatgccactggtttgcattgctggtcaggaactctagtgctttgcatagccctggtttagaaacatgttatagcagttcttggtatagagcaaactagaagaaccagcaatcattccactgtcctgccaaggtacacctcagtactccccttcccaactgaagtggtatgaggctrgctctttccaaaagcattcaagtttggcttctgatgtgactcagaatttaggaaccagatgctagatcaaataagctctgaaaatctgaggaacattgtaggaaaggtttgttaagcatctcttaagtgccatgatgagcataacagccggccgtsgtggctcrcgcctgtaakcccagcactttgggaggccaaggtgggaggatgacaaggtcaggagttttgagatcagccttggcaacacggtgaaaccccatctctactaaaaatacaaaattagccaagcatgctggcacatgcctgtaatcccagctactcgggaggctgaggtacgagaatcgcttgaacctgggaggcagaggatgcagtgagccgagatcacgccattgcactccagcctgggggacaagagtgaatctgtgtctcaccaaaaaaaaaaagaaaaagaaagatgcttaacaaaggttaccataagccacaaattcatraccacttatccttccagtttcaagtagaatatattcataacctcaataaagttctccctgctcccaaactgagttgattcattccatgcgcactgtctccctcacctccatcrtatacgcacctgcagctccttgcctgcttctagcatggagscagcggggatgtgctggtgagtgacaaggaattgtggggcatgtcgacatcagcttaaggctttgttagaaacacctgccttgcagtgtttgtgactgggaaagagctcagtgttttaatacacctcagatcaccacattgatcataactttgtcacctcagttcaatagtttctcctggattcttgtccaagtgagatgacaggtggacgtaacaatgccttttcagtctttacctagmctctccagagaatcactccagaatagaaattagagtataggtaggcagtccaacctctgcattt

SEQ ID NO: 146 - DNA, 1483 bp, Homo sapiens
acttagggccggggctggcccaggctacggcggcaaccgctccggcaacgccaaccgctccgctgcgcgcaggctgggctgcaggctctcggctgcagcgctgggtgratctmggatcyggcttccaacatgtggcagctctgggcctccctctgctgcctgctggtgttggccaatgcccggagcaggccctctttccatcccstgtcggatgagctggtcaactatgtcaacaaacggaataccacgtggcaggccgggcacaacttctacaacgtggacatgrgctacttgaagaggctatgtggtaccttcctgggtgggcccaagccaccccagaggtgagtgcctgctcctctgcaccgctgtaatgtgagtggcaggcgttggtttggggcagtgggaagtgggagagtgaaggcctctctggcgtccgcagggctcatgctgcccagggctgccgacaccgcttgaggtacagtacttgtttcttttcatttttrtattactttctytttttattttattttttccttctcaagttattagtagagaagatgctggtgcttttttttggtttttgagagagtctcactctgtcacccaggctggagtgcagtggcacgatcttggctcactgcaaactctgtctcccrggttcaagcgattctcatgccacagcctcctgagtagctggggccacaggcttgcaccaccgtgcacggctaatatttgtatttttagtagagactgggtttcgccatactggccaggctcgtctcgaactcttggcctcagcaagtcatctgcccaactcggcatcccagagtgctgggattaccggcatgagccacccccagtgttttctattgtgcttctccaaggtgtctcagccgcagatgtgacagacaaggtctgggtccccactatgtgggcagactcaatcttgagtaatttaagggaaatctaagaaaagccagatgaggccaagtatggtggctcacgcctgtaatcccagcactttgggatgccaaggcaagcggatcacctgaggtcaggagttcgagaccagtctgaccaacatgatgaaaccccgtctctactaaaaataaaaaactttgccaggcgtggtggcgggcgcctgtaatcccagctactcgggaggctgaggctagagaatcgcatgaacccgggaggcagaggttgcggtgagctgagatgatgccacttcccacgtgaggatggggtagttaagttgcacracactgccttctgcacaatggggatgatatgagaaatgatgagaggatcctgggcagaggttgaggcaggagagcagggcaagaaacactatctggactgaataaacttatttaaaaatgagtttataatttgtggataaattcatcttaaaaaatccattacataagcctagaaagaagcgtacaatatcgcaagtcaggccaggtgtggtggatcatgc

SEQ ID NO: 147 - DNA, 4001 bp, Homo sapiens
tagggccggggctggcccaggctacggcggctgcagggctccggcaaccgctccggcaacgccaaccgctccgctgcgcgcaggctgggctgcaggctctcggctgcagcgctgggctggtgtgcagtggtgcgaccacggctcacggcagcctcagccacccagatgtaagcgatytggttcccacctcagcctcccgagtagtgtcttcaggcctatggagagcagcttgcgtgggctgggcctgcagtacctggtttgcatagatgattggcaggtgratctmggatcyggcttccaacatgtggcagctctgggcctccctctgctgcctgctggtgttggccaatgcccggagcaggccctctttccatcccstgtcggatgagctggtcaactatgtcaacaaacggaataccacgtggcaggccgggcacaacttctacaacgtggacatgrgctacttgaagaggctatgtggtaccttcctgggtgggcccaagccaccccagagagttatgtttaccgaggacctgaagctgcctgcaagcttygatgcacgggaacaatggccacagtgtcccaccatcaaagagatcagagaccagggctcctgtggctcctgctgggccttcggggctgtggaagccatctctgaccggatctgcatccacaccaatgcgcacrtcagcgtggaggtgtcggcggaggacctgctcacvtgctgtggcagcatgtgtggggacggctgtaatggtggctatcctgctgaagcttggaacttctggacaagaaaaggcctggtttctggtggcctctatgaatcccatgtagggtgcagaccgtactccatccctccctgtgagcaccacgtcaacggctcycggcccccatgcacgggggagggagatacccccaagtgtagcaagatctgtgagcctggctacagcccgacctacaaacaggacaagcactacggatacaattcctacagcgtctccaatarcgagaaggacatcatggccgagatctacaaaaacggccccgtggagggagctttctctgtgtattcggacttcctgctctacaagtcaggagtgtaccaacacgtcaccggagagatgatgggtggccatgccatccgcatcctgggctggggagtggagaatggcacaccctactggctggttgccaactcctggaacactgactggggtgacaatggcttctttaaaatactcagaggacaggatcactgtggaatcgaatcagaagtggtggctggaattccacgcaccgatcagtactgggaaaagatctaatctgccgtgggcctgtcgtgccagtcctgggggcgagatsggggtagaaatgcattttattytttaagttcacgtaagatacaagtttcagrcagggtctgaaggactggattggccaaacatcagacctgtcttccaaggagaccaagtcctggctacatcccagcctgtggttacagtgcagrcaggccaygtgagccaccgctgccagcacagagcgtccttccccctgtagactagtgccgtagggagtacctgytgccccagctgactgtggccccctccgtgatccatccatctccagggagcaagacagagacscaggaatggaaagcggagttcctaacrggatraaasttcccccatcagttcccccagtacctccaagcaagtagctttccacatttgtcacagaaatcagaggagagayggtgttgggagccctttggagaaygccagtctcccaggccccctgcatctatcgagtttgcaatgtcacaacctctctgatsttgtgctcagcatgattctttaatagaagttttattttttcgtgcactctgctaatcatgtgggtgagccagtggaacagcgggagacctgtgctagttttacagattgcctcctwatgacgcggctcaaaaggaaaccaagtggtcaggagttgtttctgacccmctgatctctactaccacwaggaraatagtttaggagaaacsagcttttactgtttttgaaaaattacagcttcmccctgtcaagttaacaaggaatgcctgtgccaataaaagktttctccaacttgaagtctactctgatgggatctcagatcctttgtcactgcctatagacttgtagctgctgtctctctttgtccctgcagagaatcaygtcctggaactgcatgttcttgcgactcttgggacttcatcttaacttctcgctgccccagccatgttttcaaccatggcatccctcccccaattagttccctgtcatcctcgtcaaccttctctgtaagtgcctggtaarcttgcccttgcttaagaactcaaaacatagctgtgctctatttttttgttgttgttgtgactgacagagtgagattccgtctcccrggctggagtgcagtggcgccttctcagctcactgcaacctgcagcctcctagattcaagcgattctcctgcttcagccttccgagtagctgggatgacaggcactcaccaatatgcctgggtaatttttgtatttttaagtacatacaggatttcaccatgttggccaggctagtttcaaactccyggcctcaggtggtctgcctgcctcagcctcccaaagtgttgggattacaggygtgagccactgggccctgcctgtaytttttatcagccacaaatccagcaacaagctgaggattcagctcataaaacaggyttggtgtcttggtgatctcacataaccaagatgctaccccgtggggaaccacatccccctggatgccctccagccttggtttgggctggagtcagggcctgkatacagtattttgaatttgtatgccactggtttgcattgctggtcaggaactctagtgctttgcatagccctggtttagaaacatgttatagcagttcttggtatagagcaaactagaagaaccagcaatcattccactgtcctgccaaggtacacctcagtactccccttcccaactgaagtggtatgaggctrgctctttccaaaagcattcaagtttggcttctgatgtgactcagaatttaggaaccagatgctagatcaaataagctctgaaaatctgaggaacattgtaggaaaggtttgttaagcatctcttaagtgccatgatgagcataacagccggccgtsgtggctcrcgcctgtaakcccagcactttgggaggccaaggtgggaggatgacaaggtcaggagttttgagatcagccttggcaacacggtgaaaccccatctctactaaaaatacaaaattagccaagcatgctggcacatgcctgtaatcccagctactcgggaggctgaggtacgagaatcgcttgaacctgggaggcagaggatgcagtgagccgagatcacgccattgcactccagcctgggggacaagagtgaatctgtgtctcaccaaaaaaaaaaagaaaaagaaagatgcttaacaaaggttaccataagccacaaattcatraccacttatccttccagtttcaagtagaatatattcataacctcaataaagttctccctgctcccaaactgagttgattcattccatgcgcactgtctccctcacctccatcrtatacgcacctgcagctccttgcctgcttctagcatggagscagcggggatgtgctggtgagtgacaaggaattgtggggcatgtcgacatcagcttaaggctttgttagaaacacctgccttgcagtgtttgtgactgggaaagagctcagtgttttaatacacctcagatcaccacattgatcataactttgtcacctcagttcaatagtttctcctggattcttgtccaagtgagatgacaggtggacgtaacaatgccttttcagtctttacctagmctctccagagaatcactccagaatagaaattagagtataggtaggcagtccaacctctgcattt

SEQ ID NO: 148 - DNA, 3170 bp, Homo sapiens
ggctggcccaggctacggcggctgcagggctccggcaaccgctccggcaacgccaaccgctccgctgcgcgcaggctgggctgcaggctctcggctgcagcgctgggtgtcttcaggcctatggagagcagcttgcgtgggctgggcctgcagtacctggtttgcatagatgattggcaggtgratctmggatcyggcttccaacatgtggcagctctgggcctccctctgctgcctgctggtgttggccaatgcccggagcaggccctctttccatcccstgtcggatgagctggtcaactatgtcaacaaacggaataccacgtggcaggccgggcacaacttctacaacgtggacatgrgctacttgaagaggctatgtggtaccttcctgggtgggcccaagccaccccagagagttatgtttaccgaggacctgaagctgcctgcaagcttygatgcacgggaacaatggccacagtgtcccaccatcaaagagatcagagaccagggctcctgtggctcctgctgggccttcggggctgtggaagccatctctgaccggatctgcatccacaccaatgcgcacrtcagcgtggaggtgtcggcggaggacctgctcacvtgctgtggcagcatgtgtggggacggctgtaatggtggctatcctgctgaagcttggaacttctggacaagaaaaggcctggtttctggtggcctctatgaatcccatgtagggtgcagaccgtactccatccctccctgtgagcaccacgtcaacggctcycggcccccatgcacgggggagggagatacccccaagtgtagcaagatctgtgagcctggctacagcccgacctacaaacaggacaagcactacggatacaattcctacagcgtctccaatarcgagaaggacatcatggccgagatctacaaaaacggccccgtggagggagctttctctgtgtattcggacttcctgctctacaagtcaggagtgtaccaacacgtcaccggagagatgatgggtggccatgccatccgcatcctgggctggggagtggagaatggcacaccctactggctggttgccaactcctggaacactgactggggtgacaatggcttctttaaaatactcagaggacaggatcactgtggaatcgaatcagaagtggtggctggaattccacgcaccgatcagtactgggaaaagatctaatctgccgtgggcctgtcgtgccagtcctgggggcgagatsggggtagaaatgcattttattytttaagttcacgtaagatacaagtttcagrcagggtctgaaggactggattggccaaacatcagacctgtcttccaaggagaccaagtcctggctacatcccagcctgtggttacagtgcagrcaggccaygtgagccaccgctgccagcacagagcgtccttccccctgtagactagtgccgtagggagtacctgytgccccagctgactgtggccccctccgtgatccatccatctccagggagcaagacagagacscaggaatggaaagcggagttcctaacrggatraaasttcccccatcagttcccccagtacctccaagcaagtagctttccacatttgtcacagaaatcagaggagagayggtgttgggagccctttggagaaygccagtctcccaggccccctgcatctatcgagtttgcaatgtcacaacctctctgatsttgtgctcagcatgattctttaatagaagttttattttttcgtgcactctgctaatcatgtgggtgagccagtggaacagcgggagacctgtgctagttttacagattgcctcctwatgacgcggctcaaaaggaaaccaagtggtcaggagttgtttctgacccmctgatctctactaccacwaggaraatagtttaggagaaacsagcttttactgtttttgaaaaattacagcttcmccctgtcaagttaacaaggaatgcctgtgccaataaaagktttctccaacttgaagtctactctgatgggatctcagatcctttgtcactgcctatagacttgtagctgctgtctctctttgtccctgcagagaatcaygtcctggaactgcatgttcttgcgactcttgggacttcatcttaacttctcgctgccccagccatgttttcaaccatggcatccctcccccaattagttccctgtcatcctcgtcaaccttctctgtaagtgcctggtaarcttgcccttgcttaagaactcaaaacatagctgtgctctatttttttgttgttgttgtgactgacagagtgagattccgtctcccrggctggagtgcagtggcgccttctcagctcactgcaacctgcagcctcctagattcaagcgattctcctgcttcagccttccgagtagctgggatgacaggcactcaccaatatgcctgggtaatttttgtatttttaagtacatacaggatttcaccatgttggccaggctagtttcaaactccyggcctcaggtggtctgcctgcctcagcctcccaaagtgttgggattacaggygtgagccactgggccctgcctgtaytttttatcagccacaaatccagcaacaagctgaggattcagctcataaaacaggyttggtgtcttggtgatctcacataaccaagatgctaccccgtggggaaccacatccccctggatgccctccagccttggtttgggctggagtcagggcctgkatacagtattttgaatttgtatgccactggtttgcattgctggtcaggaactctagtgctttgcatagccctggtttagaaacatgttatagcagttcttggtatagagcaaactagaagaaccagcaatcattccactgtcctgccaaggtacacctcagtactccccttcccaactgaagtggtatgaggctrgctctttccaaaagcattcaagtttggcttctgatgtgactcagaatttaggaaccagatgctagatcaaataagctctgaaaatctgaggaacattgtaggaaaggtttgttaagcatctcttaagtgccatgatgagcataacagccggccgtsgtggctcrcgcctgtaakcccagcactttgggaggccaaggtgggaggatgacaag

SEQ ID NO: 149 - DNA, 3190 bp, Homo sapiens
acggcggctgcagggctccggcaaccgctccggcaacgccaaccgctccgctgcgcgcaggctgggctgcaggctctcggctgcagcgctggggtcttgctttgtctcccaggctggtgtgcagtggtgcgaccacggctcacggcagcctcagccacccagatgtaagcgatytggttcccacctcagcctcccgagtagtgratctmggatcyggcttccaacatgtggcagctctgggcctccctctgctgcctgctggtgttggccaatgcccggagcaggccctctttccatcccstgtcggatgagctggtcaactatgtcaacaaacggaataccacgtggcaggccgggcacaacttctacaacgtggacatgrgctacttgaagaggctatgtggtaccttcctgggtgggcccaagccaccccagagagttatgtttaccgaggacctgaagctgcctgcaagcttygatgcacgggaacaatggccacagtgtcccaccatcaaagagatcagagaccagggctcctgtggctcctgctgggccttcggggctgtggaagccatctctgaccggatctgcatccacaccaatgcgcacrtcagcgtggaggtgtcggcggaggacctgctcacvtgctgtggcagcatgtgtggggacggctgtaatggtggctatcctgctgaagcttggaacttctggacaagaaaaggcctggtttctggtggcctctatgaatcccatgtagggtgcagaccgtactccatccctccctgtgagcaccacgtcaacggctcycggcccccatgcacgggggagggagatacccccaagtgtagcaagatctgtgagcctggctacagcccgacctacaaacaggacaagcactacggatacaattcctacagcgtctccaatarcgagaaggacatcatggccgagatctacaaaaacggccccgtggagggagctttctctgtgtattcggacttcctgctctacaagtcaggagtgtaccaacacgtcaccggagagatgatgggtggccatgccatccgcatcctgggctggggagtggagaatggcacaccctactggctggttgccaactcctggaacactgactggggtgacaatggcttctttaaaatactcagaggacaggatcactgtggaatcgaatcagaagtggtggctggaattccacgcaccgatcagtactgggaaaagatctaatctgccgtgggcctgtcgtgccagtcctgggggcgagatsggggtagaaatgcattttattytttaagttcacgtaagatacaagtttcagrcagggtctgaaggactggattggccaaacatcagacctgtcttccaaggagaccaagtcctggctacatcccagcctgtggttacagtgcagrcaggccaygtgagccaccgctgccagcacagagcgtccttccccctgtagactagtgccgtagggagtacctgytgccccagctgactgtggccccctccgtgatccatccatctccagggagcaagacagagacscaggaatggaaagcggagttcctaacrggatraaasttcccccatcagttcccccagtacctccaagcaagtagctttccacatttgtcacagaaatcagaggagagayggtgttgggagccctttggagaaygccagtctcccaggccccctgcatctatcgagtttgcaatgtcacaacctctctgatsttgtgctcagcatgattctttaatagaagttttattttttcgtgcactctgctaatcatgtgggtgagccagtggaacagcgggagacctgtgctagttttacagattgcctcctwatgacgcggctcaaaaggaaaccaagtggtcaggagttgtttctgacccmctgatctctactaccacwaggaraatagtttaggagaaacsagcttttactgtttttgaaaaattacagcttcmccctgtcaagttaacaaggaatgcctgtgccaataaaagktttctccaacttgaagtctactctgatgggatctcagatcctttgtcactgcctatagacttgtagctgctgtctctctttgtccctgcagagaatcaygtcctggaactgcatgttcttgcgactcttgggacttcatcttaacttctcgctgccccagccatgttttcaaccatggcatccctcccccaattagttccctgtcatcctcgtcaaccttctctgtaagtgcctggtaarcttgcccttgcttaagaactcaaaacatagctgtgctctatttttttgttgttgttgtgactgacagagtgagattccgtctcccrggctggagtgcagtggcgccttctcagctcactgcaacctgcagcctcctagattcaagcgattctcctgcttcagccttccgagtagctgggatgacaggcactcaccaatatgcctgggtaatttttgtatttttaagtacatacaggatttcaccatgttggccaggctagtttcaaactccyggcctcaggtggtctgcctgcctcagcctcccaaagtgttgggattacaggygtgagccactgggccctgcctgtaytttttatcagccacaaatccagcaacaagctgaggattcagctcataaaacaggyttggtgtcttggtgatctcacataaccaagatgctaccccgtggggaaccacatccccctggatgccctccagccttggtttgggctggagtcagggcctgkatacagtattttgaatttgtatgccactggtttgcattgctggtcaggaactctagtgctttgcatagccctggtttagaaacatgttatagcagttcttggtatagagcaaactagaagaaccagcaatcattccactgtcctgccaaggtacacctcagtactccccttcccaactgaagtggtatgaggctrgctctttccaaaagcattcaagtttggcttctgatgtgactcagaatttaggaaccagatgctagatcaaataagctctgaaaatctgaggaacattgtaggaaaggtttgttaagcatctcttaagtgccatgatgagcataacagccggccgtsgtggctcrcgcctgtaakcccagcactttgggaggccaaggtgggaggatgacaag

SEQ ID NO: 150 - DNA, 3267 bp, Homo sapiens
tagggccggggctggcccaggctacggcggctgcagggctccggcaaccgctccggcaacgccaaccgctccgctgcgcgcaggctgggctgcaggctctcggctgcagcgctgggctggtgtgcagtggtgcgaccacggctcacggcagcctcagccacccagatgtaagcgatytggttcccacctcagcctcccgagtagtgtcttcaggcctatggagagcagcttgcgtgggctgggcctgcagtacctggtttgcatagatgattggcaggtgratctmggatcyggcttccaacatgtggcagctctgggcctccctctgctgcctgctggtgttggccaatgcccggagcaggccctctttccatcccstgtcggatgagctggtcaactatgtcaacaaacggaataccacgtggcaggccgggcacaacttctacaacgtggacatgrgctacttgaagaggctatgtggtaccttcctgggtgggcccaagccaccccagagagttatgtttaccgaggacctgaagctgcctgcaagcttygatgcacgggaacaatggccacagtgtcccaccatcaaagagatcagagaccagggctcctgtggctcctgctgggccttcggggctgtggaagccatctctgaccggatctgcatccacaccaatgcgcacrtcagcgtggaggtgtcggcggaggacctgctcacvtgctgtggcagcatgtgtggggacggctgtaatggtggctatcctgctgaagcttggaacttctggacaagaaaaggcctggtttctggtggcctctatgaatcccatgtagggtgcagaccgtactccatccctccctgtgagcaccacgtcaacggctcycggcccccatgcacgggggagggagatacccccaagtgtagcaagatctgtgagcctggctacagcccgacctacaaacaggacaagcactacggatacaattcctacagcgtctccaatarcgagaaggacatcatggccgagatctacaaaaacggccccgtggagggagctttctctgtgtattcggacttcctgctctacaagtcaggagtgtaccaacacgtcaccggagagatgatgggtggccatgccatccgcatcctgggctggggagtggagaatggcacaccctactggctggttgccaactcctggaacactgactggggtgacaatggcttctttaaaatactcagaggacaggatcactgtggaatcgaatcagaagtggtggctggaattccacgcaccgatcagtactgggaaaagatctaatctgccgtgggcctgtcgtgccagtcctgggggcgagatsggggtagaaatgcattttattytttaagttcacgtaagatacaagtttcagrcagggtctgaaggactggattggccaaacatcagacctgtcttccaaggagaccaagtcctggctacatcccagcctgtggttacagtgcagrcaggccaygtgagccaccgctgccagcacagagcgtccttccccctgtagactagtgccgtagggagtacctgytgccccagctgactgtggccccctccgtgatccatccatctccagggagcaagacagagacscaggaatggaaagcggagttcctaacrggatraaasttcccccatcagttcccccagtacctccaagcaagtagctttccacatttgtcacagaaatcagaggagagayggtgttgggagccctttggagaaygccagtctcccaggccccctgcatctatcgagtttgcaatgtcacaacctctctgatsttgtgctcagcatgattctttaatagaagttttattttttcgtgcactctgctaatcatgtgggtgagccagtggaacagcgggagacctgtgctagttttacagattgcctcctwatgacgcggctcaaaaggaaaccaagtggtcaggagttgtttctgacccmctgatctctactaccacwaggaraatagtttaggagaaacsagcttttactgtttttgaaaaattacagcttcmccctgtcaagttaacaaggaatgcctgtgccaataaaagktttctccaacttgaagtctactctgatgggatctcagatcctttgtcactgcctatagacttgtagctgctgtctctctttgtccctgcagagaatcaygtcctggaactgcatgttcttgcgactcttgggacttcatcttaacttctcgctgccccagccatgttttcaaccatggcatccctcccccaattagttccctgtcatcctcgtcaaccttctctgtaagtgcctggtaarcttgcccttgcttaagaactcaaaacatagctgtgctctatttttttgttgttgttgtgactgacagagtgagattccgtctcccrggctggagtgcagtggcgccttctcagctcactgcaacctgcagcctcctagattcaagcgattctcctgcttcagccttccgagtagctgggatgacaggcactcaccaatatgcctgggtaatttttgtatttttaagtacatacaggatttcaccatgttggccaggctagtttcaaactccyggcctcaggtggtctgcctgcctcagcctcccaaagtgttgggattacaggygtgagccactgggccctgcctgtaytttttatcagccacaaatccagcaacaagctgaggattcagctcataaaacaggyttggtgtcttggtgatctcacataaccaagatgctaccccgtggggaaccacatccccctggatgccctccagccttggtttgggctggagtcagggcctgkatacagtattttgaatttgtatgccactggtttgcattgctggtcaggaactctagtgctttgcatagccctggtttagaaacatgttatagcagttcttggtatagagcaaactagaagaaccagcaatcattccactgtcctgccaaggtacacctcagtactccccttcccaactgaagtggtatgaggctrgctctttccaaaagcattcaagtttggcttctgatgtgactcagaatttaggaaccagatgctagatcaaataagctctgaaaatctgaggaacattgtaggaaaggtttgttaagcatctcttaagtgccatgatgagcataacagccggccgtsgtggctcrcgcctgtaakcccagcactttgggaggccaaggtgggaggatgacaag

SEQ ID NO: 151 - DNA, 3919 bp, Homo sapiens
gataaggggaaagctgttttgcttggctctcattctgtctttgcctgctgccatccacacaagatgtgacttgtttctccttgccttccaccgtgattgtgaggcctccccagccatgtggaactaattccagtttttccgtctccaaatagccggggttggaagatgggttctcgccctgacaccgcagagctctgtctcatctatagaacaagagtacagccgcctccgttatctcccgactgcagctgctcttaacggtttcgctcttgttgcccaggctggagtgcagtggtgtgaactcagctcaccgcaacctccgcctcccaggttcaagcgattctcctgcctcagcctcccgaggarctgggattacaggcatgcgccatcatgcccagctaatgttttgtatgcaccttttcttaactattattgaaggggtggcctgcccctccacacctgtgggtgttcctcgttgggtggaacgagagactgagaaaagaaagagacacagcgacaaagtatagagaaagaaaagtgggcccaggggactggcgctcagcataaggaggacccgcaccagcaccagtctctgagttccctcagtatttattgatcattatctctaccatctcagagagggggacgtggcaggacaatagggtaatagtggggagagggtcagcaggaaaacatgtgaacaaatgtctgtgtcataaacaaggttaagaaaaggtgctgtgcttttgacgtgcacatacataaacatctcggtgcattaaaaagcagtattgccgccagcatgtctcacctccagccctaaggtggttttctcctatctcagtaaatagaacatacaatcgggttttacaccaaaacattccattgcccagggataagcagaagacagatgccttcctcttatctcaactgcaaagaggccttcctcttttactaatcctcctcagcacagaccctttgtgggtgtcrggctgggggacagtcaggtctttcccttcccacgaggccatatctcaggctatcacatggggagaaaccttggacaatacctggctttcctagacagaggtccctgcggccttccgcagtgtattgtgtccctgggtacttgagattagagagtggtgatgacctttaacaagyatgctgccttcaagcacttgtttaacaaagcacatcctgcacagccctaaatccattaaaccgtgagtcaacacagcacatgtctctgtgagcacagggttgggggtagggttacagattaacagcatctcaaggcagaagaatttttctyagcacagaccaaaatggagtctcttatgtctacttctttctacatagacacagtaacagtctgatctctttttcttttccccacaattataagagtatacaaggtggtgatgaagaaacctgggattacgtgctgtgaaatggggataacagcaattctaacttcatagttttctcatggtaattaaatgacacaaaatcatgttaagttccaagacaagagtctggtgcattttaagtgctcagtaaatactagcaattattaattgttgttatttgccaccattctccaagagtacaagaaaatatttatgactggacttagggagcaaacactcacgttgaccatacggtgagtaataagatgcagtcttcttagcatcaccaaagtcatagaccacaggtatggctgggccattgtcattccaacatttccctgatctgtatttcactgggtatttctgcagagacccagaagaaaggttttgtgaggacagtagagatgctgccacagtgtggggggaggaggggtttcaaattaactgccattacccaaaaccaatcctcataatagtgactgcttttccccatagctgtgtctccccaacagccccaaaccccttgtccctgtctctttctccccatgctttcctgtcccacaggcctcttccttgcyggcttagagtttctgagagrccagacatgagttcacagtgaatcaaaggaaggagaaacagccaaccactcagtagtgatgtggaaccacaggacagatctgccccctaccctagacacttcgatctctgttcaccaaagaaagtgccccccagccagcagccctgtgtacctggtagatgccaaacagattatgtcccagtctctggaggaagccagtgttggtgcggtacctcagcagggcgctgtttctccaatgctgcatgggggacttgttgggcacatgccagatgcccaggtccttggcctggatgtcgtagtagccagggttctggaaagcaacagacactgagcctgactgggccaggaggtaccaggaggcagaaggtccacatgtgcagcctcagctgggctgagagctctgggatcagtaggcagatggccagccacgctcagacaccccactcccagctgatgatcccaccaccacccagggccctaacagccttgttgagaggaagttgtgattcaagtcctgtatttctctcttcttctccagcccttccccatatccccaccttccagccctccctcctgcaggctggtggccagccacactccacacctcaccctcacccragtrggagagaagtggcaccaaccttgtagtcatcgctcgtggccgcctctgcagatccaaaggtgttgtagttggcccagttgccatccccctctgggtagtctgctttgttgccctgctgactggaccagcgatcacccaccgtgcacttcccaygcatgtcattctcgtgcacgctggccaccagggtccagccgccacccccagaagtcatgtcacagaaggtctggtagacaacaccattcttggtgcggagaaaatacaggccatctgtagagagaaccagcccagagcctccctgtctgagagctcagggttcatctcagctccgtgaatagaaaagccctaggaagtcaaaagcacactcagaagactycaacacatacttgctggaagaygatgctccaygcatcttgtgtkctgctcacctatgagcagaggcactgactgtcttggcttcacactatcttttcaaagagtttgtagagcaaatagtcttagaagagacagagatggtatctccctctcgacagtgccaccctgtggccasgagaggccagaaatcagcacacgccacatctgattctacagcaggatagggcctctgtgcagctcagagcaaaggttgtgcccacttcataagattcagcttccctaagctcagagttcccctcctgttcacaagcttgcaggagactggctccacggtggcatcctggtgaccttgcacatttgcgcataggccacatagggacagctgacctaagtcttggcagaaagcctgtggtcttccccaaacatggaaagatgggaaccttgtgaggagctgcaacaaggtcacttctcaccccccttcccatctttcgtggaggctgtcatgagacagctgtcataactgtgtcatcatctcctgggttctgaagaggtatgaggctttttgcctcactcacccccaccccgtagggtacacaggctatgaaacagctatggcagcatggactggctcctcagccactgcccatgttgtgttgtcactcgccctcttttctgtgctgtcttgtggggcaagggatgggaaaagctgacacttttgccgatcttgaacttgctagctatgtgagtaataaactctctggctctaaaaagggtttgttgtttccttgccagccacatttgtcagccagcttgacaaacccactacttgggcagatgtcacctggcccagtacaagaaaatgctgatgctctggctactgctatttctgtgattaataaagctctttgtctctgg

SEQ ID NO: 152 - DNA, 3747 bp, Homo sapiens
ccagcccaggccccattgttcccggtttccagccatggctgccattacctgaccagcgccacagccggtctctctgcaggcgccgggagaagtgaccagagcaatttctgcttttcacagggcgggtttctcaacggtgacttgtgggcagtgccttctgctgagcgagtcatggcccgaaggcagaactaactgtgcctgcagtcttcactctcaggatgcagccgaggtgggcccaaggggccacgatgtggcttggagtcctgctgacccttctgctctgttcaagccttgagggtcaagaaaactctttcacaatcaacagtgttgacatgaagagcctgccggactggacggtgcaaaatgggaagaacctgaccctgcagtgcttcgcggatgtcagcaccacctctcacgtcaagcctcagcaccagatgctgttctataaggatgacgtgctgttttacaacatctcctccatgaagagcacagagagttattttattcctgaagtccggatctatgactcagggacatataaatgtactgtgattgtgaacaacaaagagaaaaccactgcagagtaccagstgttggtggaaggagtgcccagtcccagggtgacactggacaagaaagaggccatccaaggtgggatcgtgagggtcaactgttctgtcccagaggaaaaggccccaatacacttcacaattgaaaaacttgaactaaatgaaaaaatggtcaagctgaaaagagagaagaattctcgagaccagaattttgtgatactggaattccccgttgaggaacaggaccgcgttttatccttccgatgtcaagctaggatcatttctgggatccatatgcagacctcagaatctaccaagagtgaactggtcaccgtgacggaatccttctctacacccaagttccacatcagccccaccggaatgatcatggaaggagctcagctccacattaagtgcaccattcaagtgactcacctggcccaggagtttccagaaatcataattcagaaggacaaggcgattgtggcccacaacagacatggcaacaaggctgtgtactcagtcatggccatggtggagcacagtggcaactacacgtgcaaagtggagtccagccgcatatccaaggtcagcagcatcgtggtcaacataacagaactattttccaagcccgaactggaatcttccttcacacatctggaccaaggtgaaagactgaacctgtcctgctccatcccaggagcacctccagccaacttcaccatccagaaggaagatacgattgtgtcacagactcaagatttcaccaagatagcctcaaagtcggacagtgggacgtatatctgcactgcaggtattgacaaagtggtcaagaaaagcaacacagtccagatagtcgtatgtgaaatgctctcccagcccaggatttcttatgatgcccagtttgaggtcataaaaggacagaccatcgaagtccgttgcgaatcgatcagtggaactttgcctatttcttaccaacttttaaaaacaagtaaagttttggagaatagtaccaagaactcaaatgatcctgcggtattcaaagacaaccccactgaagacgtcgaataccagtgtgttgcagataattgccattcccaygccaaaatgttaagtgaggttctgagggtgaaggtgatagccccrgtggatgaggtccagatttctatcctgtcaagtaaggtggtrgagtctggagaggacattgtgctgcaatgtgctgtgaatgaaggatctggtcccatcacctataagttttacagagaaaaagagggcaaacccttctatcaaatgacctcaaatgccacccaggcattttggaccaagcagaaggctadcaaggaacaggagggagagtattactgcacagccttcaacagagccaaccacgcctccagtgtccccagaagcaaaatactgacagtcagagtcattcttgccccatggaagaaaggacttattgcagtggttatcatcggagtgatcattgctctcttgatcattgcggccaaatgttattttctgaggaaagccaaggccaagcagatgccagtggaaatgtccaggccagcagtaccacttctgaactcyaacaacgagaaaatgtcagatcccaatatggaagctaacagtcattacggtcacaatgacgatgtcrgaaaccatgcaatgaaaccaataaatgataataaagagcctctgaactcagacgtgcagtacacggaagttcaagtgtcctcagctgagtctcacaaagatctaggaaagaaggacacagagacagtgtacagtgaagtccggaaagctgtccctgatgccgtggaaagcagatactctagaacggaaggctcccttgatggaacttagacagcaaggccagatgcacatccctggaaggacatccatgttccgagaagaacagatratccctgtatttcaagacctctgtgcacttatttatgaacctgccctgctcccacagaacacagcaattcctcaggctaagctgccggttcttaaatccatcctgctaagttaatgttgggtagaaagagatacagaggggctgttgaatttcccacataccctccttccaccaagttggaacatccttggaaaytggaagagcacaagaggagatccagggcaaggccattgggatattctgaaacttgaatattttgttttgtgcagagataaagaccttttccatgcaccctcatacacagaaaccaattttcttttttatactcaatcatttctagcgcatggcctggttagaggctggttttttctcttttcctttggtccttcaaaggcttgtagttttggstagtccttgttctttggaaatacacagtgctgaccagacagcctccccctgtcccctctatgacctcgccctccacaaatgggaaaaccagactacttgggagcacckcctgtgaaataccaacctgaagacacsgttcattcaggcaacgcacaaaacagaaaatgaaggtggaacaagcacagatgttcttcaamtgtttttgtctacactctttctcttttcctctaccatgctgaaggctgaaagacaggaagatggtgccatcagcaaatattattcttaattgaaaacttraaatgtgtatgtttcttactaatttttaaaaatgtattccttgccagggcaggcaaggtggctcacgcctgtaatcccagcacttcaggaggctgaggtgggcggatcacctgaggtcaggagtttgagaccagcctgatgaaaccctgtctctactaaaaatacaagaattagccgggcgtggtggcgcatgcctgtrgtatcagctactcaagaggctgaggtgagattatcgcttgaacccaggaaacggaggttgtagtgagcggagatcgcgccactgcactccagcctgagtgacagagtgagaatccatctcaaaaaaaacaaaaaacaaaattgcttgctaaagaagtggtctcctgaggtcttaagacattcctgacagtgtcttgagtgggtgggagaraggytgctgtcattgcgctgtggaatttcacagatgagaaccacgcctagccaaaatcacttttcctgtttgcctcagtgacacagctgcagggaccctcgtggatgttgtattaaataaatttgacctttrctctttgc

SEQ ID NO: 153 - DNA, 3715 bp, Homo sapiens
tttcattttttcaagtggaaccatggaggagagtggctgcccaaggtggggtttgtcttttgctgtctgagtggcccctgggatgcagggcgggtttctcaacggtgacttgtgggcagtgccttctgctgagcgagtcatggcccgaaggcagaactaactgtgcctgcagtcttcactctcaggatgcagccgaggtgggcccaaggggccacgatgtggcttggagtcctgctgacccttctgctctgttcaagccttgagggtcaagaaaactctttcacaatcaacagtgttgacatgaagagcctgccggactggacggtgcaaaatgggaagaacctgaccctgcagtgcttcgcggatgtcagcaccacctctcacgtcaagcctcagcaccagatgctgttctataaggatgacgtgctgttttacaacatctcctccatgaagagcacagagagttattttattcctgaagtccggatctatgactcagggacatataaatgtactgtgattgtgaacaacaaagagaaaaccactgcagagtaccagstgttggtggaaggagtgcccagtcccagggtgacactggacaagaaagaggccatccaaggtgggatcgtgagggtcaactgttctgtcccagaggaaaaggccccaatacacttcacaattgaaaaacttgaactaaatgaaaaaatggtcaagctgaaaagagagaagaattctcgagaccagaattttgtgatactggaattccccgttgaggaacaggaccgcgttttatccttccgatgtcaagctaggatcatttctgggatccatatgcagacctcagaatctaccaagagtgaactggtcaccgtgacggaatccttctctacacccaagttccacatcagccccaccggaatgatcatggaaggagctcagctccacattaagtgcaccattcaagtgactcacctggcccaggagtttccagaaatcataattcagaaggacaaggcgattgtggcccacaacagacatggcaacaaggctgtgtactcagtcatggccatggtggagcacagtggcaactacacgtgcaaagtggagtccagccgcatatccaaggtcagcagcatcgtggtcaacataacagaactattttccaagcccgaactggaatcttccttcacacatctggaccaaggtgaaagactgaacctgtcctgctccatcccaggagcacctccagccaacttcaccatccagaaggaagatacgattgtgtcacagactcaagatttcaccaagatagcctcaaagtcggacagtgggacgtatatctgcactgcaggtattgacaaagtggtcaagaaaagcaacacagtccagatagtcgtatgtgaaatgctctcccagcccaggatttcttatgatgcccagtttgaggtcataaaaggacagaccatcgaagtccgttgcgaatcgatcagtggaactttgcctatttcttaccaacttttaaaaacaagtaaagttttggagaatagtaccaagaactcaaatgatcctgcggtattcaaagacaaccccactgaagacgtcgaataccagtgtgttgcagataattgccattcccaygccaaaatgttaagtgaggttctgagggtgaaggtgatagccccrgtggatgaggtccagatttctatcctgtcaagtaaggtggtrgagtctggagaggacattgtgctgcaatgtgctgtgaatgaaggatctggtcccatcacctataagttttacagagaaaaagagggcaaacccttctatcaaatgacctcaaatgccacccaggcattttggaccaagcagaaggctadcaaggaacaggagggagagtattactgcacagccttcaacagagccaaccacgcctccagtgtccccagaagcaaaatactgacagtcagagtcattcttgccccatggaagaaaggacttattgcagtggttatcatcggagtgatcattgctctcttgatcattgcggccaaatgttattttctgaggaaagccaaggccaagcagatgccagtggaaatgtccaggccagcagtaccacttctgaactcyaacaacgagaaaatgtcagatcccaatatggaagctaacagtcattacggtcacaatgacgatgtcrgaaaccatgcaatgaaaccaataaatgataataaagagcctctgaactcagacgtgcagtacacggaagttcaagtgtcctcagctgagtctcacaaagatctaggaaagaaggacacagagacagtgtacagtgaagtccggaaagctgtccctgatgccgtggaaagcagatactctagaacggaaggctcccttgatggaacttagacagcaaggccagatgcacatccctggaaggacatccatgttccgagaagaacagatratccctgtatttcaagacctctgtgcacttatttatgaacctgccctgctcccacagaacacagcaattcctcaggctaagctgccggttcttaaatccatcctgctaagttaatgttgggtagaaagagatacagaggggctgttgaatttcccacataccctccttccaccaagttggaacatccttggaaaytggaagagcacaagaggagatccagggcaaggccattgggatattctgaaacttgaatattttgttttgtgcagagataaagaccttttccatgcaccctcatacacagaaaccaattttcttttttatactcaatcatttctagcgcatggcctggttagaggctggttttttctcttttcctttggtccttcaaaggcttgtagttttggstagtccttgttctttggaaatacacagtgctgaccagacagcctccccctgtcccctctatgacctcgccctccacaaatgggaaaaccagactacttgggagcacckcctgtgaaataccaacctgaagacacsgttcattcaggcaacgcacaaaacagaaaatgaaggtggaacaagcacagatgttcttcaamtgtttttgtctacactctttctcttttcctctaccatgctgaaggctgaaagacaggaagatggtgccatcagcaaatattattcttaattgaaaacttraaatgtgtatgtttcttactaatttttaaaaatgtattccttgccagggcaggcaaggtggctcacgcctgtaatcccagcacttcaggaggctgaggtgggcggatcacctgaggtcaggagtttgagaccagcctgatgaaaccctgtctctactaaaaatacaagaattagccgggcgtggtggcgcatgcctgtrgtatcagctactcaagaggctgaggtgagattatcgcttgaacccaggaaacggaggttgtagtgagcggagatcgcgccactgcactccagcctgagtgacagagtgagaatccatctcaaaaaaaacaaaaaacaaaattgcttgctaaagaagtggtctcctgaggtcttaagacattcctgacagtgtcttgagtgggtgggagaraggytgctgtcattgcgctgtggaatttcacagatgagaaccacgcctagccaaaatcacttttcctgtttgcctcagtgacacagctgcagggaccctcgtggatgttgtattaaataaatttgacctttrctctttgc

SEQ ID NO: 154 - DNA, 3248 bp, Homo sapiens
gaggggacgggctcacgtctgctcctcacactgcagctgctgggccgtggagcttccccagggagccagggggacttttgccgcagccatgaagggggcacgctggaggagggtcccctgggtgtccctgagctgcctgtgtctctgcctccttccgcatgtggtcccaggaaccacagaggacacattaataactggaagtaaaactsctgccccagtcacctcaacaggctcaacaacagcgacactagagggacaatcaactgcagcttcttcaaggacctctaatcaggacatatcagcttcatctcagaaccaccagactaagagcacggagaccaccagcaaagctcaaaccgacaccctcacgcagatgatgacatcaactcttttttcttccccaagtgtacacaatgtgatggagactgttacgcaggagacagctcctccagatgaaatgaccacatcatttccctccagtgtcaccaacacactcatgatgacatcaaagactataacaatgacaacctccacagactccactcttggaaacacagaagagacatcaacagcaggaactgaaagttctaccccagtgacctcagcagtctcaataacagctggacaggaaggacaatcacgaamaacttcctggaggacctctatccaagacacatcagcttcttctcagaaccactggactcggagcacgcagaccaccagggaatctcaaaccagcaccctaacacacagaaccacttcaactccttctttctctccaagtgtacacaatgtgacagggactgtttctcagaagacatctccttcaggtgaaacagctacctcatccctctgtagtgtcacaaacacatccatgatgacatcagagaagataacagtgacaacctccacaggctccactcttggaaacccaggggagacatcatcagtacctgttactggaagtcttatgccagtcacctcagcagccttagtaacakttgatccagaaggacaatcaccagcaactttctcaaggacttctmctcaggacacaacagctttttctaagaaccaccagactcagagcgtggagaccaccagagtatctcaaatcaacaccctcaacaccctcacaccggttacaacatcaactgttttatcctcaccaagtggattcaacccaagtggaacagtttctcaggagacattcccttctggtgaaacaaccayctcatccccttccagtgtcagcaatacattcctggtaacatcaaaggtgttcagaatgccaayctccagagactctactcttggaaacacagaggagacatcactatctgtaagtggaaccatttctgcaatcacttccaaagtttcaaccatatggtggtcagacactctgtcaacagcactctcccccagttctytacctccaaaaatatccacagctttccacacccagcagagtgaaggtgcagagaccacaggacrgcctcatgagaggagctcattctctccaggtgtgtctcaagaaatatttactctacatgaaacaacaacatggccttcctcattctccagcaaaggccacacaacttggtcacaaacagaactgccctcaacatcaacaggtgctgccactaggcttgtcacaggaaatccatctacagggrcagctggcactattccaagggtcccctctaaggtctcagcaataggggaaccaggagagcccaccacatactcctcccacagcacaactctcccaaaaacaacaggggcaggcgcccagacacaatggacacaagaaacggggaccactggagaggctcttctcagcagcccaagctacagtgtgactcagatgataaaaacggccacatccccatcttcttcacctatgctggatagacacacatcmcaacaaattacaacggcaccatcaacaaatcattcaacaatacattccacaagcacctctcctcaggaatcaccagctgtttcccaaaggggtcacactcaagccccgcagaccacacaagaatcacaaaccacgaggtccgtctmccccatgactgacaccaagacagtcaccaccccaggttcttccttcacagccagtgggcactcgccctcagaaattgttcctcaggacgcacccaccataagtgcagcaacaacctttgccccagctcccaccggggatggtcacacaacccaggccccgaccacagcactgcaggcarcacccagcagccatgatgccaccctggggccctcaggaggcacgtcactttccaaaacaggtgcccttactctggccaactctgtagtgtcaacaccagggggcccagaaggacaatggacatcagcctctgccagcacctcacctgacacagcagcagccatgacccatacccaccaggctgagagcacagaggcctctggacaaacacagaccagcgaaccggcctcctcagggtcacgaaccacctcagcgggcacagctaccccttcctcatccggggcgagtggcacaacaccttcaggaagcgaaggaatatccacctcaggagagacgacaaggttttcatcaaacccctccagggacagtcacacaacccagtcaacaaccgaattgctgtccgcctcagccagtcatggtgccatcccagtaagcacaggaatggcgtcttcgatcgtccccggcacctttcatcccaccctctctgaggcctccactgcagggagaccgacaggacagtcaagcccaacttctcccagtgcctctcctcaggagacagccgccatttcccggatggcccagactcagaggacaagaaccagcagagggtctgacactatcagcctggcgtcccaggcaaccgacaccttctcaacagtcccacccacacctccatcgatcacatccastgggcttacatctccacaaacccagacccacactctgtcaccttcagggtctggtaaaaccttcaccacggccctcatcagcaacgccacccctcttcctgtcacctacgcttcctcggcatccacaggtgacaccacgcctcttcctgtcaccgacacttcctcagtatccacaggtcacgccacccctcttcctgtcaccagcttttcctcagtatccacaggtgacaccacccctcttcctgtcaccgacgcttcctcggcatccaccggtcacgccacccctcttcctgtcaccgacacttcctcag

SEQ ID NO: 155 - DNA, 553 bp, Homo sapiens
cacagtgtttatttgacactgaaacgaagagcttctgtamaatagaaagcacagtgtgtgcctggctctaaggcaggatgctaagagagagaaccagggtcagctggagaatagacaaatgcagagctcagagaggtgggacatccagctcgacgagggagtcttgggagaagtgaagcaaagaaacttatatggaagtcatatcgttgagagcgtggtccagctcctcgctgatggctttgtacttcagtttctgagcgtacagctcgtcttctaagtcatcaatgcttttctccaatttagttactgacctctccgcaaactcagcccgagtctcagcctccttcagcttgtcggaaaggaccttgatctcttcctcatatctgtcttccttctgcgagtacttatcctctgcagccattaatgctttcaaggtctgatccattattcttaattgttcttccagctgtcggacttggccttctgagagctcagcccgctcctctgcacgttccaggtcgctctcaatgatgaccagcttacgggccacctg

SEQ ID NO: 156 - DNA, 2874 bp, Homo sapiens
acacatccgcgcagaccaggaagcggatcccgtggagtgaaggtcgcaccgcggcggattgacttctaaagacttggtacgtgaggaaaaaacacggaagaggaagaggaaagcaaaggagtcagggatggctcttcytcagggtctactgacattcagggatgtggccatagaattctctcaggaggagtggaaatgcctggaccctgctcagaggactctatacagagacgtgatgctggagaattataggaacctggtctccctggatacctcttccaaatgcatgatgaagatgttctcatcaacaggacaaggcaatacagaagtggtccacacagggacattgcaaatacatgcaagtcatcacattggagatacttgcttccaggaaattgagaaagatattcatgactttgtgtttcagtggcaagaaaatgaaacaaatggccatgaagcactcatgacaaaaaycaaaaagttgatgagtagtacagagcgacatgatcaaaggcatgctggaaacaaacctattaaaaatgagcttggatcaagctttcattcgcatctgcctgaagtgcacatatttcaccccgaagggaaaattggtaatcaagttgagaaggcyatcaacgatgctttctcagtttcagcatcccaacgaatttcctgtaggccaaaaactcgtatttctaataagtataggaataatttcctccagtcttcattactcacacaaaaacgggaagtacacacaagagaaaaatctttccaacgtaatgagagtggcaaagcctttaatggtagctcactcttaaaaaaacatcagataatccatttaggagayaaacagtataaatgtgatgtatgcggcaaggactttcatcagaagcgataccttgcatgccatagatgtcacactggtgagaatccttacamgtgtaatgagtgtggcaagacattcagtcacaattcagccctgttagttcacaaggcaattcatactggagagaaaccttacaagtgtaatgaatgtggcaaggtttttaatcaacaatcaaaccttgcacgtcatcatagagttcatactggagagaaaccttacaaatgtgaagaatgtgacaaagttttcagtcgcaaatcacaccttgaaagacataggagaattcacactggagagaaaccatacaaatgtaaggtttgtgacaaggctttcagacgtgattcacacctggcacaacatactgtaattcacactggagagaaaccttacaagtgtaatgagtgtggcaagacctttgttcaaaattcatctcttgtaatgcataaggtcattcatactggagagaaacgttacaagtgtaatgaatgtggcaaggtttttaatcacaaatcaaaccttgcatgtcatcrtagacttcatactggagagaaaccttacaagtgtaatgaatgtggcaaggtttttaatcgaaaatcaaaccttgaaygtcatcatagacttcatactggaaagaaatcttagaagtgtaaatttgcaaggtttttaggcaacagtcaaaccttgcatgtcatcatagactttatactggagagaaaccttacaaatgtgaagaatgtgacaaaagttttcaatttcaaatcactccttgaaatrcataggagagttcatactggagagaaaccatacaaatgtaaggtttgtgacaaggatttcgggtgtgattcacacctggcccaacatactggaattcacactggaaaggaactgtacaagtgtaatgagtgtggcagagcctttggtggtcagtcaacacttactcaccatcaagcaatccrtggtatagggaaacttgactaatgtaatgattgtcacaaagtcttcagtaatattacagccattgcaaaacattggagaatccataatgaaggaggtcttacaagtgtaataaatgtggcaagtttttcagacatcattcataacttgcagttcattggcgatcttatacaggagagaaatcttacaaatgtgatgattgtggcaaggtcttcagtcaagcttcatcttttgcaaaacgggagaattcatacaggagagaaacctcacaagtgtgatgattgtgagcaaagcctttacttcacgttcacaccacattagatatcagaggatccatactggacagaaatcttacaaacgtcctatgtgtggcaaggtcttcagtccgaggttactccttgcagaatatcataacgttcatttttgaggtaatagttacaaatgcggtgagcacagcaaaccatcaaggrttgacagtagagtcaattsagaattgacttgagtttgagttgactkaaaacattcagttgaagcattaattgacattaaagtgtttatgttaagaggattgggccaggcgtgtggctcacgcctgtaaacccagcactttaggagcccaaggtggatagatcacttgaggtcatgagtttgagatcagcctggccaacagacgtgagtcacttttcccagcctgctttttgtttctttaacaaaaaccaataggggtttttataggtattgtgttgaatctgaatcacattggcttatataataacaatattgatttttccaaaccatcaatgtgggttgtatatatatgtttttaatcattttggttaatgtttgtagatttcaaggtgtgaaattctcagtttttttatgtttattcctaagtatttcttactttaagatctctagcaaatggaagtgttttttaattttcgtttaaattttttattgtttatggaaattcaattaatttttggtgctgctattgcattgtgcaaatccactgaatgtgttgattagttccagta

SEQ ID NO: 157 - DNA, 9175 bp, Homo sapiens
atggtcttgcttctttgtytatcttgtctgattttctcctgtctgaccttttcctggttaaaaatctgggggaaaatgacggactccaagccgatcaccaagagtaaatcagaagcaaacctcatcccgagccaggagccctttccagcctctgataactcaggggagacaccgcagagaaatggggagggccacactctgcccaagacacccagccaggccgagccagcctcccacaaaggccccaaagatgcyggtcggcggagaaactccctaccaccctcccaccagaagcccccaagaaaccccctttcttccagtgacgcagcaccctccccagagcttcaagccaacgggactgggacacaaggtctggaggccacagataccaatggcctgtcctcctcagccaggccccagggccagcaagctggctccccctccaaagaagacaagaagcaggcaaacatcaagaggcagctgatgaccaacttcatcctgggctcttttgatgactactcctcygacgaggactctgttgctggctcatctcgtgagtctacccggaagggcagccgggccagcttgggggccctgtccctggaggcttatctgaccacaggtgaagctgagacccgcgtccccactatgaggccgagcatgtcgggactccacctggtgaagaggggacgggaacacaagaagctggacctgcacagagactttaccgtggcttctcccgctgagtttgtcacacgctttgggggggatcgggtcatcgagaaggtgcttattgccaacaacgggattgccgcygtgaagtgcatgcgctccatccgcaggtgggcctatgagatgttccgcaacgagcgggccatccggtttgttgtgatggtgacccccgaggaccttaaggccaacgcagagtacatcaagatggcggatcattacgtccccgtcccaggagggcccaataacaacaactatgccaacgtggagctgattgtggacattgccaagagaatccccgtgcaggcggtgtgggctggctggggccatgcttcagaaaaccctaaacttccggagctgctgtgcaagaatggagttgctttcttaggccctcccagtgaggccatgtgggccttaggagataagatcgcctccaccgttgtcgcccagacgctacaggtcccaaccctgccctggagtggaagcggcctgacagtggagtggacagaagatgatctgcagcagggaaaaagaatcagtgtcccagaagatgtttatgacaagggttgcgtgaaagacgtagatgagggcttggaggcagcagaaagaattggttttccattgatgatcaaagcttctgaaggtggcggagggaagggaatccggaaggctgagagtgcggaggacttcccgatccttttcagacaagtacagagtgagatcccaggctcgcccatctttctcatgaagctggcccagcacgcccgtcacctggaagttcagatcctcgctgaccagtatgggaatgctgtgtctctgtttggtcgcgactgctccatccagcggcggcatcagaagatcgtkgaggaagcaccggccaccatcgccccgctggccatattcgagttcatggagcagtgtgccrtccgcctggccaagaccgtgggctatgtgagtgcagggacagtggaatacctctatagtcaggatggcagcttccacttcttggagctgaatcctcgcttgcaggtggaacatccctgcacagaaatgattgctgaygttaatctgccggccgcccagctacagggttttaagccgagctccgggactgtccaggaactgaatttccggagcagcaagaacgtgtggggttacttcagcgtggccgctactggaggcctgcacgagtttgcggattcccaatttgggcactgcttctcctggggagagaaccgggaagaggccatttcgaacatggtggtggctttgaaggaactgtccatccgaggygactttaggactaccgtggaatacctcattaacctcctggagaccgagagcttccagaacaacgacatcgacaccgggtggttggactacctcattgctgagaaagtgcaggcggagaaaccggatatcatgcttggggtggtatgcggggccttgaacgtggccgatgcgatgttcagaacgtgcatgacagatttcttacactccctggaaaggggccaggtcctcccagcggattcactactgaacctcgtagatgtggaattaatttacggaggtgttaagtacattctcaaggtggcccggcagtctctgaccrtgttcgttctcatcatgaatggctgccacatcgagattgatgcccaccggctgaatgatggggggctcctgctctcctacaatgggaacagctacaccacctacatgaaggaagaggttgacagttaccgaattaccatcggcaataagacgtgtgtgtttgagaaggagaacgatcctacagtcctgagatccccctcggctgggaagctgacacagtacacagtggaggatgggggccacgttgaggctgggagcagctacgctgagatggaggtgatgaagatgatcatgaccctgaacgttcaggaaagaggccgggtgaagtacatcaagcgtccaggtgccgtgctggaagcaggctgcgtggtggccaggctggagctcgatgacccttctaaagtccacccggctgaaccrttcacaggagaactccctgcccagcagacactgcccatcctcggagagaaactgcaccaggtcttccacagcgtcctggaaaacctcaccaaygtcatgagtggcttttgtctgccagagcccgtttttagcataaagctgaaggagtgggtgcagaagctcatgatgaccctccggcacccgtcactgccgctgctggagctgcaggagatcatgaccagcgtggcaggccgcatccccgcccctgtggagaagtctgtccgcagggtgatggcccagtatgccagcaacatcacctcggtgctgtgccagttccccagccagcagatagccaccatcctggactgccatgcagccaccctgcagcggaaggctgatcgagaggtcttcttcatcaacacccagagcatcgtgcagttggtccagagataccgcagcgggatccgcggctatatgaaaacagtggtgttggatctcctgagaagatacttgcgtgttgagcaccattttcagcaaggcaagagatgctgatgccaacaccagtgggatggtggggggcgtgaggagcctgagctttacctctgtgtggtgttttgtctcccccagcccactacgacaagtgtgtgataaacctcagggagcagttcaagccagacatgtcccaggtgctggactgcatcttctcccacgcacaggtggccaagaagaaccagctggtgatcatgttgatcgatgagctgtgtggcccagacccttccctgtcggacgagctgatctccatcctcaacgagctcactcagctgagcaaaagcgagcactgcaaagtggccctcagagcccggcagatcctgattgcctcccacctcccctcctacgagctgcggcataaccaggtggagtccattttcctgtctgccattgacatgtacggccaccagttctgccccgagaacctcaagaaattaatactttcggaaacaaccatcttcgacgtcctgcctactttcttctatcacgcaaacaaagtcgtgtgcatggcgtccttggaggtttacgtgcggaggggctacatcgcctatgagttaaacagcctgcagcaccggcagctcccggacrgcacctgcgtggtagaattccagttcatgctgccgtcctcccacccaaaccggatgaccgtgcccatcagcatcaccaaccctgacctgctgaggcacagcacagagctcttcatggacagcggcttctccccactgtgccagcgcatgggagccatggtagccttcaggagattcgaggacttcaccagaaattttgatgaagtcatctcttgcttcgccaacgtgcccaaagacacccccctcttcagcgaggcccgcacctccctatactccgaggatgactgcaagagcctcagagaagagcccatccacattctgaatgtgtccatccagtgtgcagaccacctggaggatgaggcactggtgccgattttacggacattcgtacagtccaagaaaaatatccttgtggattatggactccgacgaatcacattcttgattgcccaagagaaagaatttcccaagtttttcacattcagagcaagagatgagtttgcagaagatcgcatttaccgtcacttggaacctgccctggccttccagctggaactyaaccggatgcgtaacttcgatctgaccgccgtgccctgtgccaaccacaagatgcacctttacctgggtgctgccaaggtgaaggaaggtgtggaagtgacggaccataggttcttcatccgcgccatcatcaggcactctgacctgatcacaaaggaagcctccttcgaatacctgcagaacgagggtgagcggctgctcctggaggccatggacgagctggaggtggcgttcaataacaccagcgtgcgcaccgactgcaaccacatcttcctcaacttcgtgcccactgtcatcatggaccccttcaagatcgaggagtccgtgcgctacatggttatgcgctacggcagccggctgtggaaactccgtgtgctacaggctgaggtcaagatcaacatccgccagaccaccaccggcagtgccgttcccatccgcctgttcatcaccaatgagtcgggctactacctggacatcagcctctacaaagaagtgactgactccagatctggaaatatcatgtttcactccttcggcaacaagcaagggcsccagcacgggatgctgatcaatactscctacgtcaccaaggatctgctccaggccaagcgattccaggcccagaccctgggaaccacctacatctatgacttcccggaaatgttcaggcaggcaagctctctttaaactgtggggctccccagacaagtatcccaaagacatcctgacatacactgaattagtgttggactctcagggccagctggtggagatgaaccgacttcctggtggaaatgaggtgggcatggtggccttcaaaatgaggtttaagacccaggagtacccggaaggacgggatgtgatcgtcatcggcaatgacatcacctttcgcattggatcctttggccctggagaggaccttctgtacctgcgggcatccragatggcccgggcagagggcattcccaaaatttacgtggcagccaacagtggcgcccgtattggcatggcagaggagatcaaacacatgttccacgtggcttgggtggacccagaagacccccacaaaggatttaaatacctgtacctgactccccaagactacaccagaatcagctccctgaactccgtccactgtaaacacatcgaggaaggaggagagtccagatacatgatcacggatatcatcrggaaggatgatggcttgggcgtggagaatctgaggggctcaggcatgattgctggggagtcctctctggcttacgaagagatcgtcaccattagcttggtgacctgccgagccattgggattggggcctacttggtgaggctgggccagcgagtgatccaggtggagaattcccacatcatcctcacaggagcaagtgctctcaacaaggtcctgggaagagaggtctacacatccaacaaccagctgggtggcgttcagatcatgcattacaatggtgtctcccacatcaccgtgccagatgactttgagggggtttataccatcctggagtggctgtcctatatgccaaaggataatcacagccctgtccctatcatcacacccaytgaccccattgacagagaaattgaattcctcccatccagagctccctacgacccccggtggatgcttgcaggaaggcctcacccaactctgaagggaacgtggcagagcggattctttgaccayggcagtttcaaggaaatcatggcaccctgggcgcagaccgtggtgacaggacgagcaaggcttggggggattcccgtgggagtgattgctgtggagacacggactgtggaggtggcagtccctgcagaccctgccaacctggattctgaggccaagataattcagcaggcaggacaggtgtggttcccagactcagcctacaaaacygcccaggccrtcaaggacttcaaccgggagaagttgcccctgatgatctttgccaactggagggggttctccggtggcatgaaagacatgtatgaccaggtgctgaagtttggagcctacatcgtggacggccttagacaatacaaacagcccatcctgatctatatcccgccctatgcggagctccggggaggctcctgggtggtcatagatgccaccatcaaccckctgtgcatagaaatgtatgcagacaaagagagcaggggtggtgttctggaaccagaggggacagtggagattaagttccgaaagaaagatctgataaagtccatgagaaggatcgatccagcttacaagaagctcatggaacagctaggggaacctgatctctccgacaaggaccgaaaggacctggagggccggctaaaggctcgcgaggacctgctgctccccatctaccaccaggtggcggtgcagttcgccgacttccatgacacacccggccggatgctggagaagggcgtcatatctgacatcctggagtggaagaccgcacgcaccttcctgtattggcgtctgcgccgcctcctcctggaggaccaggtcaagcaggagatcctgcaggccagcggggagctgagtcacgtgcatatccagtccatgctgcgtcgctggttcgtggagacggagggggctgtcaaggcctacttgtgggacaacaaccaggtggttgtgcagtggctggaacagcactggcaggcaggggatggcccgcgctccaccatccgtgagaacatcacgtacctgaagcacgactctgtcctcaagaccatccgaggcctggttgaagaaaaccccgaggtggccgtggactgtgtgatatacctgagccagcacatcagcccagctgagcgggcgcaggtcgttcacctgctgtctaccatggacagcccggcctccacctgaccgtggcccrcccagccactcccgggaccacggcaaaaggaaccacccagacccaccacccgtacaccctcagcagaccctgaagacttgcttttaaacaaagaaaatcctgggcacttctgcagggctgctggttccgagctgacacccgtcttaayaaaaggcccaggagtgcctcttccaaacaaaaacagcctcctctccatagctgggaagtttattttgttttgtctctgaagacagcagttttattgcatcactaaatctaatcaagctaaaacatccctgtttccttttgcaaaacagtgcctggcatgtgggatccaggcgttctttaggatccttggataccacatcgtgaaatcttttatttttttactctgagaccagcaccagatgtaagtaagcatctcatatatttcagccaaataaatgggccaagggaaaaaaatatatatatatagacaggactagagaaaacctatttttgtaatgatgtttctttggatactgtctagtcacccagaaaaatgtatggatgaattttttttttttttttttgagacaaagtctcactgtgtcatgcaggctggagtgcagtggcatgatctcactgcaacctccatctcctgtctcagcctcctagataactgggattacaggtgcccaccaccatgcccggctaatttttgtatttttggtagagacagagtttcaccaggttggtcaggctggtctcaaactcttgacttcaggtaatccacccaccttggcctcccaaagtgmtgggattacaggcatgagccaccatcttcagccagatgatttttttattgagagagtgaaatgctattttgttccccaaatggcgctagtgaatcactaggagggtcccactgataggccatgtttagcactggttgccagggattctctttttgagagagggaaagcaaaatgaatggaagtacccagctggaggtttcagggcttctggaggatgctctcgcatagctcgaggtcctctgcccacctcttctctccaaggaaaatgaggactgccccttccccctgcaggattggcccccagcctgcgcatgcaccctcctcttgcccaagtggggagcacagaggcggagaggaatcccttaccacacccacggcccagcttgctcacgagtgtcacctctgtgacggtcaccactgctcccttggagggccacttgagttactgttgcttcctcgcctgctggcttgatgagcaccgatggtgggatctgaccccgaggggcagagctgtcggtgactgaggactggactgtggtgaccatgccgatttgctcagggagaacgttgcaatgcacccagcagctcctggctctgcaggcggcacagcctggggccctgtgatcctctggtttcttccaytggggcggagtcggggrtggagggagctggccacaacccactgctctgatgggtggtttgtccaargatgctgaatgtaatgcctggtcaatgtggaagcccatgaggttgcccagggaagcctccaaaagctgggatgcttgagggtatccaagttgaaaaagacaaaatctgaccatcagccagtgacagtcctggcaaatgaaggtggggcggggcagtgaggggtgggagaaggtgaatgattcattattccaccccgaggtttgctggggtgaggggaagaatcgatgctgctttgggaactgaaggtttttctgttgggaaggccctcttggttttggagagaaagacaagttatgagtagctgctaccctggaacggtgggcagagagcctactaggaaatgtgcagaataaactattttttgaaggaaaca

SEQ ID NO: 158 - DNA, 9023 bp, Homo sapiens
atggtcttgcttctttgtytatcttgtctgattttctcctgtctgaccttttcctggttaaaaatctgggggaaaatgacggactccaagccgatcaccaagagtaaatcagaagcaaacctcatcccgagccaggagccctttccagcctctgataactcaggggagacaccgcagagaaatggggagggccacactctgcccaagacacccagccaggccgagccagcctcccacaaaggccccaaagatgcyggtcggcggagaaactccctaccaccctcccaccagaagcccccaagaaaccccctttcttccagtgacgcagcaccctccccagagcttcaagccaacgggactgggacacaaggtctggaggccacagataccaatggcctgtcctcctcagccaggccccagggccagcaagctggctccccctccaaagaagacaagaagcaggcaaacatcaagaggcagctgatgaccaacttcatcctgggctcttttgatgactactcctcygacgaggactctgttgctggctcatctcgtgagtctacccggaagggcagccgggccagcttgggggccctgtccctggaggcttatctgaccacaggtgaagctgagacccgcgtccccactatgaggccgagcatgtcgggactccacctggtgaagaggggacgggaacacaagaagctggacctgcacagagactttaccgtggcttctcccgctgagtttgtcacacgctttgggggggatcgggtcatcgagaaggtgcttattgccaacaacgggattgccgcygtgaagtgcatgcgctccatccgcaggtgggcctatgagatgttccgcaacgagcgggccatccggtttgttgtgatggtgacccccgaggaccttaaggccaacgcagagtacatcaagatggcggatcattacgtccccgtcccaggagggcccaataacaacaactatgccaacgtggagctgattgtggacattgccaagagaatccccgcggtgtgggctggctggggccatgcttcagaaaaccctaaacttccggagctgctgtgcaagaatggagttgctttcttaggccctcccagtgaggccatgtgggccttaggagataagatcgcctccaccgttgtcgcccagacgctacaggtcccaaccctgccctggagtggaagcggcctgacagtggagtggacagaagatgatctgcagcagggaaaaagaatcagtgtcccagaagatgtttatgacaagggttgcgtgaaagacgtagatgagggcttggaggcagcagaaagaattggttttccattgatgatcaaagcttctgaaggtggcggagggaagggaatccggaaggctgagagtgcggaggacttcccgatccttttcagacaagtacagagtgagatcccaggctcgcccatctttctcatgaagctggcccagcacgcccgtcacctggaagttcagatcctcgctgaccagtatgggaatgctgtgtctctgtttggtcgcgactgctccatccagcggcggcatcagaagatcgtkgaggaagcaccggccaccatcgccccgctggccatattcgagttcatggagcagtgtgccrtccgcctggccaagaccgtgggctatgtgagtgcagggacagtggaatacctctatagtcaggatggcagcttccacttcttggagctgaatcctcgcttgcaggtggaacatccctgcacagaaatgattgctgaygttaatctgccggccgcccagctacagatcgccatgggcgtgccactgcaccggctgaaggatatccggcttctgtayggagagtcaccatggggagtgactcccatttcttttgaaaccccctcaaaccctcccctcgcccgaggccacgtcattgccrccagaatcaccagcgaaaacccagacgaggcaaccgagctccgggactgtccaggaactgaatttccggagcagcaagaacgtgtggggttacttcagcgtggccgctactggaggcctgcacgagtttgcggattcccaatttgggcactgcttctcctggggagagaaccgggaagaggccatttcgaactgtccatccgaggygactttaggactaccgtggaatacctcattaacctcctggagaccgagagcttccagaacaacgacatcgacaccgggtggttggactacctcattgctgagaaagtgcagaaaccggatatcatgcttggggtggtatgcggggccttgaacgtggccgatgcgatgttcagaacgtgcatgacagatttcttacactccctggaaaggggccaggtcctcccagcggattcactactgaacctcgtagatgtggaattaatttacggaggtgttaagtacattctcaaggtggcccggcagtctctgaccrtgttcgttctcatcatgaatggctgccacatcgagattgatgcccaccggctgaatgatggggggctcctgctctcctacaatgggaacagctacaccacctacatgaaggaagaggttgacagttaccgaattaccatcggcaataagacgtgtgtgtttgagaaggagaacgatcctacagtcctgagatccccctcggctgggaagctgacacagtacacagtggaggatgggggccacgttgaggctgggagcagctacgctgagatggaggtgatgaagatgatcatgaccctgaacgttcaggaaagaggccgggtgaagtacatcaagcgtccaggtgccgtgctggaagcaggctgcgtggtggccaggctggagctcgatgacccttctaaagtccacccggctgaaccrttcacaggagaactccctgcccagcagacactgcccatcctcggagagaaactgcaccaggtcttccacagcgtcctggaaaacctcaccaaygtcatgagtggcttttgtctgccagagcccgtttttagcataaagctgaaggagtgggtgcagaagctcatgatgaccctccggcacccgtcactgccgctgctggagctgcaggagatcatgaccagcgtggcaggccgcatccccgcccctgtggagaagtctgtccgcagggtgatggcccagtatgccagcaacatcacctcggtgctgtgccagttccccagccagcagatagccaccatcctggactgccatgcagccaccctgcagcggaaggctgatcgagaggtcttcttcatcaacacccagagcatcgtgcagttggtccagaggatgtggttgtcacctgaatcgtcgcatgcattgcaccagggtggcaagagatgctgatgccaacaccagtgggatggtggggggcgtgaggagcctgagctttacctctgtgtggtgttttgtctcccccagcccactacgacaagtgtgtgataaacctcagggagcagttcaagccagacatgtcccaggtgctggactgcatcttctcccacgcacaggtggccaagaagaaccagctggtgatcatgttgatcctgtgtggcccagacccttccctgtcggacgagctgatctccatcctcaacgagctcactcagctgagcaaaagcgagcactgcaaagtggccctcagagcccggcagttcccttagaaattaatactttcggaaacaaccatcttcgacgtcctgcctactttcttctatcacgcaaacaaagtcgtgtgcatggcgtccttggagttaaacagcctgcagcaccggcagctcccggacrgcacctgcgtggtagaattccagttcatgctgccgtcctcccacccaaaccggcacagcacagagctcttcatggacagcggcttctccccactgtgccagcgcatgggagccatggtagccttcaggagattcgaggacttcaccagtcatctcttgcttcgccaacgtgcccaaagacacccccctcttcagcgaggcccgcacctccctatactccgaggatgactgcaagcctcagagaagagcccatccacattctgaatgtgtccatccagtgtgcagaccacctggaggatgaggcactggtgccgattttacggacattcgtacagtccaagaaaaatatccttgtggattatggactccgacgaatcacattcttgattgcccaagagaaagaatttcccaagtttttcacattcagagcaagagatgagtttgcagaagatcgcatttaccgtcacttggaacctgccctggccttccagctggaactyaaccggatgcgtaacttcgatctgaccgccgtgccctgtgccaaccacaagatgcacctttacctgggtgctgccaaggtgaaggaaggtgtggaagtgacggaccataggttcttcatccgcgccatcatcaggcactctgacctgatcacaaaggaagcctccttcgaatacctgcagaacgagggtgagcggctgctcctggaggccatggacgagctggaggtggcgttcaataacaccagcgtgcgcaccgactgcaaccacatcttcctcaacttcgtgcccactgtcatcatggaccccttcaagatcgaggagtccgtgcgctacatggttatgcgctacggcagccggctgtggaaactccgtgtgctacaggctgaggtcaagatcaacatccgccagaccaccaccggcagtgccgttcccatccgcctgttcatcaccaatgagtcgggctactacctggacatcagcctctacaaagaagtgactgactccagatctggaaatatcatgtttcactccttcggcaacaagcaagggcsccagcacgggatgctgatcaatactscctacgtcaccaaggatctgctccaggccaagcgattccaggcccagaccctgggaaccacctacatctatgacttcccggaaatgttcaggcaggcaaacaagtatcccaaagacatcctgacatacactgaattagtgttggactctcagggccagctggtggagatgaaccgacttcctggtggaaatgaggtgggcatggtggccttcaaaatgaggtttaagacccaggagtacccggaaggacgggatgtgatcgtcatcggcaatgacatcacctttcgcattggatcctttggccctggagaggaccttctgtacctgcgggcatccragatggcccgggcagagggcattcccaaaatttacgtggcagccaacagtggcgcccgtattggcatggcagaggagatcaaacacatgttccacgtggcttgggtggacccagaagacccccacaaaggatttaaatacctgtacctgactccccaagactacaccagaatcagctccctgaactccgtccactgtaaacacatcgaggaaggaggagagtccagatacatgatcacggatatcatcrggaaggatgatggcttgggcgtggagaatctgaggggctcaggcatgattgctggggagtcctctctggcttacgaagagatcgtcaccattagcttggtgacctgccgagccattgggattggggcctacttggtgaggctgggccagcgagtgatccaggtggagaattcccacatcatcctcacaggagcaagtgctctcaacaaggtcctgggaagagaggtctacacatccaacaaccagctgggtggcgttcagatcatgcattacaatggtgtctcccacatcaccgtgccagatgactttgagggggtttataccatcctggagtggctgtcctatatgccaaaggataatcacagccctgtccctatcatcacacccaytgaccccattgacagagaaattgaattcctcccatccagagctccctacgacccccggtggatgcttgcaggaaggcctcacccaactctgaagggaacgtggcagagcggattctttgaccayggcagtttcaaggaaatcatggcaccctgggcgcagaccgtggtgacaggacgagcaaggcttggggggattcccgtgggagtgattgctgtggagacacggactgtggaggtggcagtccctgcagaccctgccaacctggattctgaggccaagataattcagcaggcaggacaggtgtggttcccagactcagcctacaaaacygcccaggccrtcaaggacttcaaccgggagaagttgcccctgatgatctttgccaactggagggggttctccggtggcatgaaagacatgtatgaccaggtgctgaagtttggagcctacatcgtggacggccttagacaatacaaacagcccatcctgatctatatcccgccctatgcggagctccggggaggctcctgggtggtcatagatgccaccatcaaccckctgtgcatagaaatgtatgcagacaaagagagcaggggtggtgttctggaaccagaggggacagtggagattaagttccgaaagaaagatctgataaagtccatgagaaggatcgatccagcttacaagaagctcatggaacagctaggggaacctgatctctccgacaaggaccgaaaggacctggagggccggctaaaggctcgcgaggacctgctgctccccatctaccaccaggtggcggtgcagttcgccgacttccatgacacacccggccggatgctggagaagggcgtcatatctgacatcctggagtggaagaccgcacgcaccttcctgtattggcgtctgcgccgcctcctcctggaggaccaggtcaagcaggagatcctgcaggccagcggggagctgagtcacgtgcatatccagtccatgctgcgtcgctggttcgtggagacggagggggctgtcaaggcctacttgtgggacaacaaccaggtggttgtgcagtggctggaacagcactggcaggcaggggatggcccgcgctccaccatccgtgagaacatcacgtacctgaagcacgactctgtcctcaagaccatccgaggcctggttgaagaaaaccccgaggtggccgtggactgtgtgatatacctgagccagcacatcagcccagctgagcgggcgcaggtcgttcacctgctgtctaccatggacagcccggcctccacctgaccgtggcccrcccagccactcccgggaccacggcaaaaggaaccacccagacccaccacccgtacaccctcagcagaccctgaagacttgcttttaaacaaagaaaatcctgggcacttctgcagggctgctggttccgagctgacacccgtcttaayaaaaggcccaggagtgcctcttccaaacaaaaacagcctcctctccatagctgggaagtttattttgttttgtctctgaagacagcagttttattgcatcactaaatctaatcaagctaaaacatccctgtttccttttgcaaaacagtgcctggcatgtgggatccaggcgttctttaggatccttggataccacatcgtgaaatcttttatttttttactctgagaccagcaccagatgtaagtaagcatctcatatatttcagccaaataaatgggccaagggaaaaaaatatatatatatagacaggactagagaaaacctatttttgtaatgatgtttctttggatactgtctagtcacccagaaaaatgtatggatgaattttttttttttttttttgagacaaagtctcactgtgtcatgcaggctggagtgcagtggcatgatctcactgcaacctccatctcctgtctcagcctcctagataactgggattacaggtgcccaccaccatgcccggctaatttttgtatttttggtagagacagagtttcaccaggttggtcaggctggtctcaaactcttgacttcaggtaatccacccaccttggcctcccaaagtgmtgggattacaggcatgagccaccatcttcagccagatgatttttttattgagagagtgaaatgctattttgttccccaaatggcgctagtgaatcactaggagggtcccactgataggccatgtttagcactggttgccagggattctctttttgagagagggaaagcaaaatgaatggaagtacccagctggaggtttcagggcttctggaggatgctctcgcatagctcgaggtcctctgcccacctcttctctccaaggaaaatgaggactgccccttccccctgcaggattggcccccagcctgcgcatgcaccctcctcttgcccaagtggggagcacagaggcggagaggaatcccttaccacacccacggcccagcttgctcacgagtgtcacctctgtgacggtcaccactgctcccttggagggccacttgagttactgttgcttcctcgcctgctggcttgatgagcaccgatggtgggatctgaccccgaggggcagagctgtcggtgactgaggactggactgtggtgaccatgccgatttgctcagggagaacgttgcaatgcacccagcagctcctggctctgcaggcggcacagcctggggccctgtgatcctctggtttcttccaytggggcggagtcggggrtggagggagctggccacaacccactgctctgatgggtggtttgtccaargatgctgaatgtaatgcctggtcaatgtggaagcccatgaggttgcccagggaagcctccaaaagctgggatgcttgagggtatccaagttgaaaaagacaaaatctgaccatcagccagtgacagtcctggcaaatgaaggtggggcggggcagtgaggggtgggagaaggtgaatgattcattattccaccccgaggtttgctggggtgaggggaagaatcgatgctgctttgggaactgaaggtttttctgttgggaaggccctcttggttttggagagaaagacaagttatgagtagctgctaccctggaacggtgggcagagagcctactaggaaatgtgcagaataaactattttttgaaggaaaca

SEQ ID NO: 159 - DNA, 9325 bp, Homo sapiens
atggtcttgcttctttgtytatcttgtctgattttctcctgtctgaccttttcctggttaaaaatctgggggaaaatgacggactccaagccgatcaccaagagtaaatcagaagcaaacctcatcccgagccaggagccctttccagcctctgataactcaggggagacaccgcagagaaatggggagggccacactctgcccaagacacccagccaggccgagccagcctcccacaaaggccccaaagatgcyggtcggcggagaaactccctaccaccctcccaccagaagcccccaagaaaccccctttcttccagtgacgcagcaccctccccagagcttcaagccaacgggactgggacacaaggtctggaggccacagataccaatggcctgtcctcctcagccaggccccagggccagcaagctggctccccctccaaagaagacaagaagcaggcaaacatcaagaggcagctgatgaccaacttcatcctgggctcttttgatgactactcctcygacgaggactctgttgctggctcatctcgtgagtctacccggaagggcagccgggccagcttgggggccctgtccctggaggcttatctgaccacaggtgaagctgagacccgcgtccccactatgaggccgagcatgtcgggactccacctggtgaagaggggacgggaacacaagaagctggacctgcacagagactttaccgtggcttctcccgctgagtttgtcacacgctttgggggggatcgggtcatcgagaaggtgcttattgccaacaacgggattgccgcygtgaagtgcatgcgctccatccgcaggtgggcctatgagatgttccgcaacgagcgggccatccggtttgttgtgatggtgacccccgaggaccttaaggccaacgcagagtacatcaagatggcggatcattacgtccccgtcccaggagggcccaataacaacaactatgccaacgtggagctgattgtggacattgccaagagaatcccctgtttgcaggcggtgtgggctggctggggccatgcttcagaaaaccctaaacttccggagctgctgtgcaagaatggagttgctttcttaggccctcccagtgaggccatgtgggccttaggagataagatcgcctccaccgttgtcgcccagacgctacaggtcccaaccctgccctggagtggaagcggcctgacagtggagtggacagaagatgatctgcagcagggaaaaagaatcagtgtcccagaagatgtttatgacaagggttgcgtgaaagacgtagatgagggcttggaggcagcagaaagaattggttttccattgatgatcaaagcttctgaaggtggcggagggaagggaatccggaaggctgagagtgcggaggacttcccgatccttttcagacaagtacagagtgagatcccaggctcgcccatctttctcatgaagctggcccagcacgcccgtcacctggaagttcagatcctcgctgaccagtatgggaatgctgtgtctctgtttggtcgcgactgctccatccagcggcggcatcagaagatcgtkgaggaagcaccggccaccatcgccccgctggccatattcgagttcatggagcagtgtgccrtccgcctggccaagaccgtgggctatgtgagtgcagggacagtggaatacctctatagtcaggatggcagcttccacttcttggagctgaatcctcgcttgcaggtggaacatccctgcacagaaatgattgctgaygttaatctgccggccgcccagctacagatcgccatgggcgtgccactgcaccggctgaaggatatccggcttctgtayggagagtcaccatggggagtgactcccatttcttttgaaaccccctcaaaccctcccctcgcccgaggccacgtcattgccrccagaatcaccagcgaaaacccagacgagggttttaagccgagctccgggactgtccaggaactgaatttccggagcagcaagaacgtgtggggttacttcagcgtggccgctactggaggcctgcacgagtttgcggattcccaatttgggcactgcttctcctggggagagaaccgggaagaggccatttcgaacatggtggtggctttgaaggaactgtccatccgaggygactttaggactaccgtggaatacctcattaacctcctggagaccgagagcttccagaacaacgacatcgacaccgggtggttggactacctcattgctgagaaagtgcagaaaccggatatcatgcttggggtggtatgcggggccttgaacgtggccgatgcgatgttcagaacgtgcatgacagatttcttacactccctggaaaggggccaggtcctcccagcggattcactactgaacctcgtagatgtggaattaatttacggaggtgttaagtacattctcaaggtggcccggcagtctctgaccrtgttcgttctcatcatgaatggctgccacatcgagattgatgcccaccggctgaatgatggggggctcctgctctcctacaatgggaacagctacaccacctacatgaaggaagaggttgacagttaccgaattaccatcggcaataagacgtgtgtgtttgagaaggagaacgatcctacagtcctgagatccccctcggctgggaagctgacacagtacacagtggaggatgggggccacgttgaggctgggagcagctacgctgagatggaggtgatgaagatgatcatgaccctgaacgttcaggaaagaggccgggtgaagtacatcaagcgtccaggtgccgtgctggaagcaggctgcgtggtggccaggctggagctcgatgacccttctaaagtccacccggctgaaccrttcacaggagaactccctgcccagcagacactgcccatcctcggagagaaactgcaccaggtcttccacagcgtcctggaaaacctcaccaaygtcatgagtggcttttgtctgccagagcccgtttttagcataaagctgaaggagtgggtgcagaagctcatgatgaccctccggcacccgtcactgccgctgctggagctgcaggagatcatgaccagcgtggcaggccgcatccccgcccctgtggagaagtctgtccgcagggtgatggcccagtatgccagcaacatcacctcggtgctgtgccagttccccagccagcagatagccaccatcctggactgccatgcagccaccctgcagcggaaggctgatcgagaggtcttcttcatcaacacccagagcatcgtgcagttggtccagagataccgcagcgggatccgcggctatatgaaaacagtggtgttggatctcctgagaagatacttgcgtgttgagcaccattttcagcaaggcaagagatgctgatgccaacaccagtgggatggtggggggcgtgaggagcctgagctttacctctgtgtggtgttttgtctcccccagcccactacgacaagtgtgtgataaacctcagggagcagttcaagccagacatgtcccaggtgctggactgcatcttctcccacgcacaggtggccaagaagaaccagctggtgatcatgttgatcgatgagctgtgtggcccagacccttccctgtcggacgagctgatctccatcctcaacgagctcactcagctgagcaaaagcgagcactgcaaagtggccctcagagcccggcaggtagggtctcaggctcccctcctacgagctgcggcataaccaggtggagtccattttcctgtctgccattgacatgtacggccaccagttctgccccgagaacctcaagaaattaatactttcggaaacaaccatcttcgacgtcctgcctactttcttctatcacgcaaacaaagtcgtgtgcatggcgtccttggaggtttacgtgcggaggggctacatcgcctatgagttaaacagcctgcagcaccggcagctcccggacrgcacctgcgtggtagaattccagttcatgctgccgtcctcccacccaaaccggatgaccgtgcccatcagcatcaccaaccctgacctgctgaggcacagcacagagctcttcatggacagcggcttctccccactgtgccagcgcatgggagccatggtagccttcaggagattcgaggacttcaccagaaattttgatgaagtcatctcttgcttcgccaacgtgcccaaagacacccccctcttcagcgaggcccgcacctccctatactccgaggatgactgcaagagcctcagagaagagcccatccacattctgaatgtgtccatccagtgtgcagaccacctggaggatgaggcactggtgccgattttacggacattcgtacagtccaagaaaaatatccttgtggattatggactccgacgaatcacattcttgattgcccaagagaaagaatttcccaagtttttcacattcagagcaagagatgagtttgcagaagatcgcatttaccgtcacttggaacctgccctggccttccagctggaactyaaccggatgcgtaacttcgatctgaccgccgtgccctgtgccaaccacaagatgcacctttacctgggtgctgccaaggtgaaggaaggtgtggaagtgacggaccataggttcttcatccgcgccatcatcaggcactctgacctgatcacaaaggaagcctccttcgaatacctgcagaacgagggtgagcggctgctcctggaggccatggacgagctggaggtggcgttcaataacaccagcgtgcgcaccgactgcaaccacatcttcctcaacttcgtgcccactgtcatcatggaccccttcaagatcgaggagtccgtgcgctacatggttatgcgctacggcagccggctgtggaaactccgtgtgctacaggctgaggtcaagatcaacatccgccagaccaccaccggcagtgccgttcccatccgcctgttcatcaccaatgagtcgggctactacctggacatcagcctctacaaagaagtgactgactccagatctggaaatatcatgtttcactccttcggcaacaagcaagggcsccagcacgggatgctgatcaatactscctacgtcaccaaggatctgctccaggccaagcgattccaggcccagaccctgggaaccacctacatctatgacttcccggaaatgttcaggcaggctctctttaaactgtggggctccccagacaagtatcccaaagacatcctgacatacactgaattagtgttggactctcagggccagctggtggagatgaaccgacttcctggtggaaatgaggtgggcatggtggccttcaaaatgaggtttaagacccaggagtacccggaaggacgggatgtgatcgtcatcggcaatgacatcacctttcgcattggatcctttggccctggagaggaccttctgtacctgcgggcatccragatggcccgggcagagggcattcccaaaatttacgtggcagccaacagtggcgcccgtattggcatggcagaggagatcaaacacatgttccacgtggcttgggtggacccagaagacccccacaaaggatttaaatacctgtacctgactccccaagactacaccagaatcagctccctgaactccgtccactgtaaacacatcgaggaaggaggagagtccagatacatgatcacggatatcatcrggaaggatgatggcttgggcgtggagaatctgaggggctcaggcatgattgctggggagtcctctctggcttacgaagagatcgtcaccattagcttggtgacctgccgagccattgggattggggcctacttggtgaggctgggccagcgagtgatccaggtggagaattcccacatcatcctcacaggagcaagtgctctcaacaaggtcctgggaagagaggtctacacatccaacaaccagctgggtggcgttcagatcatgcattacaatggtgtctcccacatcaccgtgccagatgactttgagggggtttataccatcctggagtggctgtcctatatgccaaaggataatcacagccctgtccctatcatcacacccaytgaccccattgacagagaaattgaattcctcccatccagagctccctacgacccccggtggatgcttgcaggaaggcctcacccaactctgaagggaacgtggcagagcggattctttgaccayggcagtttcaaggaaatcatggcaccctgggcgcagaccgtggtgacaggacgagcaaggcttggggggattcccgtgggagtgattgctgtggagacacggactgtggaggtggcagtccctgcagaccctgccaacctggattctgaggccaagataattcagcaggcaggacaggtgtggttcccagactcagcctacaaaacygcccaggccrtcaaggacttcaaccgggagaagttgcccctgatgatctttgccaactggagggggttctccggtggcatgaaagacatgtatgaccaggtgctgaagtttggagcctacatcgtggacggccttagacaatacaaacagcccatcctgatctatatcccgccctatgcggagctccggggaggctcctgggtggtcatagatgccaccatcaaccckctgtgcatagaaatgtatgcagacaaagagagcaggggtggtgttctggaaccagaggggacagtggagattaagttccgaaagaaagatctgataaagtccatgagaaggatcgatccagcttacaagaagctcatggaacagctaggggaacctgatctctccgacaaggaccgaaaggacctggagggccggctaaaggctcgcgaggacctgctgctccccatctaccaccaggtggcggtgcagttcgccgacttccatgacacacccggccggatgctggagaagggcgtcatatctgacatcctggagtggaagaccgcacgcaccttcctgtattggcgtctgcgccgcctcctcctggaggaccaggtcaagcaggagatcctgcaggccagcggggagctgagtcacgtgcatatccagtccatgctgcgtcgctggttcgtggagacggagggggctgtcaaggcctacttgtgggacaacaaccaggtggttgtgcagtggctggaacagcactggcaggcaggggatggcccgcgctccaccatccgtgagaacatcacgtacctgaagcacgactctgtcctcaagaccatccgaggcctggttgaagaaaaccccgaggtggccgtggactgtgtgatatacctgagccagcacatcagcccagctgagcgggcgcaggtcgttcacctgctgtctaccatggacagcccggcctccacctgaccgtggcccrcccagccactcccgggaccacggcaaaaggaaccacccagacccaccacccgtacaccctcagcagaccctgaagacttgcttttaaacaaagaaaatcctgggcacttctgcagggctgctggttccgagctgacacccgtcttaayaaaaggcccaggagtgcctcttccaaacaaaaacagcctcctctccatagctgggaagtttattttgttttgtctctgaagacagcagttttattgcatcactaaatctaatcaagctaaaacatccctgtttccttttgcaaaacagtgcctggcatgtgggatccaggcgttctttaggatccttggataccacatcgtgaaatcttttatttttttactctgagaccagcaccagatgtaagtaagcatctcatatatttcagccaaataaatgggccaagggaaaaaaatatatatatatagacaggactagagaaaacctatttttgtaatgatgtttctttggatactgtctagtcacccagaaaaatgtatggatgaattttttttttttttttttgagacaaagtctcactgtgtcatgcaggctggagtgcagtggcatgatctcactgcaacctccatctcctgtctcagcctcctagataactgggattacaggtgcccaccaccatgcccggctaatttttgtatttttggtagagacagagtttcaccaggttggtcaggctggtctcaaactcttgacttcaggtaatccacccaccttggcctcccaaagtgmtgggattacaggcatgagccaccatcttcagccagatgatttttttattgagagagtgaaatgctattttgttccccaaatggcgctagtgaatcactaggagggtcccactgataggccatgtttagcactggttgccagggattctctttttgagagagggaaagcaaaatgaatggaagtacccagctggaggtttcagggcttctggaggatgctctcgcatagctcgaggtcctctgcccacctcttctctccaaggaaaatgaggactgccccttccccctgcaggattggcccccagcctgcgcatgcaccctcctcttgcccaagtggggagcacagaggcggagaggaatcccttaccacacccacggcccagcttgctcacgagtgtcacctctgtgacggtcaccactgctcccttggagggccacttgagttactgttgcttcctcgcctgctggcttgatgagcaccgatggtgggatctgaccccgaggggcagagctgtcggtgactgaggactggactgtggtgaccatgccgatttgctcagggagaacgttgcaatgcacccagcagctcctggctctgcaggcggcacagcctggggccctgtgatcctctggtttcttccaytggggcggagtcggggrtggagggagctggccacaacccactgctctgatgggtggtttgtccaargatgctgaatgtaatgcctggtcaatgtggaagcccatgaggttgcccagggaagcctccaaaagctgggatgcttgagggtatccaagttgaaaaagacaaaatctgaccatcagccagtgacagtcctggcaaatgaaggtggggcggggcagtgaggggtgggagaaggtgaatgattcattattccaccccgaggtttgctggggtgaggggaagaatcgatgctgctttgggaactgaaggtttttctgttgggaaggccctcttggttttggagagaaagacaagttatgagtagctgctaccctggaacggtgggcagagagcctactaggaaatgtgcagaataaactattttttgaaggaaaca

SEQ ID NO: 160 - DNA, 3791 bp, Homo sapiens
attcctccggcctcagatgaccaggcaccactagatacagaayactgtgctttccttctccaagctttttctttcctggctgatgatttgtcattctagtcacttcctgccttgtgaccacacacccrggcttgacaaagctgttctgcagatcagaaagaaggggttcctggtcatacaccagtactaccaaggacagcttttttcctgcaagatctgttacctaaagcaataaaaaatggccagaggatcagtgtccgatgaggaaatgatggagctcagagaagcttttgccaaagttgatactgatggcaatggatacatcagcttcaatgagttgaatgacttgttcaaggctgcttgcttgcctttgcctgggtatagagtacgagaaattacagaaaacctgatggctacaggtgatctggaccaagatggaaggatcagctttgatgagtttatcaagattttccatggcctaaaaagcacagatgttgccaagacctttagaaaagcaatcaataagaaggaagggatttgtgcaatcggtggtacttcagagcagtctagcgttggcacccaacactcctattcagaggaagaaaagtatgcctttgtcaactggataaacaaagccctggaaaatgatcctgattgtcggcatgtcatcccaatgaacccaaacacgaatgatctctttaatgctgttggagatggcattgtcctttgtaaaatgatcaacctgtcagtgccagacacaattgatgaaagaacaatcaacaaaaagaagctaacccctttcaccattcaggaaaatctgaacttggctctgaactctgcctcagccatcgggtgccatgtggtcaacataggggctgaggacctgaaggaggggaagccttatctggtcctgggacttctgtggcaagtcatcaagattgggttgtttgctgacattgaactcagcagaaatgaagctctgattgctcttttgagagaaggtgagagcctggaggatttgatgaaactctcccctgaagagctcttgctgaggtgggctaattaccacctggaaaatgcaggctgcaacaaaattggcaacttcagtactgacatcaaggactcaaaagcttattaccacctgcttgagcaggtggctccaaaaggagatgaagaaggtgttcctgctgttgttattgacatgtcaggactgcgggagaaggatgacatccagagggcagaatgcatgctgcagcaggcggagaggctgggctgccggcagtttgtcacagccacagatgttgtccgagggaaccccaagttgaacttggcttttattgccaacctctttaacagataccctgccctgcacaaaccagagaaccaggacattgactggggggctcttgaaggtgagacgagagaagagcggacatttaggaactggatgaactccctgggtgttaaccctcgagtcaatcatttgtacagtgacttatcagatgccctggtcatcttccagctctatgaaaagatcaaagttcctgttgactggaacagagtaaacaaaccgccataccccaaactgggaggcaatatgaagaagcttgagaattgtaactacgcggtagaattggggaagaatcaagcgaagttctccctggttggcatcggtggacaagatctcaatgaaggaaaccgcactctcacactggccttgatttggcagctaatgagaaggtatacactgaatatcctcgaagaaattggtggtggccagaaggtcaatgatgacattattgtcaactgggtgaatgaaacattgagggaagcaragaaaagttcatccatctctagtttcaaggaccckaagattagtacaagtctgcctgttctggacctcatcgatgccatccaaccaggttccattaactatgaccttctgaagacagaaaatctgaatgatgatgagaaactcaacaatgcaaaatatgccatctctatggcccgaaaaattggagcaagagtgtatgccctgccagaagacctggttgaagtgaaccccaaaatggtcatgaccgtgtttgcctgcctcatggggaaaggaatgaagagggtgtgaggcccaatggggctgggtgggaggcggtgcactcactcctgactgcccggcacagatgctccagggatgattcaagccattccaaagttcaacttggtgacactctataagattccaaaaagcacatattagtgcagccaagtagcctctcctgtatttaacaaaaagtgcttcattctttgcaggaggcccaacctcctatatataggtttctattcttgatttatttgcttcttcgaaaatctagaggaaaagaaagaagttattttccaggtacccttctcgcttttgccattagccaaggatagaagctgcagtggtattaattttgatataatctttcaaaccagcttswtgtggcttcccttttctttgttcaagatgagggccaggaggggaaacatcacacctgccctaaaccctgttcctggaggtcagcatttgatctgttgcaagcccctctttctgtcccctcttcctaccctgcctcccwtgactttgctcctcacacttttggaaycatgccttccgggggggcccatctcttctggccgtccttgtctctgggccacttggagtgtgtgataaatcagtcaagctgttgaagtctcaggagtctctggtagcctgcagaagtaagcctcatcatcagagcctttcctcaaaactggagtcccaaatgtcatcaggttttgttttttttcagccactaagaacccctctgcttttaactctagaatttgggcttggaccagatctaacatcttgaatactctgccctctagagccttcagccttaatggaaggttggatccaaggagggtgtaatggagcatcaagccactcggcggcagcatggagctataactaagcatcctttagggttctgcctctccaggcatttagccctcacattagatctagttactgtggtatggctaatacctgtcaacatttggaggcaatcctaccttgcttttgcttctagagcttagcatatctgattgttgtcaggccatattatcaatgtttacttttttggtactataaaagctttctgccacccctaaactccaggggggamaatatgtgccaatcaatagcacccctactcacatacacacacacctagccagctgtcaagggcagaatgaatctatgctggataagaaatggtggaactgcgttatgaagagctaatttactggacaaagaattccaaagcaaaaccagaacagtatgaatttgagcaggtctcataggttgagcaatttccccctaaaccaactgaaggctaaaaagcaacaggccattgtgaaccaatgcaagacgccctctatcatggtgaaaagctccatcaatgaggtatcttctttagtggtggtatgtaatggaacttagccatttttcaaagcaattgaaatgcattgctctggatctgttccttggcagtggactcagaaagccaacatgtggctcctcccagcccataaccagtatttttgctgcttctgaatacaaattggttggttttgacttcagattgaacttactgtagcctcagatgatttcccccctccgcctccaggaagaaagaatgttactgccttaataaaaaatgaaaagagaatgatgctcaaaatctttccaaataaaatgttccytatat

SEQ ID NO: 161 - DNA, 3727 bp, Homo sapiens
ctttttctttcctggctgatgatttgtcattctagtcacttcctgccttgtgaccacacacccrggcttgacaaagctgttctgcagatcagaaagaaggggttcctggtcatacaccagtactaccaaggacagcttttttcctgcaagatctgttacctaaagcaataaaaaatggccagaggatcagtgtccgatgaggaaatgatggagctcagagaagcttttgccaaagttgatactgatggcaatggatacatcagcttcaatgagttgaatgacttgttcaaggctgcttgcttgcctttgcctgggtatagagtacgagaaattacagaaaacctgatggctacaggtgatctggaccaagatggaaggatcagctttgatgagtttatcaagattttccatggcctaaaaagcacagatgttgccaagacctttagaaaagcaatcaataagaaggaagggatttgtgcaatcggtggtacttcagagcagtctagcgttggcacccaacactcctattcagaggaagaaaagtatgcctttgtcaactggataaacaaagccctggaaaatgatcctgattgtcggcatgtcatcccaatgaacccaaacacgaatgatctctttaatgctgttggagatggcattgtcctttgtaaaatgatcaacctgtcagtgccagacacaattgatgaaagaacaatcaacaaaaagaagctaacccctttcaccattcaggaaaatctgaacttggctctgaactctgcctcagccatcgggtgccatgtggtcaacataggggctgaggacctgaaggaggggaagccttatctggtcctgggacttctgtggcaagtcatcaagattgggttgtttgctgacattgaactcagcagaaatgaagctctgattgctcttttgagagaaggtgagagcctggaggatttgatgaaactctcccctgaagagctcttgctgaggtgggctaattaccacctggaaaatgcaggctgcaacaaaattggcaacttcagtactgacatcaaggactcaaaagcttattaccacctgcttgagcaggtggctccaaaaggagatgaagaaggtgttcctgctgttgttattgacatgtcaggactgcgggagaaggatgacatccagagggcagaatgcatgctgcagcaggcggagaggctgggctgccggcagtttgtcacagccacagatgttgtccgagggaaccccaagttgaacttggcttttattgccaacctctttaacagataccctgccctgcacaaaccagagaaccaggacattgactggggggctcttgaaggtgagacgagagaagagcggacatttaggaactggatgaactccctgggtgttaaccctcgagtcaatcatttgtacagtgacttatcagatgccctggtcatcttccagctctatgaaaagatcaaagttcctgttgactggaacagagtaaacaaaccgccataccccaaactgggaggcaatatgaagaagcttgagaattgtaactacgcggtagaattggggaagaatcaagcgaagttctccctggttggcatcggtggacaagatctcaatgaaggaaaccgcactctcacactggccttgatttggcagctaatgagaaggtatacactgaatatcctcgaagaaattggtggtggccagaaggtcaatgatgacattattgtcaactgggtgaatgaaacattgagggaagcaragaaaagttcatccatctctagtttcaaggaccckaagattagtacaagtctgcctgttctggacctcatcgatgccatccaaccaggttccattaactatgaccttctgaagacagaaaatctgaatgatgatgagaaactcaacaatgcaaaatatgccatctctatggcccgaaaaattggagcaagagtgtatgccctgccagaagacctggttgaagtgaaccccaaaatggtcatgaccgtgtttgcctgcctcatggggaaaggaatgaagagggtgtgaggcccaatggggctgggtgggaggcggtgcactcactcctgactgcccggcacagatgctccagggatgattcaagccattccaaagttcaacttggtgacactctataagattccaaaaagcacatattagtgcagccaagtagcctctcctgtatttaacaaaaagtgcttcattctttgcaggaggcccaacctcctatatataggtttctattcttgatttatttgcttcttcgaaaatctagaggaaaagaaagaagttattttccaggtacccttctcgcttttgccattagccaaggatagaagctgcagtggtattaattttgatataatctttcaaaccagcttswtgtggcttcccttttctttgttcaagatgagggccaggaggggaaacatcacacctgccctaaaccctgttcctggaggtcagcatttgatctgttgcaagcccctctttctgtcccctcttcctaccctgcctcccwtgactttgctcctcacacttttggaaycatgccttccgggggggcccatctcttctggccgtccttgtctctgggccacttggagtgtgtgataaatcagtcaagctgttgaagtctcaggagtctctggtagcctgcagaagtaagcctcatcatcagagcctttcctcaaaactggagtcccaaatgtcatcaggttttgttttttttcagccactaagaacccctctgcttttaactctagaatttgggcttggaccagatctaacatcttgaatactctgccctctagagccttcagccttaatggaaggttggatccaaggagggtgtaatggagcatcaagccactcggcggcagcatggagctataactaagcatcctttagggttctgcctctccaggcatttagccctcacattagatctagttactgtggtatggctaatacctgtcaacatttggaggcaatcctaccttgcttttgcttctagagcttagcatatctgattgttgtcaggccatattatcaatgtttacttttttggtactataaaagctttctgccacccctaaactccaggggggamaatatgtgccaatcaatagcacccctactcacatacacacacacctagccagctgtcaagggcagaatgaatctatgctggataagaaatggtggaactgcgttatgaagagctaatttactggacaaagaattccaaagcaaaaccagaacagtatgaatttgagcaggtctcataggttgagcaatttccccctaaaccaactgaaggctaaaaagcaacaggccattgtgaaccaatgcaagacgccctctatcatggtgaaaagctccatcaatgaggtatcttctttagtggtggtatgtaatggaacttagccatttttcaaagcaattgaaatgcattgctctggatctgttccttggcagtggactcagaaagccaacatgtggctcctcccagcccataaccagtatttttgctgcttctgaatacaaattggttggttttgacttcagattgaacttactgtagcctcagatgatttcccccctccgcctccaggaagaaagaatgttactgccttaataaaaaatgaaaagagaatgatgctcaaaatctttccaaataaaatgttccytatat

SEQ ID NO: 162 - DNA, 4038 bp, Homo sapiens
aggcgaggcgggcgccgggaggggcaggcccagcccacggtgcagcgcgcgcggagccctcgccttcctccgacgcactgtggggctgcaggggaagctgcgggccgtgggggccggaggagaagccggctccacgcgcagctgctggcgaatgaggaaagatccagctctgacagaataatgagttgtgcaaagtgaaggccaaatgacatcaccggagatagcagtagttcaaagaaagcaaagcagaggaattgaactgctgcaaaatgcacgagtctcaaacattgtctcagcagcagcatcatatcttacaaaagttgaggaaatactgtatttccagcttaggaaactgaagattcctccggcctcagatgaccaggcaccactagatacagaayactgtgctttccttctccaagtcacttcctgccttgtgaccacacacccrggcttgacaaagctgttctgcagatcagaaagaaggggttcctggtcatacaccagtactaccaaggacagcttttttcctgcaagatctgttacctaaagcaataaaaaatggccagaggatcagtgtccgatgaggaaatgatggagctcagagaagcttttgccaaagttgatactgatggcaatggatacatcagcttcaatgagttgaatgacttgttcaaggctgcttgcttgcctttgcctgggtatagagtacgagaaattacagaaaacctgatggctacaggtgatctggaccaagatggaaggatcagctttgatgagtttatcaagattttccatggcctaaaaagcacagatgttgccaagacctttagaaaagcaatcaataagaaggaagggatttgtgcaatcggtggtacttcagagcagtctagcgttggcacccaacactcctattcagaggaagaaaagtatgcctttgtcaactggataaacaaagccctggaaaatgatcctgattgtcggcatgtcatcccaatgaacccaaacacgaatgatctctttaatgctgttggagatggcattgtcctttgtaaaatgatcaacctgtcagtgccagacacaattgatgaaagaacaatcaacaaaaagaagctaacccctttcaccattcaggaaaatctgaacttggctctgaactctgcctcagccatcgggtgccatgtggtcaacataggggctgaggacctgaaggaggggaagccttatctggtcctgggacttctgtggcaagtcatcaagattgggttgtttgctgacattgaactcagcagaaatgaagctctgattgctcttttgagagaaggtgagagcctggaggatttgatgaaactctcccctgaagagctcttgctgaggtgggctaattaccacctggaaaatgcaggctgcaacaaaattggcaacttcagtactgacatcaaggactcaaaagcttattaccacctgcttgagcaggtggctccaaaaggagatgaagaaggtgttcctgctgttgttattgacatgtcaggactgcgggagaaggatgacatccagagggcagaatgcatgctgcagcaggcggagaggctgggctgccggcagtttgtcacagccacagatgttgtccgagggaaccccaagttgaacttggcttttattgccaacctctttaacagataccctgccctgcacaaaccagagaaccaggacattgactggggggctcttgaaggtgagacgagagaagagcggacatttaggaactggatgaactccctgggtgttaaccctcgagtcaatcatttgtacagtgacttatcagatgccctggtcatcttccagctctatgaaaagatcaaagttcctgttgactggaacagagtaaacaaaccgccataccccaaactgggaggcaatatgaagaagcttgagaattgtaactacgcggtagaattggggaagaatcaagcgaagttctccctggttggcatcggtggacaagatctcaatgaaggaaaccgcactctcacactggccttgatttggcagctaatgagaaggtatacactgaatatcctcgaagaaattggtggtggccagaaggtcaatgatgacattattgtcaactgggtgaatgaaacattgagggaagcaragaaaagttcatccatctctagtttcaaggaccckaagattagtacaagtctgcctgttctggacctcatcgatgccatccaaccaggttccattaactatgaccttctgaagacagaaaatctgaatgatgatgagaaactcaacaatgcaaaatatgccatctctatggcccgaaaaattggagcaagagtgtatgccctgccagaagacctggttgaagtgaaccccaaaatggtcatgaccgtgtttgcctgcctcatggggaaaggaatgaagagggtgtgaggcccaatggggctgggtgggaggcggtgcactcactcctgactgcccggcacagatgctccagggatgattcaagccattccaaagttcaacttggtgacactctataagattccaaaaagcacatattagtgcagccaagtagcctctcctgtatttaacaaaaagtgcttcattctttgcaggaggcccaacctcctatatataggtttctattcttgatttatttgcttcttcgaaaatctagaggaaaagaaagaagttattttccaggtacccttctcgcttttgccattagccaaggatagaagctgcagtggtattaattttgatataatctttcaaaccagcttswtgtggcttcccttttctttgttcaagatgagggccaggaggggaaacatcacacctgccctaaaccctgttcctggaggtcagcatttgatctgttgcaagcccctctttctgtcccctcttcctaccctgcctcccwtgactttgctcctcacacttttggaaycatgccttccgggggggcccatctcttctggccgtccttgtctctgggccacttggagtgtgtgataaatcagtcaagctgttgaagtctcaggagtctctggtagcctgcagaagtaagcctcatcatcagagcctttcctcaaaactggagtcccaaatgtcatcaggttttgttttttttcagccactaagaacccctctgcttttaactctagaatttgggcttggaccagatctaacatcttgaatactctgccctctagagccttcagccttaatggaaggttggatccaaggagggtgtaatggagcatcaagccactcggcggcagcatggagctataactaagcatcctttagggttctgcctctccaggcatttagccctcacattagatctagttactgtggtatggctaatacctgtcaacatttggaggcaatcctaccttgcttttgcttctagagcttagcatatctgattgttgtcaggccatattatcaatgtttacttttttggtactataaaagctttctgccacccctaaactccaggggggamaatatgtgccaatcaatagcacccctactcacatacacacacacctagccagctgtcaagggcagaatgaatctatgctggataagaaatggtggaactgcgttatgaagagctaatttactggacaaagaattccaaagcaaaaccagaacagtatgaatttgagcaggtctcataggttgagcaatttccccctaaaccaactgaaggctaaaaagcaacaggccattgtgaaccatggtgaaaagctccatcaatgaggtatcttctttagtggtggtatgtaatggaacttagccatttttcaaagcaattgaaatgcattgctctggatctgttccttggcagtggactcagaaagccaacatgtggctcctcccagcccataaccagtatttttgctgcttctgaatacaaattggttggttttgacttcagattgaacttactgtagcctcagatgatttcccccctccgcctccaggaagaaagaatgttactgccttaat

SEQ ID NO: 163 - DNA, 2422 bp, Homo sapiens
gaacccaagaagcagcaacgcccctcactataaattcggagctgcctcctcgccaatgattccagcgcctgacagccaggaccccaggcagcagcgagtgacaggacgtctggaccggcgcgccgctagcagctctgccgggccgcggcggtgatcgatggggagcggctggagcggacccagcgagtgagggcgcacagccgggacgccgaggcggcgggcgggagaccmgcaccagcgcagccggccctcggcgggacgtgacgcagcgcccggggcgcgggtttgatatttgacaaattgatctaaaatggctgggtttttatctgaataactcactgatgccatcccagaaagtcggcaccaggtgtatttgatatagtgtttgcaacaaattcgacccaggtgatcaaaatgattctcaactcttctactgaagatggtattaaaagaatccaagatgattgtcccaaagctggaaggcataattacatatttgtcatgattcctactttatacagtatcatctttgtggtgggaatatttggaaacagcttggtggtgatagtcatttacttttatatgaagctgaagactgtggccagtgtttttcttttgaatttagcactggctgacttatgctttttactgactttgccactatgggctgtctacacagctatggaataccgctggccctttggcaattacctatgtaagattgcttcagccagcgtcagtttcaacctgtacgctagtgtgtttctactcacgtgtctcagcattgatcgatacctggctattgttcacccaatgaagtcccgccttcgacgcacaatgcttgtagccaaagtcacctgcatcatcatttggctgctggcaggcttggccagtttgccagctataatccatcgaaatgtatttttcattgagaacaccaatattacagtttgtgctttccattatgagtcccaaaattcaaccctyccgatagggctgggcctgaccaaaaatatactgggtttcctgtttccttttctgatcattcttacaagttatactcttatttggaaggccctaaagaaggcttatgaaattcagaagaacaaaccaagaaatgatgatatttttaagataattatggcaattgtgcttttctttttcttttcctggattccccaccaaatattcacttttctggatgtattgattcaactaggcatcatacgtgactgtagaattgcagatattgtggacacggccatgccyatcaccatttgkatagcttattttaacaattgcctgaatcctctkttttatggctttctgggraaaaaatttaaaagatattttctccagcttctraaatatattcccccaaargccaaatcccactcaaacctttcaacaaaaatgagcmcgctttcctaccgcccctcagataatgtaagctcatccaccaagaagcctgcaccrtgttttgaggttgagtgacrtgttcgaaacctgtccataaagtaattttgtgaaagaaggagcaagagaacattcctctgcagcactkcactaccaaatgagcmttagctrcttttcagaattgaaggagaaaatgcattatgtggactgaaycgacttttctaaagctctgaacaaaagcttttctttccttttgcaacaagacaaagcaaagccacattttgcattagacagatgacggctgctcgaagaacaatgtcagaaactcgatgaatgtgttgatttgagaaattttactgacagaaatgcaatctccctagcctgcttttgtcctrttattttttatttccacataaaggtatttagaatatattaaatcgttagaggagcaacaggagatgagagttccagattgttctgtccagtttccaaagggcagtaaagttttcgtgcckgttttcagctattagcaactgtgctacacttgcacctggtactgcacattttgtacaaagatatgctaagcagtagtcgtcaagttgcagatctttttgtgaaattcaacctgtgtcttataggtttmcactgccaaaacaatgcccgtaagatggcttatttgtataatggtgttactaaagtcacatataaaagttaaactacttgtaaaggtgctgcactggtcccaagtagtagtgtcytcctagtatattagtttgatttaatatctgagaagtgtatatagtttgtggtaaaaagattatatatcataaagtatgccttcctgtttaaaaaaagtatatattctacacatatatrtatatgtatatctatatctctaaactgctgttaattgattaaaatctggcaaagttatatttactttaaaataaaataattttattgcaatgtatttatcttcattacttaaaatagatgctaatttatt

SEQ ID NO: 164 - DNA, 2214 bp, Homo sapiens
agggcatgccattgcaagagaatgctcakccatgttcatctggggacctgctcctggyagagcaataggatctgtgtgcccagcaccactgcccacctakctgtcctggcctgtgcccaatgctgaccttcacctcakagtgtggctgtaccacattcggtgtatttgatatagtgtttgcaacaaattcgacccaggtgatcaaaatgattctcaactcttctactgaagatggtattaaaagaatccaagatgattgtcccaaagctggaaggcataattacatatttgtcatgattcctactttatacagtatcatctttgtggtgggaatatttggaaacagcttggtggtgatagtcatttacttttatatgaagctgaagactgtggccagtgtttttcttttgaatttagcactggctgacttatgctttttactgactttgccactatgggctgtctacacagctatggaataccgctggccctttggcaattacctatgtaagattgcttcagccagcgtcagtttcaacctgtacgctagtgtgtttctactcacgtgtctcagcattgatcgatacctggctattgttcacccaatgaagtcccgccttcgacgcacaatgcttgtagccaaagtcacctgcatcatcatttggctgctggcaggcttggccagtttgccagctataatccatcgaaatgtatttttcattgagaacaccaatattacagtttgtgctttccattatgagtcccaaaattcaaccctyccgatagggctgggcctgaccaaaaatatactgggtttcctgtttccttttctgatcattcttacaagttatactcttatttggaaggccctaaagaaggcttatgaaattcagaagaacaaaccaagaaatgatgatatttttaagataattatggcaattgtgcttttctttttcttttcctggattccccaccaaatattcacttttctggatgtattgattcaactaggcatcatacgtgactgtagaattgcagatattgtggacacggccatgccyatcaccatttgkatagcttattttaacaattgcctgaatcctctkttttatggctttctgggraaaaaatttaaaagatattttctccagcttctraaatatattcccccaaargccaaatcccactcaaacctttcaacaaaaatgagcmcgctttcctaccgcccctcagataatgtaagctcatccaccaagaagcctgcaccrtgttttgaggttgagtgacrtgttcgaaacctgtccataaagtaattttgtgaaagaaggagcaagagaacattcctctgcagcactkcactaccaaatgagcmttagctrcttttcagaattgaaggagaaaatgcattatgtggactgaaycgacttttctaaagctctgaacaaaagcttttctttccttttgcaacaagacaaagcaaagccacattttgcattagacagatgacggctgctcgaagaacaatgtcagaaactcgatgaatgtgttgatttgagaaattttactgacagaaatgcaatctccctagcctgcttttgtcctrttattttttatttccacataaaggtatttagaatatattaaatcgttagaggagcaacaggagatgagagttccagattgttctgtccagtttccaaagggcagtaaagttttcgtgcckgttttcagctattagcaactgtgctacacttgcacctggtactgcacattttgtacaaagatatgctaagcagtagtcgtcaagttgcagatctttttgtgaaattcaacctgtgtcttataggtttmcactgccaaaacaatgcccgtaagatggcttatttgtataatggtgttactaaagtcacatataaaagttaaactacttgtaaaggtgctgcactggtcccaagtagtagtgtcytcctagtatattagtttgatttaatatctgagaagtgtatatagtttgtggtaaaaagattatatatcataaagtatgccttcctgtttaaaaaaagtatatattctacacatatatrtatatgtatatctatatctctaaactgctgttaattgattaaaatctggcaaagttatatttactttaaaataaaataattttattgcaatgtatttatcttcattacttaaaatagatgctaatttatt

SEQ ID NO: 165 - DNA, 2363 bp, Homo sapiens
attcggagctgcctcctcgccaatgattccagcgcctgacagccaggaccccaggcagcagcgagtgacaggacgtctggaccggcgcgccgctagcagctctgccgggccgcggcggtgatcgatggggagcggctggagcggacccagcgagtgagggcgcacagccgggacgccgaggcggcgggcgggagaccmgcaccagcgcagccggccctcggcgggacgtgacgcagcgcccggggcgcggatgaagaaaatgaatcacaagtcaactgacagtccaaaggctccacagctcagagraggtgtatttgatatagtgtttgcaacaaattcgacccaggtgatcaaaatgattctcaactcttctactgaagatggtattaaaagaatccaagatgattgtcccaaagctggaaggcataattacatatttgtcatgattcctactttatacagtatcatctttgtggtgggaatatttggaaacagcttggtggtgatagtcatttacttttatatgaagctgaagactgtggccagtgtttttcttttgaatttagcactggctgacttatgctttttactgactttgccactatgggctgtctacacagctatggaataccgctggccctttggcaattacctatgtaagattgcttcagccagcgtcagtttcaacctgtacgctagtgtgtttctactcacgtgtctcagcattgatcgatacctggctattgttcacccaatgaagtcccgccttcgacgcacaatgcttgtagccaaagtcacctgcatcatcatttggctgctggcaggcttggccagtttgccagctataatccatcgaaatgtatttttcattgagaacaccaatattacagtttgtgctttccattatgagtcccaaaattcaaccctyccgatagggctgggcctgaccaaaaatatactgggtttcctgtttccttttctgatcattcttacaagttatactcttatttggaaggccctaaagaaggcttatgaaattcagaagaacaaaccaagaaatgatgatatttttaagataattatggcaattgtgcttttctttttcttttcctggattccccaccaaatattcacttttctggatgtattgattcaactaggcatcatacgtgactgtagaattgcagatattgtggacacggccatgccyatcaccatttgkatagcttattttaacaattgcctgaatcctctkttttatggctttctgggraaaaaatttaaaagatattttctccagcttctraaatatattcccccaaargccaaatcccactcaaacctttcaacaaaaatgagcmcgctttcctaccgcccctcagataatgtaagctcatccaccaagaagcctgcaccrtgttttgaggttgagtgacrtgttcgaaacctgtccataaagtaattttgtgaaagaaggagcaagagaacattcctctgcagcactkcactaccaaatgagcmttagctrcttttcagaattgaaggagaaaatgcattatgtggactgaaycgacttttctaaagctctgaacaaaagcttttctttccttttgcaacaagacaaagcaaagccacattttgcattagacagatgacggctgctcgaagaacaatgtcagaaactcgatgaatgtgttgatttgagaaattttactgacagaaatgcaatctccctagcctgcttttgtcctrttattttttatttccacataaaggtatttagaatatattaaatcgttagaggagcaacaggagatgagagttccagattgttctgtccagtttccaaagggcagtaaagttttcgtgcckgttttcagctattagcaactgtgctacacttgcacctggtactgcacattttgtacaaagatatgctaagcagtagtcgtcaagttgcagatctttttgtgaaattcaacctgtgtcttataggtttmcactgccaaaacaatgcccgtaagatggcttatttgtataatggtgttactaaagtcacatataaaagttaaactacttgtaaaggtgctgcactggtcccaagtagtagtgtcytcctagtatattagtttgatttaatatctgagaagtgtatatagtttgtggtaaaaagattatatatcataaagtatgccttcctgtttaaaaaaagtatatattctacacatatatrtatatgtatatctatatctctaaactgctgttaattgattaaaatctggcaaagttatatttactttaaaataaaataattttattgcaatgtatttatcttcattacttaaaatagatgctaatttatt

SEQ ID NO: 166 - DNA, 2480 bp, Homo sapiens
gaacccaagaagcagcaacgcccctcactataaattcggagctgcctcctcgccaatgattccagcgcctgacagccaggaccccaggcagcagcgagtgacaggacgtctggaccggcgcgccgctagcagctctgccgggccgcggcggtgatcgatggggagcggctggagcggacccagcgagtgagggcgcacagccgggacgccgaggcggcgggcgggagaccmgcaccagcgcagccggccctcggcgggacgtgacgcagcgcccggggcgcgggtttgatatttgacaaattgatctaaaatggctgggtttttatctgaataactcactgatgccatcccagaaagtcggcaccagatgaagaaaatgaatcacaagtcaactgacagtccaaaggctccacagctcagagraggtgtatttgatatagtgtttgcaacaaattcgacccaggtgatcaaaatgattctcaactcttctactgaagatggtattaaaagaatccaagatgattgtcccaaagctggaaggcataattacatatttgtcatgattcctactttatacagtatcatctttgtggtgggaatatttggaaacagcttggtggtgatagtcatttacttttatatgaagctgaagactgtggccagtgtttttcttttgaatttagcactggctgacttatgctttttactgactttgccactatgggctgtctacacagctatggaataccgctggccctttggcaattacctatgtaagattgcttcagccagcgtcagtttcaacctgtacgctagtgtgtttctactcacgtgtctcagcattgatcgatacctggctattgttcacccaatgaagtcccgccttcgacgcacaatgcttgtagccaaagtcacctgcatcatcatttggctgctggcaggcttggccagtttgccagctataatccatcgaaatgtatttttcattgagaacaccaatattacagtttgtgctttccattatgagtcccaaaattcaaccctyccgatagggctgggcctgaccaaaaatatactgggtttcctgtttccttttctgatcattcttacaagttatactcttatttggaaggccctaaagaaggcttatgaaattcagaagaacaaaccaagaaatgatgatatttttaagataattatggcaattgtgcttttctttttcttttcctggattccccaccaaatattcacttttctggatgtattgattcaactaggcatcatacgtgactgtagaattgcagatattgtggacacggccatgccyatcaccatttgkatagcttattttaacaattgcctgaatcctctkttttatggctttctgggraaaaaatttaaaagatattttctccagcttctraaatatattcccccaaargccaaatcccactcaaacctttcaacaaaaatgagcmcgctttcctaccgcccctcagataatgtaagctcatccaccaagaagcctgcaccrtgttttgaggttgagtgacrtgttcgaaacctgtccataaagtaattttgtgaaagaaggagcaagagaacattcctctgcagcactkcactaccaaatgagcmttagctrcttttcagaattgaaggagaaaatgcattatgtggactgaaycgacttttctaaagctctgaacaaaagcttttctttccttttgcaacaagacaaagcaaagccacattttgcattagacagatgacggctgctcgaagaacaatgtcagaaactcgatgaatgtgttgatttgagaaattttactgacagaaatgcaatctccctagcctgcttttgtcctrttattttttatttccacataaaggtatttagaatatattaaatcgttagaggagcaacaggagatgagagttccagattgttctgtccagtttccaaagggcagtaaagttttcgtgcckgttttcagctattagcaactgtgctacacttgcacctggtactgcacattttgtacaaagatatgctaagcagtagtcgtcaagttgcagatctttttgtgaaattcaacctgtgtcttataggtttmcactgccaaaacaatgcccgtaagatggcttatttgtataatggtgttactaaagtcacatataaaagttaaactacttgtaaaggtgctgcactggtcccaagtagtagtgtcytcctagtatattagtttgatttaatatctgagaagtgtatatagtttgtggtaaaaagattatatatcataaagtatgccttcctgtttaaaaaaagtatatattctacacatatatrtatatgtatatctatatctctaaactgctgttaattgattaaaatctggcaaagttatatttactttaaaataaaataattttattgcaatgtatttatcttcattacttaaaatagatgctaatttatt

SEQ ID NO: 167 - DNA, 2338 bp, Homo sapiens
gaacccaagaagcagcaacgcccctcactataaattcggagctgcctcctcgccaatgattccagcgcctgacagccaggaccccaggcagcagcgagtgacaggacgtctggaccggcgcgccgctagcagctctgccgggccgcggcggtgatcgatggggagcggctggagcggacccagcgagtgagggcgcacagccgggacgccgaggcggcgggcgggagaccmgcaccagcgcagccggccctcggcgggacgtgacgcagcgcccggggcgcgggtgtatttgatatagtgtttgcaacaaattcgacccaggtgatcaaaatgattctcaactcttctactgaagatggtattaaaagaatccaagatgattgtcccaaagctggaaggcataattacatatttgtcatgattcctactttatacagtatcatctttgtggtgggaatatttggaaacagcttggtggtgatagtcatttacttttatatgaagctgaagactgtggccagtgtttttcttttgaatttagcactggctgacttatgctttttactgactttgccactatgggctgtctacacagctatggaataccgctggccctttggcaattacctatgtaagattgcttcagccagcgtcagtttcaacctgtacgctagtgtgtttctactcacgtgtctcagcattgatcgatacctggctattgttcacccaatgaagtcccgccttcgacgcacaatgcttgtagccaaagtcacctgcatcatcatttggctgctggcaggcttggccagtttgccagctataatccatcgaaatgtatttttcattgagaacaccaatattacagtttgtgctttccattatgagtcccaaaattcaaccctyccgatagggctgggcctgaccaaaaatatactgggtttcctgtttccttttctgatcattcttacaagttatactcttatttggaaggccctaaagaaggcttatgaaattcagaagaacaaaccaagaaatgatgatatttttaagataattatggcaattgtgcttttctttttcttttcctggattccccaccaaatattcacttttctggatgtattgattcaactaggcatcatacgtgactgtagaattgcagatattgtggacacggccatgccyatcaccatttgkatagcttattttaacaattgcctgaatcctctkttttatggctttctgggraaaaaatttaaaagatattttctccagcttctraaatatattcccccaaargccaaatcccactcaaacctttcaacaaaaatgagcmcgctttcctaccgcccctcagataatgtaagctcatccaccaagaagcctgcaccrtgttttgaggttgagtgacrtgttcgaaacctgtccataaagtaattttgtgaaagaaggagcaagagaacattcctctgcagcactkcactaccaaatgagcmttagctrcttttcagaattgaaggagaaaatgcattatgtggactgaaycgacttttctaaagctctgaacaaaagcttttctttccttttgcaacaagacaaagcaaagccacattttgcattagacagatgacggctgctcgaagaacaatgtcagaaactcgatgaatgtgttgatttgagaaattttactgacagaaatgcaatctccctagcctgcttttgtcctrttattttttatttccacataaaggtatttagaatatattaaatcgttagaggagcaacaggagatgagagttccagattgttctgtccagtttccaaagggcagtaaagttttcgtgcckgttttcagctattagcaactgtgctacacttgcacctggtactgcacattttgtacaaagatatgctaagcagtagtcgtcaagttgcagatctttttgtgaaattcaacctgtgtcttataggtttmcactgccaaaacaatgcccgtaagatggcttatttgtataatggtgttactaaagtcacatataaaagttaaactacttgtaaaggtgctgcactggtcccaagtagtagtgtcytcctagtatattagtttgatttaatatctgagaagtgtatatagtttgtggtaaaaagattatatatcataaagtatgccttcctgtttaaaaaaagtatatattctacacatatatrtatatgtatatctatatctctaaactgctgttaattgattaaaatctggcaaagttatatttactttaaaataaaataattttattgcaatgtatttatcttcattacttaaaatagatgctaatttatt

SEQ ID NO: 168 - DNA, 1797 bp, Homo sapiens
tgaagtcattcctagcagaggactcagatatatataggattgaagatctctcagttaagtctacatgraaaggatggtttcttggagcttccacaaacttaaaaccatgaaacatctattattgctactattgtgtgtttttctagttaagtcccaaggtgtcaacgacaatgaggagggtttcttcagtgccygtkgtcatcgrccccttgacaagaagagagaagaggctttgctacaacaggaaaggccaatcagaaatagtgttgatgagttaaataacaatgtggaagctgtttcccagacctcctcttcttcctttcagtacatgtatttgctgaaagacctgtggcaaaagaggcagaagcaagtaaaagataatgaaaatgtagtcmatgagtactcctcagaactggaaaagcaccaattatatatagatgagactgtgaatagyartatcscaactaaccttygtgtgcttcgttcaatcctrgaaaacctgagaagcaaaatacaaaagttagaatctgatgtctcagctcaaatggaatattgtcgcaccccatgcactgtcagttgcaatattcctgtggtgtctggcaaagaatgtgaggaaattatcaggaaaggaggtgaaacatctgaaatgtatctcattcaacctgacagttctgtcaaacygtatagagtatactgtgacatgaatacagaaaatggaggatggacagtkattcagaaccrtcaagacggtagtgttgactttggcaggaaatgggatccatataaacagggatttggaaatgttgcaaccaacacagatgggaagaattactgtggcctaccaggtgaatattggcttggaaatgataaaattagccagcttaccaggatgggacccacagaacttttgatagaaatggagkactggaaaggagacaaagtaaaggctcactatggaggattcactgtacagaatgaarccaacaaataccagatctcrgtgaacaaatayagaggaacagccggtaatgccckcatggatggagcatctcagctgatgggagaaaacaggaccaygaccattcacaacggcatgttcttcagcacgtatgacagagacaatgacggctggttaacatcagatcccagaaaacagtgttctaaagaagacggtgrtggatggtggtataatagatgtcatgcagccaatccaaacggcagatactactggggtggacagtacacctgggacatggcaaagcatggcacagatgatggtgtagtatggatgaattrgaaggggtcatggtactcaatgargaagatgagtatgaagatcaggcccttcttcccacagcaawagtccccaatacgtagatttttgctcttctgtatgtgacaacatttttgtacattatgttattggaattttctttcatacattatattcctctaaaactctcaagcagacgtgagtgtgactttttgaaaaaagtataggataaattacattaaaatagcacatgattttcttttgttttcttcatttctcttgctcaccaagaagtaacaaaagtatagttttgacagagttggtgttcataatttcagttctagttgattgcgagaattttcaaataaggaagaggggtcttttatccttgtcgtaggaaaaccatgacggaaaggaaaaactgatgtttaaaagtccacttttaaaactatatttatttatrtaggatctgtcaaagaaaacttccaaaaagatttattaattaaaccagmctctgttgcaat

SEQ ID NO: 169 - DNA, 1864 bp, Homo sapiens
agtctacatgraaaggatggtttcttggagcttccacaaacttaaaaccatgaaacatctattattgctactattgtgtgtttttctagttaagtcccaaggtgtcaacgacaatgaggagggtttcttcagtgccygtkgtcatcgrccccttgacaagaagagagaagaggctcccagcctgaggcctgccccaccgcccatcagtggaggtggctatcgggctygtccagccaaagcagctgccactcaaaagaaagtagaaattgtgycctacaggatgtcagttgcaagaggctttgctacaacaggaaaggccaatcagaaatagtgttgatgagttaaataacaatgtggaagctgtttcccagacctcctcttcttcctttcagtacatgtatttgctgaaagacctgtggcaaaagaggcagaagcaagtaaaagataatgaaaatgtagtcmatgagtactcctcagaactggaaaagcaccaattatatatagatgagactgtgaatagyartatcscaactaaccttygtgtgcttcgttcaatcctrgaaaacctgagaagcaaaatacaaaagttagaatctgatgtctcagctcaaatggaatattgtcgcaccccatgcactgtcagttgcaatattcctgtggtgtctggcaaagaatgtgaggaaattatcaggaaaggaggtgaaacatctgaaatgtatctcattcaacctgacagttctgtcaaacygtatagagtatactgtgacatgaatacagaaaatggaggatggacagtkattcagaaccrtcaagacggtagtgttgactttggcaggaaatgggatccatataaacagggatttggaaatgttgcaaccaacacagatgggaagaattactgtggcctaccaggtgaatattggcttggaaatgataaaattagccagcttaccaggatgggacccacagaacttttgatagaaatggagkactggaaaggagacaaagtaaaggctcactatggaggattcactgtacagaatgaarccaacaaataccagatctcrgtgaacaaatayagaggaacagccggtaatgccckcatggatggagcatctcagctgatgggagaaaacaggaccaygaccattcacaacggcatgttcttcagcacgtatgacagagacaatgacggctggttaacatcagatcccagaaaacagtgttctaaagaagacggtgrtggatggtggtataatagatgtcatgcagccaatccaaacggcagatactactggggtggacagtacacctgggacatggcaaagcatggcacagatgatggtgtagtatggatgaattrgaaggggtcatggtactcaatgargaagatgagtatgaagatcaggcccttcttcccacagcaawagtccccaatacgtagatttttgctcttctgtatgtgacaacatttttgtacattatgttattggaattttctttcatacattatattcctctaaaactctcaagcagacgtgagtgtgactttttgaaaaaagtataggataaattacattaaaatagcacatgattttcttttgttttcttcatttctcttgctcaccaagaagtaacaaaagtatagttttgacagagttggtgttcataatttcagttctagttgattgcgagaattttcaaataaggaagaggggtcttttatccttgtcgtaggaaaaccatgacggaaaggaaaaactgatgtttaaaagtccacttttaaaactatatttatttatrtaggatctgtcaaagaaaacttccaaaaagatttattaattaaaccagmctctgttgcaat

SEQ ID NO: 170 - DNA, 1716 bp, Homo sapiens
tgaagtcattcctagcagaggactcagatatatataggattgaagatctctcagttaagtctacatgraaaggatggtttcttggagcttccacaaacttaaaaccatgaaacatctattattgctactattgtgtgtttttctagttaagtcccaaggtgtcaacgacaatgaggagggtttcttcagtgccygtkgtcatcgrccccttgacaagaagagagaagaggctcccagcctgaggcctgccccaccgcccatcagtggaggtggctatcgggctygtccagccaaagcagctgccactcaaaagaaagtagaaagaaaagcccctgatgctggaggctgtcttcayrctgagactgtgaatagyartatcscaactaaccttygtgtgcttcgttcaatcctrgaaaacctgagaagcaaaatacaaaagttagaatctgatgtctcagctcaaatggaatattgtcgcaccccatgcactgtcagttgcaatattcctgtggtgtctggcaaagaatgtgaggaaattatcaggaaaggaggtgaaacatctgaaatgtatctcattcaacctgacagttctgtcaaacygtatagagtatactgtgacatgaatacagaaaatggaggatggacagtkattcagaaccrtcaagacggtagtgttgactttggcaggaaatgggatccatataaacagggatttggaaatgttgcaaccaacacagatgggaagaattactgtggcctaccaggtgaatattggcttggaaatgataaaattagccagcttaccaggatgggacccacagaacttttgatagaaatggagkactggaaaggagacaaagtaaaggctcactatggaggattcactgtacagaatgaarccaacaaataccagatctcrgtgaacaaatayagaggaacagccggtaatgccckcatggatggagcatctcagctgatgggagaaaacaggaccaygaccattcacaacggcatgttcttcagcacgtatgacagagacaatgacggctggttaacatcagatcccagaaaacagtgttctaaagaagacggtgrtggatggtggtataatagatgtcatgcagccaatccaaacggcagatactactggggtggacagtacacctgggacatggcaaagcatggcacagatgatggtgtagtatggatgaattrgaaggggtcatggtactcaatgargaagatgagtatgaagatcaggcccttcttcccacagcaawagtccccaatacgtagatttttgctcttctgtatgtgacaacatttttgtacattatgttattggaattttctttcatacattatattcctctaaaactctcaagcagacgtgagtgtgactttttgaaaaaagtataggataaattacattaaaatagcacatgattttcttttgttttcttcatttctcttgctcaccaagaagtaacaaaagtatagttttgacagagttggtgttcataatttcagttctagttgattgcgagaattttcaaataaggaagaggggtcttttatccttgtcgtaggaaaaccatgacggaaaggaaaaactgatgtttaaaagtccacttttaaaactatatttatttatrtaggatctgtcaaagaaaacttccaaaaagatttattaattaaaccagmctctgttgcaat

SEQ ID NO: 171 - DNA, 1839 bp, Homo sapiens
ggtttcttggagcttccacaaacttaaaaccatgaaacatctattattgctactattgtgtgtttttctagttaagtcccaaggtgtcaacgacaatgaggagggtttcttcagtgccygtkgtcatcgrccccttgacaagaagagagaagaggctcccagcctgaggcctgccccaccgcccatcagtggaggtggctatcgggctygtccagccaaagcagctgccactcaaaagaaattgtgycctacaggatgtcagttgcaagaggctttgctacaacaggaaaggccaatcagaaatagtgttgatgagttaaataacaatgtggaagctgtttcccagacctcctcttcttcctttcagtacatgtatttgctgaaagacctgtggcaaaagaggcagaagcaagtaaaagataatgaaaatgtagtcmatgagtactcctcagaactggaaaagcaccaattatatatagatgagactgtgaatagyartatcscaactaaccttygtgtgcttcgttcaatcctrgaaaacctgagaagcaaaatacaaaagttagaatctgatgtctcagctcaaatggaatattgtcgcaccccatgcactgtcagttgcaatattcctgtggtgtctggcaaagaatgtgaggaaattatcaggaaaggaggtgaaacatctgaaatgtatctcattcaacctgacagttctgtcaaacygtatagagtatactgtgacatgaatacagaaaatggaggatggacagtkattcagaaccrtcaagacggtagtgttgactttggcaggaaatgggatccatataaacagggatttggaaatgttgcaaccaacacagatgggaagaattactgtggcctaccaggtgaatattggcttggaaatgataaaattagccagcttaccaggatgggacccacagaacttttgatagaaatggagkactggaaaggagacaaagtaaaggctcactatggaggattcactgtacagaatgaarccaacaaataccagatctcrgtgaacaaatayagaggaacagccggtaatgccckcatggatggagcatctcagctgatgggagaaaacaggaccaygaccattcacaacggcatgttcttcagcacgtatgacagagacaatgacggctggttaacatcagatcccagaaaacagtgttctaaagaagacggtgrtggatggtggtataatagatgtcatgcagccaatccaaacggcagatactactggggtggacagtacacctgggacatggcaaagcatggcacagatgatggtgtagtatggatgaattrgaaggggtcatggtactcaatgargaagatgagtatgaagatcaggcccttcttcccacagcaawagtccccaatacgtagatttttgctcttctgtatgtgacaacatttttgtacattatgttattggaattttctttcatacattatattcctctaaaactctcaagcagacgtgagtgtgactttttgaaaaaagtataggataaattacattaaaatagcacatgattttcttttgttttcttcatttctcttgctcaccaagaagtaacaaaagtatagttttgacagagttggtgttcataatttcagttctagttgattgcgagaattttcaaataaggaagaggggtcttttatccttgtcgtaggaaaaccatgacggaaaggaaaaactgatgtttaaaagtccacttttaaaactatatttatttatrtaggatctgtcaaagaaaacttccaaaaagatttattaattaaaccagmctctgttgcaat

SEQ ID NO: 172 - DNA, 1802 bp, Homo sapiens
ggatggtttcttggagcttccacaaacttaaaaccatgaaacatctattattgctactattgtgtgtttttctagttaagtcccaaggtgtcaacgacaatgaggagggtttcttcagtgccygtkgtcatcgrccccttgacaagaagagagaagaggctcccagcctgaggcctgccccaccgcccatcagtggaggtggctatcgggctygtccagccaaagcagctgccactcaaaagaaagtagaaagaaaagcccctgatgctggaggctgtcttcayrctgacycagacctgggggtgttgtgycctacaggatgtcagttgcaagaggctttgctacaacaggaaaggccaatcagaaatagtgttgatgagttaaataacaatgtggaagctgtttcccagacctcctcttcttcctttcagtacatgtatttgctgaaagacctgtggcaaaagaggcagaagcaagtaaaagataatgaaaatgtagtcmatgagtactcctcagaactggaaaagcaccaattatatatagatgagactgtgaatagyartatcscaactaaccttygtgtgcttcgttcaatcctrgaaaacctgagaagcaaaatacaaaatgtcagttgcaatattcctgtggtgtctggcaaagaatgtgaggaaattatcaggaaaggaggtgaaacatctgaaatgtatctcattcaacctgacagttctgtcaaygatggacagtkattcagaaccrtcaagacggtagtgttgactttggcaggaaatgggatccatataaacagggatttggaaatgttgcaaccaacacagatgggaagaattactgtggcctaccaggtgaatattggcttggaaatgataaaattagccagcttaccaggatgggacccacagaacttttgatagaaatggagkactggaaaggagacaaagtaaaggctcactatggaggattcactgtacagaatgaarccaacaaataccagatctcrgtgaacaaatayagaggaacagccggtaatgccckcatggatggagcatctcagctgatgggagaaaacaggaccaygaccattcacaacggcatgttcttcagcacgtatgacagagacaatgacggctggttaacatcagatcccagaaaacagtgttctaaagaagacggtgrtggatggtggtataatagatgtcatgcagccaatccaaacggcagatactactggggtggacagtacacctgggacatggcaaagcatggcacagatgatggtgtagtatggatgaattrgaaggggtcatggtactcaatgargaagatgagtatgaagatcaggcccttcttcccacagcaawagtccccaatacgtagatttttgctcttctgtatgtgacaacatttttgtacattatgttattggaattttctttcatacattatattcctctaaaactctcaagcagacgtgagtgtgactttttgaaaaaagtataggataaattacattaaaatagcacatgattttcttttgttttcttcatttctcttgctcaccaagaagtaacaaaagtatagttttgacagagttggtgttcataatttcagttctagttgattgcgagaattttcaaataaggaagaggggtcttttatccttgtcgtaggaaaaccatgacggaaaggaaaaactgatgtttaaaagtccacttttaaaactatatttatttatrtaggatctgtcaaagaaaacttccaaaaagatttattaattaaaccagmct

SEQ ID NO: 173 - DNA, 3693 bp, Homo sapiens
tgaagtcattcctagcagaggactcagatatatataggattgaagatctctcagttaagtctacatgraaaggatggtttcttggagcttccacaaacttaaaaccatgaaacatctattattgctactattgtgtgtttttctagttaagtcccaaggtgtcaacgacaatgaggagggtttcttcagtgccygtkgtcatcgrccccttgacaagaagagagaagaggctcccagcctgaggcctgccccaccgcccatcagtggaggtggctatcgggctygtccagccaaagcagctgccactcaaaagaaagtagaaagaaaagcccctgatgctggaggctgtcttcayrctgacycagacctgggggtgttgtgycctacaggatgtcagttgcaagaggctttgctacaacaggaaaggccaatcagaaatagtgttgatgagttaaataacaatgtggaagctgtttcccagacctcctcttcttcctttcagtacatgtatttgctgaaagacctgtggcaaaagaggcagaagcaagtaaaagataatgaaaatgtagtcmatgagtactcctcagaactggaaaagcaccaattatatatagatgagactgtgaatagyartatcscaactaaccttygtgtgcttcgttcaatcctrgaaaacctgagaagcaaaatacaaaagttagaatctgatgtctcagctcaaatggaatattgtcgcaccccatgcactgtcagttgcaatattcctgtggtgtctggcaaagaatgtgaggaaattatcaggaaaggaggtgaaacatctgaaatgtatctcattcaacctgacagttctgtcaaacygtatagagtatactgtgacatgaatacagaaaatggaggatggacagtkattcagaaccrtcaagacggtagtgttgactttggcaggaaatgggatccatataaacagggatttggaaatgttgcaaccaacacagatgggaagaattactgtggcctaccaggtgaatattggcttggaaatgataaaattagccagcttaccaggatgggacccacagaacttttgatagaaatggagkactggaaaggagacaaagtaaaggctcactatggaggattcactgtacagaatgaarccaacaaataccagatctcrgtgaacaaatayagaggaacagccggtaatgccckcatggatggagcatctcagctgatgggagaaaacaggaccaygaccattcacaacggcatgttcttcagcacgtatgacagagacaatgacggctggttaacatcagatcccagaaaacagtgttctaaagaagacggtgrtggatggtggtataatagatgtcatgcagccaatccaaacggcagatactactggggtggacagtacacctgggacatggcaaagcatggcacagatgatggtgtagtatggatgaattrgaaggggtcatggtactcaatgargaagatgagtatgaagatcaggcccttcttcccacagcaawagtccccaatacgtagatttttgctcttctgtatgtgacaacatttttgtacattatgttattggaattttctttcatacattatattcctctaaaactctcaagcagacgtgagtgtgactttttgaaaaaagtataggataaattacattaaaatagcacatgattttcttttgttttcttcatttctcttgctcaccaagaagtaacaaaagtatagttttgacagagttggtgttcataatttcagttctagttgattgcgagaattttcaaataaggaagaggggtcttttatccttgtcgtaggaaaaccatgacggaaaggaaaaactgatgtttaaaagtccacttttaaaactatatttatttatrtaggatctgtcaaagaaaacttccaaaaagatttattaattaaaccagmctctgttgcaataagttaatrtttycttgttttgtaatccacacattcaatgagttaggctttgcacttgtaaggaaggagaagcgttcacaacctcaaatagctaataaaccggtcttgaatatttgaagatttaaaatctgactctaggacgggcacggtggctcacgactataatcccaacactttgggaggcygaggcgggcggtcacaaggtcaggagttcaagaccagcctgaccaatatggtgaaaccccatctctactaaaaatacaaaaattagccaggcgtggtggcaggtgcctgtagtcccagctacctgtgaggtggagattgcattgagccaagatctcaacactgcactccagcctgggcaacagcgtgagactccacctcaaaaaaaaaaaaaaaagaatctgactatataccatggaaaagccaccactctgccacttaaataaacatcaggatcagagattccaagaggacaatctgsatcaagtcttcaccaagtgttttttaagcgaaataatgaaatagggagcagaatatgcctgttgcccatagaaacgaggtctattcttgtcctcaattaggcttttttttcttcatagttacaccagaactaaagtaaaagtggtttttctsttctttctacttctccccatgaaatgggcatatcatctcaacacttcactccaagtcgccacgggcaaccttatgaccctaggtcctccacccctaatgtatcatcattgccacccatttttatggtacttattgttcttaagcttatcctcttaatcttttcatgtaagcaaagctcattaatttctgtcttggaaatgctactactctctttaattactcaccaaatccaactttaacttttgacctggtttctctgccacaagttctgtcccactggagcccatactcacctaccrctttgccatcacatttaacagaaaactcttatcaacttacttcctgcttaacattagctccttcctatctatatccaaatttcttaaattcaaattttttagctggagtaaaaatggtcccagtaccatttcctgttcccttcactayaacctacatttttgtcacattaagtttttcccyattccaggacaggtcaggccctttaaaaatttcaacagctttattgagatataattgatataatttwaaaaatcctgcacatgtgtcatgctggagccctattgattccaacagggatggcgccttgtccaagaagagacccagagccagtgaatgggacatagggtttatttaggacttaaatacagatgtggtccagtgkcagtgggctggacaggaccgctactatttgtaaagagtatgtagtttatataacatttctacttagcactctccacttagcaacctccatttaacccaaaataaaaggccttggttccttgcacatcctgagttccaacggacaggcagggagttcaagtgtccttcacagataagaagtgaatctctctgggttggccattcccggattccttagcttagactctgaacacatattcttcttagaccatacagtcattctcagggtatgcttgagttaatgctgtcggatgcatctgtcatacaaagtgtttaacatatacgatttcatgattttggaaatatgcatacacccatgatatcactggcacagtcaagatattaaatatatccatcacctcc

SEQ ID NO: 174 - DNA, 1907 bp, Homo sapiens
agtaagcaacctacagattcactatcaccaaccagccagttgatggatcttaagcaaattatcaagcttgtgataacctaaattataaaatgagggtgttggaatagttacattccaaatcttctataacactctgtattatatttctgcctcattccttgtagggtttcttcagtgccygtkgtcatcgrccccttgacaagaagagagaagaggctcccagcctgaggcctgccccaccgcccatcagtggaggtggctatcgggctygtccagccaaagcagctgccactcaaaagaaagtagaaattgtgycctacaggatgtcagttgcaagaggctttgctacaacaggaaaggccaatcagaaatagtgttgatgagttaaataacaatgtggaagctgtttcccagacctcctcttcttcctttcagtacatgtatttgctgaaagacctgtggcaaaagaggcagaagcaagtaaaagataatgaaaatgtagtcmatgagtactcctcagaactggaaaagcaccaattatatatagatgagactgtgaatagyartatcscaactaaccttygtgtgcttcgttcaatcctrgaaaacctgagaagcaaaatacaaaagttagaatctgatgtctcagctcaaatggaatattgtcgcaccccatgcactgtcagttgcaatattcctgtggtgtctggcaaagaatgtgaggaaattatcaggaaaggaggtgaaacatctgaaatgtatctcattcaacctgacagttctgtcaaacygtatagagtatactgtgacatgaatacagaaaatggaggatggacagtkattcagaaccrtcaagacggtagtgttgactttggcaggaaatgggatccatataaacagggatttggaaatgttgcaaccaacacagatgggaagaattactgtggcctaccaggtgaatattggcttggaaatgataaaattagccagcttaccaggatgggacccacagaacttttgatagaaatggagkactggaaaggagacaaagtaaaggctcactatggaggattcactgtacagaatgaarccaacaaataccagatctcrgtgaacaaatayagaggaacagccggtaatgccckcatggatggagcatctcagctgatgggagaaaacaggaccaygaccattcacaacggcatgttcttcagcacgtatgacagagacaatgacggctggttaacatcagatcccagaaaacagtgttctaaagaagacggtgrtggatggtggtataatagatgtcatgcagccaatccaaacggcagatactactggggtggacagtacacctgggacatggcaaagcatggcacagatgatggtgtagtatggatgaattrgaaggggtcatggtactcaatgargaagatgagtatgaagatcaggcccttcttcccacagcaawagtccccaatacgtagatttttgctcttctgtatgtgacaacatttttgtacattatgttattggaattttctttcatacattatattcctctaaaactctcaagcagacgtgagtgtgactttttgaaaaaagtataggataaattacattaaaatagcacatgattttcttttgttttcttcatttctcttgctcaccaagaagtaacaaaagtatagttttgacagagttggtgttcataatttcagttctagttgattgcgagaattttcaaataaggaagaggggtcttttatccttgtcgtaggaaaaccatgacggaaaggaaaaactgatgtttaaaagtccacttttaaaactatatttatttatrtaggatctgtcaaagaaaacttccaaaaagatttattaattaaaccagmctctgttgcaat

SEQ ID NO: 175 - DNA, 2543 bp, Homo sapiens
tgaagtcattcctagcagaggactcagatatatataggattgaagatctctcagttaagtctacatgraaaggatggtttcttggagcttccacaaacttaaaaccatgaaacatctattattgctactattgtgtgtttttctagttaagtcccaaggtgtcaacgacaatgaggagggtttcttcagtgccygtkgtcatcgrccccttgacaagaagagagaagaggctcccagcctgaggcctgccccaccgcccatcagtggaggtggctatcgggctygtccagccaaagcagctgccactcaaaagaaagtagaaagaaaagcccctgatgctggaggctgtcttcayrctgacycagacctgggggtgttgtgycctacaggatgtcagttgcaagaggctttgctacaacaggaaaggccaatcagaaatagtgttgatgagttaaataacaatgtggaagctgtttcccagacctcctcttcttcctttcagtacatgtatttgctgaaagacctgtggcaaaagaggcagaagcaagtaaaagataatgaaaatgtagtcmatgagtactcctcagaactggaaaagcaccaattatatatagatgagactgtgaatagyartatcscaactaaccttygtgtgcttcgttcaatcctrgaaaacctgagaagcaaaatacaaaagttagaatctgatgtctcagctcaaatggaatattgtcgcaccccatgcactgtcagttgcaatattcctgtggtgtctggcaaagaatgtgaggaaattatcaggaaaggaggtgaaacatctgaaatgtatctcattcaacctgacagttctgtcaaacygtatagagtatactgtgacatgaatacagaaaatggaggatggacagtkattcagaaccrtcaagacggtagtgttgactttggcaggaaatgggatccatataaacagggatttggaaatgttgcaaccaacacagatgggaagaattactgtggcctaccaggtgaatattggcttggaaatgataaaattagccagcttaccaggatgggacccacagaacttttgatagaaatggagkactggaaaggagacaaagtaaaggctcactatggaggattcactgtacagaatgaarccaacaaataccagatctcrgtgaacaaatayagaggaacagccggtaatgccckcatggatggagcatctcagctgatgggagaaaacaggaccaygaccattcacaacggcatgttcttcagcacgtatgacagagacaatgacggctggttaacatcagatcccagaaaacagtgttctaaagaagacggtgrtggatggtggtataatagatgtcatgcagccaatccaaacggcagatactactggggtggacagtacacctgggacatggcaaagcatggcacagatgatggtgtagtatggatgaattrgaaggggtcatggtactcaatgargaagatgaatttttgctcttctgtatgtgacaacatttttgtacattatgttattggaattttctttcatacattatattcctctaaaactctcaagcagacgtgagtgtgactttttgaaaaaagtataggataaattacattaaaatagcacatgattttcttttgttttcttcatttctcttgctcaccaagaagtaacaaaagtatagttttgacagagttggtgttcataatttcagttctagttgattgcgagaattttcaaataaggaagaggggtcttttatccttgtcgtaggaaaaccatgacggaaaggaaaaactgatgtttaaaagtccacttttaaaactatatttatttatrtaggatctgtcaaagaaaacttccaaaaagatttattaattaaaccagmctctgttgcaataagttaatrtttycttgttttgtaatccacacattcaatgagttaggctttgcacttgtaaggaaggagaagcgttcacaacctcaaatagctaataaaccggtcttgaatatttgaagatttaaaatctgactctaggacgggcacggtggctcacgactataatcccaacactttgggaggcygaggcgggcggtcacaaggtcaggagttcaagaccagcctgaccaatatggtgaaaccccatctctactaaaaatacaaaaattagccaggcgtggtggcaggtgcctgtagtcccagctacctgtgaggtggagattgcattgagccaagatctcaacactgcactccagcctgggcaacagcgtgagactccacctcaaaaaaaaaaaaaaaagaatctgactatataccatggaaaagccaccactctgccacttaaataaacatcaggatcagagattccaagaggacaatctgsatcaagtcttcaccaagtgttttttaagcgaaataatgaaatagggagcagaatatgcctgttgcccatagaaacgaggtctattcttgtcctcaattaggcttttttttcttcatagttacaccagaactaaa

SEQ ID NO: 176 - DNA, 1485 bp, Homo sapiens
tgaagtcattcctagcagaggactcagatatatataggattgaagatctctcagttaagtctacatgraaaggatggtttcttggagcttccacaaacttaaaaccatgaaacatctattattgctactattgtgtgtttttctagttaagtcccaaggtgtcaacgacaatgaggagggtttcttcagtgccygtkgtcatcgrccccttgacaagaagagagaagaggctcccagcctgaggcctgccccaccgcccatcagtggaggtggctatcgggctygtccagccaaagcagctgccactcaaaagaaagtagaaagaaaagcccctgatgctggaggctgtcttcayrctgacycagacctgggggtgttgtgycctacaggatgtcagttgcaagaggctttgctacaacaggaaaggccaatcagaaatagtgttgatgagttaaataacaatgtggaagctgtttcccagacctcctcttcttcctttcagtacatgtatttgctgaaagacctgtggcaaaagaggcagaagcaagtaaaagataatgaaaatgtagtcmatgagtactcctcagaactggaaaagcaccaattatatatagatgagactgtgaatagyartatcscaactaaccttygtgtgcttcgttcaatcctrgaaaacctgagaagcaaaatacaaaagttagaatctgatgtctcagctcaaatggaatattgtcgcaccccatgcactgtcagttgcaatattcctgtggtgtctggcaaagaatgtgaggaaattatcaggaaaggaggtgaaacatctgaaatgtatctcattcaacctgacagttctgtcaaacygtatagagtatactgtgacatgaatacagaaaatggaggatggacagtkattcagaaccrtcaagacggtagtgttgactttggcaggaaatgggatccatataaacagggatttggaaatgttgcaaccaacacagatgggaagaattactgtggcctaccaggtgaatattggcttggaaatgataaaattagccagcttaccaggatgggacccacagaacttttgatagaaatggagkactggaaaggagacaaagtaaaggctcactatggaggattcactgtacagaatgaarccaacaaataccagatctcrgtgaacaaatayagaggaacagccggtaatgccckcatggatggagcatctcagctgatgggagaaaacaggaccaygaccattcacaacggcatgttcttcagcacgtatgacagagacaatgacggctggttaacatcagatcccagaaaacaccaatccaaacggcagatactactggggtggacagtacacctgggacatggcaaagcatggcacagatgatggtgtagtatggatgaattrgaaggggtcatggtactcaatgargaagatgagtatgaagatcaggcccttcttcccacagc

SEQ ID NO: 177 - DNA, 1882 bp, Homo sapiens
tgaagtcattcctagcagaggactcagatatatataggattgaagatctctcagttaagtctacatgraaaggatggtttcttggagcttccacaaacttaaaaccatgaaacatctattattgctactattgtgtgtttttctagttaagtcccaaggtgtcaacgacaatgaggagggtttcttcagtgccygtkgtcatcgrccccttgacaagaagagagaagaggctcccacccctgatgctggaggctgtcttcayrctgacycagacctgggggtgttgtgycctacaggatgtcagttgcaagaggctttgctacaacaggaaaggccaatcagaaatagtgttgatgagttaaataacaatgtggaagctgtttcccagacctcctcttcttcctttcagtacatgtatttgctgaaagacctgtggcaaaagaggcagaagcaagtaaaagataatgaaaatgtagtcmatgagtactcctcagaactggaaaagcaccaattatatatagatgagactgtgaatagyartatcscaactaaccttygtgtgcttcgttcaatcctrgaaaacctgagaagcaaaatacaaaagttagaatctgatgtctcagctcaaatggaatattgtcgcaccccatgcactgtcagttgcaatattcctgtggtgtctggcaaagaatgtgaggaaattatcaggaaaggaggtgaaacatctgaaatgtatctcattcaacctgacagttctgtcaaacygtatagagtatactgtgacatgaatacagaaaatggagggatggacagtkattcagaaccrtcaagacggtagtgttgactttggcaggaaatgggatccatataaacagggatttggaaatgttgcaaccaacacagatgggaagaattactgtggcctaccaggtgaatattggcttggaaatgataaaattagccagcttaccaggatgggacccacagaacttttgatagaaatggagkactggaaaggagacaaagtaaaggctcactatggaggattcactgtacagaatgaarccaacaaataccagatctcrgtgaacaaatayagaggaacagccggtaatgccckcatggatggagcatctcagctgatgggagaaaacaggaccaygaccattcacaacggcatgttcttcagcacgtatgacagagacaatgacggctggttaacatcagatcccagaaaacagtgttctaaagaagacggtgrtggatggtggtataatagatgtcatgcagccaatccaaacggcagatactactggggtggacagtacacctgggacatggcaaagcatggcacagatgatggtgtagtatggatgaattrgaaggggtcatggtactcaatgargaagatgagtatgaagatcaggcccttcttcccacagcaawagtccccaatacgtagatttttgctcttctgtatgtgacaacatttttgtacattatgttattggaattttctttcatacattatattcctctaaaactctcaagcagacgtgagtgtgactttttgaaaaaagtataggataaattacattaaaatagcacatgattttcttttgttttcttcatttctcttgctcaccaagaagtaacaaaagtatagttttgacagagttggtgttcataatttcagttctagttgattgcgagaattttcaaataaggaagaggggtcttttatccttgtcgtaggaaaaccatgacggaaaggaaaaactgatgtttaaaagtccacttttaaaactatatttatttatrtaggatctgtcaaagaaaacttccaaaaagatttattaattaaaccagmctctgttgcaat

SEQ ID NO: 178 - DNA, 2267 bp, Homo sapiens
ctttctgagcccgagggactgccacctccactgtgtgcacrctcagctacgggacacatttcaggtatccaaggcagcagaggtgagtgggtcccccgagctctgtgaccttatgctccacactaactctggcagagcctccgtttcctcatagaacaaagaacakccaccatgcagctcttcctcctcttgtgcctggtgcttctcagccctcagggggcctcccttcaccgccaccacccccgggagatgaagaagagagtcgaggacctccatgtaggtgccacggtggcccccagcrgcagaagggactttaccttygacctctacagggycttggcttccgctgcccccagccagaryatcttcttctcccctgtgagcatctccatgagcctggccatgctctccctgggggctgggtccagcacaaagatgcagatcctggaggkcctgggcctcaacctccagaaaagctcagagraggagctgcacagaggctttcagcagctccytcaggaactcaaccagsccagagatggcttccagctgagcctcggcaatgcccttttcaccgacctggtggtagacctgcaggacaccttcgtaagtgccatgaagacgctgtacctggcagacactttcccyaccaactttagggactctgcaggggccatgaagcagatcaatgattatgtggcaaagcaaacgaagggcaagattgtggacttgcttaagaacctmgatagcaatgcggtcgtgatcatggtgaattacatcttctttaaagctaagtgggagacaagcttcaaccacaaasgcacccaagagcaagacttctacgtgacctyggagactgtggtgcgggtacccatgatgagccgcgaggatcagtatcactacctcctggaccggaacctctcctgcagggtggtgggggtsccctaccaaggcaatgccacggctttgttcattctccccagtgagggaaagatgcagcaggtggagaatggactgagtgagaaaacgctgaggaagtggcttaagatgttcaaaaagaggcagctcgagctttaccttcccaaattctccattgagggctcctatcagctggagaaagtcctccccagtctggggatcagtaacgtcttcacctcccatgctgatctgtccsgcatcagcaaccactcaaatatccaggtgtctgagatggtgcacaaagctgtggtggaggtggacgagtcgggaaccagagcagcggcagccacggggacaatmttcactttcaggtcrgcccgcctgaactctcagaggctagtgttcaacaggccctttctgatgttcattgtggataacaacatcctcttccttggcaaagtgaaccgcccctgaggtggggcttctcctgaaatctacaggcctcagggtgrgagatgaagggggctawgctatggcccwtctgtatgctggtagctagtgatttacacaggtttagttgactaatgaggyattacaaataatattactctatgatgattgcttccacccacacractgcaacatacaggtgccttggggaaatgtggagaacattcaatcttgccgtcactattcatcartgaagattarcactgagatccagagaggctggatgacttgctcaagttcaccagcatggtagtggcaaagagaggtccagagtcctggcccttgatgcccagctcagtgccacaaagctcartaggagggatgttccagtggatgagggccaccaggaagcacaggtccaaggctggtcccacacttatcagcagcaacaactstcagttcatcctgcatgggaaaaatgttggaatgggagtctgaaatggggctactgtttcagtcctaaygtgctgtgtgacattgggacaacactttccctctctggacctcagtttccctctgtatacaaggatcagattcttgctgtgacccaagaactcctgaaatcatatagaaargctggggtgggccctgtcattcrtggttgatttcaatacactcaagtgccattcatcctttaagaaaaacatctggatatcaaggtggaaatggcccatttaatgattgattatatcattttgtggatatagttataatctgatgggcctggctgggagtggaagaagggaagccttttgcaaatagtagagtrtcagttgcaggtgccaatgrctaactttttgaattctatgttggcattaacaataaagcattttgcaaac

SEQ ID NO: 179 - DNA, 2171 bp, Homo sapiens
ctttctgagcccgagggactgccacctccactgtgtgcacrctcagctacgggacacaaacaaagaacakccaccatgcagctcttcctcctcttgtgcctggtgcttctcagccctcagggggcctcccttcaccgccaccacccccgggagatgaagaagagagtcgaggacctccatgtaggtgccacggtggcccccagcrgcagaagggactttaccttygacctctacagggycttggcttccgctgcccccagccagaryatcttcttctcccctgtgagcatctccatgagcctggccatgctctccctgggggctgggtccagcacaaagatgcagatcctggaggkcctgggcctcaacctccagaaaagctcagagraggagctgcacagaggctttcagcagctccytcaggaactcaaccagsccagagatggcttccagctgagcctcggcaatgcccttttcaccgacctggtggtagacctgcaggacaccttcgtaagtgccatgaagacgctgtacctggcagacactttcccyaccaactttagggactctgcaggggccatgaagcagatcaatgattatgtggcaaagcaaacgaagggcaagattgtggacttgcttaagaacctmgatagcaatgcggtcgtgatcatggtgaattacatcttctttaaagctaagtgggagacaagcttcaaccacaaasgcacccaagagcaagacttctacgtgacctyggagactgtggtgcgggtacccatgatgagccgcgaggatcagtatcactacctcctggaccggaacctctcctgcagggtggtgggggtsccctaccaaggcaatgccacggctttgttcattctccccagtgagggaaagatgcagcaggtggagaatggactgagtgagaaaacgctgaggaagtggcttaagatgttcaaaaagaggcagctcgagctttaccttcccaaattctccattgagggctcctatcagctggagaaagtcctccccagtctggggatcagtaacgtcttcacctcccatgctgatctgtccsgcatcagcaaccactcaaatatccaggtgtctgagatggtgcacaaagctgtggtggaggtggacgagtcgggaaccagagcagcggcagccacggggacaatmttcactttcaggtcrgcccgcctgaactctcagaggctagtgttcaacaggccctttctgatgttcattgtggataacaacatcctcttccttggcaaagtgaaccgcccctgaggtggggcttctcctgaaatctacaggcctcagggtgrgagatgaagggggctawgctatggcccwtctgtatgctggtagctagtgatttacacaggtttagttgactaatgaggyattacaaataatattactctatgatgattgcttccacccacacractgcaacatacaggtgccttggggaaatgtggagaacattcaatcttgccgtcactattcatcartgaagattarcactgagatccagagaggctggatgacttgctcaagttcaccagcatggtagtggcaaagagaggtccagagtcctggcccttgatgcccagctcagtgccacaaagctcartaggagggatgttccagtggatgagggccaccaggaagcacaggtccaaggctggtcccacacttatcagcagcaacaactstcagttcatcctgcatgggaaaaatgttggaatgggagtctgaaatggggctactgtttcagtcctaaygtgctgtgtgacattgggacaacactttccctctctggacctcagtttccctctgtatacaaggatcagattcttgctgtgacccaagaactcctgaaatcatatagaaargctggggtgggccctgtcattcrtggttgatttcaatacactcaagtgccattcatcctttaagaaaaacatctggatatcaaggtggaaatggcccatttaatgattgattatatcattttgtggatatagttataatctgatgggcctggctgggagtggaagaagggaagccttttgcaaatagtagagtrtcagttgcaggtgccaatgrctaactttttgaattctatgttggcattaacaataaagcattttgcaaac

SEQ ID NO: 180 - DNA, 2267 bp, Homo sapiens
gacacagtaagtaccratgccgcaamgggaggtccccagggcttgagggcatgtgaggcgaggagaggatggactctagagttttggggtttggggtctgcaaagctctgaaggagtctcatctctgcagtttcaggtatccaaggcagcagagaacaaagaacakccaccatgcagctcttcctcctcttgtgcctggtgcttctcagccctcagggggcctcccttcaccgccaccacccccgggagatgaagaagagagtcgaggacctccatgtaggtgccacggtggcccccagcrgcagaagggactttaccttygacctctacagggycttggcttccgctgcccccagccagaryatcttcttctcccctgtgagcatctccatgagcctggccatgctctccctgggggctgggtccagcacaaagatgcagatcctggaggkcctgggcctcaacctccagaaaagctcagagraggagctgcacagaggctttcagcagctccytcaggaactcaaccagsccagagatggcttccagctgagcctcggcaatgcccttttcaccgacctggtggtagacctgcaggacaccttcgtaagtgccatgaagacgctgtacctggcagacactttcccyaccaactttagggactctgcaggggccatgaagcagatcaatgattatgtggcaaagcaaacgaagggcaagattgtggacttgcttaagaacctmgatagcaatgcggtcgtgatcatggtgaattacatcttctttaaagctaagtgggagacaagcttcaaccacaaasgcacccaagagcaagacttctacgtgacctyggagactgtggtgcgggtacccatgatgagccgcgaggatcagtatcactacctcctggaccggaacctctcctgcagggtggtgggggtsccctaccaaggcaatgccacggctttgttcattctccccagtgagggaaagatgcagcaggtggagaatggactgagtgagaaaacgctgaggaagtggcttaagatgttcaaaaagaggcagctcgagctttaccttcccaaattctccattgagggctcctatcagctggagaaagtcctccccagtctggggatcagtaacgtcttcacctcccatgctgatctgtccsgcatcagcaaccactcaaatatccaggtgtctgagatggtgcacaaagctgtggtggaggtggacgagtcgggaaccagagcagcggcagccacggggacaatmttcactttcaggtcrgcccgcctgaactctcagaggctagtgttcaacaggccctttctgatgttcattgtggataacaacatcctcttccttggcaaagtgaaccgcccctgaggtggggcttctcctgaaatctacaggcctcagggtgrgagatgaagggggctawgctatggcccwtctgtatgctggtagctagtgatttacacaggtttagttgactaatgaggyattacaaataatattactctatgatgattgcttccacccacacractgcaacatacaggtgccttggggaaatgtggagaacattcaatcttgccgtcactattcatcartgaagattarcactgagatccagagaggctggatgacttgctcaagttcaccagcatggtagtggcaaagagaggtccagagtcctggcccttgatgcccagctcagtgccacaaagctcartaggagggatgttccagtggatgagggccaccaggaagcacaggtccaaggctggtcccacacttatcagcagcaacaactstcagttcatcctgcatgggaaaaatgttggaatgggagtctgaaatggggctactgtttcagtcctaaygtgctgtgtgacattgggacaacactttccctctctggacctcagtttccctctgtatacaaggatcagattcttgctgtgacccaagaactcctgaaatcatatagaaargctggggtgggccctgtcattcrtggttgatttcaatacactcaagtgccattcatcctttaagaaaaacatctggatatcaaggtggaaatggcccatttaatgattgattatatcattttgtggatatagttataatctgatgggcctggctgggagtggaagaagggaagccttttgcaaatagtagagtrtcagttgcaggtgccaatgrctaactttttgaattctatgttggcattaacaataaagcattttgcaaac

SEQ ID NO: 181 - DNA, 2195 bp, Homo sapiens
ctttctgagcccgagggactgccacctccactgtgtgcacrctcagctacgggacacatttcaggtatccaaggcagcagagaacaaagaacakccaccatgcagctcttcctcctcttgtgcctggtgcttctcagccctcagggggcctcccttcaccgccaccacccccgggagatgaagaagagagtcgaggacctccatgtaggtgccacggtggcccccagcrgcagaagggactttaccttygacctctacagggycttggcttccgctgcccccagccagaryatcttcttctcccctgtgagcatctccatgagcctggccatgctctccctgggggctgggtccagcacaaagatgcagatcctggaggkcctgggcctcaacctccagaaaagctcagagraggagctgcacagaggctttcagcagctccytcaggaactcaaccagsccagagatggcttccagctgagcctcggcaatgcccttttcaccgacctggtggtagacctgcaggacaccttcgtaagtgccatgaagacgctgtacctggcagacactttcccyaccaactttagggactctgcaggggccatgaagcagatcaatgattatgtggcaaagcaaacgaagggcaagattgtggacttgcttaagaacctmgatagcaatgcggtcgtgatcatggtgaattacatcttctttaaagctaagtgggagacaagcttcaaccacaaasgcacccaagagcaagacttctacgtgacctyggagactgtggtgcgggtacccatgatgagccgcgaggatcagtatcactacctcctggaccggaacctctcctgcagggtggtgggggtsccctaccaaggcaatgccacggctttgttcattctccccagtgagggaaagatgcagcaggtggagaatggactgagtgagaaaacgctgaggaagtggcttaagatgttcaaaaagaggcagctcgagctttaccttcccaaattctccattgagggctcctatcagctggagaaagtcctccccagtctggggatcagtaacgtcttcacctcccatgctgatctgtccsgcatcagcaaccactcaaatatccaggtgtctgagatggtgcacaaagctgtggtggaggtggacgagtcgggaaccagagcagcggcagccacggggacaatmttcactttcaggtcrgcccgcctgaactctcagaggctagtgttcaacaggccctttctgatgttcattgtggataacaacatcctcttccttggcaaagtgaaccgcccctgaggtggggcttctcctgaaatctacaggcctcagggtgrgagatgaagggggctawgctatggcccwtctgtatgctggtagctagtgatttacacaggtttagttgactaatgaggyattacaaataatattactctatgatgattgcttccacccacacractgcaacatacaggtgccttggggaaatgtggagaacattcaatcttgccgtcactattcatcartgaagattarcactgagatccagagaggctggatgacttgctcaagttcaccagcatggtagtggcaaagagaggtccagagtcctggcccttgatgcccagctcagtgccacaaagctcartaggagggatgttccagtggatgagggccaccaggaagcacaggtccaaggctggtcccacacttatcagcagcaacaactstcagttcatcctgcatgggaaaaatgttggaatgggagtctgaaatggggctactgtttcagtcctaaygtgctgtgtgacattgggacaacactttccctctctggacctcagtttccctctgtatacaaggatcagattcttgctgtgacccaagaactcctgaaatcatatagaaargctggggtgggccctgtcattcrtggttgatttcaatacactcaagtgccattcatcctttaagaaaaacatctggatatcaaggtggaaatggcccatttaatgattgattatatcattttgtggatatagttataatctgatgggcctggctgggagtggaagaagggaagccttttgcaaatagtagagtrtcagttgcaggtgccaatgrctaactttttgaattctatgttggcattaacaataaagcattttgcaaac

SEQ ID NO: 182 - DNA, 2149 bp, Homo sapiens
atggggacaaaatgtcggctggataggaggtgctcaaacaaagaacakccaccatgcagctcttcctcctcttgtgcctggtgcttctcagccctcagggggcctcccttcaccgccaccacccccgggagatgaagaagagagtcgaggacctccatgtaggtgccacggtggcccccagcrgcagaagggactttaccttygacctctacagggycttggcttccgctgcccccagccagaryatcttcttctcccctgtgagcatctccatgagcctggccatgctctccctgggggctgggtccagcacaaagatgcagatcctggaggkcctgggcctcaacctccagaaaagctcagagraggagctgcacagaggctttcagcagctccytcaggaactcaaccagsccagagatggcttccagctgagcctcggcaatgcccttttcaccgacctggtggtagacctgcaggacaccttcgtaagtgccatgaagacgctgtacctggcagacactttcccyaccaactttagggactctgcaggggccatgaagcagatcaatgattatgtggcaaagcaaacgaagggcaagattgtggacttgcttaagaacctmgatagcaatgcggtcgtgatcatggtgaattacatcttctttaaagctaagtgggagacaagcttcaaccacaaasgcacccaagagcaagacttctacgtgacctyggagactgtggtgcgggtacccatgatgagccgcgaggatcagtatcactacctcctggaccggaacctctcctgcagggtggtgggggtsccctaccaaggcaatgccacggctttgttcattctccccagtgagggaaagatgcagcaggtggagaatggactgagtgagaaaacgctgaggaagtggcttaagatgttcaaaaagaggcagctcgagctttaccttcccaaattctccattgagggctcctatcagctggagaaagtcctccccagtctggggatcagtaacgtcttcacctcccatgctgatctgtccsgcatcagcaaccactcaaatatccaggtgtctgagatggtgcacaaagctgtggtggaggtggacgagtcgggaaccagagcagcggcagccacggggacaatmttcactttcaggtcrgcccgcctgaactctcagaggctagtgttcaacaggccctttctgatgttcattgtggataacaacatcctcttccttggcaaagtgaaccgcccctgaggtggggcttctcctgaaatctacaggcctcagggtgrgagatgaagggggctawgctatggcccwtctgtatgctggtagctagtgatttacacaggtttagttgactaatgaggyattacaaataatattactctatgatgattgcttccacccacacractgcaacatacaggtgccttggggaaatgtggagaacattcaatcttgccgtcactattcatcartgaagattarcactgagatccagagaggctggatgacttgctcaagttcaccagcatggtagtggcaaagagaggtccagagtcctggcccttgatgcccagctcagtgccacaaagctcartaggagggatgttccagtggatgagggccaccaggaagcacaggtccaaggctggtcccacacttatcagcagcaacaactstcagttcatcctgcatgggaaaaatgttggaatgggagtctgaaatggggctactgtttcagtcctaaygtgctgtgtgacattgggacaacactttccctctctggacctcagtttccctctgtatacaaggatcagattcttgctgtgacccaagaactcctgaaatcatatagaaargctggggtgggccctgtcattcrtggttgatttcaatacactcaagtgccattcatcctttaagaaaaacatctggatatcaaggtggaaatggcccatttaatgattgattatatcattttgtggatatagttataatctgatgggcctggctgggagtggaagaagggaagccttttgcaaatagtagagtrtcagttgcaggtgccaatgrctaactttttgaattctatgttggcattaacaataaagcattttgcaaac

SEQ ID NO: 183 - DNA, 1894 bp, Homo sapiens
gacgtgtatcgctgccgtcaagatggaggggcctttgtccgtgttcggtgaccgcagcactggggaaacgatccgctcccaaaacggcatgcccaagagaatcgtaaatgcaaaaattgcttgccttgacttcagcctgcaaaaaacaaaaatgaagcttggtgtacaggtggtcattacagaccctgaaaaactggaccaaattagacagagagaatcagatatcaccaaggagagaattcagaagatcctggcaactggtgccaatgttattctaaccactggtggaattgatgatatgtgtctgaagtattttgtggaggctggtgctatggcagttagaagagttttaaaaagggaccttaaacgcattgccaaagcttctggagcaactattctgtcaaccctggccaatttggaaggtgaagaaacttttgaagctgcaatgttgggacaggcagaagaagtggtacaggagagaatttgtgatgatgagctgatcttaatcaaaaattgtgtagtgaagagagttttggagtcaaaatctgtggttcccggtgggggtgctgtagaagcagccctttccatataccttgaaaactatgcaaccagcatggggtctcgggaacagcttgcgattgcagagtttgcaagatcacttcttgttattcccaatacactagcagttaatgctgcccaggactccacagatctggttgcaaaattaagagcttttcataatgaggcccaggttaacccagaacgtaaaaatctaaaatggattggtcttgatttgagcaatggtaaacctcgagacaacaaacaagcaggggtgtttgaaccaaccatagttaaagttaagagtttgaaatttgcaacagaagctgcaatcmccattcttcgaattgatgatcttattaaattacatccagaaagtaaagatgataaacatggaagttatgaagatgctgttcactctggagcccttwwtgattgatctgatgttccttttatttataacaatgttaratgcaattgtcttgtaccktgagttgagtattacacattaaagtaaagtacaagctgtaaacttgggtttttgtgatgtaggaaatggtttccatctgtactttggtcctctgatttcacatattgcaacctagtactttattagtttaaaaagaaattgaggttgttcaaagtttaagcaattcattctctctgaacacacattgctattcccatcccacccccaatgcacagggctgcaacaccacgayttctgcccattctctccagtgtgtgtaacagggtcacaagaattcgacagccagatgctccaagagggtggcccaaggctatagcccctccttcaatattgacggtcctattcccataatggaaggctccacacccacttgggaccaggaaactatccgtgctaaaggtgtaagyccacgtttatcagcttctgacttcttcataagaacracagctgcagcaccatcatttattcctgaagcattggctggggtgactgttcccgttccatcagtaagaaagtaaggctttagcttggacatggcttctatgttgctcccatggcgaggaaactcatctgttttaacttcaataagacctyttctagttgacaccaaaactggtacaatctctttgtcaaaatggccagctttctgtgcattctctgtcctgttctgggacagaactgcaaccttgtcctgatcttctctactcacttgccattttttggctacattttcagctgtaatacccatatgacagttgtgaaatgcatctgtaagaccatcacagagtatactgtcagtcagtggcatctcacctatctttactcctgttctcaagtaagccaagt

SEQ ID NO: 184 - DNA, 2439 bp, Homo sapiens
cctgttgtccctgcctctttttccttcccgccgtgccccgcggccgggccggggcagccgggaagcgggtggggtggtgtgttacccagtakctcctgggacatcgctcgggtacgctccacrycgtcgcagccactgctgtggtcgccggtcgsccgaggggccgcgatactggttgcccgcggtgtaagcagaattcgacgtgtatcgctgccgtcaagatggaggggcctttgtccgtgttcggtgaccgcagcactggggaaacgatccgctcccaaaacgttatggctgcagcttcgattgccaatattgtaaaaagttctcttggtccagttggcttggataaaatgttggtggatgatattggtgatgtaaccattactaacgatggtgcaaccatcctgaagttactggaggtagaacatcctgcagctaaagttctttgtgagctggctgatctgcaagacaaagaagttggagatggaactacttcagtggttattattgcagcagaactcctaaaaaatgcagatgaattagtcaaacagaaaattcatcccacatcagttattagtggctatcgacttgcttgcaaggaagcagtgcgttatatcaatgaaaacctaattgttaacacagatgaactgggaagagattgcctgattaatgctgctaagacatccatgtcttccaaaatcattggaataaatggtgatttctttgctaacatggtagtagatgctgtacttgctattaaatacacagacataagaggccagccacgctatccagtcaactctgttaatattttgaaagcccatgggagaagtcaaatggagagtatgctcatcagtggctatgcactcaactgtgtggtgggatcccagggcatgcccaagagaatcgtaaatgcaaaaattgcttgccttgacttcagcctgcaaaaaacaaaaatgaagcttggtgtacaggtggtcattacagaccctgaaaaactggaccaaattagacagagagaatcagatatcaccaaggagagaattcagaagatcctggcaactggtgccaatgttattctaaccactggtggaattgatgatatgtgtctgaagtattttgtggaggctggtgctatggcagttagaagagttttaaaaagggaccttaaacgcattgccaaagcttctggagcaactattctgtcaaccctggccaatttggaaggtgaagaaacttttgaagctgcaatgttgggacaggcagaagaagtggtacaggagagaatttgtgatgatgagctgatcttaatcaaaaatactaaggctcgtacgtctgcatcgattatcttacgtggggcaaatgatttcatgtgtgatgagatggagcgctctttacatgatgcactttgtgtagtgaagagagttttggagtcaaaatctgtggttcccggtgggggtgctgtagaagcagccctttccatataccttgaaaactatgcaaccagcatggggtctcgggaacagcttgcgattgcagagtttgcaagatcacttcttgttattcccaatacactagcagttaatgctgcccaggactccacagatctggttgcaaaattaagagcttttcataatgaggcccaggttaacccagaacgtaaaaatctaaaatggattggtcttgatttgagcaatggtaaacctcgagacaacaaacaagcaggggtgtttgaaccaaccatagttaaagttaagagtttgaaatttgcaacagaagctgcaatcmccattcttcgaattgatgatcttattaaattacatccagaaagtaaagatgataaacatggaagttatgaagatgctgttcactctggagcccttwwtgattgatctgatgttccttttatttataacaatgttaratgcaattgtcttgtaccktgagttgagtattacacattaaagtaaagtacaagctgtaaacttgggtttttgtgatgtaggaaatggtttccatctgtactttggtcctctgatttcacatattgcaacctagtactttattagtttaaaaagaaattgaggttgttcaaagtttaagcaattcattctctctgaacacacattgctattcccatcccacccccaatgcacagggctgcaacaccacgayttctgcccattctctccagtgtgtgtaacagggtcacaagaattcgacagccagatgctccaagagggtggcccaaggctatagcccctccttcaatattgacctarcgggggagaaaagatttagattgtttattcttctgtggacacagtttaaaatcttaaacttgtctttttcctcttaatgtatcagcatgctaccctttcaaactcaaattttcattttaactgcttaggaataaatttacacctttgtgaaaattca

SEQ ID NO: 185 - DNA, 2789 bp, Homo sapiens
cctgttgtccctgcctctttttccttcccgccgtgccccgcggccgggccggggcagccgggaagcgggtggggtggtgtgttacccagtakctcctgggacatcgctcgggtacgctccacrycgtcgcagccactgctgtggtcgccggtcgsccgaggggccgcgatactggttgcccgcggtgtaagcagaattcgacgtgtatcgctgccgtcaagatggaggggcctttgtccgtgttcggtgaccgcagcactggggaaacgatccgctcccaaaacgttatggctgcagcttcgattgccaatattgtaaaaagttctcttggtccagttggcttggataaaatgttggtggatgatattggtgatgtaaccattactaacgatggtgcaaccatcctgaagttactggaggtagaacatcctgcagctaaagttctttgtgagctggctgatctgcaagacaaagaagttggagatggaactacttcagtggttattattgcagcagaactcctaaaaaatgcagatgaattagtcaaacagaaaattcatcccacatcagttattagtggctatcgacttgcttgcaaggaagcagtgcgttatatcaatgaaaacctaattgttaacacagatgaactgggaagagattgcctgattaatgctgctaagacatccatgtcttccaaaatcattggaataaatggtgatttctttgctaacatggtagtagatgctgtacttgctattaaatacacagacataagaggccagccacgctatccagtcaactctgttaatattttgaaagcccatgggagaagtcaaatggagagtatgctcatcagtggctatgcactcaactgtgtggtgggatcccagggcatgcccaagagaatcgtaaatgcaaaaattgcttgccttgacttcagcctgcaaaaaacaaaaatgaagcttggtgtacaggtggtcattacagaccctgaaaaactggaccaaattagacagagagaatcagatatcaccaaggagagaattcagaagatcctggcaactggtgccaatgttattctaaccactggtggaattgatgatatgtgtctgaagtattttgtggaggctggtgctatggcagttagaagagttttaaaaagggaccttaaacgcattgccaaagcttctggagcaactattctgtcaaccctggccaatttggaaggtgaagaaacttttgaagctgcaatgttgggacaggcagaagaagtggtacaggagagaatttgtgatgatgagctgatcttaatcaaaaatactaaggctcgtacgtctgcatcgattatcttacgtggggcaaatgatttcatgtgtgatgagatggagcgctctttacatgatgcactttgtgtagtgaagagagttttggagtcaaaatctgtggttcccggtgggggtgctgtagaagcagccctttccatataccttgaaaactatgcaaccagcatggggtctcgggaacagcttgcgattgcagagtttgcaagatcacttcttgttattcccaatacactagcagttaatgctgcccaggactccacagatctggttgcaaaattaagagcttttcataatgaggcccaggttaacccagaacgtaaaaatctaaaatggattggtcttgatttgagcaatggtaaacctcgagacaacaaacaagcaggggtgtttgaaccaaccatagttaaagttaagagtttgaaatttgcaacagaagctgcaatcmccattcttcgaattgatgatcttattaaattacatccagaaagtaaagatgataaacatggaagttatgaagatgctgttcactctggagcccttwwtgattgatctgatgttccttttatttataacaatgttaratgcaattgtcttgtaccktgagttgagtattacacattaaagtaaagtacaagctgtaaacttgggtttttgtgatgtaggaaatggtttccatctgtactttggtcctctgatttcacatattgcaacctagtactttattagtttaaaaagaaattgaggttgttcaaagtttaagcaattcattctctctgaacacacattgctattcccatcccacccccaatgcacagggctgcaacaccacgayttctgcccattctctccagtgtgtgtaacagggtcacaagaattcgacagccagatgctccaagagggtggcccaaggctatagcccctccttcaatattgacggtcctattcccataatggaaggctccacacccacttgggaccaggaaactatccgtgctaaaggtgtaagyccacgtttatcagcttctgacttcttcataagaacracagctgcagcaccatcatttattcctgaagcattggctggggtgactgttcccgttccatcagtaagaaagtaaggctttagcttggacatggcttctatgttgctcccatggcgaggaaactcatctgttttaacttcaataagacctyttctagttgacaccaaaactggtacaatctctttgtcaaaatggccagctttctgtgcattctctgtcctgttctgggacagaactgcaaccttgtcctgatcttctctactcacttgccattttttggctacattttcagctgtaatacccatatgacagttgtgaaatgcatctgtaagaccatcacagagtatactgtcagtcagtggcatctcacctatctttactcctgttctcaagtaagccaagt

SEQ ID NO: 186 - DNA, 291 bp, Homo sapiens
atgatggtccgcgccgccgagacgatgaccacaggatctgagcctgcattcatcttgcttctcctgccgccgtctgccctgcgctgcctgcaagctaggcaaagctcctcctcgcagcccacaggcctgccgcgggcgggacctgagctcaggactggaatcccacgggcgagaatctcgagtgcgagcccggcccgcrgcgggtctcagcacagctctgatgggtccttttgctctcggcggcttcgggaggtcctatgcgtttctcctggcgccagtcattcgctcgcg

SEQ ID NO: 187 - DNA, 1119 bp, Homo sapiens
cacccagaggctgatgctcaccatggggcgcctgcaactggttgtgttgggcctcacctgctgctgggcagtggcgagtgccgcgaagaccccatgctgcactatgtgggcttcgtccctgtcattgatggagacttcatccccgctgacccgatcaacctgtacgccaacgccgccgacatcgactatatagcaggcaccaacaacatggacggccacatcttcgccagcatcgacatgcctgccatcaacaagggcaacaagaaagtcacggaggaggacttctacaagctggtcagtgagttcacaatcaccaaggggctcagaggcgccaagacgacctttgatgtctacaccgagtcctgggcccaggacccatcccaggagaataagaagaagactgtggtggactttgagaccgatgtcctcttcctggtgcccaccgagattgccctagcccagcacagagccaatgccaagagtgccaagacctacgcctacctgttttcccatccctctcggatgcccgtctaccccaaatgggtgggggccgaccatrsagatgasatccagtacatctttgggragccctttgccaccccactccgggctaccggccccragacaggayagtctctaaggcyatgaccgcctactggaccaactttgccaaaacaggggaccccaacatgggcsactcggctgtgcccacacactgggaaccctacactacggaaaacagcggctaccyggagatcaccaagaagatgggcagcagctccatgaagcggagcctgagaaccaacttcctgcgctactggaccctcacctatctggcgctgcccacagtgaccgaccaggaggccagttccatgccctccacaggggactctgaggccactcccrtctcccccgacaggcaactccgagtctgcccccgtccctgcaacgggtgactctcaggatgcccctgtgcccctcacaagtgactctgaggctgcccccgtgyccccctyaggtgactctgaggctcccccgtaycccctacgggtgactctgaggcccgtgcccaccttgggtgactctgaggccgcccctgtgtcccccacagatgactcc

SEQ ID NO: 188 - DNA, 1216 bp, Homo sapiens
cacccagaggctgatgctcaccatggggcgcctgcaactggttgtgttgggcctcacctgctgctgggcagtggcgagtgccgcgaagaccccatgctgcactatgtgggcttcgtccctgtcattgatggagacttcatccccgctgacccgatcaacctgtacgccaacgccgccgacatcgactatatagcaggcaccaacaacatggacggccacatcttcgccagcatcgacatgcctgccatcaacaagggcaacaagaaagtcacggaggaggacttctacaagctggtcagtgagttcacaatcaccaaggggctcagaggcgccaagacgacctttgatgtctacaccgagtcctgggcccaggacccatcccaggagaataagaagaagactgtggtggactttgagaccgatgtcctcttcctggtgcccaccgagattgccctagcccagcacagagccaatgccaagagtgccaagacctacgcctacctgttttcccatccctctcggatgcccgtctaccccaaatgggtgggggccgaccatrsagatgasatccagtacatctttgggragccctttgccaccccactccgggctaccggccccragacaggayagtctctaaggcyatgaccgcctactggaccaactttgccaaaacaggggaccccaacatgggcsactcggctgtgcccacacactgggaaccctacactacggaaaacagcggctaccyggagatcaccaagaagatgggcagcagctccatgaagcggagcctgagaaccaacttcctgcgctactggaccctcacctatctggcgctgcccacagtgaccgaccaggaggccagttccatgccctccacaggggactctgaggccactcccrtctcccccgacaggcaactccgagtctgcccccgtccctgcaacgggtgactctcaggatgcccctgtgcccctcacaagtgactctgaggctcccccgtaycccctacgggtgactctgaggcccgtgcccaccttgggtgactctgaggccgcccctgtgtcccccacagatgactccgaggaagctcagatgctgcagtcattagtttctagtgtcccatcagccttggtctcaagaggccgagagggtgcaaccccaggggctcccctcccatcttgagctcttcctgaataaaacctcattcccc

SEQ ID NO: 189 - DNA, 1216 bp, Homo sapiens; identical to SEQ ID NO: 188

SEQ ID NO: 190 - DNA, 4756 bp, Homo sapiens
ttcccctgcctgcccttcgggcacctcaggaaggcaccttcctctgtcagaatggcyaccatggtaccatccgtgttgtggcccagggcctgctggactctgctggtctgctgtctgctgaccccaggtgtccaggggcaggagttccttttgcgggtggagccccagaaccctgtgctctctgctggagggtccctgtttgtgaactgcagtactgattgtcccagctctgagaaaatcgccttggagacgtccctatcaaaggagctggtggccagtggcatgggctgggcagccttcaatctcagcaacgtgactggcaacagtcggatcctctgctcagtgtactgcaatggctcycagataacaggctcctctaacatcaccgtgtacrggctcccggagcgtgtggagctggcacccctgcctccttggcagccggtgggccagaacttcaccctgcgctgccaagtggaggrtgggtcgccccggaccagcctcacggtggtgctgcttcgctgggaggaggagctgagccggcagcccgcagtggaggagccagcggaggtcactgccactgtgctggccagcagagacgaccacggagcccctttctcatgccgcacagaactggacatgcagccccaggggctgggactgttcgtgaacacctcagccccccgccagctccgaacctttgtcctgcccgtgacccccccgcgcctcgtggccccccggttcttggaggtggaaacgtcgtggccggtggactgcaccctagacgggctttttccagcctcagaggcccaggtctacctggcgctgggggaccagatgctgaatgcgacagtcatgaaccacggggacacgctaacggccacagccacagccacggcgcgcgcggatcaggagggtgcccgggaratcgtctgcaacgtgaccctagggggcgagagacgggaggcccgggagaacttgacggtctttagcttcctaggacccattgtgaacctcagcgagcccaccgcccatgaggggtccacagtgaccgtgagttgcatggctggggctcgagtccaggtcacgctggacggagttccggccgcggccccggggcagccagctcaacttcagctaaatgctaccgagagtgacgacggacgcagcttcttctgcagtgccactctcgaggtggacggcgagttcttgcacaggaacagtagcgtccagctgcgagtcctgtatggtcccaaaattgaccgagccacatgcccccagcacttgaaatggaaagataaaacgagacacgtcctgcagtgccaagccaggggcaacccgtaccccgagctgcggtgtttgaaggaaggctccagccgggaggtgccggtggggatcccgttcttcgtcaacgtaacacataatggtacttatcagtgccaagcgtccagctcacgaggcaaatacaccctggtcgtggtgatggacattgaggctgggagctcccactttgtccccgtcttcgtggcggtgttactgaccctgggcgtggtgactatcgtactggccttaatgtacgtcttcagggagcaccaacggagcggcagttaccatgttagggaggagascacctatctgcccctcacgtctatgcagccgacagaagcaatgggggaagaaccgtccagagctgagtgacgctgggatccgggatcaaagttggcgggggcttggctgtgccctcagattccgcaccaataaagccttcaaactccctaatctgtggtttgattccacccgcgctgcaagtctctcccacccaggtgcacatccactgagtagcgtcgctgcgacggaagggggcggggcctgtggcgcgcagacgcagcttgaactcttgagaggtgggctggggcttagccaacggggcaaggggggcgggaaggaggtggggtttctcccagccaatcgacgggcgcgccctcgttgccgctctatgccgctccgccccggctcgctggtcccagaaggcgccgggtttcccaagatggcggcggacgtgtcygttactcaccggcccccgctgagccctaagtctggggccgaagtcraagccggcgatgccgcggagcgccgggcgccggaagaagagctgcygcctctagatccagaagagatccggaaacgcctggaacacaccgagcgccagttccgtaaccgccgcaagatactgatccggggcctcccgggggacgtgaccaaccaggaagtacatgacctgctcagtgactatgagctcaaatactgttttgtggacaaatacaaagggacagccttcgtgaccctgctgaatggggagcaggccgaggccgcaatcaatgctttccaccagagccgcctgcgggagcgygaactgtcggtgcagctgcagcccacggatgccctgctgtgtgtggccaacctgccccccagcctcacacagcagcagttcgaggagctggtgcggcccttcggcagcctggagcgctgcttcctggtctacagtgagcgcactggccaatccaagggctatggctttgcygagtacatgaagaaggactcggctgcccgtgccaagtcrgacctgctgggcaagccgctgggaccacgcaccctctacgtgcactggacggatgccgggcaactgacgcctgcccttctccactcccgctgcctctgtgtggaccgcctgccacctggcttcaacgatgtggacgctctgtgccgggcgctgtcagctgtccacagccccaccttctgccagctggcgtgcggccaggatgggcagctgaagggcttcgcggtgctggagtatgagacggctgagatggcggaggaggcacagcagcaggcggacggcctgtccctggggggcagccacctgcgagtctccttctgcgcccctgggccccccggccgcagtatgctggccgctctcatcgctgcccaggccacggccctcaatcgggggaagggactcctccccgagcccaacatcctgcagctgctcaacaacctgggcccatccgcgtccctccagctgctgctcaaccccctgctccatggcagtgcgggggggaagcagggcctcctgggtgcccccccagccatgccgctgctcaatgggccagccctgtccacggcgctgttgcagctcgccctgcagacccagggccagaagaagcccggcatcctgggagactcacccctgggcgccctccagcctggggcccagccagccaaccccctcctcggggagctgcctgcaggagggggcctgcccccggagctgccgccccggcgagggaagccaccacccctgctgccatccgtgcttggccctgctgggggtgaccgggaggccctgggcttgggtcccccagcggcccagctcactcctcccccmgcccctgtggggctccgaggctctggcctcagaggcctccagaaagacagtgggcctctgccgacgccccctggggtctcactgctgggggagccccccaaggactaccggattcccctgaatccctacctgaacctacacagcctgctcccggccagcaacctggcgggtaaggaggcccggggctggggaggcgccgggagaagccgccgcccagctgagggccccccaactaaccccccagcccctggaggtggcagcagcagcagcaaagccttccagctcaagtcccgcctgctcagccccctcagcagcgcccgcctgccccccgaaccaggactgtctgacagctacagcttcgactacccctcggacatgggacctcggcggctcttctcccacccacgggaaccagcccttgggcctcacggacccagccgacacaagatgtcccccccgcccagtggcttcggcgaacggagcagcggtgggagtggcgggggccccctgtctcacttctattcaggctcgcccacttcctacttcaccagcggcctgcaggctggcctcaagcagagccacctcagtaaggcaatcggctcttccccgctggggtccggagaagggctcctgggcctcagccccgggcctaatggtcacagccacctgctgaagaccccactgggcggccagaaacgcagctttgcccacctgctgccctcgcccgagcccagcccagaaggcagctatgtgggccagcactcccagggcctcggcggccactacgcggactcctacctgaagcggaagaggattttctaagtggctggcaccagagataactcaagggcctgcaccaaatcgcttttgggttttctgatgttttgttttgtgttttttttaaaccattttctctctttcggtaatagaaaaatctctgaaagactttactgaccaatcagccggagccccaggagcccaaggggtgtgggggagtctggaggcctcattatgtctctggcttgctccccacgctgaaaccctgcagccttaagagagaggggccccggcctgctctccctccctccccccatctcctcctccgctgtgcccgtctctccggagccctcctgcctcattgctcctgtaattttggcctttcgagtgccttggaggtttccctgacctcccgtgaagatacagagactgtctcctttttttttaactttgwcgctctgattccttcaaggcccggcctgtccgggccaccattccacaccttgcggtttgaaacagctgtttttcccacatttg

SEQ ID NO: 191 - DNA, 876 bp, Homo sapiens
atggaggccgagccaatcccggactcctcaatgccagcaaagcttctggcgccgccctgtctgaacctggagcggctgggaggatccccctcccaggagaagccgaggaccccaggatgctgcagaatcagtgagaggtgcagaaggccccggaaacagctgaacccctgccggggcaccgagagagtggaccctgggttcgagggggtgactctgaagtttcagataaagccggactccagcctgcagatcatccccacgtacagcctgccctgcagtagccgttctcaggaatcccctgcagatgctgttgggggccctgcagcccacccaggaggcaccgaggcccactcagcaggcagcgaggccctggagccccggcgctgtgcttcctgtcggacccagaggaccccgctctggagagacgctgaagatgggacccctctctgcaacgcctgtgggatcaggtacaagaaatacggcactcgctgctccagctgctggctggtgcccaggaaaaatgtccagcccaagaggctatgtggcagatgtggagtgtccctggaccccrttcaggaaggttaaacccagcttcaccctgctgagctgctgcttctgcctccgtttcaccagtgggagaatgggcagaagcagctctcctaggaggattggggaaagagccggcctgcctcctctctgccatytccagattcaaggatcccgggggaagacccaggcctcaggtggcagagcctgctaggggtcaccagccccttctccagtcagccttggccgaggccccctcaggagacgctctcaggaaggatgagcattgttacagcagggacaataaagtacagagatatgccgagagaa

SEQ ID NO: 192 - DNA, 5617 bp, Homo sapiens
ttcccctgcctgcccttcgggcacctcaggaaggcaccttcctctgtcagaatggcyaccatggtaccatccgtgttgtggcccagggcctgctggactctgctggtctgctgtctgctgaccccaggtgtccaggggcaggagttccttttgcgggtggagccccagaaccctgtgctctctgctggagggtccctgtttgtgaactgcagtactgattgtcccagctctgagaaaatcgccttggagacgtccctatcaaaggagctggtggccagtggcatgggctgggcagccttcaatctcagcaacgtgactggcaacagtcggatcctctgctcagtgtactgcaatggctcycagataacaggctcctctaacatcaccgtgtacrggctcccggagcgtgtggagctggcacccctgcctccttggcagccggtgggccagaacttcaccctgcgctgccaagtggaggrtgggtcgccccggaccagcctcacggtggtgctgcttcgctgggaggaggagctgagccggcagcccgcagtggaggagccagcggaggtcactgccactgtgctggccagcagagacgaccacggagcccctttctcatgccgcacagaactggacatgcagccccaggggctgggactgttcgtgaacacctcagccccccgccagctccgaacctttgtcctgcccgtgacccccccgcgcctcgtggccccccggttcttggaggtggaaacgtcgtggccggtggactgcaccctagacgggctttttccagcctcagaggcccaggtctacctggcgctgggggaccagatgctgaatgcgacagtcatgaaccacggggacacgctaacggccacagccacagccacggcgcgcgcggatcaggagggtgcccgggaratcgtctgcaacgtgaccctagggggcgagagacgggaggcccgggagaacttgacggtctttagcttcctaggacccattgtgaacctcagcgagcccaccgcccatgaggggtccacagtgaccgtgagttgcatggctggggctcgagtccaggtcacgctggacggagttccggccgcggccccggggcagccagctcaacttcagctaaatgctaccgagagtgacgacggacgcagcttcttctgcagtgccactctcgaggtggacggcgagttcttgcacaggaacagtagcgtccagctgcgagtcctgtatggtcccaaaattgaccgagccacatgcccccagcacttgaaatggaaagataaaacgagacacgtcctgcagtgccaagccaggggcaacccgtaccccgagctgcggtgtttgaaggaaggctccagccgggaggtgccggtggggatcccgttcttcgtcaacgtaacacataatgctgggagctcccactttgtccccgtcttcgtggcggtgttactgaccctgggcgtggtgactatcgtactggccttaatgtacgtcttcagggagcaccaacggagcggcagttaccatgttagggaggagascacctatctgcccctcacgtctatgcagccgacagaagcaatgggggaagaaccgtccagagctgagtgacgctgggatccgggatcaaagttggcgggggcttggctgtgccctcagattccgcaccaataaagccttcaaactccctaatctgtggtttgattccacccgcgctgcaagtctctcccacccaggtgcacatccactgagtagcgtcgctgcgacggaagggggcggggcctgtggcgcgcagacgcagcttgaactcttgagaggtgggctggggcttagccaacggggcaaggggggcgggaaggaggtggggtttctcccagccaatcgacgggcgcgccctcgttgccgctctatgccgctccgccccggctcgctggtcccagaaggcgccgggtttcccaagatggcggcggacgtgtcygttactcaccggcccccgctgagccctaagtctggggccgaagtcraagccggcgatgccgcggagcgccgggcgccggaagaagagctgcygcctctagatccagaagagatccggaaacgcctggaacacaccgagcgccagttccgtaaccgccgcaagatactgatccggggcctcccgggggacgtgaccaaccaggactgtctgacagctacagcttcgactacccctcggacatgggacctcggcggctcttctcccacccacgggaaccagcccttgggcctcacggacccagccgacacaagatgtcccccccgcccagtggcttcggcgaacggagcagcggtgggagtggcgggggccccctgtctcacttctattcaggctcgcccacttcctacttcaccagcggcctgcaggctggcctcaagcagagccacctcagtaaggcaatcggctcttccccgctggggtccggagaagggctcctgggcctcagccccgggcctaatggtcacagccacctgctgaagaccccactgggcggccagaaacgcagctttgcccacctgctgccctcgcccgagcccagcccagaaggcagctatgtgggccagcactcccagggcctcggcggccactacgcggactcctacctgaagcggaagaggattttctaagtggctggcaccagagataactcaagggcctgcaccaaatcgcttttgggttttctgatgttttgttttgtgttttttttaaaccattttctctctttcggtaatagaaaaatctctgaaagactttactgaccaatcagccggagccccaggagcccaaggggtgtgggggagtctggaggcctcattatgtctctggcttgctccccacgctgaaaccctgcagccttaagagagaggggccccggcctgctctccctccctccccccatctcctcctccgctgtgcccgtctctccggagccctcctgcctcattgctcctgtaattttggcctttcgagtgccttggaggtttccctgacctcccgtgaagatacagagactgtctcctttttttttaactttgwcaactgacttctgtttccttttctaagttttatttttcaaaccaccccggacagcccccagctctgattccttcaaggcccggcctgtccgggccaccattccacaccttgcggtttgaaacagctgtttttcccacatttgctgcaggcatggctgtctcctgcccctgcctgcccatctggcctataccccagccgtggggcccggggtccctgccgcagccccctccccttctgatgccttaaaagctgggccccaggccctgctggccagagccacagatgscaagctctgggagcttgactatggaccaaacagctctggcctagggattgggccaccctacccaggatctccaccctggggacagtagaaggggaaagccttcatcttggcgaaccggccccaccaccccctcctacccgggcctccgtgcagagatgggctttctctgccagtcccctgctgtctgtmtgtgggagtcggacattgtgcccatctcccggagcctctgctgtcactcgcttgttgaagatgaattcttgaattctgcctgcccacccccggccagatccctggagctggcctccttccagcccagtgccagaaaccagcactccatgaagataaactctgggcccgcccaccagcaggacctgtcgacctgaggtgaccctgggccttgcccccagccaactgggccaccagcttccctcccttgactctgggggtccacatccactccaaggggactattcccccgaccccaccccagtctccccacacggacctttgctgaattaaagtttgtaagtaaatggttttaaagaaatcagagttggctggttcttgggacaaacagtgggcttgagtgggaggtctgggatggccccgcgggtttacctgagatggattccgccctgctcttcccacctggtcaccgcaggccctaagcaaacatctgcgcttatgttccattgattatgggctttccctcgcctccctggcgcggcgcatgctcagtcggtgagtcacgtgatgcatgtcatggccgcctccatggcccggggaggcgtgagtgccagggttctrctgcaggctgccaggggcacctggtggaacrgacctgggggcacttccgggtcgggggagggggtggcgctggggacaaccagaaagtttcaagcgacaggctcgcgcccggckggagaggaggacgcgggcggcccggagcggcccggggacgtggtgaacgtggtgttcgtagaccgctcaggccagcggatcccagtgagtggcagagtcggggacaatgttcttcacctggcccagcgccacggggtggacctggaaggggcctgtgaagcctccctggcctgctccacctgccatgtgtatgtgagtgaagaccacctggatctcctgcctcctcccgaggagagggaagacgacatgctagacatggcccccctcctccaggagaactcgcggctgggctgccagattgtgctgacaccggagctggaaggagcggaattcaccctkcccaagatcaccaggaacttctacgtggatggccatgtccccaagccccactgacatgaacacctggaccattccacattgccatggccccagggcccagattgagggaatagccaggtgccagccctgcccagagtgcggacaggcccgggagagacgtggaagcccctgtgaaggacaacacccctgcttgggagagagtcccatgtccaggctctggtggggacagggcccctagtggggtggccttccccaggcccctgagaatcagggtttgagtaggagtggactcatattggagctgcaataaatcgataacacaggccccagcatgttgagtgtccttgggggacagatctggggtctacaggtggctcacacctgtaatcctagcactttgggaagccaagatgggaggatcacttgaggccaggagcttaagaccatcctgggcaacatggcgagacctcgtctctataaaaacagtaaaaattagcgtggagtggtggtaagtgcctgtagtcccagctactcgggagactgaggtgggaggatcacttgagcccaggggatttaggctgcagtggagcggtgatcaggccattccactccagcctgggtgacagagtgaggccctgtctcaaaaaaaaaaaaaacaaaaacaaaaacaaaccacacctgcatctgctgtgctgggcccccggttctcttttccctctgggatctaagatgccgctggggatccaaggcagaggcctgggagcccccatttccgagggggagggctagcgtggaaggccccgccccggcagctgcggagggatttggtggggtccaggccgcccttgccacgcaggggtgcgcggatgacctgaaaaaagccagaaagaggaaaggtgccgccgaggctggtcgctctcagctggggctcatcgcatcctctaccaagagcgctcccaccacacaggtcccgcccctcccag

SEQ ID NO: 193 - DNA, 3366 bp, Homo sapiens
ttcccctgcctgcccttcgggcacctcaggaaggcaccttcctctgtcagaatggcyaccatggtaccatccgtgttgtggcccagggcctgctggactctgctggtctgctgtctgctgaccccaggtgtccaggggcaggagttccttttgcgggtggagccccagaaccctgtgctctctgctggagggtccctgtttgtgaactgcagtactgattgtcccagctctgagaaaatcgccttggagacgtccctatcaaaggagctggtggccagtggcatgggctgggcagccttcaatctcagcaacgtgactggcaacagtcggatcctctgctcagtgtactgcaatggctcycagataacaggctcctctaacatcaccgtgtacrggctcccggagcgtgtggagctggcacccctgcctccttggcagccggtgggccagaacttcaccctgcgctgccaagtggaggrtgggtcgccccggaccagcctcacggtggtgctgcttcgctgggaggaggagctgagccggcagcccgcagtggaggagccagcggaggtcactgccactgtgctggccagcagagacgaccacggagcccctttctcatgccgcacagaactggacatgcagccccaggggctgggactgttcgtgaacacctcagccccccgccagctccgaacctttgtcctgcccgtgacccccccgcgcctcgtggccccccggttcttggaggtggaaacgtcgtggccggtggactgcaccctagacgggctttttccagcctcagaggcccaggtctacctggcgctgggggaccagatgctgaatgcgacagtcatgaaccacggggacacgctaacggccacagccacagccacggcgcgcgcggatcaggagggtgcccgggaratcgtctgcaacgtgaccctagggggcgagagacgggaggcccgggagaacttgacggtctttagcttcctaggacccattgtgaacctcagcgagcccaccgcccatgaggggtccacagtgaccgtgagttgcatggctggggctcgagtccaggtcacgctggacggagttccggccgcggccccggggcagccagctcaacttcagctaaatgctaccgagagtgacgacggacgcagcttcttctgcagtgccactctcgaggtggacggcgagttcttgcacaggaacagtagcgtccagctgcgagtcctgtatggtcccaaaattgaccgagccacatgcccccagcacttgaaatggaaagataaaacgagacacgtcctgcagtgccaagccaggggcaacccgtaccccgagctgcggtgtttgaaggaaggctccagccgggaggtgccggtggggatcccgttcttcgtcaacgtaacacataatggtacttatcagtgccaagcgtccagctcacgaggcaaatacaccctggtcgtggtgatggacattgaggctgggagctcccactttgtccccgtcttcgtggcggtgttactgaccctgggcgtggtgactatcgtactggccttaatgtacgtcttcagggagcaccaacggagcggcagttaccatgttagggaggagascacctatctgcccctcacgtctatgcagccgacagaagcaatgggggaagaaccgtccagagctgagtgacgctgggatccgggatcaaagttggcgggggcttggctgtgccctcagattccgcaccaataaagccttcaaactccctaatctgtggtttgattccacccgcgctgcaagtctctcccacccaggtgcacatccactgagtagcgtcgctgcgacggaagggggcggggcctgtggcgcgcagacgcagcttgaactcttgagaggtgggctggggcttagccaacggggcaaggggggcgggaaggaggtggggtttctcccagccaatcgacgggcgcgccctcgttgccgctctatgccgctccgccccggctcgctggtcccagaaggcgccgggtttcccaagatggcggcggacgtgtcygttactcaccggcccccgctgagccctaagtctggggccgaagtcraagccggcgatgccgcggagcgccgggcgccggaagaagagctgcygcctctagatccagaagagatccggaaacgcctggaacacaccgagcgccagttccgtaaccgccgcaagatactgatccggggcctcccgggggacgtgaccaaccagccttcgtgaccctgctgaatggggagcaggccgaggccgcaatcaatgctttccaccagagccgcctgcgggagcgygaactgtcggtgcagctgcagcccacggatgccctgctgtgtgtggccaacctgccccccagcctcacacagcagcagttcgaggagctggtgcggcccttcggcagcctggagcgctgcttcctggtctacagtgagcgcactggccaatccaagggctatggctttgcygagtacatgaagaaggactcggctgcccgtgccaagtcrgacctgctgggcaagccgctgggaccacgcaccctctacgtgcactggacggatgccgggcaactgacgcctgcccttctccactcccgctgcctctgtgtggaccgcctgccacctggcttcaacgatgtggacgctctgtgccgggcgctgtcagctgtccacagccccaccttctgccagctggcgtgcggccaggatgggcagctgaagggcttcgcggtgctggagtatgagacggctgagatggcggaggaggcacagcagcaggcggacggcctgtccctggggggcagccacctgcgagtctccttctgcgcccctgggccccccggccgcagtatgctggccgctctcatcgctgcccaggccacggccctcaatcgggggaagggactcctccccgagcccaacatcctgcagctgctcaacaacctgggcccatccgcgtccctccagctgctgctcaaccccctgctccatggcagtgcgggggggaagcagggcctcctgggtgcccccccagccatgccgctgctcaatgggccagccctgtccacggcgctgttgcagctcgccctgcagacccagggccagaaggtaacacacgcatccccctcacccactgctctacagcccctacaggctcttttcaacacagctggtgcgatcggtggggtggggggacctctggctgtgccctgggggcgcagaaccagggtgagggcgactcccccaaacccctgcctttcccacccacatccccatccccctctggcaattgctcatgatggttcgccatctttccctccattc

SEQ ID NO: 194 - DNA, 3085 bp, Homo sapiens
accccactgggcggccagaaacgcagctttgcccacctgctgccctcgcccgagcccagcccagaaggcagctatgtgggccagcactcccagggcctcggcggccactacgcggactcctacctgaagcggaagaggattttctaagtggctggcaccagagataactcaagggcctgcaccaaatcgcttttgggttttctgatgttttgttttgtgttttttttaaaccattttctctctttcggtaatagaaaaatctctgaaagactttactgaccaatcagccggagccccaggagcccaaggggtgtgggggagtctggaggcctcattatgtctctggcttgctccccacgctgaaaccctgcagccttaagagagaggggccccggcctgctctccctccctccccccatctcctcctccgctgtgcccgtctctccggagccctcctgcctcattgctcctgtaattttggcctttcgagtgccttggaggtttccctgacctcccgtgaagatacagagactgtctcctttttttttaactttgwcaactgacttctgtttccttttctaagttttatttttcaaaccaccccggacagcccccagctctgattccttcaaggcccggcctgtccgggccaccattccacaccttgcggtttgaaacagctgtttttcccacatttgctgcaggcatggctgtctcctgcccctgcctgcccatctggcctataccccagccgtggggcccggggtccctgccgcagccccctccccttctgatgccttaaaagctgggccccaggccctgctggccagagccacagatgscaagctctgggagcttgactatggaccaaacagctctggcctagggattgggccaccctacccaggatctccaccctggggacagtagaaggggaaagccttcatcttggcgaaccggccccaccaccccctcctacccgggcctccgtgcagagatgggctttctctgccagtcccctgctgtctgtmtgtgggagtcggacattgtgcccatctcccggagcctctgctgtcactcgcttgttgaagatgaattcttgaattctgcctgcccacccccggccagatccctggagctggcctccttccagcccagtgccagaaaccagcactccatgaagataaactctgggcccgcccaccagcaggacctgtcgacctgaggtgaccctgggccttgcccccagccaactgggccaccagcttccctcccttgactctgggggtccacatccactccaaggggactattcccccgaccccaccccagtctccccacacggacctttgctgaattaaagtttgtaagtaaatggttttaaagaaatcagagttggctggttcttgggacaaacagtgggcttgagtgggaggtctgggatggccccgcgggtttacctgagatggattccgccctgctcttcccacctggtcaccgcaggccctaagcaaacatctgcgcttatgttccattgattatgggctttccctcgcctccctggcgcggcgcatgctcagtcggtgagtcacgtgatgcatgtcatggccgcctccatggcccggggaggcgtgagtgccagggttctrctgcaggctgccaggggcacctggtggaacrgacctgggggcacttccgggtcgggggagggggtggcgctggggacaaccagaaagtttcaagcgacaggctcgcgcccggckggagaggaggacgcgggcggcccggagcggcccggggacgtggtgaacgtggtgttcgtagaccgctcaggccagcggatcccagtgagtggcagagtcggggacaatgttcttcacctggcccagcgccacggggtggacctggaaggggcctgtgaagcctccctggcctgctccacctgccatgtgtatgtgagtgaagaccacctggatctcctgcctcctcccgaggagagggaagacgacatgctagacatggcccccctcctccaggagaactcgcggctgggctgccagattgtgctgacaccggagctggaaggagcggaattcaccctkcccaagatcaccaggaacttctacgtggatggccatgtccccaagccccactgacatgaacacctggaccattccacattgccatggccccagggcccagattgagggaatagccaggtgccagccctgcccagagtgcggacaggcccgggagagacgtggaagcccctgtgaaggacaacacccctgcttgggagagagtcccatgtccaggctctggtggggacagggcccctagtggggtggccttccccaggcccctgagaatcagggtttgagtaggagtggactcatattggagctgcaataaatcgataacacaggccccagcatgttgagtgtccttgggggacagatctggggtctacaggtggctcacacctgtaatcctagcactttgggaagccaagatgggaggatcacttgaggccaggagcttaagaccatcctgggcaacatggcgagacctcgtctctataaaaacagtaaaaattagcgtggagtggtggtaagtgcctgtagtcccagctactcgggagactgaggtgggaggatcacttgagcccaggggatttaggctgcagtggagcggtgatcaggccattccactccagcctgggtgacagagtgaggccctgtctcaaaaaaaaaaaaaacaaaaacaaaaacaaaccacacctgcatctgctgtgctgggcccccggttctcttttccctctgggatctaagatgccgctggggatccaaggcagaggcctgggagcccccatttccgagggggagggctagcgtggaaggccccgccccggcagctgcggagggatttggtggggtccaggccgcccttgccacgcaggggtgcgcggatgacctgaaaaaagccagaaagaggaaaggtgccgccgaggctggtcgctctcagctggggctcatcgcatcctctaccaagagcgctcccaccacacaggtcccgcccctcccag

SEQ ID NO: 195 - DNA, 2263 bp, Homo sapiens
ttcccctgcctgcccttcgggcacctcaggaaggcaccttcctctgtcagaatggcyaccatggtaccatccgtgttgtggcccagggcctgctggactctgctggtctgctgtctgctgaccccaggtgtccaggggcaggagttccttttgcgggtggagccccagaaccctgtgctctctgctggagggtccctgtttgtgaactgcagtactgattgtcccagctctgagaaaatcgccttggagacgtccctatcaaaggagctggtggccagtggcatgggctgggcagccttcaatctcagcaacgtgactggcaacagtcggatcctctgctcagtgtactgcaatggctcycagataacaggctcctctaacatcaccgtgtacrggctcccggagcgtgtggagctggcacccctgcctccttggcagccggtgggccagaacttcaccctgcgctgccaagtggaggrtgggtcgccccggaccagcctcacggtggtgctgcttcgctgggaggaggagctgagccggcagcccgcagtggaggagccagcggaggtcactgccactgtgctggccagcagagacgaccacggagcccctttctcatgccgcacagaactggacatgcagccccaggggctgggactgttcgtgaacacctcagccccccgccagctccgaacctttgtcctgcccgtgacccccccgcgcctcgtggccccccggttcttggaggtggaaacgtcgtggccggtggactgcaccctagacgggctttttccagcctcagaggcccaggtctacctggcgctgggggaccagatgctgaatgcgacagtcatgaaccacggggacacgctaacggccacagccacagccacggcgcgcgcggatcaggagggtgcccgggaratcgtctgcaacgtgaccctagggggcgagagacgggaggcccgggagaacttgacggtctttagcttcctaggacccattgtgaacctcagcgagcccaccgcccatgaggggtccacagtgaccgtgagttgcatggctggggctcgagtccaggtcacgctggacggagttccggccgcggccccggggcagccagctcaacttcagctaaatgctaccgagagtgacgacggacgcagcttcttctgcagtgccactctcgaggtggacggcgagttcttgcacaggaacagtagcgtccagctgcgagtcctgtatggtcccaaaattgaccgagccacatgcccccagcacttgaaatggaaagataaaacgagacacgtcctgcagtgccaagccaggggcaacccgtaccccgagctgcggtgtttgaaggaaggctccagccgggaggtgccggtggggatcccgttcttcgtcaacgtaacacataatggtacttatcagtgccaagcgtccagctcacgaggcaaatacaccctggtcgtggtgatggacattgaggctgggagctcccactttgtccccgtcttcgtggcggtgttactgaccctgggcgtggtgactatcgtactggccttaatgtacgtcttcagggagcaccaacggagcggcagttaccatgttagggaggagascacctatctgcccctcacgtctatgcagccgacagaagcaatgggggaagaaccgtccagagctgagtgacgctgggatccgggatcaaagttggcgggggcttggctgtgccctcagattccgcaccaataaagccttcaaactccctaatctgtggtttgattccacccgcgctgcaagtctctcccacccaggtgcacatccactgagtagcgtcgctgcgacggaagggggcggggcctgtggcgcgcagacgcagcttgaactcttgagaggtgggctggggcttagccaacggggcaaggggggcgggaaggaggtggggtttctcccagccaatcgacgggcgcgccctcgttgccgctctatgccgctccgccccggctcgctggtcccagaaggcgccgggtttcccaagatggcggcggacgtgtcygttactcaccggcccccgctgagccctaagtctggggccgaagtcraagccggcgatgccgcggagcgccgggcgccggaagaagagctgcygcctctagatccagaagagatccggaaacgcctggaacacaccgagcgccagttccgtaaccgccgcaagatactgatccggggcctcccgggggacgtgaccaaccag

SEQ ID NO: 196 - DNA, 6213 bp, Homo sapiens
ttcccctgcctgcccttcgggcacctcaggaaggcaccttcctctgtcagaatggcyaccatggtaccatccgtgttgtggcccagggcctgctggactctgctggtctgctgtctgctgaccccaggtgtccaggggcaggagttccttttgcgggtggagccccagaaccctgtgctctctgctggagggtccctgtttgtgaactgcagtactgattgtcccagctctgagaaaatcgccttggagacgtccctatcaaaggagctggtggccagtggcatgggctgggcagccttcaatctcagcaacgtgactggcaacagtcggatcctctgctcagtgtactgcaatggctcycagataacaggctcctctaacatcaccgtgtacrggctcccggagcgtgtggagctggcacccctgcctccttggcagccggtgggccagaacttcaccctgcgctgccaagtggaggrtgggtcgccccggaccagcctcacggtggtgctgcttcgctgggaggaggagctgagccggcagcccgcagtggaggagccagcggaggtcactgccactgtgctggccagcagagacgaccacggagcccctttctcatgccgcacagaactggacatgcagccccaggggctgggactgttcgtgaacacctcagccccccgccagctccgaacctttgtcctgcccgtgacccccccgcgcctcgtggccccccggttcttggaggtggaaacgtcgtggccggtggactgcaccctagacgggctttttccagcctcagaggcccaggtctacctggcgctgggggaccagatgctgaatgcgacagtcatgaaccacggggacacgctaacggccacagccacagccacggcgcgcgcggatcaggagggtgcccgggaratcgtctgcaacgtgaccctagggggcgagagacgggaggcccgggagaacttgacggtctttagcttcctaggacccattgtgaacctcagcgagcccaccgcccatgaggggtccacagtgaccgtgagttgcatggctggggctcgagtccaggtcacgctggacggagttccggccgcggccccggggcagccagctcaacttcagctaaatgctaccgagagtgacgacggacgcagcttcttctgcagtgccactctcgaggtggacggcgagttcttgcacaggaacagtagcgtccagctgcgagtcctgtatggtcccaaaattgaccgagccacatgcccccagcacttgaaatggaaagataaaacgagacacgtcctgcagtgccaagccaggggcaacccgtaccccgagctgcggtgtttgaaggaaggctccagccgggaggtgccggtggggatcccgttcttcgtcaacgtaacacataatggtacttatcagtgccaagcgtccagctcacgaggcaaatacaccctggtcgtggtgatggacattgaggctgggagctcccactttgtccccgtcttcgtggcggtgttactgaccctgggcgtggtgactatcgtactggccttaatgtacgtcttcagggagcaccaacggagcggcagttaccatgttagggaggagascacctatctgcccctcacgtctatgcagccgacagaagcaatgggggaagaaccgtccagagctgagtgacgctgggatccgggatcaaagttggcgggggcttggctgtgccctcagattccgcaccaataaagccttcaaactccctaatctgtggtttgattccacccgcgctgcaagtctctcccacccaggtgcacatccactgagtagcgtcgctgcgacggaagggggcggggcctgtggcgcgcagacgcagcttgaactcttgagaggtgggctggggcttagccaacggggcaaggggggcgggaaggaggtggggtttctcccagccaatcgacgggcgcgccctcgttgccgctctatgccgctccgccccggctcgctggtcccagaaggcgccgggtttcccaagatggcggcggacgtgtcygttactcaccggcccccgctgagccctaagtctggggccgaagtcraagccggcgatgccgcggagcgccgggcgccggaagaagagctgcygcctctagatccagaagagatccggaaacgcctggaacacaccgagcgccagttccgtaaccgccgcaagatactgatccggggcctcccgggggacgtgaccaaccaggaagtacatgacctgctcagtgactatgagctcaaatactgttttgtggacaaatacaaagggacaggggccccggcctgctctccctccctccccccatctcctcctccgctgtgcccgtctctccggagccctcctgcctcattgctcctgtaattttggcctttcgagtgccttggaggtttccctgacctcccgtgaagatacagagactgtctcctttttttttaactttgwcaactgacttctgtttccttttctaagttttatttttcaaaccaccccggacagcccccagctctgattccttcaaggcccggcctgtccgggccaccattccacaccttgcggtttgaaacagctgtttttcccacatttgctgcaggcatggctgtctcctgcccctgcctgcccatctggcctataccccagccgtggggcccggggtccctgccgcagccccctccccttctgatgccttaaaagctgggccccaggccctgctggccagagccacagatgscaagctctgggagcttgactatggaccaaacagctctggcctagggattgggccaccctacccaggatctccaccctggggacagtagaaggggaaagccttcatcttggcgaaccggccccaccaccccctcctacccgggcctccgtgcagagatgggctttctctgccagtcccctgctgtctgtmtgtgggagtcggacattgtgcccatctcccggagcctctgctgtcactcgcttgttgaagatgaattcttgaattctgcctgcccacccccggccagatccctggagctggcctccttccagcccagtgccagaaaccagcactccatgaagataaactctgggcccgcccaccagcaggacctgtcgacctgaggtgaccctgggccttgcccccagccaactgggccaccagcttccctcccttgactctgggggtccacatccactccaaggggactattcccccgaccccaccccagtctccccacacggacctttgctgaattaaagtttgtaagtaaatggttttaaagaaatcagagttggctggttcttgggacaaacagtgggcttgagtgggaggtctgggatggccccgcgggtttacctgagatggattccgccctgctcttcccacctggtcaccgcaggccctaagcaaacatctgcgcttatgttccattgattatgggctttccctcgcctccctggcgcggcgcatgctcagtcggtgagtcacgtgatgcatgtcatggccgcctccatggcccggggaggcgtgagtgccagggttctrctgcaggctgccaggggcacctggtggaacrgacctgggggcacttccgggtcgggggagggggtggcgctggggacaaccagaaagtttcaagcgacaggctcgcgcccggckggagaggaggacgcgggcggcccggagcggcccggggacgtggtgaacgtggtgttcgtagaccgctcaggccagcggatcccagtgagtggcagagtcggggacaatgttcttcacctggcccagcgccacggggtggacctggaaggggcctgtgaagcctccctggcctgctccacctgccatgtgtatgtgagtgaagaccacctggatctcctgcctcctcccgaggagagggaagacgacatgctagacatggcccccctcctccaggagaactcgcggctgggctgccagattgtgctgacaccggagctggaaggagcggaattcaccctkcccaagatcaccaggaacttctacgtggatggccatgtccccaagccccactgacatgaacacctggaccattccacattgccatggccccagggcccagattgagggaatagccaggtgccagccctgcccagagtgcggacaggcccgggagagacgtggaagcccctgtgaaggacaacacccctgcttgggagagagtcccatgtccaggctctggtggggacagggcccctagtggggtggccttccccaggcccctgagaatcagggtttgagtaggagtggactcatattggagctgcaataaatcgataacacaggccccagcatgttgagtgtccttgggggacagatctggggtctacaggtggctcacacctgtaatcctagcactttgggaagccaagatgggaggatcacttgaggccaggagcttaagaccatcctgggcaacatggcgagacctcgtctctataaaaacagtaaaaattagcgtggagtggtggtaagtgcctgtagtcccagctactcgggagactgaggtgggaggatcacttgagcccaggggatttaggctgcagtggagcggtgatcaggccattccactccagcctgggtgacagagtgaggccctgtctcaaaaaaaaaaaaaacaaaaacaaaaacaaaccacacctgcatctgctgtgctgggcccccggttctcttttccctctgggatctaagatgccgctggggatccaaggcagaggcctgggagcccccatttccgagggggagggctagcgtggaaggccccgccccggcagctgcggagggatttggtggggtccaggccgcccttgccacgcaggggtgcgcggatgacctgaaaaaagccagaaagaggaaaggtgccgccgaggctggtcgctctcagctggggctcatcgcatcctctaccaagagcgctcccaccacacaggtcccgcccctcccaggtgggtttcatcgggtgggcccagcgggacagggccgggtgaaattagggagggggctgggctggggcgcaatggaggccgagccaatcccggactcctcaatgccagcaaagcttctggcgccgccctgtctgaacctggagcggctgggaggatccccctcccaggagaagccgaggaccccaggatgctgcagaatcagtgagaggtccctctggcctgcatgccaggagtcggtcaccgccctgtgcttcctccaagagacagtggagaggctgggtcagtcccctgcccaggacaccccrgtcctggggccttgctgggacccgatggctctggggactcagggccgcctgctgctggacagggattccaaggacacacagaccaggatcagccaaaagggccgccgtctgcagcccccggggactccctcggccccaccccagagaaggccccggaaacagctgaacccctgccggggcaccgagagagtggaccctgggttcgagggggtgactctgaagtttcagataaagccggactccagcctgcagatcatccccacgtacagcctgccctgcagtagccgttctcaggaatcccctgcagatgctgttgggggccctgcagcccacccaggaggcaccgaggcccactcagcaggcagcgaggccctggagccccggcgctgtgcttcctgtcggacccagaggaccccgctctggagagacgctgaagatgggacccctctctgcaacgcctgtgggatcaggtacaagaaatacggcactcgctgctccagctgctggctggtgcccaggaaaaatgtccagcccaagaggctatgtggcagatgtggagtgtccctggaccccrttcaggaaggttaaacccagcttcaccctgctgagctgctgcttctgcctccgtttcaccagtgggagaatgggcagaagcagctctcctaggaggattggggaaagagccggcctgcctcctctctgccatytccagattcaaggatcccgggggaagacccaggcctcaggtggcagagcctgctaggggtcaccagccccttctccagtcagccttggccgaggccccctcaggagacgctctcaggaaggatgagcattgttacagcagggacaataaagtacagagatatgccgagagaa

SEQ ID NO: 197 - DNA, 1575 bp, Homo sapiens
agataaaaccacatgagactttattggcaattgtgagttactctttccacatggcgacagcctgcaatgggggctccagtttggcttgctggtctcttctgggcagcgggcactgctgtctctactttccaggatggcagttggcccgaggggctctaacctgccattggaacctcacccatagcccagaagcctcattcacaacccttcccagactccactccaacttagagaacctgaaaaatggacatgtrgacatgtatctgaaagaaagtctaggcggttgcrcttagacaagggcctacggctttattaacagatgtcgaggaagctttcaggtgctggyagccatgagggtctggttttaaggatggcctttaaggaaaggccgtggcaggcgggctgagaggggckgctccagctcagccctgcccacagcacaggctcacagaagccgagatccacatcaccgcctggcatgcaaaggagttgaagacaaaaccatttttttccagcttctctacaaagccaattactaagcaacagttattaaagtgaagtatccatttacagactgacacaaatatcaaaaataagcagcttagatgagtacagaggctggagtgcattttctgctaacaaaaaccactgtgatattctcccagtttagagggaaaagtctatctcaggccgactcagatgtggcakaaataagtgggtctgaagtgcattttcagttgtttctgcccggaaggagcccggatgatacaaacaggtctggggttcgtggctctggcaagcgcccagagacaactgcgtctctgccaggacgctcatcctcactgcggctgtctgggcagatggctgttggcaggctagggacgacgatgaaaaactgacaatattttaaaaacccagtagggtccacagcagtgtttgaaatgacaggctttttatttctcaggaacagccgagatgacctccagaggtttccagcgaagctgtaacaatccaccctgcagctctatgacagggaggagggcgaatcaaatccatcatcttacgccagacttcagccstgcgggagctgctgcctccaaagaaagcggggacctgggcggactgcgtctctcccccgtgtggagaacgtgacagatgtgaaggttgggctgacagacacacggcctgcagcagcccagccagtcccccacagcatcgagccaagtcatttaaaaaggatttaggccactgcctttttctgagggaggagcggccagcatgtgccccgcggctcactgggcctgtctaatcacacagcagtggcaaaaggagtatctgccagacgcttcctatcactctattctgtctcctcatccacctgaagttcaccccgtttccccaatgacttagaatggctttgtgcttagttttaattgtagtttgtgctattctgtgaattaacaattcaaacaaaataagaaagccatgttgttaaacagtagaggagccrgggactctgtctccattctctcatcacacacaagtcatgcatctaccaaaaaaaaaaaaacaaaa

SEQ ID NO: 198 - DNA, 3529 bp, Homo sapiens
gccatcctccttccactgcgcctgcgcacgccacgcgcatccgctcctgggacgcaagctcgagaaaagttgctgcaaactttctagcccgttccccgcccctcctcccggccagacccgccccccctgcggagccgggaattccgaggggcggagcgcaggccgagatggggaatgtgggggcctgcagaggaccctggagacggaggcgtgcagaagctcagtctcggggcggaggcttcgcgcccttagtcctcctggacggcccgttaccttctgcgttgtcccgatggggaaactgaggccctgagccagaagcacacgctggggggaggcagaaagcgcggccagaggcggagggaaaacaaagggagaatcacagacagacgggagggggacggacacacacaaggggacagagacccgagtggagagctggatctcgccttcccggcgtggggcgcagggtcggccagaaagaagatcgagaagagcggggagtgggggcgaaaaggggggacaggtgggggaggaggctggggaaagcccgagggaggaagagagggagggaggaacttcccaaagttgcaaaacatggctaccttgcctgcggagccgagcgcggggccggcggctgggggggaggcggtggcggcggcggcggcgaccgaagaggaggaggaggaagcgcgccagctcttgcagactttgcaggcggccgagggtgaggcggcggcggcggccggggccggggcgggcgcagcggctgcgggagctgagggcccgggatccccgggcgtccccgggtcgccccccgaggccgcttccgaaccgcccacgggcctccgcttctcgcccgagcaggtggcgtgcgtctgcgaggcgctgctccaggcgggccacgccggccgcttgagccgcttcctgggcgcactgcccccggccgagcgcctacgtggcagcgacccggtgttgcgcgcgcgggccctggtggccttccagcggggcgagtacgccgagctctaccggctactcgagagccgccccttccccgccgcccaccacgccttcctgcaggacctctacctgcgcgcgcgctaccatgaggccgagcgggcccgcggccgcgcgcttggcgcagtggacaagtatcgactgcgcaagaagttcccgctgcccaagaccatctgggacggcgaggagacagtctactgcttcaaggagcgctcccgcgcagcgctcaaggcctgctaccgcggcaaccgctaccccacgccggacgagaagcgccgcctggccacactcaccggcctgtcgctcacgcaggtcagcaactggttcaagaaccggcgacagcgcgaccggaccggggccggaggcggcgcgccctgcaagagcgagtctgatgggaatcccacgactgaggacgagtccagccgaagtcctgaggacctggagagaggggcggccccagtgtccgccgaggccgctgcccagggctccatattcctggcagggaccggccctcccgcgccttgcccggcttcctcctccatcctggtgaacgggagcttcctggcagccagcggctccccagcagtgctcctcaacgggggccccgtcatcatcaacggcctggccctgggcgaggcctccagcctgggcccgctgctgctcactgggggcgggggtgcccctccaccgcagcccagccctcagggggccagcgagaccaagacctctctggtcctggaccctcagacaggggaggtgcggctggaggaggctcagtcggaggcccctgagaccaaaggggcccaggtggctgctccgggaccagcccttggagaggaggtcctggggcccctggcccaagtggtgcctggccccccgacggctgccacctttcctctgcccccggggccagtgcctgctgtggctgccccacaagtggtaccgctctccccacccccggggtatcccacgggcctgagccccacctccccactattgaacctgccccaggtagtacccacctcacaggtggtgaccctgccccaggctgtggggcccctgcagctgttggcagccgggccaggcagccctgtgaaggtggcagctgcagcaggccctgccaatgtgcacctcatcaactccggggtgggcgtgactgccctgcagctgccttcggccactgccccaggaaacttcctcctggccaaccctgtgtctggcagccccatcgtgacgggtgtggccstgcagcagggcaagatcatcctcaccgccaccttccccaccagcatgctcgtctcccaggtcctgccgccagcccccggcctggccctgccactgaagccagagacggccatctccgtgcctgagggaggcctcccggtggcccccagccctgctctcccagaggctcacgccctaggcaccctttctgcacagcagccaccccccgccgctgccaccacctccagcaccagcctgyccttctcccctgactcccctggcctcctgcccaacttcccggcgcccccaccagaggggctgatgttgtcacccgcggccgtgcctgtctggtcagcagggctggaactaagcgcaggaacagaggggctgctggaagcggaaaaggggctggggacacaggccccccacaccrtgctgaggctgccagaccccgaccctgaggggctgctcctgggggccaccgcagggggtgaggttgacgaggggttggaagctgaggccaaggttctgacccagctccagtcggtgcctgtggaggagcccttggaactgtgacccagtgtggccccgtggcctctcccgacattggtgctgaagayrcagggacaggaatgggaggggggagccccagaaatgcggttgctgaagaccccagtcaccacatccttctgcctgggtggcctctccaagccctggtggtgctgggggttgtatccccggccacctcctgtccaggtctccatccccctttggatgggaggcctctctgttacagccctccccatgctgtgccctgccatatacgtgggggactcagggtcctgactcaggggccctgccccctccacttggtactagctgtaagcggaacaccctgccccagggccggacttccagcccccagagccctctccctgtcactccctgaaacactattaatagctctgccgatagctggtgttgtcacaactgcctggaatccgaaggtggaggacaggcagccccgcgcccctgagactggagaccctccccagtgtggcatttcctgccaggggcggggggtggggcagctgtggggagacgggggtcttccttcaccagctcccctcgactcaagcccttgtcctcattatccggcccagaccaaagattccctcatccctgggggcagccctgccgctgtgtctcctttgtatcctaaatctttatttttctaggacatgttatgcctccattttcaattaaaataaagttatcggattacaccacc

SEQ ID NO: 199 - DNA, 1443 bp, Homo sapiens
ttctctctctctctcrctcttggttctggtgactgtggccctggcatctgctcatcatggtggtgagcactttgaaggcgagaaggtgttccgtgttaacgttgaagatgaaaatcacattaacataatccgcgagttggccagcacgacccagattgacttctggaagccagattctgtcacacaaatcaaacctcacagtacagttgacttccgtgttaaagcagaagatactgtcactgtggagaatgttctaaagcagaatgaactacaatacaaggtactgataagcaacctgagaaatgtggtggaggctcagtttgatagccgggttcgtgcaacaggacacagttatgagaagtacaacaagtgggaaacgatagaggcttggactcaacaagtcgccactgagaatccagccctcatctctcgcagtgttatcggaaccacatttgagggacgcgctatttacctcctgaaggttggcaaagctggacaaaataagcctgccattttcatggactgtggtttccatgccagagagtggatttctcctgcattctgccagtggtttgtaagagaggctgttcgtacctatggacgtgagatccaagtgacagagcttctcracaagttagacttttatgtcctgcctgtgctcaatattgatggctacatctacacctggaccaagagccgattttggagaaagactcgctccacccatactggatctagctgcattggcacagaccccaacagaaattttgatgctggttggtgtgaaattggagcctctcgaaacccctgtgatgaaacttactgtggacctgccgcagagtctgaaaaggagaccaaggccctggctgatttcatccgcaacaaactctcttccatcaaggcatatctgacaatccactcgtactcccaaatgatgatctacccttactcatatgcttacaaactcggtgagaacaatgctgagttgaatgccctggctaaagctactgtgaaagaacttgcctcactgcacggcaccaagtacacatatggcccgggagctacaacaatctatcctgctgctgggggctctgacgactgggcttatgaccaaggaatcagatattccttcacctttgaacttcgagatacaggcagatatggctttctccttccagaatcccagatscgggctacctgcgaggagaccttcctggcaatcaagtatgttgccagctacgtcctggaacacctgtactagttgagaaagctgatggccttgtttcaaaattctcatttttcatttcttttctttcttgaattcttattttggtttgcctggatgttttgcagatcccaatctttcttttaagcttctgggtctattaaactaggtagatcttttcgtattgatcataataaaagtgaatcattactattgga

SEQ ID NO: 200 - DNA, 1811 bp, Homo sapiens
caggcagcagcgagtgacaggacgtctggaccggcgcgccgctagcagctctgccgggccgcggcggtgatcgatggggagcggctggagcggacccagcgagtgagggcgcacagccgggacgccgaggcggcgggcgggagaccmgcaccagcgcagccggccctcggcgggacgtgacgcagcgcccggggcgcgggtgttgagagagataccctctcagactttacacagctaccaaggcaacaatgccaggaaaactattaatcaagatatgatagttcctgtttgcaatcaggagaagaaagcaaagaacactcaggattataaaagyagatgagacctacccactagacctggtcagacacaatgttggcrctcttggttctggtgactgtggccctggcatctgctcatcatggtggtgagcactttgaaggcgagaaggtgttccgtgttaacgttgaagatgaaaatcacattaacataatccgcgagttggccagcacgacccagattgacttctggaagccagattctgtcacacaaatcaaacctcacagtacagttgacttccgtgttaaagcagaagatactgtcactgtggagaatgttctaaagcagaatgaactacaatacaaggtactgataagcaacctgagaaatgtggtggaggctcagtttgatagccgggttcgtgcaacaggacacagttatgagaagtacaacaagtgggaaacgatagaggcttggactcaacaagtcgccactgagaatccagccctcatctctcgcagtgttatcggaaccacatttgagggacgcgctatttacctcctgaaggttggcaaagctggacaaaataagcctgccattttcatggactgtggtttccatgccagagagtggatttctcctgcattctgccagtggtttgtaagagaggctgttcgtacctatggacgtgagatccaagtgacagagcttctcracaagttagacttttatgtcctgcctgtgctcaatattgatggctacatctacacctggaccaagagccgattttggagaaagactcgctccacccatactggatctagctgcattggcacagaccccaacagaaattttgatgctggttggtgtgaaattggagcctctcgaaacccctgtgatgaaacttactgtggacctgccgcagagtctgaaaaggagaccaaggccctggctgatttcatccgcaacaaactctcttccatcaaggcatatctgacaatccactcgtactcccaaatgatgatctacccttactcatatgcttacaaactcggtgagaacaatgctgagttgaatgccctggctaaagctactgtgaaagaacttgcctcactgcacggcaccaagtacacatatggcccgggagctacaacaatctatcctgctgctgggggctctgacgactgggcttatgaccaaggaatcagatattccttcacctttgaacttcgagatacaggcagatatggctttctccttccagaatcccagatscgggctacctgcgaggagaccttcctggcaatcaagtatgttgccagctacgtcctggaacacctgtactagttgagaaagctgatggccttgtttcaaaattctcatttttcatttcttttctttcttgaattcttattttggtttgcctggatgttttgcagatcccaatctttcttttaagcttctgggtctattaaactaggtagatcttttcgtattgatcataataaaagtgaatcattactattggaaaactt

SEQ ID NO: 201 - DNA, 6909 bp, Homo sapiens
acactctgggcgcggagcacaatgattggtcactcctattttcgctgagcttttcctcttatttcagttttcttcgagatcaaatctggtttgtagatgtgcttggggagaatgggggcctcttctccaagaagcccggagcctgtcgggccgccggcgcccggtctccccttctgctgcggaggatccctgctggcggtygtggtgctgctygcgctgccggtggcctggggtcaatgcaatgccccagaatggcttccatttgccaggcctaccaacctaactgatgartttgagtttcccattgggacatatctgaactatgaatgccgccctggttattccggaagaccgttttctatcatctgcctaaaaaactcagtctggactggtgctaaggacaggtgcagacgtaaatcatgtygtaatcctccagatcctgtgaatggcatggtgcatgtgatcaaaggcatccagttcggatcccaaattaaatattcttgtactaaaggataccgactcattggttcctcgtctgccacatgcatcatctcaggtgatactgtcatttgggataatgaaacacctatttgtgacagaattccttgtgggctaccccccaccatcaccaatggagatttcattagcaccaacagagagaattttcactatggatcagtggtgacctaccgctgcaatcctggaagcggagggagaaaggtgtttgagcttgtgggtgagccctccatatactgcaccagcaatgacratcaagtgggcatctggagcggccccgcccctcagtgcattatacctaacaaatgcacgcctccaaatgtggaaaatggaatattggtatctgacaacagaagcttattttccttaaatgaagttgtggagtttaggtgtcagcctggctttgtcatgaaaggaccccgccgtgtgaagtgccaggccctgaacaaatgggagccggagctaccaagctgctccagggtatgtcagccacctccagatgtcctgcatgctgagcgtacccaaagggacaaggacaacttttcaccygggcaggaagtgttctacagctgtgagcccggctacgacctcagaggggctgcgtctatgcgctgcacaccccagggagactggagccctgcagcccccacatgtgaagtgaaatcctgtgatgacttcatgggccaacttcttaatggccgtgtgctatttccagtaaatctccagcttggagcaaaagtggattttgtttgtgatgaaggatttcaattaaaaggcagctctgctagttactgtgtcttggctggaatggaaagcctttggaatagcagtgttccagtgtgtgaacaaatcttttgtccaagtcctccagttattcctaatgggagacacacaggaaaacctctggaagtctttccctttggraaarcagtaaattacacatgcgacccccacccagacagagggacgagcttcgacctcattggagagagcaccatccgctgcacaagtgaccctcaagggaatggggtttggagcagccctgcccctcgctgtggaattctgggtggcaccgactcattggtcactcatctgctgaatgtatcctctcgggcaatgctgcccattggagcacgaagccgccaatttgtcaacgaattccttgtgggctaccccccaccatcgccaatggagatttcattagcaccaacagagagaattttcactatggatcagtggtgacctaccgctgcaatcctggaagcggagggagaaaggtgtttgagcttgtgggtgagccctccatatactgcaccagcaatgacgatcaagtgggcatctggagcggcccggcccctcagtgcattayacctaacaaatgcacgcctccaaatgtggaaaatggaatattggtatctgacaacagaagcttattttccttaaatgaagttgtggagtttaggtgtcagcctggctttgtcatgaaaggaccccgccgtgtgaagtgccaggccctgaacaaatgggagccggagctaccaagctgctccagggtatgtcagccacctccagatgtcctgcatgctgagcgtacccaaagggacaaggacaacttttcacccgggcaggaagtgttctacagctgtgagcccggctacgacctcagaggggctgcgtctatgcgctgcacaccccagggagactggagccctgcagcccccacatgtgaagtgaaatcctgtgatgacttcatgggccaacttcttaatggccgtgtgctatttccagtaaatctccagcttggagcaaaagtggattttgtttgtgatgaaggatttcaattaaaaggcagctctgctagttattgtgtcttggctggaatggaaagcctttggaatagcagtgttccagtgtgtgaacaaatcttttgtccaagtcctccagttattcctaatgggagacacacaggaaaacctctggaagtctttccctttggaaaagcagtaaattacacatgcgacccccacccagacagagggacgagcttcgacctcattggagagagcaccatccgctgcacaagtgaccctcaagggaatggggtttggagcagccctgcccctcgctgtggaattctgggtggcaccgactcattggtcactcatctgctgaatgtatcctctcaggcaatactgcccattggagcacgaagccgccaatttgtcaacgaattccttgtgggctacccccaaccatcgccaatggagatttcattagcaccaacagagagaattttcactatggatcagtggtgacctaccgctgcaatcttggaagcagagggagaaaggtgtttgagcttgtgggtgagccctccatatactgcaccagcaatgacgatcaagtgggcatctggagcggccccgcccctcagtgcattatacctaacaaatgcacgcctccaaatgtggaaaatggaatattggtatctgacaacagaagcttattttccttaaatgaagttgtggagtttaggtgtcagcctggctttgtcatgaaaggaccccrccgtgtgaagtgccaggccctgaacaaatgggagccagagttaccaagctgctccagggtgtgtcagccgcctccagaaatcctgcatggtgagcrtaccccaagccatcaggacaacttttcacctgggcaggaagtgttctacagctgtgagcctggctatgacctcagaggggctgcgtctctgcactgcacaccccagggagactggagccctgaagccccgagatgtgcagtgaaatcctgtgatgacttcttgggtcaactccctcatggccgtgtgctatttccacttaatctccagcttggggcaaaggtgtcctttgtctgtgatgaagggtttcgcttaaagggcagttccgttagtcattgtgtcttggttggaatgagaagcctttggaataacagtgttcctgtgtgtgaacatatcttttgtccaaatcctccagctatccttaatgggagacacacaggaactccctctggagatattccctatggaaaagaaatatcttacacatgtgacccccacccagacagagggatgaccttcaacctcattggggagagcaccatccgctgcacaagtgaccctcatgggaatggggtttggagcagccctgcccctcgctgtgaactttctgttcgtgctggtcactgtaaaaccccagagcagtttccatttgccagtcctwygatcccaattaatgactttgagtttccagtcgggacatctttgaattatgaatgccgtcctgggtattttgggaaaatgttctctatctcctgcctagaaaacttggtctggtcaagtgttgaagacaactgyagacgaaaatcatgtggacctccaccagaacccttcaatggaatggtgcatataaacacagatacacagtttggatcaacagttaattattcttgtaatgaagggtttcgactcattggttccccatctactacttgtctcgtctcaggcaataatgtcacatgggataagaaggcacctatttgtgagatcatatcttgtgagccacctccaaccatatccaatggagacttctacagcaacaatagaacatcttttcacartggaacggtggtaacttaccagtgccacactggaccagatggagaacagctgtttgagcttrtgggagaacggtcaatatattgcaccagcaaagatgatcaagttggtgtttggagcagccctccccctcggtgtatttctactaatraatgcacagctccagaagttgaaaatgcaattrgagtaccaggaaacaggagtttctttwccctcactgagatcrtcagatttagatgtcagcccgggtttgtcatggtagggtcccacactgtgcagtgccagaccaatggcagatgggggcccaagctgccacactgctccagggtgtgtcagccgcctccagaaatcctgcatggtgagcataccctaagccatcaggacaacttttcacctgggcaggaagtgttctacagctgtgagcccagctatgacctcagaggggctgcgtctctgcactgcacgccccagggagactggagccctgaagcccctagatgtacagtgaaatcctgtgatgacttcctgggccaactccctcatggccgtgtgctacttccacttaatctccagcttggggcaaaggtgtcctttgtttgcgatgaagggttccgattaaaaggcaggtctgctagtcattgtgtcttggctggaatgaaagccctttggaatagcagtgttccagtgtgtgaacaaatcttttgtccaaatcctccagctatccttaatgggagacacacaggaactccctttggagatattccctatggaaaagaaatatcttacgcatgcgacacccacccagacagagggatgaccttcaacctcattggggagagctccatccgctgcacaagtgaccstcaagggaatggggtttggagcagccctgcccctcgctgtgaactttctgttcctgctgcctgcccacatccacccargatccaaaacgggcattacattggaggacacgtatctctatatcttcctgggatgacaatcagctacatttgtgaccccggctacctgttagtgggaaagrgcttcattttctgtacagaccagggaatctggagccaattggatcattattgcaaagaagtaaattgtagcttcccactgtttatgaatggaatctcgaaggagttagaaatgaaaaaagtatatcactatggagattatgtgactttgaagtgtgaagatgggtatactctggaaggcagtccctggagccagtgccaggcggatgacagatgggaccctcctctggccaaatgtacctctcgtrcacatgatgctctcatagttggcactttatctggtacgatcttctttattttactcatcattttcctctcttggataattctaaagcacagaaaaggcaataatgcacatgaaaaccctaaagaagtggctatccatttacattctcaaggaggcagcagcgttcatccccgaactctgcaaacaaatgaagaaaatagcagggtccttccttgacaaagtactatacagctgaagaacatctcgaatayarttttggtgggaaaggagccaattgatttcaacagaatcagatctgagcttcataaagtctttgaagtgacttcacagagacgcagacatgtgcacttgaagatgctgccccttcccyggtacctagcaaagctcctgcctctttgtgtgcgtcactgtgaaaccccyacccttctgcctcgtgctaaacgcacacagtatctagtcaggggaaaagactgcatttaggagatagaaaatagtttggattacttaaaggaataaggtgttgcctggaatttctggtttgtaaggtggtcactgttcttttttaaaatatttgtaatatggaatgggctcagtaagaagagcttggaaaatgcagaaagttatgaaaaataagtcacttataattatgctacctactgataaccactcctaatattttgattcattttctgcctatcttctttcacatatgtgtttttttacatacgtacttttcccccttagtttgtttccttttattttatagagcagaaccctagtcttttaaacagtttagagtgaaatatatgctatatcagtttttactttctctagggagaaaaattaatttactagaaaggcatgaaatgatcatgggaagagtggttaagactactgaagagaaatatttggaaaataagatttcgatatcttctttttttttgagatggagtctggctctgtctcccaggctggagtgcagtggcgtaatctcggctcactgcaagctccgcctcccgggttgacaccattttcctgcctcagcctcctgagtagttgggaytaccagtagatgggactacaggcacctgccaacacgcccggctaatttttttgtatttttagtagagacggggtttcaccatgttagccaggatggtctggatctcctgacctcgtgatccaccygcctcggcctcccaaagtgctgcgattacaggcatgagccaccgcgcctggccgctttcgatattttctaaactttaattcaaaagcactttgtgctgtgttctatataaaaaacataataaaaattgaaatgaaagaataattgttattataaaagtactagcttacttttgtatggattcagaatatactaaattaactttttaaaacacaacttttaaaaaatgtatcaaaataataaacgtgttctgatattttta

SEQ ID NO: 202 - DNA, 2480 bp, Homo sapiens
tggtgcacaaagctgtggtggaggtggacgagtcgggaaccagagcagcggcagccacggggacaatmttcactttcagatattcactgaatggccactgtgtgcctggcactgttccaagtgctgaagaaaaatgaagaaaacaaaaatccctgcccttatagaggagacattataatgtgacaagataacataatgaaaaagaatgaagaataaaatagaaaagtaaaatggattgcatgtcacttgatgacaagtactgtggaatgaggcygtcatctaaayggagcacagaaagtggaacatggcgacatctcagccaaaagacccggcagacaccatcttggccaagggatcgaggttggcatcgccagctgtgagcagtgctgacatcttattatcttcgatatggcgtcatgagcaggctgcctcctcttggtgggatcttcccccaaacccagaacctcagtctaatcacaagaaaatgacagccaatcccaagttcagggacatttggcaaaatagcccaccactcctacttaaaagtgtcgaggtcttgaaaggcaagraaaccctgggaaatcgtctttggccrgaggaaactmagcagacatgacgactaaatgcaatgtagaatcctcggacagaaaaggacattagtrggacagctggtgaaacccaaaggaagaacctgtgtcaggacccccagagcggtgtctccactaagcagaagtctctgtttctctcctggcctctcccagaggggctgctctgaagcatgtggatttgatcaggataatcaagtccgagaacagaacacttggttgtcctggcatttcccaagcagkgggaggagttctctgcaggaataaataagcctcagcattcatgaaaatccactactccagacagacggctttggaatccaccagctacatccagctccctgaggcagagttgagaatggagaraatgttacctctcctgrctctggggctcttrgcggctgggttctgccctgctgtcctctgccaccctaacagcccacttgacgaggagaatctgacccaggagaaccaagaccgagggacacacgtggacctcggattagcctccgccaacgtggacttcgctttcagyctgtacaagcagttagtcctgaaggcccctgataagaatgtcatcttctccccacygagcatctccaccgccttggccttyctgtctctgggggcccataataccaccctgacagagattctcaaaggcctcaagttcaacctcacggagacttctgaggcagaaattcaccagagcttccagcacctcctgcgcaccctcaatcagtccagcgatgagctgcagctgagtatgggaaatgccatgtttgtcaaagagcaactcagtctgctggacaggttcacggaggatgccaagaggctgtatggctccgaggcctttgccactgactttcaggactcagctgcagctaagaagctcatcaacgactacgtgaagaatggaactagggggaaaatcacagatctgatcaaggaccttgactcrcagacaatgatggtcctggtgaattacatcttctttaaagccaaatgggagatgccctttgacccccaagatactcatcagtcaaggttctacttgagcaagaaaaagtgggtaatggtgcccatgatgagtttgcatcacctgactatascttacttccgggacgaggagctgtcctgcaccgtggtggagctgaagtacacaggcaatgccagygcactcttcatcctccctgatcaagacaagatggaggaagtggaagccatgctgctcccagagaccctgaagcggtggagagactctctggagttcagagagataggtgagctctacctgccaaagttttccatctcgagggactataacctgaacgacatacttctccagctgggcattgaggaagccttcaccagcaaggctgacctgtcagggatcacrggggccaggaacctagcagtctcccaggtggtccataaggctgtgcttgatgtatttgaggagggcacagaagcatctgctgccacagcagtcaaaatcaccctcctttctgcattagtggagacaaggaccattgtgcgtttcaacaggcccttcctgatgatcattgtccctacagrcacccagaacatcttcttcrtgagcaaagtcaccaatcccaagcaagcctagagcttgccatcaagcagtggggctctcagtaaggaacttggaatgcaagctggatgcctgggtctctgggcacagcctggcccctgtgcaccgagtggccatggcatgtgtggccctgtctgcttatccttggaaggtgacagcgattccctgtgtagctctcacatgcacaggggcccatggactyttcagtytggagggtcctgggcctcctgacagcaataaataatttcgttggamacgtt

SEQ ID NO: 203 - DNA, 8584 bp, Homo sapiens
tgagtttgcagaagagagtcttcccgagaaggcagaacgagggtgtgtggagcactgcgggcgagatggagctgagggaaggcagagctgggtctcactctgttgcccaggctggagttcagcagtgcaatcccggctcactgcagccttgactccgtgagctcagggactcatgaagtggcagctaagccctgtccagtggccacccgtcagccaagggccagagaccaggaaaggaagaaaggcagcttcacttcctctttgaggatggagtcgcacagccgcgctggaaagagcagaaaatctgcaaaatttcggtccatctccaggtccctgatgctctgtaatgctaagaccagtgatgatggctctagccctgatgagaaatatcctgatccctttgagatttccttggcccagggcaaggagggaattttccactcatctgtgcagctggcagacacatcggaggctgggcccagcagtgttcctgatctagcactggcctcggaggctgctcaactccaagcagctgggaatgatcgaggcaagacctgtaggaggatattcttcatgaaggaatcttccacagcttcctctcgagaaaagcctggaaaactagaagcacaaagtagtaacttcctgtttcctaaagcctgccaccaaagggcacgcagcaactcaaccagtgttaatccctattgcacaagagaaattgattttccaatgaccaagaaatctgcagcgcccacggacaggcagccttactctctctgcagtaacaggaagtccctctctcaacaattggactgtccagcaggaaaggctgcgggaacttcgagaccaacacggtccctgagcacagctcagctcgtgcagccatctgggggcctccaggcttcagtcatctccaacatcgtgctgatgaagggccaggctaagggtctgggcttcagcatcgttgggggaaaagacagcatttatggccccattgggatttacgtcaaaaccatttttgcagggggagcagcagcagccgatggaaggctacaggaaggtgatgaaattctggagctcaatggtgaatcaatggctggactaacacatcaggatgctttgcagaagttcaagcaagccaaaaaggggctcctcaccctcaccgtgagaacccgcctgacggcgcctccttccctgtgcagccacctgtctcccccactgtgccgctccctgagctccagcacttgtatcaccaaggacagcagctccttcgccttggaaagcccctcggctcccatcagcaccgccaagcccaattacagaatcatggtggaggtttctctgcagaaagaggccggcgtgggcctgggcatcggcctgtgcagcgttccctacttccaatgcatctctggcattttcgtccacacgctgtcaccaggatccgtggcgcacctggacggacgtctccggtgtggggacgagattgtggaaatcagtgattcccctgtgcactgcctgacgctcaatgaagtctacacgatcctgagtcactgtgatcccggtccagtcyccatcattgttagccgacatccagacccacaggtctctgaacagcaactcaaagaagctgtggcccaggctgtggaaaacaccaagtttggaaaggagaggcatcartggagtctggaaggtgtcaaaaggctggaaagcagttggcaygggcggcccaccttggagaaggaacgagagaagaactcagcacccccgcatcgcagggctcagaaggtcatgatccgctccagcagtgacagcagctacatgtctgggtccccagggggaagtcctgggagtggcagtgctgagaagccgtcctctgacgtggacatcagcacacacagccccagcttgcctctggcacgggagccagtggtgctttctatagcatcctccaggctgccccaggagagcccacccctcccagagagccgggacagccacccgccgctgagactgaagaaatcctttgagattttggaagcgagagagctgctgccactgctgctaccacaggaagacacagcagggagaagccctagtgcctctgccggctgcccaggacctggtatcggcccacagaccaagtcctccacagagggcgagccagggtggagaagagccagcccagtgacccaaacatccccgataaaacacccactgcttaagaggcaggctcggatggactatagctttgataccacagccgaagacccttgggttaggrtttctgactgcatcaaaaacttatttagccccatcatgagtgagaaccatggccacatgcctctacagcccaatgccagcctgaatgaagaagaagggacacagggccacccagatgggaccccaccaaagctggacaccgccaatggcactcccaaagtttacaagtcagcagacagcagcactgtgaagaaaggtcctcctgtggctcccaagccagcctggtttcgccaaagcttgaaaggtttgaggaatcgtgcttcagacccaagagggctccctgatcctgccttgtccacccagccagcacctgcttccagggagcacctaggatcacacatccgggcctcctcctcctcctcctccatcaggcagagaatcagctcctttgaaacctttggctcctctcaactgcctgacaaaggagcccagagactgagcctccagccctcctctggggaggcagcaaaacctcttgggaagcatgaggaaggacggttttctggactcttggggcraggggctgcacccactcttgtgccccarcagcctgagcaagtactgtcctyggggtcccctgcagcctccgaggccagagacccaggtgtgtctgagtcccctcccccagggcggcagcccaatcagaaaactctcccccctggcccggacccgctcctaaggctgctgtcaacacaggctgaggaatctcaaggcccagtgctcaagatgcctagccagcgagcacggagcttccccctgaccaggtcccagtcctgtgagacgaagctacttgacgaaaagaccagcaaactctattctatcagcagccaagtgtcatcggctgtcatgaaatccttgctgtgccttccatcttctatctcctgtgcccagactccctgcatccccaaggaaggggcatctccaacatcawcatccaacgaagactcagctgcaaatggttctgctgaaacatctgccttggacacrgggttctcgctcaacctttcagagctgagagaatatacagagggtctcacggaagccaaggaagacgatgatggggaccacagttcccttcagtctggtcagtccgttatctccctgctgagctcagaagaattaaaaaaactcatcgaggaggtgaaggttctggatgaagcaacattaaagcaattagacggcatccatgtcaccatcttacacaaggaggaaggtgctggtcttgggttcagcttggcaggaggagcagatctagaaaacaaggtgattacggttcacagagtgtttccaaakgggctggcctcccaggaagggactattcagaagggcaatgaggttctttccatcaacggcaagtctctcaaggggaccacgcaccrtgatgccttggcmatcctccgccaagctcgagagcccaggcaagctgtgattgtcacaagraagctgactccagaggccatgccygacctcaactcctccactgactctgcagcctcagcctctgcagccagtgatgtttctgtagaatctacagcagaggccacagtctgcacggtgacactggagaagatgtcggcagggctgggcttcagcctggaaggagggaagggctccctacacggagacaagcctctcaccattaacaggattttcaaagktggacacagaggacttcgtgccagaggcaagatccctgtaaatattgttgcacaaaawtctcactagctctcttcccataccacccaatgctgatgtcctcaccacatgcggagaacaaatgtgaagggagtaggatattgggtcagtgtccaaagcagggtctgggcaggactcagctccccagagtcctctatgaactatggacggtgctccaggcaggctaaggcgtggagctgcctgatatttccctcccctggggacagcaagggctatccctttccaaaggccatggagagctggagcctggtgccctaacctctgagtcaccatcttaagagatgcctcattttagaaccaccaacaagcaagctcccaagggatggtgccctgttctctaccaagctatcctggctctttggagatcaaggagaggaggcaactttccttgttccccatcatctgtggaacccattaccttctccctcatttcaggagcagcctcagaacaaagtgagacagtccagcctggagatgaaatcttrcagctgggtggcactgccatgcagggcctcacacggtttgaagcctggaacatcatcaaggcactgcctgatggacctgtcacgattgtcatcaggagaaaaagcctccagtccaaggaaaccacagctgctggagactcctaggcaggacatgctgaagccaaagccaataacacacagctaacacacagctcccataaccgctgattctcagggtctctgctgccgccccacccagatgggggaaagcacaggtgggcttcccagtggctgctgcccaggcccagaccttctaggacgccacccagcaaaargttgttcctaaartaagggcagagtcacackggggcagctgatacaaattgcagactgtgtaaaaagagagcttaatgataatattgtggtgccacaaataaaatggatttattagaatttcatatgacattcatgcctggcttcgcaaaatgtttcaagtactgtaactgtgtcatgattcacccccaaacagtgacatttatttttctcatgaatctgcaatgtgggcagagattggaatgggcagctcatctctgtcccacttggcatcagctggcgtcatgcaaagtcatgcaaaggctgggaccacgtgagatcattcactcatacatctggccgttgatgttggctgggaactcacctggggctgctggcctgaatgcttataggtggcctctccttgtggcctgggcctcctcwcaacatggtgtctgkattcccaggatgagcatcccaggatcgcaagagccaygtagaagctgcatcttgtttatacctttgccttggaagttgcatggcatcacctccaccatactccatcagttagagctgacacaaacctgcctgggtttaaggggagaggaaatattgctggggtcatttatgaaaaatacagtttgtcacatgaaacatttgcaaaattgtttttggttggattggagaagtaatcctagggaagggtggtggagccagtaaacagaggagtacaggtgaagcaccaagctcaaagcgtggacaggtgtgccgacagaaggaaccagcgtgtatatgagggtatcaaataaaattgctactacttacctaccacatgccaagcactgtgctcagggctaaacgggcattgcctttagtgatcacagcagcttctacggtgtatggttctgtgccaatgtattgataagagggcacacactgtgtacagtaaatggcttatccagctggtgagtgatgcggcagattgagttttcttctgtgattcggtggagactatcagcccaagatgctttaagtgcacaacattacagggaatgcctgagtgcctggccaaagggatatttggtttggccatctctggatgcctgattgccaagctcaggaccaggcaatgtgactttgcatcagcaacaaccagcatcccttgaccaggcctgggccagagtattggtctcctctcagcccctgatcctgtgaagtaaggatgtgggggaagacctggcaaggacacagatgaaacacaaacaatagtaattctcaggccatcatcagtggagccatgttaatgtaatctgatggcttctccagggtccacaggaagtgaagaatctgtttcccagcagtggactcaaaacccatctgggctcctaaccttcctgtaaacccctttagtggcttcattagagcaggcgttcagctcactgttctattcatctcaaggaataatgggcttagagcagtttctgtcctgctggttaacttgtttggcctattccattctggattttgtcaagcagtagacaagcaattagacaagaacttggaggcaccatttgtatccactttttagacttaatagaaacattgaagatgaacataatctaccaacgaaagacgtgattcaattcaacactcccttcccatgacccaggctgggcaaggaggccacgtgatgtggagggcacattccttgcctgcacaaactcaccatctgtgcacgcagtggccttccctaaaatcagggaattgttttaagtcttatcaagcagccaagggatgaaagagaaggtgggttttcatcaagactggaaggtggggacagggatgagcatggagctggccgtgggcctggggtaccaagagactccttgagagaccaggcaaagcaagtgattgggacagaggttatctgtcccaggttatctgggcatagatgcaggtgagcccatggccctcccagtacctcctgtctctggcctgttttagaaggttctctcctccccaaggagacacaacaactcctagggccactgaagatataactattgcccaggtttctggtctctaggctggggaagtcctctgggtaggaatcagcaagaagatcctaaaacaaaagctcatccatttgcgttccatgatgctgggatttacacttgaggcttagctttgctctgccaacttcttcagagctgacacaggatgaaggcaatgccatcctcaaacactgcaggcatcacagctaacaattgtgaagtcgtcttaactcaccataaaaaggaatccactcccaggcagccctacttctttgctttgcccagcattttactgattcatacattatctcacttgtgccaacactcaagaagcaggctacactgacactggtattcctgcctccatattttctttaaaagacaaatcaaagcagatatattaagtgactgttcaagagcacacttggcccaagtggcagagcttggactggatgcatgttttccagctcctcatccagggctctgaccagtttaacctgatgcagtcacgtggaggagcagtgcaggcacagtatgtcccataggcccagtgagatgcattcttggttggctggccttccacttggctacacagggatgtacaaggcgatcccatcttgataagaccaccacctcagagtatggagctcagagagggcaggcatgaagtttccttggctggtgcacctagaattggctgaactcatgagaagttgatatagaacagtgcttgccacagagcrgggactcggtaagcacttaaygaatgaatgaattctaagtcaatccargagtctgatgatttcttgaaaagggtgttagctaaaggatcttaggcatgactgtagaatttgtagttgcaatagaacagagaaagaggaagctttctgtctccttaacactgagctgtcatgttttaaagcttgctcacatcttggcacatttaagagacagtcaccccaggactcaaaaatagggaagtaacagtaacgcaggggaaacrttttctgtttggaggagcaaaggctgagaacactgtgaaaacatyytgcgcgcacaatagtaacctgggtaaatgcagcgtgaagggattttagtcacacgtggtctttcttacaaggaaggtggtgggggtgcagatgaggttgctagagaatgttagaggatccctctctggattggagatagggaaagaaagttgcacggctgctgaggccccttctaggtggcaaggctgtgctccctggttctgatgatgtgcctgggtggacatggcccctgtgagtttgtacagtcttgcagcaggatctagaggggggatttccagccagggctgctagacggaggcctactcttccatctttcctgatggcaggatggcctggccagggcctggaagacagagacctcctgcctccgcctcagtaagacgacaaggaaaggcaaatgcccaagggaaagaaaaggaaggctcttctccccagagttccccatgcagacatgagtgcgtgctcagttcagaatcacttcygagaactcatccctaatgctgcagatttgggctggaacagattcacactgtctggtttcaccgaggacatgaaactccaccttgcggggataaagagagaaaaacaaattcatcaaatggaagacacattgaaagtgtttttccttaatgcttatcctgtttttaaaccattatttccaagttgacaccttttttaaggaaaaataaatattttgcggcattaaagcyat

SEQ ID NO: 204 - DNA, 5600 bp, Homo sapiens
caaatactcccagccgagaagctgccatcgatcctcccatggacccctgatcctggtttggaggaacttttcacagctctctctccctccctcaaaccctgtgcaatgagtttgcagaagagagtcttcccgagaaggcagaacgggactcatgaagtggcagctaagccctgtccagtggccacccgtcagccaagggccagagaccaggaaaggaagaaaggcagcttcacttcctctttgaggatggagtcgcacagccgcgctggaaagagcagaaaatctgcaaaatttcggtccatctccaggtccctgatgctctgtaatgctaagaccagtgatgatggctctagccctgatgagaaatatcctgatccctttgagatttccttggcccagggcaaggagggaattttccactcatctgtgcagctggcagacacatcggaggctgggcccagcagtgttcctgatctagcactggcctcggaggctgctcaactccaagcagctgggaatgatcgaggcaagacctgtaggaggatattcttcatgaaggaatcttccacagcttcctctcgagaaaagcctggaaaactagaagcacaaagtagtaacttcctgtttcctaaagcctgccaccaaagggcacgcagcaactcaaccagtgttaatccctattgcacaagagaaattgattttccaatgaccaagaaatctgcagcgcccacggacaggcagccttactctctctgcagtaacaggaagtccctctctcaacaattggactgtccagcaggaaaggctgcgggaacttcgagaccaacacggtccctgagcacagctcagctcgtgcagccatctgggggcctccaggcttcagtcatctccaacatcgtgctgatgaagggccaggctaagggtctgggcttcagcatcgttgggggaaaagacagcatttatggccccattgggatttacgtcaaaaccatttttgcagggggagcagcagcagccgatggaaggctacaggaaggtgatgaaattctggagctcaatggtgaatcaatggctggactaacacatcaggatgctttgcagaagttcaagcaagccaaaaaggggctcctcaccctcaccgtgagaacccgcctgacggcgcctccttccctgtgcagccacctgtctcccccactgtgccgctccctgagctccagcacttgtatcaccaaggacagcagctccttcgccttggaaagcccctcggctcccatcagcaccgccaagcccaattacagaatcatggtggaggtttctctgcagaaagaggccggcgtgggcctgggcatcggcctgtgcagcgttccctacttccaatgcatctctggcattttcgtccacacgctgtcaccaggatccgtggcgcacctggacggacgtctccggtgtggggacgagattgtggaaatcagtgattcccctgtgcactgcctgacgctcaatgaagtctacacgatcctgagtcactgtgatcccggtccagtcyccatcattgttagccgacatccagacccacaggtctctgaacagcaactcaaagaagctgtggcccaggctgtggaaaacaccaagtttggaaaggagaggcatcartggagtctggaaggtgtcaaaaggctggaaagcagttggcaygggcggcccaccttggagaaggaacgagagaagaactcagcacccccgcatcgcagggctcagaaggtcatgatccgctccagcagtgacagcagctacatgtctgggtccccagggggaagtcctgggagtggcagtgctgagaagccgtcctctgacgtggacatcagcacacacagccccagcttgcctctggcacgggagccagtggtgctttctatagcatcctccaggctgccccaggagagcccacccctcccagagagccgggacagccacccgccgctgagactgaagaaatcctttgagattttggaagcgagagagctgctgccactgctgctaccacaggaagacacagcagggagaagccctagtgcctctgccggctgcccaggacctggtatcggcccacagaccaagtcctccacagagggcgagccagggtggagaagagccagcccagtgacccaaacatccccgataaaacacccactgcttaagaggcaggctcggatggactatagctttgataccacagccgaagacccttgggttaggrtttctgactgcatcaaaaacttatttagccccatcatgagtgagaaccatggccacatgcctctacagcccaatgccagcctgaatgaagaagaagggacacagggccacccagatgggaccccaccaaagctggacaccgccaatggcactcccaaagtttacaagtcagcagacagcagcactgtgaagaaaggtcctcctgtggctcccaagccagcctggtttcgccaaagcttgaaaggtttgaggaatcgtgcttcagacccaagagggctccctgatcctgccttgtccacccagccagcacctgcttccagggagcacctaggatcacacatccgggcctcctcctcctcctcctccatcaggcagagaatcagctcctttgaaacctttggctcctctcaactgcctgacaaaggagcccagagactgagcctccagccctcctctggggaggcagcaaaacctcttgggaagcatgaggaaggacggttttctggactcttggggcraggggctgcacccactcttgtgccccarcagcctgagcaagtactgtcctyggggtcccctgcagcctccgaggccagagacccaggtgtgtctgagtcccctcccccagggcggcagcccaatcagaaaactctcccccctggcccggacccgctcctaaggctgctgtcaacacaggctgaggaatctcaaggcccagtgctcaagatgcctagccagcgagcacggagcttccccctgaccaggtcccagtcctgtgagacgaagctacttgacgaaaagaccagcaaactctattctatcagcagccaagtgtcatcggctgtcatgaaatccttgctgtgccttccatcttctatctcctgtgcccagactccctgcatccccaaggaaggggcatctccaacatcawcatccaacgaagactcagctgcaaatggttctgctgaaacatctgccttggacacrgggttctcgctcaacctttcagagctgagagaatatacagagggtctcacggaagccaaggaagacgatgatggggaccacagttcccttcagtctggtcagtccgttatctccctgctgagctcagaagaattaaaaaaactcatcgaggaggtgaaggttctggatgaagcaacattaaagcaattagacggcatccatgtcaccatcttacacaaggaggaaggtgctggtcttgggttcagcttggcaggaggagcagatctagaaaacaaggtgattacggttcacagagtgtttccaaakgggctggcctcccaggaagggactattcagaagggcaatgaggttctttccatcaacggcaagtctctcaaggggaccacgcaccrtgatgccttggcmatcctccgccaagctcgagagcccaggcaagctgtgattgtcacaagraagctgactccagaggccatgccygacctcaactcctccactgactctgcagcctcagcctctgcagccagtgatgtttctgtagaatctacagcagaggccacagtctgcacggtgacactggagaagatgtcggcagggctgggcttcagcctggaaggagggaagggctccctacacggagacaagcctctcaccattaacaggattttcaaagktggacacagaggacttcgtgccagaggcaagatccctgtaaatattgttgcacaaaawtctcactagctctcttcccataccacccaatgctgatgtcctcaccacatgcggagaacaaatgtgaagggagtaggatattgggtcagtgtccaaagcagggtctgggcaggactcagctccccagagtcctctatgaactatggacggtgctccaggcaggctaaggcgtggagctgcctgatatttccctcccctggggacagcaagggctatccctttccaaaggccatggagagctggagcctggtgccctaacctctgagtcaccatcttaagagatgcctcattttagaaccaccaacaagcaagctcccaagggatggtgccctgttctctaccaagctatcctggctctttggagatcaaggagaggaggcaactttccttgttccccatcatctgtggaacccattaccttctccctcatttcaggagcagcctcagaacaaagtgagacagtccagcctggagatgaaatcttrcagctgggtggcactgccatgcagggcctcacacggtttgaagcctggaacatcatcaaggcactgcctgatggacctgtcacgattgtcatcaggagaaaaagcctccagtccaaggaaaccacagctgctggagactcctaggcaggacatgctgaagccaaagccaataacacacagctaacacacagctcccataaccgctgattctcagggtctctgctgccgccccacccagatgggggaaagcacaggtgggcttcccagtggctgctgcccaggcccagaccttctaggacgccacccagcaaaargttgttcctaaartaagggcagagtcacackggggcagctgatacaaattgcagactgtgtaaaaagagagcttaatgataatattgtggtgccacaaataaaatggatttattagaatttcatatgacattcatgcctggcttcgcaaaatgtttcaagtactgtaactgtgtcatgattcacccccaaacagtgacatttatttttctcatgaatctgcaatgtgggcagagattggaatgggcagctcatctctgtcccacttggcatcagctggcgtcatgcaaagtcatgcaaaggctgggaccacgtgagatcattcactcatacatctggccgttgatgttggctgggaactcacctggggctgctggcctgaatgcttataggtggcctctccttgtggcctgggcctcctcwcaacatggtgtctgkattcccaggatgagcatcccaggatcgcaagagccaygtagaagctgcatcttgtttatacctttgccttggaagttgcatggcatcacctccaccatactccatcagttagagctgacacaaacctgcctgggtttaaggggagaggaaatattgctggggtcatttatgaaaaatacagtttgtcacatgaaacatttgcaaaattgtttttggttggattggagaagtaatcctagggaagggtggtggagccagtaaacagaggagtacaggtgaagcaccaagctcaaagcgtggacaggtgtgccgacagaaggaaccagcgtgtatatgagggtatcaaataaaattgctactacttacctaccacatgccaagcactgtgctcag

SEQ ID NO: 205 - DNA, 2824 bp, Homo sapiens
caaatactcccagccgagaagctgccatcgatcctcccatggacccctgatcctggtttggaggaacttttcacagctctctctccctccctcaaaccctgtgcaatgagtttgcagaagagagtcttcccgagaaggcagaacgggactcatgaagtggcagctaagccctgtccagtggccacccgtcagccaagggccagagaccaggaaaggaagaaaggcagcttcacttcctctttgaggatggagtcgcacagccgcgctggaaagagcagaaaatctgcaaaatttcggtccatctccaggtccctgatgctctgtaatgctaagaccagtgatgatggctctagccctgatgagaaatatcctgatccctttgagatttccttggcccagggcaaggagggaattttccactcatctgtgcagctggcagacacatcggaggctgggcccagcagtgttcctgatctagcactggcctcggaggctgctcaactccaagcagctgggaatgatcgaggcaagacctgtaggaggatattcttcatgaaggaatcttccacagcttcctctcgagaaaagcctggaaaactagaagcacaaagtagtaacttcctgtttcctaaagcctgccaccaaagggcacgcagcaactcaaccagtgttaatccctattgcacaagagaaattgattttccaatgaccaagaaatctgcagcgcccacggacaggcagccttactctctctgcagtaacaggaagtccctctctcaacaattggactgtccagcaggaaaggctgcgggaacttcgagaccaacacggtccctgagcacagctcagctcgtgcagccatctgggggcctccaggcttcagtcatctccaacatcgtgctgatgaagggccaggctaagggtctgggcttcagcatcgttgggggaaaagacagcatttatggccccattgggatttacgtcaaaaccatttttgcagggggagcagcagcagccgatggaaggctacaggaaggtgatgaaattctggagctcaatggtgaatcaatggctggactaacacatcaggatgctttgcagaagttcaagcaagccaaaaaggggctcctcaccctcaccgtgagaacccgcctgacggcgcctccttccctgtgcagccacctgtctcccccactgtgccgctccctgagctccagcacttgtatcaccaaggacagcagctccttcgccttggaaagcccctcggctcccatcagcaccgccaagcccaattacagaatcatggtggaggtttctctgcagaaagaggccggcgtgggcctgggcatcggcctgtgcagcgttccctacttccaatgcatctctggcattttcgtccacacgctgtcaccaggatccgtggcgcacctggacggacgtctccggtgtggggacgagattgtggaaatcagtgattcccctgtgcactgcctgacgctcaatgaagtctacacgatcctgagtcactgtgatcccggtccagtcyccatcattgttagccgacatccagacccacagaaggaagaaatggaggctcaggaggttaagtaacttgtctaggtgttcacacctagacagtagaggaaccgggactagaacacaagcctttttgactctaggactcatactcttaactattactccaaagtgataataaactgtctctgaacagcaactcaaagaagctgtggcccaggctgtggaaaacaccaagtttggaaaggagaggcatcartggagtctggaagatgcagaaatggagttgggtcccccaggaagctgactctgagatggagtttggtctgcaggcagtgtcctggggttcactacctgtggcagggaggggagcaggcaggktagacagagggaggayggagctgaggtgcacacccaacagcttcagccaagccctggagctctgcagccaaagtccccattagagttgtcctatgttggccaacatagctgggcctctgtaaccctatctccagcagtccctggagatgggctgccccattggacaaggcagctgtctgcagctgtggcagcccctggagggacccacagctgaaagtagtctgccagcagcactccccacagctgggacaccaagcccttcctcgatgggtgatctgggtggcatatctccatatacatcagtcataggctcagaaagcttgaatgattttcccaacccaaagtcatacagctcgccagggaccaacaccaagactgccatactccagatccacagtgacttcagataagaagcagatggccgatgtgcagtgtgctgcccgtggcagtcacaggtgaggccagggggtatttctgttttctgaagctcagctgtgaagattctcttgtgcttcccacacaggtgtcaaaaggctggaaagcagttggcaygggcggcccaccttggagaaggaacgagagaagaactcagcacccccgcatcgcagggctcagaaggtcatgatccgctccagcagtgacagcagctacatgtctgggtccccagggggaagtcctgggagtggcagtgctgagaagccgtcctctgacgtggacatcagcacacacagccccagcttgcctctggcacgggagccagtggtgctttctatagcatcctccaggctgccccaggagagcccacccctcccagagagccgggacagccacccgccgctgagactgaagaaatcctttgagattttggtgagaaagcctatgtcctccaagcccaacctccacccag

SEQ ID NO: 206 - DNA, 619 bp, Homo sapiens
gcgtgaataactgcctaattagtggayatgaaaactggacagtctccaaagtcatcagagatgaccacgcttgccaggcaacttactagactaaggatacgacagggaaaaacagtccatgaggacgctttgatttttctttacaacgcgttactaaatgacatgagtagcctttccatcctggccaagaggaaatataatttcaaactaaagttgagttcagattctgttaaattaaatagcaaagaaacagtcactcttggttttattcctcttagacaggaagcagggcagtggggaaytgacatgagccrttcctcggtgattaacctgcagtttatgttgtttctaggtgacgtgcccatcatgcaggaagcttcyccaaggctggcgagagcaacttgtctgctttgagaaatgcagatctatcaggatccagaatcggactctgaaaaagcygtcatttcatgtcyctaaaacagcytttgatttaatgtacaagatgtcaagaagtaaaggacaataaaataaaaacsaaaaaaggagaactatttcaattaagaagcattcctatatcaattcttggaaatcacataaaataaaagctgtcagaatcaat

SEQ ID NO: 207 - DNA, 1432 bp, Homo sapiens
ttttggaggtgatggatatatttaatatcttgactgtgccagtgatatcatgggtgtatgcatatttccaaaatcatgaaatcgtatatgttaaacactttgtatgacagatgcatccgacagcattaactcaagcataccctgagaatgactgtatggtctaagaagaatatgtgttcagagtctaagctaaggaatccgggaatggccaacccagagagattcacttcttatctgtgaaggacacttgaactccctgcctgtccgttggaactcaggatgtgcaaggaaccaaggccttttattttgggttaaatggaggttgctaagtggagagtgctaagtagaaatgttatataaactacatactctttacaaatagtagcggtcctgtccagcccactgmcactggaccacatctgtatttaagtcctaaataaaccctatgtcccattcactggctctgggtctcttcttggacaaggcgccatccctgttggaatcaatagggctccagcatgacacatgtgcaggatttttwaaattatatcaattatatctcaataaagctgttgaaatttttaaagggcctgacctgtcctggaatrgggaaaaacttaatgtgacaaaaatgtaggttrtagtgaagggaacaggaaatggtactgggaccatttttactccagctaaaaaatttgaatttaagaaatttggatatagataggaaggagctaatgttaagcaggaagtaagttgataagagttttctgttaaatgtgatggcaaagyggtaggtgagtatgggctccagtgggacagaacttgtggcagagaaaccaggtcaaaagttaaagttggatttggtgagtaattaaagagagtagtagcatttccaagacagaaattaatgagctttgcttacatgaaaagattaagaggataagcttaagaacaataagtaccataaaaatgggtggcaatgatgatacattaggggtggaggacctagggtcataaggttgcccgtggcgacttggagtgaagtgttgagatgatatgcccatttcatggggagaagtagaaagaasagaaaaaccacttttactttagttctggtgtaactatgaagaaaaaaaagcctaattgaggacaagaatagacctcgtttctatgggcaacaggcatattctgctccctatttcattatttcgcttaaaaaacacttggtgaagacttgatscagattgtcctcttggaatctctgatcctgatgtttatttaagtggcagagtggtggcttttccatggtatatagtcagattcttttttttttttttttgaggtggagtctcacgctgttgcccaggctggagtgcagtgttgagatcttggctcaatgcaatctccacctcacaggtagctgggactacag

SEQ ID NO: 208 - DNA, 591 bp, Homo sapiens
atgaatgatcgtgaatyggggagccctcagaatcacagcagtttcagagatactccaggggtgccttgtgatcagaacgaatttatagacaaaaaaggttctacccrtcacctacagataatggtgagtaaatacaagaacaatgttctgctgaaaggattagaarccatcaatgactatcacttcagcataattaattccttactgatcaatgatttaaaacttaattcaacaaggagagacgaatatgacaaaattcagattgccgacttgatggaagaaaagttcccaggtgatgctggtttkggcaaactgagaactcttcaaagaaataccaacactgggagaggagaccttgctgaaactcttagaaaagtcaaaagatcatctgctctgggtttagatgtcctccttttttctttattggttgtgaataaaattaaatccattccagcaaaaggaaaaacctcatcaaagaagaggaagcagagaaaagtaggtccaactacacctttagcaaccacagacaagaagttcacagctgaagraggagaggagactcctatagctcagcgttttcacacaccatag

SEQ ID NO: 209 - DNA, 2119 bp, Homo sapiens
gagggccggcctggacccggcgggcgcacgyctccgagtccagcgcagccgagccggtctgcagaggggcccccagaactttgtgtgtgtgtgtgcacgcgcgcgcgtgtgtgcccaggtkcgagggtgcgcgcgtgtgctggcggggagggaaccgacccgaaagagagccccacgctggcaaagtggctcgcccatctcacagccggttggcgctcgcggagctctttattttccatgtgtgagcctgtgcctgtggtttatctctggaggatgtgcctgagggaggagacatatactgcctggactgcctggctgatgtgagctagtttgtctggttgagttggatgtttaaatagaaggcagaacaacaacaggtactccacatcagcattctcaagactggagaagttaggcctcagacatcccaagcrttctcctttcattggaaacttgacatttttccgccagggtttttgggaaagccaaatggagctcagaaagctgtatggacctctgtgtgggtactatcttggtcgtcggatgtttattgttatttctgrgccagacatgatcaagcaggtgttggttgagaacttcagtaactttaccaacagaatggcgtcgggtttggagttcaagtcggtagccgacagcgttctgtttttacgtgacaaaagatgggaagaggtcagaggtgccctgatgtctgctttcagtcctgaaaagctgaacgagatrgttcccctcatcagccaagcctgcgaccttctcctggctcatttaaaacgctatgcggaatctggggacgcatttgacatccagaggtgctactgcaattacaccacagatgtggttgccagmgtcmcctttggcaccccggtggactcctggcaggcccctgaggatccctttgtgaaacactgcaagcgtttcttcgaattctgcatccccagacctatcctsgttttactcttatcatttccatccataatggtcccactggcccggattttgcccaataagaaccgagacgaactgaatggcttttttaacaaactcattaggaatgtgattgccttgcgggaccagcaagctgccgaagagaggcggagagacttcctccaaatggtcctggatgcccgacattctrcaagtcccrtgggcgtgcaagactttgacatcgtcagagacgttttctcctctactgggtgcaagccgaacccttcccggcaacaccagcccagccctatggccaggcctttgactgtggatgagattgtgggccaggccttcatcttcctcatcgctggctatgaaatcatcaccmacacactttcttttgccacctacctactggccaccaaccctgactyccaagagaagcttctgagagaggtagacgtttttaaggagaaacacatggcccctgagttctgcagcctcgagsaaggcctgccctatctggacatggtgattgcagagacgctgaggatgtacccgccagctttcagattcacacgggaggcagctcaggactgcraggtgckggggcagcgcatccccgcaggcgctgtgctagagatrgccgtgggtgccctgcaccatgaccctgagcactggccaagcscggagaccttcaaccctgaaaggytcacggctraggccrggcagcagcaccggccyttcacgtacctgcccttcggggccggcccacggagctgcctcggggmgcgtctagggctgcttgaggtcaagttgacamtgctccacgtgctgcacaagttccggttccaagcctgccctgagacccaggtaccgctgcagctagaatccaaatctgccctaggtccaaaaaatggtgtctatatcaagatcgtatcccgctgacacagaaggctgccgggtggggggagggcacccccaaattcaaagaaaaccctaagtgtggatgttcagaattttggaaaaatgtcactgaagtgattgaaagagtgcctggcasgcaaggataagaggttctttacataacatttcctaaatgcttaataaacgtttgttgcacttggttttgacattgccaatggggtttgaaccagtgctctctrtaaatgaagaa

SEQ ID NO: 210 - DNA, 2106 bp, Homo sapiens
gggcatcggcaggctaggttttctccgcgcagsgccagtcgcagaggaagatggcgccgcggagggtcaggtcgtttctgcgcgggctcccggcgctgctactgctgctgctcttcctcgggccctggcccgctgcgagccacggcggcaagtactcgcgggagaagaaccagcccaagccgtccccgaaacgcgagtccggagaggagttccgcatggagaagttgaaccagctgtgggagaaggcccagcgactgcatcttcctcccgtgaggctggccgagctccacgctgatctgaagatacaggagagggacgaactcgcctggaagaaactaaagcttgacggcttggacgaagatggggagaaggaagcgagactcatacgcaacctcartgtcatcttggccaagtatggtctggacggaaagaaggacgctcggcaggtgaccagcaactccctcagtggcacccaggaagacgggctggatgaccccaggctggaaaagctgtggcacaaggcgaagacctctgggaaattctccggcgaagaactggacaagctctggcgggagttcctgcatcacaaagagaaagttcacgagtacaacgtcctgctggagaccctgagcaggaccgaagaartccacgagaacgtcattagcccctcggacctgagcgacatcaagggcagcgtcctgcacagcaggcacacggagctgaaggagaagctgcgcagcatcaaccagggcctggaccgcctgcgcagggtcagccaccagggctacagcactgaggcygagttcgaggagcccagggtgattgacctgtgggacctggcgcagtccgccaacctcacggacaaggagctggaggcgttccgggaggagctcaagcacttcgaagccaaaatcgagaagcacaaccactaccagaagcagctggagattgcgcacgagaagctgaggcacgcagagagyrtgggcgayggcgagcgtgtgagccgcagccgcgagaagcacgccctgctggaggggcggaccaaggagctgggctacacggtgaagaagcatctgcaggacctgtccggcaggatctccagagctcggcacaacgaactctgaaggcryyggggrgcccagcccggcagggaagaggccagcgtgaaggacctgggctcttggccgtggcatttccgtggacagcccgccrtcagggtggctggggctggcacgggtgtcgaggcaggaaggattgtttctggtgactgcagccgctgccgtcgygacacagggcttggtggtggtagcatttgggtctkagatcggcccagctctgactgaaggggcttggcttccactcagcatcagcgtggcagtcaccaccccagtgaggacctcgatgtccagctgctgtcaggtytgatagtcctctgctaaaacaacacgatttacataaaaaatcttacacatctgccaccggaaataccatgcacagagtccttaaaaaatagagtgcagtatttaaaccacccgcttgttggctggtcactaagtgtcctggtggctggggccggagccagtgctcktgaagggrtcgcgtcatagccagcttcccctctgggccctgtgggtctttgcagccaacctccttttcccgtgagacggcccggcctgatttaaagccaagagcgcttgagttgagtttgaggggaagatgtggagcgtgtggttctgtgkacagtcagagactgtggcctgggggcagcgtctttcaactctcacctctgcagctcagggacctcgggagacctcaccaaacctgcagggcctccgtgtccctaagtgtgctgtgtaaatgccccatctcatgggggagagacagccacggaggccttcctctgaccatagctgatggactggcggttgctcaggtccggctccgagaatgttccygtgtctgagcctggaagaggctcgggtcyggctccrggcgtggttcccttcccgtgtctgagcctggaagaggctcgggtcyggctccrrgcgtggttcccttcccgtgtctgagyctggaagaggctcgggtccggctccgagcgtggtt

SEQ ID NO: 211 - DNA, 2064 bp, Homo sapiens
gggcatcggcaggctaggttttctccgcgcagsgccagtcgcagaggaagatggcgccgcggagggtcaggtcgtttctgcgcgggctcccggcgctgctactgctgctgctcttcctcgggccctggcccgctgcgagccacggcggcaagtactcgcgggagaagaaccagcccaagccgtccccgaaacgcgagtccggagaggagttccgcatggagaagttgaaccagctgtgggagaaggcccagcgactgcatcttcctcccgtgaggctggccgagctccacgctgatctgaagatacaggagagggacgaactcgcctggaagaaactaaagcttgacggcttggacgaagatggggagaaggaagcgagactcatacgcaacctcartgtcatcttggccaagtatggtctggacggaaagaaggacgctcggcaggtgaccagcaactccctcagtggcacccaggaagacgggctggatgaccccaggctggaaaagctgtggcacaaggcgaagacctctgggaaattctccggcgaagaactggacaagctctggcgggagttcctgcatcacaaagagaaagttcacgagtacaacgtcctgctggagaccctgagcaggaccgaagaartccacgagaacgtcattagcccctcggacctgagcgacatcaagggcagcgtcctgcacagcaggcacacggagctgaaggagaagctgcgcagcatcaaccagggcctggaccgcctgcgcagggtcagccaccagggctacagcactgaggcygagttcgaggagcccagggtgattgacctgtgggacctggcgcagtccgccaacctcacggacaaggagctggaggcgttccgggaggagctcaagcacttcgaagccaaaatcgagaagcacaaccactaccagaagcagctggagattgcgcacgagaagctgaggcacgcagagagyrtgggcgayggcgagcgtgtgagccgcagccgcgagaagcacgccctgctggaggggcggaccaaggagctgggctacacggtgaagaagcatctgcaggacctgtccggcaggatctccagagctcggcacaacgaactctgaaggcryyggggrgcccagcccggcagggaagaggccagcgtgaaggacctgggctcttggccgtggcatttccgtggacagcccgccrtcagggtggctggggctggcacgggtgtcgaggcaggaaggattgtttctggtagcatttgggtctkagatcggcccagctctgactgaaggggcttggcttccactcagcatcagcgtggcagtcaccaccccagtgaggacctcgatgtccagctgctgtcaggtytgatagtcctctgctaaaacaacacgatttacataaaaaatcttacacatctgccaccggaaataccatgcacagagtccttaaaaaatagagtgcagtatttaaaccacccgcttgttggctggtcactaagtgtcctggtggctggggccggagccagtgctcktgaagggrtcgcgtcatagccagcttcccctctgggccctgtgggtctttgcagccaacctccttttcccgtgagacggcccggcctgatttaaagccaagagcgcttgagttgagtttgaggggaagatgtggagcgtgtggttctgtgkacagtcagagactgtggcctgggggcagcgtctttcaactctcacctctgcagctcagggacctcgggagacctcaccaaacctgcagggcctccgtgtccctaagtgtgctgtgtaaatgccccatctcatgggggagagacagccacggaggccttcctctgaccatagctgatggactggcggttgctcaggtccggctccgagaatgttccygtgtctgagcctggaagaggctcgggtcyggctccrggcgtggttcccttcccgtgtctgagcctggaagaggctcgggtcyggctccrrgcgtggttcccttcccgtgtctgagyctggaagaggctcgggtccggctccgagcgtggtt

SEQ ID NO: 212 - DNA, 2024 bp, Homo sapiens
ggcagcggtggcaggggctgcaggagcaagtgaccaggagcaggactggggacaggcctgatcgcccctgcacgaaccagacccttcgccgccctcasgatgactacctctccgatcctgcagctgctgctgcggctctcactgtgcgggctgctgctccagagggcggagacaggctctaaggggcagacggcgggggagctgtaccagcgctgggaacggtaccgcagggagtgccaggagaccttggcagccgcggaaccgccttcaggcctcgcctgtaacgggtccttcgatatgtacgtctgctgggactatgctgcacccaatgccactgcccgtgcgtcctgcccctggtacctgccctggcaccaccatgtggctgcaggtttcgtcctccgccagtgtggcagtgatggccaatggggactttggagagaccatacacaatgtgagaacccagagaagaatgaggcctttctggaccaaaggctcatcttggagcggttgcaggtcatgtacactgtcggctactccctgtctctcgccacactgctgctagccctgctcatcttgagtttgttcaggcggctacattgcactagaaaytatatccacatcaacctgttcacgtctttcatgctgcgagctgcggccattctcagccgagaccgtctgctacctcgacctkgcccctaccttggggaccaggcccttgygctgtggaaccaggccctcgctgcctgccgcacggcccagatcgtgacccagtactgcgtgggtgccaactacacgtggctgctggtggagggcgtctacctgcacagtctcctggtgctcgtgggaggctccgaggagggccacttccgctactacctgctcstcggctggggggcccccgcgcttttcgtcattccctgggtgatcgtcaggtacctgtacgagaacacgcagtgctgggagcgcaacgaagtcaaggccatttggtggattatacggacccccatcctcatgaccatcttgattaatttcctcatttttatccgcattcttggcattctcctgtccaagctgaggacacggcaaatgcgctgccgggattaccggctgaggctggctcgctccacgctgacgctggtgcccctgctgggtgtccacsaggtggtgtttgctcccgtgacagaggaacaggcccggggcgccctgcgcttcgccaagctcggctttgagatcttcctcagctccttccagggcttcctggtcagcgtcctctactgcttcatcaacaaggaggtgcagtcggagatccgccgtggctggcaccactgccgcctgcgccgcagcctgggcgaggagcaacgccagctcccggagcgcgccttccgggccctgccctccggctccggcccgggcgaggtccccaccagccgcggcttgtcctcggggaccctcccagggcctgggaatgaggccagccgggagttggaaagttactgctagggggcgggatccccgtgtctgttmagttagcatggatttattgagtgccaactgcgtgccaggcccagtacggaggacgctggggaaatggtgaaggaaacagaaaaaaggtccctgcccttctggagatgacaactgagtggggaaaacagaccgtgaacacaaaacatcaagttccacacacgctatggaatggttatgaagggaagcgagaagggggcctagggtggtctgggaggcgtctccaaggaggtgacacttaarccatccccgaaagaggtgaaagagatcactttggggagagctggagaacaggattctaggcggaagcgatagcataggcaaaggcccttgggcaggaaggcgctcagccttggctggagtagaattaagtcagagccaacaggtggggagagacagagaagtgggcaggggcacccaagttgggatttcatttcaggtgcattggagattcttaggagtgtctcttgggggtaatattttattttttaaaaaatgaggat

SEQ ID NO: 213 - DNA, 1580 bp, Homo sapiens
ggcagcggtggcaggggctgcaggagcaagtgaccaggagcaggactggggacaggcctgatcgcccctgcacgaaccagacccttcgccgccctcasgatgactacctctccgatcctgcagctgctgctgcggctctcactgtgcgggctgctgctccagagggcggagacaggctctaaggggcagacggcgggggagctgtaccagcgctgggaacggtaccgcagggagtgccaggagaccttggcagccgcggaaccgccttcaggcctcgcctgtaacgggtccttcgatatgtacgtctgctgggactatgctgcacccaatgccactgcccgtgcgtcctgcccctggtacctgccctggcaccaccatgtggctgcaggtttcgtcctccgccagtgtggcagtgatggccaatggggactttggagagaccatacacaatgtgagaacccagagaagaatgaggcctttctggaccaaaggctcatcttggagcggttgcaggtcatgtacactgtcggctactccctgtctctcgccacactgctgctagccctgctcatcttgagtttgttcaggcggctacattgcactagaaaytatatccacatcaacctgttcacgtctttcatgctgcgagctgcggccattctcagccgagaccgtctgctacctcgacctkgcccctaccttggggaccaggcccttgygctgtggaaccaggccctcgctgcctgccgcacggcccagatcgtgacccagtactgcgtgggtgccaactacacgtggctgctggtggagggcgtctacctgcacagtctcctggtgctcgtgggaggctccgaggagggccacttccgctactacctgctcstcggctggggggcccccgcgcttttcgtcattccctgggtgatcgtcaggtacctgtacgagaacacgcagtgctgggagcgcaacgaagtcaaggccatttggtggattatacggacccccatcctcatgaccatcttgattaatttcctcatttttatccgcattcttggcattctcctgtccaagctgaggacacggcaaatgcgctgccgggattaccggctgaggctggctcgctccacgctgacgctggtgcccctgctgggtgtccacsaggtggtgtttgctcccgtgacagaggaacaggcccggggcgccctgcgcttcgccaagctcggctttgagatcttcctcagctccttccagggcttcctggtcagcgtcctctactgcttcatcaacaaggaggtaggcagagacccggccgccgcccccgccctctggcggcagcgcggggtacggcgccgcctctgagcgccatcgtctcacaggtgcagtcggagatccgccgtggctggcaccactgccgcctgcgccgcagcctgggcgaggagcaacgccagctcccggagcgcgccttccgggccctgccctccggctccggcccgggcgaggtccccaccagccgcggcttgtcctcggggaccctcccagggcctgggaatgaggccagccgggagttggaaagttactgc

SEQ ID NO: 214 - DNA, 3458 bp, Homo sapiens
tgccgtygttgttggccacagcgtgggaagcagctctgggggagctcggagctcccgatcacggcttcttgggggtagctacggctgggtgtgtagaacggggccggggctggggctgggtcccctagtggagacccaagtgcgagaggcaagaactctgcagcttcctgccttctgggtcagttccttattcaagtctgcagccggctcccagggagatctcggtggaacttcagaaacgctgggcagtctgcctttcaaccatgcccctgtccctgggagccgagatgtgggggcctgaggcctggctgctgctgctgctactgctggcatcatttacaggccggtgccccgcgggtgagctggagacctcagacgtggtaactgtggtgctgggccaggacgcaaaactgccctgcytctaccgaggggactccggcgagcaagtggggcaagtggcatgggctcgggtggacgcgggcgaaggcgcccaggaactagcgctactgcactccaaatacgggcttcatgtgagcccggcttacgagggccgcgtggagcagccgccgcccmcacgcaaccccctggacggctcagtgctcctgcgcaacgcagtgcaggcggatgagggcgagtacgagtgccgggtcagcaccttccccgccggcagcttccaggcgcggctgcggctccgagtgctggtgcctcccctgccctcactgaatcctggtccagcactagaagagggccagggcctgaccctggcagcctcctgcacagctgagggcagcccagcccccagcgtgacctgggacacggaggtcaaaggcacaacgtccagccgttccttcaagcactcccgctctgctgccgtcacctcagagttccacttggtgcctagccgcagcatgaatgggcagccactgacttgtgtggtgtcccatcctggcctgctccaggaccaaaggatcacccacatcctccacgtgtccttccttgctgaggcctctgtgaggggccttgaagaccaaaatctgtggcacattggcagagaaggagctatgctcaagtgcctgagtgaagggcagccccctccctcatacaactggacacggctggatgggcctctgcccagtggggtacgagtggatggggacactttgggctttcccccactgaccactgagcacagcggcatctacgtctgccatgtcagcaatgagttctcctcaagggattctcaggtcactgtggatgttcttgacccccaggaagactctgggaagcaggtggacctagtgtcagcctcggtggtggtggtgggtgtgatcgccgcactcttgttctgccttctggtggtggtggtggtgctcatgtcccgataccatcggcgcaaggcccagcagatgacccagaaatatgaggaggagctgaccctgaccagggagaactccatccggaggctgcattcccatcacacggaccccaggagccagccggaggagagtgtagggctgagagccgagggccaccctgatagtctcaaggacaacagtagctgctctgtgatgagtgaagagcccgagggcygcagttactccacgctgaccacggtgagggagatagaaacacagactgaactgctgtctccaggctctgggcgggccgaggaggaggaagatcaggatgaaggcatcaaacaggccatgaaccattttgttcaggagaatgggaccctacgggccaagcccacgggcaatggcatctacatcaatgggcggggacacctggtctgacccaggcctgcctcccttccctaggcctggctccttctgttgacatgggagattttagctcatcttgggggcctccttaaacacccccatttcttgcggaagatgctccccatcccactgactgcttgacctttacctccaacccttctgttcatcgggagggctccaccaattgagtctctcccaccatgcatgcaggtcactgtgtgtgtgcatgtgtgcctgtgtgagtgttgactgactgtgtgtgtgtggaggggtgactgtccgtggaggggtgactgtgtccgtggtgtgtattatgctgtcatatcagagtcaagtgaactgtggtgtatgtgccacgggatttgagtggttgcgtgggcaacactgtcagggtttggcktgtgtgtcatgtggctgtgtgtgacctctgcctgaaaaagcaggtattttctcagaccccagagcagtattaatgatgcagaggttggaggagagaggtggagactgtggctcagacccaggtgtgcgggcatagctggagctggaatctgcctccggtgtgagggaacctgtctcctaccacttcggagccatgggggcaagtgtgaagcagccagtccctgggtcagccagaggcttgaactgttacagaagccctctgccctctggtggcctctgggcctgctgcatgtacatattttctgtaaatatacatgcgccgggagcttcttgcaggaatactgctccgaatcacttttaatttttttcttttttttttcttgccctttccattagttgtattttttatttatttttatttttatttttttttagagatggagtctcactatgttgctcaggctggccttgaactcctgggctcaagcaatcctcctgcctcagcctccctagtagctgggactttaagtgtacaccactgtgcctgctttgaatcctttacgaagagaaaaaaaaaattaaagaaagcctttagatttatccaatgtttactactgggattgcttaaagtgaggcccctccaacaccagggggttaattcctgtgattgtgaaaggggctacttccaaggcatcttcatgcaggcagccccttgggagggcacctgagagctggtagagtctgaaattagggatgtgagcctcgtggttactgagtaaggtaaaattgcatccaccattgtttgtgataccttagggaattgcttggacctggtgacaagggctcctgttcaatagtggtgttggggagagagagagcagtgattatagaccgagagagtaggagttgaggtgaggtgaaggaggtgctgggggtgagaatgtcgcctttccccctgggttttggatcactaattcaaggctcttctggatgtttctctgggttggggctggagttcaatgaggtttatttttagctggcccacccagatacactcagccagaatacctagatttagtacccaaactcttcttagtctgaaatctgctggatttctggcctaagggagaggctcccatccttcgttccccagccagcctaggacttcgaatgtggagcctgaagatctaagatcctaacatgtacattttatgtaaatatgtgcatatttgtacataaaatgatattctgtttttaaataaacagacaaaactt

SEQ ID NO: 215 - DNA, 3489 bp, Homo sapiens
tgccgtygttgttggccacagcgtgggaagcagctctgggggagctcggagctcccgatcacggcttcttgggggtagctacggctgggtgtgtagaacggggccggggctggggctgggtcccctagtggagacccaagtgcgagaggcaagaactctgcagcttcctgccttctgggtcagttccttattcaagtctgcagccggctcccagggagatctcggtggaacttcagaaacgctgggcagtctgcctttcaaccatgcccctgtccctgggagccgagatgtgggggcctgaggcctggctgctgctgctgctactgctggcatcatttacaggccggtgccccgcgggtgagctggagacctcagacgtggtaactgtggtgctgggccaggacgcaaaactgccctgcytctaccgaggggactccggcgagcaagtggggcaagtggcatgggctcgggtggacgcgggcgaaggcgcccaggaactagcgctactgcactccaaatacgggcttcatgtgagcccggcttacgagggccgcgtggagcagccgccgcccmcacgcaaccccctggacggctcagtgctcctgcgcaacgcagtgcaggcggatgagggcgagtacgagtgccgggtcagcaccttccccgccggcagcttccaggcgcggctgcggctccgagtgctggtgcctcccctgccctcactgaatcctggtccagcactagaagagggccagggcctgaccctggcagcctcctgcacagctgagggcagcccagcccccagcgtgacctgggacacggaggtcaaaggcacaacgtccagccgttccttcaagcactcccgctctgctgccgtcacctcagagttccacttggtgcctagccgcagcatgaatgggcagccactgacttgtgtggtgtcccatcctggcctgctccaggaccaaaggatcacccacatcctccacgtgtccttccttgctgaggcctctgtgaggggccttgaagaccaaaatctgtggcacattggcagagaaggagctatgctcaagtgcctgagtgaagggcagccccctccctcatacaactggacacggctggatgggcctctgcccagtggggtacgagtggatggggacactttgggctttcccccactgaccactgagcacagcggcatctacgtctgccatgtcagcaatgagttctcctcaagggattctcaggtcactgtggatgttcttgacccccaggaagactctgggaagcaggtggacctagtgtcagcctcggtggtggtggtgggtgtgatcgccgcactcttgttctgccttctggtggtggtggtggtgctcatgtcccgataccatcggcgcaaggcccagcagatgacccagaaatatgaggaggagctgaccctgaccagggagaactccatccggaggctgcattcccatcacacggaccccaggagccagagtgaagagcccgagggcygcagttactccacgctgaccacggtgagggagatagaaacacagactgaactgctgtctccaggctctgggcgggccgaggaggaggaagatcaggatgaaggcatcaaacaggccatgaaccattttgttcaggagaatgggaccctacgggccaagcccacgggcaatggcatctacatcaatgggcggggacacctggtctgacccaggcctgcctcccttccctaggcctggctccttctgttgacatgggagattttagctcatcttgggggcctccttaaacacccccatttcttgcggaagatgctccccatcccactgactgcttgacctttacctccaacccttctgttcatcgggagggctccaccaattgagtctctcccaccatgcatgcaggtcactgtgtgtgtgcatgtgtgcctgtgtgagtgttgactgactgtgtgtgtgtggaggggtgactgtccgtggaggggtgactgtgtccgtggtgtgtattatgctgtcatatcagagtcaagtgaactgtggtgtatgtgccacgggatttgagtggttgcgtgggcaacactgtcagggtttggcktgtgtgtcatgtggctgtgtgtgacctctgcctgaaaaagcaggtattttctcagaccccagagcagtattaatgatgcagaggttggaggagagaggtggagactgtggctcagacccaggtgtgcgggcatagctggagctggaatctgcctccggtgtgagggaacctgtctcctaccacttcggagccatgggggcaagtgtgaagcagccagtccctgggtcagccagaggcttgaactgttacagaagccctctgccctctggtggcctctgggcctgctgcatgtacatattttctgtaaatatacatgcgccgggagcttcttgcaggaatactgctccgaatcacttttaatttttttcttttttttttcttgccctttccattagttgtattttttatttatttttatttttatttttttttagagatggagtctcactatgttgctcaggctggccttgaactcctgggctcaagcaatcctcctgcctcagcctccctagtagctgggactttaagtgtacaccactgtgcctgctttgaatcctttacgaagagaaaaaaaaaattaaagaaagcctttagatttatccaatgtttactactgggattgcttaaagtgaggcccctccaacaccagggggttaattcctgtgattgtgaaaggggctacttccaaggcatcttcatgcaggcagccccttgggagggcacctgagagctggtagagtctgaaattagggatgtgagcctcgtggttactgagtaaggtaaaattgcatccaccattgtttgtgataccttagggaattgcttggacctggtgacaagggctcctgttcaatagtggtgttggggagagagagagcagtgattatagaccgagagagtaggagttgaggtgaggtgaaggaggtgctgggggtgagaatgtcgcctttccccctgggttttggatcactaattcaaggctcttctggatgtttctctgggttggggctggagttcaatgaggtttatttttagctggcccacccagatacactcagccagaatacctagatttagtacccaaactcttcttagtctgaaatctgctggatttctggcctaagggagaggctcccatccttcgttccccagccagcctaggacttcgaatgtggagcctgaagatctaagatcctaacatgtacattttatgtaaatatgtgcatatttgtacataaaatgatattctgtttttaaataaacagacaaaacttgttctgtctggctcctgtcttgccccttgaactgtgtaagctctgagtcacatactctctgtctcggtaccatccttcctgtagtcccaagtaggggaagacttag

SEQ ID NO: 216 - DNA, 3834 bp, Homo sapiens
ctttcccgagtccgtttgaggaagtccccgaggcgcacagagcaagcccacgcgagggcacctctggasgggagcgcctgcaggaccttgtaaagtcaaaaatgtcagaaacttccaggaccgcctttggaggcagaagagcagttccacccaataactctaatgcagcggaagatgacctgcccacagtggagcttcagggcktggtgccccggggcrtcaacctgcaagagtttcttaatgtcacgagcgttcacctgttcaaggagagatgggacactaamaaggtggaccaccacactgacaagtatgaaaacaacaagctgattgtcygcagagggcagtctttctatgtgcagattgacytcagtcgtccatatgaccccagaagggatctcttcagggtggaatacgtcattggtcgctacccacaggagaacaagggaacctacatcccagtgcctatagtctcagagttacaaagtggaaagtggggggccaagattgtcatgagagaggacaggtctgtgcggctgtccatccagtcttcccccaaatgtattgtggggaaattccgcatgtatgttgctgtctggactccctatggcgtacttygaaccagtcgaaacccagaaacagacacgtacattctcttcaatccttggtgtgaagatgatgctgtgtatctggacaatgagaaagaaagagaagagtwtgtcctgaatgacatcggggtaattttttatggagaggtcaatgacatcaagaccagaagctggagctatggtcagtttgaagatggcatcctggacacttgcctgtatgtgatggacagagcacaaatggacctctctggaakagggaatcccatcaaagtcagccgtgtggggtctgcaatggtgaatgccaaagatgacgaaggtgtcctcgttggatcctgggacaatatctrtgcctatggcgtccccccatcggcctggactggaagsgttgacattctattggaataccggagctctgagaatccagtccggtatggccaatgctgggtttttgctggtgtctttaacacatttttacratgccttggaataccmgcaagaattgttaccaattatttctctgcccatgataatgatgccaatttgcaaatggacatcttccyggaagaagatgggaacgtgaattccaaactcaccaaggattcagtgtggaactaccactgctggaatgaagcatggatgacaaggcctgaccttcctgttggatttggaggctggcaagctgtggacagcacccccyaggaaaatagcgatggcatgtatcrgtgtggccccgcctcggttcaagccatcaagcacrgccatgtctgcttccaatttgatgcaccttttgtttttgcagaggtcaacagcgacctcatttacattacagctaagaaagatggcactcatgtggtggaaaatgtggatgccacccacattgggaaattaattgtgaccaaacaaattggaggagayggcatgatggatattactgatacttacaaattccaagaaggtcaagaagaagagagattggccctagaaactgccctgatgtacrgagctaaaaagcccctcaacacagaaggtgtcatgaaatcaaggtccaacgttgacatggactttgaagtggaaaatgctgtgctgggaaaagacttcaagctctccatcaccttccggaavaacagccacaaccgttacaccatcayagcttatctctcagccaacatcaccttctacaccrgggtccygaaggcagarttcaagaaggagacgttcgacrtgacgctggagcccttgtccttcaagaaagaggcggtgcwgatccaagccggcgagtacatgggtcagctgctggaacaagcgtccctgcacttctttgtcacagctcgcatcaatgagaccagggatgttctggccaagcaaaagtccaccgtgctaaccatccctgagatcatcatcaaggtccgtggcactcaggtagttggttctgacatgactgtgacarttsagtttaccaatcctttaaaagaaacccygygaaatgtctgggtacaccyggatggtcctggagtaacaagaccaatgaagaagatgttccgtgaaatccggcccaactccaccgtgcagtgggaagaagtgtgccggccctgggtctctgggcatcggaagctgatagccagcatgagcagtgactccctgagacatgtgtatggcgagctggaygtgcagattcaaagacgaccttccatgtgaatgcacaggaagctgagatgaaccctggcatttggcctcttgtagtcttggctaaggaaattctaacgcaaaaatagctcttgctttgrcttaggtgtgaagacccagacakgactgcagagggcyccagagtggagatcccacatatttcaaaaacatrcttttccaaacccaggctattcggcaaggaagttagtttttaatctctccaccttccaaaragtgctaagcattagctttaattaagctctcatagctcataagagtaacagtcatcatttatcatcacaaatggctacatctccaaatatcagtgggctctcttaccagggagatttgctcaatacctggcctcatttaaaacaagacttcagattccccactcagccttttgggaataatagcacatgatttgggctctagaattccagtcccctttctcrgggtcaggttctaccctccatgtgagaatatttttcccaggactagagcacaacataatttttatttttggcaaagccagaaaaagatctttcattttgcacctgcagccaagcaaatgcctgccaaattttagatttaccwtgttagaagaggtggccccatattaacaaattgcatttgtgggaaacttaaccacctacaaggagataagaaagcaggtgcaacactcaagtctattgaataatgtagttttgtgatgcattttatagaatgtgtcacactgtggcctgatcagcagragccaatatcccttactttaaccctttctgggatgcaatactaggaagtaaagtgaagaatttatctctttagttagtgattatatttcacccatctctcaggaatcatctcctttgcagaatgatgcaggttcaggtcccctttcagagatataataagcccaacaagttgaagaagctggcggatctagtgaccagatatatagaaggactgcagccactgattctctcttgtccttcacatcacccatkttgagacctcagcttggcactcaggtgctgaagggtaatatggactcagscttgcaaatagccagtgctagytctgacccaaccacagaggatgctgacatcatttgtattatgttccaaggctactacagagaaggctgcctgctatgtatttgcaaggctgatttatggtcagaatttccctctgatatgtctagggtgtgatttaggtcagtagactgtgattcttagcaaaaaatgaacagtgataagtatacwgggggcaaaatcagaatggaatgctctggtctatataaccacatttctaagcctttgagactgttcctgagccttcagcactaacctatgagggtgagctggtcccctctatatatacatcatacttaactttaytaagtaatctcacagcatttgccaagtctcccaatatccaattttaaaatgaaatgcattttgctagacagttaaactggcttaacttagtatattattattaattacaatgtaatagaagcttaaaataaagttaaactgattat

SEQ ID NO: 217 - DNA, 2044 bp, Homo sapiens
aagattgcctttgatgtctacacgtcaacagtgaaaggggttccagagaaaaacaaagcctctggtaaaaagggcaagctcatcccaagattgagtatgcacgaagagggagcagaaacaggagatgggtgcctctggaacaaacatgcttatgcaggtcgctacccacaggagaacaagggaacctacatcccagtgcctatagtctcagagttacaaagtggaaagtggggggccaagattgtcatgagagaggacaggtctgtgcggctgtccatccagtcttcccccaaatgtattgtggggaaattccgcatgtatgttgctgtctggactccctatggcgtacttygaaccagtcgaaacccagaaacagacacgtacattctcttcaatccttggtgtgaagggatttctgacttcatggctgcctctgcctctaggagtcctactcacacttgtgctgctgcaagtgagaaacttgaccgtcaccttcaatttcaatgttggcaacaacaacaaaagcagccacacacaacayctgtgaatgcccagaccttaactgcagtttgggatggaggtggtgctcagcttttatataaagggggaagcaagtatgatgctgtgtatctggacaatgagaaagaaagagaagagtwtgtcctgaatgacatcggggtaattttttatggagaggtcaatgacatcaagaccagaagctggagctatggtcagtttgaagatggcatcctggacacttgcctgtatgtgatggacagagcacaaatggacctctctggaakagggaatcccatcaaagtcagccgtgtggggtctgcaatgggctttctcacttacgaagtgggtattgattctttgcaggatcctgtgtgcctggtcatagaggctagaaatcccattcgcaggttgcaaatgccagagcagcggtataggtggcatgtggactctccagaagaaatagcacatagatctcagttcatccccaggatctggcagcaactatgggcagagaatttcccccaaggagatgcagctgcttctgcaaaggctgccgytactgcagataaaggctcgttattcactgtgacacacctacatgtaccacctccatccatatttgctccagtgaatgccaaagatgacgaaggtgtcctcgttggatcctgggacaatatctrtgcctatggcgtccccccatcggcctggactggaagsgttgacattctattggaataccggagctctgagaatccagtccggtatggccaatgctgggtttttgctggtgtctttaacacatttttacratgccttggaataccmgcaagaattgttaccaattatttctctgcccatgataatgatgccaatttgcaaatggacatcttccyggaagaagatgggaacgtgaattccaaactcaccaaggattcagtgtgcaaggatctcaggagctattggcctcatacttacctccctccacaggctctggtcaaacacacccacctcaacctgtcttccccgctcctggttggtttgtggctggggcccctctcctctccaagtcccaatggtccacagtttgtgatgaatcagtttgtccagttaggtctcagtgactcagggtgtcctcttctccatgactcagccaaatcccagcctgccgaaaccagaaatcagccagcagggaggctcagaggaaaagtacaagagggtgtgagaggtgtattctgctcgccacactccagagccaggagtgacaagtttggctctgtctcttgctgtgacccttctcgccttactactgcagaccatcaaggacagactgcttcctggtttgccaccgtaggtcccctgcatgaaggatgtttccttccaagagggagcctcacctcaggggggctacagttttgcacagagcggccccactgttgacgccaacagaggccatggtctgagctccttagctgttcaggagagggmtggggactcaggaacctcagaagggcagagcagggcagag

SEQ ID NO: 218 - DNA, 3328 bp, Homo sapiens
gtcagtcctttcgcrcctcggcggcgcggcatagcccggctcggcctgtaaagcagtctcaagcctgccgcagggagaagatggcggtcgccgtragaactttgcaggaacagctggaaaaggccaaagagagtcttaagaacgtggatgagaacattcgcaagctcaccgggcgggatccgaatgacgtgaggcccatccaagccagattgctggccctttctggtcctggtggaggtagaggacgtggtagtttattactgaggcgtggattctcagatagtggaggaggacccccagccaaacagagagaccttgaaggggcagtcagtaggctgggcggggagcgtcggaccagaagagaatcacgccaggaaagcgacccggaggatgatgatgttaaaaagccagcattgcagtcttcagttgtagctacctccaaagagcgcacacgtagagaccttatccaggatcaaaatatggatgaaaagggaaagcaaaggaaccggcgaatatttggcttgttgatgggtacccttcaaaaatttaaacaagaatccactgttgctactgaaaggcaaaagcggcgccaggaaattgaacaaaaacttgaagttcaggcagaagaagagagaaagcaggttgaaaatgaaaggagagaactgtttgaagagaggcgtgctaaacagacagaactgcggcttttggaacagaaagttgagcttgcgcagctgcaagaagaatggaatgaacataatgccaaaataattaaatatataagaactaagacaaagccccatttgttttatattcctggaagaatgtgtccagctacycaaaaactaatagaagagtcacagagaaaaatgaacgctttatttgaaggtagacgcatcgaatttgcagaacaaataaataaaatggaggctaggcctagaagacaatcaatgaaggaaaaagagcatcaggtggtgcgtaatgaagaacasaaggcggaacaagaagagggtaaggtggctcagcgagaggaagagttggwggagacaggtaaycagcacaatgatgtwgaaatagaggaagcaggagaggaagaggaaaaggaaatagcgattgttcatagtgatgcagagaaagarcaggaggaggargaacaaaaacaggaaatggaggttaagatggaggaggaaactgaggtaagggaaagtgagaagcagcaggatagtcagcctgaagaagttatggatgtgctagagatggttgagaatgtcaaacatgtaattgctgassaggaggtaatggaaactaatcgagttgaaagtgtagaaccttcagaaaatgaagctagcaaagaattggaaccagaaatggaatttgaaattgagccagataaagaatgtaaawccctttctcctgggaaagagaatgtcagtgctttagacatggaaaaggagtctgasgaaaaagaagaaaaagaatctgagccccaacctgagcctgtggctcaacctcagcctcagtctcagccccagcttcagcttcaatcccagtsccawccagtactccagtcccakcctccctctcarcctgaggatttgtcattagctsttttacagccaacaccccaagttactcaggagcawgggcatttactacctgagaggaaggattttcctgtagagtctgtaaaactcactgaggtaccagtagagccagtcttgacagtacatccagagagcaagagcaaaaccaaaactaggagcagaagtagaggtcgagctagaaataaaacaagcaagagtagaagtcgaagcagtagcagtagcagttctagtagcagttcaaccagtagcagcagtggaagtagttccagcagtggaagtagtagcagtcgcagtagttccagtagcagctccagtacaagtggcagcagcagcagagatagtagcagtagyactagtagtagtagtgagagtagaagtcggagtaggggycggggacataatagagatagaaagcacagaaggagcgtggatcggaagagaagggatacttcaggactagaaagaagtcmcaaatcttcaaaaggtggtrgtagtagagatacaaaaggatcaaaggataagaattcccggtccgacagaaagaggtctatatcagagagtagtcgatcaggcaaaagatcttcaagaagtgaaagagaccgaaaatcagayaggaaagacaaaaggcgttaatggaagaagccaggctttcttagccattctttgcagcagaagatttcttgatraaaaaggattacctttccttgtaaagaggatgctgccttaagaattgcatgttgtaaaaaatctttttggaaratacagactgtttgtttaccagacattcttgtactttttgcataattttgtaagagttatttatcaaaattatgtgaggttccaaaatatgtaaaaatgataataataaaaaaagattaacatcccttgtcatcttttttaaatatcctatactcttcagtaagaatctgtatattttaataggcaaatctttaagtctgttcccttctaattctgtatcatacattgcttttgtagaaataaatgtgtgtttatttcattatttttgggatgtcctcgttgacacttgtataataaatatcctctttatcattttcagcttttaacactagatactgcacgtgattagaatgtttttgaaggtttcctcgtttttatttgccttggacagtttttagttgtcagagtcagagctttgcagctttgagggggaacagttctctttaaaatcatttgctattttctattctcccttgttattttaatctaagcattttcccccgtttctcatattttaaccatatgttcggtagataactaaacagtatgatctggttggcattttcttcctgatgatgggagcgtcattcttttgtcttcatggttacttgtgtgatataacatacatctgttaaagaaaatcacttctttctaggggagggaggtagaaaagtatctttcaaacttggtttttgagtttgtgtcttgtcttaactttgtgttggctctaacttaaacatgctgatatgtgttttcaagaattttgtttaaggaagtattgtatggaagtccacaaaatgaaggaagttcatctaggttttaatatgtaagcaagataacacacaagtgtaccaagtgattattaactttgttgttttacaaatttgtatgaacttggagtatctgttggccattactatacatgtgcaaataaatgtggcttagacttgtgtgactgcttaagacta

SEQ ID NO: 219 - DNA, 9626 bp, Homo sapiens
cagcgactcctctggctcccgagaagtggatccggtcgcggccactacgaygccgggagccgccggggtcctcctccttctgctgctctccggaggcctcgggggcgtacaggcgcagcggccgcagcagcagcggcagtcacaggcacatcagcaaagaggtttattccctgctgtcctgaatcttgcttctaatgctcttatyacgaccaatgcaacatgtggagaaaaaggacctgaaatgtactgcaaattggtagaacatgtccctgggcagcctgtgaggaacccgcagtgtcgaatctgcaatcaaaacagcagcaatccaaaccagagmcacccgattacaaatgctattgatggaaagaacacttggtggcagagtcccagtattaagaatggaatcgaataccattatgtgacaattacmctggatttacagcaggtgttccagatcgcgtatgtgattgtgaaggcagctaactccccccggcctggaaactggattttggaacgctctcttgatgatgttgaatacaagccctgrcagtatcatgctgtgacagacacggagtgcctaacgctttacaatatttatccccgcactgggccaccgtcatatgccaaagatgatgaggtcatctgcacttcattttactccaagatacaccccttagaaaatggagagattcacatctctttaatcaatgggagaccaagtgccgatgatccttctccagaactgctagaatttacctccgctcgcyatattcgcctgagatttcagaggatccgcacactgaatgctgacttgatgatgtttgctcacaaagacccaagagaaattgaccccattgtcaccagaagatattactactcggtcaaggatatttcagttggagggatgtgcatctgctatggtcatgccagggcttgtccacttgatccagcgacaaataaatctcgctgtgagtgtgagcataacacatgtggcgatagctgtgatcagtgctgtccaggattccatcagaaaccctggagagctggaacttttctaactaaaactgaatgtgaagcatgcaattgtcatggaaaagctgaagaatgctattatgatgaaaatgttgccagaagaaatctgagtttgaatatacgtggaaagtacattggagggggtgtctgcattaattgtacccaaaacactgctggtataaactgcgagacatgtactgatggcttcttcagacccaaaggggtatctccaaattatccaaggccatgccagccatgtcattgcgatccaattggttccttaaatgaagtctgtgtcaaggatgagaaacatgctcgacgaggtttggcacctggatcctgtcattgcaaaactggttttggaggtgtgagctgtgatcggtgtgccaggggctacactggctacccggactgcaaagcctgtaactgcagtgggttagggagcaaaaatgaggatccttgttttggcccctgtatctgcaaggaaaatgttgaaggaggagactgyagtcgttgcaaatccggcttcttcaatttgcaagaggataattggaaaggctgcgatgagtgtttctgttcaggggtttcaaacagatgtcagagttcctactggacctatggcaaaatacaagatatgagtggctggtatctgactgaccttcctggycgcattcgagtggctccccagcaggacgacttggactcacctcagcagatcagcatcagtaacgcggaggcccggcaagccctgccgcacagctactactggagcgcgccggctccctatctgggaaacaaactcccagcagtaggargacagttgacatttaccatatcatatgaccttgaagaagaggaagaagatacagaacrtgttctccagcttatgattatcttagagggtaatgacttgagcatcagcacagcccaagatgaggtgtacctgsacccatctgaagaacatactaatgtattgttacttaaagaagaatcatttaccatacatggcacacattttccagtccgtagaaaggaatttatgacagtgcttgcgaatttgaagagagtcctcctacaaatcacatacagctttgggatggatgccatcttcaggttgagctctgttaaccttgaatccgctgtctcctatcctactgatggaagcattgcagcagctgtagaagtgtgtcagtgcccaccagggtatactggctcctcttgtgaatcttgttggcctaggcacaggcgagttaacggcactatttttggtggcatctgtgagccatgtcagtgctttggtcatgcggagtcctgtgatgacgtcactggagaatgcctgaactgtaaggatcacacaggtggcccatattgtgataaatgtcttcctggtttctatggcgagcctactaaaggaacctctgaagactgtcaaccctgtgcctgtccactcaatatcccatccaataactttagcccaacgtgccatttagaccggagtcttggattgatctgtgatggatgccctgtcgggtacacaggaccacgctgtgagaggtgtgcagaagrctattttggacaaccctctgtacctggaggatcaygtcagccatgccaatgcaatgacaaccttgacttctccatccctggcagctgtgacagcttgtctggctcctgtctgatatgtaaaccaggtacaacaggccggtactgtgagctctgtgctgatggatattttggagatgcagttgatgcgaagaactgtcagccctgtckctgtaatgccggtggctctttctctgaggtttgccacagtcaractggacagtgtgagtgcagagccaacgttcagggtcagagatgtgacaaatgcaaggctgggacctttggcctacaatcagcaaggggctgtgttccctgmaactgcaattcttttgggtctaagtcattcgactgtgaagagagtggacaatrttggtgcyaacctggagtcacagggaagaaaygtgaccgctgtgcccacggctatttcaacttccaagaaggaggctgcacagcttgtgaatgttctcatctgggtaataattgtgacccaaagactgggygatgcatttgccctcccaataccattggagagaaatgttctaaatgtgcacccaatacctggggccacagcattaccactggttgtaaggcttgtaactgcagcacagtgggatccttggatttccaatgcaatgtaaatacaggccaatgcaactgtcatccaaaattctctggtgcaaaatgtacagagtgcagtcgaggtcactggarctaccctcgctgcaatctctgtgactgcttcctccctgggacagatgccacaacctgtgattcagagactaaaaaatgctcctgtagtgatcaaactgggcagtgcacttgtaagrtgaatgtggaaggcatccactgtgacagatgccggcctggcaaattcggactcgatgccaagaatccacttggctgcagcagctgctattgcttcggcactactacccagtgctctgaarcaaaaggactgatccggacgtgggtgactctgaaggctgagcagaccattctacccctggtagatgaggctctgcagcacrcgaccaccaagggcattgtttttcaacatccagagattgttgcccacatggacctgatgagagaagatctccatttggaacctttttattggaaacttccagaayaatttgaaggaaagaagttgatggcctatgggggcaaactcaagtatgcaatctatttcgaggctcgggaagaaacaggtttctctacatataatcctcaagtgatcattcgaggtgggacacctactcatgctagaattatcgtcaggcatatggctgctcctctgattggccaattgacaaggcatgaaattgaaatgacagagaaagaatggaaatattatggggatgatcctcgagtccatagaactgtgaccygagaagacttcttggatatactatatgatattcattrcattcttatcaaagctacttatggaaatttcatgcgacaaagcaggatttctgaaatctcaatggaggtagctgaacaaggacgtggaacaacaatgactcctccagctgacttgattgaaaaatgtgattgtcccctgggctattctggcctgtcctgtgaggcatgcttgccgggattttatcgactgcgttctcaaccaggtggccgcacccctggaccaaccctgggcacctgtgttccatgtcaatgtaatggacacagcagcctgtgtgaccctgaaacatcgatatgccagaattgtcaacatcacactgctggtgacttctgtgaacgatgtgctcttggatactatggaattgtcaagggattgccaaatgactgtcagcaatgtgcctgccctctgatttcttccagtaacaatttcagcccctcttgtgtcgcagaaggacttgaygactaccgctgcacggcttgtccacggggatatgaaggccagtactgtgaaaggtgtgcccctggctatactggcagtccaggcaaccctggaggctcctgccaagaatgtgagtgtgatccctatggctcactgcctgtgccctgtgaccctgtcacaggattctgmacgtgcygacctggagccacgggaaggaagtgtgacggctgcaagcactggcatgcacgcgagggctgggagtgtgttttttgtggagatgagtgcactggccttcttctcggtgacttggctcgcctggagcagatggtcatgagcatcaacctcactggtccgctgcctgcgccatataaaatgctgtatggtcttgaaaatatgactcaggagctaaagcacttgctgtcacctcagcgggccccagagaggcttattcagctggcagagggcaatctgaatacactcgtgacmgaaatgaacgagctgctgacsagggctaccaaagtgacagcagatggcgagcagaccggacaggatgctgagaggaccaacacaagagcaaagtccctgggagaattcattaaggagcttgcccgggatgcagaagctgtaaatgaaaaagctataaaactaaatgaaactctaggaactygagacgaggcctttgagagaaatttggaagggcttcagaaagagattgaccagatgattaaagaactgaggaggaaaaatctagagacacaaaaggaaattgctgaagatgagttggtagctgcagaagcccttctgaaaaaagtgaagaagctgtttggagagtcccggggggaaaatgaagaaatggagaaggatctccgggaaaaactggctgactacaaaaacaaagttgatgatgcttgggaccttttgagagaagccacagataaaatcagagaagctaatcgcctatttgcagtaaatcagaaaaacatgactgcattggagaaaaagaaggaggctgttgaragcggcaaacgacaaattgagaacactttaaaagarggcaatgacatactcgatgaagccaaccgtcttgcagatgaaatcaactccatcatagactatgttgaagacatccaaactaaattgccacctatgtctgaggagcttaatgataaaatagatgacctctcccaagaaataaaggacaggaagcttgctgagaaggtgtcccaggctgagagccacgcagctcagttgaatgactcatctgctgtccttgatggaatccttgatgaggctaaaaacatctccttcaatgccactgcagccttcaaagcttacagcaatattaaggactatattgatgaagctgagaaagttgccaaagaarccaaagatcttgcacatgaagctacaaaactggcaacaggtcctcggggtttattaaaggaagatgccaaaggctgtcttcagaaaagcttcaggattcttaacgaagccaagaagttagcaaatgatgtaaaagaaaatgaagaccatctaaatggcttaaaaaccaggatagaaaatgctgatgctagaaatggggatctcttgagaactttgaatgacactttgggaaagttatcagctattccaaatgatacagctgctaaactgcaagctgttaaggacaaagccagacaagccaacgacacagctaaagatgtactggcacagattacagagctccaccagaacctcgatggcctgaagaagaattacaataaactagcagacagcgtcgccaaaacraatgctgtggttaaagatccttccaagaacattgccgatgcagatgccactgtcaaaaatttagaacaggaagctgaccggctaatagataaactcaaacccatcaaggaacttgaggataacctaaagaaaaacatctctgagataaaggaattgataaaccaagctcggaaacaagccaattctatcaaagtatctgtgtcttcaggaggtgactgcattcgaacatacaaaccagaaatcaagaaaggaagttacaataatattgttgtcaacgtaaagacagctgttgctgataacctcctcttttatcttggaagtgccaaatttattgactttctggctatagaaatgcgtaaaggcaaagtcagcttcctctgggatgttggatctggagttggacgtgtagagtacccagatttgactattgatgactcatattggtaccgtatcgtagcatcaagaactgggagaaatggaactatttctgtgagagccctggatggacccaaagccagcattgtgcccagcacacaccattcgacgtctcctccagggtacacgattctagatgtggatgcaaatgcaatgctgtttgttggtggcctgactgggaaattaaagaaggctgatgctgtacgtgtgattacattcactggctgcatgggagaaacatactttgacaacaaacctataggtttgtgraatttccgagaaaaagaaggtgactgcaaaggatgcactgtcagtcctcaggtggaagatagtgaggggactattcaatttgatggagaaggttatgcattggtcagccgtcccattcgctggtamcccaacatctccactgtcatgttcaagttcagaacattttcttcgagtgctcttctgatgtatcttgccacacgagacctgagagatttcatgagtgtggagctcactgatgggcacataaaagtcagttacgatctgggctcaggaatggcttccgttgtcagcaatcaaaaccataatgatgggaaatggaaatcattcactctgtcaagaattcaaaaacaagccaatatatcaattgtagatatagatactaatcaggaggagaatatagcaacttcgtcttctggaaacaactttggtcttgacttgaaagcagatgacaaaatatattttggtggcctgccaacgctgagwaacttgagtattcaataggccagaagtaaatctgaagaaatattccggctgcctcaaagatattgaaatttcaagaactccgtacaatatactcagtagtcccgattatgttggtgttaccaaaggatgttccctggagaatgtttacacagttagctttcctaagcctggttttgtggagctctcccctgtgccaattgatgtaggaacagaaatcaacctgtcattcagcaccaagaatgagtccggcatcattcytttgggaagtggagggacaccagcaccacctaggagaaaacgaaggcagactggacaggcctattatgyaatactcctcaacaggggccgtctggaagtgcatctctccacaggggcacgaacaatgaggaaaattgtsatcagaccagagccraatctgtttcatgatggaagagaacattccgttcatgtagagcgaactagaggcatctttrcagttcaagtggatgaaaacagaagatacatgcaaaacctgacagttgaacagcctatcgaagttaaaaagcttttcgttgggggtgctccacctgaatttcaaccttccccactcagaaayattcctccttttgaaggctgcatatggaatcttgttattaactctgtccccatggactttgcaaggcctgtgtccttcaaaaatgctgacattggwcgctgtgcccatcagaaactccgtgaagatgaagatggagcagctccagctgaaatagttatccagcctgagccagttcccaccccagcctttcctacgcccaccccagttctgacacatggtccttgtgctgcagaatcagaaccagctcttttgatagggagcaagcagttcgggctttcaagaaacagtcacattgcaattgcatttgatgacaccaaagttaaaaaccgtctcacaattgagttggaagtaagaaccgaagctgaatccggcttgcttttttacatggctcgcatcaatcatgctgattttgcaacagttcagctgagaaatggattgccctacttcagctatgacttggggagtggggacacccacaccatgatccccaccaaaatcaatgatggccagtggcacaagattaagataatgagaagtaagcaagaaggaattctttatgtagatggggcttccaacagaaccatcagtcccaaaaaagccgacatcctggatgtcgtgggaatgctgtatgttggtgggttacccatcaactacactacccgaagaattggtccagtgacctatagcattgatggctgcgtcaggaatctccacatggcagaggcccctgccgatctggaacaacccacctccagcttccatgttgggacatgttttgcaaatgctcagaggggaacatattttgacggaaccggttttgccaaagcagttggtggattcaaagtgggattggaccttcttgtagaatttgaattccgcacaactacaacgactggagttcttctggggatcagtagtcaaaaaatggatggaatgggtattgaaatgattgatgaaaagttgatgtttcatgtggacaatggtgcrggcagattcactgctgtctatgatgctggggttccagggcatttgtgtgatggacaatggcataaagtcrctgccaacaagatcaaacaccgcattgagctcacagtygatgggaaccaggtggaagcccaaagcccaaacccagcatctacatcagctgacacaaatgaccctgtgtttgttggaggcttcccagatgacctcaagcagtttggcctaacaaccagtattccgttcygaggttgcatcagatccctgaagctcaccaaaggcacaggcaagccactggaggttaattttgccaaggccctggaactgaggggcgttcaacctgtatcatgcccagccaactaataaaaataagtgtaaccccaggaagagtctgtcaaaacaagtatatcaagtaaaacmaacaaatatattttacctatatatgttaattaaactaatttgtgcatgtacatagaattcyttctgtattcagatggtgctaattcagactccagactgaattttaattcaagttctttctcaagtctataaataatattaaactgattatttcattct

SEQ ID NO: 220 - DNA, 9616 bp, Homo sapiens
cagcgactcctctggctcccgagaagtggatccggtcgcggccactacgaygccgggagccgccggggtcctcctccttctgctgctctccggaggcctcgggggcgtacaggcgcagcggccgcagcagcagcggcagtcacaggcacatcagcaaagaggtttattccctgctgtcctgaatcttgcttctaatgctcttatyacgaccaatgcaacatgtggagaaaaaggacctgaaatgtactgcaaattggtagaacatgtccctgggcagcctgtgaggaacccgcagtgtcgaatctgcaatcaaaacagcagcaatccaaaccagagmcacccgattacaaatgctattgatggaaagaacacttggtggcagagtcccagtattaagaatggaatcgaataccattatgtgacaattacmctggatttacagcaggtgttccagatcgcgtatgtgattgtgaaggcagctaactccccccggcctggaaactggattttggaacgctctcttgatgatgttgaatacaagccctgrcagtatcatgctgtgacagacacggagtgcctaacgctttacaatatttatccccgcactgggccaccgtcatatgccaaagatgatgaggtcatctgcacttcattttactccaagatacaccccttagaaaatggagagattcacatctctttaatcaatgggagaccaagtgccgatgatccttctccagaactgctagaatttacctccgctcgcyatattcgcctgagatttcagaggatccgcacactgaatgctgacttgatgatgtttgctcacaaagacccaagagaaattgaccccattgtcaccagaagatattactactcggtcaaggatatttcagttggagggatgtgcatctgctatggtcatgccagggcttgtccacttgatccagcgacaaataaatctcgctgtgagtgtgagcataacacatgtggcgatagctgtgatcagtgctgtccaggattccatcagaaaccctggagagctggaacttttctaactaaaactgaatgtgaagcatgcaattgtcatggaaaagctgaagaatgctattatgatgaaaatgttgccagaagaaatctgagtttgaatatacgtggaaagtacattggagggggtgtctgcattaattgtacccaaaacactgctggtataaactgcgagacatgtactgatggcttcttcagacccaaaggggtatctccaaattatccaaggccatgccagccatgtcattgcgatccaattggttccttaaatgaagtctgtgtcaaggatgagaaacatgctcgacgaggtttggcacctggatcctgtcattgcaaaactggttttggaggtgtgagctgtgatcggtgtgccaggggctacactggctacccggactgcaaagcctgtaactgcagtgggttagggagcaaaaatgaggatccttgttttggcccctgtatctgcaaggaaaatgttgaaggaggagactgyagtcgttgcaaatccggcttcttcaatttgcaagaggataattggaaaggctgcgatgagtgtttctgttcaggggtttcaaacagatgtcagagttcctactggacctatggcaaaatacaagatatgagtggctggtatctgactgaccttcctggycgcattcgagtggctccccagcaggacgacttggactcacctcagcagatcagcatcagtaacgcggaggcccggcaagccctgccgcacagctactactggagcgcgccggctccctatctgggaaacaaactcccagcagtaggargacagttgacatttaccatatcatatgaccttgaagaagaggaagaagatacagaacrtgttctccagcttatgattatcttagagggtaatgacttgagcatcagcacagcccaagatgaggtgtacctgsacccatctgaagaacatactaatgtattgttacttaaagaagaatcatttaccatacatggcacacattttccagtccgtagaaaggaatttatgacagtgcttgcgaatttgaagagagtcctcctacaaatcacatacagctttgggatggatgccatcttcaggttgagctctgttaaccttgaatccgctgtctcctatcctactgatggaagcattgcagcagctgtagaagtgtgtcagtgcccaccagggtatactggctcctcttgtgaatcttgttggcctaggcacaggcgagttaacggcactatttttggtggcatctgtgagccatgtcagtgctttggtcatgcggagtcctgtgatgacgtcactggagaatgcctgaactgtaaggatcacacaggtggcccatattgtgataaatgtcttcctggtttctatggcgagcctactaaaggaacctctgaagactgtcaaccctgtgcctgtccactcaatatcccatccaataactttagcccaacgtgccatttagaccggagtcttggattgatctgtgatggatgccctgtcgggtacacaggaccacgctgtgagaggtgtgcagaagrctattttggacaaccctctgtacctggaggatcaygtcagccatgccaatgcaatgacaaccttgacttctccatccctggcagctgtgacagcttgtctggctcctgtctgatatgtaaaccaggtacaacaggccggtactgtgagctctgtgctgatggatattttggagatgcagttgatgcgaagaactgtcagccctgtckctgtaatgccggtggctctttctctgaggtttgccacagtcaractggacagtgtgagtgcagagccaacgttcagggtcagagatgtgacaaatgcaaggctgggacctttggcctacaatcagcaaggggctgtgttccctgmaactgcaattcttttgggtctaagtcattcgactgtgaagagagtggacaatrttggtgcyaacctggagtcacagggaagaaaygtgaccgctgtgcccacggctatttcaacttccaagaaggaggctgcacagcttgtgaatgttctcatctgggtaataattgtgacccaaagactgggygatgcatttgccctcccaataccattggagagaaatgttctaaatgtgcacccaatacctggggccacagcattaccactggttgtaaggcttgtaactgcagcacagtgggatccttggatttccaatgcaatgtaaatacaggccaatgcaactgtcatccaaaattctctggtgcaaaatgtacagagtgcagtcgaggtcactggarctaccctcgctgcaatctctgtgactgcttcctccctgggacagatgccacaacctgtgattcagagactaaaaaatgctcctgtagtgatcaaactgggcagtgcacttgtaagrtgaatgtggaaggcatccactgtgacagatgccggcctggcaaattcggactcgatgccaagaatccacttggctgcagcagctgctattgcttcggcactactacccagtgctctgaarcaaaaggactgatccggacgtgggtgactctgaaggctgagcagaccattctacccctggtagatgaggctctgcagcacrcgaccaccaagggcattgtttttcaacatccagagattgttgcccacatggacctgatgagagaagatctccatttggaacctttttattggaaacttccagaayaatttgaaggaaagaagttgatggcctatgggggcaaactcaagtatgcaatctatttcgaggctcgggaagaaacaggtttctctacatataatcctcaagtgatcattcgaggtgggacacctactcatgctagaattatcgtcaggcatatggctgctcctctgattggccaattgacaaggcatgaaattgaaatgacagagaaagaatggaaatattatggggatgatcctcgagtccatagaactgtgaccygagaagacttcttggatatactatatgatattcattrcattcttatcaaagctacttatggaaatttcatgcgacaaagcaggatttctgaaatctcaatggaggtagctgaacaaggacgtggaacaacaatgactcctccagctgacttgattgaaaaatgtgattgtcccctgggctattctggcctgtcctgtgaggcatgcttgccgggattttatcgactgcgttctcaaccaggtggccgcacccctggaccaaccctgggcacctgtgttccatgtcaatgtaatggacacagcagcctgtgtgaccctgaaacatcgatatgccagaattgtcaacatcacactgctggtgacttctgtgaacgatgtgctcttggatactatggaattgtcaagggattgccaaatgactgtcagcaatgtgcctgccctctgatttcttccagtaacaatttcagcccctcttgtgtcgcagaaggacttgaygactaccgctgcacggcttgtccacggggatatgaaggccagtactgtgaaaggtgtgcccctggctatactggcagtccaggcaaccctggaggctcctgccaagaatgtgagtgtgatccctatggctcactgcctgtgccctgtgaccctgtcacaggattctgmacgtgcygacctggagccacgggaaggaagtgtgacggctgcaagcactggcatgcacgcgagggctgggagtgtgttttttgtggagatgagtgcactggccttcttctcggtgacttggctcgcctggagcagatggtcatgagcatcaacctcactggtccgctgcctgcgccatataaaatgctgtatggtcttgaaaatatgactcaggagctaaagcacttgctgtcacctcagcgggccccagagaggcttattcagctggcagagggcaatctgaatacactcgtgacmgaaatgaacgagctgctgacsagggctaccaaagtgacagcagatggcgagcagaccggacaggatgctgagaggaccaacacaagagcaaagtccctgggagaattcattaaggagcttgcccgggatgcagaagctgtaaatgaaaaagctataaaactaaatgaaactctaggaactygagacgaggcctttgagagaaatttggaagggcttcagaaagagattgaccagatgattaaagaactgaggaggaaaaatctagagacacaaaaggaaattgctgaagatgagttggtagctgcagaagcccttctgaaaaaagtgaagaagctgtttggagagtcccggggggaaaatgaagaaatggagaaggatctccgggaaaaactggctgactacaaaaacaaagttgatgatgcttgggaccttttgagagaagccacagataaaatcagagaagctaatcgcctatttgcagtaaatcagaaaaacatgactgcattggagaaaaagaaggaggctgttgaragcggcaaacgacaaattgagaacactttaaaagarggcaatgacatactcgatgaagccaaccgtcttgcagatgaaatcaactccatcatagactatgttgaagacatccaaactaaattgccacctatgtctgaggagcttaatgataaaatagatgacctctcccaagaaataaaggacaggaagcttgctgagaaggtgtcccaggctgagagccacgcagctcagttgaatgactcatctgctgtccttgatggaatccttgatgaggctaaaaacatctccttcaatgccactgcagccttcaaagcttacagcaatattaaggactatattgatgaagctgagaaagttgccaaagaarccaaagatcttgcacatgaagctacaaaactggcaacaggtcctcggggtttattaaaggaagatgccaaaggctgtcttcagaaaagcttcaggattcttaacgaagccaagaagttagcaaatgatgtaaaagaaaatgaagaccatctaaatggcttaaaaaccaggatagaaaatgctgatgctagaaatggggatctcttgagaactttgaatgacactttgggaaagttatcagctattccaaatgatacagctgctaaactgcaagctgttaaggacaaagccagacaagccaacgacacagctaaagatgtactggcacagattacagagctccaccagaacctcgatggcctgaagaagaattacaataaactagcagacagcgtcgccaaaacraatgctgtggttaaagatccttccaagaacattgccgatgcagatgccactgtcaaaaatttagaacaggaagctgaccggctaatagataaactcaaacccatcaaggaacttgaggataacctaaagaaaaacatctctgagataaaggaattgataaaccaagctcggaaacaagccaattctatcaaagtatctgtgtcttcaggaggtgactgcattcgaacatacaaaccagaaatcaagaaaggaagttacaataatattgttgtcaacgtaaagacagctgttgctgataacctcctcttttatcttggaagtgccaaatttattgactttctggctatagaaatgcgtaaaggcaaagtcagcttcctctgggatgttggatctggagttggacgtgtagagtacccagatttgactattgatgactcatattggtaccgtatcgtagcatcaagaactgggagaaatggaactatttctgtgagagccctggatggacccaaagccagcattgtgcccagcacacaccattcgacgtctcctccagggtacacgattctagatgtggatgcaaatgcaatgctgtttgttggtggcctgactgggaaattaaagaaggctgatgctgtacgtgtgattacattcactggctgcatgggagaaacatactttgacaacaaacctataggtttgtgraatttccgagaaaaagaaggtgactgcaaaggatgcactgtcagtcctcaggtggaagatagtgaggggactattcaatttgatggagaaggttatgcattggtcagccgtcccattcgctggtamcccaacatctccactgtcatgttcaagttcagaacattttcttcgagtgctcttctgatgtatcttgccacacgagacctgagagatttcatgagtgtggagctcactgatgggcacataaaagtcagttacgatctgggctcaggaatggcttccgttgtcagcaatcaaaaccataatgatgggaaatggaaatcattcactctgtcaagaattcaaaaacaagccaatatatcaattgtagatatagatactaatcaggaggagaatatagcaacttcgtcttctggaaacaactttggtcttgacttgaaagcagatgacaaaatatattttggtggcctgccaacgctgagwaacttgaggccagaagtaaatctgaagaaatattccggctgcctcaaagatattgaaatttcaagaactccgtacaatatactcagtagtcccgattatgttggtgttaccaaaggatgttccctggagaatgtttacacagttagctttcctaagcctggttttgtggagctctcccctgtgccaattgatgtaggaacagaaatcaacctgtcattcagcaccaagaatgagtccggcatcattcytttgggaagtggagggacaccagcaccacctaggagaaaacgaaggcagactggacaggcctattatgyaatactcctcaacaggggccgtctggaagtgcatctctccacaggggcacgaacaatgaggaaaattgtsatcagaccagagccraatctgtttcatgatggaagagaacattccgttcatgtagagcgaactagaggcatctttrcagttcaagtggatgaaaacagaagatacatgcaaaacctgacagttgaacagcctatcgaagttaaaaagcttttcgttgggggtgctccacctgaatttcaaccttccccactcagaaayattcctccttttgaaggctgcatatggaatcttgttattaactctgtccccatggactttgcaaggcctgtgtccttcaaaaatgctgacattggwcgctgtgcccatcagaaactccgtgaagatgaagatggagcagctccagctgaaatagttatccagcctgagccagttcccaccccagcctttcctacgcccaccccagttctgacacatggtccttgtgctgcagaatcagaaccagctcttttgatagggagcaagcagttcgggctttcaagaaacagtcacattgcaattgcatttgatgacaccaaagttaaaaaccgtctcacaattgagttggaagtaagaaccgaagctgaatccggcttgcttttttacatggctcgcatcaatcatgctgattttgcaacagttcagctgagaaatggattgccctacttcagctatgacttggggagtggggacacccacaccatgatccccaccaaaatcaatgatggccagtggcacaagattaagataatgagaagtaagcaagaaggaattctttatgtagatggggcttccaacagaaccatcagtcccaaaaaagccgacatcctggatgtcgtgggaatgctgtatgttggtgggttacccatcaactacactacccgaagaattggtccagtgacctatagcattgatggctgcgtcaggaatctccacatggcagaggcccctgccgatctggaacaacccacctccagcttccatgttgggacatgttttgcaaatgctcagaggggaacatattttgacggaaccggttttgccaaagcagttggtggattcaaagtgggattggaccttcttgtagaatttgaattccgcacaactacaacgactggagttcttctggggatcagtagtcaaaaaatggatggaatgggtattgaaatgattgatgaaaagttgatgtttcatgtggacaatggtgcrggcagattcactgctgtctatgatgctggggttccagggcatttgtgtgatggacaatggcataaagtcrctgccaacaagatcaaacaccgcattgagctcacagtygatgggaaccaggtggaagcccaaagcccaaacccagcatctacatcagctgacacaaatgaccctgtgtttgttggaggcttcccagatgacctcaagcagtttggcctaacaaccagtattccgttcygaggttgcatcagatccctgaagctcaccaaaggcacaggcaagccactggaggttaattttgccaaggccctggaactgaggggcgttcaacctgtatcatgcccagccaactaataaaaataagtgtaaccccaggaagagtctgtcaaaacaagtatatcaagtaaaacmaacaaatatattttacctatatatgttaattaaactaatttgtgcatgtacatagaattcyttctgtattcagatggtgctaattcagactccagactgaattttaattcaagttctttctcaagtctataaataatattaaactgattatttcattct

SEQ ID NO: 221 - DNA, 9636 bp, Homo sapiens
cagcgactcctctggctcccgagaagtggatccggtcgcggccactacgaygccgggagccgccggggtcctcctccttctgctgctctccggaggcctcgggggcgtacaggcgcagcggccgcagcagcagcggcagtcacaggcacatcagcaaagaggtttattccctgctgtcctgaatcttgcttctaatgctcttatyacgaccaatgcaacatgtggagaaaaaggacctgaaatgtactgcaaattggtagaacatgtccctgggcagcctgtgaggaacccgcagtgtcgaatctgcaatcaaaacagcagcaatccaaaccagagmcacccgattacaaatgctattgatggaaagaacacttggtggcagagtcccagtattaagaatggaatcgaataccattatgtgacaattacmctggatttacagcaggtgttccagatcgcgtatgtgattgtgaaggcagctaactccccccggcctggaaactggattttggaacgctctcttgatgatgttgaatacaagccctgrcagtatcatgctgtgacagacacggagtgcctaacgctttacaatatttatccccgcactgggccaccgtcatatgccaaagatgatgaggtcatctgcacttcattttactccaagatacaccccttagaaaatggagagattcacatctctttaatcaatgggagaccaagtgccgatgatccttctccagaactgctagaatttacctccgctcgcyatattcgcctgagatttcagaggatccgcacactgaatgctgacttgatgatgtttgctcacaaagacccaagagaaattgaccccattgtcaccagaagatattactactcggtcaaggatatttcagttggagggatgtgcatctgctatggtcatgccagggcttgtccacttgatccagcgacaaataaatctcgctgtgagtgtgagcataacacatgtggcgatagctgtgatcagtgctgtccaggattccatcagaaaccctggagagctggaacttttctaactaaaactgaatgtgaagcatgcaattgtcatggaaaagctgaagaatgctattatgatgaaaatgttgccagaagaaatctgagtttgaatatacgtggaaagtacattggagggggtgtctgcattaattgtacccaaaacactgctggtataaactgcgagacatgtactgatggcttcttcagacccaaaggggtatctccaaattatccaaggccatgccagccatgtcattgcgatccaattggttccttaaatgaagtctgtgtcaaggatgagaaacatgctcgacgaggtttggcacctggatcctgtcattgcaaaactggttttggaggtgtgagctgtgatcggtgtgccaggggctacactggctacccggactgcaaagcctgtaactgcagtgggttagggagcaaaaatgaggatccttgttttggcccctgtatctgcaaggaaaatgttgaaggaggagactgyagtcgttgcaaatccggcttcttcaatttgcaagaggataattggaaaggctgcgatgagtgtttctgttcaggggtttcaaacagatgtcagagttcctactggacctatggcaaaatacaagatatgagtggctggtatctgactgaccttcctggycgcattcgagtggctccccagcaggacgacttggactcacctcagcagatcagcatcagtaacgcggaggcccggcaagccctgccgcacagctactactggagcgcgccggctccctatctgggaaacaaactcccagcagtaggargacagttgacatttaccatatcatatgaccttgaagaagaggaagaagatacagaacrtgttctccagcttatgattatcttagagggtaatgacttgagcatcagcacagcccaagatgaggtgtacctgsacccatctgaagaacatactaatgtattgttacttaaagaagaatcatttaccatacatggcacacattttccagtccgtagaaaggaatttatgacagtgcttgcgaatttgaagagagtcctcctacaaatcacatacagctttgggatggatgccatcttcaggttgagctctgttaaccttgaatccgctgtctcctatcctactgatggaagcattgcagcagctgtagaagtgtgtcagtgcccaccagggtatactggctcctcttgtgaatcttgttggcctaggcacaggcgagttaacggcactatttttggtggcatctgtgagccatgtcagtgctttggtcatgcggagtcctgtgatgacgtcactggagaatgcctgaactgtaaggatcacacaggtggcccatattgtgataaatgtcttcctggtttctatggcgagcctactaaaggaacctctgaagactgtcaaccctgtgcctgtccactcaatatcccatccaataactttagcccaacgtgccatttagaccggagtcttggattgatctgtgatggatgccctgtcgggtacacaggaccacgctgtgagaggtgtgcagaagrctattttggacaaccctctgtacctggaggatcaygtcagccatgccaatgcaatgacaaccttgacttctccatccctggcagctgtgacagcttgtctggctcctgtctgatatgtaaaccaggtacaacaggccggtactgtgagctctgtgctgatggatattttggagatgcagttgatgcgaagaactgtcagccctgtckctgtaatgccggtggctctttctctgaggtttgccacagtcaractggacagtgtgagtgcagagccaacgttcagggtcagagatgtgacaaatgcaaggctgggacctttggcctacaatcagcaaggggctgtgttccctgmaactgcaattcttttgggtctaagtcattcgactgtgaagagagtggacaatrttggtgcyaacctggagtcacagggaagaaaygtgaccgctgtgcccacggctatttcaacttccaagaaggaggctgcacagcttgtgaatgttctcatctgggtaataattgtgacccaaagactgggygatgcatttgccctcccaataccattggagagaaatgttctaaatgtgcacccaatacctggggccacagcattaccactggttgtaaggcttgtaactgcagcacagtgggatccttggatttccaatgcaatgtaaatacaggccaatgcaactgtcatccaaaattctctggtgcaaaatgtacagagtgcagtcgaggtcactggarctaccctcgctgcaatctctgtgactgcttcctccctgggacagatgccacaacctgtgattcagagactaaaaaatgctcctgtagtgatcaaactgggcagtgcacttgtaagrtgaatgtggaaggcatccactgtgacagatgccggcctggcaaattcggactcgatgccaagaatccacttggctgcagcagctgctattgcttcggcactactacccagtgctctgaarcaaaaggactgatccggacgtgggtgactctgaaggctgagcagaccattctacccctggtagatgaggctctgcagcacrcgaccaccaagggcattgtttttcaacatccagagattgttgcccacatggacctgatgagagaagatctccatttggaacctttttattggaaacttccagaayaatttgaaggaaagaagttgatggcctatgggggcaaactcaagtatgcaatctatttcgaggctcgggaagaaacaggtttctctacatataatcctcaagtgatcattcgaggtgggacacctactcatgctagaattatcgtcaggcatatggctgctcctctgattggccaattgacaaggcatgaaattgaaatgacagagaaagaatggaaatattatggggatgatcctcgagtccatagaactgtgaccygagaagacttcttggatatactatatgatattcattrcattcttatcaaagctacttatggaaatttcatgcgacaaagcaggatttctgaaatctcaatggaggtagctgaacaaggacgtggaacaacaatgactcctccagctgacttgattgaaaaatgtgattgtcccctgggctattctggcctgtcctgtgaggcatgcttgccgggattttatcgactgcgttctcaaccaggtggccgcacccctggaccaaccctgggcacctgtgttccatgtcaatgtaatggacacagcagcctgtgtgaccctgaaacatcgatatgccagaattgtcaacatcacactgctggtgacttctgtgaacgatgtgctcttggatactatggaattgtcaagggattgccaaatgactgtcagcaatgtgcctgccctctgatttcttccagtaacaatttcagcccctcttgtgtcgcagaaggacttgaygactaccgctgcacggcttgtccacggggatatgaaggccagtactgtgaaaggtgtgcccctggctatactggcagtccaggcaaccctggaggctcctgccaagaatgtgagtgtgatccctatggctcactgcctgtgccctgtgaccctgtcacaggattctgmacgtgcygacctggagccacgggaaggaagtgtgacggctgcaagcactggcatgcacgcgagggctgggagtgtgttttttgtggagatgagtgcactggccttcttctcggtgacttggctcgcctggagcagatggtcatgagcatcaacctcactggtccgctgcctgcgccatataaaatgctgtatggtcttgaaaatatgactcaggagctaaagcacttgctgtcacctcagcgggccccagagaggcttattcagctggcagagggcaatctgaatacactcgtgacmgaaatgaacgagctgctgacsagggctaccaaagtgacagcagatggcgagcagaccggacaggatgctgagaggaccaacacaagagcaaagtccctgggagaattcattaaggagcttgcccgggatgcagaagctgtaaatgaaaaagctataaaactaaatgaaactctaggaactygagacgaggcctttgagagaaatttggaagggcttcagaaagagattgaccagatgattaaagaactgaggaggaaaaatctagagacacaaaaggaaattgctgaagatgagttggtagctgcagaagcccttctgaaaaaagtgaagaagctgtttggagagtcccggggggaaaatgaagaaatggagaaggatctccgggaaaaactggctgactacaaaaacaaagttgatgatgcttgggaccttttgagagaagccacagataaaatcagagaagctaatcgcctatttgcagtaaatcagaaaaacatgactgcattggagaaaaagaaggaggctgttgaragcggcaaacgacaaattgagaacactttaaaagarggcaatgacatactcgatgaagccaaccgtcttgcagatgaaatcaactccatcatagactatgttgaagacatccaaactaaattgccacctatgtctgaggagcttaatgataaaatagatgacctctcccaagaaataaaggacaggaagcttgctgagaaggtgtcccaggctgagagccacgcagctcagttgaatgactcatctgctgtccttgatggaatccttgatgaggctaaaaacatctccttcaatgccactgcagccttcaaagcttacagcaatattaaggactatattgatgaagctgagaaagttgccaaagaarccaaagatcttgcacatgaagctacaaaactggcaacaggtcctcggggtttattaaaggaagatgccaaaggctgtcttcagaaaagcttcaggattcttaacgaagccaagaagttagcaaatgatgtaaaagaaaatgaagaccatctaaatggcttaaaaaccaggatagaaaatgctgatgctagaaatggggatctcttgagaactttgaatgacactttgggaaagttatcagctattccaaatgatacagctgctaaactgcaagctgttaaggacaaagccagacaagccaacgacacagctaaagatgtactggcacagattacagagctccaccagaacctcgatggcctgaagaagaattacaataaactagcagacagcgtcgccaaaacraatgctgtggttaaagatccttccaagaacattctatgcagttgccgatgcagatgccactgtcaaaaatttagaacaggaagctgaccggctaatagataaactcaaacccatcaaggaacttgaggataacctaaagaaaaacatctctgagataaaggaattgataaaccaagctcggaaacaagccaattctatcaaagtatctgtgtcttcaggaggtgactgcattcgaacatacaaaccagaaatcaagaaaggaagttacaataatattgttgtcaacgtaaagacagctgttgctgataacctcctcttttatcttggaagtgccaaatttattgactttctggctatagaaatgcgtaaaggcaaagtcagcttcctctgggatgttggatctggagttggacgtgtagagtacccagatttgactattgatgactcatattggtaccgtatcgtagcatcaagaactgggagaaatggaactatttctgtgagagccctggatggacccaaagccagcattgtgcccagcacacaccattcgacgtctcctccagggtacacgattctagatgtggatgcaaatgcaatgctgtttgttggtggcctgactgggaaattaaagaaggctgatgctgtacgtgtgattacattcactggctgcatgggagaaacatactttgacaacaaacctataggtttgtgraatttccgagaaaaagaaggtgactgcaaaggatgcactgtcagtcctcaggtggaagatagtgaggggactattcaatttgatggagaaggttatgcattggtcagccgtcccattcgctggtamcccaacatctccactgtcatgttcaagttcagaacattttcttcgagtgctcttctgatgtatcttgccacacgagacctgagagatttcatgagtgtggagctcactgatgggcacataaaagtcagttacgatctgggctcaggaatggcttccgttgtcagcaatcaaaaccataatgatgggaaatggaaatcattcactctgtcaagaattcaaaaacaagccaatatatcaattgtagatatagatactaatcaggaggagaatatagcaacttcgtcttctggaaacaactttggtcttgacttgaaagcagatgacaaaatatattttggtggcctgccaacgctgagwaacttgagtattcaataggccagaagtaaatctgaagaaatattccggctgcctcaaagatattgaaatttcaagaactccgtacaatatactcagtagtcccgattatgttggtgttaccaaaggatgttccctggagaatgtttacacagttagctttcctaagcctggttttgtggagctctcccctgtgccaattgatgtaggaacagaaatcaacctgtcattcagcaccaagaatgagtccggcatcattcytttgggaagtggagggacaccagcaccacctaggagaaaacgaaggcagactggacaggcctattatgyaatactcctcaacaggggccgtctggaagtgcatctctccacaggggcacgaacaatgaggaaaattgtsatcagaccagagccraatctgtttcatgatggaagagaacattccgttcatgtagagcgaactagaggcatctttrcagttcaagtggatgaaaacagaagatacatgcaaaacctgacagttgaacagcctatcgaagttaaaaagcttttcgttgggggtgctccacctgaatttcaaccttccccactcagaaayattcctccttttgaaggctgcatatggaatcttgttattaactctgtccccatggactttgcaaggcctgtgtccttcaaaaatgctgacattggwcgctgtgcccatcagaaactccgtgaagatgaagatggagcagctccagctgaaatagttatccagcctgagccagttcccaccccagcctttcctacgcccaccccagttctgacacatggtccttgtgctgcagaatcagaaccagctcttttgatagggagcaagcagttcgggctttcaagaaacagtcacattgcaattgcatttgatgacaccaaagttaaaaaccgtctcacaattgagttggaagtaagaaccgaagctgaatccggcttgcttttttacatggctcgcatcaatcatgctgattttgcaacagttcagctgagaaatggattgccctacttcagctatgacttggggagtggggacacccacaccatgatccccaccaaaatcaatgatggccagtggcacaagattaagataatgagaagtaagcaagaaggaattctttatgtagatggggcttccaacagaaccatcagtcccaaaaaagccgacatcctggatgtcgtgggaatgctgtatgttggtgggttacccatcaactacactacccgaagaattggtccagtgacctatagcattgatggctgcgtcaggaatctccacatggcagaggcccctgccgatctggaacaacccacctccagcttccatgttgggacatgttttgcaaatgctcagaggggaacatattttgacggaaccggttttgccaaagcagttggtggattcaaagtgggattggaccttcttgtagaatttgaattccgcacaactacaacgactggagttcttctggggatcagtagtcaaaaaatggatggaatgggtattgaaatgattgatgaaaagttgatgtttcatgtggacaatggtgcrggcagattcactgctgtctatgatgctggggttccagggcatttgtgtgatggacaatggcataaagtcrctgccaacaagatcaaacaccgcattgagctcacagtygatgggaaccaggtggaagcccaaagcccaaacccagcatctacatcagctgacacaaatgaccctgtgtttgttggaggcttcccagatgacctcaagcagtttggcctaacaaccagtattccgttcygaggttgcatcagatccctgaagctcaccaaaggcacaggcaagccactggaggttaattttgccaaggccctggaactgaggggcgttcaacctgtatcatgcccagccaactaataaaaataagtgtaaccccaggaagagtctgtcaaaacaagtatatcaagtaaaacmaacaaatatattttacctatatatgttaattaaactaatttgtgcatgtacatagaattcyttctgtattcagatggtgctaattcagactccagactgaattttaattcaagttctttctcaagtctataaataatattaaactgattatttcattct

SEQ ID NO: 222 - DNA, 6633 bp, Homo sapiens
  misc_feature (1)...(6633): n = A,T,C or G, or insertion/deletion polymorphism (see Tables 1-2)
ttctccccgccccccagttgttgtcgaagtctgggggttgggactggaccccctgattgcgtaagagcaaaaagcgaaggcgcaatctggacactgggagattcggagcgcagggagtttgagagaaacttttattttgaagagaccaaggttgagggggggcttatttcctgacagctatttacttagagcaaatgattagttttagaaggatggactataacattgaatcaattacaaaacgcggtttttgagcccattactgttggagctacagggagagaaacagaggaggagactgcaagagatcattggaggccgtgggcacgctctttactccatgtgtgggacattcattgcggaataacatcggaggagaagtttcccagagctatggggacttcccatccggcgttcctggtcttaggctgtcttctcacagggctgagcctaatcctctgccagctttcattaccctctatccttccaaatgaaaatgaaaaggttgtgcagctgaattcatccttttctctgagatgctttggggagagtgaagtgagctggcagtaccccatgtctgaagaagagagctcygatgtggaaatcagaaatgaagaaaacaacagcgrcctttttgtgacggtcttggaagtgagcagtgcctcggcggcccacacagggttgtacacttgctattacaaccacactcagacagaagagaatgagcttgaaggcaggcacatttacatctatgtgccagacccagatgtagcctttgtacctctaggaatgacggattatttagtcatcgtggaggatgatgattctgccattataccttgtcgcacaactgatcccgagactcctgtaaccttacacaacagtgagggggtggtacctgcctcctacgacagcagacagggctttaatgggaccttcactgtagggccctatatctgtgaggccaccgtcaaaggaaagaagttccagaccatcccatttaaygtttatgctttaaaagcaacatcagagctggatctagaaatggaagctcttaaaaccgtgtataagtcaggggaaacgattgtggtcacctgtgctgtttttaacaatgaggtggttgaccttcaatggacttaccctggagaagtgaaaggcaaaggcatcacaatgctggaagaaatcaaagtcccatccatcaaattggtgtacactttgacggtccccgaggccacggtgaaagacagtggagattacgaatgtgctgcccgccaggctaccagggaggtcaaagaaatgaagaaagtcactatttctgtccatgagaaaggkttcattgaaatcaaacccaccttcagccagttggaagctgtcaacctgcatgaagtcaaacattttgttgtagaggtgcgggcctacccacctcccaggatatcctggctgaaaaacaatctgactctgattgaaaatctcactgagatcaccactgatgtggaaaagattcaggaaataagstatcgaagcaaattaaagctgatccgtgctaaggaagaagacagtggccattatactattgtagctcaaaatgaagatgctgtgaagagctatacttttgaactgttaactcaagttccttcatccattctggacttggtcgatgatcaccatggctyaactgggggacagacggtgaggtgcacagctgaaggcacgccgcttcctgatattgagtggatgatatgcaaagatattaagaaatgtaataatgaaacttcctggactattttggccaacaatgtctcaaacatcatcacggagatccacycccgagacaggagtaccgtggagggccgtgtgactttcgccaaagtggaggagaccatcgccgtgcgatgcctggctaagaatctccttggagctgagaaccgagagctgaagctggtggctcccaccctgcgttctgaactcacggtggctgctgcagtcctggtgctgttggtgattgtgatcatctcacttattgtcctggttgtcatttggaaacagaaaccgaggtatgaaattcgctggagggtcattgaatcaatcagcccrgatggacatgaatatatttatgtggacccgatgcagctgccttatgactcaagatgggagtttccaagagatggactagtgcttggtcgggtcttggggtctggagcgtttgggaaggtggttgaaggaacagcctatggattaagccggtcccaacctgtcatgaaagttgcagtgaagatgctaaaacccacggccagatccagtgaaaaacaagctctcatgtctgaactgaagataatgactcacctggggccacatttgaacattgtaaacttgctgggagcctgcaccaagtcaggccccatttacatcatcacagagtattgcttctatggagatttggtcaactatttgcataagaatagggatagcttcctgagccaccacccagagaagccaaagaaagagctggatatctttggattgaaccctgctgatgaaagcacacggagctatgttattttatcttttgaaaacaatggtgactacatggacatgaagcaggctgatactacacagtatgtcyccatgctagaaaggaaagaggtttctaaatattccgacatccagagatcactctatgatcgtccagcctcatrtaagaagaaatctatgttagactcagaagtcaaaaacctcctttcagatgataactcagaaggccttactttattggatttgttgagcttcacctatcaagttgcccgaggaatggagtttttggcttcaaaaaattgtgtccaccgtgatctggctgctcgcaacgtnctcctggcacaaggaaaaattgtgaagatctgtgactttggcctggccagagacatcatgcatgattcgaactatgtgtcgaaaggcagtacctttctgcccgtgaagtggatggctcctgagagcatctttgacaacctctacaccacactgagtgatgtctggtcttatggcattctgctctgggagatcttttcccttggtggcaccccttaccccggcatgatggtggattctactttctacaataagatcaagagtgggtaccggatggccaagcctgaccacgctaccagtgaagtctacgagatcatggtgaaatgctggaacagtgagccggagaagagaccctccttttaccacctgagtgagattgtggagaatctgctgcctggacaatataaaaagagttatgaaaaaattcacctggacttcctgaagagtgaccatcctgctgtggcacgcatgcgtgtggactcagacaatgcatacattggtgtcacctacaaaaacgaggaagacaagctgaaggactgggagggtggtctggatgagcagagactgagcgctgacagtggctacatcattcctctgcctgacattgaccctgtccctgaggaggaggacctgggcaagaggaacagacacagctcgcagacctctgaagagagtgccattgagacgggttccagcagttccaccttcatcaagagagaggacgagaccattgaagacatcgacatgatggaygacatcggcatagactcttcagacctggtggaagacagcttcctgtaactggcggattcgaggggttccttccacttctggggccacctctggatcccgttcagaaaaccactttattgcaatgcrgaggttgagaggaggacttggttgatgtttaaagagaagttcccagccaagggcctcggggagcgttctaaatatgaatgaatgggatattttgaaatgaactttgtcagtgttgcctcttgcaatgcctcagtagcatctcagtggtgtgtgaagtttggagatagatggataagggaataataggccacagaaggtgaactttgtgcttcaaggacattggtgagagtccaacagacacaatttatactgcgacagaacttcagcattgtaattatgtaaataactctaaccamggctgtgtttagattgtattaactatcttctttggacttctgaagagaccactcaatccatccatgtacttccctcttgaaacctgatgtcagctgctgttgaactttttaaagaagtgcatgaaaaaccatttttgaaccttaaaaggtactggtactatagcattttgctatcttttttagtgttaaagagataaagaataataattaaccaaccttgtttaatagatttgggtcatttagaagcctgacaactcattttcatattgtaatctatgtttataatactactactgttatcagtaatgctaaatgtgtaataatgtaacatgatttccctccagagaaagcacaatttaaaacaatccttactaagtaggtgatgagtttgacagtttttgacatttatattaaataacatgtttctctataaagtatggtaatagctttagtgaatyaaatttagttgagcatagagaacaaagtaaaagtagtgttgtccaggaagtcagaatttttaactgtactgaataggttccccaatccatcgtattaaaaaacaattaactgccctctgaaataatgggattagaaacaaacaaaactcttaagtcctaaaagttctcaatgtagaggcataaacctgtgctgaacataacttctcatgtatattacccaatggaaaatataatgatcagcaaaaagactggatttgcagaagtttttttttttttcttcatgcctgatgaaagctttggcgaccccaatatatgtattttttgaatctatgaacctgaaaagggtcagaaggatgcccagacatcagcctccttctttcaccccttaccccaaagagaaagagtttgaaactcgagaccataaagatattctttagtggaggctggatgtgcattagcctggatcctcagttctcaaatgtgtgtggcagccaggatgactagatcctgggtttccatccttgagattctgaagtatgaagtctgagggaaaccagagtctgtatttttctaaactccctggctgttctgatcggccagttttcggaaacactgacttaggtttcaggaagttgccatgggaaacaaataatttgaactttggaacagggttggmattcaaccacgcaggaagcctactatttaaatccttggcttcaggttagtgacatttaatgccatctagctagcaattgcgaccttaatttaactttccagtcttagctgaggctgagaaagctaaagtttggttttgacaggttttccaaaagtaaagatgctacttcccactgtatgggggagattgaactttccccgtctcccgtcttctgcctcccactccataccccgccaaggaaaggcatgtacaaaaattatgcaattcagtgttccaagtctctgtgtaaccagctcagtgttttggtggaaaaaacattttaagttttactgataatttgaggttagatgggaggatgaattgtcacatctatccacactgtcaaacaggttggtgtgggttcattggcattctttgcaatactgcttaattgctgataccatatgaatgaaacatgggctgtgattactgcaatcactgtgctatcggcagatgatgctttggaagatgcagaagcaataataaagtacttgactacctactggtgtaatctcaatgcaagccccaactttcttatccaactttttcatagtaagtgcgaagactgagccagattggccaattaaaaacgaaaacctgactaggttctgtagagccaattagacttgaaatacgtttgtgtttctagaatcacagctcaagcattctgtttatcgctcactctcccttgtacagccttattttgttggtgctttgcattttgatattgctgtgagccttgcatgacatcatgaggccggatgaaacttctcagtccagcagtttccagtcctaacaaatgctcccacctgaatttgtatatgactgcatttgtgggtgtgtgtgtgttttcagcaaattccagatttgtttccttttggcctcctgcaaagtctccagaagaaaatttgccaatctttcctactttctatttttatgatgacaatcaaagccggcctgagaaacactatttgtgactttttaaacgattagtgatgtccttaaaatgtggtctgccaatctgtacaaaatggtcctatttttgtgaagagggacataagataaaatgatgttatacatcaatatgtatatatgtatttctatatagacttggagaatactgccaaaacatttatgacaagctgtatcactgccttcgtttatatttttttaactgtgataatccccacaggcacattaactgttgcacttttgaatgtccaaaatttatattttagaaataataaaaagaaagatacttacatgttcccaaaacaatggtgtggtgaatgtgtgagaaaaactaacttgatagggtctaccaatacaaaatgtattacgaatgcccctgttcatgtttttgttttaaaacgtgtaaatgaagatctttatatttcaataaatgatatataatttaaagtta

SEQ ID NO: 223 - DNA, 1047 bp, Homo sapiens
ttctccccgccccccagttgttgtcgaagtctgggggttgggactggaccccctgattgcgtaagagcaaaaagcgaaggcgcaatctggacactgggagattcggagcgcagggagtttgagagaaacttttattttgaagagaccaaggttgagggggggcttatttcctgacagctatttacttagagcaaatgattagttttagaaggatggactataacattgaatcaattacaaaacgcggtttttgagcccattactgttggagctacagggagagaaacagaggaggagactgcaagagatcattggaggccgtgggcacgctctttactccatgtgtgggacattcattgcggaataacatcggaggagaagtttcccagagctatggggacttcccatccggcgttcctggtcttaggctgtcttctcacagggctgagcctaatcctctgccagctttcattaccctctatccttccaaatgaaaatgaaaaggttgtgcagctgaattcatccttttctctgagatgctttggggagagtgaagtgagctggcagtaccccatgtctgaagaagagagctcygatgtggaaatcagaaatgaagaaaacaacagcgrcctttttgtgacggtcttggaagtgagcagtgcctcggcggcccacacagggttgtacacttgctattacaaccacactcagacagaagagaatgagcttgaaggcaggcacatttacatctatgtgccagacccagatgtagcctttgtacctctaggaatgacggattatttagtcatcgtggaggatgatgattctgccattataccttgtcgcacaactgatcccgagactcctgtaaccttacacaacagtgagggggtggtacctgcctcctacgacagcagacagggctttaatgggaccttcactgtagggccctatatctgtgaggccaccgtcaaaggaaagaagttccagaccatcccatttaaygtttatgctttaaaaggtacttgtatcatctccttccttctt

SEQ ID NO: 224 - DNA, 1314 bp, Homo sapiens
agtgtagccgggtcagctggacagggtcatcctgagggtgcgactccgccgcgatggtgacccggttcctgggcccacgctaccgggagctggtcaagaactgggtcccgacggcctacacatggggcgctgtgggcgccgtggggctggtgtgggccaccgattggcggctgatcctggactgggtaccttacatcaatggcaagtttaagaaggataattaattacacaaacccttcacagactgctctggtgcctggtggygctagctcctcccacctcagcacctgctgcatytggagcagcccaagcctcaggatggacaagaggaaacccmcagctcagcttcaggcttyttatgtttctgaaaacagcttggatattttaatgcacgttgcattaaacctcactgaaacctgmtccgtgcccggatgttgatcatgctggtggcttggttactgtgactgtagctggagtggcacaggtgacccaggcgtcctttcagctccagaatgttgcaagtctaggagagtgttccaatggctgacagaaactgcctatttgaaatggctcataagtagtatctgcagtgtgttcatccgttgctgccttaacaagtcacccacacgtagtggcttaaagcaacgaacattcactctctcacagtctgtgtcagtcggggatttgggagtgatgtatctgggtggttgtggcccagagtctctcatgaggttgcagttaagacatcagccaaggccacttcgtctgaggaaggctcaactggggctggagccacttccaagccagtgccctcacgtggctgtcggtgacagccacagttccttcccatgggggcccctacacgaagctgcttgagcatcctcacggcatggcctctgccttccccagagcaggtgaaccaagggagaggaaggagcaagccacagtgcttctatgagccaccctgagaagtctcacgtgatcacttccgccacagcctgtttatcaaaagcaagccccccaggcccagcccacgtgcagagggaggagaatgaggttctgtgttttgaagggaagaatatcagaattggtagacatttcaaactgtcacattagggatacaaaaatgaacaggctgggagtggtggctcagcctacaatcccracactttgggaggctgaggaaggggcatcacttgaaccaggagttcagtactaacctgggcaacaaagaggcccctgtctctgataaaaaraaaaaaaatgaaaaaataaaaatgaacaggtataaaaagagaatatggtacaaagtca

SEQ ID NO: 225 - DNA, 1366 bp, Homo sapiens
agtgtagccgggtcagctggacagggtcatcctgagggtgcgactccgccgcgatggtgacccggttcctgggcccacgctaccgggagctggtcaagaactgggtcccgacggcctacacatggggcgctgtgggcgccgtggggctggtgtgggccaccgattggcggctgatcctggactgggtaccttacatcaatggcaagtttaagaaggataattaattacacaaacccttcacagactgctctggtgatgcgcccgcctcggcctcccaaagtgctgggattagaggcgtgagccactgcacccagcctggaagggacacttctactcaccctgcctcgtctgctctccctccaggtgcctggtggygctagctcctcccacctcagcacctgctgcatytggagcagcccaagcctcaggatggacaagaggaaacccmcagctcagcttcaggcttyttatgtttctgaaaacagcttggatattttaatgcacgttgcattaaacctcactgaaacctgmtccgtgcccggatgttgatcatgctggtggcttggttactgtgactgtagctggagtggcacaggtgacccaggcgtcctttcagctccagaatgttgcaagtctaggagagtgttccaatggctgacagaaactgcctatttgaaatggctcataagtagtatctgcagtgtgttcatccgttgctgccttaacaagtcacccacacgtagtggcttaaagcaacgaacattcactctctcacagtctgtgtcagtcggggatttgggagtgatgtatctgggtggttgtggcccagagtctctcatgaggttgcagttaagacatcagccaaggccacttcgtctgaggaaggctcaactggggctggagccacttccaagccagtgccctcacgtggctgtcggtgacagccacagttccttcccatgggggcccctacacgaagctgcttgagcatcctcacggcatggcctctgccttccccagagcaggtgaaccaagggagaggaaggagcaagccacagtgcttctatgagccaccctgagaagtctcacgtgatcacttccgccacagcctgtttatcaaaagcaagccccccaggcccagcccacgtgcagagggaggagaatgaggttctgtgttttgaagggaagaatatcagaattggtagacatttcaaactgtcacattagggatacaaaaatgaacaggctgggagtggtggctcagcctacaatcccracactttgggaggctgaggaaggggcatcacttgaaccaggagttcagtactaacctgggcaacaaagaggcccctgtctctgataaaaa

SEQ ID NO: 226 - DNA, 3679 bp, Homo sapiens
agccatgcgtctctgagcgccccgagcgcgcccccgccccggaccgtgcccgggccccatttttgctggtcttcagctgcctggtgctgtctgtgctgtccactatccaggagcaccaggaacttgccaacgagtgtctcctcatcttggaattcgtgatgatcgtggttttcggcttggagtacatcgtccgggtctggtccgccggatgctgctgccgctaccgaggatggcagggtcgcttccgctttgccagaaagcccttctgtgtcatcgacttcatcgtgttcgtggcctcggtggccgtcatcgccgcgggtacccagggcaacatcttcgccacgtccgcgctgcgcagcatgcgcttcctgcagatcctgcgcatggtgcgcatggaccgccgcggcggcacctggaagctgctgggctcagtggtctacgcgcatagcaaggagctgatcaccgcctggtacatcgggttcctggtgctcatcttcgcctccttcctggtctacctggcygagaaggacgccaactccgacttctcctcctacgccgactcgcwctggtsggggacgattacayygacaaccatcdgctatggtgacaagacaccgcacacrtggctgggcagggtcctggctgctggcttcgccttactgggcatctctttctttgccctgcctgccggcatcctaggctccrgctttgccctgaaggtccaggagcagcaccggcagaagcacttcgagaagcggaggatgccggcagccaacctcatccaggctgcctggcgcctgtactccaccgatatgagccgggcctacctgacagccacctggtactactatgacagtatcctcccatccttcagagagctggccctcttgtttgagcacgtgcaacgggcccgcaatgggggcctacggcccctggaggtgcggcgggcgccggtacccgacggagcaccctcccgttacccgcccgttgccacctgccaccggccgggcagcacctccttctgccctggggaaagcagccggatgggcatcaaagaccgcatccgcatgggcagctcccagcggcggacgggtccttccaagcagcakctggcacctccaacaatgcccacctccccaagcagcgagcaggtgggtgaggccaccagccccaccaaggtgcaaaagagctggagcttcaatgaccgcacccgcttccgggcatctctgagactcaaaccccgcacctctgctgaggatgccccctcagaggaagtagcagaggagaagagctaccagtgtgagctcacggtggacgacatcatgcctgctgtgaagacagtcatccgctccatcaggattctcaagttcctggtggccaaaaggaaattcaaggagacaytgcgaccrtacgacgtgaaggacgtcattgagcagtactcagcaggccacctggacatgctgggccggatcaagagcctgcaaactcgggtggaccaaattgtgggtcgggggcccggggacaggaaggcccgggagaagggcgacaaggggccctccgacgcggaggtggtggatgaaatcagcatgatgggacgcgtggtcaaggtggagaagcaggtgcagtccatcgagcacaagctggacctgctgttgggcttctattcgcgctgcctgcgctctggcacctcggccagcctgggcgccgtgcaagtgccgctgttcgaccccgacatcacctccgactaccacagccctgtggaccacgaggacatctccgtctccgcacagacgctcagcatctcccgctcggtcagcaccaacatggactgagggacttctcagaggcagggcagcacacggccagccccgcggcctggcgctccgactgccctctgaggcctccggactcctctcgtacttgaactcactccctcacggggagagagaccacacgcagtattgagctgcctgagtgggcgtggtacctgctgtgggtgccagcgccccttccccacctcaggagcgtgagatgccaggtcgcacagagggcagcagcagcggccgtccygcggcctctgggccccccagtgccctgcccactccatcaaggccctatgtggcccacctggcaggggcacagccccgggagtgggagcgggcgctggggccctgggccctgacccagcttccagctatgcaaggtgaggtctctggcccacccttcggacacagcagggaagccctcccgccaagtccccgccccacttgggggtgggccaaggtgcccccacaggtacccacaaagcacaggaccctgccacaaggcaggtggacaccatatatgcaaaccatgttaaatatgcaactttggggacccccatggggtctctctgtccctcccccattgggagctgggcccccagcagtagctggtctcaggctgcttggccaccaccctgtccctattctttggcttatcactccttcccctcccagcatggggcctgtttctcccctgccctctcctaagggcaatgcctgggcctttcttcccatttgcaagtgtcagctcccaggggctccctcctcctgctgggtggccactcccctccttggccctccagacaccactcatagtcagcacaggtttctgtatcctccccaaaactcccagacagtgcttcgtggacgatcgcacaaacatagccttttagtttctccagacaggaagaaagcctctcacacttaaacatgcaatgacgtgacacacttggagacatgagtgcagagccactcagccgctcctgggcctctgcagcagatgccagtggactggccttgcagggtgacgwccactaagaggaagacccccaactccatctgagcaggagaaggagctttgaagtaacccgagagctctccaggccccacccagacctttacccgctccccttcttcaagaagatctcctcctctctggtccaggagccctaacccactgcctctgcctgtccccaagggcccgcctccgtgtctccacagcacaactcgggcccaggcctgacaccactggagagaccccaggcccacttctagccaggcctgtgccttcctagtcactctaactcccagagagaataagaatgcatgtaatagctataccaaccgcgcatccggctttcacatgcactgtctcccctccctccacaccccacttcttcacttcaattggcagcgccacatccaggcgtcagcccccattcactccaggaacactttcttatccccacccctttgctcctcttctgcaaagccaatgcaggtggcaggaaggtgaggggtagtggaccaatggcaaccctctgtgggaacaaggggccgaggccacgctgcctgcatctcgtgctggggacctgcatgcgccagcaccagggcttggactggatcttactcagtccatggtgcccagcctctgccccaacatgccctctgcatgtgaccgtcatgccctggatggagccactcctggctcaccccacctgcactgcactgtccccagagagccacccctccacccactcagagacagctgtggagagggccaggagaatgggattaccctatgaccaaggagacatgggaagaagccctccttccttccacgatcgaggttccgc

SEQ ID NO: 227 - DNA, 315 bp, Homo sapiens
atgccaggtcgcacagagggcagcagcagcggccgtccygcggcctctgggccccccagtgccctgcccactccatcaaggccctatgtggcccacctggcaggggcacagccccgggagtgggagcgggcgctggggccctgggccctgacccagcttccagctatgcaagagagccacccctccacccactcagagacagctgtggagagggccaggagaatgggattaccctatgaccaaggagacatgggaagaagccctccttccttccacgatcgaggttccgccatcaactcggttctcggatatgca

SEQ ID NO: 228 - DNA, 1950 bp, Homo sapiens
cgcatgcgcaggcgacagctcatggcgttcagggcctgacggttgctagggtgacagggacacaacatggcggcgggatctctaacgctctccttcgagggaccaccacggagatcctagtgcgggaccccgcctcagggaagtggaaagcagggggacaaccttcctgcttctttcttttccgtccagtgtcggcaaggggttgtcaccggcttccgcatccaagatgaagaactataaagcaattggcaaaataggagagggaacgttttctgaagttatgaagatgcaaagcctgagagatggaaactactatgcatgtaaacaaatgaagcagcgctttgaaagtattgagcaagtcaacaacctacgagagatccaagcactgaggcgcctgaatccgcacccaaacattcttatgttgcatgaagtggtttttgacagaaaatctggttctcttgcactaatatgtgaacttatggacatgaatatttatgagctaatacgagggagaagatacccattatcagaaaaaaaaattatgcactatatgtaccagttatgtaagtccctggatcatattcacagaaatggaatatttcacagagatgtaaaaccagaaaatatactaataaagcaggatgtcctgaaattaggggactttggctcctgccggagtgtctattccaagcagccgtacacggaatacatctccacccgctggtaccgggccccggagtgtctcctcactgatgggttctacacgtacaagatggacctgtggagcgccggctgtgtgttctacgagatcgccagtctgcagccsctctttcctggagtaaatgaactggaccaaatctcaaaaatccacgatgtcatcggcacacccgctcagaagatcctcaccaagttcaaacagtcgagagctatgaattttgattttccttttaaaaagggatcaggaatacctctactaacaaccaatttgtccccacaatgcctctccctcctgcacgcaatggtggcctatgatcccgatgagagaatcgccgcccaccaggccctgcagcacccctacttccaagaacagaggaaaacagagaagcgggctctgggcagycacagaaaagctggctttccggagcaccctgtggcaccggaaccactcagtaacagctgccagatttccaaggagggcagaaagcagaaacagtccctaaagcaagaggaggaccgtcccaagagacgaggaccggcctatgtcatggaactgcccaaactaaagctttcgggagtggtcagactgtcgtcttactccagccccacgctgcagtccgtgcttggatctggaacaaatggaagagtgccggtgctgagacccttgaagtgcatccctgcgagcaagaagacagatccgcrgaaggaccttaagcctgccccgcagcagtgtcgcctgcccaccatagtgcggaaaggcggaagataactgagcagcaccgtcgtctcgacttcggaggcaacaccaagcccgaccgggccaggcctgggygatctgctgctgagacgccacggagggctggggatgcgcctgcgtccgtttcgcgctggccggggctctgrgtgctgccctgcgccctgccgcacccgcggcccgcgcagctgcctaggatgttctgggctaatatacttgtaaaaccaccgcattytagggttttctttcattttcgttaagaatttggggcaggaaatactttgtaactttgtatatgaatcaaaacaaacgagcaggcatttctgtgatgtgttgggcgtggttggaaggtgggttctgcgtgtcccttcccagcgctgctggtcagtcgtggagcgccatcatgtcttaccagtgacgctgctgacacccctgacttttattaaagaataagctgtcgttrcagtattgcattttaa

SEQ ID NO: 229 - DNA, 2477 bp, Homo sapiens
ggaaagcagggggacaaccttcctgcttctttcttttccgtccagtgtcggcaaggggttgtcaccggcttccgcatccaagatgaaactataaagcaattggcaaaataggagagggaacgttttctgaagttatgaagatgcaaagcctgagagatggaaactactatgcatgtaaacaaatgaagcagcgctttgaaagactagggaattgaaattcggagagatcaagttccccacctggcccgttgctacccaacctacacgtcgtggagctgactctgagcccagtattgagcaagtcaacaacctacgagagatccaagcactgaggcgcctgaatccgcacccaaacattcttatgttgcatgaagtggtttttgacagaaaatctggttctcttgcactaatatgtgaacttatggacatgaatatttatgagctaatacgagggagaagatacccattatcagaaaaaaaaattatgcactatatgtaccagttatgtaagtccctggatcatattcacaggtatgctctcggagatttgacagctctgaaattaataaaatgtgttaacattcagattcaagaatttgaataaatgaagtgtaattytatttttcctttatactgaatgcagaaatggaatatttcacagagatgtaaaaccagaaaatatactaataaagcaggatgtcctgaaattaggggactttggctcctgccggagtgtctattccaagcagccgtacacggaatacatctccacccgctggtaccgggccccggagtgtctcctcactgatgggttctacacgtacaagatggacctgtggagcgccggctgtgtgttctacgagatcgccagtctgcagccsctctttcctggagtaaatgaactggaccaaatctcaaaaatccacgatgtcatcggcacacccgctcagaagatcctcaccaagttcaaacagtcgagagctatgaattttgattttccttttaaaaagggatcaggaatacctctactaacaaccaatttgtccccacaatgcctctccctcctgcacgcaatggtggcctatgatcccgatgagagaatcgccgcccaccaggccctgcagcacccctacttccaagaacagagaacccagaacggaagcgaggatgaggcctcagccgtcctcctccccattcaaacacgttcatccctcaaccctctgctgagcacctgcrtgctgcccggccgcagtgtcacccttcttgtrtgagcctaccctcatccacccacctcaccctcctgaccttaaagaagacaccgggcagaagcacaggggagcccagtcacaccccacactggcgggggcaggccttgcagggagaagcagtaagcagccatctccatcagccatttccatctggcactcagacgtgcacgtcttcgtgtgacaggcggcagcagtgcgaccgtgacctcccatctgctctgctgtccccacacctgcggtgcagccagcctgccacaaggcagctagagtccagctagacccacccctggcacggccgacctcttcctggcttcttctgggcctaatccccgtgcattctccaacgccagaagtgtaagaaagtgcaaggcaacaagtgagaagagcaaacccaaatcgtaccagggaagctagtctttccagggcacctgagtgagggcatgaccagccttgacgctgcctcgctaccatctgcccagggcctgctgaatgcttgagtccatggtgacagtggtgggaacagttacgaggcagttagattttggaagtcatgttggcccacttggctacagagcagtcttaggaacagcaccataaaaataaagacttattcctgacacacatgcatctagagtaaactggggcgtatctgacagcgttagtacagtgatggccaaatgcaaactgcattccagaaccagcgaagggtgacagactgggctgaggcagagctaggactaaccatctcgagtgatgccatctcggggccarcaaaagttttggacacggctggatcatctgaccaaactgctcaaatctttacacaattattgtcctggtattaaactttcacctgccacttccaacaaacaggagacagaataaggagatgaccaggaagatggctggattaagaattctagacttggccgggtgcggtggctcacacctgtaatcctagcatcttgggaggctgaggcaggaggatcgcttgagcccaggagtttgagaccagcctaggcaacataaggagaccccatctctacaaaatatcaaaaaattacccaggtatggtggcacacacgtgtgattccagctactcgggaggctgagrygggagaatggygtgaacccgggaggcggagcttgcagtgagcygagattgcgccactgcactccagcctggacaacagagggagactccatctc

SEQ ID NO: 230 - DNA, 2874 bp, Homo sapiens
cgcatgcgcaggcgacagctcatggcgttcagggcctgacggttgctagggtgacagggacacaacatggcggcgggatctctaacgctctccttcgagggaccaccacggagatcctagtgcgggaccccgcctcagggaagtggaaagcagggggacaaccttcctgcttctttcttttccgtccagtgtcggcaaggggttgtcaccggcttccgcatccaagatgaagaactataaagcaattggcaaaataggagagggaacgttttctgaagttatgaagatgcaaagcctgagagatggaaactactatgcatgtaaacaaatgaagcagcgctttgaaaggcagttacctagaaacagaatcactgggtcaaaggtgacagaaaatctggttctcttgcactaatatgtgaacttatggacatgaatatttatgagctaatacgagggagaagatacccattatcagaaaaaaaaattatgcactatatgtaccagttatgtaagtccctggatcatattcacagaaatggaatatttcacagagatgtaaaaccagaaaatatactaataaagcaggatgtcctgaaattaggggactttggctcctgccggagtgtctattccaagcagccgtacacggaatacatctccacccgctggtaccgggccccggagtgtctcctcactgatgggttctacacgtacaagatggacctgtggagcgccggctgtgtgttctacgagatcgccagtctgcagccsctctttcctggagtaaatgaactggaccaaatctcaaaaatccacgatgtcatcggcacacccgctcagaagatcctcaccaagttcaaacagtaagtattgtgttctgagagtggatgtggacccactcccctgctaggacctgcagcagggcaagcccctccctgtgcctccctcaaacccctctcaggagctcctttggctgactacaggggttcaagttcacttgagggccagtgagtggctgctcagacagagcccatcactttaagtggtctcaaaggtgagctcttccttgagcatcacagaaagatttgtcacaggctttctgagggctggggagtcaggctgtgttccctgagtaatttaaacaggacttagaagcctttgggtggaaacgttccccaagcacagagcataggtggtgagggctttctgcagccctccacagccctgctggcgggaccgacgcctggaagaggtgttcccggactcttagggtcattctggtgaagctgaggctgggagttgggacttcccagggagggcctgtgggctgaggggcaagtagcacccagcggcccccacatcccagggagggagaaggtggcaaccattttggactcttctttttttgttaaattttatttcattcttctcatgtgggaaggtgatattaatcttttataggaaaggtagttttcttacatttttagcataacagatccccccctttataatagactatttttaaatagatttttttaagagcagttttaggtttccatagagccctgtccccatgtgcacacagcctcccctgtcgtcagcacctgcctcgagtggtgtgtttattatggtcgatgaaccgtggatatctcattactacacagagcccatcatttacatcaggggtccctcttggtggtgcacgttctgtgggctgggacaggtgtagactctgcagtcataaaccattccccaccacacagggcccttagttgtgacagyggaccaccggtgcgctcagtgacagcatgaccatttattatcattgggtttttaatacaggtcgagagctatgaattttgattttccttttaaaaagggatcaggaatacctctactaacaaccaatttgtccccacaatgcctctccctcctgcacgcaatggtggcctatgatcccgatgagagaatcgccgcccaccaggccctgcagcacccctacttccaagaacagaggaaaacagagaagcgggctctgggcagycacagaaaagctggctttccggagcaccctgtggcaccggaaccactcagtaacagctgccagatttccaaggagggcagaaagcagaaacagtccctaaagcaagaggaggaccgtcccaagagacgaggaccggcctatgtcatggaactgcccaaactaaagctttcgggagtggtcagactgtcgtcttactccagccccacgctgcagtccgtgcttggatctggaacaaatggaagagtgccggtgctgagacccttgaagtgcatccctgcgagcaagaagacagatccgcrgaaggaccttaagcctgccccgcagcagtgtcgcctgcccaccatagtgcggaaaggcggaagataactgagcagcaccgtcgtctcgacttcggaggcaacaccaagcccgaccgggccaggcctgggygatctgctgctgagacgccacggagggctggggatgcgcctgcgtccgtttcgcgctggccggggctctgrgtgctgccctgcgccctgccgcacccgcggcccgcgcagctgcctaggatgttctgggctaatatacttgtaaaaccaccgcattytagggttttctttcattttcgttaagaatttggggcaggaaatactttgtaactttgtatatgaatcaaaacaaacgagcaggcatttctgtgatgtgttgggcgtggttggaaggtgggttctgcgtgtcccttcccagcgctgctggtcagtcgtggagcgccatcatgtcttaccagtgacgctgctgacacccctgacttttattaaagaataagctgtcgttrcagtattgcattttaa

SEQ ID NO: 231 - DNA, 1639 bp, Homo sapiens
cgcatgcgcaggcgacagctcatggcgttcagggcctgacggttgctagggtgacagggacacaacatggcggcgggatctctaacgctctccttcgagggaccaccacggagatcctagtgcgggaccccgcctcagggaagtggaaagcagggggacaaccttcctgcttctttcttttccgtccagtgtcggcaaggggttgtcaccggcttccgcatccaagatgaagaactataaagcaattggcaaaataggagagggaacgttttctgaagttatgaagatgcaaagcctgagagatggaaactactatgcatgtaaacaaatgaagcagcgctttgaaagtgacagaaaatctggttctcttgcactaatatgtgaacttatggacatgaatatttatgagctaatacgagggagaagatacccattatcagaaaaaaaaattatgcactatatgtaccagttatgtaagtccctggatcatattcacagaaatggaatatttcacagagatgtaaaaccagaaaatatactaataaaggatgtcctgaaattaggggactttggctcctgccggagtgtctattccaagcagccgtacacggaatacatctccacccgctggtaccgggccccggagtgtctcctcactgatgggttctacacgtacaagatggacctgtggagcgccggctgtgtgttctacgagatcgccagtctgcagccsctctttcctggagtaaatgaactggaccaaatctcaaaaatccacgatgtcatcggcacacccgctcagaagatcctcaccaagttcaaacagtggcctatgatcccgatgagagaatcgccgcccaccaggccctgcagcacccctacttccaagaacagagaaacagtccctaaagcaagaggaggaccgtcccaagagacgaggaccggcctatgtcatggaactgcccaaactaaagctttcgggagtggtcagactgtcgtcttactccagccccacgctgcagtccgtgcttggatctggaacaaatggaagagtgccggtgctgagacccttgaagtgcatccctgcgagcaagaagacagatccgcrgaaggaccttaagcctgccccgcagcagtgtcgcctgcccaccatagtgcggaaaggcggaagataactgagcagcaccgtcgtctcgacttcggaggcaacaccaagcccgaccgggccaggcctgggygatctgctgctgagacgccacggagggctggggatgcgcctgcgtccgtttcgcgctggccggggctctgrgtgctgccctgcgccctgccgcacccgcggcccgcgcagctgcctaggatgttctgggctaatatacttgtaaaaccaccgcattytagggttttctttcattttcgttaagaatttggggcaggaaatactttgtaactttgtatatgaatcaaaacaaacgagcaggcatttctgtgatgtgttgggcgtggttggaaggtgggttctgcgtgtcccttcccagcgctgctggtcagtcgtggagcgccatcatgtcttaccagtgacgctgctgacacccctgacttttattaaagaataagctgtcgttrcagtattgcattttaa

SEQ ID NO: 232 - DNA, 1741 bp, Homo sapiens
cgcatgcgcaggcgacagctcatggcgttcagggcctgacggttgctagggtgacagggacacaacatggcggcgggatctctaacgctctccttcgagggaccaccacggagatcctagtgcgggaccccgcctcagggaagtggaaagcagggggacaaccttcctgcttctttcttttccgtccagtgtcggcaaggggttgtcaccggcttccgcatccaagatgaagaactataaagcaattggcaaaataggagagggaacgttttctgaagttatgaagatgcaaagcctgagagatggaaactactatgcatgtaaacaaatgaagcagcgctttgaaagtattgagcaagtcaacaacctacgagagatccaagcactgaggcgcctgaatccgcacccaaacattcttatgttgcatgaagtggtttttgacagaaaatctggttctcttgcactaatatgtgaacttatggacatgaatatttatgagctaatacgagggagaagatacccattatcagaaaaaaaaattatgcactatatgtaccagttatgtaagtccctggatcatattcacagaaatggaatatttcacagagatgtaaaaccagaaaatatactaataaagcaggatgtcctgaaattaggggactttggctcctgccggagtgtctattccaagcagccgtacacggaatacatctccacccgctggtaccgggccccggagtgtctcctcactgatgggttctacacgtacaagatggacctgtggagcgccggctgtgtgttctacgagatcgccagtctgcagccsctctttcctggagtaaatgaactggaccaaatctcaaaaatccacgatgtcatcggcacacccgctcagaagatcctcaccaagttcaaacacacgcaatggtggcctatgatcccgatgagagaatcgccgcccaccaggccctgcagcacccctacttccaagaacagagaaacagtccctaaagcaagaggaggaccgtcccaagagacgaggaccggcctatgtcatggaactgcccaaactaaagctttcgggagtggtcagactgtcgtcttactccagccccacgctgcagtccgtgcttggatctggaacaaatggaagagtgccggtgctgagacccttgaagtgcatccctgcgagcaagaagacagatccgcrgaaggaccttaagcctgccccgcagcagtgtcgcctgcccaccatagtgcggaaaggcggaagataactgagcagcaccgtcgtctcgacttcggaggcaacaccaagcccgaccgggccaggcctgggygatctgctgctgagacgccacggagggctggggatgcgcctgcgtccgtttcgcgctggccggggctctgrgtgctgccctgcgccctgccgcacccgcggcccgcgcagctgcctaggatgttctgggctaatatacttgtaaaaccaccgcattytagggttttctttcattttcgttaagaatttggggcaggaaatactttgtaactttgtatatgaatcaaaacaaacgagcaggcatttctgtgatgtgttgggcgtggttggaaggtgggttctgcgtgtcccttcccagcgctgctggtcagtcgtggagcgccatcatgtcttaccagtgacgctgctgacacccctgacttttattaaagaataagctgtcgttrcagtattgcattttaa

SEQ ID NO: 233 - DNA, 3861 bp, Homo sapiens
tcgagcctggmggtagaatcttcccagtaggcggcgcgggagggaaaagaggattgaggggctaggccgggcggatcccgtcctcccccgatgtgagcagttttcckaaaccccgtcaggcgaaggctgcccagagaggtggagtcggtagcggggccgggaacatgaggcagtctctcctattcctgaccagcgtggttcctttcgtgctggcgccgcgacctccggatgacccgggcttcggcccccaccagagactcgagaagcttgattctttgctctcagactacgatattctctctttatctaatatccagcagcattcggtaagaaaaagagatctacagacttcaacacatgtagaaacactactaactttttcagctttgaaaaggcattttaaattatacctgacatcaagtactgaacgtttttcacaaaatttcaaggtcgtggtggtggatggtaaaaacgaaagcgagtacactgtaaaatggcaggacttcttcactggacacgtggttggtgagcctgactctagggttctagcccacataagagatgatgatgttataatcagaatcaacacagatggggccgaatataacatagagccactttggagatttgttaatgataccaaagacraaagaatgttagtttataaatctgaagatatcaagaatgtttcacgtttgcagtctccaaaagtgtgtggttatttaaaagtggataatgaagagttgctcccaaaagggttagtagacrgagaaccacctgaagagcttgttcatcgagtgaaaagaagagctgacccagatcccatgaagaacacgtgtaaattattggtggtagcagatcatcgcttctacagatacatgggcagaggggaagagagtacaactacaaattacttaatagagctaattgacagagttgatgacatctatcggaacacttcatgggataatgcaggttttaaaggctatggaatacagatagagcagattcgcattctcaagtctccacaagaggtaaaacctggtgaaaagcactacaacatggcaaaaagttacccaaatgaagaaaaggatgcttgggatgtgaagatgttgctagagcaatttagctttgatatagctgaggaagcatctaaagtttgcttggcacaccttttcacataccaagattttgatatgggaactcttggattagcttatgttggctctcccagagcaaacagccatggaggtgtttgtccaaaggcttattatagcccagttgggaagaaaaatatctatttgaatagtggtttgacgagcacaaagaattatggtaaaaccatccttacaaaggaagctgacctggttacaactcatgaattgggacataattttggagcagaacatgatccggatggtctagcagaatgtgccccgaatgaggaccagggagggaaatatgtcatgtatcccatagctgtgagtggcgatcacgagaacaataagatgttttcaaactgcagtaaacaatcaatctataagaccattgaaagtaaggcccaggagtgttttcaagaacgcagcaataaagtttgtgggaactcgagggtggatgaaggagaagagtgtgatcctggcatcatgtatctgaacaacgacacctgctgcaacagcgactgcacgttgaaggaaggtgtccagtgcagtgacaggaacagtccttgctgtaaaaactgtcagtttgagactgcccagaagaagtgccaggaggcgattaatgctacttgcaaaggcgtgtcctactgcacaggtaatagcagtgagtgcccgcctccaggaaatgctgaagatgacactgtttgcttggatcttggcaagtgtaaggatgggaaatgcatccctttctgcgagagggaacagcagctggagtcctgtgcatgtaatgaaactgacaactcctgcaaggtgtgctgcagggacctttcyggccgctgtgtgccctatgtcgatgctgaacaaaagaacttatttttgaggaaaggaaagccctgtacagtaggattttgtgacatgaatggcaaatgtgagaaacgagtacaggatgtaattgaacgattttgggatttcattgaccagctgagcatcaatacttttggaaagtttttagcagacaacatcgttgggtctgtcctggttttctccttgatattttggattcctttcagcattcttgtycattgtgtggataagaaattggataaacagtatgaatctctgtctctgtttcaccccagtaacgtcgaaatgctgagcagcatggattctgcatcggttcgcattatcaaaccctttcctgcgccccagactccaggccgcctgcagcctgcccctgtgatcccttyggcgccagcagctccaaaactggaccaccagagaatggacaccatccaggaagaccccagcacagactcacatatggacgaggatgggtttgagaaggaccccttcccaaatagcagcacagctgccaagtcatttgaggatctcacggaccatccggtcaccagaagtgaaaaggctgcctcctttaaactgcagcgtcagaatcgtgttgacagcaaagaaacagagtgctaatttagttctcagctcttctgacttaagtgtgcaaaatatttttatagatttgacctacaaatcaatcacagcttrtattttgtgaagactgggaagtgacttagcagatgctggtcatgtgtttgaacttcctgcaggtaaacagttcttgtgtggtttggcccttctccttttgaaaaggtaaggtgaaggtgaatctagcttattttgaggctttcaggttttagtttttaaaatatcttttgacctgtggtgcaaaagcagaaaatacagctggattgggttatgartatttacgtttttgtaaattaatcttttatattgataacagcactgactagggaaatgatcagtttttttttatacactgtaatgaaccgctgaatatgaggcatttggcatttatttgtgatgacaactggaatagttttttttttttttttttttttttgccttcaactaaaaacaaaggagataaatctagtatacattgtctctaaattgtgggtctatttctagttattacccaaagtttttatgtagcagggaaaatatatatctaaatttaaaaatcrtttgggttaatatggctcttcataattctaaaactaatgctctctaaaaacctaaccacctaccttacagtgagggctatacatggtagccagttgaatttatggaatctaccaactgtttagggccctgatttgctgggcagtttttctgtattttataagtatcttcatgtatccctgttactgatagggatacatgctcttagaaaattcactattggctgggagtggtggctcatgcctgtaatcccagcacttggagaggctgaggttgcgccactacactccagcctgggtgacagagtgagactctgcctcaaaaaaaaaaaaaaaaaaaaaaaattcactatctacaaacctagamtatttaaaatacaaagattgcctgttttcaaacactattgaataagagggtgagatatttcttaacaacaacaacaacaaaaaaaacaggttgttttgaatgtgatgagccagccaggagatagaatactacctgcccttagggttgggggctgtccccacaagacttgatacttcagaaaccctttttattgacccacaagcagatatttgaattacttcttactttattgctccaggattcyggatgggctgcatttactgtgtgaaggataaaaatcatt

SEQ ID NO: 234 - DNA, 3810 bp, Homo sapiens
tcgagcctggmggtagaatcttcccagtaggcggcgcgggagggaaaagaggattgaggggctaggccgggcggatcccgtcctcccccgatgtgagcagttttcckaaaccccgtcaggcgaaggctgcccagagaggtggagtcggtagcggggccgggaacatgaggcagtctctcctattcctgaccagcgtggttcctttcgtgctggcgccgcgacctccggatgacccgggcttcggcccccaccagagactcgagaagcttgattctttgctctcagactacgatattctctctttatctaatatccagcagcattcggtaagaaaaagagatctacagacttcaacacatgtagaaacactactaactttttcagctttgaaaaggcattttaaattatacctgacatcaagtactgaacgtttttcacaaaatttcaaggtcgtggtggtggatggtaaaaacgaaagcgagtacactgtaaaatggcaggacttcttcactggacacgtggttggtgagcctgactctagggttctagcccacataagagatgatgatgttataatcagaatcaacacagatggggccgaatataacatagagccactttggagatttgttaatgataccaaagacraaagaatgttagtttataaatctgaagatatcaagaatgtttcacgtttgcagtctccaaaagtgtgtggttatttaaaagtggataatgaagagttgctcccaaaagggttagtagacrgagaaccacctgaagagcttgttcatcgagtgaaaagaagagctgacccagatcccatgaagaacacgtgtaaattattggtggtagcagatcatcgcttctacagatacatgggcagaggggaagagagtacaactacaaattacttaatagagctaattgacagagttgatgacatctatcggaacacttcatgggataatgcaggttttaaaggctatggaatacagatagagcagattcgcattctcaagtctccacaagaggtaaaacctggtgaaaagcactacaacatggcaaaaagttacccaaatgaagaaaaggatgcttgggatgtgaagatgttgctagagcaatttagctttgatatagctgaggaagcatctaaagtttgcttggcacaccttttcacataccaagattttgatatgggaactcttggattagcttatgttggctctcccagagcaaacagccatggaggtgtttgtccaaaggcttattatagcccagttgggaagaaaaatatctatttgaatagtggtttgacgagcacaaagaattatggtaaaaccatccttacaaaggaagctgacctggttacaactcatgaattgggacataattttggagcagaacatgatccggatggtctagcagaatgtgccccgaatgaggaccagggagggaaatatgtcatgtatcccatagctgtgagtggcgatcacgagaacaataagatgttttcaaactgcagtaaacaatcaatctataagaccattgaaagtaaggcccaggagtgttttcaagaacgcagcaataaagtttgtgggaactcgagggtggatgaaggagaagagtgtgatcctggcatcatgtatctgaacaacgacacctgctgcaacagcgactgcacgttgaaggaaggtgtccagtgcagtgacaggaacagtccttgctgtaaaaactgtcagtttgagactgcccagaagaagtgccaggaggcgattaatgctacttgcaaaggcgtgtcctactgcacaggtaatagcagtgagtgcccgcctccaggaaatgctgaagatgacactgtttgcttggatcttggcaagtgtaaggatgggaaatgcatccctttctgcgagagggaacagcagctggagtcctgtgcatgtaatgaaactgacaactcctgcaaggtgtgctgcagggacctttcyggccgctgtgtgccctatgtcgatgctgaacaaaagaacttatttttgaggaaaggaaagccctgtacagtaggattttgtgacatgaatggcaaatgtgagaaacgagtacaggatgtaattgaacgattttgggatttcattgaccagctgagcatcaatacttttggaaagtttttagcagacaacatcgttgggtctgtcctggttttctccttgatattttggattcctttcagcattcttgtycattgtgtgaacgtcgaaatgctgagcagcatggattctgcatcggttcgcattatcaaaccctttcctgcgccccagactccaggccgcctgcagcctgcccctgtgatcccttyggcgccagcagctccaaaactggaccaccagagaatggacaccatccaggaagaccccagcacagactcacatatggacgaggatgggtttgagaaggaccccttcccaaatagcagcacagctgccaagtcatttgaggatctcacggaccatccggtcaccagaagtgaaaaggctgcctcctttaaactgcagcgtcagaatcgtgttgacagcaaagaaacagagtgctaatttagttctcagctcttctgacttaagtgtgcaaaatatttttatagatttgacctacaaatcaatcacagcttrtattttgtgaagactgggaagtgacttagcagatgctggtcatgtgtttgaacttcctgcaggtaaacagttcttgtgtggtttggcccttctccttttgaaaaggtaaggtgaaggtgaatctagcttattttgaggctttcaggttttagtttttaaaatatcttttgacctgtggtgcaaaagcagaaaatacagctggattgggttatgartatttacgtttttgtaaattaatcttttatattgataacagcactgactagggaaatgatcagtttttttttatacactgtaatgaaccgctgaatatgaggcatttggcatttatttgtgatgacaactggaatagttttttttttttttttttttttttgccttcaactaaaaacaaaggagataaatctagtatacattgtctctaaattgtgggtctatttctagttattacccaaagtttttatgtagcagggaaaatatatatctaaatttaaaaatcrtttgggttaatatggctcttcataattctaaaactaatgctctctaaaaacctaaccacctaccttacagtgagggctatacatggtagccagttgaatttatggaatctaccaactgtttagggccctgatttgctgggcagtttttctgtattttataagtatcttcatgtatccctgttactgatagggatacatgctcttagaaaattcactattggctgggagtggtggctcatgcctgtaatcccagcacttggagaggctgaggttgcgccactacactccagcctgggtgacagagtgagactctgcctcaaaaaaaaaaaaaaaaaaaaaaaattcactatctacaaacctagamtatttaaaatacaaagattgcctgttttcaaacactattgaataagagggtgagatatttcttaacaacaacaacaacaaaaaaaacaggttgttttgaatgtgatgagccagccaggagatagaatactacctgcccttagggttgggggctgtccccacaagacttgatacttcagaaaccctttttattgacccacaagcagatatttgaattacttcttactttattgctccaggattcyggatgggctgcatttactgtgtgaaggataaaaatcatt

SEQ ID NO: 235 - DNA, 3523 bp, Homo sapiens
tcgagcctggmggtagaatcttcccagtaggcggcgcgggagggaaaagaggattgaggggctaggccgggcggatcccgtcctcccccgatgtgagcagttttcckaaaccccgtcaggcgaaggctgcccagagaggtggagtcggtagcggggccgggaacatgaggcagtctctcctattcctgaccagcgtggttcctttcgtgctggcgccgcgacctccggatgacccgggcttcggcccccaccagagactcgagaagcttgattctttgctctcagactacgatattctctctttatctaatatccagcagcattcggtaagaaaaagagatctacagacttcaacacatgtagaaacactactaactttttcagctttgaaaaggcattttaaattatacctgacatcaagtactgaacgtttttcacaaaatttcaaggtcgtggtggtggatggtaaaaacgaaagcgagtacactgtaaaatggcaggacttcttcactggacacgtggttggtgagcctgactctagggttctagcccacataagagatgatgatgttataatcagaatcaacacagatggggccgaatataacatagagccactttggagatttgttaatgataccaaagacraaagaatgttagtttataaatctgaagatatcaagaatgtttcacgtttgcagtctccaaaagtgtgtggttatttaaaagtggataatgaagagttgctcccaaaagggttagtagacrgagaaccacctgaagagcttgttcatcgagtgaaaagaagagctgacccagatcccatgaagaacacgtgtaaattattggtggtagcagatcatcgcttctacagatacatgggcagaggggaagagagtacaactacaaattacttaatagagctaattgacagagttgatgacatctatcggaacacttcatgggataatgcaggttttaaaggctatggaatacagatagagcagtctccacaagaggtaaaacctggtgaaaagcactacaacatggcaaaaagttacccaaatgaagaaaaggatgcttgggatgtgaagatgttgctagagcaatttagctttgatatagctgaggaagcatctaaagtttgcttggcacaccttttcacataccaagattttgatatgggaactcttggattagcttatgttggctctcccagagcaaacagccatggaggtgtttgtccaaaggcttattatagcccagttgggaagaaaaatatctatttgaatagtggtttgacgagcacaaagaattatggtaaaaccatccttacaaaggaagctgacctggttacaactcatgaattgggacataattttggagcagaacatgatccggatggtctagcagaatgtgccccgaatgaggaccagggagggaaatatgtcatgtatcccatagctgtgagtggcgatcacgagaacaataagatgttttcaaactgcagtaaacaatcaatctataagaccattgaaagtaaggcccaggagtgttttcaagaacgcagcaataaagtttgtgggaactcgagggtggatgaaggagaagagtgtgatcctggcatcatgtatctgaacaacgacacctgctgcaacagcgactgcacgttgaaggaaggtgtccagtgcagtgacaggaacagtccttgctgtaaaaactgtcagtttgagactgcccagaagaagtgccaggaggcgattaatgctacttgcaaaggcgtgtcctactgcacaggtaatagcagtgagtgcccgcctccaggaaatgctgaagatgacactgtttgcttggatcttggcaagtgtaaggatgggaaatgcatccctttctgcgagagggaacagcagctggagtcctgtgcatgtaatgaaactgacaactcctgcaaggtgtgctgcagggacctttcyggccgctgtgtgccctatgtcgatgctgaacaaaagaacttatttttgaggaaaggaaagccctgtacagtaggattttgtgacatgaatggcaaatgtgagaaacgagtacaggatgtaattgaacgattttgggatttcattgaccagctgagcatcaatacttttggaaagtttttagcagacaacatcgttgggtctgtcctggttttctccttgatattttggattcctttcagcattcttgtycattgtgtggataagaaattggataaacagtatgaatctctgtctctgtttcaccccagtaacgtcgaaatgctgagcagcatggattctgcatcggttcgcattatcaaaccctttcctgcgccccagactccaggccgcctgcagcctgcccctgtgatcccttyggcgccagcagctccaaaactggaccaccagagaatggacaccatccaggaagaccccagcacagactcacatatggacgaggatgggtttgagaaggaccccttcccaaatagcagcacagctgccaagtcatttgaggatctcacggaccatccggtcaccagaagtgaaaaggctgcctcctttaaactgcagcgtcagaatcgtgttgacagcaaagaaacagagtgctaatttagttctcagctcttctgacttaagtgtgcaaaatatttttatagatttgacctacaaatcaatcacagcttrtattttgtgaagactgggaagtgacttagcagatgctggtcatgtgtttgaacttcctgcaggtaaacagttcttgtgtggtttggcccttctccttttgaaaaggtaaggtgaaggtgaatctagcttattttgaggctttcaggttttagtttttaaaatatcttttgacctgtggtgcaaaagcagaaaatacagctggattgggttatgartatttacgtttttgtaaattaatcttttatattgataacagcactgactagggaaatgatcagtttttttttatacactgtaatgaaccgctgaatatgaggcatttggcatttatttgtgatgacaactggaatagttttttttttttttttttttttttgccttcaactaaaaacaaaggagataaatctagtatacattgtctctaaattgtgggtctatttctagttattacccaaagtttttatgtagcagggaaaatatatatctaaatttaaaaatcrtttgggttaatatggctcttcataattctaaaactaatgctctctaaaaacctaaccacctaccttacagtgagggctatacatggtagccagttgaatttatggaatctaccaactgtttagggccctgatttgctgggcagtttttctgtattttataagtatcttcatgtatccctgttactgatagggatacatgctcttagaaaattcactattggctgggagaacggtggctcacgcctgtaatcccagcactttgggaggctgactgagattgtgccactgcactccagcctgggcgacagagtgagactccgtctc

SEQ ID NO: 236 - DNA, 3538 bp, Homo sapiens
tcgagcctggmggtagaatcttcccagtaggcggcgcgggagggaaaagaggattgaggggctaggccgggcggatcccgtcctcccccgatgtgagcagttttcckaaaccccgtcaggcgaaggctgcccagagaggtggagtcggtagcggggccgggaacatgaggcagtctctcctattcctgaccagcgtggttcctttcgtgctggcgccgcgacctccggatgacccgggcttcggcccccaccagagactcgagaagcttgattctttgctctcagactacgatattctctctttatctaatatccagcagcattcggtaagaaaaagagatctacagacttcaacacatgtagaaacactactaactttttcagctttgaaaaggcattttaaattatacctgacatcaagtactgaacgtttttcacaaaatttcaaggtcgtggtggtggatggtaaaaacgaaagcgagtacactgtaaaatggcaggacttcttcactggacacgtggttggtgagcctgactctagggttctagcccacataagagatgatgatgttataatcagaatcaacacagatggggccgaatataacatagagccactttggagatttgttaatgataccaaagacraaagaatgttagtttataaatctgaagatatcaagaatgtttcacgtttgcagtctccaaaagtgtgtggttatttaaaagtggataatgaagagttgctcccaaaagggttagtagacrgagaaccacctgaagagcttgttcatcgagtgaaaagaagagctgacccagatcccatgaagaacacgtgtaaattattggtggtagcagatcatcgcttctacagatacatgggcagaggggaagagagtacaactacaaattacttaatagagctaattgacagagttgatgacatctatcggaacacttcatgggataatgcaggttttaaaggctatggaatacagatagagcagattcgcattctcaagtctccacaagaggtaaaacctggtgaaaagcactacaacatggcaaaaagttacccaaatgaagaaaaggatgcttgggatgtgaagatgttgctagagcaatttagctttgatatagctgaggaagcatctaaagtttgcttggcacaccttttcacataccaagattttgatatgggaactcttggattagcttatgttggctctcccagagcaaacagccatggaggtgtttgtccaaaggcttattatagcccagttgggaagaaaaatatctatttgaatagtggtttgacgagcacaaagaattatggtaaaaccatccttacaaaggaagctgacctggttacaactcatgaattgggacataattttggagcagaacatgatccggatggtctagcagaatgtgccccgaatgaggaccagggagggaaatatgtcatgtatcccatagctgtgagtggcgatcacgagaacaataagatgttttcaaactgcagtaaacaatcaatctataagaccattgaaagtaaggcccaggagtgttttcaagaacgcagcaataaagtttgtgggaactcgagggtggatgaaggagaagagtgtgatcctggcatcatgtatctgaacaacgacacctgctgcaacagcgactgcacgttgaaggaaggtgtccagtgcagtgacaggaacagtccttgctgtaaaaactgtcagtttgagactgcccagaagaagtgccaggaggcgattaatgctacttgcaaaggcgtgtcctactgcacaggtaatagcagtgagtgcccgcctccaggaaatgctgaagatgacactgtttgcttggatcttggcaagtgtaaggatgggaaatgcatccctttctgcgagagggaacagcagctggagtcctgtgcatgtaatgaaactgacaactcctgcaaggtgtgctgcagggacctttcyggccgctgtgtgccctatgtcgatgctgaacaaaagaacttatttttgaggaaaggaaagccctgtacagtaggattttgtgacatgaatggcaaatgtgagaaacgagtacaggatgtaattgaacgattttgggatttcattgaccagctgagcatcaatacttttggaaagtttttagcagacaacatcgttgggtctgtcctggttttctccttgatattttggattcctttcagcattcttgtycattgtgtggataagaaattggataaacagtatgaatctctgtctctgtttcaccccagtaacgtcgaaatgctgagcagcatggattctgcatcggttcgcattatcaaaccctttcctgcgccccagactccaggccgcctgcagcctgcccctgtgatcccttyggcgccagcagctccaaaactggaccaccagagaatggacaccatccaggaagaccccagcacagactcacatatggacgaggatgggtttgagaaggaccccttcccaaatagcagcacagctgccaagtcatttgaggatctcacggaccatccggtcaccagaagtgaaaaggctgcctcctttaaactgcagcgtcagaatcgtgttgacagcaaagaaacagagtgctaatttagttctcagctcttctgacttaagtgtgcaaaatatttttatagatttgacctacaaatcaatcacagcttrtattttgtgaagactgggaagtgacttagcagatgctggtcatgtgtttgaacttcctgcaggtaaacagttcttgtgtggtttggcccttctccttttgaaaaggtaaggtgaaggtgaatctagcttattttgaggctttcaggttttagtttttaaaatatcttttgacctgtggtgcaaaagcagaaaatacagctggattgggttatgartatttacgtttttgtaaattaatcttttatattgataacagcactgactagggaaatgatcagtttttttttatacactgtaatgaaccgctgaatatgaggcatttggcatttatttgtgatgacaactggaatagttttttttttttttttttttttttgccttcaactaaaaacaaaggagataaatctagtatacattgtctctaaattgtgggtctatttctagttattacccaaagtttttatgtagcagggaaaatatatatctaaatttaaaaatcrtttgggttaatatggctcttcataattctaaaactaatgctctctaaaaacctaaccacctaccttacagtgagggctatacatggtagccagttgaatttatggaatctaccaactgtttagggccctgatttgctgggcagtttttctgtattttataagtatcttcatgtatccctgttactgatagggatacatgctcttagaaaattcactattggctgggagaacggtggctcacgcctgtaatcccagcactttgggaggctgactgagattgtgccactgcactccagcctgggcgacagagtgagactccgtctc

SEQ ID NO: 237 - DNA, 3487 bp, Homo sapiens
tcgagcctggmggtagaatcttcccagtaggcggcgcgggagggaaaagaggattgaggggctaggccgggcggatcccgtcctcccccgatgtgagcagttttcckaaaccccgtcaggcgaaggctgcccagagaggtggagtcggtagcggggccgggaacatgaggcagtctctcctattcctgaccagcgtggttcctttcgtgctggcgccgcgacctccggatgacccgggcttcggcccccaccagagactcgagaagcttgattctttgctctcagactacgatattctctctttatctaatatccagcagcattcggtaagaaaaagagatctacagacttcaacacatgtagaaacactactaactttttcagctttgaaaaggcattttaaattatacctgacatcaagtactgaacgtttttcacaaaatttcaaggtcgtggtggtggatggtaaaaacgaaagcgagtacactgtaaaatggcaggacttcttcactggacacgtggttggtgagcctgactctagggttctagcccacataagagatgatgatgttataatcagaatcaacacagatggggccgaatataacatagagccactttggagatttgttaatgataccaaagacraaagaatgttagtttataaatctgaagatatcaagaatgtttcacgtttgcagtctccaaaagtgtgtggttatttaaaagtggataatgaagagttgctcccaaaagggttagtagacrgagaaccacctgaagagcttgttcatcgagtgaaaagaagagctgacccagatcccatgaagaacacgtgtaaattattggtggtagcagatcatcgcttctacagatacatgggcagaggggaagagagtacaactacaaattacttaatagagctaattgacagagttgatgacatctatcggaacacttcatgggataatgcaggttttaaaggctatggaatacagatagagcagattcgcattctcaagtctccacaagaggtaaaacctggtgaaaagcactacaacatggcaaaaagttacccaaatgaagaaaaggatgcttgggatgtgaagatgttgctagagcaatttagctttgatatagctgaggaagcatctaaagtttgcttggcacaccttttcacataccaagattttgatatgggaactcttggattagcttatgttggctctcccagagcaaacagccatggaggtgtttgtccaaaggcttattatagcccagttgggaagaaaaatatctatttgaatagtggtttgacgagcacaaagaattatggtaaaaccatccttacaaaggaagctgacctggttacaactcatgaattgggacataattttggagcagaacatgatccggatggtctagcagaatgtgccccgaatgaggaccagggagggaaatatgtcatgtatcccatagctgtgagtggcgatcacgagaacaataagatgttttcaaactgcagtaaacaatcaatctataagaccattgaaagtaaggcccaggagtgttttcaagaacgcagcaataaagtttgtgggaactcgagggtggatgaaggagaagagtgtgatcctggcatcatgtatctgaacaacgacacctgctgcaacagcgactgcacgttgaaggaaggtgtccagtgcagtgacaggaacagtccttgctgtaaaaactgtcagtttgagactgcccagaagaagtgccaggaggcgattaatgctacttgcaaaggcgtgtcctactgcacaggtaatagcagtgagtgcccgcctccaggaaatgctgaagatgacactgtttgcttggatcttggcaagtgtaaggatgggaaatgcatccctttctgcgagagggaacagcagctggagtcctgtgcatgtaatgaaactgacaactcctgcaaggtgtgctgcagggacctttcyggccgctgtgtgccctatgtcgatgctgaacaaaagaacttatttttgaggaaaggaaagccctgtacagtaggattttgtgacatgaatggcaaatgtgagaaacgagtacaggatgtaattgaacgattttgggatttcattgaccagctgagcatcaatacttttggaaagtttttagcagacaacatcgttgggtctgtcctggttttctccttgatattttggattcctttcagcattcttgtycattgtgtgaacgtcgaaatgctgagcagcatggattctgcatcggttcgcattatcaaaccctttcctgcgccccagactccaggccgcctgcagcctgcccctgtgatcccttyggcgccagcagctccaaaactggaccaccagagaatggacaccatccaggaagaccccagcacagactcacatatggacgaggatgggtttgagaaggaccccttcccaaatagcagcacagctgccaagtcatttgaggatctcacggaccatccggtcaccagaagtgaaaaggctgcctcctttaaactgcagcgtcagaatcgtgttgacagcaaagaaacagagtgctaatttagttctcagctcttctgacttaagtgtgcaaaatatttttatagatttgacctacaaatcaatcacagcttrtattttgtgaagactgggaagtgacttagcagatgctggtcatgtgtttgaacttcctgcaggtaaacagttcttgtgtggtttggcccttctccttttgaaaaggtaaggtgaaggtgaatctagcttattttgaggctttcaggttttagtttttaaaatatcttttgacctgtggtgcaaaagcagaaaatacagctggattgggttatgartatttacgtttttgtaaattaatcttttatattgataacagcactgactagggaaatgatcagtttttttttatacactgtaatgaaccgctgaatatgaggcatttggcatttatttgtgatgacaactggaatagttttttttttttttttttttttttgccttcaactaaaaacaaaggagataaatctagtatacattgtctctaaattgtgggtctatttctagttattacccaaagtttttatgtagcagggaaaatatatatctaaatttaaaaatcrtttgggttaatatggctcttcataattctaaaactaatgctctctaaaaacctaaccacctaccttacagtgagggctatacatggtagccagttgaatttatggaatctaccaactgtttagggccctgatttgctgggcagtttttctgtattttataagtatcttcatgtatccctgttactgatagggatacatgctcttagaaaattcactattggctgggagaacggtggctcacgcctgtaatcccagcactttgggaggctgactgagattgtgccactgcactccagcctgggcgacagagtgagactccgtctc

SEQ ID NO: 238 - DNA, 3977 bp, Homo sapiens
cctgaagggaggatgggctaaggcaggcacacagtggcggagaagatgccctcctgggccctcttcatggtcacctcctgcctcctcctggcccctcaaaacctggcccaagtcagcagccaagatgtctccttgctggcatcagactcagagcccctgaaktgtttctccygaacatttgaggacctcacttgcttctgggatgaggaagaggcagygcccagtgggacataccagctgctgtatgcctacccrcggagggacctcttctatgccaacagggagaagccccgtgcttgccccctgagttcccagagcatgccccactttggaaccygatacgtgtgccagtttccagaccaggaggaagtgcstctcttctttccgctgcacctctgggtgaagaatrtgttcctaaaccagactcggactcagcgagtcctctttgtggacagtgtaggcctgccggctccccmcagtatcatcaaggccatgggtgggagccagccaggggaacttcagatcagctgggaggagccagctccagaaatcagtgatttcctgaggtacraactccgctatggccccagagatcccaagaactccactggycccacggtcatayagctgattgccacagaaacctgctgccctgctctgcagaggcctcactcagcctctgctctggaccagtctccatgtgctcagcccacaatgccctggcaagatggaccaaagcagacctccccaagactccagcctggcaactcctactggctgcagctgygcagcgaacctgatgggatctccctcggtggctcctggggatcctggtccctccctgtgactgtggacctgcctggagatgcagtggcacttggactgcaatgctttaccttggacctgaagaatgttacctgtcaatggcagcaacaggaccatgctagctcccaaggcttcttctaccacagcagggcacggtgctgccccagagacaggtaccccatctgggagaactgcgaagaggaagagaaaacaaatccaggactacagaccccacagttctctcgctgccacttcaagtcacgaaatgacagcattattcacatccttgtggaggtgaccacagccccgggtactgttcacagctacctgggctcccctttctggatccaccaggctggtaagaactttcttcctcattcttcccacatagttcccacccccactgaatctgaccctgtgcccaggatccccaactctgacccttctgaccgatggctctggtggcacaatgccttgtgcacagaaggacttaagctgctccctgctgacatccctgtagtgcgcctccccaccccaaacttgcactggagggagatctccagtgggcatctggaattggagtggcagcacccatcgtcctgggcagcccaagagacctgytatcaactccgatacacaggagaaggccatcaggactggaaggtgctggagccgcctctcggggcccgaggagggaccctggagctgcgcccgcgatctcgctaccgtttacagctgcgcgccaggctcaacggccccacctaccaaggtccctggagctcgtggtcggacccaactagggtggagaccgccaccgagaccgcctgratctccttggtgaccgctctgcatctagtgctgggcctcagcgccgtcctgggcctgctgctgctgaggtggcagtttcctgcacactacaggagactgaggcatgccctgtggccctcacttccagacctgcaccrggtcctaggccagtaccttagggacactgcagccctgagcccgcccaaggccacagtctcagatacctgtgaagaagtggaacccagcctccttgaaatcctccccaagtcctcagagaggactcctttgcccctgtgttcctcccaggcccagatggactaccgaagattgcagccttcttgcctggggaccatgcccctgtctgtgtgcccacccatggctgagtcagggtcctgctgtaccacccacattgccaaccattcctacctaccactaagctattggcagcagcyttgaggacaggctcctcactcccagttccctggacagagctaaactctcgagacttctctgtgaacttccctaccctacccccacaacacaagcaccccagacctcacctccatccccctctgtctgccctcacaattaggcttcattgcactgatcttactctactgctgctgacataaaaccaggaccctttctccacaggcaggctcatttcactaagctcctcctttactttctctctcctctttgatgtcaaacgccttgaaaacaagcctccacttccccacacttcccatttactcttgagactacttcaattagttcccctactacactttgctagtgaaactgcccaggcaaagtgcacctcaaatcttctaattccaagatccaataggatctcgttaatcatcagttcctttgatctcgctgtaagatttgtcaaggctgactactcacttctcctttaaattctttcctaccttggtcctgcctctttgagtatattagtaggttttttttatttgtttgagacagggtctcactctgtcacccaggctgcagtgcaatggcgcgatctcagctcactgcaacctccacctccgggttcaagcgattcttgtgcctcggcctccctagtagctgggattacaggcgcacaccaycacacacagctaattttttttttttttttttttttttttttttagacggagccttgctctgttgccagactggagtgcagtggcacgatctcggctcactgcaacctctgcctcccgggttcaagccattctgcctcagcctcccaagtagctgggagtacaggcgtctgccaccatgcctaatttttttctatttttaggagagaccggttttcaccacgttggccaggatggtctcgatatcctgatctcgtgatccgcctgcctctgcctcccaaagtgctgggattacaggtgtgacccactgcgcacagccccagctaattttcatatttttagtagagacagggttttgccatgttgcccaggctggtcttgaactcctaacctcgggtgatccacccaccttggcctcccaaagtgttaggattacaggcatgagccactgcgcccggctgagtgtactagtagttaagagaataaactagatctagaatcagagctggattcaattcctgtccttcacatttactagctgtgcaaccttgggcacataacttaatgtctttgagccttagttttttcatctgtaaaacagggataataacagcaccccatagagttgtgacgaggattgagataatctaagtaaagcacagtccctaggacatagtaaatgattcatatatccgaactactgttataattattccttcttactctcctcttctagcatttcttccaattattacagtccttcaagattccatttcttaacagtctccaatcccatctattctctgcctttactatatgttgaccattccaaagttcttatctctagctcagacatctactacagcactgtgatgctttatgcaactaactgtttacatatctgtcccctgctactagattgtgagctccttgagggaaaggaacatgatttatttgtccttttcccccagcacctagagtagtgcttggtgcatgatagtaggccttcaataaattttttctaaatgaatgaaatctttctggacaaggttaccttaatcccatgccagctgtcctcatcctctaaaccgttcataggcagcagtaaatgtgctcagacagttctgattatggactctcctaacacattctaattctcaaacaaatggttttgttgtcattgttttttctggctccaaatatacccactgtatcagtcagggtcttgga

SEQ ID NO: 239 - DNA, 3842 bp, Homo sapiens
cctgaagggaggatgggctaaggcaggcacacagtggcggagaagatgccctcctgggccctcttcatggtcacctcctgcctcctcctggcccctcaaaacctggcccaagtcagcagccaagatgtctccttgctggcatcagactcagagcccctgaaktgtttctccygaacatttgaggacctcacttgcttctgggatgaggaagaggcagygcccagtgggacataccagctgctgtatgcctacccrcgggagaagccccgtgcttgccccctgagttcccagagcatgccccactttggaaccygatacgtgtgccagtttccagaccaggaggaagtgcstctcttctttccgctgcacctctgggtgaagaatrtgttcctaaaccagactcggactcagcgagtcctctttgtggacagtgtaggcctgccggctccccmcagtatcatcaaggccatgggtgggagccagccaggggaacttcagatcagctgggaggagccagctccagaaatcagtgatttcctgaggtacraactccgctatggccccagagatcccaagaactccactggycccacggtcatayagctgattgccacagaaacctgctgccctgctctgcagaggcctcactcagcctctgctctggaccagtctccatgtgctcagcccacaatgccctggcaagatggaccaaagcagacctccccaagtagagargcttcagctctgacagcagagggtggaagctgcctcatctcaggactccagcctggcaactcctactggctgcagctgygcagcgaacctgatgggatctccctcggtggctcctggggatcctggtccctccctgtgactgtggacctgcctggagatgcagtggcacttggactgcaatgctttaccttggacctgaagaatgttacctgtcaatggcagcaacaggaccatgctagctcccaaggcttcttctaccacagcagggcacggtgctgccccagagacaggtaccccatctgggagaactgcgaagaggaagagaaaacaaatccaggactacagaccccacagttctctcgctgccacttcaagtcacgaaatgacagcattattcacatccttgtggaggtgaccacagccccgggtactgttcacagctacctgggctcccctttctggatccaccaggctgtgcgcctccccaccccaaacttgcactggagggagatctccagtgggcatctggaattggagtggcagcacccatcgtcctgggcagcccaagagacctgytatcaactccgatacacaggagaaggccatcaggactggaaggtgctggagccgcctctcggggcccgaggagggaccctggagctgcgcccgcgatctcgctaccgtttacagctgcgcgccaggctcaacggccccacctaccaaggtccctggagctcgtggtcggacccaactagggtggagaccgccaccgagaccgcctgratctccttggtgaccgctctgcatctagtgctgggcctcagcgccgtcctgggcctgctgctgctgaggtggcagtttcctgcacactacaggagactgaggcatgccctgtggccctcacttccagacctgcaccrggtcctaggccagtaccttagggacactgcagccctgagcccgcccaaggccacagtctcagatacctgtgaagaagtggaacccagcctccttgaaatcctccccaagtcctcagagaggactcctttgcccctgtgttcctcccaggcccagatggactaccgaagattgcagccttcttgcctggggaccatgcccctgtctgtgtgcccacccatggctgagtcagggtcctgctgtaccacccacattgccaaccattcctacctaccactaagctattggcagcagcyttgaggacaggctcctcactcccagttccctggacagagctaaactctcgagacttctctgtgaacttccctaccctacccccacaacacaagcaccccagacctcacctccatccccctctgtctgccctcacaattaggcttcattgcactgatcttactctactgctgctgacataaaaccaggaccctttctccacaggcaggctcatttcactaagctcctcctttactttctctctcctctttgatgtcaaacgccttgaaaacaagcctccacttccccacacttcccatttactcttgagactacttcaattagttcccctactacactttgctagtgaaactgcccaggcaaagtgcacctcaaatcttctaattccaagatccaataggatctcgttaatcatcagttcctttgatctcgctgtaagatttgtcaaggctgactactcacttctcctttaaattctttcctaccttggtcctgcctctttgagtatattagtaggttttttttatttgtttgagacagggtctcactctgtcacccaggctgcagtgcaatggcgcgatctcagctcactgcaacctccacctccgggttcaagcgattcttgtgcctcggcctccctagtagctgggattacaggcgcacaccaycacacacagctaattttttttttttttttttttttttttttttagacggagccttgctctgttgccagactggagtgcagtggcacgatctcggctcactgcaacctctgcctcccgggttcaagccattctgcctcagcctcccaagtagctgggagtacaggcgtctgccaccatgcctaatttttttctatttttaggagagaccggttttcaccacgttggccaggatggtctcgatatcctgatctcgtgatccgcctgcctctgcctcccaaagtgctgggattacaggtgtgacccactgcgcacagccccagctaattttcatatttttagtagagacagggttttgccatgttgcccaggctggtcttgaactcctaacctcgggtgatccacccaccttggcctcccaaagtgttaggattacaggcatgagccactgcgcccggctgagtgtactagtagttaagagaataaactagatctagaatcagagctggattcaattcctgtccttcacatttactagctgtgcaaccttgggcacataacttaatgtctttgagccttagttttttcatctgtaaaacagggataataacagcaccccatagagttgtgacgaggattgagataatctaagtaaagcacagtccctaggacatagtaaatgattcatatatccgaactactgttataattattccttcttactctcctcttctagcatttcttccaattattacagtccttcaagattccatttcttaacagtctccaatcccatctattctctgcctttactatatgttgaccattccaaagttcttatctctagctcagacatctactacagcactgtgatgctttatgcaactaactgtttacatatctgtcccctgctactagattgtgagctccttgagggaaaggaacatgatttatttgtccttttcccccagcacctagagtagtgcttggtgcatgatagtaggccttcaataaattttttctaaatgaatgaaatctttctggacaaggttaccttaatcccatgccagctgtcctcatcctctaaaccgttcataggcagcagtaaatgtgctcagacagttctgattatggactctcctaacacattctaattctcaaacaaatggttttgttgtcattgttttttctggctccaaatatacccactgtatcagtcagggtcttgga

SEQ ID NO: 240 - DNA, 1785 bp, Homo sapiens
cctgaagggaggatgggctaaggcaggcacacagtggcggagaagatgccctcctgggccctcttcatggtcacctcctgcctcctcctggcccctcaaaacctggcccaagtcagcagccaagatgtctccttgctggcatcagactcagagcccctgaaktgtttctccygaacatttgaggacctcacttgcttctgggatgaggaagaggcagygcccagtgggacataccagctgctgtatgcctacccrcgggagaagccccgtgcttgccccctgagttcccagagcatgccccactttggaaccygatacgtgtgccagtttccagaccaggaggaagtgcstctcttctttccgctgcacctctgggtgaagaatrtgttcctaaaccagactcggactcagcgagtcctctttgtggacagtgtaggcctgccggctccccmcagtatcatcaaggccatgggtgggagccagccaggggaacttcagatcagctgggaggagccagctccagaaatcagtgatttcctgaggtacraactccgctatggccccagagatcccaagaactccactggycccacggtcatayagctgattgccacagaaacctgctgccctgctctgcagaggcctcactcagcctctgctctggaccagtctccatgtgctcagcccacaatgccctggcaagatggaccaaagcagacctccccaagtagagargcttcagctctgacagcagagggtggaagctgcctcatctcaggactccagcctggcaactcctactggctgcagctgygcagcgaacctgatgggatctccctcggtggctcctggggatcctggtccctccctgtgactgtggacctgcctggagatgcagtggcacttggactgcaatgctttaccttggacctgaagaatgttacctgtcaatggcagcaacaggaccatgctagctcccaaggcttcttctaccacagcagggcacggtgctgccccagagacaggtaccccatctgggagaactgcgaagaggaagagaaaacaaatccaggactacagaccccacagttctctcgctgccacttcaagtcacgaaatgacagcattattcacatccttgtggaggtgaccacagccccgggtactgttcacagctacctgggctcccctttctggatccaccaggctgtgcgcctccccaccccaaacttgcactggagggagatctccagtgggcatctggaattggagtggcagcacccatcgtcctgggcagcccaagagacctgytatcaactccgatacacaggagaaggccatcaggactggaaggtgctggagccgcctctcggggcccgaggagggaccctggagctgcgcccgcgatctcgctaccgtttacagctgcgcgccaggctcaacggccccacctaccaaggtccctggagctcgtggtcggacccaactagggtggagaccgccaccgagaccgcctgratctccttggtgaccgctctgcatctagtgctgggcctcagcgccgtcctgggcctgctgctgctgaggtggcagtttcctgcacactacaggtaccgcccccgccaggcaggagactggcggtggaccaggtggagccgaaggcctgtaaacaggcattcttggttcgctctgtgaccccagatctccgtccaccgcccgtgcgcacctacggcttcgccacttcctgcacgtcacctctgggactcgccgcggctccttacactc

SEQ ID NO: 241 - DNA, 5543 bp, Homo sapiens
gagcagccgcgggagccgggaccgggtagccgcgcgctgggggtgggcgccgctcgctccgccccgcgaagcccctgcgcgctcagggacgcggcccccccgcggcagccgcgctaggctccggcgtgtggccgcggccgccgccgccgctgccatgtctccggggaagcccggggcgggcggagcggggacgaggcggaccggctggcggaggaggaggcgaaggagacggcaggaggcggcgacgacggtgcccgggctcgggcgcacggcggggcccgattcgcgcgtccggggcacgttccagggcgcgcggggcatgaagccggcggcgcgggaggcgcggctgcctccgcgctcgcccgggctgcgctgggcgctgccgctgctgctgctgctgctgcgcctgggccaggtaagcgccgggtggcccctagtccaattcctgacccttcagtagcaactgttgccacaggggaaaatggcataacgcagatcagcagtacagcagaatcctttcataaacagaatggaactggaacacctcaggtggaaacaaacaccagtgaggatggtgaaagctctggagccaacgatagtttaagaacacctgaacaaggatctaatgggactgatggggcatctcaaaaaactcccagtagcactgggcccagtcctgtgtttgacattaaagctgtttccatcagtccaaccaatgtgatcttaacttggaaaagtaatgacacagctgcttctgagtacaagtatgtagtaaagcataagatggaaaatgagaagacaattactgttgtgcatcaaccatggtgtaacatcacaggcttacgtccagcgacttcatatgtattctccatcactccaggaataggcartgagacttggggagatcccagagtcataaaagtcatcacagarccgatcccagtttctgatctccgtgttgccctcacgggtgtgaggaaggctgctctctcctggagcaatggcaatggcacygcctcctgccgggttcttcttgaaagcattggaagccatgaggagttgactcaagactcaagacttcaggtcaatatctcgggcctgaagccaggggttcaatacaacatcaacccgtatcttctacmatcaaataagacaaagggagaccccttgggcacagaaggtggcttggatrccagcaatacagagagaagccgggcagggagccccaccgcccctgtgcatgatgagtccctcgtgggacctgtggacccatcctccggccagcagtcccragacacggaagtcctgcttgtcgggttagagcctggcacccgatacaatgccaccgtttattcccaagcagcgaatggcacagaaggacagccccaggccatagagttcaggacaaatgctattcaggtttttgacrtcaccgctgtgaacatcagtgccacaagcctgaccctgatctggaaagtcagcgataacgagtcgtcatctaactatacctacaagatacatgtggcgggggagacagattcttccaatctcaacgtcagtgagcctcrcgctgtcatccccggactccgctccagcaccttctacaacatcacagtgtgtcctgtcctaggtgacatcgagggcacgccgggcttcctccaagtgcrcaccccccctgttccagtttctgacttccgagtgacagtggtcagcacgacggagatcggcttrgcatggagcagccatgatgcagaatcatttcagatgcatatcacacaggagggagctggcaattctcgggtagaaataaccaccaaccaaagtattatcattggtggcttgttccctggaaccaagtattgctttgaaatagttccaaaaggaccaaatgggactgaaggggcatctcggacagtttgcaatagaactgttcccagtgcagtgtttgacatccacgtggtctacgtcaccaccacggagatgtggctggactggaagagccctgacggtgcttccgagtatgtctaccatttagtcatagagtccaagcatggctctaaccacacaagcacgtatgacaaagcgattactctccagggcctgattccgggcaccttatataacatcaccatctctccagaagtggaccacgtctggggggaccccaactccactgcacagtacacacggcccagcaatgtgtccaacattgatgtaagtaccaacaccacagcagcaactttaagttggcagaactttgatgacgcctctcccacgtactcctactgccttcttattgagaaggctggaaattccagcaacgcaacacaagtagtcacggacattggaattactgacgctacagtcactgaattaatacctggctcatcatacacagtggagatctttgcacaagtaggggatgggatcaagtcactggaacctggccggaagtcattctgtacagatcctgcgtccatggcctccttcgactgcgaagtggtccccaaagagccagccctggttctcaaatggacctgccctcctggcgccaatgcaggctttgagctggaggtcagcagtggagcctggaacaatgcgacccacctggagagctgctcctctgagartggcactgagtatagaacggaagtcacgtatttgaatttttctacctcgtacaacatcagcatcaccactgtgtcctgtggaaagatggcagcccccacccggaacacctgcactactggcatcacagatccccctcctccagatggatcccctaatattacatctgtcagtcacaattcagtaaaggtcaagttcagtggatttgaagccagccacggacccatcaaagcctatgctgtcattctcaccaccggggaagctggtcacccttctgcagatgtcctgaaatacacgtatgasgatttcaaaaagggagcctcagatacttatgtgacatacctcataagaacagaagaaaagggacgttctcagagcttgtctgaagttttgaaatatgaaattgacgttgggaatgagtcaaccacacttggttattacaatgggaagctggaacctctgggctcctaccgggcttgtgtggctggcttcaccaacattaccttccaccctcaaaacaaggggctcattgatggggytgagagctatgtgtccttcagtcgytactcagatgctgtttccttgccccaggatccaggtgtcatctgtggagcggtttttggctgtatctttggtgccctggttattgtgactgtgggaggcttcatcttctggagaaagaagaggaaagatgcaaagaataatgaagtgtccttttctcaaattaaatctaagttaatcagagtggagaattttgaggcctacttcaagaagcagcaagctgactccaactgtgggttcgcagaggaatacgaagatctgaagcttgttggaattagtcaacctaaatatgcagcagaactggctgagaatagaggaaagaatcgctataataatgttctgccctatgatatttcccgtgtcaaactttcggtccagacccattcaacggatgactacatcaatgccaactacatgcctggctaccactccaagaaagattttattgccacacaaggacctttaccgaacactttgaaagatttttggcgtatggtttgggagaaaaatgtatatgccatcattatgttgactaaatgtgttgaacagggaagaaccaaatgtgaggagtattggccctccaagcaggctcaggactatggagacataactgtggcaatgacatcagaaattgttcttccggaatggaccatcagagatttcacagtgaaaaatatccagacaagtgagagtcaccctctgagacagttccatttcacctcctggccagaccacggtgttcccgacaccactgacctgctcatcaacttccggtacctcgttcgtgactacatgaagcagagtcctcccgaatcgccgaytctggtgcattgcagtgctggggtcggaaggacgggcactttcattgccattgatcgtctcatctaccagatagagaatgagaacaccgtggatgtgtatgggattgtgtatgaccttcgaatgcataggcctttaatggtgcagacagaggaccagtatgttttcctcaatcagtgtgttttggatattgtcagatcccagaaagactcaaaagtagatcttatctaccagaacacaactgcaatgacaatctatgaaaaccttgcrcccgtgaccacatttggaaagaccaatggttacatmgcctaattccaaaggaataacctttctggagtgaaccagaccgtcgcacccacagcgaaggcacatgccccgatgtcgacatgtttttatatgtctaatatcttaattctttgttctgttttgtgagaactaattttgagggcatgaagctgcatatgatagatgacaaattggggctgtcgggggctgtggatgggtggggagcaaatcatctgcattcctgatgaccaatgggatgaggtcactttttttttttttcccccttgaggattgyggaaaaccaggaaaagggakctatgatttttttttccaaaacaatttcttttttaaaaaagactattttatatgattcacatgctaaagccaggattgtgttgggttgaatatattttaagtatcagaggtctatttttacctactgtgtcttggaatctagccgatggaaaatacctaattgtggatgatgattgcgcagggaggggtacgtggcacctcttccgaatgggttttctatttgaacatgtgccttttctgaattatgcttccacaggcaaaactcagtagagatctatatttttgtactgaatctcataattggaatatacggaatatttaaacagtagcttagcatcagaggtttgcttcctcagtaacatttctgttctcatttgatcaggggaggcctctttgccccgrcyccgcttcccctgccccctgtasatttgtgctccattttttcttcccttttccctcccagttttctccaaagactcttctgttggcaacattttcaacccattggttgggtgagaatggcgactcaaatatcaccttgagaatttctgtgggtgggaatgggagaagcagaggaatcctacagtggcagaaatccttttcttgtccctgtattatcctttttctcatgtctgtatttggtatgaaggattatttaaaggtgcaatatgtgaattagtgattcatgatgttctaggtttttagtaacgttttactcaggttggcattttatgtgtctgtgtctgtatgtgtgtgtgtatgttcagaagcgtggcaatctgtgaacacttcagcgtgaattcagtgtcagattaatccctccttccccaaagtccactggctttcgtctctctctgccgtgacacatatcggaatctactgtatatatatatatatatatatatatatatatatatatatatatatatrcacta

SEQ ID NO: 242 - DNA, 5547 bp, Homo sapiens
gagcagccgcgggagccgggaccgggtagccgcgcgctgggggtgggcgccgctcgctccgccccgcgaagcccctgcgcgctcagggacgcggcccccccgcggcagccgcgctaggctccggcgtgtggccgcggccgccgccgccgctgccatgtctccggggaagcccggggcgggcggagcggggacgaggcggaccggctggcggaggaggaggcgaaggagacggcaggaggcggcgacgacggtgcccgggctcgggcgcacggcggggcccgattcgcgcgtccggggcacgttccagggcgcgcggggcatgaagccggcggcgcgggaggcgcggctgcctccgcgctcgcccgggctgcgctgggcgctgccgctgctgctgctgctgctgcgcctgggccaggtaagcgccgggtggcccctagtccaattcctgacccttcagtagcaactgttgccacaggggaaaatggcataacgcagatcagcagtacagcagaatcctttcataaacagaatggaactggaacacctcaggtggaaacaaacaccagtgaggatggtgaaagctctggagccaacgatagtttaagaacacctgaacaaggatctaatgggactgatggggcatctcaaaaaactcccagtagcactgggcccagtcctgtgtttgacattaaagctgtttccatcagtccaaccaatgtgatcttaacttggaaaagtaatgacacagctgcttctgagtacaagtatgtagtaaagcataagatggaaaatgagaagacaattactgttgtgcatcaaccatggtgtaacatcacaggcttacgtccagcgacttcatatgtattctccatcactccaggaataggcartgagacttggggagatcccagagtcataaaagtcatcacagarccgatcccagtttctgatctccgtgttgccctcacgggtgtgaggaaggctgctctctcctggagcaatggcaatggcacygcctcctgccgggttcttcttgaaagcattggaagccatgaggagttgactcaagactcaagacttcaggtcaatatctcgggcctgaagccaggggttcaatacaacatcaacccgtatcttctacmatcaaataagacaaagggagaccccttgggcacagaaggtggcttggatrccagcaatacagagagaagccgggcagggagccccaccgcccctgtgcatgatgagtccctcgtgggacctgtggacccatcctccggccagcagtcccragacacggaagtcctgcttgtcgggttagagcctggcacccgatacaatgccaccgtttattcccaagcagcgaatggcacagaaggacagccccaggccatagagttcaggacaaatgctattcaggtttttgacrtcaccgctgtgaacatcagtgccacaagcctgaccctgatctggaaagtcagcgataacgagtcgtcatctaactatacctacaagatacatgtggcgggggagacagattcttccaatctcaacgtcagtgagcctcrcgctgtcatccccggactccgctccagcaccttctacaacatcacagtgtgtcctgtcctaggtgacatcgagggcacgccgggcttcctccaagtgcrcaccccccctgttccagtttctgacttccgagtgacagtggtcagcacgacggagatcggcttrgcatggagcagccatgatgcagaatcatttcagatgcatatcacacaggagggagctggcaattctcgggtagaaataaccaccaaccaaagtattatcattggtggcttgttccctggaaccaagtattgctttgaaatagttccaaaaggaccaaatgggactgaaggggcatctcggacagtttgcaatagaactgttcccagtgcagtgtttgacatccacgtggtctacgtcaccaccacggagatgtggctggactggaagagccctgacggtgcttccgagtatgtctaccatttagtcatagagtccaagcatggctctaaccacacaagcacgtatgacaaagcgattactctccagggcctgattccgggcaccttatataacatcaccatctctccagaagtggaccacgtctggggggaccccaactccactgcacagtacacacggcccagcaatgtgtccaacattgatgtaagtaccaacaccacagcagcaactttaagttggcagaactttgatgacgcctctcccacgtactcctactgccttcttattgagaaggctggaaattccagcaacgcaacacaagtagtcacggacattggaattactgacgctacagtcactgaattaatacctggctcatcatacacagtggagatctttgcacaagtaggggatgggatcaagtcactggaacctggccggaagtcattctgtacagatcctgcgtccatggcctccttcgactgcgaagtggtccccaaagagccagccctggttctcaaatggacctgccctcctggcgccaatgcaggctttgagctggaggtcagcagtggagcctggaacaatgcgacccacctggagagctgctcctctgagartggcactgagtatagaacggaagtcacgtatttgaatttttctacctcgtacaacatcagcatcaccactgtgtcctgtggaaagatggcagcccccacccggaacacctgcactactggcatcacagatccccctcctccagatggatcccctaatattacatctgtcagtcacaattcagtaaaggtcaagttcagtggatttgaagccagccacggacccatcaaagcctatgctgtcattctcaccaccggggaagctggtcacccttctgcagatgtcctgaaatacacgtatgasgatttcaaaaagggagcctcagatacttatgtgacatacctcataagaacagaagaaaagggacgttctcagagcttgtctgaagttttgaaatatgaaattgacgttgggaatgagtcaaccacacttggttattacaatgggaagctggaacctctgggctcctaccgggcttgtgtggctggcttcaccaacattaccttccaccctcaaaacaaggggctcattgatggggytgagagctatgtgtccttcagtcgytactcagatgctgtttccttgccccaggatccaggtgtcatctgtggagcggtttttggctgtatctttggtgccctggttattgtgactgtgggaggcttcatcttctggagaaagaagaggaaagatgcaaagaataatgaagtgtccttttctcaaattaagtaaatctaagttaatcagagtggagaattttgaggcctacttcaagaagcagcaagctgactccaactgtgggttcgcagaggaatacgaagatctgaagcttgttggaattagtcaacctaaatatgcagcagaactggctgagaatagaggaaagaatcgctataataatgttctgccctatgatatttcccgtgtcaaactttcggtccagacccattcaacggatgactacatcaatgccaactacatgcctggctaccactccaagaaagattttattgccacacaaggacctttaccgaacactttgaaagatttttggcgtatggtttgggagaaaaatgtatatgccatcattatgttgactaaatgtgttgaacagggaagaaccaaatgtgaggagtattggccctccaagcaggctcaggactatggagacataactgtggcaatgacatcagaaattgttcttccggaatggaccatcagagatttcacagtgaaaaatatccagacaagtgagagtcaccctctgagacagttccatttcacctcctggccagaccacggtgttcccgacaccactgacctgctcatcaacttccggtacctcgttcgtgactacatgaagcagagtcctcccgaatcgccgaytctggtgcattgcagtgctggggtcggaaggacgggcactttcattgccattgatcgtctcatctaccagatagagaatgagaacaccgtggatgtgtatgggattgtgtatgaccttcgaatgcataggcctttaatggtgcagacagaggaccagtatgttttcctcaatcagtgtgttttggatattgtcagatcccagaaagactcaaaagtagatcttatctaccagaacacaactgcaatgacaatctatgaaaaccttgcrcccgtgaccacatttggaaagaccaatggttacatmgcctaattccaaaggaataacctttctggagtgaaccagaccgtcgcacccacagcgaaggcacatgccccgatgtcgacatgtttttatatgtctaatatcttaattctttgttctgttttgtgagaactaattttgagggcatgaagctgcatatgatagatgacaaattggggctgtcgggggctgtggatgggtggggagcaaatcatctgcattcctgatgaccaatgggatgaggtcactttttttttttttcccccttgaggattgyggaaaaccaggaaaagggakctatgatttttttttccaaaacaatttcttttttaaaaaagactattttatatgattcacatgctaaagccaggattgtgttgggttgaatatattttaagtatcagaggtctatttttacctactgtgtcttggaatctagccgatggaaaatacctaattgtggatgatgattgcgcagggaggggtacgtggcacctcttccgaatgggttttctatttgaacatgtgccttttctgaattatgcttccacaggcaaaactcagtagagatctatatttttgtactgaatctcataattggaatatacggaatatttaaacagtagcttagcatcagaggtttgcttcctcagtaacatttctgttctcatttgatcaggggaggcctctttgccccgrcyccgcttcccctgccccctgtasatttgtgctccattttttcttcccttttccctcccagttttctccaaagactcttctgttggcaacattttcaacccattggttgggtgagaatggcgactcaaatatcaccttgagaatttctgtgggtgggaatgggagaagcagaggaatcctacagtggcagaaatccttttcttgtccctgtattatcctttttctcatgtctgtatttggtatgaaggattatttaaaggtgcaatatgtgaattagtgattcatgatgttctaggtttttagtaacgttttactcaggttggcattttatgtgtctgtgtctgtatgtgtgtgtgtatgttcagaagcgtggcaatctgtgaacacttcagcgtgaattcagtgtcagattaatccctccttccccaaagtccactggctttcgtctctctctgccgtgacacatatcggaatctactgtatatatatatatatatatatatatatatatatatatatatatatatrcacta

SEQ ID NO: 243 - DNA, 857 bp, Homo sapiens
atgcctgggtacattgcrtgctctggggaccagtatgttttcctcaatcagtgtgttttggatattgtcagatcccagaaagactcaaaagtagatcttatctaccagaacacaactgcaatgacaatctatgaaaaccttgcrcccgtgaccacatttggaaagaccaatgaaaagcagctggtatgggtttgggtgtcaatgaaagggccaaagactggtggccagctggtttgggggatttgggccattgatagcatctcccaggaacaacgactttttgcctccaaagttggatctagtgatgatcagcaccagcaggaaatgacatttggtgtctgcccactgcagccatactgtgacctccagccagacttccgcctaattgactccactggatttgtgctctgttgagtcagaggctcccgggggttggggatcgaggggcgggggtcagctatgcagcccatcacgtgtgtttttcatctgggatgaaaaagcctggttctcttttgaaatgcttgattgtacttattgagctaaacaagtcttggtgactgttgttgatttgcctcaaaagttttaagtcctgggttttcagactactgtgtagcagctgtgtgtttaacatactgtagctttttctcccttgggggcacatacaaataggatgtgttgatgtggactctaaactgtaattttcctgtaactattttggaatgatgcatatttctaatgtttgttatacttgtacagagtattgctgttggttgcttttttttttttttaaggaaaaaatggcctgaaaacatttttttaaagacttacaaataccaaatataaaaaaatgtcaatgc

SEQ ID NO: 244 - DNA, 5117 bp, Homo sapiens
cccctagtccaattcctgacccttcagtagcaactgttgccacaggggaaaatggcataacgcagatcagcagtacagcagaatcctttcataaacagaatggaactggaacacctcaggtggaaacaaacaccagtgaggatggtgaaagctctggagccaacgatagtttaagaacacctgaacaaggatctaatgggactgatggggcatctcaaaaaactcccagtagcactgggcccagtcctgtgtttgacattaaagctgtttccatcagtccaaccaatgtgatcttaacttggaaaagtaatgacacagctgcttctgagtacaagtatgtagtaaagcataagatggaaaatgagaagacaattactgttgtgcatcaaccatggtgtaacatcacaggcttacgtccagcgacttcatatgtattctccatcactccaggaataggcartgagacttggggagatcccagagtcataaaagtcatcacagarccgatcccagtttctgatctccgtgttgccctcacgggtgtgaggaaggctgctctctcctggagcaatggcaatggcacygcctcctgccgggttcttcttgaaagcattggaagccatgaggagttgactcaagactcaagacttcaggtcaatatctcgggcctgaagccaggggttcaatacaacatcaacccgtatcttctacmatcaaataagacaaagggagaccccttgggcacagaaggtggcttggatrccagcaatacagagagaagccgggcagggagccccaccgcccctgtgcatgatgagtccctcgtgggacctgtggacccatcctccggccagcagtcccragacacggaagtcctgcttgtcgggttagagcctggcacccgatacaatgccaccgtttattcccaagcagcgaatggcacagaaggacagccccaggccatagagttcaggacaaatgctattcaggtttttgacrtcaccgctgtgaacatcagtgccacaagcctgaccctgatctggaaagtcagcgataacgagtcgtcatctaactatacctacaagatacatgtggcgggggagacagattcttccaatctcaacgtcagtgagcctcrcgctgtcatccccggactccgctccagcaccttctacaacatcacagtgtgtcctgtcctaggtgacatcgagggcacgccgggcttcctccaagtgcrcaccccccctgttccagtttctgacttccgagtgacagtggtcagcacgacggagatcggcttrgcatggagcagccatgatgcagaatcatttcagatgcatatcacacaggagggagctggcaattctcgggtagaaataaccaccaaccaaagtattatcattggtggcttgttccctggaaccaagtattgctttgaaatagttccaaaaggaccaaatgggactgaaggggcatctcggacagtttgcaatagaactgttcccagtgcagtgtttgacatccacgtggtctacgtcaccaccacggagatgtggctggactggaagagccctgacggtgcttccgagtatgtctaccatttagtcatagagtccaagcatggctctaaccacacaagcacgtatgacaaagcgattactctccagggcctgattccgggcaccttatataacatcaccatctctccagaagtggaccacgtctggggggaccccaactccactgcacagtacacacggcccagcaatgtgtccaacattgatgtaagtaccaacaccacagcagcaactttaagttggcagaactttgatgacgcctctcccacgtactcctactgccttcttattgagaaggctggaaattccagcaacgcaacacaagtagtcacggacattggaattactgacgctacagtcactgaattaatacctggctcatcatacacagtggagatctttgcacaagtaggggatgggatcaagtcactggaacctggccggaagtcattctgtacagatcctgcgtccatggcctccttcgactgcgaagtggtccccaaagagccagccctggttctcaaatggacctgccctcctggcgccaatgcaggctttgagctggaggtcagcagtggagcctggaacaatgcgacccacctggagagctgctcctctgagartggcactgagtatagaacggaagtcacgtatttgaatttttctacctcgtacaacatcagcatcaccactgtgtcctgtggaaagatggcagcccccacccggaacacctgcactactggcatcacagatccccctcctccagatggatcccctaatattacatctgtcagtcacaattcagtaaaggtcaagttcagtggatttgaagccagccacggacccatcaaagcctatgctgtcattctcaccaccggggaagctggtcacccttctgcagatgtcctgaaatacacgtatgasgatttcaaaaagggagcctcagatacttatgtgacatacctcataagaacagaagaaaagggacgttctcagagcttgtctgaagttttgaaatatgaaattgacgttgggaatgagtcaaccacacttggttattacaatgggaagctggaacctctgggctcctaccgggcttgtgtggctggcttcaccaacattaccttccaccctcaaaacaaggggctcattgatggggytgagagctatgtgtccttcagtcgytactcagatgctgtttccttgccccaggatccaggtgtcatctgtggagcggtttttggctgtatctttggtgccctggttattgtgactgtgggaggcttcatcttctggagaaagaagaggaaagatgcaaagaataatgaagtgtccttttctcaaattaagtaaatctaagttaatcagagtggagaattttgaggcctacttcaagaagcagcaagctgactccaactgtgggttcgcagaggaatacgaagatctgaagcttgttggaattagtcaacctaaatatgcagcagaactggctgagaatagaggaaagaatcgctataataatgttctgccctatgatatttcccgtgtcaaactttcggtccagacccattcaacggatgactacatcaatgccaactacatgcctggctaccactccaagaaagattttattgccacacaaggacctttaccgaacactttgaaagatttttggcgtatggtttgggagaaaaatgtatatgccatcattatgttgactaaatgtgttgaacagggaagaaccaaatgtgaggagtattggccctccaagcaggctcaggactatggagacataactgtggcaatgacatcagaaattgttcttccggaatggaccatcagagatttcacagtgaaaaatatccagacaagtgagagtcaccctctgagacagttccatttcacctcctggccagaccacggtgttcccgacaccactgacctgctcatcaacttccggtacctcgttcgtgactacatgaagcagagtcctcccgaatcgccgaytctggtgcattgcagtgctggggtcggaaggacgggcactttcattgccattgatcgtctcatctaccagatagagaatgagaacaccgtggatgtgtatgggattgtgtatgaccttcgaatgcataggcctttaatggtgcagacagaggaccagtatgttttcctcaatcagtgtgttttggatattgtcagatcccagaaagactcaaaagtagatcttatctaccagaacacaactgcaatgacaatctatgaaaaccttgcrcccgtgaccacatttggaaagaccaatggttacatmgcctaattccaaaggaataacctttctggagtgaaccagaccgtcgcacccacagcgaaggcacatgccccgatgtcgacatgtttttatatgtctaatatcttaattctttgttctgttttgtgagaactaattttgagggcatgaagctgcatatgatagatgacaaattggggctgtcgggggctgtggatgggtggggagcaaatcatctgcattcctgatgaccaatgggatgaggtcactttttttttttttcccccttgaggattgyggaaaaccaggaaaagggakctatgatttttttttccaaaacaatttcttttttaaaaaagactattttatatgattcacatgctaaagccaggattgtgttgggttgaatatattttaagtatcagaggtctatttttacctactgtgtcttggaatctagccgatggaaaatacctaattgtggatgatgattgcgcagggaggggtacgtggcacctcttccgaatgggttttctatttgaacatgtgccttttctgaattatgcttccacaggcaaaactcagtagagatctatatttttgtactgaatctcataattggaatatacggaatatttaaacagtagcttagcatcagaggtttgcttcctcagtaacatttctgttctcatttgatcaggggaggcctctttgccccgrcyccgcttcccctgccccctgtasatttgtgctccattttttcttcccttttccctcccagttttctccaaagactcttctgttggcaacattttcaacccattggttgggtgagaatggcgactcaaatatcaccttgagaatttctgtgggtgggaatgggagaagcagaggaatcctacagtggcagaaatccttttcttgtccctgtattatcctttttctcatgtctgtatttggtatgaaggattatttaaaggtgcaatatgtgaattagtgattcatgatgttctaggtttttagtaacgttttactcaggttggcattttatgtgtctgtgtctgtatgtgtgtgtgtatgttcagaagcgtggcaatctgtgaacacttcagcgtgaattcagtgtcagattaatccctccttccccaaagtccactggctttcgtctctctctgccgtgacacatatcggaatctactgtatatatatatatatatatatatatatatatatatatatatatatatrcacta

SEQ ID NO: 245 - DNA, 5548 bp, Homo sapiens
gagcagccgcgggagccgggaccgggtagccgcgcgctgggggtgggcgccgctcgctccgccccgcgaagcccctgcgcgctcagggacgcggcccccccgcggcagccgcgctaggctccggcgtgtggccgcggccgccgccgccgctgccatgtctccggggaagcccggggcgggcggagcggggacgaggcggaccggctggcggaggaggaggcgaaggagacggcaggaggcggcgacgacggtgcccgggctcgggcgcacggcggggcccgattcgcgcgtccggggcacgttccagggcgcgcggggcatgaagccggcggcgcgggaggcgcggctgcctccgcgctcgcccgggctgcgctgggcgctgccgctgctgctgctgctgctgcgcctgggccaggtaagcgccgggtggcccctagtccaattcctgacccttcagtagcaactgttgccacaggggaaaatggcataacgcagatcagcagtacagcagaatcctttcataaacagaatggaactggaacacctcaggtggaaacaaacaccagtgaggatggtgaaagctctggagccaacgatagtttaagaacacctgaacaaggatctaatgggactgatggggcatctcaaaaaactcccagtagcactgggcccagtcctgtgtttgacattaaagctgtttccatcagtccaaccaatgtgatcttaacttggaaaagtaatgacacagctgcttctgagtacaagtatgtagtaaagcataagatggaaaatgagaagacaattactgttgtgcatcaaccatggtgtaacatcacaggcttacgtccagcgacttcatatgtattctccatcactccaggaataggcartgagacttggggagatcccagagtcataaaagtcatcacagarccgatcccagtttctgatctccgtgttgccctcacgggtgtgaggaaggctgctctctcctggagcaatggcaatggcacygcctcctgccgggttcttcttgaaagcattggaagccatgaggagttgactcaagactcaagacttcaggtcaatatctcgggcctgaagccaggggttcaatacaacatcaacccgtatcttctacmatcaaataagacaaagggagaccccttgggcacagaaggtggcttggatrccagcaatacagagagaagccgggcagggagccccaccgcccctgtgcatgatgagtccctcgtgggacctgtggacccatcctccggccagcagtcccragacacggaagtcctgcttgtcgggttagagcctggcacccgatacaatgccaccgtttattcccaagcagcgaatggcacagaaggacagccccaggccatagagttcaggacaaatgctattcaggtttttgacrtcaccgctgtgaacatcagtgccacaagcctgaccctgatctggaaagtcagcgataacgagtcgtcatctaactatacctacaagatacatgtggcgggggagacagattcttccaatctcaacgtcagtgagcctcrcgctgtcatccccggactccgctccagcaccttctacaacatcacagtgtgtcctgtcctaggtgacatcgagggcacgccgggcttcctccaagtgcrcaccccccctgttccagtttctgacttccgagtgacagtggtcagcacgacggagatcggcttrgcatggagcagccatgatgcagaatcatttcagatgcatatcacacaggagggagctggcaattctcgggtagaaataaccaccaaccaaagtattatcattggtggcttgttccctggaaccaagtattgctttgaaatagttccaaaaggaccaaatgggactgaaggggcatctcggacagtttgcaatagaactgttcccagtgcagtgtttgacatccacgtggtctacgtcaccaccacggagatgtggctggactggaagagccctgacggtgcttccgagtatgtctaccatttagtcatagagtccaagcatggctctaaccacacaagcacgtatgacaaagcgattactctccagggcctgattccgggcaccttatataacatcaccatctctccagaagtggaccacgtctggggggaccccaactccactgcacagtacacacggcccagcaatgtgtccaacattgatgtaagtaccaacaccacagcagcaactttaagttggcagaactttgatgacgcctctcccacgtactcctactgccttcttattgagaaggctggaaattccagcaacgcaacacaagtagtcacggacattggaattactgacgctacagtcactgaattaatacctggctcatcatacacagtggagatctttgcacaagtaggggatgggatcaagtcactggaacctggccggaagtcattctgtacagatcctgcgtccatggcctccttcgactgcgaagtggtccccaaagagccagccctggttctcaaatggacctgccctcctggcgccaatgcaggctttgagctggaggtcagcagtggagcctggaacaatgcgacccacctggagagctgctcctctgagartggcactgagtatagaacggaagtcacgtatttgaatttttctacctcgtacaacatcagcatcaccactgtgtcctgtggaaagatggcagcccccacccggaacacctgcactactggcatcacagatccccctcctccagatggatcccctaatattacatctgtcagtcacaattcagtaaaggtcaagttcagtggatttgaagccagccacggacccatcaaagcctatgctgtcattctcaccaccggggaagctggtcacccttctgcagatgtcctgaaatacacgtatgasgatttcaaaaagggagcctcagatacttatgtgacatacctcataagaacagaagaaaagggacgttctcagagcttgtctgaagttttgaaatatgaaattgacgttgggaatgagtcaaccacacttggttattacaatgggaagctggaacctctgggctcctaccggtaatggcttgtgtggctggcttcaccaacattaccttccaccctcaaaacaaggggctcattgatggggytgagagctatgtgtccttcagtcgytactcagatgctgtttccttgccccaggatccaggtgtcatctgtggagcggtttttggctgtatctttggtgccctggttattgtgactgtgggaggcttcatcttctggagaaagaagaggaaagatgcaaagaataatgaagtgtccttttctcaaattaaatctaagttaatcagagtggagaattttgaggcctacttcaagaagcagcaagctgactccaactgtgggttcgcagaggaatacgaagatctgaagcttgttggaattagtcaacctaaatatgcagcagaactggctgagaatagaggaaagaatcgctataataatgttctgccctatgatatttcccgtgtcaaactttcggtccagacccattcaacggatgactacatcaatgccaactacatgcctggctaccactccaagaaagattttattgccacacaaggacctttaccgaacactttgaaagatttttggcgtatggtttgggagaaaaatgtatatgccatcattatgttgactaaatgtgttgaacagggaagaaccaaatgtgaggagtattggccctccaagcaggctcaggactatggagacataactgtggcaatgacatcagaaattgttcttccggaatggaccatcagagatttcacagtgaaaaatatccagacaagtgagagtcaccctctgagacagttccatttcacctcctggccagaccacggtgttcccgacaccactgacctgctcatcaacttccggtacctcgttcgtgactacatgaagcagagtcctcccgaatcgccgaytctggtgcattgcagtgctggggtcggaaggacgggcactttcattgccattgatcgtctcatctaccagatagagaatgagaacaccgtggatgtgtatgggattgtgtatgaccttcgaatgcataggcctttaatggtgcagacagaggaccagtatgttttcctcaatcagtgtgttttggatattgtcagatcccagaaagactcaaaagtagatcttatctaccagaacacaactgcaatgacaatctatgaaaaccttgcrcccgtgaccacatttggaaagaccaatggttacatmgcctaattccaaaggaataacctttctggagtgaaccagaccgtcgcacccacagcgaaggcacatgccccgatgtcgacatgtttttatatgtctaatatcttaattctttgttctgttttgtgagaactaattttgagggcatgaagctgcatatgatagatgacaaattggggctgtcgggggctgtggatgggtggggagcaaatcatctgcattcctgatgaccaatgggatgaggtcactttttttttttttcccccttgaggattgyggaaaaccaggaaaagggakctatgatttttttttccaaaacaatttcttttttaaaaaagactattttatatgattcacatgctaaagccaggattgtgttgggttgaatatattttaagtatcagaggtctatttttacctactgtgtcttggaatctagccgatggaaaatacctaattgtggatgatgattgcgcagggaggggtacgtggcacctcttccgaatgggttttctatttgaacatgtgccttttctgaattatgcttccacaggcaaaactcagtagagatctatatttttgtactgaatctcataattggaatatacggaatatttaaacagtagcttagcatcagaggtttgcttcctcagtaacatttctgttctcatttgatcaggggaggcctctttgccccgrcyccgcttcccctgccccctgtasatttgtgctccattttttcttcccttttccctcccagttttctccaaagactcttctgttggcaacattttcaacccattggttgggtgagaatggcgactcaaatatcaccttgagaatttctgtgggtgggaatgggagaagcagaggaatcctacagtggcagaaatccttttcttgtccctgtattatcctttttctcatgtctgtatttggtatgaaggattatttaaaggtgcaatatgtgaattagtgattcatgatgttctaggtttttagtaacgttttactcaggttggcattttatgtgtctgtgtctgtatgtgtgtgtgtatgttcagaagcgtggcaatctgtgaacacttcagcgtgaattcagtgtcagattaatccctccttccccaaagtccactggctttcgtctctctctgccgtgacacatatcggaatctactgtatatatatatatatatatatatatatatatatatatatatatatatrcacta

SEQ ID NO: 246 - DNA, 2472 bp, Homo sapiens
cactcaaaaagagtgaatgaaatgtgcagctcagagtgtcatttctgaagggaggagtctttctcttggagaagagtcctcaatgagcctggccgaggcccgggatctgtgtgaagtggactaaggattaagtaggatgtcaactgagacagaacttcaagtagctgtgaaaaccagcgccaagaaagactccagaaagaaaggtcaggatcgcagtgaagccactttgataaagaggtttaaaggtgaaggggtccggtacaaagccaaattgatcgggattgatgaagtttccgcagctcggggagacaagttatgtcaagattccatgatgaaactcaagggcrttgttgctggcgctcgttccaaaggagaacacaaacagaaaatctttttaaccatctcctttggaggaatcaaaatctttgatgagaagacaggggcccttcagcatcatcatgctgttcatgaaatatcctacattgcaaaggacattacagatcaccgggcctttggatatgtttgtgggaaggaagggaatcacagatttgtggccataaaaacagcccaggcggctgaacctgttattctggacttgagagatctctttcaactcatttatgaattgaagcaaagagaagaattagaaaaaaaggcacaaaaggataagcagtgtgaacaagctgtgtaccagacaatattggaagaggatgttgaagatcctgtgtaccagtacattgtgtttgaggctggacacgagccaatccgtgatcccgaaacggaagaaaacatttatcaggttcccaccagccaaaagaaggaaggtgtttatgatgtgccaaaaagtcaacctgctgtgacccaattagaactttttggggacatgtccacaccccctgatataacctctccccccactcctgcaactccaggtgatgcctttatcccatcttcatctcagacccttccagcgagtgcagatgtgtttarttctgtacctttcggcactgctgctgtaccctcaggttacgttgcaatgggcgctgtcctcccrtccttctggggtcagcagcccctcgtccaacagcagatggtcatgggtgcccagccaccagtcgctcaggtgatgccgggggctcagcccatcgcatggggccagccgggtctctttcctgccactcagcagccctggccaactgtggccgggcagtttccgccagccgccttcatgcccacacaaactgttatgcctttgccagctgccatgttccaaggtcccctcaccccccttgccaccgtcccaggcacgagtgactccaccaggtcaagtccacagaccgacaagcccaggcagaaaatgggcaaagaaacgtttaaggatttccagatggcccagcctccgcccgtgccctcccgcaaacccgaccagccctccctcacctgtacctcagaggccttctccagttacttcaacaaagtcggggtggcacaggatacagacgactgtgatgactttgacatctcccagttgaatttgacccctgtgacttctaccacaccatcgaccaactcacctccaaccccagcccctagacagagctctccatccaaatcatctgcatcccatgccagtgatcctaccacagatgacatctttgaagagggctttgaaagtcccagcaaaagcgaagagcaagaagctcctgatggatcacaggcctcatccaacagtgatccatttggtgagcccagtggggagcccagtggtgataatataagtccacaggccggtagctagatagcgcaggtctgggagccagagcctctgtacgcgcagatcaacagacctaagaaatagcatcgatgcgagctcgtggtgggtgctcaagactggcatggacatcagcatcacgacaggctctcttgtattctttcacctcttcccacaagaaattcatgattgcccaatggaactcgctcagaagagggaactaagcatttttggcaaccaatggcagatatctatggcagcacacaaaaaaagtatagaaagatccacccaacattaaatcagaaatcaagcaaatgcttacccaacaaatatttgagccctcatagctgggtttaagatgactcagtgtgcaaaattattaattccctttttatttctctacctgttgaccactgttgagacaccaaatttggagtgacaggcatcagaggattacaacagggttggaactgacttctttaagcaaaagcaaagggtcttctgtgaccacaatatcrtcatccatatgccttttcacataggatgatgtgttttttgtcactccatggggcctggtctgccattttcccccctttcctttttttgtcatgtttgaaaattaataggtgtacaaatttttgtattgcttttgactttttttagatatgggtgaagaaatctaactggggagaaaaaaagcc

SEQ ID NO: 247 - DNA, 2633 bp, Homo sapiens
gcagagagctcagtttttttttctaccaaggaaactttaaatctctgtggttcggctcataaagcaggcacacaagagggtgtcaaccgccgagagaacccagaggcagggagtccgagatggggggaggtcgtgtcgcggcgtctgaaaggggccactggcactcaaaaagagtgaatgaaatgtgcagctcagagtgtcatttctgaagggaggagtctttctcttggagaagagtcctcaatgagcctggccgaggcccgggatctgtgtgaagtggactaaggattaagtaggatgtcaactgagacagaacttcaagtagctgtgaaaaccagcgccaagaaagactccagaaagaaaggtcaggatcgcagtgaagccactttgataaagaggtttaaaggtgaaggggtccggtacaaagccaaattgatcgggattgatgaagtttccgcagctcggggagacaagttatgtcaagattccatgatgaaactcaagggcrttgttgctggcgctcgttccaaaggagaacacaaacagaaaatctttttaaccatctcctttggaggaatcaaaatctttgatgagaagacaggggcccttcagcatcatcatgctgttcatgaaatatcctacattgcaaaggacattacagatcaccgggcctttggatatgtttgtgggaaggaagggaatcacagatttgtggccataaaaacagcccaggcggctgaacctgttattctggacttgagagatctctttcaactcatttatgaattgaagcaaagagaagaattagaaaaaaaggcacaaaaggataagcagtgtgaacaagctgtgtaccagacaatattggaagaggatgttgaagatcctgtgtaccagtacattgtgtttgaggctggacacgagccaatccgtgatcccgaaacggaagaaaacatttatcaggttcccaccagccaaaagaaggaaggtgtttatgatgtgccaaaaagtcaacctgctgtgacccaattagaactttttggggacatgtccacaccccctgatataacctctccccccactcctgcaactccaggtgatgcctttatcccatcttcatctcagacccttccagcgagtgcagatgtgtttarttctgtacctttcggcactgctgctgtaccctcaggttacgttgcaatgggcgctgtcctcccrtccttctggggtcagcagcccctcgtccaacagcagatggtcatgggtgcccagccaccagtcgctcaggtgatgccgggggctcagcccatcgcatggggccagccgggtctctttcctgccactcagcagccctggccaactgtggccgggcagtttccgccagccgccttcatgcccacacaaactgttatgcctttgccagctgccatgttccaaggtcccctcaccccccttgccaccgtcccaggcacgagtgactccaccaggtcaagtccacagaccgacaagcccaggcagaaaatgggcaaagaaacgtttaaggatttccagatggcccagcctccgcccgtgccctcccgcaaacccgaccagccctccctcacctgtacctcagaggccttctccagttacttcaacaaagtcggggtggcacaggatacagacgactgtgatgactttgacatctcccagttgaatttgacccctgtgacttctaccacaccatcgaccaactcacctccaaccccagcccctagacagagctctccatccaaatcatctgcatcccatgccagtgatcctaccacagatgacatctttgaagagggctttgaaagtcccagcaaaagcgaagagcaagaagctcctgatggatcacaggcctcatccaacagtgatccatttggtgagcccagtggggagcccagtggtgataatataagtccacaggccggtagctagatagcgcaggtctgggagccagagcctctgtacgcgcagatcaacagacctaagaaatagcatcgatgcgagctcgtggtgggtgctcaagactggcatggacatcagcatcacgacaggctctcttgtattctttcacctcttcccacaagaaattcatgattgcccaatggaactcgctcagaagagggaactaagcatttttggcaaccaatggcagatatctatggcagcacacaaaaaaagtatagaaagatccacccaacattaaatcagaaatcaagcaaatgcttacccaacaaatatttgagccctcatagctgggtttaagatgactcagtgtgcaaaattattaattccctttttatttctctacctgttgaccactgttgagacaccaaatttggagtgacaggcatcagaggattacaacagggttggaactgacttctttaagcaaaagcaaagggtcttctgtgaccacaatatcrtcatccatatgccttttcacataggatgatgtgttttttgtcactccatggggcctggtctgccattttcccccctttcctttttttgtcatgtttgaaaattaataggtgtacaaatttttgtattgcttttgactttttttagatatgggtgaagaaatctaactggggagaaaaaaagcc

SEQ ID NO: 248 - DNA, 2639 bp, Homo sapiens
gcagagagctcagtttttttttctaccaaggaaactttaaatctctgtggttcggctcataaagcaggcacacaagagggtgtcaaccgccgagagaacccagaggcagggagtccgagatggggggaggtcgtgtcgcggcgtctgaaaggggccactggcactcaaaaagagtgaatgaaatgtgcagctcagagtgtcatttctgaagggaggagtctttctcttggagaagagtcctcaatgagcctggccgaggcccgggatctgtgtgaagtggactaaggattaagtaggatgtcaactgagacagaacttcaagtagctgtgaaaaccagcgccaagaaagactccagaaagaaaggtcaggatcgcagtgaagccactttgataaagaggtttaaaggtgaaggggtccggtacaaagccaaattgatcgggattgatgaagtttccgcagctcggggagacaagttatgtcaagattccatgatgaaactcaagggcrttgttgctggcgctcgttccaaaggagaacacaaacagaaaatctttttaaccatctcctttggaggaatcaaaatctttgatgagaagacaggggcccttcagcatcatcatgctgttcatgaaatatcctacattgcaaaggacattacagatcaccgggcctttggatatgtttgtgggaaggaagggaatcacagatttgtggccataaaaacagcccaggcggctgaacctgttattctggacttgagagatctctttcaactcatttatgaattgaagcaaagagaagaattagaaaaaaaggcacaaaaggataagcagtgtgaacaagctgtgtaccagacaatattggaagaggatgttgaagatcctgtgtaccagtacattgtgtttgaggctggacacgagccaatccgtgatcccgaaacggaagaaaacatttatcaggttcccaccagccaaaagaaggaaggtgtttatgatgtgccaaaaagtcaacctgtaagtgctgtgacccaattagaactttttggggacatgtccacaccccctgatataacctctccccccactcctgcaactccaggtgatgcctttatcccatcttcatctcagacccttccagcgagtgcagatgtgtttarttctgtacctttcggcactgctgctgtaccctcaggttacgttgcaatgggcgctgtcctcccrtccttctggggtcagcagcccctcgtccaacagcagatggtcatgggtgcccagccaccagtcgctcaggtgatgccgggggctcagcccatcgcatggggccagccgggtctctttcctgccactcagcagccctggccaactgtggccgggcagtttccgccagccgccttcatgcccacacaaactgttatgcctttgccagctgccatgttccaaggtcccctcaccccccttgccaccgtcccaggcacgagtgactccaccaggtcaagtccacagaccgacaagcccaggcagaaaatgggcaaagaaacgtttaaggatttccagatggcccagcctccgcccgtgccctcccgcaaacccgaccagccctccctcacctgtacctcagaggccttctccagttacttcaacaaagtcggggtggcacaggatacagacgactgtgatgactttgacatctcccagttgaatttgacccctgtgacttctaccacaccatcgaccaactcacctccaaccccagcccctagacagagctctccatccaaatcatctgcatcccatgccagtgatcctaccacagatgacatctttgaagagggctttgaaagtcccagcaaaagcgaagagcaagaagctcctgatggatcacaggcctcatccaacagtgatccatttggtgagcccagtggggagcccagtggtgataatataagtccacaggccggtagctagatagcgcaggtctgggagccagagcctctgtacgcgcagatcaacagacctaagaaatagcatcgatgcgagctcgtggtgggtgctcaagactggcatggacatcagcatcacgacaggctctcttgtattctttcacctcttcccacaagaaattcatgattgcccaatggaactcgctcagaagagggaactaagcatttttggcaaccaatggcagatatctatggcagcacacaaaaaaagtatagaaagatccacccaacattaaatcagaaatcaagcaaatgcttacccaacaaatatttgagccctcatagctgggtttaagatgactcagtgtgcaaaattattaattccctttttatttctctacctgttgaccactgttgagacaccaaatttggagtgacaggcatcagaggattacaacagggttggaactgacttctttaagcaaaagcaaagggtcttctgtgaccacaatatcrtcatccatatgccttttcacataggatgatgtgttttttgtcactccatggggcctggtctgccattttcccccctttcctttttttgtcatgtttgaaaattaataggtgtacaaatttttgtattgcttttgactttttttagatatgggtgaagaaatctaactggggagaaaaaaagcc

SEQ ID NO: 249 - DNA, 3294 bp, Homo sapiens
ttttacttttgtcgttttaaaggacactctggacatccaaccgatgcacatcccacgcccccaccccccacgtttcctgaggctgcgtctggcctggaggaaccgcccagtgaagacaggtgctcgcagatatcaccgcctagtgttccctgggcccacttgcggggaagtcttggaggtgaaaatccaggtctggaatgaatgcattccacagatgcatatggagagctactgcatgcccagcaccrttcctaggctgggagcaaaacgcaactagaagccatttgtgtcaaggtaacgtctggagaaacaaaaggtcaggaaaggccaatgcycctaccgaccacaatccagccccaaactgcaagaaagagccagctgccccgggggaattcctgcctggtggggctccatatcgccagccctcagctgctcagrgtacagccgcttgtgagaaccgagccacagtcctgcttcctaagtgacttatgccaacctcctgctcaggggtttgtacagagaccactgccagccctccaggtggtycctgcaaagagagtcccagcccccaaggctccaratgaacagggctccatgttgacccctttgtctgcctctgacccgctggcagtaacatctctttcatccagttcagcacatccatttatttccaacttgcatacaagacatactgagaaactaaaaaaatcgttaaaagtaaagacacgttctggacgggtatctcgacctcccaaatataaagctaaagattataagttcataaaaacagaggatctggcgratggtcatctgtcagattctgatgattactcagaactctgtgtggaagaagatgaagatcagagggagaggcacgcactctttgacttatcgagctgctccctgaggcccaaaagctttaagtgtcagacttgtgaaaagtcatatatagggaaggggggactggcccgacattttaaacttaacccaggccacggccagttggaccccgagatggtgctgtctgagaaagccagtggaagcaccctccgggggtgcacggaggaaaggacgctcagcctgacctccctggggctgtccatgccagcggatccatgtgagggaggggcccrctcctgcttggtgacagagtcagcacgcggtggcctgcagaatggtcagtctgtagacgttgaagagacattgccatctgaaccagaaaatggagctcttttgcgatcagagagataccaaggacctagaagacgcrcatgctcagagacccttgcagagtcccgcacagctgtcctccagcagagaagagctgctcagctacctggtggccctgctgcggcaggggagcagagggcgtcgccaagcaaagccaggctcaaggagttcctccagcagtgtgaccgggaggatctggtggaattggctctgcctcagctggctcaggttgtgaccgtgtatgagtttcttctgatgaaggttgaaaaagatcatctagcaaagccttttttcccagctatatataaggaatttgaagagttgcataaaatggttaagaaaatgtgccaagattacctcagtagttctggtctgtgttcccaggagaccctggaaataaacaatgataaggttgctgagtcattaggaatcacagaattcctacggaagaaagaaatacacccagacaaccttggacccaagcacctcagccgagacatggatggggagcagctagagggagctagcagcgagaagagggaacgtgaggctgcggaggagggactggcctcagtgaaaaggcccagaagagaagccctgtccaacgataccactgaatctcttgctgccaacagcagaggccgggagaagcccaggcccttgcatgctttggccgctggtttttcccctycagtaaatgtgactgtctctccccgttctgaagaaagccatacaacgacggtttctggtggcaatgggagcgtgttccaggcgggcccgcagcttcaggcactggctaacttagaagccaggagggggtctataggtgctgctctctcatccygggatgtcagtgggctgcctgtttatgctcagtcaggagagcctaggaggctgacccaggcacaggtggcagcgtttcctggagagaatgctttggaacactcttcagaccaggacacctgggacagcctgaggagcccgggtttctgcagccctttgtcatctggtggtggagcagagtccctgccgcctggggggcctggacatgcagaggcaggacacctcggcaaggtttgtgacttccacctgaaccaccagcagcccagccccaccagcgtcctgcctacagaggtggcagcccctccgcttgagaaaattttgtctgtggatagcrtggcagtggactgtgcctacaggactgtgcccaagccagggcctcagcctggcccacatggatcactattgactgaagggtgtctcagaagcctttcgggggacttgaaccggttmccctgtgggatggaggtgcactctggccagagagaactggagagcgtggttgctgtyggcgaagccatggcttttgaaatttccaatgggagccatgagttactgtctcagggacagaagcagatttttattcagacttccgatgggcttatcttgtcccctccaggtacaatagtgtctcaggaggaggacattgtcacagtgactgatgcagaggggcgtgcctgcggatgggcccgctagaaggagttcctctagaagctgtggagtcggtcgtcaccgyggagcsagagccctcacagtgaagtggagtcagatcctagattcgtctgattttatccagagaaggtctatggcaagcaatgtatatttttctaatgtsaatattgcacagatgaaccttttatttataaagaataatgtctttctgccctgctgtctacatttttctatggagcttgtcataataatagcagatattacctgatcaggaatccctgtggcgcgtctgacgctcatgagtttttcatgatggtgatgagtagcactgcactgtcacctgatgattggccctgctccgtttcccttctctcctgggagatatgctgcttttccaccagacttgctccatactagaagcttcttttgggttcaattaaaaagaaaataagctagtcattctgggcagcattttattgatagaagggggaaaaagtcatttctacttgcatgattttttaaattaaattaaattaawttaatttaattatt

SEQ ID NO: 250 - DNA, 1803 bp, Homo sapiens
gttgaaaaagatcatctagcaaagccttttttcccagctatatataaggaatttgaagagttgcataaaatggttaagaaaatgtgccaagattacctcagtagttctggtctgtgttcccaggagaccctggaaataaacaatgataaggttgctgagtcattaggaatcacagaattcctacggaagaaagaaatacacccagacaaccttggacccaagcacctcagccgagacatggatggggagcagctagagggagctagcagcgagaagagggaacgtgaggctgcggaggagggactggcctcagtgaaaaggcccagaagagaagccctgtccaacgataccactgaatctcttgctgccaacagcagaggccgggagaagcccaggcccttgcatgctttggccgctggtttttcccctycagtaaatgtgactgtctctccccgttctgaagaaagccatacaacgacggtttctggtggcaatgggagcgtgttccaggcgggcccgcagcttcaggcactggctaacttagaagccaggagggggtctataggtgctgctctctcatccygggatgtcagtgggctgcctgtttatgctcagtcaggagagcctaggaggctgacccaggcacaggtggcagcgtttcctggagagaatgctttggaacactcttcagaccaggacacctgggacagcctgaggagcccgggtttctgcagccctttgtcatctggtggtggagcagagtccctgccgcctggggggcctggacatgcagaggcaggacacctcggcaaggtttgtgacttccacctgaaccaccagcagcccagccccaccagcgtcctgcctacagaggtggcagcccctccgcttgagaaaattttgtctgtggatagcrtggcagtggactgtgcctacaggactgtgcccaagccagggcctcagcctggcccacatggatcactattgactgaagggtgtctcagaagcctttcgggggacttgaaccggttmccctgtgggatggaggtgcactctggccagagagaactggagagcgtggttgctgtyggcgaagccatggcttttgaaatttccaatgggagccatgagttactgtctcagggacagaagcagatttttattcagacttccgatgggcttatcttgtcccctccaggtacaatagtgtctcaggaggaggacattgtcacagtgactgatgcagaggggcgtgcctgcggatgggcccgctagaaggagttcctctagaagctgtggagtcggtcgtcaccgyggagcsagagccctcacagtgaagtggagtcagatcctagattcgtctgattttatccagagaaggtctatggcaagcaatgtatatttttctaatgtsaatattgcacagatgaaccttttatttataaagaataatgtctttctgccctgctgtctacatttttctatggagcttgtcataataatagcagatattacctgatcaggaatccctgtggcgcgtctgacgctcatgagtttttcatgatggtgatgagtagcactgcactgtcacctgatgattggccctgctccgtttcccttctctcctgggagatatgctgcttttccaccagacttgctccatactagaagcttcttttgggttcaattaaaaagaaaataagctagtcattctgggcagcattttattgatagaagggggaaaaagtcatttctacttgcatgattttttaaattaaattaaattaawttaatttaattatt

SEQ ID NO: 251 - DNA, 2176 bp, Homo sapiens
ttttacttttgtcgttttaaaggacactctggacatccaaccgatgcacatcccacgcccccaccccccacgtttcctgaggctgcgtctggcctggaggaaccgcccagtgaagacaggtgctcgcagatatcaccgcctagtgttccctgggcccacttgcggggaagtcttggaggtgaaaatccaggtctggaatgaatgcattccacagatgcatatggagagctactgcatgcccagcaccrttcctaggctgggagcaaaacgcaactagaagccatttgtgtcaaggtaacgtctggagaaacaaaaggtcaggaaaggccaatgcycctaccgaccacaatccagccccaaactgcaagaaagagccagctgccccgggggaattcctgcctggtggggctccatatcgccagccctcagctgctcagrgtacagccgcttgtgagaaccgagccacagtcctgcttcctaagtgacttatgccaacctcctgctcaggggtttgtacagagaccactgccagccctccaggtggtycctgcaaagagagtcccagcccccaaggctccaratgaacagggctccatgttgacccctttgtctgcctctgacccgctggcagtaacatctctttcatccagttcagcacatccatttatttccaacttgcatacaagacatactgagaaactaaaaaaatcgttaaaagtaaagacacgttctggacgggtatctcgacctcccaaatataaagctaaagattataagttcataaaaacagaggatctggcgratggtcatctgtcagattctgatgattactcagaactctgtgtggaagaagatgaagatcagagggagaggcacgcactctttgacttatcgagctgctccctgaggcccaaaagctttaagtgtcagacttgtgaaaagtcatatatagggaaggggggactggcccgacattttaaacttaacccaggccacggccagttggaccccgagatggtgctgtctgagaaagccagtggaagcaccctccgggggtgcacggaggaaaggacgctcagcctgacctccctggggctgtccatgccagcggatccatgtgagggaggggcccrctcctgcttggtgacagagtcagcacgcggtggcctgcagaatggtcagtctgtagacgttgaagagacattgccatctgaaccagaaaatggagctcttttgcgatcagagagataccaaggacctagaagacgcrcatgctcagagacccttgcagagtcccgcacagctgtcctccagcagagaagagctgctcagctacctggtggccctgctgcggcaggggagcagagggcgtcgccaagcaaagccaggctcaaggagttcctccagcagtgtgaccgggaggatctggtggaattggctctgcctcagctggctcaggttgtgaccgtgtatgagtttcttctgatgaaggttgaaaaagatcatctagcaaagccttttttcccagctatatataaggaatttgaagagttgcataaaatggttaagaaaatgtgccaagattacctcagtagttctggtctgtgttcccaggagaccctggaaataaacaatgataaggttgctgagtcattaggaatcacagaattcctacggaagaaagaaatacacccagacaaccttggacccaagcacctcagccgagacatggatggggagcagctagagggagctagcagcgagaagagggaacgtgaggctgcggaggagggactggcctcagtgaaaaggcccagaagagaagccctgtccaacgataccactgaatctcttgctgccaacagcagaggccgggagaagcccaggcccttgcatgctttggccgctggtacaatagtgtctcaggaggaggacattgtcacagtgactgatgcagaggggcgtgcctgcggatgggcccgctagaaggagttcctctagaagctgtggagtcggtcgtcaccgyggagcsagagccctcacagtgaagtggagtcagatcctagattcgtctgattttatccagagaaggtctatggcaagcaatgtatatttttctaatgtsaatattgcacagatgaaccttttatttataaagaataatgtctttctgccc

SEQ ID NO: 252 - DNA, 3069 bp, Homo sapiens
ttttacttttgtcgttttaaaggacactctggacatccaaccgatgcacatcccacgcccccaccccccacgtttcctgaggctgcgtctggcctggaggaaccgcccagtgaagacaggtgctcgcagatatcaccgcctagtgttccctgggcccacttgcggggaagtcttggaggtgaaaatccaggtctggaatgaatgcattccacagatgcatatggagagctactgcatgcccagcaccrttcctaggctgggagcaaaacgcaactagaagccatttgtgtcaaggtaacgtctggagaaacaaaaggtcaggaaaggccaatgcycctaccgaccacaatccagccccaaactgcaagaaagagccagctgccccgggggaattcctgcctggtggggctccatatcgccagccctcagctgctcagrgtacagccgcttgtgagaaccgagccacagtcctgcttcctaagtgacttatgccaacctcctgctcaggggtttgtacagagaccactgccagccctccaggtggtycctgcaaagagagtcccagcccccaaggctccaratgaacagggctccatgttgacccctttgtctgcctctgacccgctggcagtaacatctctttcatccagttcagcacatccatttatttccaacttgcatacaagacatactgagaaactaaaaaaatcgttaaaagtaaagacacgttctggacgggtatctcgacctcccaaatataaagctaaagattataagttcataaaaacagaggatctggcgratggtcatctgtcagattctgatgattactcagaactctgtgtggaagaagatgaagatcagagggagaggcacgcactctttgacttatcgagctgctccctgaggcccaaaagctttaagtgtcagacttgtgaaaagtcatatatagggaaggggggactggcccgacattttaaacttaacccaggccacggccagttggaccccgagatggtgctgtctgagaaagccagtggaagcaccctccgggggtgcacggaggaaaggacgctcagcctgacctccctggggctgtccatgccagcggatccatgtgagggaggggcccrctcctgcttggtgacagagtcagcacgcggtggcctgcagttcctccagcagtgtgaccgggaggatctggtggaattggctctgcctcagctggctcaggttgtgaccgtgtatgagtttcttctgatgaaggttgaaaaagatcatctagcaaagccttttttcccagctatatataaggaatttgaagagttgcataaaatggttaagaaaatgtgccaagattacctcagtagttctggtctgtgttcccaggagaccctggaaataaacaatgataaggttgctgagtcattaggaatcacagaattcctacggaagaaagaaatacacccagacaaccttggacccaagcacctcagccgagacatggatggggagcagctagagggagctagcagcgagaagagggaacgtgaggctgcggaggagggactggcctcagtgaaaaggcccagaagagaagccctgtccaacgataccactgaatctcttgctgccaacagcagaggccgggagaagcccaggcccttgcatgctttggccgctggtttttcccctycagtaaatgtgactgtctctccccgttctgaagaaagccatacaacgacggtttctggtggcaatgggagcgtgttccaggcgggcccgcagcttcaggcactggctaacttagaagccaggagggggtctataggtgctgctctctcatccygggatgtcagtgggctgcctgtttatgctcagtcaggagagcctaggaggctgacccaggcacaggtggcagcgtttcctggagagaatgctttggaacactcttcagaccaggacacctgggacagcctgaggagcccgggtttctgcagccctttgtcatctggtggtggagcagagtccctgccgcctggggggcctggacatgcagaggcaggacacctcggcaaggtttgtgacttccacctgaaccaccagcagcccagccccaccagcgtcctgcctacagaggtggcagcccctccgcttgagaaaattttgtctgtggatagcrtggcagtggactgtgcctacaggactgtgcccaagccagggcctcagcctggcccacatggatcactattgactgaagggtgtctcagaagcctttcgggggacttgaaccggttmccctgtgggatggaggtgcactctggccagagagaactggagagcgtggttgctgtyggcgaagccatggcttttgaaatttccaatgggagccatgagttactgtctcagggacagaagcagatttttattcagacttccgatgggcttatcttgtcccctccaggtacaatagtgtctcaggaggaggacattgtcacagtgactgatgcagaggggcgtgcctgcggatgggcccgctagaaggagttcctctagaagctgtggagtcggtcgtcaccgyggagcsagagccctcacagtgaagtggagtcagatcctagattcgtctgattttatccagagaaggtctatggcaagcaatgtatatttttctaatgtsaatattgcacagatgaaccttttatttataaagaataatgtctttctgccctgctgtctacatttttctatggagcttgtcataataatagcagatattacctgatcaggaatccctgtggcgcgtctgacgctcatgagtttttcatgatggtgatgagtagcactgcactgtcacctgatgattggccctgctccgtttcccttctctcctgggagatatgctgcttttccaccagacttgctccatactagaagcttcttttgggttcaattaaaaagaaaataagctagtcattctgggcagcattttattgatagaagggggaaaaagtcatttctacttgcatgattttttaaattaaattaaattaawttaatttaattatt

SEQ ID NO: 253 - DNA, 3234 bp, Homo sapiens
ttttacttttgtcgttttaaaggacactctggacatccaaccgatgcacatcccacgcccccaccccccacgtttcctgaggctgcgtctggcctggaggaaccgcccagtgaagacaggtgctcgcagatatcaccgcctagtgttccctgggcccacttgcggggaagtcttggaggtgaaaatccaggtctggaatgaatgcattccacagatgcatatggagagctactgcatgcccagcaccrttcctaggctgggagcaaaacgcaactagaagccatttgtgtcaaggtaacgtctggagaaacaaaaggtcaggaaaggccaatgcycctaccgaccacaatccagccccaaactgcaagaaagagccagctgccccgggggaattcctgcctggtggggctccatatcgccagccctcagctgctcagrgtacagccgcttgtgagaaccgagccacagtcctgcttcctaagtgacttatgccaacctcctgctcaggggtttgtacagagaccactgccagccctccaggtggtycctgcaaagagagtcccagcccccaaggctccaratgaacagggctccatgttgacccctttgtctgcctctgacccgctggcagtaacatctctttcatccagttcagcacatccatttatttccaacttgcatacaagacatactgagaaactaaaaaaatcgttaaaagtaaagacacgttctggacgggtatctcgacctcccaaatataaagctaaagattataagttcataaaaacagaggatctggcgratggtcatctgtcagattctgatgattactcagaactctgtgtggaagaagatgaagatcagagggagaggcacgcactctttgacttatcgagctgctccctgaggcccaaaagctttaagtgtcagacttgtgaaaagtcatatatagggaaggggggactggcccgacattttaaacttaacccaggccacggccagttggaccccgagatggtgctgtctgagaaagccagtggaagcaccctccgggggtgcacggaggaaaggacgctcagcctgacctccctggggctgtccatgccagcggatccatgtgagggaggggcccrctcctgcttggtgacagagtcagcacgcggtggcctgcagaatggtcagtctgtagacgttgaagagacattgccatctgaaccagaaaatggagctcttttgcgatcagagagataccaaggacctagaagacgcrcatgctcagagacccttgcagagtcccgcacagctgtcctccagcagagaagagctgctcagctacctggtggccctgctgcggcaggggagcagagggcgtcgccaagcaaagccaggctcaaggagttcctccagcagtgtgaccgggaggatctggtggaattggctctgcctcagctggctcaggttgtgaccgtgtatgagtttcttctgatgaagttgcataaaatggttaagaaaatgtgccaagattacctcagtagttctggtctgtgttcccaggagaccctggaaataaacaatgataaggttgctgagtcattaggaatcacagaattcctacggaagaaagaaatacacccagacaaccttggacccaagcacctcagccgagacatggatggggagcagctagagggagctagcagcgagaagagggaacgtgaggctgcggaggagggactggcctcagtgaaaaggcccagaagagaagccctgtccaacgataccactgaatctcttgctgccaacagcagaggccgggagaagcccaggcccttgcatgctttggccgctggtttttcccctycagtaaatgtgactgtctctccccgttctgaagaaagccatacaacgacggtttctggtggcaatgggagcgtgttccaggcgggcccgcagcttcaggcactggctaacttagaagccaggagggggtctataggtgctgctctctcatccygggatgtcagtgggctgcctgtttatgctcagtcaggagagcctaggaggctgacccaggcacaggtggcagcgtttcctggagagaatgctttggaacactcttcagaccaggacacctgggacagcctgaggagcccgggtttctgcagccctttgtcatctggtggtggagcagagtccctgccgcctggggggcctggacatgcagaggcaggacacctcggcaaggtttgtgacttccacctgaaccaccagcagcccagccccaccagcgtcctgcctacagaggtggcagcccctccgcttgagaaaattttgtctgtggatagcrtggcagtggactgtgcctacaggactgtgcccaagccagggcctcagcctggcccacatggatcactattgactgaagggtgtctcagaagcctttcgggggacttgaaccggttmccctgtgggatggaggtgcactctggccagagagaactggagagcgtggttgctgtyggcgaagccatggcttttgaaatttccaatgggagccatgagttactgtctcagggacagaagcagatttttattcagacttccgatgggcttatcttgtcccctccaggtacaatagtgtctcaggaggaggacattgtcacagtgactgatgcagaggggcgtgcctgcggatgggcccgctagaaggagttcctctagaagctgtggagtcggtcgtcaccgyggagcsagagccctcacagtgaagtggagtcagatcctagattcgtctgattttatccagagaaggtctatggcaagcaatgtatatttttctaatgtsaatattgcacagatgaaccttttatttataaagaataatgtctttctgccctgctgtctacatttttctatggagcttgtcataataatagcagatattacctgatcaggaatccctgtggcgcgtctgacgctcatgagtttttcatgatggtgatgagtagcactgcactgtcacctgatgattggccctgctccgtttcccttctctcctgggagatatgctgcttttccaccagacttgctccatactagaagcttcttttgggttcaattaaaaagaaaataagctagtcattctgggcagcattttattgatagaagggggaaaaagtcatttctacttgcatgattttttaaattaaattaaattaawttaatttaattatt

SEQ ID NO: 254 - DNA, 4473 bp, Homo sapiens
cccccggcggagccagctgctgctcttcggtgctggccccggtgccggccccgttgcccagggaacaggctcccggcagcccccgcggcccggagtccatcccgcctcctccggcccggcggggccgacgagtccggaggggctgccgcgggagcccccaggtttccctagatgacaaataaacattccttttcctgcgtgaagatmgtctgtggaaaccttggycatggcatcgatatcagagcctgttacattcagagagttctgcccgttgtactatctcctcaatgccattccgacaaagatccagaagggtttccgctctatcgtggtctatctcacggccctcgacaccaacggggactacatcgcggtgggcagcagcatcggcatgctctatctgtactgccggcacctcaaccagatgaggaagtacaactttgaggggaagacggaatctatcactgtggtgaagctgctgagctgctttgatgacctggtggcagcaggcacagcctctggcagggttgcagtttttcaacttgtatcttcattgccagggagaaataaacagcttcggagatttgatgtcactggtattcacaaaaatagcattacagctctggcttggagccccaatggaatgaaattgttctctggagatgacaaaggcaaaattgtttattcttctctggatctagaccaggggctctgtaactcccagctggtgttggaggagccatcttccattgtgcagctggattatagccagaaagtgctgctggtctctactctgcaaagaagtctgctcttttacactgaagaaaagtctgtaaggcaaattggaacacaaccaaggaaaagtactgggaaatttggtgcttgttttataccaggactctgtaagcaaagtgatctaaccttgtatgygtcacggcccgggctccggctatggaaggctgatgtccacgggactgttcaagccacgtttatcttaaaagatgcttttgccgggggagtcaagcctttwgaactgcacccgcgtctggaatcccccaacagtggaagttgcagcttacctgagaggcacctggggcttgtttcatgtttctttcaagaaggctgggtgctgagttggaatgaatatagtatctatctcctagacacagtcaaccaggccacarttgctggtttggaaggatccggtgatattgtgtctgtttcgtgcacagaaaatgaaatatttttcttgaaaggagataggaacattataagaatttcaagcaggcctgaaggattaacatcaacagactcttctttcttagtgagagatggtctggagatgtctggatgctcagagcgtgtccacgtgcagcaagcggagaagctgccagggrccacagtttctgagacgaggctcagaggctcttccatggccagctccgtggccagcgagccaaggagcaggagcagctcgctcaactccaccgacagcggctccgggctcctgccccctgggctccaggccacccctgarctgggcaagggcagccagyccctgtcacagagattcaacgccatcagctcagaggactttgaccaggagcttgtcgtgaagcctatcaaagtgaaaaggaagaagaagaagaagaagacagaaggtggaagcaggagcacctgtcacagctccctggaatcgacaccctgctccgaatttcctggggacagtccccagtccttgaacacagacttgctgtcgatgacctcaagtgtcctgggcagtagcgtggatcagttaagtgcagagtctccagaccaggaaagcagcttcaatggtgaagtgaacggtgtcccrcaggaaaatactgaccccgaaacgtttaatgtcctggaggtgtcaggatcaatgcctgattctctggctgaggaagatgacattagaactgaaatgccacactgtcaccatgcacatgggcgggagctgctcaatggagcgagggaagatgtgggaggcagtgatgtcacgggactcggagatgagccgtgtcctgcagatgatggaccaaatagcacacagttacccttccaagaacaggacagctctcctggrgcgcatgatggggaagacatccaacccattggcccccaaagcactttttgtgaagtccccctcctgaactcactcactgtgccttccagcctcagctgggccccaagtgctgaacagtggctgcctgggaccagagctgatgaaggcagccccgtggagcccagccaagagcaggacrtcctaaccagcatggaggcctctggccacctcagcacaaatctctggcatgctgtcactgatgatgacacaggtcagaaagaaatacccatttctgaacgtgtcttggggagtgtgggaggacagctgactccggtctctgccttggcagccagcactcacaagccctggcttgagcagcctccacgggatcagacattgacgtccagcgatgaggaggacatctatgcccaygggcttccttcttcatcctcagagacgagtgtgacagagctcggacctagttgctcccagcaggacctgagccggctgggtgcagaggacgccgggctgctcaagccagatcagtttgcagaaagctggatgggctactcgggtcccggctatggcatcctcagcttggtggtctccgagaagtatatctggtgcctggactacaaaggcggcctgttctgcagcgcgttgccgggcgccgggctgcgctggcagaagtttgaagatgctgtccagcaggtggcagtctcgccctcaggagcccttctctggaagattgaacagaaatctaaccgggcttttgcttgtgggaaagtcaccatcaaggggaagcggcactggtacgaagccctgccccaggcagtgtttgtggccctgagcgatgacacggcctggatcatcaggaccagtggggacctatacttgcagacaggtctgagygtggatcgcccttgtgccagagccgtaaaggtggactgtccctacccgctgtcccagatcacagcccggaacaatgtggtgtgggcgctgacagagcagagggccctcctgtaccgggagggcgtgagcagcttctgtccggaaggcgagcagtggaagtgtgacattgtcagcgaaaggmaagctttagaacccgtctgcataacgctcggggatcagcagactctctgggccctggacatccatgggaacctgtggttcagaactggcattatttccaagaagccccaaggagatgacgaccattggtggcaagtgagcatcacggactatgtggtgtttgaccagtgcagcttatttcagacgataatccatgccactcactcggtggccacagcagcccaagcccccgtagaaaaggtggcagataagctgcgcatggcgttttggtcccagcagcttcagtgccagccaagccttctcggggtcaataacagcggtgtctggatctcctcgggcaagaatgaattccacgtcgctaagggaagtctcataggcacctactggaatcatgtggttccccgtgggacagcttctgctacaaaatgggcctttgtgttggcttctgcagctcccacgaaggaaggaagcttcctgtggctgtgccagagcagcaaggacctgtgcagcgtcagcgcccagagcgcacagtcgcgrccctccacggtgcagctgcctcccgaagccgagatgcgcgcctatgccgcctgccaggatgcgctgtgggcgctggacagcctcggccaggtgttcatcaggacgctctccaagagctgccccacgggcatgcactggaccaggctggacctctcccagctaggagctgtaaaattgacaagcttggcatgtggaaatcagcacatctgggcctgtgattccaggggtggagtttacttccgtgtagggactcagcctctcaatcccagtctcatgcttccagcctggataatgattgagccacctgtccagcccgccggggtcagcttggtcagcgtccattccagccccaacgaccagatgctgtgggtgcttgacagcaggtggaacgtgcacgtgcggaccgggatcaccgaggagatgcctgtggggaccgcctgggagcatgtgccagggttgcaggcctgccagctggcgctgagcaccaggaccgtgtgggcccgctgtccaaacggagacctcgcccggcggtacggcgtcacagacaagaaccccgccggggactactggaagaaaattcccggcagcgtgtcgtgtttcacatgactgcgtcagatgagctgtgggctgtgggcccgcccggctacctcctccaacggctgacaaagacgttcagccactcgcacggcacccagaagagcagccaggccgccatgccccaccctgaggacctggaggacgagtgggaggtcatc

SEQ ID NO: 255 - DNA, 6383 bp, Homo sapiens
cccccggcggagccagctgctgctcttcggtgctggccccggtgccggccccgttgcccagggaacaggctcccggcagcccccgcggcccggagtccatcccgcctcctccggcccggcggggccgacgagtccggaggggctgccgcgggagcccccaggtttccctagatgacaaataaacattccttttcctgcgtgaagatmgtctgtggaaaccttggycatggcatcgatatcagagcctgttacattcagagagttctgcccgttgtactatctcctcaatgccattccgacaaagatccagaagggtttccgctctatcgtggtctatctcacggccctcgacaccaacggggactacatcgcggtgggcagcagcatcggcatgctctatctgtactgccggcacctcaaccagatgaggaagtacaactttgaggggaagacggaatctatcactgtggtgaagctgctgagctgctttgatgacctggtggcagcaggcacagcctctggcagggttgcagtttttcaacttgtatcttcattgccagggagaaataaacagcttcggagatttgatgtcactggtattcacaaaaatagcattacagctctggcttggagccccaatggaatgaaattgttctctggagatgacaaaggcaaaattgtttattcttctctggatctagaccaggggctctgtaactcccagctggtgttggaggagccatcttccattgtgcagctggattatagccagaaagtgctgctggtctctactctgcaaagaagtctgctcttttacactgaagaaaagtctgtaaggcaaattggaacacaaccaaggaaaagtactgggaaatttggtgcttgttttataccaggactctgtaagcaaagtgatctaaccttgtatgygtcacggcccgggctccggctatggaaggctgatgtccacgggactgttcaagccacgtttatcttaaaagatgcttttgccgggggagtcaagcctttwgaactgcacccgcgtctggaatcccccaacagtggaagttgcagcttacctgagaggcacctggggcttgtttcatgtttctttcaagaaggctgggtgctgagttggaatgaatatagtatctatctcctagacacagtcaaccaggccacarttgctggtttggaaggatccggtgatattgtgtctgtttcgtgcacagaaaatgaaatatttttcttgaaaggagataggaacattataagaatttcaagcaggcctgaaggattaacatcaacagtgagagatggtctggagatgtctggatgctcagagcgtgtccacgtgcagcaagcggagaagctgccagggrccacagtttctgagacgaggctcagaggctcttccatggccagctccgtggccagcgagccaaggagcaggagcagctcgctcaactccaccgacagcggctccgggctcctgccccctgggctccaggccacccctgarctgggcaagggcagccagyccctgtcacagagattcaacgccatcagctcagaggactttgaccaggagcttgtcgtgaagcctatcaaagtgaaaaggaagaagaagaagaagaagacagaaggtggaagcaggagcacctgtcacagctccctggaatcgacaccctgctccgaatttcctggggacagtccccagtccttgaacacagacttgctgtcgatgacctcaagtgtcctgggcagtagcgtggatcagttaagtgcagagtctccagaccaggaaagcagcttcaatggtgaagtgaacggtgtcccrcaggaaaatactgaccccgaaacgtttaatgtcctggaggtgtcaggatcaatgcctgattctctggctgaggaagatgacattagaactgaaatgccacactgtcaccatgcacatgggcgggagctgctcaatggagcgagggaagatgtgggaggcagtgatgtcacgggactcggagatgagccgtgtcctgcagatgatggaccaaatagcacacagttacccttccaagaacaggacagctctcctggrgcgcatgatggggaagacatccaacccattggcccccaaagcactttttgtgaagtccccctcctgaactcactcactgtgccttccagcctcagctgggccccaagtgctgaacagtggctgcctgggaccagagctgatgaaggcagccccgtggagcccagccaagagcaggacrtcctaaccagcatggaggcctctggccacctcagcacaaatctctggcatgctgtcactgatgatgacacaggtcagaaagaaatacccatttctgaacgtgtcttggggagtgtgggaggacagctgactccggtctctgccttggcagccagcactcacaagccctggcttgagcagcctccacgggatcagacattgacgtccagcgatgaggaggacatctatgcccaygggcttccttcttcatcctcagagacgagtgtgacagagctcggacctagttgctcccagcaggacctgagccggctgggtgcagaggacgccgggctgctcaagccagatcagtttgcagaaagctggatgggctactcgggtcccggctatggcatcctcagcttggtggtctccgagaagtatatctggtgcctggactacaaaggcggcctgttctgcagcgcgttgccgggcgccgggctgcgctggcagaagtttgaagatgctgtccagcaggtggcagtctcgccctcaggagcccttctctggaagattgaacagaaatctaaccgggcttttgcttgtgggaaagtcaccatcaaggggaagcggcactggtacgaagccctgccccaggcagtgtttgtggccctgagcgatgacacggcctggatcatcaggaccagtggggacctatacttgcagacaggtctgagygtggatcgcccttgtgccagagccgtaaaggtggactgtccctacccgctgtcccagatcacagcccggaacaatgtggtgtgggcgctgacagagcagagggccctcctgtaccgggagggcgtgagcagcttctgtccggaaggcgagcagtggaagtgtgacattgtcagcgaaaggmaagctttagaacccgtctgcataacgctcggggatcagcagactctctgggccctggacatccatgggaacctgtggttcagaactggcattatttccaagaagccccaaggagatgacgaccattggtggcaagtgagcatcacggactatgtggtgtttgaccagtgcagcttatttcagacgataatccatgccactcactcggtggccacagcagcccaagcccccgtagaaaaggtggcagataagctgcgcatggcgttttggtcccagcagcttcagtgccagccaagccttctcggggtcaataacagcggtgtctggatctcctcgggcaagaatgaattccacgtcgctaagggaagtctcataggcacctactggaatcatgtggttccccgtgggacagcttctgctacaaaatgggcctttgtgttggcttctgcagctcccacgaaggaaggaagcttcctgtggctgtgccagagcagcaaggacctgtgcagcgtcagcgcccagagcgcacagtcgcgrccctccacggtgcagctgcctcccgaagccgagatgcgcgcctatgccgcctgccaggatgcgctgtgggcgctggacagcctcggccaggtgttcatcaggacgctctccaagagctgccccacgggcatgcactggaccaggctggacctctcccagctaggagctgtaaaattgacaagcttggcatgtggaaatcagcacatctgggcctgtgattccaggggtggagtttacttccgtgtagggactcagcctctcaatcccagtctcatgcttccagcctggataatgattgagccacctgtccagcccgccggggtcagcttggtcagcgtccattccagccccaacgaccagatgctgtgggtgcttgacagcaggtggaacgtgcacgtgcggaccgggatcaccgaggagatgcctgtggggaccgcctgggagcatgtgccagggttgcaggcctgccagctggcgctgagcaccaggaccgtgtgggcccgctgtccaaacggagacctcgcccggcggtacggcgtcacagacaagaaccccgccggggactactggaagaaaattcccggcagcgtgtcgtgtttcacaggcagtgactgcgtcagatgagctgtgggctgtgggcccgcccggctacctcctccaacggctgacaaagacgttcagccactcgcacggcacccagaagagcagccaggccgccatgccccaccctgaggacctggaggacgagtgggaggtcatctgaaggagccctggccgagtcacgcggaggggcccggcgtctgtggcgggcacaggggcttcrgagtgactccctggtggacgcrctgyctcaacacttgtccagacacctctggccaggttggacccgcacacttactttcatctatgttggtttctgtctcgttccagaacccacagcctccacccrtggctggcgtgattgctgcagcagtggcgcctcctagctcaggacagtggcgactgcccggctgcatgcactccgattacccacgtgctgccgtcctggtctcatccacagatagctccagcttttgttggtgggagtggtctccggaggcctcccagaaccaagggtagccgggcagctggtttggcccagggcctccttccacattagtagccccagggccagatggagccaaaggtcagctctctgcagcgcgggatgtgctcrgtgatggctttgtcccatcataggggggtgtccccccagagacaaagctgcagagcacattccatgccagacgctctggccaggaagctgaggccgggcttgagaggagagcgctggccatgccaggagagaacccacgcacatgcacaccacaacacacaacacacctcacctcacaccacagcacacctcaccacaccacaccgcactgcaccatacctcaccacatctcaccacaccacagcacacctcaccacacaacacaccacaccccacaccgcactgcaccgcaccgcaccgcaccgtacctcgccacatctcaccacaccacaccacaccacacctcactgcccacacacggcgcaggctgcccgcctcctggagagcrcwcttcagctgaaacagtaaagcctgatgggtgcaaatggaacctggatgtgtgcacgtgtgtcccaggtagggacggcacaggagggtgcatggggcgtgggggagctgagcaagggtcgctcacttagaaatgtctttggaatggtgtttaactaatgctgctggcggacatcctaaaaccagatgcatcctcagaggacgagtctactaattattgcctttgttgttgtattacaaatctgcataaaatacctcatttcaaatcaaatcttacaaatttagaagagagatatgttttccgaaaacagtggaagccctttgttccttcccgggtttgtcctgagcytgcactgtcctygcctgcagcctcagaggggcaggcatccccgcacagacttgactggcagggcggtcacgggacctgcgggctggctccgagtggcagcccatgccttctgcrgggtatgggttgacacttgacaggttgaaaccagtgcctctatggacggctgctgtggccccttcagacaatgggcagtgcccaccccgcccactggcrtctgcgtgtgagggctaggccgccctgccacacatcccgccccctcccggaggcagcttcaggacaggacaccaggctggctgctttttttagcctgcccctggcccaggcccagtccttggtgtcagggagcccccaggccgcaggtggagggtgataaaatatgttctctgacaggacccagccagccacataggtggaggttttccatgtccaaatgaggtcaagatgccgaaatcccagatctgacttcacacttcccttttctagaaccttttgtaaaagttggtggcagcagaggcagccccaggccgggctgcatctctctgtgtctgttgtgccttgcccggcgcctcacggatggcaaagctctcctcacccatgggactgtagtgcaattaaacccgcgtctaggtgatgcttttaaagttgtagcttcgtgctttgtacagttttctttctggttttaatttttagttgtgctttgagtcagtgcaataaactagactttttcc

SEQ ID NO: 256 - DNA, 6379 bp, Homo sapiens
cccccggcggagccagctgctgctcttcggtgctggccccggtgccggccccgttgcccagggaacaggctcccggcagcccccgcggcccggagtccatcccgcctcctccggcccggcggggccgacgagtccggaggggctgccgcgggagcccccaggtttccctagatgacaaataaacattccttttcctgcgtgaagatmgtctgtggaaaccttggycatggcatcgatatcagagcctgttacattcagagagttctgcccgttgtactatctcctcaatgccattccgacaaagatccagaagggtttccgctctatcgtggtctatctcacggccctcgacaccaacggggactacatcgcggtgggcagcagcatcggcatgctctatctgtactgccggcacctcaaccagatgaggaagtacaactttgaggggaagacggaatctatcactgtggtgaagctgctgagctgctttgatgacctggtggcagcaggcacagcctctggcagggttgcagtttttcaacttgtatcttcattgccagggagaaataaacagcttcggagatttgatgtcactggtattcacaaaaatagcattacagctctggcttggagccccaatggaatgaaattgttctctggagatgacaaaggcaaaattgtttattcttctctggatctagaccaggggctctgtaactcccagctggtgttggaggagccatcttccattgtgcagctggattatagccagaaagtgctgctggtctctactctgcaaagaagtctgctcttttacactgaagaaaagtctgtaaggcaaattggaacacaaccaaggaaaagtactgggaaatttggtgcttgttttataccaggactctgtaagcaaagtgatctaaccttgtatgygtcacggcccgggctccggctatggaaggctgatgtccacgggactgttcaagccacgtttatcttaaaagatgcttttgccgggggagtcaagcctttwgaactgcacccgcgtctggaatcccccaacagtggaagttgcagcttacctgagaggcacctggggcttgtttcatgtttctttcaagaaggctgggtgctgagttggaatgaatatagtatctatctcctagacacagtcaaccaggccacarttgctggtttggaaggatccggtgatattgtgtctgtttcgtgcacagaaaatgaaatatttttcttgaaaggagataggaacattataagaatttcaagcaggcctgaaggattaacatcaacagtgagagatggtctggagatgtctggatgctcagagcgtgtccacgtgcagcaagcggagaagctgccagggrccacagtttctgagacgaggctcagaggctcttccatggccagctccgtggccagcgagccaaggagcaggagcagctcgctcaactccaccgacagcggctccgggctcctgccccctgggctccaggccacccctgarctgggcaagggcagccagyccctgtcacagagattcaacgccatcagctcagaggactttgaccaggagcttgtcgtgaagcctatcaaagtgaaaaggaagaagaagaagaagaagacagaaggtggaagcaggagcacctgtcacagctccctggaatcgacaccctgctccgaatttcctggggacagtccccagtccttgaacacagacttgctgtcgatgacctcaagtgtcctgggcagtagcgtggatcagttaagtgcagagtctccagaccaggaaagcagcttcaatggtgaagtgaacggtgtcccrcaggaaaatactgaccccgaaacgtttaatgtcctggaggtgtcaggatcaatgcctgattctctggctgaggaagatgacattagaactgaaatgccacactgtcaccatgcacatgggcgggagctgctcaatggagcgagggaagatgtgggaggcagtgatgtcacgggactcggagatgagccgtgtcctgcagatgatggaccaaatagcacacagttacccttccaagaacaggacagctctcctggrgcgcatgatggggaagacatccaacccattggcccccaaagcactttttgtgaagtccccctcctgaactcactcactgtgccttccagcctcagctgggccccaagtgctgaacagtggctgcctgggaccagagctgatgaaggcagccccgtggagcccagccaagagcaggacrtcctaaccagcatggaggcctctggccacctcagcacaaatctctggcatgctgtcactgatgatgacacaggtcagaaagaaatacccatttctgaacgtgtcttggggagtgtgggaggacagctgactccggtctctgccttggcagccagcactcacaagccctggcttgagcagcctccacgggatcagacattgacgtccagcgatgaggaggacatctatgcccaygggcttccttcttcatcctcagagacgagtgtgacagagctcggacctagttgctcccagcaggacctgagccggctgggtgcagaggacgccgggctgctcaagccagatcagtttgcagaaagctggatgggctactcgggtcccggctatggcatcctcagcttggtggtctccgagaagtatatctggtgcctggactacaaaggcggcctgttctgcagcgcgttgccgggcgccgggctgcgctggcagaagtttgaagatgctgtccagcaggtggcagtctcgccctcaggagcccttctctggaagattgaacagaaatctaaccgggcttttgcttgtgggaaagtcaccatcaaggggaagcggcactggtacgaagccctgccccaggcagtgtttgtggccctgagcgatgacacggcctggatcatcaggaccagtggggacctatacttgcagacaggtctgagygtggatcgcccttgtgccagagccgtaaaggtggactgtccctacccgctgtcccagatcacagcccggaacaatgtggtgtgggcgctgacagagcagagggccctcctgtaccgggagggcgtgagcagcttctgtccggaaggcgagcagtggaagtgtgacattgtcagcgaaaggmaagctttagaacccgtctgcataacgctcggggatcagcagactctctgggccctggacatccatgggaacctgtggttcagaactggcattatttccaagaagccccaaggagatgacgaccattggtggcaagtgagcatcacggactatgtggtgtttgaccagtgcagcttatttcagacgataatccatgccactcactcggtggccacagcagcccaagcccccgtagaaaaggtggcagataagctgcgcatggcgttttggtcccagcagcttcagtgccagccaagccttctcggggtcaataacagcggtgtctggatctcctcgggcaagaatgaattccacgtcgctaagggaagtctcataggcacctactggaatcatgtggttccccgtgggacagcttctgctacaaaatgggcctttgtgttggcttctgcagctcccacgaaggaaggaagcttcctgtggctgtgccagagcagcaaggacctgtgcagcgtcagcgcccagagcgcacagtcgcgrccctccacggtgcagctgcctcccgaagccgagatgcgcgcctatgccgcctgccaggatgcgctgtgggcgctggacagcctcggccaggtgttcatcaggacgctctccaagagctgccccacgggcatgcactggaccaggctggacctctcccagctaggagctgtaaaattgacaagcttggcatgtggaaatcagcacatctgggcctgtgattccaggggtggagtttacttccgtgtagggactcagcctctcaatcccagtctcatgcttccagcctggataatgattgagccacctgtccagcccgccggggtcagcttggtcagcgtccattccagccccaacgaccagatgctgtgggtgcttgacagcaggtggaacgtgcacgtgcggaccgggatcaccgaggagatgcctgtggggaccgcctgggagcatgtgccagggttgcaggcctgccagctggcgctgagcaccaggaccgtgtgggcccgctgtccaaacggagacctcgcccggcggtacggcgtcacagacaagaaccccgccggggactactggaagaaaattcccggcagcgtgtcgtgtttcacagtgactgcgtcagatgagctgtgggctgtgggcccgcccggctacctcctccaacggctgacaaagacgttcagccactcgcacggcacccagaagagcagccaggccgccatgccccaccctgaggacctggaggacgagtgggaggtcatctgaaggagccctggccgagtcacgcggaggggcccggcgtctgtggcgggcacaggggcttcrgagtgactccctggtggacgcrctgyctcaacacttgtccagacacctctggccaggttggacccgcacacttactttcatctatgttggtttctgtctcgttccagaacccacagcctccacccrtggctggcgtgattgctgcagcagtggcgcctcctagctcaggacagtggcgactgcccggctgcatgcactccgattacccacgtgctgccgtcctggtctcatccacagatagctccagcttttgttggtgggagtggtctccggaggcctcccagaaccaagggtagccgggcagctggtttggcccagggcctccttccacattagtagccccagggccagatggagccaaaggtcagctctctgcagcgcgggatgtgctcrgtgatggctttgtcccatcataggggggtgtccccccagagacaaagctgcagagcacattccatgccagacgctctggccaggaagctgaggccgggcttgagaggagagcgctggccatgccaggagagaacccacgcacatgcacaccacaacacacaacacacctcacctcacaccacagcacacctcaccacaccacaccgcactgcaccatacctcaccacatctcaccacaccacagcacacctcaccacacaacacaccacaccccacaccgcactgcaccgcaccgcaccgcaccgtacctcgccacatctcaccacaccacaccacaccacacctcactgcccacacacggcgcaggctgcccgcctcctggagagcrcwcttcagctgaaacagtaaagcctgatgggtgcaaatggaacctggatgtgtgcacgtgtgtcccaggtagggacggcacaggagggtgcatggggcgtgggggagctgagcaagggtcgctcacttagaaatgtctttggaatggtgtttaactaatgctgctggcggacatcctaaaaccagatgcatcctcagaggacgagtctactaattattgcctttgttgttgtattacaaatctgcataaaatacctcatttcaaatcaaatcttacaaatttagaagagagatatgttttccgaaaacagtggaagccctttgttccttcccgggtttgtcctgagcytgcactgtcctygcctgcagcctcagaggggcaggcatccccgcacagacttgactggcagggcggtcacgggacctgcgggctggctccgagtggcagcccatgccttctgcrgggtatgggttgacacttgacaggttgaaaccagtgcctctatggacggctgctgtggccccttcagacaatgggcagtgcccaccccgcccactggcrtctgcgtgtgagggctaggccgccctgccacacatcccgccccctcccggaggcagcttcaggacaggacaccaggctggctgctttttttagcctgcccctggcccaggcccagtccttggtgtcagggagcccccaggccgcaggtggagggtgataaaatatgttctctgacaggacccagccagccacataggtggaggttttccatgtccaaatgaggtcaagatgccgaaatcccagatctgacttcacacttcccttttctagaaccttttgtaaaagttggtggcagcagaggcagccccaggccgggctgcatctctctgtgtctgttgtgccttgcccggcgcctcacggatggcaaagctctcctcacccatgggactgtagtgcaattaaacccgcgtctaggtgatgcttttaaagttgtagcttcgtgctttgtacagttttctttctggttttaatttttagttgtgctttgagtcagtgcaataaactagactttttcc

SEQ ID NO: 257 - DNA, 6230 bp, Homo sapiens
cccccggcggagccagctgctgctcttcggtgctggccccggtgccggccccgttgcccagggaacaggctcccggcagcccccgcggcccggagtccatcccgcctcctccggcccggcggggccgacgagtccggaggggctgccgcgggagcccccaggtttccctagatgacaaataaacattccttttcctgcgtgaagatmgtctgtggaaaccttggycatggcatcgatatcagagcctgttacattcagagagttctgcccgttgtactatctcctcaatgccattccgacaaagatccagaagggtttccgctctatcgtggtctatctcacggccctcgacaccaacggggactacatcgcggtgggcagcagcatcggcatgctctatctgtactgccggcacctcaaccagatgaggaagtacaactttgaggggaagacggaatctatcactgtggtgaagctgctgagctgctttgatgacctggtggcagcaggcacagcctctggcagggttgcagtttttcaacttgtatcttcattgccagggagaaataaacagcttcggagatttgatgtcactggtattcacaaaaatagcattacagctctggcttggagccccaatggaatgaaattgttctctggagatgacaaaggcaaaattgtttattcttctctggatctagaccaggggctctgtaactcccagctggtgttggaggagccatcttccattgtgcagctggattatagccagaaagtgctgctggtctctactctgcaaagaagtctgctcttttacactgaagaaaagtctgtaaggcaaattggaacacaaccaaggaaaagtactgggaaatttggtgcttgttttataccaggactctgtaagcaaagtgatctaaccttgtatgygtcacggcccgggctccggctatggaaggctgatgtccacgggactgttcaagccacgtttatcttaaaagatgcttttgccgggggagtcaagcctttwgaactgcacccgcgtctggaatcccccaacagtggaagttgcagcttacctgagaggcacctggggcttgtttcatgtttctttcaagaaggctgggtgctgagttggaatgaatatagtatctatctcctagacacagtcaaccaggccacarttgctggtttggaaggatccggtgatattgtgtctgtttcgtgcacagaaaatgaaatatttttcttgaaaggagataggaacattataagaatttcaagcaggcctgaaggattaacatcaacagtgagagatggtctggagatgtctggatgctcagagcgtgtccacgtgcagcaagcggagaagctgccagggrccacagtttctgagacgaggctcagaggctcttccatggccagctccgtggccagcgagccaaggagcaggagcagctcgctcaactccaccgacagcggctccgggctcctgccccctgggctccaggccacccctgarctgggcaagggcagccagyccctgtcacagagattcaacgccatcagctcagaggactttgaccaggagcttgtcgtgaagcctatcaaagtgaaaaggaagaagaagaagaagaagacagaaggtggaagcaggagcacctgtcacagctccctggaatcgacaccctgctccgaatttcctggggacagtccccagtccttgaacacagacttgctgtcgatgacctcaagtgtcctgggcagtagcgtggatcagttaagtgcagagtctccagaccaggaaagcagcttcaatggtgaagtgaacggtgtcccrcaggaaaatactgaccccgaaacgtttaatgtcctggaggtgtcaggatcaatgcctgattctctggctgaggaagatgacattagaactgaaatgccacactgtcaccatgcacatgggcgggagctgctcaatggagcgagggaagatgtgggaggcagtgatgtcacgggactcggagatgagccgtgtcctgcagatgatggaccaaatagcacacagttacccttccaagaacaggacagctctcctggrgcgcatgatggggaagacatccaacccattggcccccaaagcactttttgtgaagtccccctcctgaactcactcactgtgccttccagcctcagctgggccccaagtgctgaacagtggctgcctgggaccagagctgatgaaggcagccccgtggagcccagccaagagcaggacrtcctaaccagcatggaggcctctggccacctcagcacaaatctctggcatgctgtcactgatgatgacacaggtcagaaagaaatacccatttctgaacgtgtcttggggagtgtgggaggacagctgactccggtctctgccttggcagccagcactcacaagccctggcttgagcagcctccacgggatcagacattgacgtccagcgatgaggaggacatctatgcccaygggcttccttcttcatcctcagagacgagtgtgacagagctcggacctagttgctcccagcaggacctgagccggctgggtgcagaggacgccgggctgctcaagccagatcagtttgcagaaagctggatgggctactcgggtcccggctatggcatcctcagcttggtggtctccgagaagtatatctggtgcctggactacaaaggcggcctgttctgcagcgcgttgccgggcgccgggctgcgctggcagaagtttgaagatgctgtccagcaggtggcagtctcgccctcaggagcccttctctggaagattgaacagaaatctaaccgggcttttgcttgtgggaaagtcaccatcaaggggaagcggcactggtacgaagccctgccccaggcagtgtttgtggccctgagcgatgacacggcctggatcatcaggaccagtggggacctatacttgcagacaggtctgagygtggatcgcccttgtgccagagccgtaaaggtggactgtccctacccgctgtcccagatcacagcccggaacaatgtggtgtgggcgctgacagagcagagggccctcctgtaccgggagggcgtgagcagcttctgtccggaaggcgagcagtggaagtgtgacattgtcagcgaaaggmaagctttagaacccgtctgcataacgctcggggatcagcagactctctgggccctggacatccatgggaacctgtggttcagaactggcattatttccaagaagccccaaggagatgacgaccattggtggcaagtgagcatcacggactatgtggtgtttgaccagtgcagcttatttcagacgataatccatgccactcactcggtggccacagcagcccaagcccccgtagaaaaggtggcagataagctgcgcatggcgttttggtcccagcagcttcagtgccagccaagccttctcggggtcaataacagcggtgtctggatctcctcgggcaagaatgaattccacgtcgctaagggaagtctcataggcacctactggaatcatgtggttccccgtgggacagcttctgctacaaaatgggcctttgtgttggcttctgcagctcccacgaaggaaggaagcttcctgtggctgtgccagagcagcaaggacctgtgcagcgtcagcgcccagagcgcacagtcgcgrccctccacggtgcagctgcctcccgaagccgagatgcgcgcctatgccgcctgccaggatgcgctgtgggcgctggacagcctcggccaggtgttcatcaggacgctctccaagagctgccccacgggcatgcactggaccaggctggacctctcccagctagcccgccggggtcagcttggtcagcgtccattccagccccaacgaccagatgctgtgggtgcttgacagcaggtggaacgtgcacgtgcggaccgggatcaccgaggagatgcctgtggggaccgcctgggagcatgtgccagggttgcaggcctgccagctggcgctgagcaccaggaccgtgtgggcccgctgtccaaacggagacctcgcccggcggtacggcgtcacagacaagaaccccgccggggactactggaagaaaattcccggcagcgtgtcgtgtttcacagtgactgcgtcagatgagctgtgggctgtgggcccgcccggctacctcctccaacggctgacaaagacgttcagccactcgcacggcacccagaagagcagccaggccgccatgccccaccctgaggacctggaggacgagtgggaggtcatctgaaggagccctggccgagtcacgcggaggggcccggcgtctgtggcgggcacaggggcttcrgagtgactccctggtggacgcrctgyctcaacacttgtccagacacctctggccaggttggacccgcacacttactttcatctatgttggtttctgtctcgttccagaacccacagcctccacccrtggctggcgtgattgctgcagcagtggcgcctcctagctcaggacagtggcgactgcccggctgcatgcactccgattacccacgtgctgccgtcctggtctcatccacagatagctccagcttttgttggtgggagtggtctccggaggcctcccagaaccaagggtagccgggcagctggtttggcccagggcctccttccacattagtagccccagggccagatggagccaaaggtcagctctctgcagcgcgggatgtgctcrgtgatggctttgtcccatcataggggggtgtccccccagagacaaagctgcagagcacattccatgccagacgctctggccaggaagctgaggccgggcttgagaggagagcgctggccatgccaggagagaacccacgcacatgcacaccacaacacacaacacacctcacctcacaccacagcacacctcaccacaccacaccgcactgcaccatacctcaccacatctcaccacaccacagcacacctcaccacacaacacaccacaccccacaccgcactgcaccgcaccgcaccgcaccgtacctcgccacatctcaccacaccacaccacaccacacctcactgcccacacacggcgcaggctgcccgcctcctggagagcrcwcttcagctgaaacagtaaagcctgatgggtgcaaatggaacctggatgtgtgcacgtgtgtcccaggtagggacggcacaggagggtgcatggggcgtgggggagctgagcaagggtcgctcacttagaaatgtctttggaatggtgtttaactaatgctgctggcggacatcctaaaaccagatgcatcctcagaggacgagtctactaattattgcctttgttgttgtattacaaatctgcataaaatacctcatttcaaatcaaatcttacaaatttagaagagagatatgttttccgaaaacagtggaagccctttgttccttcccgggtttgtcctgagcytgcactgtcctygcctgcagcctcagaggggcaggcatccccgcacagacttgactggcagggcggtcacgggacctgcgggctggctccgagtggcagcccatgccttctgcrgggtatgggttgacacttgacaggttgaaaccagtgcctctatggacggctgctgtggccccttcagacaatgggcagtgcccaccccgcccactggcrtctgcgtgtgagggctaggccgccctgccacacatcccgccccctcccggaggcagcttcaggacaggacaccaggctggctgctttttttagcctgcccctggcccaggcccagtccttggtgtcagggagcccccaggccgcaggtggagggtgataaaatatgttctctgacaggacccagccagccacataggtggaggttttccatgtccaaatgaggtcaagatgccgaaatcccagatctgacttcacacttcccttttctagaaccttttgtaaaagttggtggcagcagaggcagccccaggccgggctgcatctctctgtgtctgttgtgccttgcccggcgcctcacggatggcaaagctctcctcacccatgggactgtagtgcaattaaacccgcgtctaggtgatgcttttaaagttgtagcttcgtgctttgtacagttttctttctggttttaatttttagttgtgctttgagtcagtgcaataaactagactttttcc

SEQ ID NO: 258 - DNA, 1202 bp, Homo sapiens
tatttttttttttttttttttttttttcttttttttttttttttgagacacaagtcttactctgttgcctaggctggagtgcagtggcacgatctcggctcactgcaacctcccccggctcccccggtgtccgccatggccaaagcctaygaccacctcttcaagttgctgctgatcggggactcgggggtgggcaagacttgtctgatcattcgctttgcagaggacaacttcaacaacacttacatctccaccatyggaattgatttcaagatccgcactgtggatatagaggggaagaagatcaaactacaagtctgggacacagctggccaagagcggttcaagacaataactactgcctactaccgtggagccatgggcattatcctagcatacgacatcacggatgagaaatctttcgagaatattcagaactggatgaaaagcatcatggagaatgcctcagctggggtggagcacctcttgctagggaacaaatgtgacatggaggccaagaggaaggtgcagaaggagcaggccgataagttggctcgagagcatggaatccgatttttcgaaactagtgctaaatccagtatgaatgtggatgaggcttttagttccctggcccgggacatcttgctcaagtcaggaggccggagatcaggaaacrgcaacaagcctcccagtactgacctgaaaacttgtgacataaagaacaccaacaagtgctccctgagctgaggaccctttcttgcctccccaccccggaagctgaacctgagggagacaacagcagagggagtgagcaggggagaaatagcagaggggcttggagggacacataggtagatggtaaagagaatgaggagaaaaaggagaaaagggaaaagcagaaaggaaaagaaggaaaagagaggaagggagaagggagaggaatgaattgaggaagtgaacgaaggcaaggaggtaggaagagagggaggaggaaaggaaggagagatgcctcaggcttcagaccttacctgggttttcagggcaaacataaatgtaaatacactgatttattctgttactagatcaggttttagggtcctgcaaagggctagctcggcactacactagggaatttgctcctgttctgtcacttgtcatggtctttcttggtattaaaggccaccatttgcacaaaaaataaa

SEQ ID NO: 259 - DNA, 1271 bp, Homo sapiens
acaaaaattagctgggtgtggtggtgcgtgcctgtaatcccagctactcaggaggctgaggcacgagaattgcttgaacctgggaggcagaggtagcagtgagccgagatcacacgactgcactccagcctggacaacagagcgattccgtctcaaaaataaataaatagccccatcccttccccggctcccccggtgtccgccatggccaaagcctaygaccacctcttcaagttgctgctgatcggggactcgggggtgggcaagacttgtctgatcattcgctttgcagaggacaacttcaacaacacttacatctccaccatyggaattgatttcaagatccgcactgtggatatagaggggaagaagatcaaactacaagtctgggacacagctggccaagagcggttcaagacaataactactgcctactaccgtggagccatgggcattatcctagcatacgacatcacggatgagaaatctttcgagaatattcagaactggatgaaaagcatcatggagaatgcctcagctggggtggagcacctcttgctagggaacaaatgtgacatggaggccaagaggaaggtgcagaaggagcaggccgataagttggctcgagagcatggaatccgatttttcgaaactagtgctaaatccagtatgaatgtggatgaggcttttagttccctggcccgggacatcttgctcaagtcaggaggccggagatcaggaaacrgcaacaagcctcccagtactgacctgaaaacttgtgacataaagaacaccaacaagtgctccctgagctgaggaccctttcttgcctccccaccccggaagctgaacctgagggagacaacagcagagggagtgagcaggggagaaatagcagaggggcttggagggacacataggtagatggtaaagagaatgaggagaaaaaggagaaaagggaaaagcagaaaggaaaagaaggaaaagagaggaagggagaagggagaggaatgaattgaggaagtgaacgaaggcaaggaggtaggaagagagggaggaggaaaggaaggagagatgcctcaggcttcagaccttacctgggttttcagggcaaacataaatgtaaatacactgatttattctgttactagatcaggttttagggtcctgcaaagggctagctcggcactacactagggaatttgctcctgttctgtcacttgtcatggtctttcttggtattaaaggccaccatttgcacaaaaaataaa

SEQ ID NO: 260 - DNA, 3223 bp, Homo sapiens
tcgacacaggcttggggccgacgggggagacggagccccagtatccccctccctccaccctttcccattctgataatctggccatgactagcagaagcacagctaggcccaatgggcaaccccaggccagcaaaatttgccagttcaaattggtcctgctgggagaatctgcagtgggaaagtcaagcctggtattacgttttgtcaaagggcagttccatgagtaccaggagagcaccattggagcggccttcctcacccagtccgtttgtctagatgacacaacagtgaagtttgagatctgggacacagctgggcaggagcgatatcacagcttagcccccatgtactacaggggtgcccaagctgcaatcgtggtttacgacattactaatcaggaaacctttgcccgagcaaagacatgggtgaaggaactacagcgacaggccagtcctagcatcgttattgccctggcagggaacaaagctgacctggccaacaaacgtatggtggagtatgaagaggcccaggcatatgcagatgacaacagcttattgttcatggagacttcmgccaagacagctatgaacgtgaatgatctcttcctggcaatagctaagaagttgccaaagagtgaaccccagaatctgggaggtgcagcaggccgaagccggggtgtggatctccatgaacagtcccagcagaacaagagccagtgttgtagcaactgagggggtggctagcagcaaacaagtatggagctagcacaagagctaagaaataacckccatccctacccctcagcacacarcccctacggtaacagcacactgagccctggctcccaagggctgcctcctgacagctccgtcatggcactttttaacgcttcagcaacaaacaccaggcagctgttgccactggcctcctaccccctactctggggcttgggggtcaactccccccaggacttaccttccaaaacaaactttcttcactttgtattataggtacaagacagcgacttaygtatcttttctcctcctccctagtgttcctccccattttttcagaaaacrcttctgactcctgtcccttccccttctgcttttggtcagtccctgttcttgagcctcttttctcctctccccaggatgcwgaaagtggtgaacccaggaactgaggaaggaggtttccagttcatttacattaagggccctgggggagaataaagctcagagcaggagggagtaaggaaacatttcctttttgtttttatttggttggagtttctcatatttgaaaacattgcggtatccatgatttggccttgtggagggtgttcctaggtagaggtgagaatggggaggcaagatctcaggcaccargcaggaggtgcckkgtaagctaactgggcggaggtggaggtgcagtgtcaactgtggctctgtaactcttcaaaggcccagtttcccctcacgcagcctcttaggtagcgtttcccctaatcgtgggggttggaccccagagtcttccaaagaattttcactggttgcctrcrtctttggctctgctgtgatctgattggaggagggacagtttctggtacccatcctctgatttatacatatgcrttttttcccctctggcctttagatggcctcagccccagccaccatatacccctgcagtttgcactttaattgatggtagttcagttggggtacttgttttatggaagttttgattgatttacttgccctcccaccttctttttaattcaatgaaatctgaggttaatgcgaggttcgaggagaggttatagataaaactaccagtggcagctactcaagtcctatctccactgttagcttcctccaactctaattattaacctatattcttgccaagctaactattgactataggtttgcctttcctggagaattaattgagcaattgaggagtgtctcaggatagcacaggccaaggtaggggagtaaaaaggaggtcaggcaaaagggaggagttttctgtcctttcccaggtttcacactcaatttgatatccattaccatgtcttttctacttccttgtaaataggtatgatctttattcccactgtacagtctgttctatcctctgcctcccatcaggccctgtttctttgttcctttgttaatatcttgaatttagtccctccatccttaatccccccatccctccccatcatgcaaccagtggtttaatccatgtaccaataggggctagtaccacagaggcctcctgtggtgccctcgtatcataccacctgttcctgtggagagggaatgaccggcactgaargtaccttacaactggctcatattatcagaggaccttggtcctttctaaatctctagtctctcttcatatccttcatcaggtgttttaagatgtctctgagaagccatcaaggcaaaagagaactttaagttccttgttccagcccggagttttgggaaagaaagaaaggaaaggtcacagtgacctaggattggaaccttcctgcccttttggcttgcagactgccttctatcccagaacagctgagaaatctatgaagctgagattctgaaggacccagcttaggttcttccacttaggcctcaattcccttccttttccaggggcagccttagttcccatggccctgaaacacacacatttcccccttcctttcccagaagccactggccccccatagcacccagtgcatcctttttacaagtggaagaactaggatggctttccaaagtcttctagaaatgaagttctttctctgtgcagctttcccccttggagcaggagtgaagatgtttcattatcttgggcctgggaaaccacttccccaggcttctccctccccccacccccataggaacaggatttggccttagcttytgggcstatcggctgccttccctctacttcctaccacctcttctgccttcctttgagctctgttgggcttggggatcttagttttcttttgtttatttcccagctcatttttttcttctggtcmgtttttttaagggggggtgttgtggttttttgtttttgttttgcttctgagaaagcatttgcctttcttcctctcccaacataacaatcgtggtaacagaatgcgactgctgatttaccgatgtatttaatgtaagtaaaaaaaggaaaaaaagaa

SEQ ID NO: 261 - DNA, 3182 bp, Homo sapiens
tatccccctccctccaccctttcccattctgataatctggccatgactagcagaagcacagctaggcccaatgggcaaccccaggccagcaaaatttgccagttcaaattggtcctgctgggagaatctgcagtgggaaagtcaagcctggtattacgttttgtcaaagggcagttccatgagtaccaggagagcaccattggagcggccttcctcacccagtccgtttgtctagatgacacaacagtgaagtttgagatctgggacacagctgggcaggagcgatatcacagcttagcccccatgtactacaggggtgcccaagctgcaatcgtggtttacgacattactaatcaggaaacctttgcccgagcaaagacatgggtgaaggaactacagcgacaggccagtcctagcatcgttattgccctggcagggaacaaagctgacctggccaacaaacgtatggtggagtatgaagaggcccaggcatatgcagatgacaacagcttattgttcatggagacttcmgccaagacagctatgaacgtgaatgatctcttcctggcaatagctaagaagttgccaaagagtgaaccccagaatctgggaggtgcagcaggccgaagccggggtgtggatctccatgaacagtcccagcagaacaagagccagtgttgtagcaactgagggggtggctagcagcaaacaagtatggagctagcacaagagctaagaaataacckccatccctacccctcagcacacarcccctacggtaacagcacactgagccctggctcccaagggctgcctcctgacagctccgtcatggcactttttaacgcttcagcaacaaacaccaggcagctgttgccactggcctcctaccccctactctggggcttgggggtcaactccccccaggacttaccttccaaaacaaactttcttcactttgtattataggtacaagacagcgacttaygtatcttttctcctcctccctagtgttcctccccattttttcagaaaacrcttctgactcctgtcccttccccttctgcttttggtcagtccctgttcttgagcctcttttctcctctccccaggatgcwgaaagtggtgaacccaggaactgaggaaggaggtttccagttcatttacattaagggccctgggggagaataaagctcagagcaggagggagtaaggaaacatttcctttttgtttttatttggttggagtttctcatatttgaaaacattgcggtatccatgatttggccttgtggagggtgttcctaggtagaggtgagaatggggaggcaagatctcaggcaccargcaggaggtgcckkgtaagctaactgggcggaggtggaggtgcagtgtcaactgtggctctgtaactcttcaaaggcccagtttcccctcacgcagcctcttaggtagcgtttcccctaatcgtgggggttggaccccagagtcttccaaagaattttcactggttgcctrcrtctttggctctgctgtgatctgattggaggagggacagtttctggtacccatcctctgatttatacatatgcrttttttcccctctggcctttagatggcctcagccccagccaccatatacccctgcagtttgcactttaattgatggtagttcagttggggtacttgttttatggaagttttgattgatttacttgccctcccaccttctttttaattcaatgaaatctgaggttaatgcgaggttcgaggagaggttatagataaaactaccagtggcagctactcaagtcctatctccactgttagcttcctccaactctaattattaacctatattcttgccaagctaactattgactataggtttgcctttcctggagaattaattgagcaattgaggagtgtctcaggatagcacaggccaaggtaggggagtaaaaaggaggtcaggcaaaagggaggagttttctgtcctttcccaggtttcacactcaatttgatatccattaccatgtcttttctacttccttgtaaataggtatgatctttattcccactgtacagtctgttctatcctctgcctcccatcaggccctgtttctttgttcctttgttaatatcttgaatttagtccctccatccttaatccccccatccctccccatcatgcaaccagtggtttaatccatgtaccaataggggctagtaccacagaggcctcctgtggtgccctcgtatcataccacctgttcctgtggagagggaatgaccggcactgaargtaccttacaactggctcatattatcagaggaccttggtcctttctaaatctctagtctctcttcatatccttcatcaggtgttttaagatgtctctgagaagccatcaaggcaaaagagaactttaagttccttgttccagcccggagttttgggaaagaaagaaaggaaaggtcacagtgacctaggattggaaccttcctgcccttttggcttgcagactgccttctatcccagaacagctgagaaatctatgaagctgagattctgaaggacccagcttaggttcttccacttaggcctcaattcccttccttttccaggggcagccttagttcccatggccctgaaacacacacatttcccccttcctttcccagaagccactggccccccatagcacccagtgcatcctttttacaagtggaagaactaggatggctttccaaagtcttctagaaatgaagttctttctctgtgcagctttcccccttggagcaggagtgaagatgtttcattatcttgggcctgggaaaccacttccccaggcttctccctccccccacccccataggaacaggatttggccttagcttytgggcstatcggctgccttccctctacttcctaccacctcttctgccttcctttgagctctgttgggcttggggatcttagttttcttttgtttatttcccagctcatttttttcttctggtcmgtttttttaagggggggtgttgtggttttttgtttttgttttgcttctgagaaagcatttgcctttcttcctctcccaacataacaatcgtggtaacagaatgcgactgctgatttaccgatgtatttaatgtaagtaaaaaaaggaaaaaaagaa

SEQ ID NO: 262 - DNA, 3188 bp, Homo sapiens
ggtttggttgagctgcagctgtttgtctgttcgacacaggcttggggccgacgggggagacggagccccaggagtgttgaagcctggaaatcccctccccttccccctcccccctttacagtatccccctccctccaccctttcccattctgataatctggccatgactagcagaagcacagctaggcccaatgggcaaccccaggccagcaaaatttgccagttcaaattggtcctgctgggagaatctgcagtgggaaagtcaagcctggtattacgttttgtcaaagggcagttccatgagtaccaggagagcaccattggagcggccttcctcacccagtccgtttgtctagatgacacaacagtgaagtttgagatctgggacacagctgggcaggagcgatatcacagcttagcccccatgtactacaggggtgcccaagctgcaatcgtggtttacgacattactaatcaggaggcccaggcatatgcagatgacaacagcttattgttcatggagacttcmgccaagacagctatgaacgtgaatgatctcttcctggcaatagctaagaagttgccaaagagtgaaccccagaatctgggaggtgcagcaggccgaagccggggtgtggatctccatgaacagtcccagcagaacaagagccagtgttgtagcaactgagggggtggctagcagcaaacaagtatggagctagcacaagagctaagaaataacckccatccctacccctcagcacacarcccctacggtaacagcacactgagccctggctcccaagggctgcctcctgacagctccgtcatggcactttttaacgcttcagcaacaaacaccaggcagctgttgccactggcctcctaccccctactctggggcttgggggtcaactccccccaggacttaccttccaaaacaaactttcttcactttgtattataggtacaagacagcgacttaygtatcttttctcctcctccctagtgttcctccccattttttcagaaaacrcttctgactcctgtcccttccccttctgcttttggtcagtccctgttcttgagcctcttttctcctctccccaggatgcwgaaagtggtgaacccaggaactgaggaaggaggtttccagttcatttacattaagggccctgggggagaataaagctcagagcaggagggagtaaggaaacatttcctttttgtttttatttggttggagtttctcatatttgaaaacattgcggtatccatgatttggccttgtggagggtgttcctaggtagaggtgagaatggggaggcaagatctcaggcaccargcaggaggtgcckkgtaagctaactgggcggaggtggaggtgcagtgtcaactgtggctctgtaactcttcaaaggcccagtttcccctcacgcagcctcttaggtagcgtttcccctaatcgtgggggttggaccccagagtcttccaaagaattttcactggttgcctrcrtctttggctctgctgtgatctgattggaggagggacagtttctggtacccatcctctgatttatacatatgcrttttttcccctctggcctttagatggcctcagccccagccaccatatacccctgcagtttgcactttaattgatggtagttcagttggggtacttgttttatggaagttttgattgatttacttgccctcccaccttctttttaattcaatgaaatctgaggttaatgcgaggttcgaggagaggttatagataaaactaccagtggcagctactcaagtcctatctccactgttagcttcctccaactctaattattaacctatattcttgccaagctaactattgactataggtttgcctttcctggagaattaattgagcaattgaggagtgtctcaggatagcacaggccaaggtaggggagtaaaaaggaggtcaggcaaaagggaggagttttctgtcctttcccaggtttcacactcaatttgatatccattaccatgtcttttctacttccttgtaaataggtatgatctttattcccactgtacagtctgttctatcctctgcctcccatcaggccctgtttctttgttcctttgttaatatcttgaatttagtccctccatccttaatccccccatccctccccatcatgcaaccagtggtttaatccatgtaccaataggggctagtaccacagaggcctcctgtggtgccctcgtatcataccacctgttcctgtggagagggaatgaccggcactgaargtaccttacaactggctcatattatcagaggaccttggtcctttctaaatctctagtctctcttcatatccttcatcaggtgttttaagatgtctctgagaagccatcaaggcaaaagagaactttaagttccttgttccagcccggagttttgggaaagaaagaaaggaaaggtcacagtgacctaggattggaaccttcctgcccttttggcttgcagactgccttctatcccagaacagctgagaaatctatgaagctgagattctgaaggacccagcttaggttcttccacttaggcctcaattcccttccttttccaggggcagccttagttcccatggccctgaaacacacacatttcccccttcctttcccagaagccactggccccccatagcacccagtgcatcctttttacaagtggaagaactaggatggctttccaaagtcttctagaaatgaagttctttctctgtgcagctttcccccttggagcaggagtgaagatgtttcattatcttgggcctgggaaaccacttccccaggcttctccctccccccacccccataggaacaggatttggccttagcttytgggcstatcggctgccttccctctacttcctaccacctcttctgccttcctttgagctctgttgggcttggggatcttagttttcttttgtttatttcccagctcatttttttcttctggtcmgtttttttaagggggggtgttgtggttttttgtttttgttttgcttctgagaaagcatttgcctttcttcctctcccaacataacaatcgtggtaacagaatgcgactgctgatttaccgatgtatttaatgtaagtaaaaaaaggaaaaaaagaaaagggcat

SEQ ID NO: 263 - DNA, 3169 bp, Homo sapiens
tcgacacaggcttggggccgacgggggagacggagccccagtatccccctccctccaccctttcccattctgataatctggccatgactagcagaagcacagctaggcccaatgggcaaccccaggccagcaaaatttgccagttcaaattggtcctgctgggagaatctgcagtgggaaagtcaagcctggtattacgttttgtcaaagggcagttccatgagtaccaggagagcaccattggagcggccttcctcacccagtccgtttgtctagatgacacaacagtgaagtttgagatctgggacacagctgggcaggagcgatatcacagcttagcccccatgtactacaggggtgcccaagctgcaatcgtggtttacgacattactaatcaggaaacctttgcccgagcaaagacatgggtgaaggaactacagcgacaggccagtcctagcatcgttattgccctggcagggaacaaagctgacctggccaacaaacgtatggtggagtatgaagaggcccaggcatatgcagatgacaacagcttattgttcatggagacttcmgccaagacagctatgaacgtgaatgatctcttcctggcaatagctaagaagttgccaaagagtgaaccccagaatctgggaggtgcagcaggccgaagccggggtgtggatctccatgaacagtcccagcagaacaagagccagtgttgtagcaactgagggggtggctagcagcaaacaagtatggagctagcacaagagctaagaaataacckccatccctacccctcagcacacarcccctacggtaacagcacactgagccctggctcccaagggctgcctcctgacagctccgtcatggcactttttaacgcttcagcaacaaacaccaggcagctgttgccactggcctcctaccccctactctggggcttgggggtcaactccccccaggacttaccttccaaaacaaactttcttcactttgtattataggtacaagacagcgacttaygtatcttttctcctcctccctagtgttcctccccattttttcagaaaacrcttctgactcctgtcccttccccttctgcttttggtcagtccctgttcttgagcctcttttctcctctccccaggatgcwgaaagtggtgaacccaggaactgaggaaggaggtttccagttcatttacattaagggccctgggggagaataaagctcagagcaggagggagtaaggaaacatttcctttttgtttttatttggttggagtttctcatatttgaaaacattgcggtatccatgatttggccttgtggagggtgttcctaggtagaggtgagaatggggaggcaagatctcaggcaccargcaggaggtgcckkgtaagctaactgggcggaggtggaggtgcagtgtcaactgtggctctgtaactcttcaaaggcccagtttcccctcacgcagcctcttaggtagcgtttcccctaatcgtgggggttggaccccagagtcttccaaagaattttcactggttgcctrcrtctttggctctgctgtgatctgattggaggagggacagtttctggtacccatcctctgatttatacatatgcrttttttcccctctggcctttagatggcctcagccccagccaccatatacccctgcagtttgcactttaattgatggtagttcagttggggtacttgttttatggaagttttgattgatttacttgccctcccaccttctttttaattcaatgaaatctgaggttaatgcgaggttcgaggagaggttatagataaaactaccagtggcagctactcaagtcctatctccactgttagcttcctccaactctaattattaacctatattcttgccaagctaactattgactataggtttgcctttcctggagaattaattgagcaattgaggagtgtctcaggatagcacaggccaaggtaggggagtaaaaaggaggtcaggcaaaagggaggagttttctgtcctttcccaggtttcacactcaatttgatatccattaccatgtcttttctacttccttgtaaataggtatgatctttattcccactgtacagtctgttctatcctctgcctcccatcaggccctgtttctttgttcctttgttaatatcttgaatttagtccctccatccttaatccccccatccctccccatcatgcaaccagtggtttaatccatgtaccaataggggctagtaccacagaggcctcctgtggtgccctcgtatcataccacctgttcctgtggagagggaatgaccggcactgaargtaccttacaactggctcatattatcagaggaccttggtcctttctaaatctctagtctctcttcatatccttcatcaggtgttttaagatgtctctgagaagccatcaaggcaaaagagtcacagtgacctaggattggaaccttcctgcccttttggcttgcagactgccttctatcccagaacagctgagaaatctatgaagctgagattctgaaggacccagcttaggttcttccacttaggcctcaattcccttccttttccaggggcagccttagttcccatggccctgaaacacacacatttcccccttcctttcccagaagccactggccccccatagcacccagtgcatcctttttacaagtggaagaactaggatggctttccaaagtcttctagaaatgaagttctttctctgtgcagctttcccccttggagcaggagtgaagatgtttcattatcttgggcctgggaaaccacttccccaggcttctccctccccccacccccataggaacaggatttggccttagcttytgggcstatcggctgccttccctctacttcctaccacctcttctgccttcctttgagctctgttgggcttggggatcttagttttcttttgtttatttcccagctcatttttttcttctggtcmgtttttttaagggggggtgttgtggttttttgtttttgttttgcttctgagaaagcatttgcctttcttcctctcccaacataacaatcgtggtaacagaatgcgactgctgatttaccgatgtatttaatgtaagtaaaaaaaggaaaaaaagaa

SEQ ID NO: 264 - DNA, 2982 bp, Homo sapiens
tgttcccaagattataacctgctttatgcaaccatcagagccaaagaaacttaaccaaaggtttaaaacttacataaacaaagattcttttatttacaactctgcttctctgatgaacaagaagctgcagcttacacgtttgaggtgccttattcatactggctactcaatatgtaattttttaaaaaatctgttggtcttacagtatggaagcaaaaatgaatggtgatgttggtgaatgctaagggtagaagtaagacatatcaagatttaaaacataaatagcttggaacaccctgaagagcaacatgggagaaactgagaaaagaattgaaacccatagaayaagatgtctttccaagttgaagatgtttctgttggcaataacatgtgcatttgtatccaaaacactgtctggatcttatatgaattccatgctcacacaaatagagagacaattcaacatcccaacatctctagttggattcattaatggaagctttgagattggaaatcttttgttgattatatttgtgagttattttggaaccaaactgcatagacctataatgattggcattggatgtgtggttatgggcttaggctgtttcttaaaatcactacctcatttcctcatgaaccaatatgaatatgaatctacagtttcagtttcaggcaacttgtcctcawacagtttcttgtgtatggaaaatggaacccagattttaagaccaacgcaggatccatcagagtgtacaaaggaagttaaatcattaatgtgggtgtacgtcctagtaggcaatattgtacgtggaatgggtgamactcccatcctgcctttgggtatttcctatatagaagattttgccaaatttgaaaattctcctttatatattgggcttgtagaaacaggagctattattggtcctttgattggacttttgttggcatcattctgtgcaaatgtttatgttgacactggatttgtgaacacagatgatctgatcataactcccactgacactcgttgggtyggtgcatggtggtttggctttctgatttgtgcaggagttaaygtgctcactgccattccttttttctttttgcccaacacacttccaaaggaaggactagagactaatgctgacatcattaaaaatgaaaatgaagacaaacaaaaagaagaggtcaagaaggaaaaatatggaatcactaaagattttctacctttcatgaaaagtctttcctgcaatccaatttatatgcttttcatacttgtaagtgtgatacagttcaatgcattcgttaacatgatctccttcatgcctaaatacctagaacagcaatatggaatatcatcttcagatgcaatctttctaatgggtatttataacttacctccaatatgtattggatatataattggtggtttaattatgaagaagttcaagattactgtcaaacaagctgcccacataggatgttggttatccttacttgagtatcttctctattttttatcttttctcatgacttgtgaaaattcttcagttgttggaataaatacctcttatgaaggaattccacaagatttatatgtggaaaatgacatctttgctgattgcaatgtggattgcaactgtccatctaaaatatgggatcctgtgtgtggaaacaatggcttgtcrtatctgtcagcttgtcttgctggttgtgagacatccattggaacgggaataaacatggtgttccaaaattgcagctgtattcaaacatcaggaaattcatctgcagttcttgggctgtgcgacaaaggacctgactgttccttgatgctccagtacttcctaatcttgtcagcgatgagcagtttcatttattctttggctgccatacctggatatatggttctcttgaggtgtatgaaatctgaagagaagtcccttggtgtgggattacatacattttgyacaagagtatttgctggcattcctgcacctatatattttggcgctttaatggattccacatgtttacactggggaactttgaaatgtggtgagtcaggggcatgcaggatatatgattccaccaccttcagatacatctacctcggattgccggcagcactaagaggatcaagctttgttccagccttaatcatcttaattcttttgaggaagtgtcatctacctggtgaaaatgcctcttcaggaacagagcttatagagacaaaagtcaaagggaaggaaaatgagtgcaaagatatataccaaaagtccacggttttgaaagatgatgaattgaaaactaaattgtaatyktcctattatattacttttttcagaattagagaacatgctgtacaacttaattgttttaaaaatcagtagagatataatagataactttttcttgtctttaagaacctaaaaaamctcttaactcaaaataataaaatgttcactaatgatatttctaaggtatcagtgacacttgagttttcctaggagggacatcaataacagccccctaaagaagattcttagmgccagctttatttttatgttgaaacagcaatttcccttaattcatcgaagtaagggtgtacttcctacatctccttctactaatacttctaaaaattttctgttatgaaaacctatttaattccactaaatttgttctttgatattggaattattcagatgcctaaattctcattctgttatgtgaagatttaaatattttattcaagtttatcgcttccatgtgagagaagcctacatcttcttattctatttaggaatcgttctttaactcttcttattcattctaggcatgactcctatataatagattactcataaatataccctcctactttcaattttttcttttctttattactcatacatttgctcaatttgtacagaatactgacaaacttaagcaggttattaaacatcatgaggcaaagat

SEQ ID NO: 265 - DNA, 2925 bp, Homo sapiens
tttgaaatagaaaaccaacaactaaatcttctctaacaccatgattttctaatctgtattaaagcgttccaggtatttttgtaatgcaatggatttcaattatgttgttcattttcagcacttacttcaaaagaatgatgctttacaattttgtagttaatttaacatatttttttgtttgcttgaaagggtagaagtaagacatatcaagatttaaaacataaatagcttggaacaccctgaagagcaacatgggagaaactgagaaaagaattgaaacccatagaayaagatgtctttccaagttgaagatgtttctgttggcaataacatgtgcatttgtatccaaaacactgtctggatcttatatgaattccatgctcacacaaatagagagacaattcaacatcccaacatctctagttggattcattaatggaagctttgagattggaaatcttttgttgattatatttgtgagttattttggaaccaaactgcatagacctataatgattggcattggatgtgtggttatgggcttaggctgtttcttaaaatcactacctcatttcctcatgaaccaatatgaatatgaatctacagtttcagtttcaggcaacttgtcctcawacagtttcttgtgtatggaaaatggaacccagattttaagaccaacgcaggatccatcagagtgtacaaaggaagttaaatcattaatgtgggtgtacgtcctagtaggcaatattgtacgtggaatgggtgamactcccatcctgcctttgggtatttcctatatagaagattttgccaaatttgaaaattctcctttatatattgggcttgtagaaacaggagctattattggtcctttgattggacttttgttggcatcattctgtgcaaatgtttatgttgacactggatttgtgaacacagatgatctgatcataactcccactgacactcgttgggtyggtgcatggtggtttggctttctgatttgtgcaggagttaaygtgctcactgccattccttttttctttttgcccaacacacttccaaaggaaggactagagactaatgctgacatcattaaaaatgaaaatgaagacaaacaaaaagaagaggtcaagaaggaaaaatatggaatcactaaagattttctacctttcatgaaaagtctttcctgcaatccaatttatatgcttttcatacttgtaagtgtgatacagttcaatgcattcgttaacatgatctccttcatgcctaaatacctagaacagcaatatggaatatcatcttcagatgcaatctttctaatgggtatttataacttacctccaatatgtattggatatataattggtggtttaattatgaagaagttcaagattactgtcaaacaagctgcccacataggatgttggttatccttacttgagtatcttctctattttttatcttttctcatgacttgtgaaaattcttcagttgttggaataaatacctcttatgaaggaattccacaagatttatatgtggaaaatgacatctttgctgattgcaatgtggattgcaactgtccatctaaaatatgggatcctgtgtgtggaaacaatggcttgtcrtatctgtcagcttgtcttgctggttgtgagacatccattggaacgggaataaacatggtgttccaaaattgcagctgtattcaaacatcaggaaattcatctgcagttcttgggctgtgcgacaaaggacctgactgttccttgatgctccagtacttcctaatcttgtcagcgatgagcagtttcatttattctttggctgccatacctggatatatggttctcttgaggtgtatgaaatctgaagagaagtcccttggtgtgggattacatacattttgyacaagagtatttgctggcattcctgcacctatatattttggcgctttaatggattccacatgtttacactggggaactttgaaatgtggtgagtcaggggcatgcaggatatatgattccaccaccttcagatacatctacctcggattgccggcagcactaagaggatcaagctttgttccagccttaatcatcttaattcttttgaggaagtgtcatctacctggtgaaaatgcctcttcaggaacagagcttatagagacaaaagtcaaagggaaggaaaatgagtgcaaagatatataccaaaagtccacggttttgaaagatgatgaattgaaaactaaattgtaatyktcctattatattacttttttcagaattagagaacatgctgtacaacttaattgttttaaaaatcagtagagatataatagataactttttcttgtctttaagaacctaaaaaamctcttaactcaaaataataaaatgttcactaatgatatttctaaggtatcagtgacacttgagttttcctaggagggacatcaataacagccccctaaagaagattcttagmgccagctttatttttatgttgaaacagcaatttcccttaattcatcgaagtaagggtgtacttcctacatctccttctactaatacttctaaaaattttctgttatgaaaacctatttaattccactaaatttgttctttgatattggaattattcagatgcctaaattctcattctgttatgtgaagatttaaatattttattcaagtttatcgcttccatgtgagagaagcctacatcttcttattctatttaggaatcgttctttaactcttcttattcattctaggcatgactcctatataatagattactcataaatataccctcctactttcaattttttcttttctttattactcatacatttgctcaatttgtacagaatactgacaaacttaagcaggttattaaacatcatgaggcaaagat

SEQ ID NO: 266 - DNA, 2333 bp, Homo sapiens
gtgaagtatgtttttatgagcaaatttacctttctctccaagttctcccaaatttggaaaccctgagaaaccctgaaaatactctgtcctgggcttatatgccttagacacaactgggattgctgagctcaagggttgcagagcatcctactatgggaagaatgaggacataactcagattgttctggatatttccctcattgctgagaatgcagaatgtttctgaccaagaattgcaagcaagaacaggaaagagtggagtcggccaagatgtttctgttggcaataacatgtgcatttgtatccaaaacactgtctggatcttatatgaattccatgctcacacaaatagagagacaattcaacatcccaacatctctagttggattcattaatggaagctttgagattggaaatcttttgttgattatatttgtgagttattttggaaccaaactgcatagacctataatgattggcattggatgtgtggttatgggcttaggctgtttcttaaaatcactacctcatttcctcatgaaccaatatgaatatgaatctacagtttcagtttcaggcaacttgtcctcawacagtttcttgtgtatggaaaatggaacccagattttaagaccaacgcaggatccatcagagtgtacaaaggaagttaaatcattaatgtgggtgtacgtcctagtaggcaatattgtacgtggaatgggtgamactcccatcctgcctttgggtatttcctatatagaagattttgccaaatttgaaaattctcctttatatattgggcttgtagaaacaggagctattattggtcctttgattggacttttgttggcatcattctgtgcaaatgtttatgttgacactggatttgtgaacacagatgatctgatcataactcccactgacactcgttgggtyggtgcatggtggtttggctttctgatttgtgcaggagttaaygtgctcactgccattccttttttctttttgcccaacacacttccaaaggaaggactagagactaatgctgacatcattaaaaatgaaaatgaagacaaacaaaaagaagaggtcaagaaggaaaaatatggaatcactaaagattttctacctttcatgaaaagtctttcctgcaatccaatttatatgcttttcatacttgtaagtgtgatacagttcaatgcattcgttaacatgatctccttcatgcctaaatacctagaacagcaatatggaatatcatcttcagatgcaatctttctaatgggtatttataacttacctccaatatgtattggatatataattggtggtttaattatgaagaagttcaagattactgtcaaacaagctgcccacataggatgttggttatccttacttgagtatcttctctattttttatcttttctcatgacttgtgaaaattcttcagttgttggaataaatacctcttatgaaggaattccacaagatttatatgtggaaaatgacatctttgctgattgcaatgtggattgcaactgtccatctaaaatatgggatcctgtgtgtggaaacaatggcttgtcrtatctgtcagcttgtcttgctggttgtgagacatccattggaacgggaataaacatggtgttccaaaattgcagctgtattcaaacatcaggaaattcatctgcagttcttgggctgtgcgacaaaggacctgactgttccttgatgctccagtacttcctaatcttgtcagcgatgagcagtttcatttattctttggctgccatacctggatatatggttctcttgaggtgtatgaaatctgaagagaagtcccttggtgtgggattacatacattttgyacaagagtatttggtaaaaatagttattttttcccacatcctatcagaacaatattattmktattattttttattacactttaagttttagggtacatgtgcacaacgtgcaggtttgttacatatgtatacatgtgycatgttggtgtgctgcacccattaactcatcatttaacattaggtgaatctcctaatgctatccctccccccttcccccaccccacaacrggccgtggtgtgtgatgttccccttcctgtgtccatgtgcagaacaatattaaatactagataaacaaggtaatattatttcagaaaagcagtctagcaaatgtcccttctgtatgtaaaaagcacrttataaatatgagaatgcagcacacaaagagatagagaatctcttttacttgaaaaggccctgtctgaccttaattacactattctttgtttgaagatttgaaaat

SEQ ID NO: 267 - DNA, 3395 bp, Homo sapiens
ctcgctgctgccttgcagtttgatctcagactgctgtgctagcaatcagcgagactccatgggcgtaggaccctccgagccaggtgcgggatataatcttgtggcgcgccgttttttaagcctgttggaagagcgcagtattcgggtgggagtgacccgattttccaggtgcgtcagtcacccctttctttgactcagaaagggaactccctgaccccttgggcttcccaagtgaggcaatgcctcaccctgctttggcttgcgcacggtgcgcgcacccactgacctgcgcccattgtctggcactccctagtgagatgaacccggtacctcagatggaaatgcagaaatcacccgtcttctgcgtcgctcacgctgggagctgtgcaccggagctgttcctatttggccatcttggctcctctccccttgttcctgattttaatgggactaccttggttatttcacagcacacttacggtgctttgtgaagtgcctgctatgttactatcatcatcttcctgacaagatggtgctgtagaaatctttgcatattgctatgggcttccaagaaaaactacctcgaaggaaaacaaagacaagatgacgatcattctaatgagaagaattataatatgacatgcacactctttacaaagggtagaagtaagacatatcaagatttaaaacataaatagcttggaacaccctgaagagcaacatgggagaaactgagaaaagaattgaaacccatagaayaagatgtctttccaagttgaagatgtttctgttggcaataacatgtgcatttgtatccaaaacactgtctggatcttatatgaattccatgctcacacaaatagagagacaattcaacatcccaacatctctagttggattcattaatggaagctttgagattggaaatcttttgttgattatatttgtgagttattttggaaccaaactgcatagacctataatgattggcattggatgtgtggttatgggcttaggctgtttcttaaaatcactacctcatttcctcatgaaccaatatgaatatgaatctacagtttcagtttcaggcaacttgtcctcawacagtttcttgtgtatggaaaatggaacccagattttaagaccaacgcaggatccatcagagtgtacaaaggaagttaaatcattaatgtgggtgtacgtcctagtaggcaatattgtacgtggaatgggtgamactcccatcctgcctttgggtatttcctatatagaagattttgccaaatttgaaaattctcctttatatattgggcttgtagaaacaggagctattattggtcctttgattggacttttgttggcatcattctgtgcaaatgtttatgttgacactggatttgtgaacacagatgatctgatcataactcccactgacactcgttgggtyggtgcatggtggtttggctttctgatttgtgcaggagttaaygtgctcactgccattccttttttctttttgcccaacacacttccaaaggaaggactagagactaatgctgacatcattaaaaatgaaaatgaagacaaacaaaaagaagaggtcaagaaggaaaaatatggaatcactaaagattttctacctttcatgaaaagtctttcctgcaatccaatttatatgcttttcatacttgtaagtgtgatacagttcaatgcattcgttaacatgatctccttcatgcctaaatacctagaacagcaatatggaatatcatcttcagatgcaatctttctaatgggtatttataacttacctccaatatgtattggatatataattggtggtttaattatgaagaagttcaagattactgtcaaacaagctgcccacataggatgttggttatccttacttgagtatcttctctattttttatcttttctcatgacttgtgaaaattcttcagttgttggaataaatacctcttatgaaggaattccacaagatttatatgtggaaaatgacatctttgctgattgcaatgtggattgcaactgtccatctaaaatatgggatcctgtgtgtggaaacaatggcttgtcrtatctgtcagcttgtcttgctggttgtgagacatccattggaacgggaataaacatggtgttccaaaattgcagctgtattcaaacatcaggaaattcatctgcagttcttgggctgtgcgacaaaggacctgactgttccttgatgctccagtacttcctaatcttgtcagcgatgagcagtttcatttattctttggctgccatacctggatatatggttctcttgaggtgtatgaaatctgaagagaagtcccttggtgtgggattacatacattttgyacaagagtatttgctggcattcctgcacctatatattttggcgctttaatggattccacatgtttacactggggaactttgaaatgtggtgagtcaggggcatgcaggatatatgattccaccaccttcagatacatctacctcggattgccggcagcactaagaggatcaagctttgttccagccttaatcatcttaattcttttgaggaagtgtcatctacctggtgaaaatgcctcttcaggaacagagcttatagagacaaaagtcaaagggaaggaaaatgagtgcaaagatatataccaaaagtccacggttttgaaagatgatgaattgaaaactaaattgtaatyktcctattatattacttttttcagaattagagaacatgctgtacaacttaattgttttaaaaatcagtagagatataatagataactttttcttgtctttaagaacctaaaaaamctcttaactcaaaataataaaatgttcactaatgatatttctaaggtatcagtgacacttgagttttcctaggagggacatcaataacagccccctaaagaagattcttagmgccagctttatttttatgttgaaacagcaatttcccttaattcatcgaagtaagggtgtacttcctacatctccttctactaatacttctaaaaattttctgttatgaaaacctatttaattccactaaatttgttctttgatattggaattattcagatgcctaaattctcattctgttatgtgaagatttaaatattttattcaagtttatcgcttccatgtgagagaagcctacatcttcttattctatttaggaatcgttctttaactcttcttattcattctaggcatgactcctatataatagattactcataaatataccctcctactttcaattttttcttttctttattactcatacatttgctcaatttgtacagaatactgacaaacttaagcaggttattaaacatcatgaggcaaagat

SEQ ID NO: 268 - DNA, 4176 bp, Homo sapiens
agtcacgtgaggcgcagatcctggctgggagggggttggtagaggggtccagagtggcagtaaaggaggaagatggcggggtgcagggggtctctgtgctgctgctgcaggtggtgctgctgctgcggtgagcgtgagacccgcacccccgaggagctgaccatccttggagaaacacaggaggaggaggatgagattcttccaaggaaagactatgagagtttggattatgatcgctgtatcaatgacccttacctggaagttttggagaccatggataataagaaaggtcgaagatatgaggcrgtgaagtggatggtggtgtttgccattggagtctgcactggcctggtgggtctctttgtggacttttttgtgcgactcttcacccaactcaagttcrgagtggtacagacattttccgcagcggtggaggagtgcagccagaaaggctgcctcgctctgtctctccttgaactcctgggttttaacctcacctttgtcttcctggcaagcctccttgttctcattgagccggtggcagcaggttccgggatacccgaggtcaaatgctatctgaatggcgtaaaggtgccaggaatcgtccgtctccggaccctgctctgcaaggtccttggagtgctgttcagtgtggctggagggctcttcgtggrgaaggaaggccccatgatccacagtggttcggtggtgggagctggcctccctcagtttcagagcatctccttacggaagatccagtttaacttcccctatttccgaagcgacagagacaagagagactttgtatcagcaggagcggctgctggagttgctgcagctttcggggcgccaatcgggggtaccttgttcagtctagaggagggttcgtccttctggaaccaagggctcacgtggaaagtgctcttttgttccatgtctgccaccttcaccctcaacttcttccgttctgggattcagtttggaagctggggttccttccagctccctggattgctgaactttggcgagtttaagagtcttagagagcctccttgtgtctctggtaaccaccgtggtggtgtttgtggcctcgatggtgttaggagaatgccgacagatgtcctcttcgagtcaaatcggtaatgactcattccagctccaggtcacagaagatgtgaattcaagtatcaagacatttttttgtcccaatgatacctacaatgacatggccacactcttcttcaacccgcaggagtctgccatcctccagctcttccaccaggatggtactttcagccccgtcactctggccttgttcttcgttctctatttcttgcttgcatgttggacttacggcatttctgttccaagtggcctttttgtgccttctctgctgtgtggagctgcttttggacgtttagttgccaatgtcctaaaaagctacattggattgggccacatctattcggggacctttgccctgattggtgcagcggctttcttgggcggggtggtccgcatgaccatcagcctcacggtcatcctgatcgagtccaccaatgagatcacctacgggctccccatcatggtcacactgatggtggccaaatggacaggggactttttcaataagggcatttatgatatccacgtgggcctgcgaggcgtgccgcttctggaatgggagacagaggtggaaatggacaagctgagagccagcgacatcatggagcccaacctgacctacgtctacccgcacacccgcatccagtctctggtgagcatcctgcgcaccacggtccaccatgccttcccggtggtcacrgagaaccgcggtaacgagaaggagttcatgaagggcaaccagctcatcagcaacaacatcaagttcaagaaatccagcatcctcacccgggctggygagcagcgcaaacggagccagtccatgaagtcctacccatccagcgagctacggaacatgtgtgatgagcacatcgcctctgaggagccagccgagaaggaggacctcctgcagcagatgctggaaaggagatacactccctaccccaacctataccctgaccagtccccaagtgaagactggaccatggaggagcggttccgccctctgaccttccacggcctgatccttcggtcgcagcttgtcaccctgcttgtccgaggagtttgttactctgaaagccagtcgagcgccagccagccgcgcctctcctatgccgagatggccgaggactacccgcggtaccccgacatccacgacctggacctgacgctgctcaacccgcgcatgatcgtggatgtcaccccatacatgaacccttcgcctttyaccgtctcgcccaacacccacgtctcccaagtcttcaacctgttcagaacgatgggcctgcgccacctgcccgtggtgaacgctgtgggagagatcgtggggatcatcacacggcacaacctcacctatgaatttctgcaggcccggctgaggcagcactaccagaccatctgacagcccagcccaccctctcctggtgctgcctggggaggcaaatcatgctcactccggcgggcacagctggctggggctgttccggggcatggaagattcccagtyacccactcactcagaaagccgggagtcatcggacaccttgctggtcagaggycctgggggtggttttgaaccatcagagcttggacttttctgacttccccagcaaggatcttcccacttcctgctccctgtgttcccaccctccagtgttggcacaggcccacccctggctccaccagagccagaagcagaggtagaatcaggcgggccccgggctgcactccgagcagtgttcctggccatctttgctactttcctagagaacccggctgttgccttaaatgtgtgagagggacttggccaaggcaaaagctggggagatgccagtgacaacatacagttcatgactaggtttaggaattgggcactgagaaaattctcaatatttcagagagtccttcccttatttgggactcytaacacggtatcctcgctagttkgttttaagggaaacactctgctcctgggtgtgagcagaggctctggtcttgccctgtggtttgactctccttagaaccaccgcccaccagaaacataaaggattaaaatcacactaataacccctggatggtcaatctgataataggatcagatttacgtctaccctaattcttaacattgcagctttctctccatctgcagattattcccagtctcccagtaacacgtttctacccagatcctttttcatttccttaagttttgatctccgtcttcctgatgaagcaggcagagctcagaggatcttggcatcacccaccaaagttagctgaaagcagggcactcctggataaagcagcttcactcaactctggggaatgctaccattttttttccaaagtagaaaggaagcacttctgagccagtgaccactgaaagatgaacactcttcctgatcctctcctctagaattcatctcctcctgctagcagccgcgtcctggaggagcagcggatggggaatccattctgtttcttcctggtgtttaggaagttgccccacamacagattgccccgatgtccaaccagaagaagtgaaactgctgctgggtctggagaggtgaagacccgtggccagcttctgttgttgccatcggccattgctttttgttcgcttgcttttggttttgcaagaagagcggcctctgtctctgatctgcttcaaatcatcattccatcagtgacagaagtggcygttccatcagtggtcgcagccagttcagctcctgcatccatccccaagtgttctgagtggaatttgaggcctccccaaccaccyaccaaaaaaggagggtgaaatgaaaggaagaagaaaaactcagcattctttcctctgacaaagagtaaaacgacaaggaatatcggcctgaattctcttcccaagaagaaagaaagcacaccaacgcaggcatttgtcttctgtccatggkgctgaagtttattcactttcaaaccactttcagtaacagcaaattctttagaaaaggaaaatacagggaaagggataaacctcactgacttggaggaaatcaagaggagtgagcaca

SEQ ID NO: 269 - DNA, 4039 bp, Homo sapiens
agtcacgtgaggcgcagatcctggctgggagggggttggtagaggggtccagagtggcagtaaaggaggaagatggcggggtgcagggggtctctgtgctgctgctgcaggtggtgctgctgctgcggtgagcgtgagacccgcacccccgaggagctgaccatccttggagaaacacaggaggaggaggatgagattcttccaaggaaagactatgagagtttggattatgatcgctgtatcaatgacccttacctggaagttttggagaccatggataataagaaaggtcgaagatatgaggcrgtgaagtggatggtggtgtttgccattggagtctgcactggcctggtgggtctctttgtggacttttttgtgcgactcttcacccaactcaagttcrgagtggtacagacatcggtggaggagtgcagccagaaaggctgcctcgctctgtctctccttgaactcctgggttttaacctcacctttgtcttcctggcaagcctccttgttctcattgagccggtggcagcaggttccgggatacccgaggtcaaatgctatctgaatggcgtaaaggtgccaggaatcgtccgtctccggaccctgctctgcaaggtccttggagtgctgttcagtgtggctggagggctcttcgtggrgaaggaaggccccatgatccacagtggttcggtggtgggagctggcctccctcagtttcagagcatctccttacggaagatccagtttaacttcccctatttccgaagcgacagagacaagagagactttgtatcagcaggagcggctgctggagttgctgcagctttcggggcgccaatcgggggtaccttgttcagtctagaggagggttcgtccttctggaaccaagggctcacgtggaaagtgctcttttgttccatgtctgccaccttcaccctcaacttcttccgttctgggattcagtttggaagctggggttccttccagctccctggattgctgaactttggcgagtttaagagtcttagagagcctccttgtgtctctggtaaccaccgtggtggtgtttgtggcctcgatggtgttaggagaatgccgacagatgtcctcttcgagtcaaatcgctgacagcccagcccaccctctcctggtgctgcctggggaggcaaatcatgctcactccggcgggcacagctggctggggctgttccggggcatggaagattcccagtyacccactcactcagaaagccgggagtcatcggacaccttgctggtcagaggycctgggggtggttttgaaccatcagagcttggacttttctgacttccccagcaaggatcttcccacttcctgctccctgtgttcccaccctccagtgttggcacaggcccacccctggctccaccagagccagaagcagaggtagaatcaggcgggccccgggctgcactccgagcagtgttcctggccatctttgctactttcctagagaacccggctgttgccttaaatgtgtgagagggacttggccaaggcaaaagctggggagatgccagtgacaacatacagttcatgactaggtttaggaattgggcactgagaaaattctcaatatttcagagagtccttcccttatttgggactcytaacacggtatcctcgctagttkgttttaagggaaacactctgctcctgggtgtgagcagaggctctggtcttgccctgtggtttgactctccttagaaccaccgcccaccagaaacataaaggattaaaatcacactaataacccctggatggtcaatctgataataggatcagatttacgtctaccctaattcttaacattgcagctttctctccatctgcagattattcccagtctcccagtaacacgtttctacccagatcctttttcatttccttaagttttgatctccgtcttcctgatgaagcaggcagagctcagaggatcttggcatcacccaccaaagttagctgaaagcagggcactcctggataaagcagcttcactcaactctggggaatgctaccattttttttccaaagtagaaaggaagcacttctgagccagtgaccactgaaaggtatgtgctatgataaagcagatggcctatttgaggaagagggtgtctgcccttcacaaacacctctctctcccctgcactagctgtcccaagcttacatacagaggcccttcaggagggcctcctgtgccgcagggagggtgcgtggggaagatgcttcctgccagcacgtgcctgaaggtttcacatgaagcatgggaagcgcaccctgtcgttcagtgacgtcattcttctccaggctggcccgccccctctgactaggcacccaaagtgagcatctgggcattgggcattcatgcttatcttcccccaccttctacatggtatyagtcccagcaggcatccctggggcagacgtgctttggctcaagatggccttcatttacgtttagttttttttaaaaccgtggaggttgcccacgggcctcggcacctggccctggcagcacagctctcaggcccagccctgggcgacctccttggccaagtctgcctttcaccctggggtgagcatcagtcctggctctgctggtccagatcttgcgctcagcacactctagggaataattccactccagagatggggctgcttcaaggtcttttctagctgattgtggcccctccattttccccattttcttatctccctgaccaaaattgctttgacttctaaatgtttctgcttcccagaatgcacctgacttatgaaatggggataatactcccaggaaatagcgcaggacatcacaaggaccaaaaaggcaattcttatttaaatgttactatttggccagctgctgctgtgttttatggcagtgttcagagcttgatcacgttatttcttccttttattaagaaggaagccaattgtccaagtcaggagaatggtgtgatcacctgtcacagacactttgtcccctctccccgccccttcctggagctggcagagctaacgccctgcaggaggaccccggcctctcgagggctggatcagcagccgcctgccctgaggctgccccggtgaatgttattggaattcatccctcgtgcacatcctgttgtgtttaagtcaccagatattttgttcccatcagtttagcccagagatagacagtagaatgcaaatacctccctcccctaaactgactggacggctgccaaggaggccccaaacccaggccccatgcaaaggcacgtggtttccttttctcctctctctgcatctgcgctttccagataagcccaaagacagcaacttctccactcatgacaaatcaactgtgaccctcgctccttccatttctgtccattagaaaccagccttttcagcatctcacccattagcagccccatcacccagtgatcagtcgcctcagtaaagcagatctgtggatggggagcctacgggtggtaagaagtggtgttttgtgtttcatctccagcttggtgttccatggcccctaggcgaggtgatcagggagtggggccaatgggcccccggccctggctttgggaccttgtgctgagggatgatttgctcctgaccttgattaacttaacagttcccagctggaagggacactttcaggacccagtccactgtatggcatttgtgatgcagaattatgcactgacatgaccctgggtgacaggaaagcctttcgagaggcccaaggtggcctcgccagccctgcagtattgatgtgcagtattgcaccacagctctgcggaccttggccattgccrcagtcgcagcttccttttttctgtttgcactgtttgtttgtatgatgttagctaattccactgtgtatataaattgtattttttttaatttgtaaaatgctatttttatttgaacctttggaacttgggagttctcattgtaaccctaacatgtgagaataaaatgtcttctgtc

SEQ ID NO: 270 - DNA, 5587 bp, Homo sapiens
agtcacgtgaggcgcagatcctggctgggagggggttggtagaggggtccagagtggcagtaaaggaggaagatggcggggtgcagggggtctctgtgctgctgctgcaggtggtgctgctgctgcggtgagcgtgagacccgcacccccgaggagctgaccatccttggagaaacacaggaggaggaggatgagattcttccaaggaaagactatgagagtttggattatgatcgctgtatcaatgacccttacctggaagttttggagaccatggataataagaaaggtcgaagatatgaggcrgtgaagtggatggtggtgtttgccattggagtctgcactggcctggtgggtctctttgtggacttttttgtgcgactcttcacccaactcaagttcrgagtggtacagacatcggtggaggagtgcagccagaaaggctgcctcgctctgtctctccttgaactcctgggttttaacctcacctttgtcttcctggcaagcctccttgttctcattgagccggtggcagcaggttccgggatacccgaggtcaaatgctatctgaatggcgtaaaggtgccaggaatcgtccgtctccggaccctgctctgcaaggtccttggagtgctgttcagtgtggctggagggctcttcgtggrgaaggaaggccccatgatccacagtggttcggtggtgggagctggcctccctcagtttcagagcatctccttacggaagatccagtttaacttcccctatttccgaagcgacagagacaagagagactttgtatcagcaggagcggctgctggagttgctgcagctttcggggcgccaatcgggggtaccttgttcagtctagaggagggttcgtccttctggaaccaagggctcacgtggaaagtgctcttttgttccatgtctgccaccttcaccctcaacttcttccgttctgggattcagtttggaagctggggttccttccagctccctggattgctgaactttggcgagtttaagtgctctgactctgataaaaaatgtcatctctggacagctatggatttgggtttcttcgtcgtgatgggggtcattgggggcctcctgggagccacattcaactgtctgaacaagaggcttgcaaagtaccgtatgcgaaacgtgcacccgaaacctaagctcgtcagagtcttagagagcctccttgtgtctctggtaaccaccgtggtggtgtttgtggcctcgatggtgttaggagaatgccgacagatgtcctcttcgagtcaaatcggtaatgactcattccagctccaggtcacagaagatgtgaattcaagtatcaagacatttttttgtcccaatgatacctacaatgacatggccacactcttcttcaacccgcaggagtctgccatcctccagctcttccaccaggatggtactttcagccccgtcactctggccttgttcttcgttctctatttcttgcttgcatgttggacttacggcatttctgttccaagtggcctttttgtgccttctctgctgtgtggagctgcttttggacgtttagttgccaatgtcctaaaaagctacattggattgggccacatctattcggggacctttgccctgattggtgcagcggctttcttgggcggggtggtccgcatgaccatcagcctcacggtcatcctgatcgagtccaccaatgagatcacctacgggctccccatcatggtcacactgatggtggccaaatggacaggggactttttcaataagggcatttatgatatccacgtgggcctgcgaggcgtgccgcttctggaatgggagacagaggtggaaatggacaagctgagagccagcgacatcatggagcccaacctgacctacgtctacccgcacacccgcatccagtctctggtgagcatcctgcgcaccacggtccaccatgccttcccggtggtcacrgagaaccgcggtaacgagaaggagttcatgaagggcaaccagctcatcagcaacaacatcaagttcaagaaatccagcatcctcacccgggctggygagcagcgcaaacggagccagtccatgaagtcctacccatccagcgagctacggaacatgtgtgatgagcacatcgcctctgaggagccagccgagaaggaggacctcctgcagcagatgctggaaaggagatacactccctaccccaacctataccctgaccagtccccaagtgaagactggaccatggaggagcggttccgccctctgaccttccacggcctgatccttcggtcgcagcttgtcaccctgcttgtccgaggagtttgttactctgaaagccagtcgagcgccagccagccgcgcctctcctatgccgagatggccgaggactacccgcggtaccccgacatccacgacctggacctgacgctgctcaacccgcgcatgatcgtggatgtcaccccatacatgaacccttcgcctttyaccgtctcgcccaacacccacgtctcccaagtcttcaacctgttcagaacgatgggcctgcgccacctgcccgtggtgaacgctgtgggagagatcgtggggatcatcacacggcacaacctcacctatgaatttctgcaggcccggctgaggcagcactaccagaccatctgacagcccagcccaccctctcctggtgctgcctggggaggcaaatcatgctcactccggcgggcacagctggctggggctgttccggggcatggaagattcccagtyacccactcactcagaaagccgggagtcatcggacaccttgctggtcagaggycctgggggtggttttgaaccatcagagcttggacttttctgacttccccagcaaggatcttcccacttcctgctccctgtgttcccaccctccagtgttggcacaggcccacccctggctccaccagagccagaagcagaggtagaatcaggcgggccccgggctgcactccgagcagtgttcctggccatctttgctactttcctagagaacccggctgttgccttaaatgtgtgagagggacttggccaaggcaaaagctggggagatgccagtgacaacatacagttcatgactaggtttaggaattgggcactgagaaaattctcaatatttcagagagtccttcccttatttgggactcytaacacggtatcctcgctagttkgttttaagggaaacactctgctcctgggtgtgagcagaggctctggtcttgccctgtggtttgactctccttagaaccaccgcccaccagaaacataaaggattaaaatcacactaataacccctggatggtcaatctgataataggatcagatttacgtctaccctaattcttaacattgcagctttctctccatctgcagattattcccagtctcccagtaacacgtttctacccagatcctttttcatttccttaagttttgatctccgtcttcctgatgaagcaggcagagctcagaggatcttggcatcacccaccaaagttagctgaaagcagggcactcctggataaagcagcttcactcaactctggggaatgctaccattttttttccaaagtagaaaggaagcacttctgagccagtgaccactgaaaggtatgtgctatgataaagcagatggcctatttgaggaagagggtgtctgcccttcacaaacacctctctctcccctgcactagctgtcccaagcttacatacagaggcccttcaggagggcctcctgtgccgcagggagggtgcgtggggaagatgcttcctgccagcacgtgcctgaaggtttcacatgaagcatgggaagcgcaccctgtcgttcagtgacgtcattcttctccaggctggcccgccccctctgactaggcacccaaagtgagcatctgggcattgggcattcatgcttatcttcccccaccttctacatggtatyagtcccagcaggcatccctggggcagacgtgctttggctcaagatggccttcatttacgtttagttttttttaaaaccgtggaggttgcccacgggcctcggcacctggccctggcagcacagctctcaggcccagccctgggcgacctccttggccaagtctgcctttcaccctggggtgagcatcagtcctggctctgctggtccagatcttgcgctcagcacactctagggaataattccactccagagatggggctgcttcaaggtcttttctagctgattgtggcccctccattttccccattttcttatctccctgaccaaaattgctttgacttctaaatgtttctgcttcccagaatgcacctgacttatgaaatggggataatactcccaggaaatagcgcaggacatcacaaggaccaaaaaggcaattcttatttaaatgttactatttggccagctgctgctgtgttttatggcagtgttcagagcttgatcacgttatttcttccttttattaagaaggaagccaattgtccaagtcaggagaatggtgtgatcacctgtcacagacactttgtcccctctccccgccccttcctggagctggcagagctaacgccctgcaggaggaccccggcctctcgagggctggatcagcagccgcctgccctgaggctgccccggtgaatgttattggaattcatccctcgtgcacatcctgttgtgtttaagtcaccagatattttgttcccatcagtttagcccagagatagacagtagaatgcaaatacctccctcccctaaactgactggacggctgccaaggaggccccaaacccaggccccatgcaaaggcacgtggtttccttttctcctctctctgcatctgcgctttccagataagcccaaagacagcaacttctccactcatgacaaatcaactgtgaccctcgctccttccatttctgtccattagaaaccagccttttcagcatctcacccattagcagccccatcacccagtgatcagtcgcctcagtaaagcagatctgtggatggggagcctacgggtggtaagaagtggtgttttgtgtttcatctccagcttggtgttccatggcccctaggcgaggtgatcagggagtggggccaatgggcccccggccctggctttgggaccttgtgctgagggatgatttgctcctgaccttgattaacttaacagttcccagctggaagggacactttcaggacccagtccactgtatggcatttgtgatgcagaattatgcactgacatgaccctgggtgacaggaaagcctttcgagaggcccaaggtggcctcgccagccctgcagtattgatgtgcagtattgcaccacagctctgcggaccttggccattgccrcagtcgcagcttccttttttctgtttgcactgtttgtttgtatgatgttagctaattccactgtgtatataaattgtattttttttaatttgtaaaatgctatttttatttgaacctttggaacttgggagttctcattgtaaccctaacatgtgagaataaaatgtcttctgtc

SEQ ID NO: 271 - DNA, 4317 bp, Homo sapiens
agtcacgtgaggcgcagatcctggctgggagggggttggtagaggggtccagagtggcagtaaaggaggaagatggcggggtgcagggggtctctgtgctgctgctgcaggtggtgctgctgctgcggtgagcgtgagacccgcacccccgaggagctgaccatccttggagaaacacaggaggaggaggatgagattcttccaaggaaagactatgagagtttggattatgatcgctgtatcaatgacccttacctggaagttttggagaccatggataataagaaaggtcgaagatatgaggcrgtgaagtggatggtggtgtttgccattggagtctgcactggcctggtgggtctctttgtggacttttttgtgcgactcttcacccaactcaagttcrgagtggtacagacattttccgcagcggtggaggagtgcagccagaaaggctgcctcgctctgtctctccttgaactcctgggttttaacctcacctttgtcttcctggcaagcctccttgttctcattgagccggtggcagcaggttccgggatacccgaggtcaaatgctatctgaatggcgtaaaggtgccaggaatcgtccgtctccggaccctgctctgcaaggtccttggagtgctgttcagtgtggctggagggctcttcgtggrgaaggaaggccccatgatccacagtggttcggtggtgggagctggcctccctcagtttcagagcatctccttacggaagatccagtttaacttcccctatttccgaagcgacaggagcggctgctggagttgctgcagctttcggggcgccaatcgggggtaccttgttcagtctagaggagggttcgtccttctggaaccaagggctcacgtggaaagtgctcttttgttccatgtctgccaccttcaccctcaacttcttccgttctgggattcagtttggaagctggggttccttccagctccctggattgctgaactttggcgagtttaagtgctctgactctgataaaaaatgtcatctctggacagctatggatttgggtttcttcgtcgtgatgggggtcattgggggcctcctgggagccacattcaactgtctgaacaagaggcttgcaaagtaccgtatgcgaaacgtgcacccgaaacctaagctcgtcagagtcttagagagcctccttgtgtctctggtaaccaccgtggtggtgtttgtggcctcgatggtgttaggagaatgccgacagatgtcctcttcgagtcaaatcggtaatgactcattccagctccaggtcacagaagatgtgaattcaagtatcaagacatttttttgtcccaatgatacctacaatgacatggccacactcttcttcaacccgcaggagtctgccatcctccagctcttccaccaggatggtactttcagccccgtcactctggccttgttcttcgttctctatttcttgcttgcatgttggacttacggcatttctgttccaagtggcctttttgtgccttctctgctgtgtggagctgcttttggacgtttagttgccaatgtcctaaaaagctacattggattgggccacatctattcggggacctttgccctgattggtgcagcggctttcttgggcggggtggtccgcatgaccatcagcctcacggtcatcctgatcgagtccaccaatgagatcacctacgggctccccatcatggtcacactgatggtggccaaatggacaggggactttttcaataagggcatttatgatatccacgtgggcctgcgaggcgtgccgcttctggaatgggagacagaggtggaaatggacaagctgagagccagcgacatcatggagcccaacctgacctacgtctacccgcacacccgcatccagtctctggtgagcatcctgcgcaccacggtccaccatgccttcccggtggtcacrgagaaccgcggtaacgagaaggagttcatgaagggcaaccagctcatcagcaacaacatcaagttcaagaaatccagcatcctcacccgggctggygagcagcgcaaacggagccagtccatgaagtcctacccatccagcgagctacggaacatgtgtgatgagcacatcgcctctgaggagccagccgagaaggaggacctcctgcagcagatgctggaaaggagatacactccctaccccaacctataccctgaccagtccccaagtgaagactggaccatggaggagcggttccgccctctgaccttccacggcctgatccttcggtcgcagcttgtcaccctgcttgtccgaggagtttgttactctgaaagccagtcgagcgccagccagccgcgcctctcctatgccgagatggccgaggactacccgcggtaccccgacatccacgacctggacctgacgctgctcaacccgcgcatgatcgtggatgtcaccccatacatgaacccttcgcctttyaccgtctcgcccaacacccacgtctcccaagtcttcaacctgttcagaacgatgggcctgcgccacctgcccgtggtgaacgctgtgggagagatcgtggggatcatcacacggcacaacctcacctatgaatttctgcaggcccggctgaggcagcactaccagaccatctgacagcccagcccaccctctcctggtgctgcctggggaggcaaatcatgctcactccggcgggcacagctggctggggctgttccggggcatggaagattcccagtyacccactcactcagaaagccgggagtcatcggacaccttgctggtcagaggycctgggggtggttttgaaccatcagagcttggacttttctgacttccccagcaaggatcttcccacttcctgctccctgtgttcccaccctccagtgttggcacaggcccacccctggctccaccagagccagaagcagaggtagaatcaggcgggccccgggctgcactccgagcagtgttcctggccatctttgctactttcctagagaacccggctgttgccttaaatgtgtgagagggacttggccaaggcaaaagctggggagatgccagtgacaacatacagttcatgactaggtttaggaattgggcactgagaaaattctcaatatttcagagagtccttcccttatttgggactcytaacacggtatcctcgctagttkgttttaagggaaacactctgctcctgggtgtgagcagaggctctggtcttgccctgtggtttgactctccttagaaccaccgcccaccagaaacataaaggattaaaatcacactaataacccctggatggtcaatctgataataggatcagatttacgtctaccctaattcttaacattgcagctttctctccatctgcagattattcccagtctcccagtaacacgtttctacccagatcctttttcatttccttaagttttgatctccgtcttcctgatgaagcaggcagagctcagaggatcttggcatcacccaccaaagttagctgaaagcagggcactcctggataaagcagcttcactcaactctggggaatgctaccattttttttccaaagtagaaaggaagcacttctgagccagtgaccactgaaagatgaacactcttcctgatcctctcctctagaattcatctcctcctgctagcagccgcgtcctggaggagcagcggatggggaatccattctgtttcttcctggtgtttaggaagttgccccacamacagattgccccgatgtccaaccagaagaagtgaaactgctgctgggtctggagaggtgaagacccgtggccagcttctgttgttgccatcggccattgctttttgttcgcttgcttttggttttgcaagaagagcggcctctgtctctgatctgcttcaaatcatcattccatcagtgacagaagtggcygttccatcagtggtcgcagccagttcagctcctgcatccatccccaagtgttctgagtggaatttgaggcctccccaaccaccyaccaaaaaaggagggtgaaatgaaaggaagaagaaaaactcagcattctttcctctgacaaagagtaaaacgacaaggaatatcggcctgaattctcttcccaagaagaaagaaagcacaccaacgcaggcatttgtcttctgtccatggkgctgaagtttattcactttcaaaccactttcagtaacagcaaattctttagaaaaggaaaatacagggaaagggataaacctcactgacttggaggaaatcaagaggagtgagcaca

SEQ ID NO: 272 - DNA, 3938 bp, Homo sapiens
agtcacgtgaggcgcagatcctggctgggagggggttggtagaggggtccagagtggcagtaaaggaggaagatggcggggtgcagggggtctctgtgctgctgctgcaggtggtgctgctgctgcggtgagcgtgagacccgcacccccgaggagctgaccatccttggagaaacacaggaggaggaggatgagattcttccaaggaaagactatgagagtttggattatgatcgctgtatcaatgacccttacctggaagttttggagaccatggataataagaaaggtcgaagatatgaggcrgtgaagtggatggtggtgtttgccattggagtctgcactggcctggtgggtctctttgtggacttttttgtgcgactcttcacccaactcaagttcrgagtggtacagacatcggtggaggagtgcagccagaaaggctgcctcgctctgtctctccttgaactcctgggttttaacctcacctttgtcttcctggcaagcctccttgttctcattgagccggtggcagcaggttccgggatacccgaggtcaaatgctatctgaatggcgtaaaggtgccaggaatcgtccgtctccggaccctgctctgcaaggtccttggagtgctgttcagtgtggctggagggctcttcgtggrgaaggaaggccccatgatccacagtggttcggtggtgggagctggcctccctcagtttcagagcatctccttacggaagatccagtttaacttcccctatttccgaagcgacaggtatggaaagagacaagagagactttgtatcagcaggagcggctgctggagttgctgcagctttcggggcgccaatcgggggtaccttgttcagtctagaggagggttcgtccttctggaaccaagggctcacgtggaaagtgctcttttgttccatgtctgccaccttcaccctcaacttcttccgttctgggattcagtttggaagctggggttccttccagctccctggattgctgaactttggcgagtttaagcccagcccaccctctcctggtgctgcctggggaggcaaatcatgctcactccggcgggcacagctggctggggctgttccggggcatggaagattcccagtyacccactcactcagaaagccgggagtcatcggacaccttgctggtcagaggycctgggggtggttttgaaccatcagagcttggacttttctgacttccccagcaaggatcttcccacttcctgctccctgtgttcccaccctccagtgttggcacaggcccacccctggctccaccagagccagaagcagaggtagaatcaggcgggccccgggctgcactccgagcagtgttcctggccatctttgctactttcctagagaacccggctgttgccttaaatgtgtgagagggacttggccaaggcaaaagctggggagatgccagtgacaacatacagttcatgactaggtttaggaattgggcactgagaaaattctcaatatttcagagagtccttcccttatttgggactcytaacacggtatcctcgctagttkgttttaagggaaacactctgctcctgggtgtgagcagaggctctggtcttgccctgtggtttgactctccttagaaccaccgcccaccagaaacataaaggattaaaatcacactaataacccctggatggtcaatctgataataggatcagatttacgtctaccctaattcttaacattgcagctttctctccatctgcagattattcccagtctcccagtaacacgtttctacccagatcctttttcatttccttaagttttgatctccgtcttcctgatgaagcaggcagagctcagaggatcttggcatcacccaccaaagttagctgaaagcagggcactcctggataaagcagcttcactcaactctggggaatgctaccattttttttccaaagtagaaaggaagcacttctgagccagtgaccactgaaaggtatgtgctatgataaagcagatggcctatttgaggaagagggtgtctgcccttcacaaacacctctctctcccctgcactagctgtcccaagcttacatacagaggcccttcaggagggcctcctgtgccgcagggagggtgcgtggggaagatgcttcctgccagcacgtgcctgaaggtttcacatgaagcatgggaagcgcaccctgtcgttcagtgacgtcattcttctccaggctggcccgccccctctgactaggcacccaaagtgagcatctgggcattgggcattcatgcttatcttcccccaccttctacatggtatyagtcccagcaggcatccctggggcagacgtgctttggctcaagatggccttcatttacgtttagttttttttaaaaccgtggaggttgcccacgggcctcggcacctggccctggcagcacagctctcaggcccagccctgggcgacctccttggccaagtctgcctttcaccctggggtgagcatcagtcctggctctgctggtccagatcttgcgctcagcacactctagggaataattccactccagagatggggctgcttcaaggtcttttctagctgattgtggcccctccattttccccattttcttatctccctgaccaaaattgctttgacttctaaatgtttctgcttcccagaatgcacctgacttatgaaatggggataatactcccaggaaatagcgcaggacatcacaaggaccaaaaaggcaattcttatttaaatgttactatttggccagctgctgctgtgttttatggcagtgttcagagcttgatcacgttatttcttccttttattaagaaggaagccaattgtccaagtcaggagaatggtgtgatcacctgtcacagacactttgtcccctctccccgccccttcctggagctggcagagctaacgccctgcaggaggaccccggcctctcgagggctggatcagcagccgcctgccctgaggctgccccggtgaatgttattggaattcatccctcgtgcacatcctgttgtgtttaagtcaccagatattttgttcccatcagtttagcccagagatagacagtagaatgcaaatacctccctcccctaaactgactggacggctgccaaggaggccccaaacccaggccccatgcaaaggcacgtggtttccttttctcctctctctgcatctgcgctttccagataagcccaaagacagcaacttctccactcatgacaaatcaactgtgaccctcgctccttccatttctgtccattagaaaccagccttttcagcatctcacccattagcagccccatcacccagtgatcagtcgcctcagtaaagcagatctgtggatggggagcctacgggtggtaagaagtggtgttttgtgtttcatctccagcttggtgttccatggcccctaggcgaggtgatcagggagtggggccaatgggcccccggccctggctttgggaccttgtgctgagggatgatttgctcctgaccttgattaacttaacagttcccagctggaagggacactttcaggacccagtccactgtatggcatttgtgatgcagaattatgcactgacatgaccctgggtgacaggaaagcctttcgagaggcccaaggtggcctcgccagccctgcagtattgatgtgcagtattgcaccacagctctgcggaccttggccattgccrcagtcgcagcttccttttttctgtttgcactgtttgtttgtatgatgttagctaattccactgtgtatataaattgtattttttttaatttgtaaaatgctatttttatttgaacctttggaacttgggagttctcattgtaaccctaacatgtgagaataaaatgtcttctgtc

SEQ ID NO: 273 - DNA, 3902 bp, Homo sapiens
agtcacgtgaggcgcagatcctggctgggagggggttggtagaggggtccagagtggcagtaaaggaggaagatggcggggtgcagggggtctctgtgctgctgctgcaggtggtgctgctgctgcggtgagcgtgagacccgcacccccgaggagctgaccatccttggagaaacacaggaggaggaggatgagattcttccaaggaaagactatgagagtttggattatgatcgctgtatcaatgacccttacctggaagttttggagaccatggataataagaaaggtcgaagatatgaggcrgtgaagtggatggtggtgtttgccattggagtctgcactggcctggtgggtctctttgtggacttttttgtgcgactcttcacccaactcaagttcrgagtggtacagacatcggtggaggagtgcagccagaaaggctgcctcgctctgtctctccttgaactcctgggttttaacctcacctttgtcttcctggcaagcctccttgttctcattgagccggtggcagcaggttccgggatacccgaggtcaaatgctatctgaatggcgtaaaggtgccaggaatcgtccgtctccggaccctgctctgcaaggtccttggagtgctgttcagtgtggctggagggctcttcgtggrgaaggaaggccccatgatccacagtggttcggtggtgggagctggcctccctcagtttcagagcatctccttacggaagatccagtttaacttcccctatttccgaagcgacaggagcggctgctggagttgctgcagctttcggggcgccaatcgggggtaccttgttcagtctagaggagggttcgtccttctggaaccaagggctcacgtggaaagtgctcttttgttccatgtctgccaccttcaccctcaacttcttccgttctgggattcagtttggaagctggggttccttccagctccctggattgctgaactttggcgagtttaagcccagcccaccctctcctggtgctgcctggggaggcaaatcatgctcactccggcgggcacagctggctggggctgttccggggcatggaagattcccagtyacccactcactcagaaagccgggagtcatcggacaccttgctggtcagaggycctgggggtggttttgaaccatcagagcttggacttttctgacttccccagcaaggatcttcccacttcctgctccctgtgttcccaccctccagtgttggcacaggcccacccctggctccaccagagccagaagcagaggtagaatcaggcgggccccgggctgcactccgagcagtgttcctggccatctttgctactttcctagagaacccggctgttgccttaaatgtgtgagagggacttggccaaggcaaaagctggggagatgccagtgacaacatacagttcatgactaggtttaggaattgggcactgagaaaattctcaatatttcagagagtccttcccttatttgggactcytaacacggtatcctcgctagttkgttttaagggaaacactctgctcctgggtgtgagcagaggctctggtcttgccctgtggtttgactctccttagaaccaccgcccaccagaaacataaaggattaaaatcacactaataacccctggatggtcaatctgataataggatcagatttacgtctaccctaattcttaacattgcagctttctctccatctgcagattattcccagtctcccagtaacacgtttctacccagatcctttttcatttccttaagttttgatctccgtcttcctgatgaagcaggcagagctcagaggatcttggcatcacccaccaaagttagctgaaagcagggcactcctggataaagcagcttcactcaactctggggaatgctaccattttttttccaaagtagaaaggaagcacttctgagccagtgaccactgaaaggtatgtgctatgataaagcagatggcctatttgaggaagagggtgtctgcccttcacaaacacctctctctcccctgcactagctgtcccaagcttacatacagaggcccttcaggagggcctcctgtgccgcagggagggtgcgtggggaagatgcttcctgccagcacgtgcctgaaggtttcacatgaagcatgggaagcgcaccctgtcgttcagtgacgtcattcttctccaggctggcccgccccctctgactaggcacccaaagtgagcatctgggcattgggcattcatgcttatcttcccccaccttctacatggtatyagtcccagcaggcatccctggggcagacgtgctttggctcaagatggccttcatttacgtttagttttttttaaaaccgtggaggttgcccacgggcctcggcacctggccctggcagcacagctctcaggcccagccctgggcgacctccttggccaagtctgcctttcaccctggggtgagcatcagtcctggctctgctggtccagatcttgcgctcagcacactctagggaataattccactccagagatggggctgcttcaaggtcttttctagctgattgtggcccctccattttccccattttcttatctccctgaccaaaattgctttgacttctaaatgtttctgcttcccagaatgcacctgacttatgaaatggggataatactcccaggaaatagcgcaggacatcacaaggaccaaaaaggcaattcttatttaaatgttactatttggccagctgctgctgtgttttatggcagtgttcagagcttgatcacgttatttcttccttttattaagaaggaagccaattgtccaagtcaggagaatggtgtgatcacctgtcacagacactttgtcccctctccccgccccttcctggagctggcagagctaacgccctgcaggaggaccccggcctctcgagggctggatcagcagccgcctgccctgaggctgccccggtgaatgttattggaattcatccctcgtgcacatcctgttgtgtttaagtcaccagatattttgttcccatcagtttagcccagagatagacagtagaatgcaaatacctccctcccctaaactgactggacggctgccaaggaggccccaaacccaggccccatgcaaaggcacgtggtttccttttctcctctctctgcatctgcgctttccagataagcccaaagacagcaacttctccactcatgacaaatcaactgtgaccctcgctccttccatttctgtccattagaaaccagccttttcagcatctcacccattagcagccccatcacccagtgatcagtcgcctcagtaaagcagatctgtggatggggagcctacgggtggtaagaagtggtgttttgtgtttcatctccagcttggtgttccatggcccctaggcgaggtgatcagggagtggggccaatgggcccccggccctggctttgggaccttgtgctgagggatgatttgctcctgaccttgattaacttaacagttcccagctggaagggacactttcaggacccagtccactgtatggcatttgtgatgcagaattatgcactgacatgaccctgggtgacaggaaagcctttcgagaggcccaaggtggcctcgccagccctgcagtattgatgtgcagtattgcaccacagctctgcggaccttggccattgccrcagtcgcagcttccttttttctgtttgcactgtttgtttgtatgatgttagctaattccactgtgtatataaattgtattttttttaatttgtaaaatgctatttttatttgaacctttggaacttgggagttctcattgtaaccctaacatgtgagaataaaatgtcttctgtc

SEQ ID NO: 274 - DNA, 4343 bp, Homo sapiens
agtcacgtgaggcgcagatcctggctgggagggggttggtagaggggtccagagtggcagtaaaggaggaagatggcggggtgcagggggtctctgtgctgctgctgcaggtggtgctgctgctgcggtgagcgtgagacccgcacccccgaggagctgaccatccttggagaaacacaggaggaggaggatgagattcttccaaggaaagactatgagagtttggattatgatcgctgtatcaatgacccttacctggaagttttggagaccatggataataagaaaggtcgaagatatgaggcrgtgaagtggatggtggtgtttgccattggagtctgcactggcctggtgggtctctttgtggacttttttgtgcgactcttcacccaactcaagttcrgagtggtacagacattttccgcagcggtggaggagtgcagccagaaaggctgcctcgctctgtctctccttgaactcctgggttttaacctcacctttgtcttcctggcaagcctccttgttctcattgagccggtggcagcaggttccgggatacccgaggtcaaatgctatctgaatggcgtaaaggtgccaggaatcgtccgtctccggaccctgctctgcaaggtccttggagtgctgttcagtgtggctggagggctcttcgtggrgaaggaaggccccatgatccacagtggttcggtggtgggagctggcctccctcagtttcagagcatctccttacggaagatccagtttaacttcccctatttccgaagcgacagagacaagagagactttgtatcagcaggagcggctgctggagttgctgcagctttcggggcgccaatcgggggtaccttgttcagtctagaggagggttcgtccttctggaaccaagggctcacgtggaaagtgctcttttgttccatgtctgccaccttcaccctcaacttcttccgttctgggattcagtttggaagctggggttccttccagctccctggattgctgaactttggcgagtttaagtgctctgactctgataaaaaatgtcatctctggacagctatggatttgggtttcttcgtcgtgatgggggtcattgggggcctcctgggagccacattcaactgtctgaacaagaggcttgcaaagtaccgtatgcgaaacgtgcacccgaaacctaagctcgtcagagtcttagagagcctccttgtgtctctggtaaccaccgtggtggtgtttgtggcctcgatggtgttaggagaatgccgacagatgtcctcttcgagtcaaatcggtaatgactcattccagctccaggtcacagaagatgtgaattcaagtatcaagacatttttttgtcccaatgatacctacaatgacatggccacactcttcttcaacccgcaggagtctgccatcctccagctcttccaccaggatggtactttcagccccgtcactctggccttgttcttcgttctctatttcttgcttgcatgttggacttacggcatttctgttccaagtggcctttttgtgccttctctgctgtgtggagctgcttttggacgtttagttgccaatgtcctaaaaagctacattggattgggccacatctattcggggacctttgccctgattggtgcagcggctttcttgggcggggtggtccgcatgaccatcagcctcacggtcatcctgatcgagtccaccaatgagatcacctacgggctccccatcatggtcacactgatggtggccaaatggacaggggactttttcaataagggcatttatgatatccacgtgggcctgcgaggcgtgccgcttctggaatgggagacagaggtggaaatggacaagctgagagccagcgacatcatggagcccaacctgacctacgtctacccgcacacccgcatccagtctctggtgagcatcctgcgcaccacggtccaccatgccttcccggtggtcacrgagaaccgcggtaacgagaaggagttcatgaagggcaaccagctcatcagcaacaacatcaagttcaagaaatccagcatcctcacccgggctggygagcagcgcaaacggagccagtccatgaagtcctacccatccagcgagctacggaacatgtgtgatgagcacatcgcctctgaggagccagccgagaaggaggacctcctgcagcagatgctggaaaggagatacactccctaccccaacctataccctgaccagtccccaagtgaagactggaccatggaggagcggttccgccctctgaccttccacggcctgatccttcggtcgcagcttgtcaccctgcttgtccgaggagtttgttactctgaaagccagtcgagcgccagccagccgcgcctctcctatgccgagatggccgaggactacccgcggtaccccgacatccacgacctggacctgacgctgctcaacccgcgcatgatcgtggatgtcaccccatacatgaacccttcgcctttyaccgtctcgcccaacacccacgtctcccaagtcttcaacctgttcagaacgatgggcctgcgccacctgcccgtggtgaacgctgtgggagagatcgtggggatcatcacacggcacaacctcacctatgaatttctgcaggcccggctgaggcagcactaccagaccatctgacagcccagcccaccctctcctggtgctgcctggggaggcaaatcatgctcactccggcgggcacagctggctggggctgttccggggcatggaagattcccagtyacccactcactcagaaagccgggagtcatcggacaccttgctggtcagaggycctgggggtggttttgaaccatcagagcttggacttttctgacttccccagcaaggatcttcccacttcctgctccctgtgttcccaccctccagtgttggcacaggcccacccctggctccaccagagccagaagcagaggtagaatcaggcgggccccgggctgcactccgagcagtgttcctggccatctttgctactttcctagagaacccggctgttgccttaaatgtgtgagagggacttggccaaggcaaaagctggggagatgccagtgacaacatacagttcatgactaggtttaggaattgggcactgagaaaattctcaatatttcagagagtccttcccttatttgggactcytaacacggtatcctcgctagttkgttttaagggaaacactctgctcctgggtgtgagcagaggctctggtcttgccctgtggtttgactctccttagaaccaccgcccaccagaaacataaaggattaaaatcacactaataacccctggatggtcaatctgataataggatcagatttacgtctaccctaattcttaacattgcagctttctctccatctgcagattattcccagtctcccagtaacacgtttctacccagatcctttttcatttccttaagttttgatctccgtcttcctgatgaagcaggcagagctcagaggatcttggcatcacccaccaaagttagctgaaagcagggcactcctggataaagcagcttcactcaactctggggaatgctaccattttttttccaaagtagaaaggaagcacttctgagccagtgaccactgaaagatgaacactcttcctgatcctctcctctagaattcatctcctcctgctagcagccgcgtcctggaggagcagcggatggggaatccattctgtttcttcctggtgtttaggaagttgccccacamacagattgccccgatgtccaaccagaagaagtgaaactgctgctgggtctggagaggtgaagacccgtggccagcttctgttgttgccatcggccattgctttttgttcgcttgcttttggttttgcaagaagagcggcctctgtctctgatctgcttcaaatcatcattccatcagtgacagaagtggcygttccatcagtggtcgcagccagttcagctcctgcatccatccccaagtgttctgagtggaatttgaggcctccccaaccaccyaccaaaaaaggagggtgaaatgaaaggaagaagaaaaactcagcattctttcctctgacaaagagtaaaacgacaaggaatatcggcctgaattctcttcccaagaagaaagaaagcacaccaacgcaggcatttgtcttctgtccatggkgctgaagtttattcactttcaaaccactttcagtaacagcaaattctttagaaaaggaaaatacagggaaagggataaacctcactgacttggaggaaatcaagaggagtgagcaca

SEQ ID NO: 275 - DNA, 1400 bp, Homo sapiens
ggcagccctgtctgaggccagaggtctgcccacgtggcggatgaggcaggtgtgaggccagcttgagcatctggatccatttgtctcgggctgctggctgcctgccatttcctcctctccacccttatttggaggccctgacagctgagccacaaacaaaccaggggagctgggcmccagccaagcgtcaccctctgtttccccgcacgggtaccagcrtcgaggagaaagaatcctgaggcacggcggtgagataaccaaggaytcttttttactcttctcacacctttgaagtgggagcctcttgagtcaaatcagtaagaatgcggctcttgcagctgagggtctggggggctgttggggctgcccaaggcagagaggggctgtgacaagccctgcgggatgataactttaaaagggcatctcctgctggcttctcacttggcagctttatcactgcaagtgacagaatggggagggttctgtctctcctgcgtgcttggagagctggggggctataaaaagaggcggcactgggcagctgggagacagggacagacgtaggccaagagaggggaaccagagaggaaccagaggggagagacagagcagcaagcagtggattgctccttgacgacgccagcatgagctccttctccaccaccaccgtgagcttcctccttttactggcattccagctcctaggtcagaccagagctaatcccatgtacaatgccrtgtccaacgcagacctgatggatttcaagaatttgctggaccatttggaagaaaagatgcctttagaagatgaggtcgtgcccccacaagtgctcagtgagccgaatgaagaagcgggggctgctctcagccccytccctgaggtgcctccctggaccggggaagtcagcccagcccagagagatggaggtgccctcgggcggggcccctgggactcctctgatcgatctgccctcctaaaaagcaagctgagggcgctgctcactgcccctcggagcctgcrgagatccagctgcttcgggggcaggatggacaggattggagcccagagcggactgggctgtaacagcttccggtacygaagataacagccagggaggacaagcagggctgggcctagggacagactgcaagaggctcctgtcccctgggktctctgctgcattygtgtcaycttgttgccatggagttgtgatcatcccatytaagctgcagcttcctgtcaacacttctcacatcttatgctaactgtagataaagtggtttgatggtgacttcctcgcctctcccaccccatgcattaaattttaaggtagaacctcacctgttactgaaagtggtttgaaagtgaataaacttcagcmccatggacagaagacaaa

SEQ ID NO: 276 - DNA, 3329 bp, Homo sapiens
atttcaggacttcgctttcgggttcccttgtcctgtgttgtgtaatgcccccgttatggcactagaaatattttttattagccgaagctaaatatagtgggactttggctgatcccgagctcggaggacagccggggtgatccgtttccccccgaggatcgaggtggtgcgctctggacggggttgtgcattctcgccgcgcccgggcggacgatccagcgaacagccccgcttctaacccgagatgctgctgccggcgcccgcgctccgccgcgccctgctgtcccgcccctggaccggggccggcctgcggtggaagcacacctcctccctgaaggtggccaacgagcccgtcttagccttcacgcagggcagccctgagcgagatgccctgcaaaaggccttgaaggacctgaagggccggatggaagccatcccatgcgtggtgggggatgaggaggtgtggacgtcggacgtgcagtaccaagtgtcgccttttaaccatggacataaggtggccaagttctgttatgcagacaagagcctgctcaacaaagccattgaggctgccctggctgcccggaaagagtgggacctgaagcctattgcagaccgggcccagatcttcctgaaggcggcagacatgctgagtgggccgcgcagggctgagatcctcgccaagaccatggtgggacagggtaagaccgtgatccaagcggagattgacgctgcagcggaactcatcgacttcttccggttcaatgccaagtatgcggtggagctggaggggcagcagcccatcagcgtgcccccgagcaccaacagcacggtgtaccggggtctggagggcttcgtggcggccatctcgccctttaacttcactgcaatcggcggcaacctggcgggggcaccggccctgatgggcaacgtggtcctatggaagcccagtgacactgccatgctggccagctatgctgtctaccgcatycttcgggaggctggcctgccccccaacatcatccagtttgtgccagctgatgggcccctatttggggacactgtcaccagctcagagcacctctgtggcatcaacttcacaggcagtgtgcccaccttcaaacacctgtggaagcaggtggcccagaacctggaccggttccacaccttcccacgcctggctggagagtgcggcggaaagaacttccacttcgtgcaccgctcggccgacgtggagagcgtggtgagcgggaccctccgctcagccttcgagtacggtggccagaagtgttccgcstgctygcgtctctacgtgccgcactcgctgtggccrcagatcaaarggcggctgctggaggagcacagtcggatcaaagtgggcgaccctgcagaggattttgggaccttcttctctgcagtgattgatgccaagtcctttgcccgtatcaagaagtggctggagcacgcrcgctcctcrcccagcctcaccatcctggcygggggcaagtgtgatgactccgtgggctactttgtggagccctgcatcgtggagagcaaggaccctcaggagcccatcatgaaggaggagatcttcgggcctgtactgtctgtgtacgtctacccggaygacaagtacaaggagacgctgcagctgrttgacagcaccaccagctatggcctcacgggggcagtgttctcccaggataaggacgtcgtgcaggaggccacaaaggtgctgaggaatgctgccggcaacttctacatcaacgacaagtccactggctcgatagtgggycagcagccctttgggggggcccgagcctctggaaccaatgacaagccagggggcccacactacatcctgcgctggacgtcgccgcaggtcatcaaggagacacataagcccctgggggactggagctacgcgtacatgcagtgagcccctctcgggctccaccgtccagctgtctgtcygtccaggtggccgacctcactgcacagaccccactccagcccctccaccccttcttcatgcacagctgcctttctataatccrggcytgactcccttcttaccactgtattctggcctctcccatgcctcaggctctggtttgagatcgtgctggggaggaacatggccactaccccttatcccatcggccatgtgggaggtatgaccctggtgcctggcaggttctccctctgccctccactgggcccagtggctcagggacctggggaaaggagatggagcagctcttgggatcctttggggaaaaggaggccattctgggccccttggcaaacctcaccactcacagaggctcctggccttgatccctgcccctccaggtgtccagggtaaagtgtaactcagacygacctgtggggcacagggggcaccagctggccttgccctctctggtctgggctgtctrccttcctcactgtatctttgcccagacccacctgggccagtaggcccctgtccccagccacacaccttagatgctggcatgccttactccaggtgcctgtgtttggccgaggcctgtgtgattcccggtctgcaccacatggcggggttggggggccgctggaggccacctgccaaggcgtgggatgggatggtcctgcrggtttaggcygtgattctggaaaaccttggatgggccttcgtcctatgtcagccttccctytgatcctcaggccctacctgtagagacctccactcctagagccagtctcagggtctgggatttccctgcaggagctcagccaccactgtgccatggtgacacaggccaaggcagacattggccctcccttctcccagcccccagaggcctggccttgrgttygtcagcatgggccgaggacgttgcctgtagaatcctcctctgcctgggagtggctctgtgtggaccagtccctcactggcccattctttttttgacgcagccaatctgtgaccacgattcctcccacagatgcctcctgcttggattctgagtggtcagagatctgtaaagcatgactttcaaggatggttcttaggggactgtgaaartgttgggtcttcctccaggatgcctgcatgggaccccacccggagctggtgtggccattcccsragtgctggtgccasctgggctgggtgtgggttctgtgtccttccaggatmtgtgtcatttcccatgaggggccggggcaggtggctgggtgggggcacaggctggagtattyttagttctactggttctacactgtgaggtggcaatgggatttgctcagatgccacccaataaaatgcctgttacttaatcaca

SEQ ID NO: 277 - DNA, 3351 bp, Homo sapiens
atttcaggacttcgctttcgggttcccttgtcctgtgttgtgtaatgcccccgttatggcactagaaatattttttattagccgaagctaaatatagtgggactttggctgatcccgagctcggaggacagccggggtgatccgtttccccccgaggatcgaggtggtgcgctctggacggggttgtgcattctcgccgcgcccgggcggacgatccagcgaacagccccgcttctaacccgagatgctgctgccggcgcccgcgctccgccgcgccctgctgtcccgcccctggaccggggccggcctgcggtggaagcacacctcctccctgaaggtggccaacgagcccgtcttagccttcacgcagggcagccctgagcgagatgccctgcaaaaggccttgaaggacctgaagggccggatggaagccatcccatgcgtggtgggggatgaggaggtgtggacgtcggacgtgcagtaccaagtgtcgccttttaaccatggacataaggtggccaagttctgttatgcagacaagagcctgctcaacaaagccattgaggctgccctggctgcccggaaagagtgggacctgaagcctattgcagaccgggcccagatcttcctgaaggcggcagacatgctgagtgggccgcgcagggctgagatcctcgccaagaccatggtgggacagggtaagaccgtgatccaagcggagattgacgctgcagcggaactcatcgacttcttccggttcaatgccaagtatgcggtggagctggaggggcagcagcccatcagcgtgcccccgagcaccaacagcacggtgtaccggggtctggagggcttcgtggcggccatctcgccctttaacttcactgcaatcggcggcaacctggcgggggcaccggccctgatgggcaacgtggtcctatggaagcccagtgacactgccatgctggccagctatgctgtctaccgcatycttcgggaggctggcctgccccccaacatcatccagtttgtgccagctgatgggcccctatttggggacactgtcaccagctcagagcacctctgtggcatcaacttcacaggcagtgtgcccaccttcaaacacctgtggaagcaggtggcccagaacctggaccggttccacaccttcccacgcctggctggagagtgcggcggaaagaacttccacttcgtgcaccgctcggccgacgtggagagcgtggtgagcgggaccctccgctcagccttcgagtacggtggccagaagtgttccgcstgctygcgtctctacgtgccgcactcgctgtggccrcagatcaaarggcggctgctggaggagcacagtcggatcaaagtgggcgaccctgcagaggattttgggaccttcttctctgcagtgattgatgccaagtcctttgcccgtatcaagaagtggctggagcacgcrcgctcctcrcccagcctcaccatcctggcygggggcaagtgtgatgactccgtgggctactttgtggagccctgcatcgtggagagcaaggaccctcaggagcccatcatgaaggaggagatcttcgggcctgtactgtctgtgtacgtctacccggaygacaagtacaaggagacgctgcagctgrttgacagcaccaccagctatggcctcacgggggcagtgttctcccaggataaggacgtcgtgcaggaggccacaaaggtgctgaggaatgctgccggcaacttctacatcaacgacaagtccactggctcgatagtgggycagcagccctttgggggggcccgagcctctggaaccaatgacaagccagggggcccacactacatcctgcgctggacgtcgccgcaggtcatcaaggagacacataagcccctgggggactggagctacgcgtacatgcagtgagcccctctcgggctccaccgtccagctgtctgtcygtccaggtggccgacctcactgcacagaccccactccagcccctccaccccttcttcatgcacagctgcctttctataatccrggcytgactcccttcttaccactgtattctggcctctcccatgcctcaggctctggtttgagatcgtgctggggaggaacatggccactaccccttatcccatcggccatgtgggaggtatgaccctggtgcctggcaggttctccctctgccctccactgggcccagtggctcagggacctggggaaaggagatggagcagctcttgggatcctttggggaaaaggaggccattctgggccccttggcaaacctcaccactcacagaggctcctggccttgatccctgcccctccaggtgtccagggtaaagtgtaactcagacygacctgtggggcacagggggcaccagctggccttgccctctctggtctgggctgtctrccttcctcactgtatctttgcccagacccacctgggccagtaggcccctgtccccagccacacaccttagatgctggcatgccttactccaggtgcctgtgtttggccgaggcctgtgtgattcccggtctgcaccacatggcggggttggggggccgctggaggccacctgccaaggcgtgggatgggatggtcctgcrggtttaggcygtgattctggaaaaccttggatgggccttcgtcctatgtcagccttccctytgatcctcaggccctacctgtagagacctccactcctagagccagtctcagggtctgggatttccctgcaggagctcagccaccactgtgccatggtgacacaggccaaggcagacattggccctcccttctcccagcccccagaggcctggccttgrgttygtcagcatgggccgaggacgttgcctgtagaatcctcctctgcctgggagtggctctgtgtggaccagtccctcactggcccattctttttttgacgcagccaatctgtgaccacgattcctcccacagatgcctcctgcttggattctgagtggtcagagatctgtaaagcatgactttcaaggatggttcttaggggactgtgaaartgttgggtcttcctccaggatgcctgcatgggaccccacccggagctggtgtggccattcccsragtgccactggcccatggatgggggtgggtgctggtgccasctgggctgggtgtgggttctgtgtccttccaggatmtgtgtcatttcccatgaggggccggggcaggtggctgggtgggggcacaggctggagtattyttagttctactggttctacactgtgaggtggcaatgggatttgctcagatgccacccaataaaatgcctgttacttaa

SEQ ID NO: 278 - DNA, 2336 bp, Homo sapiens
atttcaggacttcgctttcgggttcccttgtcctgtgttgtgtaatgcccccgttatggcactagaaatattttttattagccgaagctaaatatagtgggactttggctgatcccgagctcggaggacagccggggtgatccgtttccccccgaggatcgaggtggtgcgctctggacggggttgtgcattctcgccgcgcccgggcggacgatccagcgaacagccccgcttctaacccgagatgctgctgccggcgcccgcgctccgccgcgccctgctgtcccgcccctggaccggggccggcctgcggtggaagcacacctcctccctgaaggtggccaacgagcccgtcttagccttcacgcagggcagccctgagcgagatgccctgcaaaaggccttgaaggacctgaagggccggatggaagccatcccatgcgtggtgggggatgaggaggtgtggacgtcggacgtgcagtaccaagtgtcgccttttaaccatggacataaggtggccaagttctgttatgcagacaagagcctgctcaacaaagccattgaggctgccctggctgcccggaaagagtgggacctgaagcctattgcagaccgggcccagatcttcctgaaggcggcagacatgctgagtgggccgcgcagggctgagatcctcgccaagaccatggtgggacagggtaagaccgtgatccaagcggagattgacgctgcagcggaactcatcgacttcttccggttcaatgccaagtatgcggtggagctggaggggcagcagcccatcagcgtgcccccgagcaccaacagcacggtgtaccggggtctggagggcttcgtggcggccatctcgccctttaacttcactgcaatcggcggcaacctggcgggggcaccggccctgatgggcaacgtggtcctatggaagcccagtgacactgccatgctggccagctatgctgtctaccgcatycttcgggaggctggcctgccccccaacatcatccagtttgtgccagctgatgggcccctatttggggacactgtcaccagctcagagcacctctgtggcatcaacttcacaggcagtgtgcccaccttcaaacacctgtggaagcaggtggcccagaacctggaccggttccacaccttcccacgcctggctggagagtgcggcggaaagaacttccacttcgtgcaccgctcggccgacgtggagagcgtggtgagcgggaccctccgctcagccttcgagtacggtggccagaagtgttccgcstgctygcgtctctacgtgccgcactcgctgtggccrcagatcaaarggcggctgctggaggagcacagtcggatcaaagtgggcgaccctgcagaggattttgggaccttcttctctgcagtgattgatgccaagtcctttgcccgtatcaagaagtggctggagcacgcrcgctcctcrcccagcctcaccatcctggcygggggcaagtgtgatgactccgtgggctactttgtggagccctgcatcgtggagagcaaggaccctcaggagcccatcatgaaggaggagatcttcgggcctgtactgtctgtgtacgtctacccggaygacaagtacaaggagacgctgcagctgrttgacagcaccaccagctatggcctcacgggggcagtgttctcccaggataaggacgtcgtgcaggaggccacaaaggtgctgaggaatgctgccggcaacttctacatcaacgacaagtccactggctcgatagtgggycagcagccctttgggggggcccgagcctctggaaccaatgacaagccagggggcccacactacatcctgcgctggacgtcgccgcaggtcatcaaggagacacataagcccctgggggactggagctacgcgtacatgcagtgagcccctctcgggctccaccgtccagctgtctgtcygtccagatgcctcctgcttggattctgagtggtcagagatctgtaaagcatgactttcaaggatggttcttaggggactgtgaaartgttgggtcttcctccaggatgcctgcatgggaccccacccggagctggtgtggccattcccsragtgccactggcccatggatgggggtgggtgctggtgccasctgggctgggtgtgggttctgtgtccttccaggatmtgtgtcatttcccatgaggggccggggcaggtggctgggtgggggcacaggctggagtattyttagttctactggttctacactgtgaggtggcaatgggatttgctcagatgccacccaataaaatgcctgttactt

SEQ ID NO: 279 - DNA, 3394 bp, Homo sapiens
aggcagcagaggaagccgaggggcggccatcttggctccgtgaggctytgaggtgcyggggtgcggcggcggcagcggcggccagcagggcggaggctgaggcagcaagctcgctagagagggagaagcagtcgggcgcaggcgcctcctccgcagcccgctccatggtcggcgcccacagcccgcggcggcctgtcttgcgctccacttccttcacatcctcctccgcctcctcgttttcaggcgccgccggcggcgctgtgtggaggcccgcgagctgaaattcgcggtgcgacgggagggagtggagaaggaggtgagggggcccaggatcgcggggcgccctgaggcaaggggacgccggcgggccgaagcgcagcccgccgcccgcaggctcggctccgccactgccgccctcccggtctcctcgcctcggccgccgagggagggagagaatgagccccgggacccgccgggggacggcccgggccaggcccgggatctagacggccgtagggggaagggagccgccctccccacggcgccttttcggaactgccgtggactcgaggacgctggtcgccggcctcctagggctgtgctgttttgttttgaccctcgcattgtgcagaattaaagtgcagtaaaatgtccactaggaccccattgccaacggtgaatgaacgagacactgaaaaccacacgtcacatggagatgggcgtcaagaagttacctctcgtaccagccgctcaggagctcggtgtagaaactctatagcctcctgtgcagatgaacaacctcacatcggaaactacagactgttgaaaacaatcggcaaggggaattttgcaaaagtaaaattggcaagacatatccttacaggcagagaggttgcaataaaaataattgacaaaactcagttgaatccaacaagtctacaaaagctcttcagagaagtaagaataatgaagattttaaatcatcccaatatagtgaagttattcgargtcattgaaactgaaaaaacactctacctaatcatggaatatgcaagtggaggtgaagtatttgactatttggttgcacatggcaggatgaaggaaaaagaagcaagatctaaatttagacagattgtgtctgcagttcaatactgccatcagaaacggatcgtacatcgagacctcaaggctgaaaatctattgttagatgccgatatgaacattaaaatagcagatttcggttttagcaatgaatttactgttggcggtaaactcgacacgttttgtggcagtcctccatacgcagcacctgagctcttccagggcaagaaatatgacgggccagaagtggatgtgtggagtctgggggtcattttatacacactagtcagtggctcacttccctttgatgggcaaaacctaaaggaactgagagagagagtattaagagggaaatacagaattcccttctacatgtctacagactgtgaaaaccttctcaaacgtttcctggtgctaaatccaattaaacgcggcactctagagcaaatcatgaaggacaggtggatcaatgcagggcatgaagaagatgaactcaaaccatttgttgaaccagagctagacatctcagaccaaaaaagaatagatattatggtgggaatgggatattcacaagaagaaattcaagaatctcttagtaagatgaaatacgatgaaatcacagctacatatttgttattggggagaaaatcttcagaggttaggccgagcagtgatctcaacaacagtactggccagtctcctcaccacaaagtgcagagaagtgtttcttcaagccaaaagcaaagacgctacagtgaccatgctggaccagctattccttctgttgtggcgtatccgaaaaggagtcagacmagcactgcagatrgtgacctcaaagaagatggaatttcctcccggaaatcaastggcagtgctgttggaggaaagggaattgctccagccagtcccatgcttgggaatgcaagtaatcctaataaggcggatattcctgaacgcaagaaaagctccactgtccctagtagtaacacagcatctggtggaatgacacgacgaaatacttatgtttgcagtgagagaactacagmtgatagacactcagtgattcagaatggcaaagaaaacagcactattcctgatcagagaactccagttgcttcaacacacagtatcagtagtgcagccaccccagatcgaatccgcttcccaagagkcactgccagtcgtagcactttccacggccagccccgggaacggcgaaccgcaacatataatggccctcctgcctctcccagcctgtcccatgaagccacaccattgtcccagactcgaagccgaggctccactaatctctttagtaaattaacttcaaaactcacaaggagtcgcaatgtatctgctgagcaaaaagatgaaaacaaagaagcaaagcctcgatccctacgcttcacctggagcatgaaaaccactagttcaatggatcccggggacatgatgcgggaaatccgcaaagtgttggacgccaataactgcgactatgagcagagggagcgcttcttgctcttctgcgtccacggagatgggcacgcggagaacctcgtgcagtgggaaatggaagtgtgcaagctgccaagactgtctctgaacggggtccggtttaagcggatatcggggacatccatagccttcaaaaatattgcttccaaaattgccaatgagctaaagctgtaacccagtgattatgatgtaaattaagtagcaaktaaagtgttttcctgaacactgatggaaatgtatagaataatatttaggcaataacgtctgcatcttctaaatcatgaaattaaagtctgaggacragagcacgcctgggagcgaaagctggccttttttctacgaatgcactacattaaagatgtgcaacctatgcgccccctgccctacttccgttaccctgagagtcggygtgtggccccatctccatgtgcctcccgtctgggtgggtgtgagagtggacggtatgtgtgtgaagtggtgtatatggaagcatctccctacactggcagccagtcattrctagtacctctgcgggagatcatccggtgctaaaacattacagttgccaaggaggaaaatactgaatgactgctaagaattaaccttaagaccagttcatagttaatacaggtttacagttcatgcctgtggttttgtgtttgttgttttgtgtttttttagtgcaaaaggtttaaatttatagttgtgaacattgcttgtgtgtgtttttctaagtagattcacaagataattaaaaattcactttttctcagtaaaa

SEQ ID NO: 280 - DNA, 3514 bp, Homo sapiens
aggcagcagaggaagccgaggggcggccatcttggctccgtgaggctytgaggtgcyggggtgcggcggcggcagcggcggccagcagggcggaggctgaggcagcaagctcgctagagagggagaagcagtcgggcgcaggcgcctcctccgcagcccgctccatggtcggcgcccacagcccgcggcggcctgtcttgcgctccacttccttcacatcctcctccgcctcctcgttttcaggcgccgccggcggcgctgtgtggaggcccgcgagctgaaattcgcggtgcgacgggagggagtggagaaggaggtgagggggcccaggatcgcggggcgccctgaggcaaggggacgccggcgggccgaagcgcagcccgccgcccgcaggctcggctccgccactgccgccctcccggtctcctcgcctcggccgccgagggagggagagaatgagccccgggacccgccgggggacggcccgggccaggcccgggatctagacggccgtagggggaagggagccgccctccccacggcgccttttcggaactgccgtggactcgaggacgctggtcgccggcctcctagggctgtgctgttttgttttgaccctcgcattgtgcagaattaaagtgcagtaaaatgtccactaggaccccattgccaacggtgaatgaacgagacactgaaaaccacacgtcacatggagatgggcgtcaagaagttacctctcgtaccagccgctcaggagctcggtgtagaaactctatagcctcctgtgcagatgaacaacctcacatcggaaactacagactgttgaaaacaatcggcaaggggaattttgcaaaagtaaaattggcaagacatatccttacaggcagagaggttgcaataaaaataattgacaaaactcagttgaatccaacaagtctacaaaagctcttcagagaagtaagaataatgaagattttaaatcatcccaatatagtgaagttattcgargtcattgaaactgaaaaaacactctacctaatcatggaatatgcaagtggaggtgaagtatttgactatttggttgcacatggcaggatgaaggaaaaagaagcaagatctaaatttagacagattgtgtctgcagttcaatactgccatcagaaacggatcgtacatcgagacctcaaggctgaaaatctattgttagatgccgatatgaacattaaaatagcagatttcggttttagcaatgaatttactgttggcggtaaactcgacacgttttgtggcagtcctccatacgcagcacctgagctcttccagggcaagaaatatgacgggccagaagtggatgtgtggagtctgggggtcattttatacacactagtcagtggctcacttccctttgatgggcaaaacctaaaggaactgagagagagagtattaagagggaaatacagaattcccttctacatgtctacagactgtgaaaaccttctcaaacgtttcctggtgctaaatccaattaaacgcggcactctagagcaaatcatgaaggacaggtggatcaatgcagggcatgaagaagatgaactcaaaccatttgttgaaccagagctagacatctcagaccaaaaaagaatagatattatggtgggaatgggatattcacaagaagaaattcaagaatctcttagtaagatgaaatacgatgaaatcacagctacatatttgttattggggagaaaatcttcagagctggatgctagtgattccagttctagcagcaatctttcacttgctaaggttaggccgagcagtgatctcaacaacagtactggccagtctcctcaccacaaagtgcagagaagtgtttcttcaagccaaaagcaaagacgctacagtgaccatgctggaccagctattccttctgttgtggcgtatccgaaaaggagtcagacmagcactgcagatrgtgacctcaaagaagatggaatttcctcccggaaatcaastggcagtgctgttggaggaaagggaattgctccagccagtcccatgcttgggaatgcaagtaatcctaataaggcggatattcctgaacgcaagaaaagctccactgtccctagtagtaacacagcatctggtggaatgacacgacgaaatacttatgtttgcagtgagagaactacagmtgatagacactcagtgattcagaatggcaaagaaaacagcactattcctgatcagagaactccagttgcttcaacacacagtatcagtagtgcagccaccccagatcgaatccgcttcccaagagkcactgccagtcgtagcactttccacggccagccccgggaacggcgaaccgcaacatataatggccctcctgcctctcccagcctgtcccatgaagccacaccattgtcccagactcgaagccgaggctccactaatctctttagtaaattaacttcaaaactcacaaggagaaacatgtcattcaggtttatcaaaaggcttccaactgaatatgagaggaacgggagatatgagggctcaagtcgcaatgtatctgctgagcaaaaagatgaaaacaaagaagcaaagcctcgatccctacgcttcacctggagcatgaaaaccactagttcaatggatcccggggacatgatgcgggaaatccgcaaagtgttggacgccaataactgcgactatgagcagagggagcgcttcttgctcttctgcgtccacggagatgggcacgcggagaacctcgtgcagtgggaaatggaagtgtgcaagctgccaagactgtctctgaacggggtccggtttaagcggatatcggggacatccatagccttcaaaaatattgcttccaaaattgccaatgagctaaagctgtaacccagtgattatgatgtaaattaagtagcaaktaaagtgttttcctgaacactgatggaaatgtatagaataatatttaggcaataacgtctgcatcttctaaatcatgaaattaaagtctgaggacragagcacgcctgggagcgaaagctggccttttttctacgaatgcactacattaaagatgtgcaacctatgcgccccctgccctacttccgttaccctgagagtcggygtgtggccccatctccatgtgcctcccgtctgggtgggtgtgagagtggacggtatgtgtgtgaagtggtgtatatggaagcatctccctacactggcagccagtcattrctagtacctctgcgggagatcatccggtgctaaaacattacagttgccaaggaggaaaatactgaatgactgctaagaattaaccttaagaccagttcatagttaatacaggtttacagttcatgcctgtggttttgtgtttgttgttttgtgtttttttagtgcaaaaggtttaaatttatagttgtgaacattgcttgtgtgtgtttttctaagtagattcacaagataattaaaaattcactttttctcagtaaaa

SEQ ID NO: 281 - DNA, 3511 bp, Homo sapiens
aggcagcagaggaagccgaggggcggccatcttggctccgtgaggctytgaggtgcyggggtgcggcggcggcagcggcggccagcagggcggaggctgaggcagcaagctcgctagagagggagaagcagtcgggcgcaggcgcctcctccgcagcccgctccatggtcggcgcccacagcccgcggcggcctgtcttgcgctccacttccttcacatcctcctccgcctcctcgttttcaggcgccgccggcggcgctgtgtggaggcccgcgagctgaaattcgcggtgcgacgggagggagtggagaaggaggtgagggggcccaggatcgcggggcgccctgaggcaaggggacgccggcgggccgaagcgcagcccgccgcccgcaggctcggctccgccactgccgccctcccggtctcctcgcctcggccgccgagggagggagagaatgagccccgggacccgccgggggacggcccgggccaggcccgggatctagacggccgtagggggaagggagccgccctccccacggcgccttttcggaactgccgtggactcgaggacgctggtcgccggcctcctagggctgtgctgttttgttttgaccctcgcattgtgcagaattaaagtgcagtaaaatgtccactaggaccccattgccaacggtgaatgaacgagacactgaaaaccacacgtcacatggagatgggcgtcaagaagttacctctcgtaccagccgctcaggagctcggtgtagaaactctatagcctcctgtgcagatgaacaacctcacatcggaaactacagactgttgaaaacaatcggcaaggggaattttgcaaaagtaaaattggcaagacatatccttacaggcagagaggttgcaataaaaataattgacaaaactcagttgaatccaacaagtctacaaaagctcttcagagaagtaagaataatgaagattttaaatcatcccaatatagtgaagttattcgargtcattgaaactgaaaaaacactctacctaatcatggaatatgcaagtggaggtgaagtatttgactatttggttgcacatggcaggatgaaggaaaaagaagcaagatctaaatttagacagggttgtcaagctggacagactattaaagttcaagtctcctttgatttgcttagtctgatgtttacatttattgtgtctgcagttcaatactgccatcagaaacggatcgtacatcgagacctcaaggctgaaaatctattgttagatgccgatatgaacattaaaatagcagatttcggttttagcaatgaatttactgttggcggtaaactcgacacgttttgtggcagtcctccatacgcagcacctgagctcttccagggcaagaaatatgacgggccagaagtggatgtgtggagtctgggggtcattttatacacactagtcagtggctcacttccctttgatgggcaaaacctaaaggaactgagagagagagtattaagagggaaatacagaattcccttctacatgtctacagactgtgaaaaccttctcaaacgtttcctggtgctaaatccaattaaacgcggcactctagagcaaatcatgaaggacaggtggatcaatgcagggcatgaagaagatgaactcaaaccatttgttgaaccagagctagacatctcagaccaaaaaagaatagatattatggtgggaatgggatattcacaagaagaaattcaagaatctcttagtaagatgaaatacgatgaaatcacagctacatatttgttattggggagaaaatcttcagagctggatgctagtgattccagttctagcagcaatctttcacttgctaaggttaggccgagcagtgatctcaacaacagtactggccagtctcctcaccacaaagtgcagagaagtgtttcttcaagccaaaagcaaagacgctacagtgaccatgctggaccagctattccttctgttgtggcgtatccgaaaaggagtcagacmagcactgcagatrgtgacctcaaagaagatggaatttcctcccggaaatcaastggcagtgctgttggaggaaagggaattgctccagccagtcccatgcttgggaatgcaagtaatcctaataaggcggatattcctgaacgcaagaaaagctccactgtccctagtagtaacacagcatctggtggaatgacacgacgaaatacttatgtttgcagtgagagaactacagmtgatagacactcagtgattcagaatggcaaagaaaacagcactattcctgatcagagaactccagttgcttcaacacacagtatcagtagtgcagccaccccagatcgaatccgcttcccaagagkcactgccagtcgtagcactttccacggccagccccgggaacggcgaaccgcaacatataatggccctcctgcctctcccagcctgtcccatgaagccacaccattgtcccagactcgaagccgaggctccactaatctctttagtaaattaacttcaaaactcacaaggagtcgcaatgtatctgctgagcaaaaagatgaaaacaaagaagcaaagcctcgatccctacgcttcacctggagcatgaaaaccactagttcaatggatcccggggacatgatgcgggaaatccgcaaagtgttggacgccaataactgcgactatgagcagagggagcgcttcttgctcttctgcgtccacggagatgggcacgcggagaacctcgtgcagtgggaaatggaagtgtgcaagctgccaagactgtctctgaacggggtccggtttaagcggatatcggggacatccatagccttcaaaaatattgcttccaaaattgccaatgagctaaagctgtaacccagtgattatgatgtaaattaagtagcaaktaaagtgttttcctgaacactgatggaaatgtatagaataatatttaggcaataacgtctgcatcttctaaatcatgaaattaaagtctgaggacragagcacgcctgggagcgaaagctggccttttttctacgaatgcactacattaaagatgtgcaacctatgcgccccctgccctacttccgttaccctgagagtcggygtgtggccccatctccatgtgcctcccgtctgggtgggtgtgagagtggacggtatgtgtgtgaagtggtgtatatggaagcatctccctacactggcagccagtcattrctagtacctctgcgggagatcatccggtgctaaaacattacagttgccaaggaggaaaatactgaatgactgctaagaattaaccttaagaccagttcatagttaatacaggtttacagttcatgcctgtggttttgtgtttgttgttttgtgtttttttagtgcaaaaggtttaaatttatagttgtgaacattgcttgtgtgtgtttttctaagtagattcacaagataattaaaaattcactttttctcagtaaaa

SEQ ID NO: 282 - DNA, 3487 bp, Homo sapiens
aggcagcagaggaagccgaggggcggccatcttggctccgtgaggctytgaggtgcyggggtgcggcggcggcagcggcggccagcagggcggaggctgaggcagcaagctcgctagagagggagaagcagtcgggcgcaggcgcctcctccgcagcccgctccatggtcggcgcccacagcccgcggcggcctgtcttgcgctccacttccttcacatcctcctccgcctcctcgttttcaggcgccgccggcggcgctgtgtggaggcccgcgagctgaaattcgcggtgcgacgggagggagtggagaaggaggtgagggggcccaggatcgcggggcgccctgaggcaaggggacgccggcgggccgaagcgcagcccgccgcccgcaggctcggctccgccactgccgccctcccggtctcctcgcctcggccgccgagggagggagagaatgagccccgggacccgccgggggacggcccgggccaggcccgggatctagacggccgtagggggaagggagccgccctccccacggcgccttttcggaactgccgtggactcgaggacgctggtcgccggcctcctagggctgtgctgttttgttttgaccctcgcattgtgcagaattaaagtgcagtaaaatgtccactaggaccccattgccaacggtgaatgaacgagacactgaaaaccacacgtcacatggagatgggcgtcaagaagttacctctcgtaccagccgctcaggagctcggtgtagaaactctatagcctcctgtgcagatgaacaacctcacatcggaaactacagactgttgaaaacaatcggcaaggggaattttgcaaaagtaaaattggcaagacatatccttacaggcagagaggttgcaataaaaataattgacaaaactcagttgaatccaacaagtctacaaaagctcttcagagaagtaagaataatgaagattttaaatcatcccaatatagtgaagttattcgargtcattgaaactgaaaaaacactctacctaatcatggaatatgcaagtggaggtgaagtatttgactatttggttgcacatggcaggatgaaggaaaaagaagcaagatctaaatttagacagattgtgtctgcagttcaatactgccatcagaaacggatcgtacatcgagacctcaaggctgaaaatctattgttagatgccgatatgaacattaaaatagcagatttcggttttagcaatgaatttactgttggcggtaaactcgacacgttttgtggcagtcctccatacgcagcacctgagctcttccagggcaagaaatatgacgggccagaagtggatgtgtggagtctgggggtcattttatacacactagtcagtggctcacttccctttgatgggcaaaacctaaaggaactgagagagagagtattaagagggaaatacagaattcccttctacatgtctacagactgtgaaaaccttctcaaacgtttcctggtgctaaatccaattaaacgcggcactctagagcaaatcatgaaggacaggtggatcaatgcagggcatgaagaagatgaactcaaaccatttgttgaaccagagctagacatctcagaccaaaaaagaatagatattatggtgggaatgggatattcacaagaagaaattcaagaatctcttagtaagatgaaatacgatgaaatcacagctacatatttgttattggggagaaaatcttcagagctggatgctagtgattccagttctagcagcaatctttcacttgctaaggttaggccgagcagtgatctcaacaacagtactggccagtctcctcaccacaaagtgcagagaagtgtttcttcaagccaaaagcaaagacgctacagtgaccatgctggaccagctattccttctgttgtggcgtatccgaaaaggagtcagacmagcactgcagatrgtgacctcaaagaagatggaatttcctcccggaaatcaastggcagtgctgttggaggaaagggaattgctccagccagtcccatgcttgggaatgcaagtaatcctaataaggcggatattcctgaacgcaagaaaagctccactgtccctagtagtaacacagcatctggtggaatgacacgacgaaatacttatgtttgcagtgagagaactacagmtgatagacactcagtgattcagaatggcaaagaaaacagcactattcctgatcagagaactccagttgcttcaacacacagtatcagtagtgcagccaccccagatcgaatccgcttcccaagagkcactgccagtcgtagcactttccacggccagccccgggaacggcgaaccgcaacatataatggccctcctgcctctcccagcctgtcccatgaagccacaccattgtcccagactcgaagccgaggctccactaatctctttagtaaattaacttcaaaactcacaaggaggcttccaactgaatatgagaggaacgggagatatgagggctcaagtcgcaatgtatctgctgagcaaaaagatgaaaacaaagaagcaaagcctcgatccctacgcttcacctggagcatgaaaaccactagttcaatggatcccggggacatgatgcgggaaatccgcaaagtgttggacgccaataactgcgactatgagcagagggagcgcttcttgctcttctgcgtccacggagatgggcacgcggagaacctcgtgcagtgggaaatggaagtgtgcaagctgccaagactgtctctgaacggggtccggtttaagcggatatcggggacatccatagccttcaaaaatattgcttccaaaattgccaatgagctaaagctgtaacccagtgattatgatgtaaattaagtagcaaktaaagtgttttcctgaacactgatggaaatgtatagaataatatttaggcaataacgtctgcatcttctaaatcatgaaattaaagtctgaggacragagcacgcctgggagcgaaagctggccttttttctacgaatgcactacattaaagatgtgcaacctatgcgccccctgccctacttccgttaccctgagagtcggygtgtggccccatctccatgtgcctcccgtctgggtgggtgtgagagtggacggtatgtgtgtgaagtggtgtatatggaagcatctccctacactggcagccagtcattrctagtacctctgcgggagatcatccggtgctaaaacattacagttgccaaggaggaaaatactgaatgactgctaagaattaaccttaagaccagttcatagttaatacaggtttacagttcatgcctgtggttttgtgtttgttgttttgtgtttttttagtgcaaaaggtttaaatttatagttgtgaacattgcttgtgtgtgtttttctaagtagattcacaagataattaaaaattcactttttctcagtaaaa

SEQ ID NO: 283 - DNA, 3466 bp, Homo sapiens
aggcagcagaggaagccgaggggcggccatcttggctccgtgaggctytgaggtgcyggggtgcggcggcggcagcggcggccagcagggcggaggctgaggcagcaagctcgctagagagggagaagcagtcgggcgcaggcgcctcctccgcagcccgctccatggtcggcgcccacagcccgcggcggcctgtcttgcgctccacttccttcacatcctcctccgcctcctcgttttcaggcgccgccggcggcgctgtgtggaggcccgcgagctgaaattcgcggtgcgacgggagggagtggagaaggaggtgagggggcccaggatcgcggggcgccctgaggcaaggggacgccggcgggccgaagcgcagcccgccgcccgcaggctcggctccgccactgccgccctcccggtctcctcgcctcggccgccgagggagggagagaatgagccccgggacccgccgggggacggcccgggccaggcccgggatctagacggccgtagggggaagggagccgccctccccacggcgccttttcggaactgccgtggactcgaggacgctggtcgccggcctcctagggctgtgctgttttgttttgaccctcgcattgtgcagaattaaagtgcagtaaaatgtccactaggaccccattgccaacggtgaatgaacgagacactgaaaaccacacgtcacatggagatgggcgtcaagaagttacctctcgtaccagccgctcaggagctcggtgtagaaactctatagcctcctgtgcagatgaacaacctcacatcggaaactacagactgttgaaaacaatcggcaaggggaattttgcaaaagtaaaattggcaagacatatccttacaggcagagaggttgcaataaaaataattgacaaaactcagttgaatccaacaagtctacaaaagctcttcagagaagtaagaataatgaagattttaaatcatcccaatatagtgaagttattcgargtcattgaaactgaaaaaacactctacctaatcatggaatatgcaagtggaggtgaagtatttgactatttggttgcacatggcaggatgaaggaaaaagaagcaagatctaaatttagacagattgtgtctgcagttcaatactgccatcagaaacggatcgtacatcgagacctcaaggctgaaaatctattgttagatgccgatatgaacattaaaatagcagatttcggttttagcaatgaatttactgttggcggtaaactcgacacgttttgtggcagtcctccatacgcagcacctgagctcttccagggcaagaaatatgacgggccagaagtggatgtgtggagtctgggggtcattttatacacactagtcagtggctcacttccctttgatgggcaaaacctaaaggaactgagagagagagtattaagagggaaatacagaattcccttctacatgtctacagactgtgaaaaccttctcaaacgtttcctggtgctaaatccaattaaacgcggcactctagagcaaatcatgaaggacaggtggatcaatgcagggcatgaagaagatgaactcaaaccatttgttgaaccagagctagacatctcagaccaaaaaagaatagatattatggtgggaatgggatattcacaagaagaaattcaagaatctcttagtaagatgaaatacgatgaaatcacagctacatatttgttattggggagaaaatcttcagaggttaggccgagcagtgatctcaacaacagtactggccagtctcctcaccacaaagtgcagagaagtgtttcttcaagccaaaagcaaagacgctacagtgaccatgctggaccagctattccttctgttgtggcgtatccgaaaaggagtcagacmagcactgcagatrgtgacctcaaagaagatggaatttcctcccggaaatcaastggcagtgctgttggaggaaagggaattgctccagccagtcccatgcttgggaatgcaagtaatcctaataaggcggatattcctgaacgcaagaaaagctccactgtccctagtagtaacacagcatctggtggaatgacacgacgaaatacttatgtttgcagtgagagaactacagmtgatagacactcagtgattcagaatggcaaagaaaacagcactattcctgatcagagaactccagttgcttcaacacacagtatcagtagtgcagccaccccagatcgaatccgcttcccaagagkcactgccagtcgtagcactttccacggccagccccgggaacggcgaaccgcaacatataatggccctcctgcctctcccagcctgtcccatgaagccacaccattgtcccagactcgaagccgaggctccactaatctctttagtaaattaacttcaaaactcacaaggagaaacatgtcattcaggtttatcaaaaggcttccaactgaatatgagaggaacgggagatatgagggctcaagtcgcaatgtatctgctgagcaaaaagatgaaaacaaagaagcaaagcctcgatccctacgcttcacctggagcatgaaaaccactagttcaatggatcccggggacatgatgcgggaaatccgcaaagtgttggacgccaataactgcgactatgagcagagggagcgcttcttgctcttctgcgtccacggagatgggcacgcggagaacctcgtgcagtgggaaatggaagtgtgcaagctgccaagactgtctctgaacggggtccggtttaagcggatatcggggacatccatagccttcaaaaatattgcttccaaaattgccaatgagctaaagctgtaacccagtgattatgatgtaaattaagtagcaaktaaagtgttttcctgaacactgatggaaatgtatagaataatatttaggcaataacgtctgcatcttctaaatcatgaaattaaagtctgaggacragagcacgcctgggagcgaaagctggccttttttctacgaatgcactacattaaagatgtgcaacctatgcgccccctgccctacttccgttaccctgagagtcggygtgtggccccatctccatgtgcctcccgtctgggtgggtgtgagagtggacggtatgtgtgtgaagtggtgtatatggaagcatctccctacactggcagccagtcattrctagtacctctgcgggagatcatccggtgctaaaacattacagttgccaaggaggaaaatactgaatgactgctaagaattaaccttaagaccagttcatagttaatacaggtttacagttcatgcctgtggttttgtgtttgttgttttgtgtttttttagtgcaaaaggtttaaatttatagttgtgaacattgcttgtgtgtgtttttctaagtagattcacaagataattaaaaattcactttttctcagtaaaa

SEQ ID NO: 284 - DNA, 3442 bp, Homo sapiens
aggcagcagaggaagccgaggggcggccatcttggctccgtgaggctytgaggtgcyggggtgcggcggcggcagcggcggccagcagggcggaggctgaggcagcaagctcgctagagagggagaagcagtcgggcgcaggcgcctcctccgcagcccgctccatggtcggcgcccacagcccgcggcggcctgtcttgcgctccacttccttcacatcctcctccgcctcctcgttttcaggcgccgccggcggcgctgtgtggaggcccgcgagctgaaattcgcggtgcgacgggagggagtggagaaggaggtgagggggcccaggatcgcggggcgccctgaggcaaggggacgccggcgggccgaagcgcagcccgccgcccgcaggctcggctccgccactgccgccctcccggtctcctcgcctcggccgccgagggagggagagaatgagccccgggacccgccgggggacggcccgggccaggcccgggatctagacggccgtagggggaagggagccgccctccccacggcgccttttcggaactgccgtggactcgaggacgctggtcgccggcctcctagggctgtgctgttttgttttgaccctcgcattgtgcagaattaaagtgcagtaaaatgtccactaggaccccattgccaacggtgaatgaacgagacactgaaaaccacacgtcacatggagatgggcgtcaagaagttacctctcgtaccagccgctcaggagctcggtgtagaaactctatagcctcctgtgcagatgaacaacctcacatcggaaactacagactgttgaaaacaatcggcaaggggaattttgcaaaagtaaaattggcaagacatatccttacaggcagagaggttgcaataaaaataattgacaaaactcagttgaatccaacaagtctacaaaagctcttcagagaagtaagaataatgaagattttaaatcatcccaatatagtgaagttattcgargtcattgaaactgaaaaaacactctacctaatcatggaatatgcaagtggaggtgaagtatttgactatttggttgcacatggcaggatgaaggaaaaagaagcaagatctaaatttagacagattgtgtctgcagttcaatactgccatcagaaacggatcgtacatcgagacctcaaggctgaaaatctattgttagatgccgatatgaacattaaaatagcagatttcggttttagcaatgaatttactgttggcggtaaactcgacacgttttgtggcagtcctccatacgcagcacctgagctcttccagggcaagaaatatgacgggccagaagtggatgtgtggagtctgggggtcattttatacacactagtcagtggctcacttccctttgatgggcaaaacctaaaggaactgagagagagagtattaagagggaaatacagaattcccttctacatgtctacagactgtgaaaaccttctcaaacgtttcctggtgctaaatccaattaaacgcggcactctagagcaaatcatgaaggacaggtggatcaatgcagggcatgaagaagatgaactcaaaccatttgttgaaccagagctagacatctcagaccaaaaaagaatagatattatggtgggaatgggatattcacaagaagaaattcaagaatctcttagtaagatgaaatacgatgaaatcacagctacatatttgttattggggagaaaatcttcagagctggatgctagtgattccagttctagcagcaatctttcacttgctaaggttaggccgagcagtgatctcaacaacagtactggccagtctcctcaccacaaagtgcagagaagtgtttcttcaagccaaaagcaaagacgctacagtgaccatgctggaccagctattccttctgttgtggcgtatccgaaaaggagtcagacmagcactgcagatrgtgacctcaaagaagatggaatttcctcccggaaatcaastggcagtgctgttggaggaaagggaattgctccagccagtcccatgcttgggaatgcaagtaatcctaataaggcggatattcctgaacgcaagaaaagctccactgtccctagtagtaacacagcatctggtggaatgacacgacgaaatacttatgtttgcagtgagagaactacagmtgatagacactcagtgattcagaatggcaaagaaaacagcactattcctgatcagagaactccagttgcttcaacacacagtatcagtagtgcagccaccccagatcgaatccgcttcccaagagkcactgccagtcgtagcactttccacggccagccccgggaacggcgaaccgcaacatataatggccctcctgcctctcccagcctgtcccatgaagccacaccattgtcccagactcgaagccgaggctccactaatctctttagtaaattaacttcaaaactcacaaggagtcgcaatgtatctgctgagcaaaaagatgaaaacaaagaagcaaagcctcgatccctacgcttcacctggagcatgaaaaccactagttcaatggatcccggggacatgatgcgggaaatccgcaaagtgttggacgccaataactgcgactatgagcagagggagcgcttcttgctcttctgcgtccacggagatgggcacgcggagaacctcgtgcagtgggaaatggaagtgtgcaagctgccaagactgtctctgaacggggtccggtttaagcggatatcggggacatccatagccttcaaaaatattgcttccaaaattgccaatgagctaaagctgtaacccagtgattatgatgtaaattaagtagcaaktaaagtgttttcctgaacactgatggaaatgtatagaataatatttaggcaataacgtctgcatcttctaaatcatgaaattaaagtctgaggacragagcacgcctgggagcgaaagctggccttttttctacgaatgcactacattaaagatgtgcaacctatgcgccccctgccctacttccgttaccctgagagtcggygtgtggccccatctccatgtgcctcccgtctgggtgggtgtgagagtggacggtatgtgtgtgaagtggtgtatatggaagcatctccctacactggcagccagtcattrctagtacctctgcgggagatcatccggtgctaaaacattacagttgccaaggaggaaaatactgaatgactgctaagaattaaccttaagaccagttcatagttaatacaggtttacagttcatgcctgtggttttgtgtttgttgttttgtgtttttttagtgcaaaaggtttaaatttatagttgtgaacattgcttgtgtgtgtttttctaagtagattcacaagataattaaaaattcactttttctcagtaaaa

SEQ ID NO: 285 - DNA, 3888 bp, Homo sapiens
tatgaggagggacytacaaagactggaaactattcttagctccgtcactgactccaagttcatcccctctgtctttcagtttggttgagatataggctactcttcccaactcagtcttgaagagtatcaccaactgcctcatgtgtggtgaccttcactgtyrtatgccagtgactcatctggagtaatctcaacaacgagttaccaatacttgctcttgattgataaacagaatggggttttggatcttagcaattctcacaattctcatgtattccacagcagcaaagtttagtaaacaatcatggggcctggaaaatgaggctttaattgtaagatgtcctagacaaggaaaacctagttacaccgtggattggtattactcacaaacaaacaaaagtattcccactcaggaaagaaatcgtgtgtttgcctcaggccaacttctgaagtttctaccagctgmagttgytgattctggtatttatacctgtattgtcagaagtcccacattcaataggactggatatgcgaatgtcaccatatataaaaaacaatcagattgcaatgttccagattatttgatgtattcaacagtatctggatcagaaaaaaattccaaaatttattgtcctaccattgacctctacaactggacagcacctcttgagtggtttaagaattgtcaggctcttcaaggatcaaggtacagggcgcacaagtcatttttggtcattgataatgtgatgactgaggacrcaggtgattacacctgtaaatttatacacaatgaaaatggagccaattatagtgtgacggcgaccaggtccttcacggtcaaggatgagcaaggcttttctctgtttccagtaatcggagcccctgcacaaaatgaaataaaggaagtggaaattggaaaaaacgcaaacctaacttgctctgcttgttttggaaaaggcactcagttcttggctgccgtcctgtggcagcttaatggaacaaaaattacagactttggtgaaccaagaattcaacaagaggaagggcaaaatcaaagtttcagcaatgggctggcttgtctagacatggttttaagaatagctgaygtgaaggaagaggatttattgctgcagtacgactgtctggccctgaatttgcatggcttgagaaggcacaccgtaagactaagtaggaaaaatccaagtaaggagtgtttctgagactttgatcacctgaactttctctagcaagtgtaagcagaatggagtgtggttccaagagatccatcaagacaatgggaatggcctgtgccataaaatgtgcttctcttcttcrggatgttgtttgctgtctgatctttgtagactgttcctgtttgctgggagcttctctgctgcttaaattgttcgtcctcccccactccctcctatcgttggtttgtctagaacactcagctgcttctttggtcatccttgttttctaactttatgaactccctctgtgtcactgtatgtgaaaggaaatgcaccaacaaccgwaaactgaacgtgttcttttgtgctcttttataacttgcattacatgttgtaagcatggtccgttctatacstttttctggtcataatgaacactcattttgttagcgagggtggtaaagtgaacaaaaaggggaagtatcaaactactgccatttcagtgagaaaatcctaggtgctactttataataagacatttgttaggccattcttgcattgatataaagaaatacctgagactgggtgatttatatgaaaagaggtttaattggctcacggctctgcaggctgtatgggaagcatggcggcatctgcttctggggacacctcaggagctttactcatggcagaaggcaaagcaaaggcaggcacttcaaacagtaaaagcaggagcgagagagaggtgccacactgaaacagccagatctcatgagaagtcactcactattgcaaggacagcatcaaagagatggtgctaaaccattcatgatgaactcacccccatgatccaatcacctcccaccaggctccacctcgaatactggggattaccattcagcatgagatttgggcaggaacacagacccaaaccataccacacacattatcatcgttaractttgtaaagtatttaaggtacatggaacacacgggaagtctggtagctcagcccatttctttattgcatctgttattcaccatgtaattcaggtaccacgtattccagggagcctttcttggccctcagtttgcagtatacacactttccaagtactcttgtagcatcctgtttgtatcatagcactggtcacattgccttacctaaatctgtttgacagtctgctcaacacgactgcaagctccatgagggcagggacatcatctcttccatctttgggtccttagtgcaatacctggcagctagccagtgctcagctaaatatttgttgactgaataaatgaatgcacaaccaaattattgataccaaatgttttttttgtgtacatttctacttctctagctataagtcttaattatacaacaaaatactatttttatatttatgtttggtaaattcaataactttcctcatcatttggaaagtcaaattgtttattgcttccctacagttttttctgaatctagcaggattttaaygatatcattataatttgacacaataaaaggacaacatgaaactgatgaatctttattgggttaatttcagacactatataatcttttaaaaatgtaacattcttttttatatataaataattggtggcatcacaaatagccaaagcagggtggagagagtgatccttcctgggtgcaggcaagaaggggatatgttttctacagagttttcaaaacagtgataaagctgtctacaagtcattgtgctttttatcatcactatgcccagacaatgtgaaacatcagagatgaagtgctcttcccacagaggtggactgatccttctccccactcccttggtgtgtctctgaatgcaatgttgtcttggaaaacagctttccaagcatttcactcctgagcacttgccagtttcctcacttgttcttcacatatccaggcaaagacatcctgtttgctatatgaagcattgtatcccgtataaaaggaaggaaagagagaaatatatttttacactcatcactcctcaggggctgtacaatcatgtagaaattgtttaatgtgcytgtcaaatagccaaagagtgttaaaccctgagttcccacccatgtgtgtggtatggttaggattcatccagatacacagagagaggcacaacaggaggagaaaggataggggtgtggggacagcgggcccccaatatggtgtaatcgtggcaggtctctgcctgaagtgctatgtggggtttttcttgttttaattttgactttaacccctgatttgtaagtttttcataaaataaacagaatcataactcatgtagatggctataagtgccgtagtgttctgtgggtctctggtgtctgccagtgataagtgtggcaccccaggaaggctgtggaccccatcaaggtgctatgtgagggccatgcttggggtggtggtgggcccagtagaccctgcagccatccatccagcctgcccacycacactgcccttgtgtactcctgctttgctacgttatcattgatcaatgtccctggttacctatgtgtttgaattatcttcrtgttacaggtgtttaatgattttgctccttctagcttatttgtatttcacctgtttttctttaaatcaacatggttacactctgtttcagcaactgtataaattaaacacaaattattactactgcta

SEQ ID NO: 286 - DNA, 4058 bp, Homo sapiens
tatgaggagggacytacaaagactggaaactattcttagctccgtcactgactccaagttcatcccctctgtctttcagtttggttgagatataggctactcttcccaactcagtcttgaagagtatcaccaactgcctcatgtgtggtgaccttcactgtyrtatgccagtgactcatctggagtaatctcaacaacgagttaccaatacttgctcttgattgataaacagaatggggttttggatcttagcaattctcacaattctcatgtattccacagcagcaaagtttagtaaacaatcatggggcctggaaaatgaggctttaattgtaagatgtcctagacaaggaaaacctagttacaccgtggattggtattactcacaaacaaacaaaagtattcccactcaggaaagaaatcgtgtgtttgcctcaggccaacttctgaagtttctaccagctgmagttgytgattctggtatttatacctgtattgtcagaagtcccacattcaataggactggatatgcgaatgtcaccatatataaaaaacaatcagattgcaatgttccagattatttgatgtattcaacagtatctggatcagaaaaaaattccaaaatttattgtcctaccattgacctctacaactggacagcacctcttgagtggtttaagaattgtcaggctcttcaaggatcaaggtacagggcgcacaagtcatttttggtcattgataatgtgatgactgaggacrcaggtgattacacctgtaaatttatacacaatgaaaatggagccaattatagtgtgacggcgaccaggtccttcacggtcaaggtttggtgtcagagtttctgcaaattaaaaaagagcttaatctttagtaatactcattggattcaaartytaatgagaggctttgtgatggtatactatggtgtacataaatgttgtcgagtggtttttaatctttgtttgcaatactttcaacatcatcaatggccttgaatgagcaaggcttttctctgtttccagtaatcggagcccctgcacaaaatgaaataaaggaagtggaaattggaaaaaacgcaaacctaacttgctctgcttgttttggaaaaggcactcagttcttggctgccgtcctgtggcagcttaatggaacaaaaattacagactttggtgaaccaagaattcaacaagaggaagggcaaaatcaaagtttcagcaatgggctggcttgtctagacatggttttaagaatagctgaygtgaaggaagaggatttattgctgcagtacgactgtctggccctgaatttgcatggcttgagaaggcacaccgtaagactaagtaggaaaaatccaagtaaggagtgtttctgagactttgatcacctgaactttctctagcaagtgtaagcagaatggagtgtggttccaagagatccatcaagacaatgggaatggcctgtgccataaaatgtgcttctcttcttcrggatgttgtttgctgtctgatctttgtagactgttcctgtttgctgggagcttctctgctgcttaaattgttcgtcctcccccactccctcctatcgttggtttgtctagaacactcagctgcttctttggtcatccttgttttctaactttatgaactccctctgtgtcactgtatgtgaaaggaaatgcaccaacaaccgwaaactgaacgtgttcttttgtgctcttttataacttgcattacatgttgtaagcatggtccgttctatacstttttctggtcataatgaacactcattttgttagcgagggtggtaaagtgaacaaaaaggggaagtatcaaactactgccatttcagtgagaaaatcctaggtgctactttataataagacatttgttaggccattcttgcattgatataaagaaatacctgagactgggtgatttatatgaaaagaggtttaattggctcacggctctgcaggctgtatgggaagcatggcggcatctgcttctggggacacctcaggagctttactcatggcagaaggcaaagcaaaggcaggcacttcaaacagtaaaagcaggagcgagagagaggtgccacactgaaacagccagatctcatgagaagtcactcactattgcaaggacagcatcaaagagatggtgctaaaccattcatgatgaactcacccccatgatccaatcacctcccaccaggctccacctcgaatactggggattaccattcagcatgagatttgggcaggaacacagacccaaaccataccacacacattatcatcgttaractttgtaaagtatttaaggtacatggaacacacgggaagtctggtagctcagcccatttctttattgcatctgttattcaccatgtaattcaggtaccacgtattccagggagcctttcttggccctcagtttgcagtatacacactttccaagtactcttgtagcatcctgtttgtatcatagcactggtcacattgccttacctaaatctgtttgacagtctgctcaacacgactgcaagctccatgagggcagggacatcatctcttccatctttgggtccttagtgcaatacctggcagctagccagtgctcagctaaatatttgttgactgaataaatgaatgcacaaccaaattattgataccaaatgttttttttgtgtacatttctacttctctagctataagtcttaattatacaacaaaatactatttttatatttatgtttggtaaattcaataactttcctcatcatttggaaagtcaaattgtttattgcttccctacagttttttctgaatctagcaggattttaaygatatcattataatttgacacaataaaaggacaacatgaaactgatgaatctttattgggttaatttcagacactatataatcttttaaaaatgtaacattcttttttatatataaataattggtggcatcacaaatagccaaagcagggtggagagagtgatccttcctgggtgcaggcaagaaggggatatgttttctacagagttttcaaaacagtgataaagctgtctacaagtcattgtgctttttatcatcactatgcccagacaatgtgaaacatcagagatgaagtgctcttcccacagaggtggactgatccttctccccactcccttggtgtgtctctgaatgcaatgttgtcttggaaaacagctttccaagcatttcactcctgagcacttgccagtttcctcacttgttcttcacatatccaggcaaagacatcctgtttgctatatgaagcattgtatcccgtataaaaggaaggaaagagagaaatatatttttacactcatcactcctcaggggctgtacaatcatgtagaaattgtttaatgtgcytgtcaaatagccaaagagtgttaaaccctgagttcccacccatgtgtgtggtatggttaggattcatccagatacacagagagaggcacaacaggaggagaaaggataggggtgtggggacagcgggcccccaatatggtgtaatcgtggcaggtctctgcctgaagtgctatgtggggtttttcttgttttaattttgactttaacccctgatttgtaagtttttcataaaataaacagaatcataactcatgtagatggctataagtgccgtagtgttctgtgggtctctggtgtctgccagtgataagtgtggcaccccaggaaggctgtggaccccatcaaggtgctatgtgagggccatgcttggggtggtggtgggcccagtagaccctgcagccatccatccagcctgcccacycacactgcccttgtgtactcctgctttgctacgttatcattgatcaatgtccctggttacctatgtgtttgaattatcttcrtgttacaggtgtttaatgattttgctccttctagcttatttgtatttcacctgtttttctttaaatcaacatggttacactctgtttcagcaactgtataaattaaacacaaattattactactgcta

SEQ ID NO: 287 - DNA, 2018 bp, Homo sapiens
tatgaggagggacytacaaagactggaaactattcttagctccgtcactgactccaagttcatcccctctgtctttcagtttggttgagatataggctactcttcccaactcagtcttgaagagtatcaccaactgcctcatgtgtggtgaccttcactgtyrtatgccagtgactcatctggagtaatctcaacaacgagttaccaatacttgctcttgattgataaacagaatggggttttggatcttagcaattctcacaattctcatgtattccacagcagcaaagtttagtaaacaatcatggggcctggaaaatgaggctttaattgtaagatgtcctagacaaggaaaacctagttacaccgtggattggtattactcacaaacaaacaaaagtattcccactcaggaaagaaatcgtgtgtttgcctcaggccaacttctgaagtttctaccagctgmagttgytgattctggtatttatacctgtattgtcagaagtcccacattcaataggactggatatgcgaatgtcaccatatataaaaaacaatcagattgcaatgttccagattatttgatgtattcaacagtatctggatcagaaaaaaattccaaaatttattgtcctaccattgacctctacaactggacagcacctcttgagtggtttaagaattgtcaggctcttcaaggatcaaggtacagggcgcacaagtcatttttggtcattgataatgtgatgactgaggacrcaggtgattacacctgtaaatttatacacaatgaaaatggagccaattatagtgtgacggcgaccaggtccttcacggtcaaggatgagcaaggcttttctctgtttccagtaatcggagcccctgcacaaaatgaaataaaggaagtggaaattggaaaaaacgcaaacctaacttgctctgcttgttttggaaaaggcactcagttcttggctgccgtcctgtggcagcttaatggaacaaaaattacagactttggtgaaccaagaattcaacaagaggaagggcaaaatcaaagtttcagcaatgggctggcttgtctagacatggttttaagaatagctgaygtgaaggaagaggatttattgctgcagtacgactgtctggccctgaatttgcatggcttgagaaggcacaccgtaagactaagtaggaaaaatccaattgatcatcatagcatctactgcataattgcagtatgtagtgtatttttaatgctaatcaatgtcctggttatcatcctaaaaatgttctggattgaggccactctgctctggagagacatagctaaaccttacaagactaggaatgatggaaagctctatgatgcttatgttgtctacccacggaactacaaatccagtacagatggggccagtcgtgtagagcactttgttcaccagattctgcctgatgttcttgaaaataaatgtggctataccttatgcatttatgggagagatatgctacctggagaagatgtagtcactrcagtggaaaccaacatacgaaagagcaggcggcacattttcatcctgacccctcagatcactcacaayaaggagtttgcctacgarcaggaggttgccctgcactgtgccctcatccagaacgacgccaaggtgatacttattgagatggaggctctgagcgagctggacatgctgcaggctgaggcgcttcaggactccctcmrgcatcttatgaaagtacaggggaccatcaagtggagggaggaccacattgccawtaaaaggtccctgaattcyaaattctggaagcacgtgaggtaccaaatgcctgtgccaagcaaaattcccagaaaggcctctagtttgaytccctyggctgcccagaagcaatagtgcctgctgtgatgtgcaaaggcatctgagtttgaagctttcctgacttctcctagctggcttatgcccctgcactgaagtgtgaggagcaggaatattaaagggattcaggcc

SEQ ID NO: 288 - DNA, 1934 bp, Homo sapiens
ttgagatataggctactcttcccaactcagtcttgaagagtatcaccaactgcctcatgtgtggtgaccttcactgtyrtatgccagtgactcatctggagtaatctcaacaacgagttaccaatacttgctcttgattgataaacagaatggggttttggatcttagcaattctcacaattctcatgtattccacagcagcaaagtttagtaaacaatcatggggcctggaaaatgaggctttaattgtaagatgtcctagacaaggaaaacctagttacaccgtggattggtattactcacaaacaaacaaaagtattcccactcaggaaagaaatcgtgtgtttgcctcaggccaacttctgaagtttctaccagctgmagttgytgattctggtatttatacctgtattgtcagaagtcccacattcaataggactggatatgcgaatgtcaccatatataaaaaacaatcagattgcaatgttccagattatttgatgtattcaacagtatctggatcagaaaaaaattccaaaatttattgtcctaccattgacctctacaactggacagcacctcttgagtggtttaagaattgtcaggctcttcaaggatcaaggtacagggcgcacaagtcatttttggtcattgataatgtgatgactgaggacrcaggtgattacacctgtaaatttatacacaatgaaaatggagccaattatagtgtgacggcgaccaggtccttcacggtcaaggatgagcaaggcttttctctgtttccagtaatcggagcccctgcacaaaatgaaataaaggaagtggaaattggaaaaaacgcaaacctaacttgctctgcttgttttggaaaaggcactcagttcttggctgccgtcctgtggcagcttaatggaacaaaaattacagactttggtgaaccaagaattcaacaagaggaagggcaaaatcaaagtttcagcaatgggctggcttgtctagacatggttttaagaatagctgaygtgaaggaagaggatttattgctgcagtacgactgtctggccctgaatttgcatggcttgagaaggcacaccgtaagactaagtaggaaaaatccaattgatcatcatagcatctactgcataattgcagtatgtagtgtatttttaatgctaatcaatgtcctggttatcatcctaaaaatgttctggattgaggccactctgctctggagagacatagctaaaccttacaagactaggaatgatggaaagctctatgatgcttatgttgtctacccacggaactacaaatccagtacagatggggccagtcgtgtagagcactttgttcaccagattctgcctgatgttcttgaaaataaatgtggctataccttatgcatttatgggagagatatgctacctggagaagatgtagtcactrcagtggaaaccaacatacgaaagagcaggcggcacattttcatcctgacccctcagatcactcacaayaaggagtttgcctacgarcaggaggttgccctgcactgtgccctcatccagaacgacgccaaggtgatacttattgagatggaggctctgagcgagctggacatgctgcaggctgaggcgcttcaggactccctcmrgcatcttatgaaagtacaggggaccatcaagtggagggaggaccacattgccawtaaaaggtccctgaattcyaaattctggaagcacgtgaggtaccaaatgcctgtgccaagcaaaattcccagaaaggcctctagtttgaytccctyggctgcccagaagcaatagtgcctgctgtgatgtgcaaaggcatctgagtttgaagctttcctgacttctcctagctggcttatgcccctgcactgaagtgtgaggagcaggaatattaaagggattcaggcc

SEQ ID NO: 289 - DNA, 3804 bp, Homo sapiens
ttgagatataggctactcttcccaactcagtcttgaagagtatcaccaactgcctcatgtgtggtgaccttcactgtyrtatgccagtgactcatctggagtaatctcaacaacgagttaccaatacttgctcttgattgataaacagaatggggttttggatcttagcaattctcacaattctcatgtattccacagcagcaaagtttagtaaacaatcatggggcctggaaaatgaggctttaattgtaagatgtcctagacaaggaaaacctagttacaccgtggattggtattactcacaaacaaacaaaagtattcccactcaggaaagaaatcgtgtgtttgcctcaggccaacttctgaagtttctaccagctgmagttgytgattctggtatttatacctgtattgtcagaagtcccacattcaataggactggatatgcgaatgtcaccatatataaaaaacaatcagattgcaatgttccagattatttgatgtattcaacagtatctggatcagaaaaaaattccaaaatttattgtcctaccattgacctctacaactggacagcacctcttgagtggtttaagaattgtcaggctcttcaaggatcaaggtacagggcgcacaagtcatttttggtcattgataatgtgatgactgaggacrcaggtgattacacctgtaaatttatacacaatgaaaatggagccaattatagtgtgacggcgaccaggtccttcacggtcaaggatgagcaaggcttttctctgtttccagtaatcggagcccctgcacaaaatgaaataaaggaagtggaaattggaaaaaacgcaaacctaacttgctctgcttgttttggaaaaggcactcagttcttggctgccgtcctgtggcagcttaatggaacaaaaattacagactttggtgaaccaagaattcaacaagaggaagggcaaaatcaaagtttcagcaatgggctggcttgtctagacatggttttaagaatagctgaygtgaaggaagaggatttattgctgcagtacgactgtctggccctgaatttgcatggcttgagaaggcacaccgtaagactaagtaggaaaaatccaagtaaggagtgtttctgagactttgatcacctgaactttctctagcaagtgtaagcagaatggagtgtggttccaagagatccatcaagacaatgggaatggcctgtgccataaaatgtgcttctcttcttcrggatgttgtttgctgtctgatctttgtagactgttcctgtttgctgggagcttctctgctgcttaaattgttcgtcctcccccactccctcctatcgttggtttgtctagaacactcagctgcttctttggtcatccttgttttctaactttatgaactccctctgtgtcactgtatgtgaaaggaaatgcaccaacaaccgwaaactgaacgtgttcttttgtgctcttttataacttgcattacatgttgtaagcatggtccgttctatacstttttctggtcataatgaacactcattttgttagcgagggtggtaaagtgaacaaaaaggggaagtatcaaactactgccatttcagtgagaaaatcctaggtgctactttataataagacatttgttaggccattcttgcattgatataaagaaatacctgagactgggtgatttatatgaaaagaggtttaattggctcacggctctgcaggctgtatgggaagcatggcggcatctgcttctggggacacctcaggagctttactcatggcagaaggcaaagcaaaggcaggcacttcaaacagtaaaagcaggagcgagagagaggtgccacactgaaacagccagatctcatgagaagtcactcactattgcaaggacagcatcaaagagatggtgctaaaccattcatgatgaactcacccccatgatccaatcacctcccaccaggctccacctcgaatactggggattaccattcagcatgagatttgggcaggaacacagacccaaaccataccacacacattatcatcgttaractttgtaaagtatttaaggtacatggaacacacgggaagtctggtagctcagcccatttctttattgcatctgttattcaccatgtaattcaggtaccacgtattccagggagcctttcttggccctcagtttgcagtatacacactttccaagtactcttgtagcatcctgtttgtatcatagcactggtcacattgccttacctaaatctgtttgacagtctgctcaacacgactgcaagctccatgagggcagggacatcatctcttccatctttgggtccttagtgcaatacctggcagctagccagtgctcagctaaatatttgttgactgaataaatgaatgcacaaccaaattattgataccaaatgttttttttgtgtacatttctacttctctagctataagtcttaattatacaacaaaatactatttttatatttatgtttggtaaattcaataactttcctcatcatttggaaagtcaaattgtttattgcttccctacagttttttctgaatctagcaggattttaaygatatcattataatttgacacaataaaaggacaacatgaaactgatgaatctttattgggttaatttcagacactatataatcttttaaaaatgtaacattcttttttatatataaataattggtggcatcacaaatagccaaagcagggtggagagagtgatccttcctgggtgcaggcaagaaggggatatgttttctacagagttttcaaaacagtgataaagctgtctacaagtcattgtgctttttatcatcactatgcccagacaatgtgaaacatcagagatgaagtgctcttcccacagaggtggactgatccttctccccactcccttggtgtgtctctgaatgcaatgttgtcttggaaaacagctttccaagcatttcactcctgagcacttgccagtttcctcacttgttcttcacatatccaggcaaagacatcctgtttgctatatgaagcattgtatcccgtataaaaggaaggaaagagagaaatatatttttacactcatcactcctcaggggctgtacaatcatgtagaaattgtttaatgtgcytgtcaaatagccaaagagtgttaaaccctgagttcccacccatgtgtgtggtatggttaggattcatccagatacacagagagaggcacaacaggaggagaaaggataggggtgtggggacagcgggcccccaatatggtgtaatcgtggcaggtctctgcctgaagtgctatgtggggtttttcttgttttaattttgactttaacccctgatttgtaagtttttcataaaataaacagaatcataactcatgtagatggctataagtgccgtagtgttctgtgggtctctggtgtctgccagtgataagtgtggcaccccaggaaggctgtggaccccatcaaggtgctatgtgagggccatgcttggggtggtggtgggcccagtagaccctgcagccatccatccagcctgcccacycacactgcccttgtgtactcctgctttgctacgttatcattgatcaatgtccctggttacctatgtgtttgaattatcttcrtgttacaggtgtttaatgattttgctccttctagcttatttgtatttcacctgtttttctttaaatcaacatggttacactctgtttcagcaactgtataaattaaacacaaattattactactgcta

SEQ ID NO: 290 - DNA, 2188 bp, Homo sapiens
tatgaggagggacytacaaagactggaaactattcttagctccgtcactgactccaagttcatcccctctgtctttcagtttggttgagatataggctactcttcccaactcagtcttgaagagtatcaccaactgcctcatgtgtggtgaccttcactgtyrtatgccagtgactcatctggagtaatctcaacaacgagttaccaatacttgctcttgattgataaacagaatggggttttggatcttagcaattctcacaattctcatgtattccacagcagcaaagtttagtaaacaatcatggggcctggaaaatgaggctttaattgtaagatgtcctagacaaggaaaacctagttacaccgtggattggtattactcacaaacaaacaaaagtattcccactcaggaaagaaatcgtgtgtttgcctcaggccaacttctgaagtttctaccagctgmagttgytgattctggtatttatacctgtattgtcagaagtcccacattcaataggactggatatgcgaatgtcaccatatataaaaaacaatcagattgcaatgttccagattatttgatgtattcaacagtatctggatcagaaaaaaattccaaaatttattgtcctaccattgacctctacaactggacagcacctcttgagtggtttaagaattgtcaggctcttcaaggatcaaggtacagggcgcacaagtcatttttggtcattgataatgtgatgactgaggacrcaggtgattacacctgtaaatttatacacaatgaaaatggagccaattatagtgtgacggcgaccaggtccttcacggtcaaggtttggtgtcagagtttctgcaaattaaaaaagagcttaatctttagtaatactcattggattcaaartytaatgagaggctttgtgatggtatactatggtgtacataaatgttgtcgagtggtttttaatctttgtttgcaatactttcaacatcatcaatggccttgaatgagcaaggcttttctctgtttccagtaatcggagcccctgcacaaaatgaaataaaggaagtggaaattggaaaaaacgcaaacctaacttgctctgcttgttttggaaaaggcactcagttcttggctgccgtcctgtggcagcttaatggaacaaaaattacagactttggtgaaccaagaattcaacaagaggaagggcaaaatcaaagtttcagcaatgggctggcttgtctagacatggttttaagaatagctgaygtgaaggaagaggatttattgctgcagtacgactgtctggccctgaatttgcatggcttgagaaggcacaccgtaagactaagtaggaaaaatccaattgatcatcatagcatctactgcataattgcagtatgtagtgtatttttaatgctaatcaatgtcctggttatcatcctaaaaatgttctggattgaggccactctgctctggagagacatagctaaaccttacaagactaggaatgatggaaagctctatgatgcttatgttgtctacccacggaactacaaatccagtacagatggggccagtcgtgtagagcactttgttcaccagattctgcctgatgttcttgaaaataaatgtggctataccttatgcatttatgggagagatatgctacctggagaagatgtagtcactrcagtggaaaccaacatacgaaagagcaggcggcacattttcatcctgacccctcagatcactcacaayaaggagtttgcctacgarcaggaggttgccctgcactgtgccctcatccagaacgacgccaaggtgatacttattgagatggaggctctgagcgagctggacatgctgcaggctgaggcgcttcaggactccctcmrgcatcttatgaaagtacaggggaccatcaagtggagggaggaccacattgccawtaaaaggtccctgaattcyaaattctggaagcacgtgaggtaccaaatgcctgtgccaagcaaaattcccagaaaggcctctagtttgaytccctyggctgcccagaagcaatagtgcctgctgtgatgtgcaaaggcatctgagtttgaagctttcctgacttctcctagctggcttatgcccctgcactgaagtgtgaggagcaggaatattaaagggattcaggcc

SEQ ID NO: 291 - DNA, 1848 bp, Homo sapiens
  misc_feature (1)...(1848): n = A,T,C or G, or insertion/deletion polymorphism (see Tables 1-2)
gtcttgactcatgggtgtattcacaaattctgttacttcaagtctttttcttttaacggattgatcttttgctagatagagacaaaatatcagtgtgaattacagcaaacccctattccatgctgttatgggtgaaactctgggagattctcctattgacscagaaagcgattccttcactgatacactgtctgcaaacatatcacaagaaatgaccatggttgacacagagatgccattctggsccaccaactttgggatcagctccgtggatctctccgtaatggaagaccactcccactcctttgatatcaagcccttcactactgttgacttctccagcatttctactccacattacgaagacattccattcacaagaacagatccagtggttgcagattacaagtatgacctgaaacttcaagagtaccaaagtgcaatcaaagtggagcctgcatctcmaccttattattctgagaagactcagctctacaataagcctcatgaagagccttccaactccctcatggcaattgaatgtcgtgtctgtggagataaagcttctggatttcactatggagttcatgcttgtgaaggatgcaagggtttcttccggagaacaatcagattgaagcttatctatgacagatgtgatcttaactgtcggatccacaaaaaaagtagaaataaatgtcagtactgtcggtttcagaaatgccttgcagtggggatgtctcataatgccatcaggtttgggcggatgccacaggccgagaaggagaagctgttggcggagatctccagtgatatcgaccagctgaatccagagtccgctgacctccgggccctggcaaaacatttgtatgactcatacataaagtccttcccgctgaccaaagcaaaggcgagggcgatcttgacaggaaagacaacagacaaatcaccattcgttatctatgacatgaattccttaatgatgggagaagataaaatcaagttcaaacacatcacccccctgcaggagcagagcaaagaggtggccatccgcatctttcagggctgccagtttcgctccrtggaggctgtgcaggagatcacagagtatgccaaaagcattcctggttttgtaaatcttgacttgaacgaccaagtaactctcctcaaatatggagtccacgagatcatttacacaatgctggcctccttgatgaataaagatggggttctcatatccgagggccaaggcttcatgacaagggagtttctaaagagcctgcgaaagcctttwggtgactttatggagcccaagtttgagtttgctgtgaagttcaatgcactggaattagatgacagcgacttggcaatatttattgctgtcattattctcagtggagaccgcccaggtttgctgaatgtgaagcccattgaagacattcaagacaacctgctacaagccctggagctccagctgaagctgaaccaccctgagtcctcacagctgtttgccaagctgctccagaaaatgacagacctcagacagattgtcacggaacaygtgcagctantgcaggtgatcaagaagacggagacagacatgagtcttcaccygctcctgcaggagatctacaaggacttgtactagcagagagtcctgagccactgccaacatttcccttcttccagttgcactattctgagggaaaatctgacacctaagaaatttactgtgaaaaagcattttaaaaagaaaaggttttagaatatgatctattttatgcatattgtttataaagacacatttacaatttacttttaatattaaaaattaccatattatgaaattgc

SEQ ID NO: 292 - DNA, 1397 bp, Homo sapiens
gtcttgactcatgggtgtattcacaaattctgttacttcaagtctttttcttttaacggattgatcttttgctagatagagacaaaatatcagtgtgaattacagcaaacccctattccatgctgttatgggtgaaactctgggagattctcctattgacscagaaagcgattccttcactgatacactgtctgcaaacatatcacaagaaatgaccatggttgacacagagatgccattctggsccaccaactttgggatcagctccgtggatctctccgtaatggaagaccactcccactcctttgatatcaagcccttcactactgttgacttctccagcatttctactccacattacgaagacattccattcacaagaacagatccagtggttgcagattacaagtatgacctgaaacttcaagagtaccaaagtgcaatcaaagtggagcctgcatctcmaccttattattctgagaagactcagctctacaataagcctcatgaagagccttccaactccctcatggcaattgaatgtcgtgtctgtggagataaagcttctggatttcactatggagttcatgcttgtgaaggatgcaagggtttcttccggagaacaatcagattgaagcttatctatgacagatgtgatcttaactgtcggatccacaaaaaaagtagaaataaatgtcagtactgtcggtttcagaaatgccttgcagtggggatgtctcataatgccatcaggtttgggcggatgccacaggccgagaaggagaagctgttggcggagatctccagtgatatcgaccagctgaatccagagtccgctgacctccgggccctggcaaaacatttgtatgactcatacataaagtccttcccgctgaccaaagcaaaggcgagggcgatcttgacaggaaagacaacagacaaatcaccattcgttatctatgacatgaattccttaatgatgggagaagataaaatcaagttcaaacacatcacccccctgcaggagcagagcaaagaggtggccatccgcatctttcagggctgccagtttcgctccrtggaggctgtgcaggagatcacagagtatgccaaaagcattcctggttttgtaaatcttgacttgaacgaccaagtaactctcctcaaatatggagtccacgagatcatttacacaatgctggcctccttgatgaataaagatggggttctcatatccgagggccaaggcttcatgacaagggagtttctaaagagcctgcgaaagcctttwggtgactttatggagcccaagtttgagtttgctgtgaagttcaatgcactggaattagatgacagcgacttggcaatatttattgctgtcattattctcagtggag

SEQ ID NO: 293 - DNA, 1751 bp, Homo sapiens
  misc_feature (1)...(1751): n = A,T,C or G, or insertion/deletion polymorphism (see Tables 1-2)
caggcggggcccagcgcactcggagcccgagcccgagccgcagccgccgcctggggcgcttgggtcggcctcgaggacaccggagaggggcgccacgccgccgtggccgcagaaatgaccatggttgacacagagatgccattctggsccaccaactttgggatcagctccgtggatctctccgtaatggaagaccactcccactcctttgatatcaagcccttcactactgttgacttctccagcatttctactccacattacgaagacattccattcacaagaacagatccagtggttgcagattacaagtatgacctgaaacttcaagagtaccaaagtgcaatcaaagtggagcctgcatctcmaccttattattctgagaagactcagctctacaataagcctcatgaagagccttccaactccctcatggcaattgaatgtcgtgtctgtggagataaagcttctggatttcactatggagttcatgcttgtgaaggatgcaagggtttcttccggagaacaatcagattgaagcttatctatgacagatgtgatcttaactgtcggatccacaaaaaaagtagaaataaatgtcagtactgtcggtttcagaaatgccttgcagtggggatgtctcataatgccatcaggtttgggcggatgccacaggccgagaaggagaagctgttggcggagatctccagtgatatcgaccagctgaatccagagtccgctgacctccgggccctggcaaaacatttgtatgactcatacataaagtccttcccgctgaccaaagcaaaggcgagggcgatcttgacaggaaagacaacagacaaatcaccattcgttatctatgacatgaattccttaatgatgggagaagataaaatcaagttcaaacacatcacccccctgcaggagcagagcaaagaggtggccatccgcatctttcagggctgccagtttcgctccrtggaggctgtgcaggagatcacagagtatgccaaaagcattcctggttttgtaaatcttgacttgaacgaccaagtaactctcctcaaatatggagtccacgagatcatttacacaatgctggcctccttgatgaataaagatggggttctcatatccgagggccaaggcttcatgacaagggagtttctaaagagcctgcgaaagcctttwggtgactttatggagcccaagtttgagtttgctgtgaagttcaatgcactggaattagatgacagcgacttggcaatatttattgctgtcattattctcagtggagaccgcccaggtttgctgaatgtgaagcccattgaagacattcaagacaacctgctacaagccctggagctccagctgaagctgaaccaccctgagtcctcacagctgtttgccaagctgctccagaaaatgacagacctcagacagattgtcacggaacaygtgcagctantgcaggtgatcaagaagacggagacagacatgagtcttcaccygctcctgcaggagatctacaaggacttgtactagcagagagtcctgagccactgccaacatttcccttcttccagttgcactattctgagggaaaatctgacacctaagaaatttactgtgaaaaagcattttaaaaagaaaaggttttagaatatgatctattttatgcatattgtttataaagacacatttacaatttacttttaatattaaaaattaccatattatgaaattgc

SEQ ID NO: 294 - DNA, 1619 bp, Homo sapiens
  misc_feature (1)...(1619): n = A,T,C or G, or insertion/deletion polymorphism (see Tables 1-2)
ttggtggaaggtgggtgtgtagtcgtggtactttacgcctcggtgtttagggaggagcctaaggtaaggagtcagaaacggggagtaaccgagctgcggcttttatataaggtcagtggtaggtaaggaaggggccttwacctctgctggtgaccagaagcctgcatttctgcattctgcttaattccctttccttagatttgaaagaagccaacactaaaccacaaatatacaacaaggccattttctcaaacgagagtcagcctttaacgtctatttttcctttcagaaatgaccatggttgacacagagatgccattctggsccaccaactttgggatcagctccgtggatctctccgtaatggaagaccactcccactcctttgatatcaagcccttcactactgttgacttctccagcatttctactccacattacgaagacattccattcacaagaacagatccagtggttgcagattacaagtatgacctgaaacttcaagagtaccaaagtgcaatcaaagtggagcctgcatctcmaccttattattctgagaagactcagctctacaataagcctcatgaagagccttccaactccctcatggcaattgaatgtcgtgtctgtggagataaagcttctggatttcactatggagttcatgcttgtgaaggatgcaagggtttcttccggagaacaatcagattgaagcttatctatgacagatgtgatcttaactgtcggatccacaaaaaaagtagaaataaatgtcagtactgtcggtttcagaaatgccttgcagtggggatgtctcataatgccatcaggtttgggcggatgccacaggccgagaaggagaagctgttggcggagatctccagtgatatcgaccagctgaatccagagtccgctgacctccgggccctggcaaaacatttgtatgactcatacataaagtccttcccgctgaccaaagcaaaggcgagggcgatcttgacaggaaagacaacagacaaatcaccattcgttatctatgacatgaattccttaatgatgggagaagataaaatcaagttcaaacacatcacccccctgcaggagcagagcaaagaggtggccatccgcatctttcagggctgccagtttcgctccrtggaggctaccgcccaggtttgctgaatgtgaagcccattgaagacattcaagacaacctgctacaagccctggagctccagctgaagctgaaccaccctgagtcctcacagctgtttgccaagctgctccagaaaatgacagacctcagacagattgtcacggaacaygtgcagctantgcaggtgatcaagaagacggagacagacatgagtcttcaccygctcctgcaggagatctacaaggacttgtactagcagagagtcctgagccactgccaacatttcccttcttccagttgcactattctgagggaaaatctgacacctaagaaatttactgtgaaaaagcattttaaaaagaaaaggttttagaatatgatctattttatgcatattgtttataaagacacatttacaatttacttttaatattaaaaattaccatattatgaaattgct

SEQ ID NO: 295 - DNA, 3268 bp, Homo sapiens
caggcgggwcgggctctcccttgggtgcttagccccgcccccgtcccactctgccctgttgctgtcgcgccgctgctggttgctgtccctggacccctaccatggaggagaccatcaaagatccccccacatcagctgtcttgctggatcactgtcatttctctcaggtcatctttaacagtgtggagaagttctacatccctggaggggacgtcacatgtcattataccttcacccagcatttcatccctcgtcgaaaggattggattggcatctttagagcatttaaatgtttccaagacaaattgraacaagaactactcaaatggaggagccaaggacagaaattgcaggtggggtggaagacaacccgtgagtattacaccttcatgtgggttactttgcccattgacctaaacaacaaatcagctaaacagcaggaagtccaattcaaagcttactacctgcccaaggatgatgagtattaccagttctgctatgtggatgaggatggtgtggtccggggagcaagtattcctttccaattccgtccagaaaatgaggaagacatcctggttgttaccactcaggragaggtggaagagattgagcagcacaacaaggagctttgcaaagaaaaccaggagctgaaggacagctgtatcagcctccagaagcagaactcagacatgcaggctgagctccaaaagaagcaggaggagctagaaaccctacagagcatcaataagaagttggaactgaaagtgaaagaacagaaggactattgggagacagagctgcttcaactgaaagaacaaaaccagaagatgtcctcagaaaatgagaagatgrgaatcagagtggatcagcttcaggcccagctgtcaactcaagagaaagaaatggagaagcttgytcagggagatcaagataagacagagcagttagagcagctgaaaaaggaaaatgaccacctctttctcagtttaactgaacagaggaaggaccagaagaagctcgagcagacagtggagcaaatgaagcagaatgaaactactgcaatgaagaaacaacaggaattaatggatgaaaactttgacctgtcaaaaagactgagtgagaacgaaattatatgtaatgctctgcagagacagaaagagagattggaaggagaaaatgatcttttgaagagggagaacagcagattgctcagttacatgggtctggattttaattctttgccgtatcaagtacctacttcagatgaaggaggcgcaagacaaaatccaggacttgcctatggaaacccatattctggtatccaagaaagttcttccsccagcccgctctccatcaagaaatgccctatctgcaaagcagatgatatttgtgatcacaccttggagcaacagcagatgcagcccctttgyttcaattgtccaatttgtgacaagatcttcccagctacagagaagcagatctttgaagaccacgtgttctgccactctctctgagtatcccaacctcttggatgtatacagagattttatagaatagaacctrtagcttctaccatgagttatatgagtcaagatcctgcctaacctgaaattattagggatttactcagccctgctgccgctaacagtggagttatgtcactgatctgaaggtcactgttaagggcttctgctgccatccttgtgggttgctacctttaagtcgcataactctagctgtatcatcctctcacctgtcattcttctgagggtctcagtacaagggccctgggatggagccaacctgggtattcacaacaggcctgacttgatactaagtgattagttttccaagttgtcccactgccattcaaagtcagcccttgagtgtatttgttctcagtcctaaccctggggccagagattggtccgaggttgagaattccttcctcctcatccttggtgttgctttctccaaatgattgttttagactagccaaaaatgccgtggcaaagagctcagaaatccaatttggataccaaaggtttctcatgttaatttctcagcccccaaagaagcatcttactcctgaaccttagacaggaagtattgtttcagtcacagaaagcttttctgggtacctctggttagcactttctactctctgatatttcctatgtacatagcttttattgttgtaaatcctttcttaatggttaaataggattgttagcaactatgggtttgcagttttctgagtaggtgagttttgaatatgggtaaatcagaataatgagacaacttgttaatctctttaatactaaaaataaattactcttctatttcagggacttaggtaatttaaaataaaccttcaatttatggtcttctrttttgaagctcatgggaaaattgtgatcaaaagggctatgggaagggcagaccccgccaatgatttctcttcacctgtcttaagattaaataaaaaagagtgtcctggcagttatcttgaggtggggaaggaggtgatgaaacattagtttgtgaaatccaaggccctggcttkctttctttcttttttttttttttttttttgaaacagtctctctctgtcacccaggctggcgtgcaatggcgcagttgactcactacagcctctgcctcccaggttcaagcgattctcatgccttagcctcccaagtagctgggattacaggtgtgtgccrcaatgcccagctaatttttgtgtttttagtagagacagggtttcactatgttggccaggctggtctcgaactcctggcctcacgtgatctgtccacttcagccstccaaagtgctgggattacaagcgtgagccactgtgctgggcccgaggccctgacttcttgctgtaactttccatgcattttttttaaaaggagcagtgtggattttcgcaccctttgtgaactaagttcaatgygctctatccaaatttgcctaattgaactataagaaagtaataattccattttctatcccctcagggactgaacaaatggaaataactcccaggcagtatcaggtggtcactacagagacttccacaaaaacttttgaatgatgtgaaacacgatgtcatgaataagggttgagccaactatagctctgtgttcctactgggctttccctaatgtggttgggagttatgccctagactaactgtattgtcctagtcacagctccttgctttgatttcatccttgataaaatgaagatgaaactt

SEQ ID NO: 296 - DNA, 3196 bp, Homo sapiens
caggcgggwcgggctctcccttgggtgcttagccccgcccccgtcccactctgccctgttgctgtcgcgccgctgctggttgctgtccctggacccctaccatggaggagaccatcaaagatccccccacatcagctgtcttgctggatcactgtcatttctctcaggtcatctttaacagtgtggagaagttctacatccctggaggggacgtcacatgtcattataccttcacccagcatttcatccctcgtcgaaaggattggattggcatctttagagtggggtggaagacaacccgtgagtattacaccttcatgtgggttactttgcccattgacctaaacaacaaatcagctaaacagcaggaagtccaattcaaagcttactacctgcccaaggatgatgagtattaccagttctgctatgtggatgaggatggtgtggtccggggagcaagtattcctttccaattccgtccagaaaatgaggaagacatcctggttgttaccactcaggragaggtggaagagattgagcagcacaacaaggagctttgcaaagaaaaccaggagctgaaggacagctgtatcagcctccagaagcagaactcagacatgcaggctgagctccaaaagaagcaggaggagctagaaaccctacagagcatcaataagaagttggaactgaaagtgaaagaacagaaggactattgggagacagagctgcttcaactgaaagaacaaaaccagaagatgtcctcagaaaatgagaagatgrgaatcagagtggatcagcttcaggcccagctgtcaactcaagagaaagaaatggagaagcttgytcagggagatcaagataagacagagcagttagagcagctgaaaaaggaaaatgaccacctctttctcagtttaactgaacagaggaaggaccagaagaagctcgagcagacagtggagcaaatgaagcagaatgaaactactgcaatgaagaaacaacaggaattaatggatgaaaactttgacctgtcaaaaagactgagtgagaacgaaattatatgtaatgctctgcagagacagaaagagagattggaaggagaaaatgatcttttgaagagggagaacagcagattgctcagttacatgggtctggattttaattctttgccgtatcaagtacctacttcagatgaaggaggcgcaagacaaaatccaggacttgcctatggaaacccatattctggtatccaagaaagttcttccsccagcccgctctccatcaagaaatgccctatctgcaaagcagatgatatttgtgatcacaccttggagcaacagcagatgcagcccctttgyttcaattgtccaatttgtgacaagatcttcccagctacagagaagcagatctttgaagaccacgtgttctgccactctctctgagtatcccaacctcttggatgtatacagagattttatagaatagaacctrtagcttctaccatgagttatatgagtcaagatcctgcctaacctgaaattattagggatttactcagccctgctgccgctaacagtggagttatgtcactgatctgaaggtcactgttaagggcttctgctgccatccttgtgggttgctacctttaagtcgcataactctagctgtatcatcctctcacctgtcattcttctgagggtctcagtacaagggccctgggatggagccaacctgggtattcacaacaggcctgacttgatactaagtgattagttttccaagttgtcccactgccattcaaagtcagcccttgagtgtatttgttctcagtcctaaccctggggccagagattggtccgaggttgagaattccttcctcctcatccttggtgttgctttctccaaatgattgttttagactagccaaaaatgccgtggcaaagagctcagaaatccaatttggataccaaaggtttctcatgttaatttctcagcccccaaagaagcatcttactcctgaaccttagacaggaagtattgtttcagtcacagaaagcttttctgggtacctctggttagcactttctactctctgatatttcctatgtacatagcttttattgttgtaaatcctttcttaatggttaaataggattgttagcaactatgggtttgcagttttctgagtaggtgagttttgaatatgggtaaatcagaataatgagacaacttgttaatctctttaatactaaaaataaattactcttctatttcagggacttaggtaatttaaaataaaccttcaatttatggtcttctrttttgaagctcatgggaaaattgtgatcaaaagggctatgggaagggcagaccccgccaatgatttctcttcacctgtcttaagattaaataaaaaagagtgtcctggcagttatcttgaggtggggaaggaggtgatgaaacattagtttgtgaaatccaaggccctggcttkctttctttcttttttttttttttttttttgaaacagtctctctctgtcacccaggctggcgtgcaatggcgcagttgactcactacagcctctgcctcccaggttcaagcgattctcatgccttagcctcccaagtagctgggattacaggtgtgtgccrcaatgcccagctaatttttgtgtttttagtagagacagggtttcactatgttggccaggctggtctcgaactcctggcctcacgtgatctgtccacttcagccstccaaagtgctgggattacaagcgtgagccactgtgctgggcccgaggccctgacttcttgctgtaactttccatgcattttttttaaaaggagcagtgtggattttcgcaccctttgtgaactaagttcaatgygctctatccaaatttgcctaattgaactataagaaagtaataattccattttctatcccctcagggactgaacaaatggaaataactcccaggcagtatcaggtggtcactacagagacttccacaaaaacttttgaatgatgtgaaacacgatgtcatgaataagggttgagccaactatagctctgtgttcctactgggctttccctaatgtggttgggagttatgccctagactaactgtattgtcctagtcacagctccttgctttgatttcatccttgataaaatgaagatgaaactt

SEQ ID NO: 297 - DNA, 3710 bp, Homo sapiens
gagcgacagagcgagactctgtctcaaaaacaaataaaggaaaaagaaaaaaatgagaagcgcgtgttcccgactccggtgctttttcgcaaggtcgtgctactgcgccttctgaactacgagtcccaggcaccccccgagcccagctccacacaccgttcctggatctcctctccccaggcrgagcgtgcccctgcccagtccagygaccttcgcctgttggagccctggttaatttttgcccagtctgcctgttgtggggctcctcccctttggggatataagcccggcctggggctgctccgttctctgcctggcctgaggctccstgagccgcctccccaccatcaccatggccaagggcttctatatttccaagtccctgggcatcctggggatcctcctgggcgtggcagccgtgtgcacaatcatcgcactgtcagtggtgtactcccaggagaagaacaagaacgccaacagctcccccgtggcctccaccaccccgtccgcctcagccaccaccaaccccgcctcggccaccacmttggaccaaagtaaagcgtggaatcgttaccgcctccccaacacgctgaaacccgattcctaccrggtgacgctgagaccgtacctcacccccaatgacaggggcctgtacgtttttaagggctccagcaccgtccgtttcacctgcaaggaggccactgaygtcatcatcatccacagcaagaagctcaactacaccctcagccaggggcacagggtggtcctgcgtggtgtgggaggctcccagccccccgacattgacaagactgagctggtggagcccaccgagtacctggtggtgcacctcaagggctccctggtgaaggacagccagtatgagatggacagcgagttcgagggggagttggcagatgacctggcgggcttctaccgcagcgagtacatggagggcaatgtcagaaaggtggtggccactacacagatgcaggctgcagatgcccggaagtccttcccatgcttcgatgagccggccatgaaggccgagttcaacatcacgcttatccaccccaaggacctgacagccctgtccaacatgcttcccaaaggtcccagcaccccacttccagaagaccccaactggaatgtcactgagttccacaccacgcccaagatgtccacgtacttgctggccttcattgtcagtgagttcgactacgtggagaagcaggcatccaatggtgtcttgatccggatctgggcccggcccagtgccattgcggygggccacggcgattatgccctkaacgtgacrggccccatccttaacttctttgctggtcattatgacacaccctacccactcccaaaatcagaccagattggcctgccagacttcaacgccggcgccatggagaactggggactggtgacctaccgggagaactccctgctrttcgaccccctgtcctcctccagcagcaacaaggagcgggtggtcactgtgattgctcatgagctggcccaccagtggttcgggaacctggtgaccatagagtggtggaatgacctgtggctgaacgagggcttcgcctcctacgtggagtacctgggtgstgactatgcggagcccacctggaacttgaaagacctcatggtgctgaatgatgtgtaccgcgtgatggcagtggatgcactggcctcctcccacccgctgtccacacccgcctcggagatcaacacgccggcccagatcagtgagctgtttgacgccatctcctacagcaagggcgcctcagtcctcaggatgctctccagcttcctgtccgaggacgtattcaagcagggcctggcgtcctacctccacacctttgcctaccagaacaccatctacctgaacctgtgggaccacctgcaggaggctgtgaacaaccggtccatccaactccccaccaccgtgcgggacatcatgaacygctggaccctgcagatgggcttcccggtcatcacggtggataccagcacggggaccctttcccaggagcacttcctccttgaccccgattccaatgttacccgcccctcagaattcaactacgtgtggattgtgcccatcacatccatcagagatggcagacagcagcaggactactggctgatrgatgtaagagcccagaacgatctcttcagcacatcaggcaatgagtgggtcctgctgaacctcaatgtgacgggctattaccgggtgaactacgacgaagagaactggaggaagattcagactcagctgcagagagaccactcggccatccctgtcatcaatcgggcacagatcattaatgacgccttcaacctggccagtgcccataaggtccctgtcactctggcgctgaacaacascctcttcctgattgaagagagacagtacatgccctgggaggccgccctgagcagcctgagctacttcaagctcatgtttgaccgctccgaggtctatkgccccatgaagaactacctgaagaagcaggtcacacccctcttcattcacttcagaaataataccaacaactggagggagatcccagaaaacctgatggaccagtacarcgaggttaatgccatcagcaccgcctgctccaacggagttccagagtgtgaggaratggtctctggccttttcaagcagtggatggagaaccccaataataacccgatccaccccaacctgcggtccacygtctactgcaacgctatcgcccagggcggggaggaggagtgggacttcgcctgggagcagttccgaaatgccacactggtcaatgaggctgacaagctccgggcagccctggcctgcagcaaagagttgtggatcctgaacaggtacctgagctacacmctgaacccggacttaatccggaagcaggacgccacctctaccatcatcagcattaccaacaacgtcatygggcaaggtctgrtctgggactttgtccagagcaactggaagaagctttttaacgattatggtggtggctcgttctccttctccaacctcatccaggcagtgacacgacgattctcmaccgagtatgagctgcagcagctggagcagttcaagaaggacaacgaggaaacaggcttcggctcaggcacccgggccctggagcaagccctggagaagacgaaagccaacatcaagtgggtgaaggagaacaaggaggtggtgctccagtggttcacagaaaacagcaaatagtccccagcccttgaagtcaccsggccccbatgcaaggtgcccacatgtgtccatcccagcggmtggtgcagggcctccattcctggagcccgaggcaccagtgtcctcccctcaaggacaaagtctccagcccacgttctctctgcctgtgagccagtctagttcctgatgacccaggctgcctgagcacctcccagcccctgcccctcatgccaaccccgccctaggcctggcatggcacctgtcgcccagtgccctggggctgatctcagggragcccagctccagggccagatgagcagaagctctcgatggacaatgaacggccttgctgggggccgccctgtaccctctttcacctttccctaaagaccctaaatctgaggaatcaacagggcagcagatctgtatatttttttctaagagaaaatgtaaataaaggatttctagatga

SEQ ID NO: 298 - DNA, 3581 bp, Homo sapiens
gcaccccccgagcccagctccacacaccgttcctggatctcctctccccaggcrgagcgtgcccctgcccagtccagygaccttcgcctgttggagccctggttaatttttgcccagtctgcctgttgtggggctcctcccctttggggatataagcccggcctggggctgctccgttctctgcctggcctgaggctccstgagccgcctccccaccatcaccatggccaagggcttctatatttccaagtccctgggcatcctggggatcctcctgggcgtggcagccgtgtgcacaatcatcgcactgtcagtggtgtactcccaggagaagaacaagaacgccaacagctcccccgtggcctccaccaccccgtccgcctcagccaccaccaaccccgcctcggccaccacmttggaccaaagtaaagcgtggaatcgttaccgcctccccaacacgctgaaacccgattcctaccrggtgacgctgagaccgtacctcacccccaatgacaggggcctgtacgtttttaagggctccagcaccgtccgtttcacctgcaaggaggccactgaygtcatcatcatccacagcaagaagctcaactacaccctcagccaggggcacagggtggtcctgcgtggtgtgggaggctcccagccccccgacattgacaagactgagctggtggagcccaccgagtacctggtggtgcacctcaagggctccctggtgaaggacagccagtatgagatggacagcgagttcgagggggagttggcagatgacctggcgggcttctaccgcagcgagtacatggagggcaatgtcagaaaggtggtggccactacacagatgcaggctgcagatgcccggaagtccttcccatgcttcgatgagccggccatgaaggccgagttcaacatcacgcttatccaccccaaggacctgacagccctgtccaacatgcttcccaaaggtcccagcaccccacttccagaagaccccaactggaatgtcactgagttccacaccacgcccaagatgtccacgtacttgctggccttcattgtcagtgagttcgactacgtggagaagcaggcatccaatggtgtcttgatccggatctgggcccggcccagtgccattgcggygggccacggcgattatgccctkaacgtgacrggccccatccttaacttctttgctggtcattatgacacaccctacccactcccaaaatcagaccagattggcctgccagacttcaacgccggcgccatggagaactggggactggtgacctaccgggagaactccctgctrttcgaccccctgtcctcctccagcagcaacaaggagcgggtggtcactgtgattgctcatgagctggcccaccagtggttcgggaacctggtgaccatagagtggtggaatgacctgtggctgaacgagggcttcgcctcctacgtggagtacctgggtgstgactatgcggagcccacctggaacttgaaagacctcatggtgctgaatgatgtgtaccgcgtgatggcagtggatgcactggcctcctcccacccgctgtccacacccgcctcggagatcaacacgccggcccagatcagtgagctgtttgacgccatctcctacagcaagggcgcctcagtcctcaggatgctctccagcttcctgtccgaggacgtattcaagcagggcctggcgtcctacctccacacctttgcctaccagaacaccatctacctgaacctgtgggaccacctgcaggaggctgtgaacaaccggtccatccaactccccaccaccgtgcgggacatcatgaacygctggaccctgcagatgggcttcccggtcatcacggtggataccagcacggggaccctttcccaggagcacttcctccttgaccccgattccaatgttacccgcccctcagaattcaactacgtgtggattgtgcccatcacatccatcagagatggcagacagcagcaggactactggctgatrgatgtaagagcccagaacgatctcttcagcacatcaggcaatgagtgggtcctgctgaacctcaatgtgacgggctattaccgggtgaactacgacgaagagaactggaggaagattcagactcagctgcagagagaccactcggccatccctgtcatcaatcgggcacagatcattaatgacgccttcaacctggccagtgcccataaggtccctgtcactctggcgctgaacaacascctcttcctgattgaagagagacagtacatgccctgggaggccgccctgagcagcctgagctacttcaagctcatgtttgaccgctccgaggtctatkgccccatgaagaactacctgaagaagcaggtcacacccctcttcattcacttcagaaataataccaacaactggagggagatcccagaaaacctgatggaccagtacarcgaggttaatgccatcagcaccgcctgctccaacggagttccagagtgtgaggaratggtctctggccttttcaagcagtggatggagaaccccaataataacccgatccaccccaacctgcggtccacygtctactgcaacgctatcgcccagggcggggaggaggagtgggacttcgcctgggagcagttccgaaatgccacactggtcaatgaggctgacaagctccgggcagccctggcctgcagcaaagagttgtggatcctgaacaggtacctgagctacacmctgaacccggacttaatccggaagcaggacgccacctctaccatcatcagcattaccaacaacgtcatygggcaaggtctgrtctgggactttgtccagagcaactggaagaagctttttaacgattatggtggtggctcgttctccttctccaacctcatccaggcagtgacacgacgattctcmaccgagtatgagctgcagcagctggagcagttcaagaaggacaacgaggaaacaggcttcggctcaggcacccgggccctggagcaagccctggagaagacgaaagccaacatcaagtgggtgaaggagaacaaggaggtggtgctccagtggttcacagaaaacagcaaatagtccccagcccttgaagtcaccsggccccbatgcaaggtgcccacatgtgtccatcccagcggmtggtgcagggcctccattcctggagcccgaggcaccagtgtcctcccctcaaggacaaagtctccagcccacgttctctctgcctgtgagccagtctagttcctgatgacccaggctgcctgagcacctcccagcccctgcccctcatgccaaccccgccctaggcctggcatggcacctgtcgcccagtgccctggggctgatctcagggragcccagctccagggccagatgagcagaagctctcgatggacaatgaacggccttgctgggggccgccctgtaccctctttcacctttccctaaagaccctaaatctgaggaatcaacagggcagcagatctgtatatttttttctaagagaaaatgtaaataaaggatttctagatga

SEQ ID NO: 299 - DNA, 3508 bp, Homo sapiens
gagcgacagagcgagactctgtctcaaaaacaaataaaggaaaaagaaaaaaatgagaagcgcgtgttcccgactccggtgctttttcgcaaggtcgtgctactgcgccttctgaactacgagtcccaggcaccccccgagcccagctccacacaccgttcctggatctcctctccccaggcrgagcgtgcccctgcccagtccagygaccttcgcctgttggagccctggttaatttttgcccagtctgcctgttgtggggctcctcccctttggggatataagcccggcctggggctgctccgttctctgcctggcctgaggctccstgagccgcctccccaccatcaccatggccaagggcttctatatttccaagtccctgggcatcctggggatcctcctgggcgtggcagccgtgtgcacaatcatcgcactgtcagtggtgtactcccaggagaagaacaagaacgccaacagctcccccgtggcctccaccaccccgtccgcctcagccaccaccaaccccgcctcggccaccacmttggaccaaagtaaagcgtggaatcgttaccgcctccccaacacgctgaaacccgattcctaccrggtgacgctgagaccgtacctcacccccaatgacaggggcctgtacgtttttaagggctccagcaccgtccgtttcacctgcaaggaggccactgaygtcatcatcatccacagcaagaagctcaactacaccctcagccaggggcacagggtggtcctgcgtggtgtgggaggctcccagccccccgacattgacaagactgagctggtggagcccaccgagtacctggtggtgcacctcaagggctccctggtgaaggacagccagtatgagatggacagcgagttcgagggggagttggcagatgacctggcgggcttctaccgcagcgagtacatggagggcaatgtcagaaaggtggtggccactacacagatgcaggctgcagatgcccggaagtccttcccatgcttcgatgagccggccatgaaggccgagttcaacatcacgcttatccaccccaaggacctgacagccctgtccaacatgcttcccaaaggtcccagcaccccacttccagaagaccccaactggaatgtcactgagttccacaccacgcccaagatgtccacgtacttgctggccttcattgtcagtgagttcgactacgtggagaagcaggcatccaatggtgtcttgatccggatctgggcccggcccagtgccattgcggygggccacggcgattatgccctkaacgtgacrggccccatccttaacttctttgctggtcattatgacacaccctacccactcccaaaatcagaccagattggcctgccagacttcaacgccggcgccatggagaactggggactggtgacctaccgggagaactccctgctrttcgaccccctgtcctcctccagcagcaacaaggagcgggtggtcactgtgattgctcatgagctggcccaccagtggttcgggaacctggtgaccatagagtggtggaatgacctgtggctgaacgagggcttcgcctcctacgtggagtacctgggtgstgactatgcggagcccacctggaacttgaaagacctcatggtgctgaatgatgtgtaccgcgtgatggcagtggatgcactggcctcctcccacccgctgtccacacccgcctcggagatcaacacgccggcccagatcagtgagctgtttgacgccatctcctacagcaagggcgcctcagtcctcaggatgctctccagcttcctgtccgaggacgtattcaagcagggcctggcgtcctacctccacacctttgcctaccagaacaccatctacctgaacctgtgggaccacctgcaggaggctgtgaacaaccggtccatccaactccccaccaccgtgcgggacatcatgaacygctggaccctgcagatgggcttcccggtcatcacggtggataccagcacggggaccctttcccaggagcacttcctccttgaccccgattccaatgttacccgcccctcagaattcaactacgtgtggattgtgcccatcacatccatcagagatggcagacagcagcaggactactggctgatrgatgtaagagcccagaacgatctcttcagcacatcaggcaatgagtgggtcctgctgaacctcaatgtgacgggctattaccgggtgaactacgacgaagagaactggaggaagattcagactcagctgcagagagaccactcggccatccctgtcatcaatcgggcacagatcattaatgacgccttcaacctggccagtgcccataaggtccctgtcactctggcgctgaacaacascctcttcctgattgaagagagacagtacatgccctgggaggccgccctgagcagcctgagctacttcaagctcatgtttgaccgctccgaggtctatkgccccatgaagaactacctgaagaagcaggtcacacccctcttcattcacttcagaaataataccaacaactggagggagatcccagaaaacctgatggaccagtacarcgaggttaatgccatcagcaccgcctgctccaacggagttccagagtgtgaggaratggtctctggccttttcaagcagtggatggagaaccccaataataacccgatccaccccaacctgcggtccacygtctactgcaacgctatcgcccagggcggggaggaggagtgggacttcgcctgggagcagttccgaaatgccacactggtcaatgaggctgacaagctccgggcagccctggcctgcagcaaagagttgtggatcctgaacaggtacctgagctacacmctgaacccggacttaatccggaagcaggacgccacctctaccatcatcagcattaccaacaacgtcatygggcaaggtctgrtctgggactttgtccagagcaactggaagaagctttttaacgattatggtggtggctcgttctccttctccaacctcatccaggcagtgacacgacgattctcmaccgagtatgagctgcagcagctggagcagttcaagaaggacaacgaggaaacaggcttcggctcaggcacccgggccctggagcaagccctggagaagacgaaagccaacatcaagtgggtgaaggagaacaaggaggtggtgctccagtggttcacagaaaacagcaaatagtccccagcccttgaagtcaccsggccccbatgcaaggcacctgtcgcccagtgccctggggctgatctcagggragcccagctccagggccagatgagcagaagctctcgatggacaatgaacggccttgctgggggccgccctgtaccctctttcacctttccctaaagaccctaaatctgaggaatcaacagggcagcagatctgtatatttttttctaagagaaaatgtaaataaaggatttctagatg

SEQ ID NO: 300 - DNA, 968 bp, Homo sapiens
ggtaaatatgtgttcattaactgagattaaccttccctgagttttctcacaccaaggtgaggaccatgtccctgtttccatcactccctctccttctcctgagtatggtggcagcgtcttactcagaaactgtgacctgtgaggatgcccaaaagacctgccctgcagtgattgcctgtagctctccaggcatcaayggcttcccaggcaaagatgggygtgatgrcaccaaggragaaaagggggaaccaggccaagggctcagaggcttacagggcccccctggaaagttggggcctccaggaaatccagggccttctgggtcaccaggaccaaagggccaaaaaggagaccctggaaaaagtccggatggtgatagtagcctggctgcctcagaaagaaaagctctgcaaacagaaatggcacgtatcaaaaagtggctsaccttctctctgggcaaacaagttgggaacaagttcttcctgaccaatggtgaaataatgacctttgaaaaagtgaaggccttgtgtgtcaagttccaggcctctgtggccacccccaggaatgctgcagagaatggagccattcagaatctcatcaaggaggaagccttcctgggcatcactgatgagaagacagaagggcagtttgtggatctgacaggaaatagactgacctacacaaactggaacgagggtgaacccaacaatgctggttctgatgaagattgtgtattgctactgaaaaatggccagtggaatgacgtcccctgctccacctcccatctggccgtctgtgagttccctatctgaagggtcatatcactcaggccctccttgtctttttactgcaacccacaggcccacagtatgcttgaaaagataaattatatcaatttcctcatatccagtattgttccttttgtgggcaatcactaaaacagcagtagtagtcatgctaattatata

SEQ ID NO: 301 - DNA, 3568 bp, Homo sapiens
ggtaaatatgtgttcattaactgagattaaccttccctgagttttctcacaccaaggtgaggaccatgtccctgtttccatcactccctctccttctcctgagtatggtggcagcgtcttactcagaaactgtgacctgtgaggatgcccaaaagacctgccctgcagtgattgcctgtagctctccaggcatcaayggcttcccaggcaaagatgggygtgatgrcaccaaggragaaaagggggaaccaggccaagggctcagaggcttacagggcccccctggaaagttggggcctccaggaaatccagggccttctgggtcaccaggaccaaagggccaaaaaggagaccctggaaaaagtccggatggtgatagtagcctggctgcctcagaaagaaaagctctgcaaacagaaatggcacgtatcaaaaagtggctsaccttctctctgggcaaacaagttgggaacaagttcttcctgaccaatggtgaaataatgacctttgaaaaagtgaaggccttgtgtgtcaagttccaggcctctgtggccacccccaggaatgctgcagagaatggagccattcagaatctcatcaaggaggaagccttcctgggcatcactgatgagaagacagaagggcagtttgtggatctgacaggaaatagactgacctacacaaactggaacgagggtgaacccaacaatgctggttctgatgaagattgtgtattgctactgaaaaatggccagtggaatgacgtcccctgctccacctcccatctggccgtctgtgagttccctatctgaagggtcatatcactcaggccctccttgtctttttactgcaacccacaggcccacagtatgcttgaaaagataaattatatcaatttcctcatatccagtattgttccttttgtgggcaatcactaaaaatgatcactaacagcaccaacaaagcaataatagtagtagtagtagttagcagcagcagtagtagtcatgctaattatataatatttttaatatatactatgaggccctatcttttgcatcctacattaattatctagtttaattaatctgtaatgctttcgatagtgttaacttgctgcagtatgaaaataagacggatttatttttccatttacaacaaacacctgtgctctgttgagccttcctttctgtttgggtagagggctcccctaatgacatcaccacagtttaataccacagctttttaccaagtttcaggtattaagaaaatctattttgtaactttctctatgaactctgttttctttctaatgagatattaaaccatgtaaagaacataaataacaaatctcaagcaaacagcttcacaaattctcacacacatacatacctatatactcactttctagattaagatatgggacatttttgactccctagaagccccgttataactcctcctagtactaactcctaggaaaatactattctgacctccatgactgcacagtaatttcgtctgtttataaacattgtatagttggaatcatattgtgtgtaatgttgtatgtcttgyttactcagaattaagtctgtgagattcattcatgtcatgtgtacaaaagtttcatccttttcattgccatgtagggttcccttatattaatattcctcagttcatccattctattgttaataggcacttaagtggcttccaatttttggccatgaggaagagaacccacgaacattcctggacttgtcttttggtggacatggtgcactaatttcactacctatccaggagtggaactggtagaggatgaggaaagcatgtattcagctttagtagatattaccagttttcctaagtgattgtatgaatttatgctcctaccggcaatgtgtggcagtcctagatgctctatgtgcttgtaaaaagtcratgttttcagttctcttgattttcattattcctgtggatgtaaagtgatatttccccatggttttaatctgtatttccccaacatgtaataaggttgaacacttttttatatgcttattgggcacttgggtatcttcttytgtgaagtacccgttcacatttttgtattttgtttaaattagttagccaatatttttcttactgatttttaagttatttttacattctgaatatgtcctttttaatgtgtattacaaatattttgctagtttttgacttgctcctaatgttgaattttgatgaacaaaatttcctaattttgagaaagtcttatttattcatattttctttcaaaattagtgctttttgtgtcatgtttaagaaatttttgcccatcccaaaatcataagatatttttcatgattttgaaaccatgaagagatttttcatgattttgaaatcatgaagatatttttccatttttttctaatagttttattaataaacattctatctattcctggtagaatagatatccacttgagacagcactatrtaggaaagaccatttttcctccactgaactagggtggtgcatttttgtaagttaggtaactgtatgtgtgtgtgtctgtttctgggctgtctattctagtctatttgttgatgcttgtgtcaaacagtacactatcttaattattgtacatttatagttgtaactrtagtccagctttgttcttcttmaagtcaagatttccatataaatattagaaacagyttctcaatttctacaaaatcctgatgaggtttctactgggaccacattgagtctatcaatcaacttatgcagaactggcaacttactactgaatctctaatcaatgttcatcatgtatcgcttcatktaactagratttctttaacttaattgctatgttttgacatttttagtttaaaaaccttgtatatcttgttttggtggttttagtgattttaataatatattttaaatattttttcttttctattgttgtacacagaaatacagttaagttttgtgtgtagtcttacgatgtttagtaamctcaataagtttatttcttaaatctagtaatttgtagattcctctggattttgtatatgcatagtcatgtaagctgaaaatatggcaatacttgcttcttcccaattgctttaccttttttcttaccttattgcactggttagcaaccccaatacagagaccaccagakcaggtatagactcctgaaagacaatataatgaagtgctccagtcaggcctatctaaactggattcacagctctgtcacttaattgctacatgatctagagccagttactttktgtttcagccatgtatttgcagctgagagaaaataatcattcttatttcatgaaaattgtggggatgatgaaataagttaacacctttaaagtgtgtagtaaagtatcaggatactatattttaggtcttaatacacacagttatgccgctagatacatgctttttaatgagataatgtgatattatacataacacatatcgatttttaaaaattaaatcaaccttgctttgatggaataaactccatttagtcac

SEQ ID NO: 302 - DNA, 2221 bp, Homo sapiens
gagctccagcctccaggcacccgggatccagcgccgccgctcataacacccgcgaccccgcagctaagcgcagctcccgacgcaatggacccggcgctggcagcccagatgagcgaggctgtggccgagaagatgctccagtaccggcgggacacagcaggctggaagatttgccgggaaggcgtaccgaggagaaggcattgtatatgggacactagaggaggtgtgggactgtgtgaagccagctgttggargcctacgagtgaagtgggatgagaatgtgaccggttttgaaattatccaaagcatcactgacaccctgtgtgtaagcagaacctccactccctccgctgccatgaagctcatttctcccagagattttgtggacttggtgctagtcaagagatatgaggatgggaccatcagttccaacgccacccatgtggagcatccgttatgtcccccgaagccaggttttgtgagaggatttaaccatccttktggttgcttctgtgaacctcttccaggggaacccaccaagaccaacctggtcacattcttccataccgacctcagcggttacctcccacagaacgtggtggactccttcttcccccgcagcatgacccggttttatgccaaccttcagaaagcagtgaagcaattccatgagtaatgctatcgttacttcttggcaaagaactcccgtgactcatcgaggagctccagctgttgggacaccaaggagcctgggagcacgcagaggcctgtgttcactctttggaacaagctgatggactgcgcatctctgagaatgccaaccagaggcggcagcccacccttcctgcctcctgccccactcagggttggcrtgtgatgagccattcatgtgttccaaactccatctgcctgttacccaaacacgcctctcctggcagggtagacccaggcctctaaccatctgacagagactcggcctggacaccatgcgatgcactctggcaccaaggctttatgtgcccatcactctcagagaccacgtttccctgactgtcatagagaatcatcatcgccactgaaaaccaggccctgttgccttttaagcatgtaccgctccctcagtcctgtgctgcagccccccaaatatatttttctgatatagaccttgtatatrgctttaatgccgcaaaatatttatttttccttaaaaaaggtgtcaacttggaaataatggtttaaaaacaggataagcattaaggaaaaacactttcaatgtgtcttccatttgatgaatttgtttttctctctttatccccgcaaggtggagtttcatgtcctcggtgaaaccagacagtgtgaatctgttccagcccaaatctgcagcattagggatgagttctcrgaagtgattctgaactgagcacgcactcatgtctgcatggggaactctggggagaagagccttccttttctttcccttgggcatttgcctttccttgtcgtcttactgaggcggaggcaggaggtctctgtcttccaggccctggccaggccatcctgccatcaggaaagatggaagagtaggcctccgtctagcagccctggctggaaatcccccctctagatcctgctgcaagactgtacaaactcacaggggccatgtccacccaggcacatcatcagaaccagggagcacagccttgccacctagaaggggcctcagcagccgtgcaactttctttccctatctccaatccagagagggatcctctaacattctctagcaacctcatctgcacccccaccaccttccttgtaagaaagaccacgtgtgactaaaatcccttcacgctgcatttacccaggttactattgtgcgcgcarratgttttcacagtgttctcagcctttgctcctccaaacagaaaaygtttcccctgcgttactgttacttccctatttttgagtcctggggtgactgtctcttaaatgtgccaagatgtgagcaagctttaaaacatgacagctcagtgttaaggagacagaaagcttcctctttctctgttctattgcaactacaaattctacagtcatgcctaagatcctttagctaacacccttttcaagaaatcatcagactcytggattgacttagaattcattcattcrttaagtgcttaccgagtcccygctctgtggcaagcactgttctatatcaact

SEQ ID NO: 303 - DNA, 2213 bp, Homo sapiens
cgcagctaagcgcagctcccgacgcaatggacccggcgctggcagcccagatgagcgaggctgtggccgagaagatgctccagtaccggcgggacacagcaggctggaagatttgccgggaaggcaatggagtttcagtttcctggaggccatctgtggagtttccagggaacctgtaccgaggagaaggcattgtatatgggacactagaggaggtgtgggactgtgtgaagccagctgttggargcctacgagtgaagtgggatgagaatgtgaccggttttgaaattatccaaagcatcactgacaccctgtgtgtaagcagaacctccactccctccgctgccatgaagctcatttctcccagagattttgtggacttggtgctagtcaagagatatgaggatgggaccatcagttccaacgccacccatgtggagcatccgttatgtcccccgaagccaggttttgtgagaggatttaaccatccttktggttgcttctgtgaacctcttccaggggaacccaccaagaccaacctggtcacattcttccataccgacctcagcggttacctcccacagaacgtggtggactccttcttcccccgcagcatgacccggttttatgccaaccttcagaaagcagtgaagcaattccatgagtaatgctatcgttacttcttggcaaagaactcccgtgactcatcgaggagctccagctgttgggacaccaaggagcctgggagcacgcagaggcctgtgttcactctttggaacaagctgatggactgcgcatctctgagaatgccaaccagaggcggcagcccacccttcctgcctcctgccccactcagggttggcrtgtgatgagccattcatgtgttccaaactccatctgcctgttacccaaacacgcctctcctggcagggtagacccaggcctctaaccatctgacagagactcggcctggacaccatgcgatgcactctggcaccaaggctttatgtgcccatcactctcagagaccacgtttccctgactgtcatagagaatcatcatcgccactgaaaaccaggccctgttgccttttaagcatgtaccgctccctcagtcctgtgctgcagccccccaaatatatttttctgatatagaccttgtatatrgctttaatgccgcaaaatatttatttttccttaaaaaaggtgtcaacttggaaataatggtttaaaaacaggataagcattaaggaaaaacactttcaatgtgtcttccatttgatgaatttgtttttctctctttatccccgcaaggtggagtttcatgtcctcggtgaaaccagacagtgtgaatctgttccagcccaaatctgcagcattagggatgagttctcrgaagtgattctgaactgagcacgcactcatgtctgcatggggaactctggggagaagagccttccttttctttcccttgggcatttgcctttccttgtcgtcttactgaggcggaggcaggaggtctctgtcttccaggccctggccaggccatcctgccatcaggaaagatggaagagtaggcctccgtctagcagccctggctggaaatcccccctctagatcctgctgcaagactgtacaaactcacaggggccatgtccacccaggcacatcatcagaaccagggagcacagccttgccacctagaaggggcctcagcagccgtgcaactttctttccctatctccaatccagagagggatcctctaacattctctagcaacctcatctgcacccccaccaccttccttgtaagaaagaccacgtgtgactaaaatcccttcacgctgcatttacccaggttactattgtgcgcgcarratgttttcacagtgttctcagcctttgctcctccaaacagaaaaygtttcccctgcgttactgttacttccctatttttgagtcctggggtgactgtctcttaaatgtgccaagatgtgagcaagctttaaaacatgacagctcagtgttaaggagacagaaagcttcctctttctctgttctattgcaactacaaattctacagtcatgcctaagatcctttagctaacacccttttcaagaaatcatcagactcytggattgacttagaattcattcattcrttaagtgcttaccgagtcccygctctgtggcaagcactgttctatatcaact

SEQ ID NO: 304 - DNA, 2570 bp, Homo sapiens
gacatgccccgcggcgcgccattaaccgccagatttgaatcgcsggacccgttggcagaggtggcggcggcggcatgggtgccccgacgttgccccctgcctggcagccctttctcaaggaccaccgcatctctacattcaagaactggcccttcttggagggctgcgcctgcaccccggagcggatggccgaggctggcttcatccactgccccactgagaacgagccagacttggcccagtgtttcttctgcttcaaggagctggaaggctgggagccagatgacgaccccatagaggaacataaaaagcattcgtccggttgcgctttcctttctgtcaagaagcagtttgaagaattaacccttggtgaatttttgaaactggacagagaaagagccaagaacaaaattgcaaaggaaaccaacaataagaagaaagaatttgaggaaactgcgragaaagtgcgccgtgccatcgagcagctggctgccatggattgaggcctctggccggagctgcctggtcccagagtggctgcaccacttccagggtttattccctggtgccaccagccttcctgtgggccccttagcaatgtcttagraaaggagatcaacattttcaaattagatgtttcaactgtgctcytgttttgtcttgaaagtggcaccagaggtgcttctgcctgtgcagcgggtgctgctggtaacagtggctgcttctctctctctctctcttttttgggggctcatttttgctgttttgattcccgggcttaccaggtgagaagtgagggaggaagaaggcagtgtcccttttgctagagctgacagctttgttcgcgtgggcagagccttccacagtgaatgtgtctggacctcatgttgttgaggctgtcacagtcctgagtgtggacttggcaggtgcctgttgaatctgagctgcaggttccttatctgtcacacctgtgcctcctcagaggacatgtttttttgtttttttttttttggtagatgcatgacttgtgtgtgatgagagaatggagacagagtcccyggctcctctactgtttaacaacatggctttcttattttgtttgaattgttaattcacagaatagcacaaactacaattaaaactaagcacaaagccattctaagtcattggggaaacggggtgaacttcaggtggatgaggagacagaatagagtgataggaagcgtctggcagatactccttttgccactgctgtgtgattagacaggcccagtgagccgcggggcacatgctggccgctcctccctcagaaaaaggcagtggcctaaatcctttttaaatgacttggctcgatgctgtgggggactggctgggctgctgcaggccgtgtgtctgtcagcccaaccttcacatctgtcacgttctccacacgggggagagacgcagtccgcccaggtccccgctttctttggaggcagcagctcccgcasggctgaagtctggcgtaagatgatggatttgattcgccctcctccctgtcatagagctgcagggtggattgttacagcttcgctggaaacctctggaggtcatctcggctgttcctgagaaataaaaagcctgtcatttcaaacactgctgtggaccctactgggtttttaaaatattgtcagtttttcatcgtcgtccctagcctgccaacagccatctgcccagacagccgcagtgaggatgagcgtcctggcagagacgcagttgtctctgggcgcttgccagagccacgaaccccagacctgtttgtatcatccgggctccttccgggcagaaacaactgaaaatgcacttcagacccacttatttmtgccacatctgagtcggcctgagatagacttttccctctaaactgggagaatatcacagtggtttttgttagcagaaaatgcactccagcctctgtactcatctaagctgcttatttttgatatttgtgtcagtctgtaaatggatacttcactttaataactgttgcttagtaattggctttgtagagaagctggaaaaaaatggttttgtcttcaactcctttgcatgccaggcggtgatgtggatctcggcttctgtgagcctgtgctgtgggcagggctgagctggagcmgcccctctcagcccgcctgccacggcctttccttaaaggccatccttaaaaccagaccctcatggctrccagcacctgaaagcttcctcgacatctgttaataaagccgtaggcccttgtctaagygcaaccgcctagactttctttcagatacatgtcyacatgtccatttttcaggttctctaagttggagtggagtctgggaagggttgtgaatgaggcttctgggctatgggtgaggttccaatggcaggttagagcccctcgggccaactgccatcctggaaagtagagacagcagtgcccgctgcccagaagagaccagcaagccaaactggagcccccattgcaggctgtcgccatgtggaaagagtaactcacaattgccaataaagtctcatgtggttttatctac

SEQ ID NO: 305 - DNA, 2452 bp, Homo sapiens
gacatgccccgcggcgcgccattaaccgccagatttgaatcgcsggacccgttggcagaggtggcggcggcggcatgggtgccccgacgttgccccctgcctggcagccctttctcaaggaccaccgcatctctacattcaagaactggcccttcttggagggctgcgcctgcaccccggagcggatggccgaggctggcttcatccactgccccactgagaacgagccagacttggcccagtgtttcttctgcttcaaggagctggaaggctgggagccagatgacgaccccatgcaaaggaaaccaacaataagaagaaagaatttgaggaaactgcgragaaagtgcgccgtgccatcgagcagctggctgccatggattgaggcctctggccggagctgcctggtcccagagtggctgcaccacttccagggtttattccctggtgccaccagccttcctgtgggccccttagcaatgtcttagraaaggagatcaacattttcaaattagatgtttcaactgtgctcytgttttgtcttgaaagtggcaccagaggtgcttctgcctgtgcagcgggtgctgctggtaacagtggctgcttctctctctctctctcttttttgggggctcatttttgctgttttgattcccgggcttaccaggtgagaagtgagggaggaagaaggcagtgtcccttttgctagagctgacagctttgttcgcgtgggcagagccttccacagtgaatgtgtctggacctcatgttgttgaggctgtcacagtcctgagtgtggacttggcaggtgcctgttgaatctgagctgcaggttccttatctgtcacacctgtgcctcctcagaggacatgtttttttgtttttttttttttggtagatgcatgacttgtgtgtgatgagagaatggagacagagtcccyggctcctctactgtttaacaacatggctttcttattttgtttgaattgttaattcacagaatagcacaaactacaattaaaactaagcacaaagccattctaagtcattggggaaacggggtgaacttcaggtggatgaggagacagaatagagtgataggaagcgtctggcagatactccttttgccactgctgtgtgattagacaggcccagtgagccgcggggcacatgctggccgctcctccctcagaaaaaggcagtggcctaaatcctttttaaatgacttggctcgatgctgtgggggactggctgggctgctgcaggccgtgtgtctgtcagcccaaccttcacatctgtcacgttctccacacgggggagagacgcagtccgcccaggtccccgctttctttggaggcagcagctcccgcasggctgaagtctggcgtaagatgatggatttgattcgccctcctccctgtcatagagctgcagggtggattgttacagcttcgctggaaacctctggaggtcatctcggctgttcctgagaaataaaaagcctgtcatttcaaacactgctgtggaccctactgggtttttaaaatattgtcagtttttcatcgtcgtccctagcctgccaacagccatctgcccagacagccgcagtgaggatgagcgtcctggcagagacgcagttgtctctgggcgcttgccagagccacgaaccccagacctgtttgtatcatccgggctccttccgggcagaaacaactgaaaatgcacttcagacccacttatttmtgccacatctgagtcggcctgagatagacttttccctctaaactgggagaatatcacagtggtttttgttagcagaaaatgcactccagcctctgtactcatctaagctgcttatttttgatatttgtgtcagtctgtaaatggatacttcactttaataactgttgcttagtaattggctttgtagagaagctggaaaaaaatggttttgtcttcaactcctttgcatgccaggcggtgatgtggatctcggcttctgtgagcctgtgctgtgggcagggctgagctggagcmgcccctctcagcccgcctgccacggcctttccttaaaggccatccttaaaaccagaccctcatggctrccagcacctgaaagcttcctcgacatctgttaataaagccgtaggcccttgtctaagygcaaccgcctagactttctttcagatacatgtcyacatgtccatttttcaggttctctaagttggagtggagtctgggaagggttgtgaatgaggcttctgggctatgggtgaggttccaatggcaggttagagcccctcgggccaactgccatcctggaaagtagagacagcagtgcccgctgcccagaagagaccagcaagccaaactggagcccccattgcaggctgtcgccatgtggaaagagtaactcacaattgccaataaagtctcatgtggttttatctac

SEQ ID NO: 306 - DNA, 2654 bp, Homo sapiens
gacatgccccgcggcgcgccattaaccgccagatttgaatcgcsggacccgttggcagaggtggcggcggcggcatgggtgccccgacgttgccccctgcctggcagccctttctcaaggaccaccgcatctctacattcaagaactggcccttcttggagggctgcgcctgcaccccggagcggatggccgaggctggcttcatccactgccccactgagaacgagccagacttggcccagtgtttcttctgcttcaaggagctggaaggctgggagccagatgacgaccccattgggccgggcacggtggcttacgcctgtaataccagcactttgggaggccgaggcgggcggatcacgagagaggaacataaaaagcattcgtccggttgcgctttcctttctgtcaagaagcagtttgaagaattaacccttggtgaatttttgaaactggacagagaaagagccaagaacaaaattgcaaaggaaaccaacaataagaagaaagaatttgaggaaactgcgragaaagtgcgccgtgccatcgagcagctggctgccatggattgaggcctctggccggagctgcctggtcccagagtggctgcaccacttccagggtttattccctggtgccaccagccttcctgtgggccccttagcaatgtcttagraaaggagatcaacattttcaaattagatgtttcaactgtgctcytgttttgtcttgaaagtggcaccagaggtgcttctgcctgtgcagcgggtgctgctggtaacagtggctgcttctctctctctctctcttttttgggggctcatttttgctgttttgattcccgggcttaccaggtgagaagtgagggaggaagaaggcagtgtcccttttgctagagctgacagctttgttcgcgtgggcagagccttccacagtgaatgtgtctggacctcatgttgttgaggctgtcacagtcctgagtgtggacttggcaggtgcctgttgaatctgagctgcaggttccttatctgtcacacctgtgcctcctcagaggacagtttttttgttgttgtgtttttttgtttttttttttttggtagatgcatgacttgtgtgtgatgagagaatggagacagagtcccyggctcctctactgtttaacaacatggctttcttattttgtttgaattgttaattcacagaatagcacaaactacaattaaaactaagcacaaagccattctaagtcattggggaaacggggtgaacttcaggtggatgaggagacagaatagagtgataggaagcgtctggcagatactccttttgccactgctgtgtgattagacaggcccagtgagccgcggggcacatgctggccgctcctccctcagaaaaaggcagtggcctaaatcctttttaaatgacttggctcgatgctgtgggggactggctgggctgctgcaggccgtgtgtctgtcagcccaaccttcacatctgtcacgttctccacacgggggagagacgcagtccgcccaggtccccgctttctttggaggcagcagctcccgcasggctgaagtctggcgtaagatgatggatttgattcgccctcctccctgtcatagagctgcagggtggattgttacagcttcgctggaaacctctggaggtcatctcggctgttcctgagaaataaaaagcctgtcatttcaaacactgctgtggaccctactgggtttttaaaatattgtcagtttttcatcgtcgtccctagcctgccaacagccatctgcccagacagccgcagtgaggatgagcgtcctggcagagacgcagttgtctctgggcgcttgccagagccacgaaccccagacctgtttgtatcatccgggctccttccgggcagaaacaactgaaaatgcacttcagacccacttatttmtgccacatctgagtcggcctgagatagacttttccctctaaactgggagaatatcacagtggtttttgttagcagaaaatgcactccagcctctgtactcatctaagctgcttatttttgatatttgtgtcagtctgtaaatggatacttcactttaataactgttgcttagtaattggctttgtagagaagctggaaaaaaatggttttgtcttcaactcctttgcatgccaggcggtgatgtggatctcggcttctgtgagcctgtgctgtgggcagggctgagctggagcmgcccctctcagcccgcctgccacggcctttccttaaaggccatccttaaaaccagaccctcatggctrccagcacctgaaagcttcctcgacatctgttaataaagccgtaggcccttgtctaagygcaaccgcctagactttctttcagatacatgtcyacatgtccatttttcaggttctctaagttggagtggagtctgggaagggttgtgaatgaggcttctgggctatgggtgaggttccaatggcaggttagagcccctcgggccaactgccatcctggaaagtagagacagcagtgcccgctgcccagaagagaccagcaagccaaactggagcccccattgcaggctgtcgccatgtggaaagagtaactcacaattgccaataaagtctcatgtggttttatctac

SEQ ID NO: 307 - DNA, 578 bp, Homo sapiens
gacatgccccgcggcgcgccattaaccgccagatttgaatcgcsggacccgttggcagaggtggcggcggcggcatgggtgccccgacgttgccccctgcctggcagccctttctcaaggaccaccgcatctctacattcaagaactggcccttcttggagggctgcgcctgcaccccggagcggatggccgaggctggcttcatccactgccccactgagaacgagccagacttggcccagtgtttcttctgcttcaaggagctggaaggctgggagccagatgacgaccccatagaggaacataaaaagcattcgtccggttgcgctttcctttctgtcaagaagcagtttgaagaattaacccttggtgaatttttgaaactggacagagaaagagccaagaacaaaattgagagagctctgttagcagaatgaaaaaattggaagccagattcagggagggactggaagcaaaagaatttctgttcgaggaagagcctgatgtttgccagggtctgtttaactggacatgaagaggaaggctctggactttcctccaggagtttcaggagaaag

SEQ ID NO: 308 - DNA, 2467 bp, Homo sapiens
gacatgccccgcggcgcgccattaaccgccagatttgaatcgcsggacccgttggcagaggtggcggcggcggcatgggtgccccgacgttgccccctgcctggcagccctttctcaaggaccaccgcatctctacattcaagaactggcccttcttggagggctgcgcctgcaccccggagcggatggccgaggctggcttcatccactgccccactgagaacgagccagacttggcccagtgtttcttctgcttcaaggagctggaaggctgggagccagatgacgaccccatgcaaaggaaaccaacaataagaagaaagaatttgaggaaactgcgragaaagtgcgccgtgccatcgagcagctggctgccatggattgaggcctctggccggagctgcctggtcccagagtggctgcaccacttccagggtttattccctggtgccaccagccttcctgtgggccccttagcaatgtcttagraaaggagatcaacattttcaaattagatgtttcaactgtgctcytgttttgtcttgaaagtggcaccagaggtgcttctgcctgtgcagcgggtgctgctggtaacagtggctgcttctctctctctctctcttttttgggggctcatttttgctgttttgattcccgggcttaccaggtgagaagtgagggaggaagaaggcagtgtcccttttgctagagctgacagctttgttcgcgtgggcagagccttccacagtgaatgtgtctggacctcatgttgttgaggctgtcacagtcctgagtgtggacttggcaggtgcctgttgaatctgagctgcaggttccttatctgtcacacctgtgcctcctcagaggacagtttttttgttgttgtgtttttttgtttttttttttttggtagatgcatgacttgtgtgtgatgagagaatggagacagagtcccyggctcctctactgtttaacaacatggctttcttattttgtttgaattgttaattcacagaatagcacaaactacaattaaaactaagcacaaagccattctaagtcattggggaaacggggtgaacttcaggtggatgaggagacagaatagagtgataggaagcgtctggcagatactccttttgccactgctgtgtgattagacaggcccagtgagccgcggggcacatgctggccgctcctccctcagaaaaaggcagtggcctaaatcctttttaaatgacttggctcgatgctgtgggggactggctgggctgctgcaggccgtgtgtctgtcagcccaaccttcacatctgtcacgttctccacacgggggagagacgcagtccgcccaggtccccgctttctttggaggcagcagctcccgcasggctgaagtctggcgtaagatgatggatttgattcgccctcctccctgtcatagagctgcagggtggattgttacagcttcgctggaaacctctggaggtcatctcggctgttcctgagaaataaaaagcctgtcatttcaaacactgctgtggaccctactgggtttttaaaatattgtcagtttttcatcgtcgtccctagcctgccaacagccatctgcccagacagccgcagtgaggatgagcgtcctggcagagacgcagttgtctctgggcgcttgccagagccacgaaccccagacctgtttgtatcatccgggctccttccgggcagaaacaactgaaaatgcacttcagacccacttatttmtgccacatctgagtcggcctgagatagacttttccctctaaactgggagaatatcacagtggtttttgttagcagaaaatgcactccagcctctgtactcatctaagctgcttatttttgatatttgtgtcagtctgtaaatggatacttcactttaataactgttgcttagtaattggctttgtagagaagctggaaaaaaatggttttgtcttcaactcctttgcatgccaggcggtgatgtggatctcggcttctgtgagcctgtgctgtgggcagggctgagctggagcmgcccctctcagcccgcctgccacggcctttccttaaaggccatccttaaaaccagaccctcatggctrccagcacctgaaagcttcctcgacatctgttaataaagccgtaggcccttgtctaagygcaaccgcctagactttctttcagatacatgtcyacatgtccatttttcaggttctctaagttggagtggagtctgggaagggttgtgaatgaggcttctgggctatgggtgaggttccaatggcaggttagagcccctcgggccaactgccatcctggaaagtagagacagcagtgcccgctgcccagaagagaccagcaagccaaactggagcccccattgcaggctgtcgccatgtggaaagagtaactcacaattgccaataaagtctcatgtggttttatctac

SEQ ID NO: 309 - DNA, 2639 bp, Homo sapiens
gacatgccccgcggcgcgccattaaccgccagatttgaatcgcsggacccgttggcagaggtggcggcggcggcatgggtgccccgacgttgccccctgcctggcagccctttctcaaggaccaccgcatctctacattcaagaactggcccttcttggagggctgcgcctgcaccccggagcggatggccgaggctggcttcatccactgccccactgagaacgagccagacttggcccagtgtttcttctgcttcaaggagctggaaggctgggagccagatgacgaccccattgggccgggcacggtggcttacgcctgtaataccagcactttgggaggccgaggcgggcggatcacgagagaggaacataaaaagcattcgtccggttgcgctttcctttctgtcaagaagcagtttgaagaattaacccttggtgaatttttgaaactggacagagaaagagccaagaacaaaattgcaaaggaaaccaacaataagaagaaagaatttgaggaaactgcgragaaagtgcgccgtgccatcgagcagctggctgccatggattgaggcctctggccggagctgcctggtcccagagtggctgcaccacttccagggtttattccctggtgccaccagccttcctgtgggccccttagcaatgtcttagraaaggagatcaacattttcaaattagatgtttcaactgtgctcytgttttgtcttgaaagtggcaccagaggtgcttctgcctgtgcagcgggtgctgctggtaacagtggctgcttctctctctctctctcttttttgggggctcatttttgctgttttgattcccgggcttaccaggtgagaagtgagggaggaagaaggcagtgtcccttttgctagagctgacagctttgttcgcgtgggcagagccttccacagtgaatgtgtctggacctcatgttgttgaggctgtcacagtcctgagtgtggacttggcaggtgcctgttgaatctgagctgcaggttccttatctgtcacacctgtgcctcctcagaggacatgtttttttgtttttttttttttggtagatgcatgacttgtgtgtgatgagagaatggagacagagtcccyggctcctctactgtttaacaacatggctttcttattttgtttgaattgttaattcacagaatagcacaaactacaattaaaactaagcacaaagccattctaagtcattggggaaacggggtgaacttcaggtggatgaggagacagaatagagtgataggaagcgtctggcagatactccttttgccactgctgtgtgattagacaggcccagtgagccgcggggcacatgctggccgctcctccctcagaaaaaggcagtggcctaaatcctttttaaatgacttggctcgatgctgtgggggactggctgggctgctgcaggccgtgtgtctgtcagcccaaccttcacatctgtcacgttctccacacgggggagagacgcagtccgcccaggtccccgctttctttggaggcagcagctcccgcasggctgaagtctggcgtaagatgatggatttgattcgccctcctccctgtcatagagctgcagggtggattgttacagcttcgctggaaacctctggaggtcatctcggctgttcctgagaaataaaaagcctgtcatttcaaacactgctgtggaccctactgggtttttaaaatattgtcagtttttcatcgtcgtccctagcctgccaacagccatctgcccagacagccgcagtgaggatgagcgtcctggcagagacgcagttgtctctgggcgcttgccagagccacgaaccccagacctgtttgtatcatccgggctccttccgggcagaaacaactgaaaatgcacttcagacccacttatttmtgccacatctgagtcggcctgagatagacttttccctctaaactgggagaatatcacagtggtttttgttagcagaaaatgcactccagcctctgtactcatctaagctgcttatttttgatatttgtgtcagtctgtaaatggatacttcactttaataactgttgcttagtaattggctttgtagagaagctggaaaaaaatggttttgtcttcaactcctttgcatgccaggcggtgatgtggatctcggcttctgtgagcctgtgctgtgggcagggctgagctggagcmgcccctctcagcccgcctgccacggcctttccttaaaggccatccttaaaaccagaccctcatggctrccagcacctgaaagcttcctcgacatctgttaataaagccgtaggcccttgtctaagygcaaccgcctagactttctttcagatacatgtcyacatgtccatttttcaggttctctaagttggagtggagtctgggaagggttgtgaatgaggcttctgggctatgggtgaggttccaatggcaggttagagcccctcgggccaactgccatcctggaaagtagagacagcagtgcccgctgcccagaagagaccagcaagccaaactggagcccccattgcaggctgtcgccatgtggaaagagtaactcacaattgccaataaagtctcatgtggttttatctac

SEQ ID NO: 310 - DNA, 2585 bp, Homo sapiens
gacatgccccgcggcgcgccattaaccgccagatttgaatcgcsggacccgttggcagaggtggcggcggcggcatgggtgccccgacgttgccccctgcctggcagccctttctcaaggaccaccgcatctctacattcaagaactggcccttcttggagggctgcgcctgcaccccggagcggatggccgaggctggcttcatccactgccccactgagaacgagccagacttggcccagtgtttcttctgcttcaaggagctggaaggctgggagccagatgacgaccccatagaggaacataaaaagcattcgtccggttgcgctttcctttctgtcaagaagcagtttgaagaattaacccttggtgaatttttgaaactggacagagaaagagccaagaacaaaattgcaaaggaaaccaacaataagaagaaagaatttgaggaaactgcgragaaagtgcgccgtgccatcgagcagctggctgccatggattgaggcctctggccggagctgcctggtcccagagtggctgcaccacttccagggtttattccctggtgccaccagccttcctgtgggccccttagcaatgtcttagraaaggagatcaacattttcaaattagatgtttcaactgtgctcytgttttgtcttgaaagtggcaccagaggtgcttctgcctgtgcagcgggtgctgctggtaacagtggctgcttctctctctctctctcttttttgggggctcatttttgctgttttgattcccgggcttaccaggtgagaagtgagggaggaagaaggcagtgtcccttttgctagagctgacagctttgttcgcgtgggcagagccttccacagtgaatgtgtctggacctcatgttgttgaggctgtcacagtcctgagtgtggacttggcaggtgcctgttgaatctgagctgcaggttccttatctgtcacacctgtgcctcctcagaggacagtttttttgttgttgtgtttttttgtttttttttttttggtagatgcatgacttgtgtgtgatgagagaatggagacagagtcccyggctcctctactgtttaacaacatggctttcttattttgtttgaattgttaattcacagaatagcacaaactacaattaaaactaagcacaaagccattctaagtcattggggaaacggggtgaacttcaggtggatgaggagacagaatagagtgataggaagcgtctggcagatactccttttgccactgctgtgtgattagacaggcccagtgagccgcggggcacatgctggccgctcctccctcagaaaaaggcagtggcctaaatcctttttaaatgacttggctcgatgctgtgggggactggctgggctgctgcaggccgtgtgtctgtcagcccaaccttcacatctgtcacgttctccacacgggggagagacgcagtccgcccaggtccccgctttctttggaggcagcagctcccgcasggctgaagtctggcgtaagatgatggatttgattcgccctcctccctgtcatagagctgcagggtggattgttacagcttcgctggaaacctctggaggtcatctcggctgttcctgagaaataaaaagcctgtcatttcaaacactgctgtggaccctactgggtttttaaaatattgtcagtttttcatcgtcgtccctagcctgccaacagccatctgcccagacagccgcagtgaggatgagcgtcctggcagagacgcagttgtctctgggcgcttgccagagccacgaaccccagacctgtttgtatcatccgggctccttccgggcagaaacaactgaaaatgcacttcagacccacttatttmtgccacatctgagtcggcctgagatagacttttccctctaaactgggagaatatcacagtggtttttgttagcagaaaatgcactccagcctctgtactcatctaagctgcttatttttgatatttgtgtcagtctgtaaatggatacttcactttaataactgttgcttagtaattggctttgtagagaagctggaaaaaaatggttttgtcttcaactcctttgcatgccaggcggtgatgtggatctcggcttctgtgagcctgtgctgtgggcagggctgagctggagcmgcccctctcagcccgcctgccacggcctttccttaaaggccatccttaaaaccagaccctcatggctrccagcacctgaaagcttcctcgacatctgttaataaagccgtaggcccttgtctaagygcaaccgcctagactttctttcagatacatgtcyacatgtccatttttcaggttctctaagttggagtggagtctgggaagggttgtgaatgaggcttctgggctatgggtgaggttccaatggcaggttagagcccctcgggccaactgccatcctggaaagtagagacagcagtgcccgctgcccagaagagaccagcaagccaaactggagcccccattgcaggctgtcgccatgtggaaagagtaactcacaattgccaataaagtctcatgtggttttatctac

SEQ ID NO: 311 - DNA, 2649 bp, Homo sapiens
agtcccatggggaatgtcaacaggcaggggcagcactgcagagatttcatcatsgtctccyaggccctcaggctcctctgccttctgcttgggcttcagggctgcctggctgcaggcggggtcgctaaggcctcaggaggagaaacacgggacatgccgtggaagccggggcctcacagartcttcgtaacccaggaggaagcccacggcgtcctgcaccggcgccggcgcgccaacgcgytcctggaggagctgcggccgggctcccwggagaggragtgcaagsaggagcagtgcyccttcgaggaggcccgggagatcttcaaggacgcggagaggacgaagctgttctggatttcttacagtgatggggaccagtgtgcctcaagtccatgccagaatgggggcycctkmaaggaccagcyccagtcctrtatctgcttctgcctccctgccttcgagggcyrgaactgtgagacgcacaaggatgaccagctgatctgtgtgaacgagaacggcggctgtgagcrgtactrcagtgaccacacgggcaccaagygctcctgtcggtgccaygaggggtactctctgctggcagayggggtgtcctgcacacccacagttgaatatmcaygtggaraaatacctattctagaaaaaagaaatgccagcaaaccccaaggcyraattgtggggggcaaggtgtgccccaaaggggagtgtccatggcaggtcctgttgttggtgaatggagctcagttgtgtggggggamcctgatcaacaccatctgggtggtctccrcggcccactrtttcgacaaaatcaagaactggaggaaccygatcrcggtgctgggcgagcacgacctcagcgagcacgacggggatgagcagagcyggcrggtggcgcaggtcatcatccccagcacgtacgwcccgggcacyaccaaccacvacatcrygctgctcyrcctgcaccagcccrtggtcctcactgaccatgtggtgcccctctgcctgcccraacggacgttctctgagaggaygctggccttcgtgyrcttctcattgktcagsggctggrgccagctgctggaccgtggcgccacggycctggagctcrtrgtccycaacgtgmscyrgctgatgacccaggactkcctgcagcagtcacggaaggtgggagactccccaaatatcacggagtacrtgtycbgtgcyrrctactcggatggcagcaaggactcctgcaagrrgvacagtggaggcccacrkgccacccactaccrgggcacgtrgtacctgaygggcatcgtcakctgvggccagggctgcgcaaccgtgggccactttgrggtgtacaccrgggtctcccagtacatcgagtggctgcaaaagctcatgcgctcagagccacgcccaggagtcctcctgcgagccccatttccctagcccagcagccctggcctgtggagagaaagccaaggctgcgtcgaactgtcctggcaccaaatcccatatattcttctgcagttaatggggtagaggagggcatgggagggagggagaggtggggagggagacagagacagaaacagagagagacaragacagagagagactgagggagagactctgaggacatggagagagactcaaagagactccaagattcaaagagactaatagagacacagagatggaatagaaaagatgagaggcagaggcagacaggcgctggacagaggggcaggggagtgccaaggttgtcctggaggcagacagcccagctgagcctccttacctcccttcagccaagcccacctgcacgtgatctgctggcctcaggctgctgctctgccttcattgctggagacagtagaggcatgaacacacatggatgcacacacacacacgccaatgcacacacacagagatatgcacacacacggatgcacacacagatggtcacacagagatacgcaaacacaccgatgcacacgcacatagagatatgcacacacagatgcacacacagatatacacatggatgcacgcacatgccaatgcacgcacacatcagtgcacacggatgcacagagatatgcacacaccgatgtgcgcacacacagatatgcacacacatggatgagcacacacacaccaatgcgcacacacaccgatgtacacacacagatgcacacacagatgcacacacaccgatgctgactccatgtgtgctgtcctctgaaggcggttgtttagctctcacttttctggttcttatccattatcatcttcacttcagacaattcagaagcatcaccatgcatggtggcgaatgcccccaaactctcccccaaatgtatttctcccttcgctgggtgccgggctgcacagactattccccacctgcttcccagcttcacaataaacggctgcgtctcctccgcacacctgtggtgcctgccacccactgggttgcccatgattcatttttggagcccccggtgctcatcctctgagatgctcttttctttcacaattttcaacatcactgaaatgaaccctcacatggaagctattttttaaaaacaaaagctgtttgatagatgtttgaggctgtagctcccaggatcctgtggaatt

SEQ ID NO: 312 - DNA, 2946 bp, Homo sapiens
agtcccatggggaatgtcaacaggcaggggcagcactgcagagatttcatcatsgtctccyaggccctcaggctcctctgccttctgcttgggcttcagggctgcctggctgcaggcggggtcgctaaggcctcaggaggagaaacacgggacatgccgtggaagccggggcctcacagartcttcgtaacccaggaggaagcccacggcgtcctgcaccggcgccggcgcgccaacgcgytcctggaggagctgcggccgggctcccwggagaggragtgcaagsaggagcagtgcyccttcgaggaggcccgggagatcttcaaggacgcggagaggacgaagctgttctggatttcttacagtgatggggaccagtgtgcctcaagtccatgccagaatgggggcycctkmaaggaccagcyccagtcctrtatctgcttctgcctccctgccttcgagggcyrgaactgtgagacgcacaaggatgaccagctgatctgtgtgaacgagaacggcggctgtgagcrgtactrcagtgaccacacgggcaccaagygctcctgtcggtgccaygaggggtactctctgctggcagayggggtgtcctgcacacccacagttgaatatmcaygtggaraaatacctattctagaaaaaagaaatgccagcaaaccccaaggcyraattgtggggggcaaggtgtgccccaaaggggagtgtccatggcaggtcctgttgttggtgaatggagctcagttgtgtggggggamcctgatcaacaccatctgggtggtctccrcggcccactrtttcgacaaaatcaagaactggaggaaccygatcrcggtgctgggcgagcacgacctcagcgagcacgacggggatgagcagagcyggcrggtggcgcaggtcatcatccccagcacgtacgwcccgggcacyaccaaccacvacatcrygctgctcyrcctgcaccagcccrtggtcctcactgaccatgtggtgcccctctgcctgcccraacggacgttctctgagaggaygctggccttcgtgyrcttctcattgktcagsggctggrgccagctgctggaccgtggcgccacggycctggagctcrtrgtccycaacgtgmscyrgctgatgacccaggactkcctgcagcagtcacggaaggtgggagactccccaaatatcacggagtacrtgtycbgtgcyrrctactcggatggcagcaaggactcctgcaagrrgvacagtggaggcccacrkgccacccactaccrgggcacgtrgtacctgaygggcatcgtcakctgvggccagggctgcgcaaccgtgggccactttgrggtgtacaccrgggtctcccagtacatcgagtggctgcaaaagctcatgcgctcagagccacgcccaggagtcctcctgcgagccccatttccctagcccagcagccctggcctgtggagagaaagccaaggctgcgtcgaactgtcctggcaccaaatcccatatattcttctgcagttaatggggtagaggagggcatgggagggagggagaggtggggagggagacagagacagaaacagagagagacaragacagagagagactgagggagagactctgaggacatggagagagactcaaagagactccaagattcaaagagactaatagagacacagagatggaatagaaaagatgagaggcagaggcagacaggcgctggacagaggggcaggggagtgccaaggttgtcctggaggcagacagcccagctgagcctccttacctcccttcagccaagcccacctgcacgtgatctgctggcctcaggctgctgctctgccttcattgctggagacagtagaggcatgaacacacatggatgcacacacacacacgccaatgcacacacacagagatatgcacacacacggatgcacacacagatggtcacacagagatacgcaaacacaccgatgcacacgcacatagagatatgcacacacagatgcacacacagatatacacatggatgcacgcacatgccaatgcacgcacacatcagtgcacacggatgcacagagatatgcacacaccgatgtgcgcacacacagatatgcacacacatggatgagcacacacacaccaatgcgcacacacaccgatgtacacacacagatgcacacacagatgcacacacaccgatgctgactccatgtgtgctgtcctctgaaggcggttgtttagctctcacttttctggttcttatccattatcatcttcacttcagacaattcagaagcatcaccatgcatggtggcgaatgcccccaaactctcccccaaatgtatttctcccttcgctgggtgccgggctgcacagactattccccacctgcttcccagcttcacaataaacggctgcgtctcctccgcacacctgtggtgcctgccacccactgggttgcccatgattcatttttggagcccccggtgctcatcctctgagatgctcttttctttcacaattttcaacatcactgaaatgaaccctcacatggaagctattttttaaaaacaaaagctgtttgatagatgtttgaggctgtagctcccaggatcctgtggaattggatgttctctccctgccacagcccttgtcaatgatatttcacagagaccctgggagcacctgctcaagagtcagggacacacgcatcactaaatgcaagttcccaggccctggctgcagtgggaggacctggcaagctgcactcttgctgagtccccagggtggtggaagaagaatgagaaacacatgaacagagaaatggggaggtgacaaacagtgcccccactcagactccggcaagcacggctcagagagtggactcgatgccatccctgcagggccgtcctgggcaccact

SEQ ID NO: 313 - DNA, 2880 bp, Homo sapiens
agtcccatggggaatgtcaacaggcaggggcagcactgcagagatttcatcatsgtctccyaggccctcaggctcctctgccttctgcttgggcttcagggctgcctggctgcagtcttcgtaacccaggaggaagcccacggcgtcctgcaccggcgccggcgcgccaacgcgytcctggaggagctgcggccgggctcccwggagaggragtgcaagsaggagcagtgcyccttcgaggaggcccgggagatcttcaaggacgcggagaggacgaagctgttctggatttcttacagtgatggggaccagtgtgcctcaagtccatgccagaatgggggcycctkmaaggaccagcyccagtcctrtatctgcttctgcctccctgccttcgagggcyrgaactgtgagacgcacaaggatgaccagctgatctgtgtgaacgagaacggcggctgtgagcrgtactrcagtgaccacacgggcaccaagygctcctgtcggtgccaygaggggtactctctgctggcagayggggtgtcctgcacacccacagttgaatatmcaygtggaraaatacctattctagaaaaaagaaatgccagcaaaccccaaggcyraattgtggggggcaaggtgtgccccaaaggggagtgtccatggcaggtcctgttgttggtgaatggagctcagttgtgtggggggamcctgatcaacaccatctgggtggtctccrcggcccactrtttcgacaaaatcaagaactggaggaaccygatcrcggtgctgggcgagcacgacctcagcgagcacgacggggatgagcagagcyggcrggtggcgcaggtcatcatccccagcacgtacgwcccgggcacyaccaaccacvacatcrygctgctcyrcctgcaccagcccrtggtcctcactgaccatgtggtgcccctctgcctgcccraacggacgttctctgagaggaygctggccttcgtgyrcttctcattgktcagsggctggrgccagctgctggaccgtggcgccacggycctggagctcrtrgtccycaacgtgmscyrgctgatgacccaggactkcctgcagcagtcacggaaggtgggagactccccaaatatcacggagtacrtgtycbgtgcyrrctactcggatggcagcaaggactcctgcaagrrgvacagtggaggcccacrkgccacccactaccrgggcacgtrgtacctgaygggcatcgtcakctgvggccagggctgcgcaaccgtgggccactttgrggtgtacaccrgggtctcccagtacatcgagtggctgcaaaagctcatgcgctcagagccacgcccaggagtcctcctgcgagccccatttccctagcccagcagccctggcctgtggagagaaagccaaggctgcgtcgaactgtcctggcaccaaatcccatatattcttctgcagttaatggggtagaggagggcatgggagggagggagaggtggggagggagacagagacagaaacagagagagacaragacagagagagactgagggagagactctgaggacatggagagagactcaaagagactccaagattcaaagagactaatagagacacagagatggaatagaaaagatgagaggcagaggcagacaggcgctggacagaggggcaggggagtgccaaggttgtcctggaggcagacagcccagctgagcctccttacctcccttcagccaagcccacctgcacgtgatctgctggcctcaggctgctgctctgccttcattgctggagacagtagaggcatgaacacacatggatgcacacacacacacgccaatgcacacacacagagatatgcacacacacggatgcacacacagatggtcacacagagatacgcaaacacaccgatgcacacgcacatagagatatgcacacacagatgcacacacagatatacacatggatgcacgcacatgccaatgcacgcacacatcagtgcacacggatgcacagagatatgcacacaccgatgtgcgcacacacagatatgcacacacatggatgagcacacacacaccaatgcgcacacacaccgatgtacacacacagatgcacacacagatgcacacacaccgatgctgactccatgtgtgctgtcctctgaaggcggttgtttagctctcacttttctggttcttatccattatcatcttcacttcagacaattcagaagcatcaccatgcatggtggcgaatgcccccaaactctcccccaaatgtatttctcccttcgctgggtgccgggctgcacagactattccccacctgcttcccagcttcacaataaacggctgcgtctcctccgcacacctgtggtgcctgccacccactgggttgcccatgattcatttttggagcccccggtgctcatcctctgagatgctcttttctttcacaattttcaacatcactgaaatgaaccctcacatggaagctattttttaaaaacaaaagctgtttgatagatgtttgaggctgtagctcccaggatcctgtggaattggatgttctctccctgccacagcccttgtcaatgatatttcacagagaccctgggagcacctgctcaagagtcagggacacacgcatcactaaatgcaagttcccaggccctggctgcagtgggaggacctggcaagctgcactcttgctgagtccccagggtggtggaagaagaatgagaaacacatgaacagagaaatggggaggtgacaaacagtgcccccactcagactccggcaagcacggctcagagagtggactcgatgccatccctgcagggccgtcctgggcaccact

SEQ ID NO: 314 - DNA, 2583 bp, Homo sapiens
agtcccatggggaatgtcaacaggcaggggcagcactgcagagatttcatcatsgtctccyaggccctcaggctcctctgccttctgcttgggcttcagggctgcctggctgcagtcttcgtaacccaggaggaagcccacggcgtcctgcaccggcgccggcgcgccaacgcgytcctggaggagctgcggccgggctcccwggagaggragtgcaagsaggagcagtgcyccttcgaggaggcccgggagatcttcaaggacgcggagaggacgaagctgttctggatttcttacagtgatggggaccagtgtgcctcaagtccatgccagaatgggggcycctkmaaggaccagcyccagtcctrtatctgcttctgcctccctgccttcgagggcyrgaactgtgagacgcacaaggatgaccagctgatctgtgtgaacgagaacggcggctgtgagcrgtactrcagtgaccacacgggcaccaagygctcctgtcggtgccaygaggggtactctctgctggcagayggggtgtcctgcacacccacagttgaatatmcaygtggaraaatacctattctagaaaaaagaaatgccagcaaaccccaaggcyraattgtggggggcaaggtgtgccccaaaggggagtgtccatggcaggtcctgttgttggtgaatggagctcagttgtgtggggggamcctgatcaacaccatctgggtggtctccrcggcccactrtttcgacaaaatcaagaactggaggaaccygatcrcggtgctgggcgagcacgacctcagcgagcacgacggggatgagcagagcyggcrggtggcgcaggtcatcatccccagcacgtacgwcccgggcacyaccaaccacvacatcrygctgctcyrcctgcaccagcccrtggtcctcactgaccatgtggtgcccctctgcctgcccraacggacgttctctgagaggaygctggccttcgtgyrcttctcattgktcagsggctggrgccagctgctggaccgtggcgccacggycctggagctcrtrgtccycaacgtgmscyrgctgatgacccaggactkcctgcagcagtcacggaaggtgggagactccccaaatatcacggagtacrtgtycbgtgcyrrctactcggatggcagcaaggactcctgcaagrrgvacagtggaggcccacrkgccacccactaccrgggcacgtrgtacctgaygggcatcgtcakctgvggccagggctgcgcaaccgtgggccactttgrggtgtacaccrgggtctcccagtacatcgagtggctgcaaaagctcatgcgctcagagccacgcccaggagtcctcctgcgagccccatttccctagcccagcagccctggcctgtggagagaaagccaaggctgcgtcgaactgtcctggcaccaaatcccatatattcttctgcagttaatggggtagaggagggcatgggagggagggagaggtggggagggagacagagacagaaacagagagagacaragacagagagagactgagggagagactctgaggacatggagagagactcaaagagactccaagattcaaagagactaatagagacacagagatggaatagaaaagatgagaggcagaggcagacaggcgctggacagaggggcaggggagtgccaaggttgtcctggaggcagacagcccagctgagcctccttacctcccttcagccaagcccacctgcacgtgatctgctggcctcaggctgctgctctgccttcattgctggagacagtagaggcatgaacacacatggatgcacacacacacacgccaatgcacacacacagagatatgcacacacacggatgcacacacagatggtcacacagagatacgcaaacacaccgatgcacacgcacatagagatatgcacacacagatgcacacacagatatacacatggatgcacgcacatgccaatgcacgcacacatcagtgcacacggatgcacagagatatgcacacaccgatgtgcgcacacacagatatgcacacacatggatgagcacacacacaccaatgcgcacacacaccgatgtacacacacagatgcacacacagatgcacacacaccgatgctgactccatgtgtgctgtcctctgaaggcggttgtttagctctcacttttctggttcttatccattatcatcttcacttcagacaattcagaagcatcaccatgcatggtggcgaatgcccccaaactctcccccaaatgtatttctcccttcgctgggtgccgggctgcacagactattccccacctgcttcccagcttcacaataaacggctgcgtctcctccgcacacctgtggtgcctgccacccactgggttgcccatgattcatttttggagcccccggtgctcatcctctgagatgctcttttctttcacaattttcaacatcactgaaatgaaccctcacatggaagctattttttaaaaacaaaagctgtttgatagatgtttgaggctgtagctcccaggatcctgtggaatt

SEQ ID NO: 315 - DNA, 4064 bp, Homo sapiens
gtagttgagggtggctgtgcaagtcagactcctttccaccaggaaacacagaaaacattctatcttcccaaatgttactctctcagatttgcaccaagaccctagaagtttcttaaayttccatatactttatggacactacaaagcaattccaggaaacactgatacagtagcaaaactactgggagtggaaattggatggagatctgggtcccagttcagagtctgacacctgatttgcaacataattaggcacagggcactcaactattcagggccctaaacccttctattgaaagggaaatgggagaacaatatgtgttcctatggctcagtccctataagattctgtactattcagagttgattttaagtgtcacttaactgaaattatccaacaaaccttcatggcatgaaacattaacacrgctctttttatatggcatggttcctatggctcaatccctataagattctgtactattcagagttgattttaaaagtcacttaactgaaattatccaacaaaccctcgaggacattaaacattaacgtggctctttttatatggcatggttcattatcatgccaataaatgattaatcgtaactctctgtcttgaccaataattttgctggacttttgtgattcacaacgtgytctgtgttgtaatgctacctcttgaaactgacatcctagctttattgttttttattacttccctaaggtggctttcaaaagagacaccaagtgacatatttttaggaggggtttaaaagtttgatggggtagaagtaaacgttgcttaactcaaccagcagcagagccagggcccagggaccagcgcttctgtggacttggcctttcsagcagcagacccagcaatgaatgatccgaacagctgtgtggacaatgcaacagtttgctctggtgcatcctgtgtggtacctgagagcaatttcaataacatcctaagtgtggtcctaagtacggtgctgaccatcctgttggcyttggtgatgttctccatgggatgcaacgtggaaatcaagaaatttctagggcacataaagcggccgtggggcatttgtgttggcttcctctgtcagtttggaatcatgcccctcacaggattcatcctgtcggtggcctttgacatcctcccgctccaggccrtagtggtgctcattataggatgctgccctggaggaactgcctccaatatcttggcctattgggtcgatggcgacatggacctgagcgtcagcatgaccacatgctccacactgcttgccctcggaatgatgccrctgtgcctccttatctataccaaaatgtgggtcgactctgggagcatcrtaattccctatgataacataggtacatctytggttkctctcgttgttcctgtttccattggaatgtttgttaatcacaaatggccccaaaaagcaaagatcatacttaaaattgggtccatcgcgggcgccatcctcattgtgctcatagctgtggttggaggaatattgtaccaaagcgcctggatcattgctcccaaactgtggattataggaacaatatttcctgtggcgggttactccctggggtttcttctggctagaattgctggtctaccctggtacaggtgccgaacggttgcttttgaaacggggatgcagaacacgcagctatgttccaccatcgttcagctctccttcactcctgaggagctcaatgtcgtattcaccttcycgctcatctacagcattttccagctcgcctttgccgcaatattcttaggattttatgtggcatacaagaaatgtcatggaaaaaacaaggcagaaattccagagagcaaagaaaatggaacggagccagagtcatcgttttataaggcaaatggaggatttcaacctgacgaaaagtagacatcaagtggacaaaacagacgagttccaaattacgttcttaaaccgtaactatatttaattatttgttttggtaggacagttggcagaaaagagttaaagtgaaaattggaatttcaytggaattcatgtattggtttcagtaccaagtgactggtggcccaattctttaatgggacaaatattgtttcctatatatatgtrtatgttttatatatgtatgtatactcatatagatatattgtcattgaaatattcccccaaaatattctcagactaaacctgacatagggaacaccgagaatgaaaacatckttaacaccaaaactgaattcttatgcagaatttcctagcccatagatgacaacctgastttctgtatgttaaagtagatgtaatgaattattattattacagtggtcacgattttcttcagtgtttatgattataaaaattgacatgaacatctttcactgacattttaatcattattttaaaagctttgcaacctatatatttatataactttgtaatataacatgggcaaatatctgacttctgtatttttaaaaagttgccttctccagtggcagtccaaaagcagaaatgagaggaaattattacaaaatagaattcaataaccatattggatgcaggctcttaactcagcagggatatcgtacatctattgctctacctcaggggtccagtgatacccactagatcttccaaggaaaaacataattctttcaaayggtgtgtatttggcaaagagctcttcaaatctgggagagggacttcctcaaggttttcctgtgtgcagtggatccacatagctaatatgacagctagtcagttgacagggaccacccacagtaagcaccatggtcagggaggtggcaggaggtgcaaagacagaagtattgagagaaacaccaagactctagtggaggaattaattcaatgggagatagtataaaatacatagaaaacacaagtaacagaaacctggttgaaatgctwractagagtcaattagatgtgcaggagtaagtagtataagaagaatcaagtccgagagtgatcaggaaatgagtattaaacagtatttgaaacagagaacgtgtcccagggcccaaaagtcagaagggccccaccagccaggaaagttgtttcaatgctgtaagtaggtgtagccaagggaagccaggactatctgatatacggtagcaggggtttacggctgccaggggaaaataactcatcaagtgttggactttcaattataagatcgaatttaatttcctttccctcattctgcagcaatcagaatacacaatcttaaccactcggtccttagtggttttgttccattttgcattgggtattttcactgcctcatagagtctatttcaagtgttttggctgaaagggctttttgcatttgcatgttctgagttcagattctgctggtgcacccaagcattatgggaacrggaactcaacttagctcttccagtagaggggtgagggattctgcttttcaaattcataacattgatctttttatgcaagatttccatttacagttgaataagtacttcatatttttccatcattagacaaatacaaaatggactaaataattttaagagatagtggaggagagggggtacagacttccttcttagagagtgtcagagaatatgctcccaatggtggaaaggaagatttacagtctagcggctaagtacctcctacacatttcccatcaatcagaaaatagacaggtacactaaagggaccctgagaactcctcttgtaatttcaacacacccaaaatcaagggcctggatgccagcagctgcagcaagcaggtttttcctccctgttgagcaagacaggtgagcaagataggacttggctttcttacatgatgcggtaacttgtgacttgagtctttttccctaatttgctagtgggaagaaaaatagctgagctttctaaaatgatagctctctatttttaaatgaatttgaaaagtcgattaaattatgtattttattgcctctgagtatcatattaaatgaatattttattttaaaggcttaaataaatgaaaatgatttttgt

SEQ ID NO: 316 - DNA, 5200 bp, Homo sapiens
actgagtcccgggaccccgggagagcggtcartgtgtggtcgctgcgtttcctctgcctgcgccgggcatcacttgcgcgccgcagaaagtccgtctggcagcctggatatcctctcctaccggcacccgcagacgcccctgcagccgcggtcggcgcccgggctccctagccctgtgcgctcaactgtcctgcgctgcggggtgccgcgagttccacctccgcgcctccttctctagacaggcgctgggagaaagaaccggctcccgagttctgggcatttcgcccggctcgaggtgcaggatgcagagcaaggtgctgctggccgtcgccctgtggctctgcgtggagacccgggccgcctctgtgggtttgcctagtgtttctcttgatctgcccaggctcagcatacaaaaagacatacttacaattaaggctaatacaactcttcaaattacttgcaggggacagagggacttggactggctttggcccaataawcagagtggcagtgagcaaagggtggaggtgactgagtgcagcgatggcctcttctgtaagacactcacaattccaaaagtgatcggaaatgacactggagcctacaagtgcttctaccgggaaactgacttggcctcggtcatttatgtctatgttcaagattacagatctccatttattgcttctgttagtgaccaacatggagtcgtgtacattactgagaacaaaaacaaaactgtggtgattccatgtctcgggtccatttcaaatctcaacgtgtcactttgtgcaagatacccagaaaagagatttgttcctgatggtaacagaatttcctgggacagcaagaagggctttactattcccagctacatgatcagctatgctggcatggtcttctgtgaagcaaaaattaatgatgaaagttaccagtctattatgtacatagttgtcgttgtagggtataggatttatgatgtggttctgagtccgtctcatggaattgaactatctgttggagaaaagcttgtcttaaattgtacagcaagaactgaactaaatgtggggattgacttcaactgggaatacccttcttcgaagcatcagcataagaaacttgtaaaccgagacctaaaaacccagtctgggagtgagatgaagaaatttttgagcaccttaactatagatggtrtaacccggagtgaccaaggattgtacacctgtgcagcatccagtgggctgatgaccaagaagaacagcacatttgtcagggtccatgaaaaaccttttgttgcttttggaagtggcatggaatctctggtggaagccacggtgggggagcgtgtcaraatccctgcgaagtaccttggttacccacccccagaaataaaatggtataaaaatggaataccccttgagtccaatcacacaattaaagcggggcatgtactgacgattatggaagtgagtgaaagaracacaggaaattacactgtcatccttaccaatcccatttcaaaggagaagcagagccatgtggtctctctggttgtgtatgtcccaccccagattggtgagaaatctctaatctctcctgtggattcctaccagtacggcaccactcaaacgctgacatgtacggtctatgccattcctcccccgcatcacatccactggtattggcagttggaggaagagtgcgccaacgagcccagccawgctgtctcagtgacaaacccataccctygtgaagaatggagaagtgtggaggacttccagggaggaaataaaattgaagttaataaaaatcaatttgctctaattgaaggaaaaaacaaaactgtaagtacccttgttatccaagcggcaaatgtgtcagctttgtacaaatgtgaagcggtcaacaaagtcgggagaggagagagggtgatctccttccacgtgaccaggggtcctgaaattactttgcaacctgacatgcagcccactgagcaggagagcgtgtctttgtggtgcactgcagacagatctacgtttgagaacctcacatggtacaagcttggcccacagcctctgccaatccatgtgggagagttgcccacacctgtttgcaagaacttggatactctttggaaattgaatgccaccatgttctctaatagcacaaatgacattttgatcatggagcttaagaatgcatccttgcaggaccaaggagactatgtctgccttgctcaagacaggaagaccaagaaaagacattgcgtggtcaggcagctcacagtcctagagcgtgtggcacccacgatcacaggaaacctggagaatcagacgacaagtattggggaaagcatcgaagtctcatgcacggcatctgggaatccccctccacagatcatgtggtttaaagataatgagacccttgtagaagactcaggcattgtattgaaggatgggaaccggaacctcactatccgcagagtgaggaaggaggacgaaggcctctacacctgccaggcatgcagtgttcttggctgtgcaaaagtggaggcatttttcataatagaaggtgcccaggaaaagacgaacttggaaatcattattctagtaggcacgrcggtgattgccatgttcttctggctacttcttgtcatcatcctacggaccgttaagcgggccaatggaggggaactgaagacaggctacttgtccatcgtcatggatccagatgaactcccattggatgaacattgtgaacgactgccttatgatgccagcaaatgggaattccccagagaccggctgaagctaggtaagcctcttggccgtggtgcctttggccaagtgattgaagcagatgcctttggaattgacaagacagcaacttgcaggacagtagcagtcaaaatgttgaaagaaggagcaacacacagtgagcatcgagctctcatgtctgaactcaagatcctcattcatattggtcaccatctcaatgtggtcaaccttctaggtgcctgtaccaagccaggagggccactcatggtgattgtggaattctgcaaatttggaaacctgtccacttacctgaggagcaagagaaatgaatttgtcccctacaagaccaaaggggcacgattccgtcaagggaaagactacrttggagcaatccctgtggatctgaaacggcgcttggacagcatcaccagtagccagagctcagccagctctggatttgtggaggagaagtccctcagtgatgtagaagaagaggaagctcctgaagatctgtataaggacttcctgaccttggagcatctcatctgttacagcttccaagtggctaagggcatggagttcttggcatcgcgaaagtgtatccacagggacctggcrgcacgaaatatcctcttatcggagaagaacgtggttaaaatctgtgactttggcttggcccgggatatttataaagatccagattatgtcagaaaaggagatgctcgcctccctttgaaatggatggccccagaaacaatttttgacagagtgtacacaatccagagtgacgtctggtcttttggtgttttgctgtgggaaatattttccttaggtgcttctccatatcctggggtaaagattgatgaagaattttgtaggcgattgaaagaaggaactagaatgagggcccctgattatactacaccagaaatgtaccagaccatgctggactgctggcacggggagcccagtcagagacccacgttttcagagttggtggaacatttgggaaatctcttgcaagctaatgctcagcaggatggcaaagactacattgttcttccgatatcagagactttgagcatggaagaggattctggactctctctgcctacctcacctgtttcctgtatggaggaggaggaagtatgtgaccccaaattccattatgacaacacagcaggaatcagtcagtatctgcagaacagtaagcgaaagagccggcctgtgagtgtaaaaacatttgaagatatcccgttagaagaaccagaagtaaaagtaatcccagatgacaaccagacggacagtggtatggttcttgcctcagaagagctgaaaactttggaagacagaaccaaattatctccatcttttggtggaatggtgcccagcaaaagcagggagtctgtggcatctgaaggctcaaaccagacaagcggctaccagtccggatatcactccgatgacacagacaccaccgtgtactccagtgaggaagcagaacttttaaagctgatagagattggagtgcaaacyggtagcacagcccagattctccagcctgacwcggggaccacactgagctctcctcctgtttaaaaggaagcatccacacccccaactccyggacatcacatgagaggtgctgctcagattttsaagtgttgttctttccaccagcaggaagtagccgcatttgattttcatttcgacaacaaacaaagacgttcaagaaatggccccatcctcaaagaagtagcagtacctggggagctgacacttctgtaaaactagaagataaaccaggcaatgtaagtgttcgaggtgttgaagatgggaaggatttgcagggctgagtctatccaagaggctttgtttaggacgtgggtcccaagccaagccttaagtgtggaattcggattgatagaaaggaagactaacgttaccttgctttggagagtactggagcctgcaaatgcattgtgtttgctctggtggaggtgggcatggggtctgttctgaaatgtaaagggttcagacggggtttctggttttagaaggttgcgtgttcttcgagttgggctaaagtagagttcgttgtgctgtttctgactcctaatgagagttccttccagaccgttacgtgtctcctggccaagccccaggaaggaaatgatgcagctctggctccttgtctcccaggctgatcctttattcagaataccacaaagaaaggacattcagctcaaggctccctgccgtgttgaagagttctgactgcacaaaccagcttctggtttcttctggaatgaataccctcatatctgtcctgatgtgatatgtctgagactgaatgcgggaggttcaatgtgaagctgtgtgtggtgtcaaagtttcaggaaggattttacccttttgttcttccc

SEQ ID NO: 317 - DNA, 5050 bp, Homo sapiens
actgagtcccgggaccccgggagagcggtcartgtgtggtcgctgcgtttcctctgcctgcgccgggcatcacttgcgcgccgcagaaagtccgtctggcagcctggatatcctctcctaccggcacccgcagacgcccctgcagccgcggtcggcgcccgggctccctagccctgtgcgctcaactgtcctgcgctgcggggtgccgcgagttccacctccgcgcctccttctctagacaggcgctgggagaaagaaccggctcccgagttctgggcatttcgcccggctcgaggtgcaggatgcagagcaaggtgctgctggccgtcgccctgtggctctgcgtggagacccgggccgcctctgtgggtttgcctagtgtttctcttgatctgcccaggctcagcatacaaaaagacatacttacaattaaggctaatacaactcttcaaattacttgcaggggacagagggacttggactggctttggcccaataawcagagtggcagtgagcaaagggtggaggtgactgagtgcagcgatggcctcttctgtaagacactcacaattccaaaagtgatcggaaatgacactggagcctacaagtgcttctaccgggaaactgacttggcctcggtcatttatgtctatgttcaagattacagatctccatttattgcttctgttagtgaccaacatggagtcgtgtacattactgagaacaaaaacaaaactgtggtgattccatgtctcgggtccatttcaaatctcaacgtgtcactttgtgcaagatacccagaaaagagatttgttcctgatggtaacagaatttcctgggacagcaagaagggctttactattcccagctacatgatcagctatgctggcatggtcttctgtgaagcaaaaattaatgatgaaagttaccagtctattatgtacatagttgtcgttgtagggtataggatttatgatgtggttctgagtccgtctcatggaattgaactatctgttggagaaaagcttgtcttaaattgtacagcaagaactgaactaaatgtggggattgacttcaactgggaatacccttcttcgaagcatcagcataagaaacttgtaaaccgagacctaaaaacccagtctgggagtgagatgaagaaatttttgagcaccttaactatagatggtrtaacccggagtgaccaaggattgtacacctgtgcagcatccagtgggctgatgaccaagaagaacagcacatttgtcagggtccatgaaaaaccttttgttgcttttggaagtggcatggaatctctggtggaagccacggtgggggagcgtgtcaraatccctgcgaagtaccttggttacccacccccagaaataaaatggtataaaaatggaataccccttgagtccaatcacacaattaaagcggggcatgtactgacgattatggaagtgagtgaaagaracacaggaaattacactgtcatccttaccaatcccatttcaaaggagaagcagagccatgtggtctctctggttgtgtatgtcccaccccagattggtgagaaatctctaatctctcctgtggattcctaccagtacggcaccactcaaacgctgacatgtacggtctatgccattcctcccccgcatcacatccactggtattggcagttggaggaagagtgcgccaacgagcccagccawgctgtctcagtgacaaacccataccctygtgaagaatggagaagtgtggaggacttccagggaggaaataaaattgaagttaataaaaatcaatttgctctaattgaaggaaaaaacaaaactgtaagtacccttgttatccaagcggcaaatgtgtcagctttgtacaaatgtgaagcggtcaacaaagtcgggagaggagagagggtgatctccttccacgtgaccaggggtcctgaaattactttgcaacctgacatgcagcccactgagcaggagagcgtgtctttgtggtgcactgcagacagatctacgtttgagaacctcacatggtacaagcttggcccacagcctctgccaatccatgtgggagagttgcccacacctgtttgcaagaacttggatactctttggaaattgaatgccaccatgttctctaatagcacaaatgacattttgatcatggagcttaagaatgcatccttgcaggaccaaggagactatgtctgccttgctcaagacaggaagaccaagaaaagacattgcgtggtcaggcagctcacagtcctagagcgtgtggcacccacgatcacaggaaacctggagaatcagacgacaagtattggggaaagcatcgaagtctcatgcacggcatctgggaatccccctccacagatcatgtggtttaaagataatgagacccttgtagaagactcaggcattgtattgaaggatgggaaccggaacctcactatccgcagagtgaggaaggaggacgaaggcctctacacctgccaggcatgcagtgttcttggctgtgcaaaagtggaggcatttttcataatagaaggtgcccaggaaaagacgaacttggaaatcattattctagtaggcacgrcggtgattgccatgttcttctggctacttcttgtcatcatcctacggaccgttaagcgggccaatggaggggaactgaagacaggctacttgtccatcgtcatggatccagatgaactcccattggatgaacattgtgaacgactgccttatgatgccagcaaatgggaattccccagagaccggctgaagctaggtaagcctcttggccgtggtgcctttggccaagtgattgaagcagatgcctttggaattgacaagacagcaacttgcaggacagtagcagtcaaaatgttgaaagaaggagcaacacacagtgagcatcgagctctcatgtctgaactcaagatcctcattcatattggtcaccatctcaatgtggtcaaccttctaggtgcctgtaccaagccaggagggccactcatggtgattgtggaattctgcaaatttggaaacctgtccacttacctgaggagcaagagaaatgaatttgtcccctacaaggtatctcctgaagatctgtataaggacttcctgaccttggagcatctcatctgttacagcttccaagtggctaagggcatggagttcttggcatcgcgaaagtgtatccacagggacctggcrgcacgaaatatcctcttatcggagaagaacgtggttaaaatctgtgactttggcttggcccgggatatttataaagatccagattatgtcagaaaaggagatgctcgcctccctttgaaatggatggccccagaaacaatttttgacagagtgtacacaatccagagtgacgtctggtcttttggtgttttgctgtgggaaatattttccttaggtgcttctccatatcctggggtaaagattgatgaagaattttgtaggcgattgaaagaaggaactagaatgagggcccctgattatactacaccagaaatgtaccagaccatgctggactgctggcacggggagcccagtcagagacccacgttttcagagttggtggaacatttgggaaatctcttgcaagctaatgctcagcaggatggcaaagactacattgttcttccgatatcagagactttgagcatggaagaggattctggactctctctgcctacctcacctgtttcctgtatggaggaggaggaagtatgtgaccccaaattccattatgacaacacagcaggaatcagtcagtatctgcagaacagtaagcgaaagagccggcctgtgagtgtaaaaacatttgaagatatcccgttagaagaaccagaagtaaaagtaatcccagatgacaaccagacggacagtggtatggttcttgcctcagaagagctgaaaactttggaagacagaaccaaattatctccatcttttggtggaatggtgcccagcaaaagcagggagtctgtggcatctgaaggctcaaaccagacaagcggctaccagtccggatatcactccgatgacacagacaccaccgtgtactccagtgaggaagcagaacttttaaagctgatagagattggagtgcaaacyggtagcacagcccagattctccagcctgacwcggggaccacactgagctctcctcctgtttaaaaggaagcatccacacccccaactccyggacatcacatgagaggtgctgctcagattttsaagtgttgttctttccaccagcaggaagtagccgcatttgattttcatttcgacaacaaacaaagacgttcaagaaatggccccatcctcaaagaagtagcagtacctggggagctgacacttctgtaaaactagaagataaaccaggcaatgtaagtgttcgaggtgttgaagatgggaaggatttgcagggctgagtctatccaagaggctttgtttaggacgtgggtcccaagccaagccttaagtgtggaattcggattgatagaaaggaagactaacgttaccttgctttggagagtactggagcctgcaaatgcattgtgtttgctctggtggaggtgggcatggggtctgttctgaaatgtaaagggttcagacggggtttctggttttagaaggttgcgtgttcttcgagttgggctaaagtagagttcgttgtgctgtttctgactcctaatgagagttccttccagaccgttacgtgtctcctggccaagccccaggaaggaaatgatgcagctctggctccttgtctcccaggctgatcctttattcagaataccacaaagaaaggacattcagctcaaggctccctgccgtgttgaagagttctgactgcacaaaccagcttctggtttcttctggaatgaataccctcatatctgtcctgatgtgatatgtctgagactgaatgcgggaggttcaatgtgaagctgtgtgtggtgtcaaagtttcaggaaggattttacccttttgttcttccc

SEQ ID NO: 318 - DNA, 5832 bp, Homo sapiens
actgagtcccgggaccccgggagagcggtcartgtgtggtcgctgcgtttcctctgcctgcgccgggcatcacttgcgcgccgcagaaagtccgtctggcagcctggatatcctctcctaccggcacccgcagacgcccctgcagccgcggtcggcgcccgggctccctagccctgtgcgctcaactgtcctgcgctgcggggtgccgcgagttccacctccgcgcctccttctctagacaggcgctgggagaaagaaccggctcccgagttctgggcatttcgcccggctcgaggtgcaggatgcagagcaaggtgctgctggccgtcgccctgtggctctgcgtggagacccgggccgcctctgtgggtttgcctagtgtttctcttgatctgcccaggctcagcatacaaaaagacatacttacaattaaggctaatacaactcttcaaattacttgcaggggacagagggacttggactggctttggcccaataawcagagtggcagtgagcaaagggtggaggtgactgagtgcagcgatggcctcttctgtaagacactcacaattccaaaagtgatcggaaatgacactggagcctacaagtgcttctaccgggaaactgacttggcctcggtcatttatgtctatgttcaagattacagatctccatttattgcttctgttagtgaccaacatggagtcgtgtacattactgagaacaaaaacaaaactgtggtgattccatgtctcgggtccatttcaaatctcaacgtgtcactttgtgcaagatacccagaaaagagatttgttcctgatggtaacagaatttcctgggacagcaagaagggctttactattcccagctacatgatcagctatgctggcatggtcttctgtgaagcaaaaattaatgatgaaagttaccagtctattatgtacatagttgtcgttgtagggtataggatttatgatgtggttctgagtccgtctcatggaattgaactatctgttggagaaaagcttgtcttaaattgtacagcaagaactgaactaaatgtggggattgacttcaactgggaatacccttcttcgaagcatcagcataagaaacttgtaaaccgagacctaaaaacccagtctgggagtgagatgaagaaatttttgagcaccttaactatagatggtrtaacccggagtgaccaaggattgtacacctgtgcagcatccagtgggctgatgaccaagaagaacagcacatttgtcagggtccatgaaaaaccttttgttgcttttggaagtggcatggaatctctggtggaagccacggtgggggagcgtgtcaraatccctgcgaagtaccttggttacccacccccagaaataaaatggtataaaaatggaataccccttgagtccaatcacacaattaaagcggggcatgtactgacgattatggaagtgagtgaaagaracacaggaaattacactgtcatccttaccaatcccatttcaaaggagaagcagagccatgtggtctctctggttgtgtatgtcccaccccagattggtgagaaatctctaatctctcctgtggattcctaccagtacggcaccactcaaacgctgacatgtacggtctatgccattcctcccccgcatcacatccactggtattggcagttggaggaagagtgcgccaacgagcccagccawgctgtctcagtgacaaacccataccctygtgaagaatggagaagtgtggaggacttccagggaggaaataaaattgaagttaataaaaatcaatttgctctaattgaaggaaaaaacaaaactgtaagtacccttgttatccaagcggcaaatgtgtcagctttgtacaaatgtgaagcggtcaacaaagtcgggagaggagagagggtgatctccttccacgtgaccaggggtcctgaaattactttgcaacctgacatgcagcccactgagcaggagagcgtgtctttgtggtgcactgcagacagatctacgtttgagaacctcacatggtacaagcttggcccacagcctctgccaatccatgtgggagagttgcccacacctgtttgcaagaacttggatactctttggaaattgaatgccaccatgttctctaatagcacaaatgacattttgatcatggagcttaagaatgcatccttgcaggaccaaggagactatgtctgccttgctcaagacaggaagaccaagaaaagacattgcgtggtcaggcagctcacagtcctagagcgtgtggcacccacgatcacaggaaacctggagaatcagacgacaagtattggggaaagcatcgaagtctcatgcacggcatctgggaatccccctccacagatcatgtggtttaaagataatgagacccttgtagaagactcaggcattgtattgaaggatgggaaccggaacctcactatccgcagagtgaggaaggaggacgaaggcctctacacctgccaggcatgcagtgttcttggctgtgcaaaagtggaggcatttttcataatagaaggtgcccaggaaaagacgaacttggaaatcattattctagtaggcacgrcggtgattgccatgttcttctggctacttcttgtcatcatcctacggaccgttaagcgggccaatggaggggaactgaagacaggctacttgtccatcgtcatggatccagatgaactcccattggatgaacattgtgaacgactgccttatgatgccagcaaatgggaattccccagagaccggctgaagctaggtaagcctcttggccgtggtgcctttggccaagtgattgaagcagatgcctttggaattgacaagacagcaacttgcaggacagtagcagtcaaaatgttgaaagaaggagcaacacacagtgagcatcgagctctcatgtctgaactcaagatcctcattcatattggtcaccatctcaatgtggtcaaccttctaggtgcctgtaccaagccaggagggccactcatggtgattgtggaattctgcaaatttggaaacctgtccacttacctgaggagcaagagaaatgaatttgtcccctacaagaccaaaggggcacgattccgtcaagggaaagactacrttggagcaatccctgtggatctgaaacggcgcttggacagcatcaccagtagccagagctcagccagctctggatttgtggaggagaagtccctcagtgatgtagaagaagaggaagctcctgaagatctgtataaggacttcctgaccttggagcatctcatctgttacagcttccaagtggctaagggcatggagttcttggcatcgcgaaagtgtatccacagggacctggcrgcacgaaatatcctcttatcggagaagaacgtggttaaaatctgtgactttggcttggcccgggatatttataaagatccagattatgtcagaaaaggagatgctcgcctccctttgaaatggatggccccagaaacaatttttgacagagtgtacacaatccagagtgacgtctggtcttttggtgttttgctgtgggaaatattttccttaggtgcttctccatatcctggggtaaagattgatgaagaattttgtaggcgattgaaagaaggaactagaatgagggcccctgattatactacaccagaaatgtaccagaccatgctggactgctggcacggggagcccagtcagagacccacgttttcagagttggtggaacatttgggaaatctcttgcaagctaatgctcagcaggatggcaaagactacattgttcttccgatatcagagactttgagcatggaagaggattctggactctctctgcctacctcacctgtttcctgtatggaggaggaggaagtatgtgaccccaaattccattatgacaacacagcaggaatcagtcagtatctgcagaacagtaagcgaaagagccggcctgtgagtgtaaaaacatttgaagatatcccgttagaagaaccagaagtaaaagtaatcccagatgacaaccagacggacagtggtatggttcttgcctcagaagagctgaaaactttggaagacagaaccaaattatctccatcttttggtggaatggtgcccagcaaaagcagggagtctgtggcatctgaaggctcaaaccagacaagcggctaccagtccggatatcactccgatgacacagacaccaccgtgtactccagtgaggaagcagaacttttaaagctgatagagattggagtgcaaacyggtagcacagcccagattctccagcctgacwcggggaccacactgagctctcctcctgtttaaaaggaagcatccacacccccaactccyggacatcacatgagaggtgctgctcagattttsaagtgttgttctttccaccagcaggaagtagccgcatttgattttcatttcgacaacagaaaaaggacctcggactgcagggagccagtcttctaggcatatcctggaagaggcttgtgacccaagaatgtgtctgtgtcttctcccagtgttgacctgatcctctttttcattcatttaaaaagcatttatcatgccccctgctgcgggtctcaccatgggtttagaacaaagacgttcaagaaatggccccatcctcaaagaagtagcagtacctggggagctgacacttctgtaaaactagaagataaaccaggcaatgtaagtgttcgaggtgttgaagatgggaaggatttgcagggctgagtctatccaagaggctttgtttaggacgtgggtcccaagccaagccttaagtgtggaattcggattgatagaaaggaagactaacgttaccttgctttggagagtactggagcctgcaaatgcattgtgtttgctctggtggaggtgggcatggggtctgttctgaaatgtaaagggttcagacggggtttctggttttagaaggttgcgtgttcttcgagttgggctaaagtagagttcgttgtgctgtttctgactcctaatgagagttccttccagaccgttacgtgtctcctggccaagccccaggaaggaaatgatgcagctctggctccttgtctcccaggctgatcctttattcagaataccacaaagaaaggacattcagctcaaggctccctgccgtgttgaagagttctgactgcacaaaccagcttctggtttcttctggaatgaataccctcatatctgtcctgatgtgatatgtctgagactgaatgcgggaggttcaatgtgaagctgtgtgtggtgtcaaagtttcaggaaggattttacccttttgttcttccccctgtccccaacccactctcaccccgcaacccatcagtattttagttatttggcctctactccagtaaacctgattgggtttgttcactctctgaatgattattagccagacttcaaaattattttatagcccaaattataacatctattgtattatttagacttttaacatatagagctatttctactgatttttgcccttgttctgtcctttttttcaaaaaagaaaatgtgttttttgtttggtaccatagtgtgaaatgctgggaacaatgactataagacatgctatggcacatatatttatagtctgtttatgtagaaacaaatgtaatatattaaagccttatatataatgaactttgtactattcacattttgtatcagtattatgtagcataacaaaggtcataatgctttcagcaattgatgtcattttattaaagaacattgaaaaacttga

SEQ ID NO: 319 - DNA, 1965 bp, Homo sapiens
tgttttcttcactcatggtgaagaatgggggagatagaaggaacatacagagtcctgcagactgcagggatgcrcttgggtgcccagacccctgtgggagttagcacccttgagcctgggcagactctcttgcccagaatgcaagagaagcacctgyacctcagagtaaagctgctggacaacaccatggaaatatttgacattgagcctaaatgcgatggccaggtattactgacacaagtgtggaagcgtttaaacctggtagaatgtgactacttcgggatggagtttcaaaatactcagtcctactggatttggcttgaacctatgaaacccatcattaggcaaatacgaaggccaaagaatgtggtgcttcgcctagctgtaaaattttttccacctgatcctggtcagctacaagaagaatatacaagatacttgtttgccttgcarcttaagagagacctgctggaagagcgtttgacctgtgctgacaccacagcggcccttctcacgtcccatctcctgcagtcggaaataggagattacgatgaaacgctggaccgagagcacctcaamgtgaacgagtatttgcctggccagcagcactgccttgagaagatactagaattccatcagaagcacgtgggccagacacctgctgagtcggatttccaggtgctcgaaattgctcgaaagttggaaatgtacggcatcagatttcacatggcttctgacagggaaggaaccaagattcaactggcagtttcccacatgggtgtactcgtgttccagggcaccaycaaaatcaacactttcaactggtccaaggtccgtaaactaagcttcaagaggaaaagatttcttatcaaacttcatccagaggttcatggaccttaccaggacacattagaatttttgttgggtagtagagatgaatgtaagaacttctggaagatttgtgtggagtatcacaccttttttagacttttggaccaacctaagccaaaagcaaaagccgtcttcttcagccggggctcctccttcagatacagtggaagaactcagaaacaactagtagattatttcaaagacagtggaatgaagagaattccatatgaaagaaggcacagcaagacccacacgtccgttcgagctctgactgcagacctaccaaaacagagcatctcattccccgagggattgaggacwcctgcctccccatcttcagcgaatgccttttactcgctctctccctccactstggtcccctctggcctgccagagtttaaggacagcagcagctccctcacagatccccaggtttcctacgtcaagagtccagctgcagagaggcgcagtggagcagtggctggaggccccgacacaccatcggcccagcccctcgggccccccgcactccagcctggtccaggcctttccacgaagagtcctcagccttctccctccagccggaagagccccctgagtytgagccctgcatttcaggtgcctttgggcccagctgaacagggctcatccccactcctgagccctgtcctcagtgatgctggcggagccgggatggactgcgaggagcccagacacaagcgcgtgcctgcagacgaggcctacttcatagtcaaagagattctcgctacagaacgaacatacctcaaggatttagaagttattaccgtgtggttccgcagcgcagtggtgaaggaggacgccatgcctgcgactctgatgacgctgctcttctccaacatcgatcccatctatgagttccacagaggcttcctgcgcgaggtggagcagaggctggcactctgggaagggccctccaaagcccacacaaaaggcagtcatcaacgaatcggggacatcctgctcaggaacatgcgccagttaaaggtgttccagctccacgaagggcatgtagcaggggtcacaaaaatggag

SEQ ID NO: 320 - DNA, 3906 bp, Homo sapiens
tgttttcttcactcatggtgaagaatgggggagatagaaggaacatacagagtcctgcagactgcagggatgcrcttgggtgcccagacccctgtgggagttagcacccttgagcctgggcagactctcttgcccagaatgcaagagaagcacctgyacctcagagtaaagctgctggacaacaccatggaaatatttgacattgagcctaaatgcgatggccaggtattactgacacaagtgtggaagcgtttaaacctggtagaatgtgactacttcgggatggagtttcaaaatactcagtcctactggatttggcttgaacctatgaaacccatcattaggcaaatacgaaggccaaagaatgtggtgcttcgcctagctgtaaaattttttccacctgatcctggtcagctacaagaagaatatacaagatacttgtttgccttgcarcttaagagagacctgctggaagagcgtttgacctgtgctgacaccacagcggcccttctcacgtcccatctcctgcagtcggaaataggagattacgatgaaacgctggaccgagagcacctcaamgtgaacgagtatttgcctggccagcagcactgccttgagaagatactagaattccatcagaagcacgtgggccagacacctgctgagtcggatttccaggtgctcgaaattgctcgaaagttggaaatgtacggcatcagatttcacatggcttctgacagggaaggaaccaagattcaactggcagtttcccacatgggtgtactcgtgttccagggcaccaycaaaatcaacactttcaactggtccaaggtccgtaaactaagcttcaagaggaaaagatttcttatcaaacttcatccagaggttcatggaccttaccaggacacattagaatttttgttgggtagtagagatgaatgtaagaacttctggaagatttgtgtggagtatcacaccttttttagacttttggaccaacctaagccaaaagcaaaagccgtcttcttcagccggggctcctccttcagatacagtggaagaactcagaaacaactagtagattatttcaaagacagtggaatgaagagaattccatatgaaagaaggcacagcaagacccacacgtccgttcgagctctgactgcagacctaccaaaacagagcatctcattccccgagggattgaggacwcctgcctccccatcttcagcgaatgccttttactcgctctctccctccactstggtcccctctggcctgccagagtttaaggacagcagcagctccctcacagatccccaggtttcctacgtcaagagtccagctgcagagaggcgcagtggagcagtggctggaggccccgacacaccatcggcccagcccctcgggccccccgcactccagcctggtccaggcctttccacgaagagtcctcagccttctccctccagccggaagagccccctgagtytgagccctgcatttcaggtgcctttgggcccagctgaacagggctcatccccactcctgagccctgtcctcagtgatgctggcggagccgggatggactgcgaggagcccagacacaagcgcgtgcctgcagacgaggcctacttcatagtcaaagagattctcgctacagaacgaacatacctcaaggatttagaagttattaccgtgtggttccgcagcgcagtggtgaaggaggacgccatgcctgcgactctgatgacgctgctcttctccaacatcgatcccatctatgagttccacagaggcttcctgcgcgaggtggagcagaggctggcactctgggaagggccctccaaagcccacacaaaaggcagtcatcaacgaatcggggacatcctgctcaggaacatgcgccagttaaaggagtttaccagctacttccaaagacatgacgagrtcctaacagaactggaaaaggctaccaaacgctgtaagaagttggaggcagtgtacaaggagtttgagctgcagaaggtctgctacttgcctctcaacacgttcctgctgaagcccatccagcggctgctgcactaccgcctgctgctgcgccgcctrtgcggacattacagccccgggcaccatgactacgctgactgccatgacgccctgaaagccatcacagaggtgaccaccacactacagcacattctcatcyggctggagaacctgcagaagctaacggagctgcagcgggacctggtgggcatagagaacctcattgctcctggcagggagttcatccgtgagggctgccttcacaagctcaccaagaagggcctgcagcagaggatgttttttctgttctcagatatgttgctgtacacaagcaaaggagttgcagggaccagccacttccggatccggggcctccttcccctccaaggcatgctggtggaagaaagtgataacgagtggtctgwtccacactgtttcaccatctaygcggctcagaaaacaatcgtggtggcagccagcactcggctggagaaagagmagtggatgctggacctgaactccgcgatccaagcagccaagagtggcggtgacacggcccctgcactgccaggccgcactgtgtgcactcgtccccccagatcccccaacgaggtatctctggagcaggagtcagaagatgatgctcggggtgtccgcagctccctggaggggcatggccagcaccgggccaacaccacaatgcacgtgtgctggtaccggaacaccagcgtgtccagggcagaccacagtgcagctgtcgagaaccagctttcaggatatctgctaagaaagttcaaaaacagtcatggctggcagaagctctgggtcgtctttaccaacttctgtttgttcttctacaaaactcatcaggatgactacccactggccagcctcccgctgctgggctacagcgtgagcatccccagggaggccgatggcatacacaaagactatgttttcaagctccagttcaaatcccacgtctacttcttccgggctgagagcaagtacacatttgaaaggtggatggaggtgatccagggggccagcagctcagccgggagggccccaagcatcgtgcaggatggcccccaaccctcctcagggctggaggggatggtcagggggaaggaggaatgacgctcaacctgcccaggtttggacacaactacaaagaacagcaggacacagaggtgacctctgtcctgaggcttctcaacagatgggaagtggctgtggtctcactggatccccactggcaccagcagtgtgggtgggcctcatgtaacatctgggaggggcttcatccccccacccaggacctagtgcatgccagcagctatctggggccctgggaaaaatgtgcgagtcttgagcgcggagccgctcaagccacagctcccaggcccctggctcaaagacgcagacaaggcctgagcagtgctctcggcatcggaccaaagcctgggcacaccctgcctctctccccagagcagggtccctgccgaggactggcctagagcaagcactggaaaagaggccctgccatacaccctgcgtacccactgccaggaccctctcagacaagcgtggcacagccatgctgaccttccatctggtgaaccaagtggcagccccaggggcctgccctgcaggtcacagctaaacaagtctggcagaagccacgcttgttccccatgtacctctagagaagcagaaaccaaagtccccctgtgccctgggagggtggggccgtctaatttattactgcccagcattccttccaacgggaagtagatgggcgactgctttgttcacacacatttgattaaaaataaacaaacagcatctccccac

SEQ ID NO: 321 - DNA, 4180 bp, Homo sapiens
gcggggaagcagcagcggccaggatgaatcccaggtgctctggagctggatggtgaaggtcggcactcttcaccctcccgagccctgcccgtctcggccccatgcccccaccagtcagccccgggccacaggcagtgagcaggcacctgggagccraggccctrtgaccaggccaaggagacgggcgctccagggtcccagccacctgtcccccccatggagctgaggccctggttgctatgggtggtagcagcaacaggaaccttggtcctgctagcagctgatgctcagggccagaaggtcttcaccaacacgtgggctgtgcgcatccctggaggcccagyggtggccaacagtgtggcacggaagcatgggttcctcaacctgggccagatcttcggggactattaccacttctggcatcgaggagtgacgaagcggtccctgtcgcctcaccgcccgcggcacagccggctgcagagggagcctcaagtacagtggctggaacagcaggtggcaaagcgacggactaaacgggacgtgtaccaggagcccacagaccccaagtttcctcagcagtggtacctgtctggtgtcactcagcgggacctgaatgtgaaggcggcctgggcgcagggctacacagggcacggcattgtggtctccattctggacgatggcatcgagaagaaccacccggacttggcaggcaattatgatcctggggccagttttgatgtcaatgaccaggaccctgacccccagcctcggtacacacagatgaatgacaacaggcacggcacacggtgtgcgggggaagtggctgcggtggccaacaacggtgtctgtggtgtaggtgtggcctacaacgcccgcattggaggggtgcgcatgctggatggcgaggtgacagatgcagtggaggcacgctcgctgggcctgaaccccaaccacatccacatctacagtgccagctggggccccgaggatgacggcaagacagtggatgggccagcccgcctcgccgaggaggccttcttccgtggggttagccagggccgaggggggctgggctccatctttgtctgggcctcggggaacgggggccgggaacatgacagctgcaactgcgacggctacaccaacagtatctacacgctgtccatcagcagcgccacgcagtttggcaacgtgccgtggtacagcgaggcctgctcgtccacactggccacgacctacagcagtggcaaccagaatgagaagcagatcgtgacgactgacttgcggcagaagtgcacggagtctcacacgggcacctcagcctctgcccccttagcagccggcatcattgctctcaccctggaggccaataagaacctcacatggcgggacatgcaacacctggtggtacagacctcgaagccagcccacctcaatgccaacgactgggccaccaatggtgtgggccggaaagtgagccactcatatggctacgggcttttggacgcaggcgccatggtggccctggcccagaattggaccacagtggccccccagcggaagtgcatcatcgacatcctcaccgagcccaaagacatcgggaaacgkctcgaggtgcggaagaccgtgaccgcgtgcctgggcgagcccaaccacatcactcggctggagcacgctcaggcgcggctcaccctgtcctataatcgccgtggcgacctggccatccacctggtcagccccatgggcacccgctccaccctgctggcagccaggccacatgactactccgcagatgggtttaatgactgggccttcatgacaactcattcctgggatgaggatccctctggcgagtgggtcctagagattgaaaacaccagcgaagccaacaactatgggacgctgaccaagttcaccctcgtactctatggcaccgcccctgaggggctgcccgtacctccagaaagcagtggctgcaagaccctcacgtccagtcaggcctgtgtggtgtgcgaggaaggcttctccctgcaccagaagagctgtgtccagcactgccctccaggsttcgccccccaagtcctcgatacgcactatagcaccgagaatgacgtggagaccatccgggccagcgtctgcgccccctgccacgcctcatgtgccacatgccaggggccggccctgacagactgcctcagctgccccagccacgcctccttggaccctgtggagcagacttgctcccggcaaagccagagcagccgagagtccccgccacagcagcagccacctcggctgcccccggaggtggaggcggggcaacggctgcgggcagggctgctgccctcacacctgcctgaggtggtggccggcctcagctgcgccttcatcgtgctggtcttcgtcactgtcttcctggtcctgcagctgcgctctggctttagttttcrgggggtgaaggtgtacaccatggaccgtggcctcatctcctacaaggggctgccccctgaagcctggcaggaggagtgcccgtctgactcagaagaggacgagggccggggcgagaggaccgcctttatcaaagaccagagcgccctctgatgagcccactgcccaccccctcaagccaatcccctccttgggcactttttaattcaccaaagtatttttttatcttgggactgggtttggaccccagctgggaggcaagaggggtggagactgyttcccatcctaccctcgggcccacctggccacctgaggtgggcccaggaccagctggggcgtggggagggccgtaccccaccctcagcaccccttccatgtggagaaaggagtgaaacctttagggcagcttgccccggccccggccccagccagagttcctgcggagtgaagaggggcagcccttgcttgttgggattcctgacccaggccgcagctcttgcccttccctgtccctctaaagcaataatggtcccatccagrcagtcgggggctggcctaggagatatctgagggaggaggccacctctccaagggcttctgcaccctccaccctgtcccccagctctggtgagtcttggcggcagcagccatcataggaagggaccaaggcaaggcaggtgcctccaggtgtgcacgtggcatgtggcctgtggcctgtgtcccatgacccacccctgtgctccgtgcctccaccaccactggccaccaggctggcgcagccaaggycgaagctctggctgaaccctgtgctggtgtcctgaccaccctcccctctcttgcacccgcctctcccgtcagggcccaagtccctgttttctgagcccgggctgcctgggctgttggcactcacagacctggagcccctgggtgggtggtggggaggggcgctggcccagccggcctctctggcctcccacccgatgctgctttcccctgtggggatctcaggggctgtttgaggatatattttcactttgtgattatttcactttagatgctgatgatttgtttttgtatttttaatgggggtagcagctggactacccacgttctcacacccaccgtccgccctgctcctccctggctgccctggccctgaggtgtgggggctgcagcrtgttgctgaggagtgaggaatagttgagccccaagtcctgaagaggcgggccagccaggcgggctcaaggaaagggggtcccagtgggaggggcaggctgacatctgtgtttcaagtggggctcgccatgccgggggttcataggtcactggctctccaagtgccagaggtgggcaggtggtggcactgagcccccccaacactgtgccctggtggagaaagcactgacctgtcatgcccccctcaaacctcctcttytgacgtgccttttgcacccctcccattaggacaatcagtcccctcccatctgggagtccccttttcttttctaccctagccattcctggtacccagccatctgcccaggggtgccccctcctctcccatccccctgccctcgtggccagcccggctggttttgtaagatrctgggttggtgcacagtgatttttttcttgtaatttaaacaggcccagcattgctggttctatttaatggacatgagataatgttagaggttttaaagtgattaaacgtgcagactatgcaaaccas

SEQ ID NO: 322 - DNA, 4073 bp, Homo sapiens
gcggggaagcagcagcggccaggatgaatcccaggtgctctggagctggatggtgaaggtcggcactcttcaccctcccgagccctgcccgtctcggccccatgcccccaccagtcagccccgggccacaggcagtgagcaggcacctgggagccraggccctrtgaccaggccaaggagacgggcgctccagggtcccagccacctgtcccccccatggagctgaggccctggttgctatgggtggtagcagcaacaggaaccttggtcctgctagcagctgatgctcagggccagaaggtcttcaccaacacgtgggctgtgcgcatccctggaggcccagyggtggccaacagtgtggcacggaagcatgggttcctcaacctgggccagatcttcggggactattaccacttctggcatcgaggagtgacgaagcggtccctgtcgcctcaccgcccgcggcacagccggctgcagagggagcctcaagtacagtggctggaacagcaggtggcaaagcgacggactaaacgggacgtgtaccaggagcccacagaccccaagtttcctcagcagtggtacctgtctggtgtcactcagcgggacctgaatgtgaaggcggcctgggcgcagggctacacagggcacggcattgtggtctccattctggacgatggcatcgagaagaaccacccggacttggcaggcaattatgatcctggggccagttttgatgtcaatgaccaggaccctgacccccagcctcggtacacacagatgaatgacaacaggcacggcacacggtgtgcgggggaagtggctgcggtggccaacaacggtgtctgtggtgtaggtgtggcctacaacgcccgcattggaggggtgcgcatgctggatggcgaggtgacagatgcagtggaggcacgctcgctgggcctgaaccccaaccacatccacatctacagtgccagctggggccccgaggatgacggcaagacagtggatgggccagcccgcctcgccgaggaggccttcttccgtggggttagccagggccgaggggggctgggctccatctttgtctgggcctcggggaacgggggccgggaacatgacagctgcaactgcgacggctacaccaacagtatctacacgctgtccatcagcagcgccacgcagtttggcaacgtgccgtggtacagcgaggcctgctcgtccacactggccacgacctacagcagtggcaaccagaatgagaagcagatcgtgacgactgacttgcggcagaagtgcacggagtctcacacgggcacctcagcctctgcccccttagcagccggcatcattgctctcaccctggaggccaataagaacctcacatggcgggacatgcaacacctggtggtacagacctcgaagccagcccacctcaatgccaacgactgggccaccaatggtgtgggccggaaagtgagccactcatatggctacgggcttttggacgcaggcgccatggtggccctggcccagaattggaccacagtggccccccagcggaagtgcatcatcgacatcctcaccgagcccaaagacatcgggaaacgkctcgaggtgcggaagaccgtgaccgcgtgcctgggcgagcccaaccacatcactcggctggagcacgctcaggcgcggctcaccctgtcctataatcgccgtggcgacctggccatccacctggtcagccccatgggcacccgctccaccctgctggcagccaggccacatgactactccgcagatgggtttaatgactgggccttcatgacaactcattcctgggatgaggatccctctggcgagtgggtcctagagattgaaaacaccagcgaagccaacaactatgggacgctgaccaagttcaccctcgtactctatggcaccgcccctgaggggctgcccgtacctccagaaagcagtggctgcaagaccctcacgtccagtcaggcctgtgtggtgtgcgaggaaggcttctccctgcaccagaagagctgtgtccagcactgccctccaggsttcgccccccaagtcctcgatacgcactatagcaccgagaatgacgtggagaccatccgggccagcgtctgcgccccctgccacgcctcatgtgccacatgccaggggccggccctgacagactgcctcagctgccccagccacgcctccttggaccctgtggagcagacttgctcccggcaaagccagagcagccgagagtccccgccacagcagcagccacctcggctgcccccggaggtggaggcggggcaacggctgcgggcagggctgctgccctcacacctgcctgaggtggtggccggcctcagctgcgccttcatcgtgctggtcttcgtcactgtcttcctggtcctgcagctgcgctctggctttagttttcrgggggtgaaggtgtacaccatggaccgtggcctcatctcctacaaggggctgccccctgaagcctggcaggaggagtgcccgtctgactcagaagaggacgagggccggggcgagaggaccgcctttatcaaagaccagagcgccctctgatgagcccactgcccaccccctcaagccaatcccctccttgggcactttttaattcaccaaagtatttttttatcttgggactgggtttggaccccagctgggaggcaagaggggtggagactgyttcccatcctaccctcgggcccacctggccacctgaggtgggcccaggaccagctggggcgtggggagggccgtaccccaccctcagcaccccttccatgtggagaaaggagtgaaacctttagggcagcttgccccggccccggccccagccagagttcctgcggagtgaagaggggcagcccttgcttgttgggattcctgacccaggccgcagctcttgcccttccctgtccctctaaagcaataatggtcccatccagrcagtcgggggctggcctaggagatatctgagggaggaggccacctctccaagggcttctgcaccctccaccctgtcccccagctctggtgagtcttggcggcagcagccatcataggaagggaccaaggcaaggcaggtgcctccaggtgtgcacgtggcatgtggcctgtggcctgtgtcccatgacccacccctgtgctccgtgcctccaccaccactggccaccaggctggcgcagccaaggycgaagctctggctgaaccctgtgctggtgtcctgaccaccctcccctctcttgcacccgcctctcccgtcagggcccaagtccctgttttctgagcccgggctgcctgggctgttggcactcacagacctggagcccctgggtgggtggtggggaggggcgctggcccagccggcctctctggcctcccacccgatgctgctttcccctgtggggatctcaggggctgtttgaggatatattttcactttgtgattatttcactttagatgctgatgatttgtttttgtatttttaatgggggtagcagctggactacccacgttctcacacccaccgtccgccctgctcctccctggctgccctggccctgaggtgtgggggctgcagcrtgttgctgaggagtgaggaatagttgagccccaagtcctgaagaggcgggccagccaggcgggctcaaggaaagggggtcccagtgggaggggcaggctgacatctgtgtttcaagtggggctcgccatgccgggggttcataggtcactggctctccaagtgccagaggtgggcaggtggtggcactgagcccccccaacactgtgccctggtggagaaagcactgacctgtcatgcccccctcaaacctcctcttytgacgggtgccccctcctctcccatccccctgccctcgtggccagcccggctggttttgtaagatrctgggttggtgcacagtgatttttttcttgtaatttaaacaggcccagcattgctggttctatttaatggacatgagataatgttagaggttttaaagtgattaaacgtgcagactatgcaaac

SEQ ID NO: 323 - DNA, 2576 bp, Homo sapiens
cggcaacaagtcctgtttttataagagagcgaggaggacacttctcagaaggggttgttktgcttktgcttatttccgtccatttccctctstgcgcgcggaccttccttttccagatggtgagagccgcggggacacccgacgccrgggcaggctgatccacgatcctgggtgtgcgtaacrccgcctggggctccgtgggcgagggacgtgtggggacaggtgcaccggaaactgccagactggagagttgaggcatcggaggcgcgagaacagcactactactgcggcgagacgagcgcggcgcatcccaaagcccggccaaatgcgctcgtccctgggaggggagggaggcgcgcctggagcggggacagtcttggtccgcgccctcctcccgggtctgtgccgggacccgggacccgggagccgtcgcaggtctcggtccaaggggccccttttctcggaagggcggcggccaagagcrgggaaggtggatctcaggtagcgagtctgggcttcggggacggcggggaggrgagccggacgggaggatgagctcccctggcaccgagagcgcgggaaagagcctgcagtaccgagtggaccacctgctgagcgccgtggagaatgagctgcaggcgggcagcgagaagggcgaccccacagagcgcgaactgcgcgtgggcctggaggagagcgagctgtggctgcgcttcaaggagctcaccaatgagatgatcgtgaccaagaacggcaggaggatgtttccggtgctgaaggtgaacgtgtctggcctggaccccaacgccatgtactccttcctgctggacttcgtggcggcggayaaccaccgctggaagtacgtgaacggggaatgggtgccggggggcaagccggagccgcaggcgcccagytgcgtctacatccaccccgactcgcccaacttcggggcccactggatgaaggctcccgtctccttcagcaaagtcaagctcaccaacaagctcaacggagggggccagatcatgctgaactccttgcataagtatgagcctcgaatccacatagtgagagttggggrtccacagcgcatgatcaccagccactgcttccctgagacccagttcatagcggtgactgcttatcagaacgaggagatcacagctcttaaaattaagtacaatccatttgcaaaagctttccttgatgcaaaggaaagaagtgatcacaaagagatgatggaggaacccggagacagccagcaacctgggtactcccaatgggggtggcttcttcctggaaccagcaccstgtgtccacctgcaaatcctcatcctcagtttggaggtgccctctccctcccctccaygcacagctgtgacaggtacccaaccctgaggagccaccggtcctcaccctaccccagcccctatgctcatcggaacaattctccaacctattctgacaactcacctgcatgtttatccatgctgcaatcccatgacaattggtccagccttggaatgcctgcccatcccagcatgctccccgtgagccacaatgccagcccacctaccagctccagtcagtaccccagcctgtggtctgtgagcaacrgcgccgtcaccccgggctcccaggcagcagccrtgtccarcgggctgggggcccagttcttccggggctcccccgcgcactacacacccctcacccatccggtctcggcrccctcttcctcgggatccccactgtacraaggggcggccgcggccacagacatcgtggacagccagtacgacgccgcagcccaaggccgcctcatagcctcatggacacctgtgtcgccaccttccatgtgaagcagcaaggcccaggtcccgaaagatgcagtgactttttgtcgtggcagccagtggtgactggattgacctactaggtacccagtggcagtctcaggttaagaaggaaatgcagcctcagtaacttccttttcaaagcagtggaggagcacacggcacctttccccagagccccagcatcccttgctcacacctgcagtagyggtgctgtcccaggtggcttmcagatgaacccaactgtggagatgaygcagttggcccaacctcactgayggtggaaaaatgtttgccagggtccagaaactttttttggtttatttctcatacagtgtattggcaactttggcacaccagaatttrtaaactccaccagtcctactttagtgagataaaaagcacactcttaatcttcttccttgttgctttcaagtagttagagttgagctgttaaggacagaataaaatcatagttgaggacagcaggttttagttgaattgaaaatttgactgctctgccccctakaatgtgtgtattttaagcatatgtagctaatctcttgtgttgttaaactataactgtttcatatttttcttttgacaaagtagccaaagacaatcagcagaaagcattttctgcamaataaaygcaatatgcaaaatgtgattcgtccagttattagtgaagcccctccttttgtgagtatttactgtttattg

SEQ ID NO: 324 - DNA, 3498 bp, Homo sapiens
taaaccaagaaggttatcctcaatcatctggtatcaatatataattatttttcacatttctgttactttttaatgagatttgaggttgttctgtgattgttatcagaattaccaatgcacaaaagccagaatgtatttggaaactagaagagctatttttgttttttggatttttctccaagttcaaggaaccaaagatatctccattaacatataccattctgaaactaaagacatagacaatcccccaagaaatgaaacaactgaaagtactgaaaaaatgtacaaaatgtcaactatgagacgaatattcgatttggcaaagcatcgaacaaaaagatccgcatttttcccaacgggggttaaagtctgtccacaggaatccatgaaacagattttagacagtcttcaagcttattatagattgagagtgtgtcaggaagcagtatgggaagcatatcggatctttctggatcgcatccctgacacaggggaatatcaggactgggtcagcatctgccagcaggagaccttctgcctctttgacattggaaaaaacttcagcaattcccaggagcacctggatcttctccagcagagaataaaacagagaagtttccctgacaggcaaatgaaatatctgcagagaagacattgggagagcctggtgaaaccattgtcatttcaacagatgttgccaacgtctcacttgggcctttccctctcactcctgatgacaccctcctcaatgaaattctcgataatacactcaacgacaccaagatgcctacaacagaaagagaaacagaattcgctgtgttggaggagcagagggtggagctcagcgtctctctggtaaaccagaagttcaaggcagagctcgctgactcccagtccccatattaccaggagctagcaggaaagtcccaacttcagatgcaaaagatatttaagaaacttccaggattcaaaaaaatccatgtgttaggatttagaccaaagaaagaaaaagatggctcaagctccacagagatgcaacttacggccatctttaagagacacagtgcagaagcaaaaagccctgcaagtgacctcctgtcttttgattccaacaaaattgaaagtgaggaagtctatcatggaaccatggaggaggacaagcaaccagaaatctatctcacagctacagacctcaaaaggctgatcagcaaagcactagaggaagaacaatctttggatgtggggacaattcagttcactgatgaaattgctggatcactgccagcctttggtcctgacacccaatcagagctgcccacatcttttgctgttataacagaggatgctactttgagtccagaacttcctcctgttgaaccccagcttgagacagtggacggagcagagcatggtctacctgacacttcttggtctccacctgctatrgcctctacctccctgtcagaagctccacctttctttatggcatcaagcatcttctctctgactgatcaagkcaccacagatacaatggccactgaccagacaatgctagtaccagggctcaccatccccaccagtgattattctgcaatcagccaactggctctgggaatttcacatccacctgcatcttcagatgacagccgatcaagtgcaggtggcgaagatatggtcagasacctagatgaaatggatctgtctgacactcctgccccatctgaggtaccagagctcagcgaatatgtttctgtcccagatcatttcttggaggataccactcctgtctcagctttacagtatatcaccactagttctatgaccattgcccccargggccgagagctggtagtgttcttcagtctgcgtgttgctaacatggccttctccaacgacctgttcaacaagagctctctggagtaccgagctctggagcaacaattcacacagctgctggttccatatctacgatccaatcttacaggatttaagcaacttgaaatacttaacttcagaaacgggagtgtgattgtgaatagcaaaatgaagtttgctaagtcagtgccgtataacctcaccaaggctgtgcacggggtcttggaggattttcgttctgctgcagcccaacaactccatctggaaatagacagctactctctcaacattgaaccagctgatcaagcagatccctgcaagttcctggcctgcggcgaatttgcccaatgtgtaaagaacgaayggactgaggaagcggagtgtcrctgcaaaccaggatatgacagccaggggagcctggacggtctggaaccaggcctctgtggccctggcacaaaggaatgcgaggtcctccagggaaagggagctccatgcaggttgccagatcactctgaaaatcaagcatacaaaactartgttaaaaagttccaaaatcaacaaaataacaaggtaatcagtaaaagaaattctgaattactgaccgtagaatatgaagaatttaaccatcaagattgggaaggaaattaaaaactgaaaatgtacaattatcatttaggctatctcaagagagatgatttgccttctcaaggaaaatggagacaggcatattcatgggtcatcaaaatccagacatacagtcaacactgagaatcagcacacaccatatttcaaatatagaagagtcatgtacttggcaaccagtaaattctgaagaaaaagacacttacttattattaaaaccccaaatgcaatcagcgaaacatatttttactattcttggatgatagtcaaaatgatcataagccaggtttgcttccaccttccctgaaaattttactcacagatcatttgcaacaagcatagcttacttattgtttagggactgaacaatttattgggaagcaaactctttatatgctagaaagtacatttaaaagatgactacttacgcagggagatgcaggtctctctaaacgcatgaatgtatgtagtgtgtaggcactgtagtgagtgtatatatgctccacactacgtctgataaacacaaacctcagtattcagttattaggcacactagttttatacgcaactactgcttacatagtagactgttttgttgccaataatctttgaattgttctttaaaagaaactgaggttcagatacacataccatggaaaaatcttacttttcttgttactacacaaagctattttaaagaagatgctatgttgggagaagggcgaagttgtactatatgacataatcaattcctgtcttccaccacagatgaacaatgtcttcctataataacttcagaatatttcctcacaccaactttagtgtgtgtatacctagactggcatcaatgtaatccaattcagtccattttttatgtgctgcttaatgaaaatgaatctgtctctatctctttcaaatgttctaatatcagatatatttgctacaaaccttaatttcaataaagtaaaagtgatatactca

SEQ ID NO: 325 - DNA, 3499 bp, Homo sapiens
taaaccaagaaggttatcctcaatcatctggtatcaatatataattatttttcacatttctgttactttttaatgagatttgaggttgttctgtgattgttatcagaattaccaatgcacaaaagccagaatgtatttggaaactagaagagctatttttgttttttggatttttctccaagttcaaggaaccaaagatatctccattaacatataccattctgaaactaaagacatagacaatcccccaagaaatgaaacaactgaaagtactgaaaaaatgtacaaaatgtcaactatgagacgaatattcgatttggcaaagcatcgaacaaaaagatccgcatttttcccaacgggggttaaagtctgtccacaggaatccatgaaacagattttagacagtcttcaagcttattatagattgagagtgtgtcaggaagcagtatgggaagcatatcggatctttctggatcgcatccctgacacaggggaatatcaggactgggtcagcatctgccagcaggagaccttctgcctctttgacattggaaaaaacttcagcaattcccaggagcacctggatcttctccagcagagaataaaacagagaagtttccctgacagaaaagatgaaatatctgcagagaagacattgggagagcctggtgaaaccattgtcatttcaacagatgttgccaacgtctcacttgggcctttccctctcactcctgatgacaccctcctcaatgaaattctcgataatacactcaacgacaccaagatgcctacaacagaaagagaaacagaattcgctgtgttggaggagcagagggtggagctcagcgtctctctggtaaaccagaagttcaaggcagagctcgctgactcccagtccccatattaccaggagctagcaggaaagtcccaacttcagatgcaaaagatatttaagaaacttccaggattcaaaaaaatccatgtgttaggatttagaccaaagaaagaaaaagatggctcaagctccacagagatgcaacttacggccatctttaagagacacagtgcagaagcaaaaagccctgcaagtgacctcctgtcttttgattccaacaaaattgaaagtgaggaagtctatcatggaaccatggaggaggacaagcaaccagaaatctatctcacagctacagacctcaaaaggctgatcagcaaagcactagaggaagaacaatctttggatgtggggacaattcagttcactgatgaaattgctggatcactgccagcctttggtcctgacacccaatcagagctgcccacatcttttgctgttataacagaggatgctactttgagtccagaacttcctcctgttgaaccccagcttgagacagtggacggagcagagcatggtctacctgacacttcttggtctccacctgctatrgcctctacctccctgtcagaagctccacctttctttatggcatcaagcatcttctctctgactgatcaagkcaccacagatacaatggccactgaccagacaatgctagtaccagggctcaccatccccaccagtgattattctgcaatcagccaactggctctgggaatttcacatccacctgcatcttcagatgacagccgatcaagtgcaggtggcgaagatatggtcagasacctagatgaaatggatctgtctgacactcctgccccatctgaggtaccagagctcagcgaatatgtttctgtcccagatcatttcttggaggataccactcctgtctcagctttacagtatatcaccactagttctatgaccattgcccccargggccgagagctggtagtgttcttcagtctgcgtgttgctaacatggccttctccaacgacctgttcaacaagagctctctggagtaccgagctctggagcaacaattcacacagctgctggttccatatctacgatccaatcttacaggatttaagcaacttgaaatacttaacttcagaaacgggagtgtgattgtgaatagcaaaatgaagtttgctaagtcagtgccgtataacctcaccaaggctgtgcacggggtcttggaggattttcgttctgctgcagcccaacaactccatctggaaatagacagctactctctcaacattgaaccagctgatcaagcagatccctgcaagttcctggcctgcggcgaatttgcccaatgtgtaaagaacgaayggactgaggaagcggagtgtcrctgcaaaccaggatatgacagccaggggagcctggacggtctggaaccaggcctctgtggccctggcacaaaggaatgcgaggtcctccagggaaagggagctccatgcaggttgccagatcactctgaaaatcaagcatacaaaactartgttaaaaagttccaaaatcaacaaaataacaaggtaatcagtaaaagaaattctgaattactgaccgtagaatatgaagaatttaaccatcaagattgggaaggaaattaaaaactgaaaatgtacaattatcatttaggctatctcaagagagatgatttgccttctcaaggaaaatggagacaggcatattcatgggtcatcaaaatccagacatacagtcaacactgagaatcagcacacaccatatttcaaatatagaagagtcatgtacttggcaaccagtaaattctgaagaaaaagacacttacttattattaaaaccccaaatgcaatcagcgaaacatatttttactattcttggatgatagtcaaaatgatcataagccaggtttgcttccaccttccctgaaaattttactcacagatcatttgcaacaagcatagcttacttattgtttagggactgaacaatttattgggaagcaaactctttatatgctagaaagtacatttaaaagatgactacttacgcagggagatgcaggtctctctaaacgcatgaatgtatgtagtgtgtaggcactgtagtgagtgtatatatgctccacactacgtctgataaacacaaacctcagtattcagttattaggcacactagttttatacgcaactactgcttacatagtagactgttttgttgccaataatctttgaattgttctttaaaagaaactgaggttcagatacacataccatggaaaaatcttacttttcttgttactacacaaagctattttaaagaagatgctatgttgggagaagggcgaagttgtactatatgacataatcaattcctgtcttccaccacagatgaacaatgtcttcctataataacttcagaatatttcctcacaccaactttagtgtgtgtatacctagactggcatcaatgtaatccaattcagtccattttttatgtgctgcttaatgaaaatgaatctgtctctatctctttcaaatgttctaatatcagatatatttgctacaaaccttaatttcaataaagtaaaagtgatatactca

SEQ ID NO: 326 - DNA, 3470 bp, Homo sapiens
taaaccaagaaggttatcctcaatcatctggtatcaatatataattatttttcacatttctgttactttttaatgagatttgaggttgttctgtgattgttatcagaattaccaatgcacaaaagccagaatgtatttggaaactagaagagctatttttgttttttggatttttctccaagttcaaggaaccaaagatatctccattaacatataccattctgaaactaaagacatagacaatcccccaagaaatgaaacaactgaaagtactgaaaaaatgtacaaaatgtcaactatgagacgaatattcgatttggcaaagcatcgaacaaaaagatccgcatttttcccaacgggggttaaagtctgtccacaggaatccatgaaacagattttagacagtcttcaagcttattatagattgagagtgtgtcaggaagcagtatgggaagcatatcggatctttctggatcgcatccctgacacaggggaatatcaggactgggtcagcatctgccagcaggagaccttctgcctctttgacattggaaaaaacttcagcaattcccaggagcacctggatcttctccagcagaaaagatgaaatatctgcagagaagacattgggagagcctggtgaaaccattgtcatttcaacagatgttgccaacgtctcacttgggcctttccctctcactcctgatgacaccctcctcaatgaaattctcgataatacactcaacgacaccaagatgcctacaacagaaagagaaacagaattcgctgtgttggaggagcagagggtggagctcagcgtctctctggtaaaccagaagttcaaggcagagctcgctgactcccagtccccatattaccaggagctagcaggaaagtcccaacttcagatgcaaaagatatttaagaaacttccaggattcaaaaaaatccatgtgttaggatttagaccaaagaaagaaaaagatggctcaagctccacagagatgcaacttacggccatctttaagagacacagtgcagaagcaaaaagccctgcaagtgacctcctgtcttttgattccaacaaaattgaaagtgaggaagtctatcatggaaccatggaggaggacaagcaaccagaaatctatctcacagctacagacctcaaaaggctgatcagcaaagcactagaggaagaacaatctttggatgtggggacaattcagttcactgatgaaattgctggatcactgccagcctttggtcctgacacccaatcagagctgcccacatcttttgctgttataacagaggatgctactttgagtccagaacttcctcctgttgaaccccagcttgagacagtggacggagcagagcatggtctacctgacacttcttggtctccacctgctatrgcctctacctccctgtcagaagctccacctttctttatggcatcaagcatcttctctctgactgatcaagkcaccacagatacaatggccactgaccagacaatgctagtaccagggctcaccatccccaccagtgattattctgcaatcagccaactggctctgggaatttcacatccacctgcatcttcagatgacagccgatcaagtgcaggtggcgaagatatggtcagasacctagatgaaatggatctgtctgacactcctgccccatctgaggtaccagagctcagcgaatatgtttctgtcccagatcatttcttggaggataccactcctgtctcagctttacagtatatcaccactagttctatgaccattgcccccargggccgagagctggtagtgttcttcagtctgcgtgttgctaacatggccttctccaacgacctgttcaacaagagctctctggagtaccgagctctggagcaacaattcacacagctgctggttccatatctacgatccaatcttacaggatttaagcaacttgaaatacttaacttcagaaacgggagtgtgattgtgaatagcaaaatgaagtttgctaagtcagtgccgtataacctcaccaaggctgtgcacggggtcttggaggattttcgttctgctgcagcccaacaactccatctggaaatagacagctactctctcaacattgaaccagctgatcaagcagatccctgcaagttcctggcctgcggcgaatttgcccaatgtgtaaagaacgaayggactgaggaagcggagtgtcrctgcaaaccaggatatgacagccaggggagcctggacggtctggaaccaggcctctgtggccctggcacaaaggaatgcgaggtcctccagggaaagggagctccatgcaggttgccagatcactctgaaaatcaagcatacaaaactartgttaaaaagttccaaaatcaacaaaataacaaggtaatcagtaaaagaaattctgaattactgaccgtagaatatgaagaatttaaccatcaagattgggaaggaaattaaaaactgaaaatgtacaattatcatttaggctatctcaagagagatgatttgccttctcaaggaaaatggagacaggcatattcatgggtcatcaaaatccagacatacagtcaacactgagaatcagcacacaccatatttcaaatatagaagagtcatgtacttggcaaccagtaaattctgaagaaaaagacacttacttattattaaaaccccaaatgcaatcagcgaaacatatttttactattcttggatgatagtcaaaatgatcataagccaggtttgcttccaccttccctgaaaattttactcacagatcatttgcaacaagcatagcttacttattgtttagggactgaacaatttattgggaagcaaactctttatatgctagaaagtacatttaaaagatgactacttacgcagggagatgcaggtctctctaaacgcatgaatgtatgtagtgtgtaggcactgtagtgagtgtatatatgctccacactacgtctgataaacacaaacctcagtattcagttattaggcacactagttttatacgcaactactgcttacatagtagactgttttgttgccaataatctttgaattgttctttaaaagaaactgaggttcagatacacataccatggaaaaatcttacttttcttgttactacacaaagctattttaaagaagatgctatgttgggagaagggcgaagttgtactatatgacataatcaattcctgtcttccaccacagatgaacaatgtcttcctataataacttcagaatatttcctcacaccaactttagtgtgtgtatacctagactggcatcaatgtaatccaattcagtccattttttatgtgctgcttaatgaaaatgaatctgtctctatctctttcaaatgttctaatatcagatatatttgctacaaaccttaatttcaataaagtaaaagtgatatactca

SEQ ID NO: 327 - DNA, 6233 bp, Homo sapiens
  misc_feature (1)...(6233): n = A,T,C or G, or insertion/deletion polymorphism (see Tables 1-2)
cgggagtgtggctgcagtgcgccgggacaccagggctccgcgctccgcactcaagaggctcccgcgtcccaacccctcgcgcccgcgcgttcgcggatccaggccgaggaccgaaaggggccgcccgagcccccggggccggcgcccagagagcccagcaaggccggccgccctgccggtgtgccgccggcgggtgcttctggaagggccaatgcgttcgggcagcagcccctgaagccgagcccgaggctaagtgggactgaccggggcccagagtggacgaaccgccagcatggggagagaccagcgcgcggtggccggccctgccctacggcggtggctgctgctggggacagtgaccgtggggttcctcgcccagagcgtcttggcgggtgtgaagaagtttgatgtgccgtgtggaggaagagattgcagtgggggctgccagtgctaccctgagaaaggtggacgtggtcagcctgggccagtgggcccccaggggtacaatgggccaccaggattacaaggattcccgggactgcagggacgtaaaggagacaagggtgaaaggggagcccccggagtaacrggacccaagggcgacgtgggagcaagaggcgtttctggattccctggtgccgatggaattcctggacacccggggcaaggtgggcccaggggaaggccgggctacgatggctgcaacggaacccagggagactcaggtccacaggggccccccggctctgaggggttcaccgggcctcccgggccccaaggaccaaaagggcagaaaggtgagccttatgcactgcctaaagaggagcgcgacagatatcggggtgaacctggagagcctggattgktyggtttccagggacctccyggccgccctgggcatgtgggacagatgggtccagttggagctccagggagaccaggaccacctggaccccctggaccaaaaggacagcaaggcaacagaggacttggtttctacggagttaagggtgaaaagggtgacgtagggcagccgggacccaacgggattccatcagacaccctccaccccatcatcgcgcccacaggagtcaccttccacccagatcagtacaagggtgaaaaaggcagtgagggggaaccaggaataagaggcatttccttgaagggagaagaaggaatcatgggctttcctggactgaggggttaccctggcttgagtggtgaaaaaggatcaccaggacagaagggaagccgaggcctggatggctatcaagggcctgatggaccccggggaccyaagggagaagccggagacccagggccccctggactacctgcctactcccctcacccttccctagcaaaaggtgccagaggtgacccgggattcccaggggcccaaggggagccaggaagccagggtgagccaggagacccgggcctcccaggtccccctggcctctccatcggagatggagatcagaggagaggcctgccgggtgagatgggacccaagggcttcatcggagaccccggcatccctgcgctctacgggggcccacctggacctgatggaaagcgagggcctccaggaccccccgggctccctggaccacctggacctgatggcttcctgtttgggctgaaaggagcaaaaggaagagcaggcttccctgggcttcccggctcccctggagcccgcggaccaaaggggtggaaaggtgacgctggggaatgcagatgtacagaaggcgacgaagctatcaaaggwcttccrggactgccaggacccaagggcttcgcaggcatcaacggggagccggggaggaaaggggacaraggagaccccggccaacacggcctccctgggttcccagggctcaagggagtgcctggcaacattggtgctcccggacccaaaggagcaaaaggagattccagaacaatcacaaccaaaggtgagcggggacagcccggcgtcccaggtgtgcccgggatgaaaggtgacgatggcagcccaggccgcgatgggctcgatggattccccggcctcccaggccctcccggtgatggcatcaagggccctccaggggacccaggctatccaggaatacctggaacgaagggtactccaggagaaatgggccccccaggactgggccttcccggcctcaaaggccaacgtggtttccctggagacgccggcttacctggaccaccaggcttcctgggccctcctggccccgcagggaccccaggacaaatagattgtgacacagatgtgaaaagggccgttggargtgacagacaggaggccatccagccaggttgcatagsagggcccaagggattgccaggcctgccaggacccccaggccccacaggtgccaaaggcctccgaggaatcccaggcttcgcaggagctgatggaggaccagggyccaggggcttgccaggagacgcaggtcgtgaagggttcccaggacccccagggttcataggaccccgaggatccaaaggtgcagtgggcctccctggcccagatggatccccaggtcccatcggcctgccagggccagatgggccccctggggaaaggggcctccctggagaagtcctgggagctcagcccgggccacggggagatgctggtgtgcctggacagcctgggcttaaaggccttcccggagacagaggcccccctggattcagaggaagccaagggatgcctgggatgccagggctgaagggccagccaggcctcccaggaccttccggccagccaggcctgtatgggcctccaggactgcatggattcccaggagctcctggccaagaggggcccttggggctgccaggaatcccaggccgtgaaggtctgcctggtgatagaggggaccctggggacacaggcgctcctggccctgtgggcatgaaaggtctctctggtgacagaggagatgctggcttcacaggggagcaaggccatccaggaagccctggatttaaaggaattgatggaatgcctgggacccccgggctaaaaggagatagaggctcacctgggatggatggtttccaaggcatgcctggactcaaagggagacccgggtttccagggagcaaaggcgaggctggatttttcggaatacccggtctgaagggtctggctggtgagccaggttttaaaggcagccgaggggaccctgggcccccaggaccacctcctgtcatcctgccaggaatgaaagacattaaaggagagaaaggagatgaagggcctatggggctgaaaggatacctgggcgcaaaaggtatccaaggaatgccaggcatcccagggctgtcaggaatccctgggctgcctgggaggcccggccacatcaaaggagtcaagggagacatcggagtccccggcatccccggtttgccaggattccctggggtggctggcccccctggaattacgggattcccaggattcataggaagccggggtgacaaaggtgccccagggagagcmggcctgtatggcgagattggcgcgactggtgatttcggtgacatcggggacactataaatttaccaggaagaccaggcctgaagggggagcggggcaccactggaataccaggtctgaagggattctttggagagaagggaacagaaggtgacatcggcttccctgggataacaggcgtgactggagtccaaggccctcctggacttaaaggamaaacaggctttccagggctgactgggcctccagggtcgcagggagagctggggcggattggactgcctggtggcaaaggagatgatggctggccgggagctccgggcttaccaggttttccgggactccgtgggatccgcggcttacacggcttgccaggcaccaagggctttccaggatccccaggttctgacatccacggagacccaggcttcccaggccctcctggggaaagaggtgacccaggagaggccaacacccttccaggccctgtgggagtcccaggacagaaaggagaccaaggagctccaggggaacgaggcccacctgggagcccaggacttcaggggttcccwggyatcacacccccttccaacatctctggggcacctggtgacaaaggggcgccagggatatttggcctgaaaggttatcggggcccaccagggccaccaggttctgctgctcttcctggaagcaaaggtgacacagggaacccaggagctccaggaaccccagggaccaaaggatgggccggggactccgggccccagggcaggcctggtgtgtttggtctcccaggagaaaaagggcccaggggtgaacaaggcttcatggggaacactggacccacyggggcrgtgggcgacagaggccccaagggacccaagggagacccaggattccctggtgccccygggactgtgggagcccccgggattgcaggaatcccccagaagattgccgtccaaccagggacagtgggtccccaggggaggcgaggcccccctggggcaccgggggagatggggccccagggcccccccggagaaccaggtttycgtggggctccagggaaagctgggccccaaggaagaggtggtgtgtctgctgttcccggcttccggggagatgaaggacccataggccaccaggggccgattggccaagmaggtgcaccaggccgtccagggagcccgggcctgccgggtatgccaggccgcagcgtcagcatcggctacctcctggtgaagcacagccagacggaccaggagcccatgtgcccngtgggcatgaacaaactctggagtggatacagcctgctgtacttcgagggccaggagaaggcgcacaaccaggacctggggctggcgggctcctgcctggcrcggttcagcaccatgcccttcctgtactgcaaccctggtgatgtctgctactatgccagccggaacgacaagtcctactggctctctaccactgcgccgctgcccatgatgcccgtggccgaggacgagatcaagccctacatcagccgctgttctgtgtgtgaggccccggccatcgccatcgcggtccacagtcaggatgtctccatcccacactgcccagctgggtggcggagtttgtggatcggatattccttcctcatgcacacggcggcgggagacgaaggcggtggccaatcactggtgtcaccrggcagctgtctagaggacttccgcgccacaccattcatcgaatgcaatggaggccgcrgcacctgccactactacgccaacaagtacagcttctggctgaccaccattcccgagcagagcttccagggctcgccctccgccgacacgctcaaggccggcctcatccgcacacacatcagccgctgccaggtgtgcatgaagaacctgtgagccggcgcgtgccaggaagggccattttggtgcttattcttaacttattacctcaggtgccaacccaaaaattggytttatttttttcttaaaaaaaaaagtctaccaaaggaatttgcatccagcagcagcacttagacctgccagccactgtcaccgagcgggtgcaagcactcggggtccctggagggcaagccctgcccacagaaagccaggagcagccctggcccccatcagccctgctagacgcaccgcctgaaggcacagctaaccacttcgcacacacccatgtaaccactgcactttccaatgccacagacaactcacattgttcaactcccttctcggggtgggacagacgagacaacagcacacaggcagccagccgtggccagaggctcgaggggctcagggsctcaggcacccgtccccacacgagggccccgtgggtgggcctggccctgctttytacgccaatgttatgccagctccatgttctcccaaataccgttgatgtgaattattttaaaggcaaaacygtgctctttattttaraaaacactgataatcacactgcggtaggtcattcttttgccacatccctatagaccactgggtttggcaaaactcaggcagaaccttgctacttgaaggtacaccccatagggtcggaggtgctgtccccactgccccacsttgtccctgagatttaacccctccactgctgggggtgagctrtactyttctgactgccccctcctgtgtaacgactacaaaataaaacttggttctgaatattttt

SEQ ID NO: 328 - DNA, 3868 bp, Homo sapiens
tctgtccccgcctcctggcctcctggctgaggggaagctgagtgggccacggcccatgtgtygcactcgcctcggctcccacacagccgcctctgctccagcaaggatgtggctcttccacactctgctctgcatagccagcctggccctgctggccgctttcaatgtggatgtggcccggccctggctcacgcccaagggaggtgcccctttcgtgctcagctcccttctgcaccaagaccccagcaccaaccagacctggctcctggtcaccagccccagaaccaagaggacaccagggcccctccatcgatgttcccttgtccaggatgaaatcctttgccatcctgtagagcatgtccccatccccaaggggaggcaccggggagtgaccgttgtccggagccaccacggtgttttgatatgcattcaagtgctggtccggcggcctcacagcctcagctcagaactcacaggcacctgtagcctcctgggccctgacctccgtccccaggctcaggccaacttcttcgaccttgaaaatctcctggatccagatgcacgtgtggacactggagactgctacagcaacaaagaaggcggtggagaagacgatgtgaacacagccaggcagcgccgggctctggagaaggaggaggaggaagacaaggaggaggaggaagacgaggaggaggaggaagctggcaccgagattgccatcatcctggatggctcaggaagcattgatcccccagactttcagagagccaaagacttcatctccaacatgatgaggaacttctatgaaaagtgttttgagtgcaactttgccttggtgcagtatggaggagtgatccagactgagtttgaccttcgggacagccaggatgtgatggcctccctcgccagagtccagaacatcactcaagtggggagtgtcaccaagactgcctcagccatgcaacacgtcttagacagcatcttcacctcaagccacggctccaggagaaaggcatccaaggtcatggtggtgctcaccgatggtggcatattcgaggaccccctcaaccttacgacagtcatcaactcccccaaaatgcagggtgttgagcgctttgccattggggtgggagaagaatttaagagtgctaggactgcgagggaactgaacctgatcgcctcagacccggatgagacccatgctttcaaggtgaccaactacatggcgctggatgggctgctgagcaaactgcggtacaacatcatcagcatggaaggcacggttggagacgcccttcactaccagctggcacagattggcttcagtgctcagatcctggatgagcggcaggtgctgctcggcgccgtcggggcctttgactggtccggaggggcgttgctctacgacacacgcagccgccggggccgcttcctgaaccagacagcggcggcggcggcagacgcggaggctgcgcagtacagctacctgggttacgctgtggccgtgctgcacaagacctgcagcctctcctacrtcgcgggggctccacrgtacaaacatcatggggccgtgtttgagctccagaaggagggcagagagkccagcttcctgccagtgctggagggagagcagatggggtcctattttggctctgagctgtgccctgtggacattgacatggatggaagcacggacttcttgctggtggctgctccattttaccacgttcatggagaagaaggcagagtctacgtgtaccgtctcagcgagcaggatggttctttctccttggcacgcatactgagtgggcaccccgggttcaccaatgcccgctttggctttgccatggcggctatgggggatctcagtcaggataagctcacagatgtggccatcggggcccccctggaaggttttggggcagatgatggtgccagcttcggcagtgtgtatatctacaayggacactgggacggcctctccgccagcccctcgcagcggatcagagcctccacggtggccccaggactccagtacttcggcatgtccatggctggtggctttgatattagtggcgacggccttgccgacatcaccgtgggcactctgggccaggcggttgtgttccgctcccggcctgtggttcgcctgaaggtctccatggccttcacccccagcgcactgcccatcggcttcaacggcgtcgtgaatgtccgtttatgttttgaaatcagctctgtaaccacagcctctgagtcaggcctccgygaggcacttctcaacttcacgctggatgtggatgtggggaagcagaggagacggctgcagtgttcagacgtaagaagctgtctgggctgcctgagggagtggagcagcggatcccagctttgtgaggacctcctgctcatgcccacagagggagagctctgtgaggaggactgcttctccaatgccagtgtcaaagtcagctaccagctccagacccctgagggacagacggaccatccccagcccatcctggaccgctacactgagccctttgccatcttccagctgccctatgagaaggcctgcaagaataagctgttttgtgtcgcagaattacagttggccaccrccgtctctcagcaggagttggtggtgggtctcacaaaggagctgaccctgaacattaacctaactaactccggggaagattcctacatgacaagcatggccttgaattaccccagaaacctgcagttgaagaggatgcaaaagcctccctctccaaacattcastgtgatgaccctcagccggttgcttctgtcctgatcatgaactgcaggattggtcaccccgtcctcaagaggtcatctgctcatgtttcagtcgtttggcagctagaggagaatgcctttccaaacaggacagcagacatcactgtgactgtcaccaattccaatgaaagayggtctttggccaacgagacccacacccttcaattcaggcatggcttcgttgcagttctgtccaaaccatccataatgtacgtgaacacaggccaggggctttctcaccacaaagaattcctcttccatgtacatggggagaacctctttggagcagaataccagttgcaaatttgcgtcccaaccaaattacgaggtctccaggttgyagcagtgaagaagctgacgaggactcaggcctccacggtgtgcacctggagtcaggagcgcgcttgtgcgtacagttcggttcagcatgtggaagaakggcattcagtgagctgtgtcatcgcttcagataaagaaaatgtcaccgtggctgcagagatctcctgggatcactctgaggagttactaaaagatgtaactgaactgcagatccttggtgaaatatctttcaacaaatctctatatgagggactkaatgcagagaaccacagaactaagatcactgtcgtcttcctgaaagatgagaagtaccattctttgcctatcatcattaaaggcagcgttggtggacttctggtgttgatcgtgattctggtcatcctgttcaagtgtggcttttttaaaagaaaatatcaacaactgaacttggagagcatcaggaaggcccagctgaaatcagagaatctgctcgaagaagagaattaggacctgctatccactgggagaggctatcagccagtcctgggacttggagacccagcatcctttgcattactttttccttcaggatgatctagagcagcatggagctgttggtagaatattagtttttaaccatacattgtcccaaaagtgtctgtgcattgtgcaaaaagtaaacttaggaaacatttggtattaaataaatttacacttttctttgcarta

SEQ ID NO: 329 - DNA, 2625 bp, Homo sapiens
cgcgcccctcccagccgcgcgcgcccgcctgcggtttgtctgcgcagccctggaggcygcgacttccggactgctcctggccgcagggggcgccgccrtcgcacagagaggcctgggcggggcggaccggcgctgggcagccaggacagccgcggcagccgggtccgcagggcagcagccggcctctcccactgcagccctcccgcccgcctaccgtccggcgcgatggcggggagtagctcgctggaggcggtgcgcaggaagatccggagcctgcaggagcaggcggacgccgctgaggagcgcgcgggcaccctgcagcgcgagctggaccacgagaggaagctgagggagaccgctgaagccgacgtagcttctctgaacagacgcatccagctggytgaggaagagttggatcgtgcccaggagcgtctggcaacagctttgcagaagctggaggaagctgagaaggcagcagatgagagtgagagaggcatgaaagtcattgagagtcgagcccaaaaagatgaagaaaaaatggaaattcaggagatccaactgaaagaggcmaagcacattgctgaagatgccgaccgcaaatatgaagaggtggcccgtaagctggtcatcattgagagcgacctggaacgtgcagaggagcgggctgagctctcagaaggcaaatgtgccgagcttgaagargaattgaaaactgtgacgaacaacttgaagtcactggaggctcaggctgagaagtactcgcagaaggaagacagatatgaggaagagatcaaggtcctttccgacaagctgaaggaggctgagactcgggctgagtttgcggagaggtcagtaactaaattggagaaaagcattgatgacttagaagatcaactctaccagcaacttgagcaaaatcgccgcctcactaatgaactaaagctggccctgaatgaggattaaacttaagagtgaaaaaacttgggctgaattctaggcgtggagcccatgtgcagaaaatctaagactgtcctaccttcaactaatagagttgaaaacagttgctttctgcagaaatgcaaatgcaaggaattggctgaaaggctggccttgcctgcttgtttctctatatggctggaataattacgttctctttaatcacaaaacagcttttatggtagaatacttatatcaattcakcactgctccttgaaatagcaggtcctcttgtttgaactgataaataatgaggagcccccccaaaaaatgttttctatttcctgacagccatgagtcctactttaagtatgtatatatatatatatatgtgtgtgtgtgtgtgtgtgtgatatattcctatcagatactcatattcctaacttctaaatatctggtatagtgtttgaaatatgattaaatgtacctatgcttgggcaaaatagcttttgaaaacaggaactcatgccagaagcccctggttgtctgaaaggtatgctttactcagtctaatggtgctgttggagtctggggagaatgtcatgctaataaatagaacactataaaaatattaagagaatgtcctaatgaagtgtgcatgaaacatgttgacaattttttatgagcaacagaaataaatcattttaaaagttctcagaaaacctatttatgtcatctttgcttttgtgagtttgtgttaccgcacaactcccagacttttaactgcctgtaccttggaaatgtctgctgttcgtaacttcttcagtttgtataacagtgctgcagctgtatttggtttttacctctccctgttcccacggcacaccgtcagtgaaccytcaccaaacmcyacgtgcattttatcctcagtgaattgttggtggaggtgcacctgactgctctgtgagaatccgtgccatggctcctttgggtcaaagatgccctcccctccgtcttaggttcttgtctagaaatgagtaatgtcttacaagcatgcctagttctaatcatctcatcctgtgtttgtgattgatgtttgcctgcctaaatgtacaaaccaccattgtgtccaaagcacagctattcatgacttaattttctaatctcaccacagagaaagtggctcatgccaaagaagaaaaccttagtatgcatcagatgctggatcagactttactggagttaaacaacatgtgaaaacctccttagctgcgaccacattctttcattttkttttgttttgttttgtttttaaacacctgcttaccccttaaatgcaatwtatttacttttaccactgtcacagaaacatccacaagataccagctaggtcagggggtggggaaaacacatacaaaaaggcaagcccatgtcagggcgatcctggttcaaatgtgccatttcccgggttgatgctgccacactttgtagagagtttagcaacacagtgtgcttagtcagygtaggaatcctcaytwaagcagragaagttyyattcaaagtgccaatgatagagtcaacaggaaggttaatgttggaaacacaatcaggtgtggattggtgctacyttgaacaaaagtaatttattttgtcttgagttttactacaagatgagactatggatcccgc

SEQ ID NO: 330 - DNA, 1801 bp, Homo sapiens
gagaggaggaaggggggcaggagaaaaaagcttttccaaaaaagtattggctgtcttgaggaatgcggtcgcccccttgggaaagtacatatctgggagaagcaggcggctccgcgctcgcactcccgctcctccgcccgaccgcgcgctcgccccgccgctcctgctgcagccccagggcccctcgccgccgccaccatggacgccatcaagaagaagatgcagatgctgaagctcgacaaggagaacgccttggatcgagctgagcaggcggaggccgacaagaaggcggcggaagacaggagcaagcagctgraagatgagctggtgtcactgcaaaagaaactcaagggcaccraagatgaactggacaaatactctgaggytctcaaagatgcccaggagaagctggagctggcagagaaaaaggccaccgatgctgaagccgacgtagcttctctgaacagacgcatccagctggytgaggaagagttggatcgtgcccaggagcgtctggcaacagctttgcagaagctggaggaagctgagaaggcagcagatgagagtgagagaggcatgaaagtcattgagagtcgagcccaaaaagatgaagaaaaaatggaaattcaggagatccaactgaaagaggcmaagcacattgctgaagatgccgaccgcaaatatgaagaggtggcccgtaagctggtcatcattgagagcgacctggaacgtgcagaggagcgggctgagctctcagaaggccaagtccgacagctggaagaacaattaagaataatggatcagaccttgaaagcattaatggctgcagaggataagtactcgcagaaggaagacagatatgaggaagagatcaaggtcctttccgacaagctgaaggaggctgagactcgggctgagtttgcggagaggtcagtaactaaattggagaaaagcattgatgacttagaagagaaagtggctcatgccaaagaagaaaaccttagtatgcatcagatgctggatcagactttactggagttaaacaacatgtgaaaacctccttagctgcgaccacattctttcattttkttttgttttgttttgtttttaaacacctgcttaccccttaaatgcaatwtatttacttttaccactgtcacagaaacatccacaagataccagctaggtcagggggtggggaaaacacatacaaaaaggcaagcccatgtcagggcgatcctggttcaaatgtgccatttcccgggttgatgctgccacactttgtagagagtttagcaacacagtgtgcttagtcagygtaggaatcctcaytwaagcagragaagttyyattcaaagtgccaatgatagagtcaacaggaaggttaatgttggaaacacaatcaggtgtggattggtgctacyttgaacaaaaggtccccctgtggtcttttgttcaacattgtacaatgtagaactctgtccaacactaatttattttgtcttgagttttactacaagatgagactatggatcccgcatgcctgaattcactaaagccaagggtctgtaagccacgctgctcttcygagacttccattcctttctgattggcacacgtgcagctcatgacaatctgtaggataacaatcagtgtggatttccactctttkcagtccttcatgttaaagatttagacaccacatacaactggtaaaggacgttttcttgagagttttaactatatgtaaacattgtataatgatatggaataaaatgcacattktaggacattttctaaa

SEQ ID NO: 331 - DNA, 1766 bp, Homo sapiens
gagaggaggaaggggggcaggagaaaaaagcttttccaaaaaagtattggctgtcttgaggaatgcggtcgcccccttgggaaagtacatatctgggagaagcaggcggctccgcgctcgcactcccgctcctccgcccgaccgcgcgctcgccccgccgctcctgctgcagccccagggcccctcgccgccgccaccatggacgccatcaagaagaagatgcagatgctgaagctcgacaaggagaacgccttggatcgagctgagcaggcggaggccgacaagaaggcggcggaagacaggagcaagcagctgraagatgagctggtgtcactgcaaaagaaactcaagggcaccraagatgaactggacaaatactctgaggytctcaaagatgcccaggagaagctggagctggcagagaaaaaggccaccgatgctgaagccgacgtagcttctctgaacagacgcatccagctggytgaggaagagttggatcgtgcccaggagcgtctggcaacagctttgcagaagctggaggaagctgagaaggcagcagatgagagtgagagaggcatgaaagtcattgagagtcgagcccaaaaagatgaagaaaaaatggaaattcaggagatccaactgaaagaggcmaagcacattgctgaagatgccgaccgcaaatatgaagaggtggcccgtaagctggtcatcattgagagcgacctggaacgtgcagaggagcgggctgagctctcagaaggccaagtccgacagctggaagaacaattaagaataatggatcagaccttgaaagcattaatggctgcagaggataagtactcgcagaaggaagacagatatgaggaagagatcaaggtcctttccgacaagctgaaggaggctgagactcgggctgagtttgcggagaggtcagtaactaaattggagaaaagcattgatgacttagaagagaaagtggctcatgccaaagaagaaaaccttagtatgcatcagatgctggatcagactttactggagttaaacaacatgtgaaaacctccttagctgcgaccacattctttcattttkttttgttttgttttgtttttaaacacctgcttaccccttaaatgcaatwtatttacttttaccactgtcacagaaacatccacaagataccagctaggtcagggggtggggaaaacacatacaaaaaggcaagcccatgtcagggcgatcctggttcaaatgtgccatttcccgggttgatgctgccacactttgtagagagtttagcaacacagtgtgcttagtcagygtaggaatcctcaytwaagcagragaagttaatgttggaaacacaatcaggtgtggattggtgctacyttgaacaaaaggtccccctgtggtcttttgttcaacattgtacaatgtagaactctgtccaacactaatttattttgtcttgagttttactacaagatgagactatggatcccgcatgcctgaattcactaaagccaagggtctgtaagccacgctgctcttcygagacttccattcctttctgattggcacacgtgcagctcatgacaatctgtaggataacaatcagtgtggatttccactctttkcagtccttcatgttaaagatttagacaccacatacaactggtaaaggacgttttcttgagagttttaactatatgtaaacattgtataatgatatggaataaaatgcacattktaggacattttctaaattt

SEQ ID NO: 332 - DNA, 2521 bp, Homo sapiens
cgcactcccgctcctccgcccgaccgcgcgctcgccccgccgctcctgctgcagccccagggcccctcgccgccgccaccatggacgccatcaagaagaagatgcagatgctgaagctcgacaaggagaacgccttggatcgagctgagcaggcggaggccgacaagaaggcggcggaagacaggagcaagcaggtctgcgcctccccggccctgcgcccgcgcccagagcgccgggactcgagcctggcacccccggctggatccccaccccgaggactcggggagccaccaccctacccccaccaccacccagggcggccagggcgcgcgtctggaaagaaggaagggaaacgcaagagccaggcttagtctaacttagtctggtctgaggacgcttatttcccttctctggttcccatggcccgcgaaatcaagtcctagaggcgctttattctcaggactgggaatcagtttgggggagggaggaggacacccggttcctggggacgtttgaaggaagggcgagggatggagaaagggggtcgagtaactcaagtgttagaagttcgttgacttttgactggggagaaaggaaccttaaacttggggaggagaagggagtcctggagttgttacctaagaacaaagatggggcggaatggaggctacagcccgaaagccaggccagcagtggcgttcttctgtgtccccaagtagtggacttgagcccgctgagacctcggcaggagtctcgtcccagggcaggtgggtgtgcggggtgagccgcggagcggttccagctcgggtaaagaggaagttacctcgggtcctttgcactccaactcggcggcgccccgagcccgaggggccccagccaacccgacgcccgtgtgttgtgtgtgtctaacacccggtccgtgccggccgcccgcgcccgcccgccgctgcccccagctcgaggaggacatcgcggccaaggagaagttgctgcgggtgtcggaggacgagcgggaccgggtgctggaggagctgcacaaggcggaggacagcctcctggccgccgaagaggccgccgccaaggctgaagccgacgtagcttctctgaacagacgcatccagctggytgaggaagagttggatcgtgcccaggagcgtctggcaacagctttgcagaagctggaggaagctgagaaggcagcagatgagagtgagagaggcatgaaagtcattgagagtcgagcccaaaaagatgaagaaaaaatggaaattcaggagatccaactgaaagaggcmaagcacattgctgaagatgccgaccgcaaatatgaagaggtggcccgtaagctggtcatcattgagagcgacctggaacgtgcagaggagcgggctgagctctcagaaggccaagtccgacagctggaagaacaattaagaataatggatcagaccttgaaagcattaatggctgcagaggataagcaaatgtgccgagcttgaagargaattgaaaactgtgacgaacaacttgaagtcactggaggctcaggctgagaagtactcgcagaaggaagacagatatgaggaagagatcaaggtcctttccgacaagctgaaggaggctgagactcgggctgagtttgcggagaggtcagtaactaaattggagaaaagcattgatgacttagaagagaaagtggctcatgccaaagaagaaaaccttagtatgcatcagatgctggatcagactttactggagttaaacaacatgtgaaaacctccttagctgcgaccacattctttcattttkttttgttttgttttgtttttaaacacctgcttaccccttaaatgcaatwtatttacttttaccactgtcacagaaacatccacaagataccagctaggtcagggggtggggaaaacacatacaaaaaggcaagcccatgtcagggcgatcctggttcaaatgtgccatttcccgggttgatgctgccacactttgtagagagtttagcaacacagtgtgcttagtcagygtaggaatcctcaytwaagcagragaagttyyattcaaagtgccaatgatagagtcaacaggaaggttaatgttggaaacacaatcaggtgtggattggtgctacyttgaacaaaaggtccccctgtggtcttttgttcaacattgtacaatgtagaactctgtccaacactaatttattttgtcttgagttttactacaagatgagactatggatcccgcatgcctgaattcactaaagccaagggtctgtaagccacgctgctcttcygagacttccattcctttctgattggcacacgtgcagctcatgacaatctgtaggataacaatcagtgtggatttccactctttkcagtccttcatgttaaagatttagacaccacatacaactggtaaaggacgttttcttgagagttttaactatatgtaaacattgtataatgatatggaataaaatgcacattktaggacattttctaaa

SEQ ID NO: 333 - DNA, 1766 bp, Homo sapiens
gagaggaggaaggggggcaggagaaaaaagcttttccaaaaaagtattggctgtcttgaggaatgcggtcgcccccttgggaaagtacatatctgggagaagcaggcggctccgcgctcgcactcccgctcctccgcccgaccgcgcgctcgccccgccgctcctgctgcagccccagggcccctcgccgccgccaccatggacgccatcaagaagaagatgcagatgctgaagctcgacaaggagaacgccttggatcgagctgagcaggcggaggccgacaagaaggcggcggaagacaggagcaagcagctcgaggaggacatcgcggccaaggagaagttgctgcgggtgtcggaggacgagcgggaccgggtgctggaggagctgcacaaggcggaggacagcctcctggccgccgaagaggccgccgccaaggctgaagccgacgtagcttctctgaacagacgcatccagctggytgaggaagagttggatcgtgcccaggagcgtctggcaacagctttgcagaagctggaggaagctgagaaggcagcagatgagagtgagagaggcatgaaagtcattgagagtcgagcccaaaaagatgaagaaaaaatggaaattcaggagatccaactgaaagaggcmaagcacattgctgaagatgccgaccgcaaatatgaagaggtggcccgtaagctggtcatcattgagagcgacctggaacgtgcagaggagcgggctgagctctcagaaggcaaatgtgccgagcttgaagargaattgaaaactgtgacgaacaacttgaagtcactggaggctcaggctgagaagtactcgcagaaggaagacagatatgaggaagagatcaaggtcctttccgacaagctgaaggaggctgagactcgggctgagtttgcggagaggtcagtaactaaattggagaaaagcattgatgacttagaagagaaagtggctcatgccaaagaagaaaaccttagtatgcatcagatgctggatcagactttactggagttaaacaacatgtgaaaacctccttagctgcgaccacattctttcattttkttttgttttgttttgtttttaaacacctgcttaccccttaaatgcaatwtatttacttttaccactgtcacagaaacatccacaagataccagctaggtcagggggtggggaaaacacatacaaaaaggcaagcccatgtcagggcgatcctggttcaaatgtgccatttcccgggttgatgctgccacactttgtagagagtttagcaacacagtgtgcttagtcagygtaggaatcctcaytwaagcagragaagttaatgttggaaacacaatcaggtgtggattggtgctacyttgaacaaaaggtccccctgtggtcttttgttcaacattgtacaatgtagaactctgtccaacactaatttattttgtcttgagttttactacaagatgagactatggatcccgcatgcctgaattcactaaagccaagggtctgtaagccacgctgctcttcygagacttccattcctttctgattggcacacgtgcagctcatgacaatctgtaggataacaatcagtgtggatttccactctttkcagtccttcatgttaaagatttagacaccacatacaactggtaaaggacgttttcttgagagttttaactatatgtaaacattgtataatgatatggaataaaatgcacattktaggacattttctaaattt

SEQ ID NO: 334 - DNA, 1964 bp, Homo sapiens
gagaggaggaaggggggcaggagaaaaaagcttttccaaaaaagtattggctgtcttgaggaatgcggtcgcccccttgggaaagtacatatctgggagaagcaggcggctccgcgctcgcactcccgctcctccgcccgaccgcgcgctcgccccgccgctcctgctgcagccccagggcccctcgccgccgccaccatggacgccatcaagaagaagatgcagatgctgaagctcgacaaggagaacgccttggatcgagctgagcaggcggaggccgacaagaaggcggcggaagacaggagcaagcagctgraagatgagctggtgtcactgcaaaagaaactcaagggcaccraagatgaactggacaaatactctgaggytctcaaagatgcccaggagaagctggagctggcagagaaaaaggccaccgatgctgaagccgacgtagcttctctgaacagacgcatccagctggytgaggaagagttggatcgtgcccaggagcgtctggcaacagctttgcagaagctggaggaagctgagaaggcagcagatgagagtgagagaggcatgaaagtcattgagagtcgagcccaaaaagatgaagaaaaaatggaaattcaggagatccaactgaaagaggcmaagcacattgctgaagatgccgaccgcaaatatgaagaggtggcccgtaagctggtcatcattgagagcgacctggaacgtgcagaggagcgggctgagctctcagaaggcaaatgtgccgagcttgaagargaattgaaaactgtgacgaacaacttgaagtcactggaggctcaggctgagaagtactcgcagaaggaagacagatatgaggaagagatcaaggtcctttccgacaagctgaaggaggctgagactcgggctgagtttgcggagaggtcagtaactaaattggagaaaagcattgatgacttagaagacgagctgtacgctcagaaactgaagtacaaagccatcagcgaggagctggaccacgctctcaacgatatgacttccatgtaaactttctttgcttcacttctcccaagactccctcgtcgagctggatgtcccacctctctgagctctgcatttgtctattctccagctgaccctggttctctctcttagcatcctgccttagagccaggcacacactgtgctttctattktacagaagctcttcgtttcagtgtcaaataaacactgtgtaagctatttctgtttgctattctttttacttcttatttattgacattttagtttcaacattgaataaaactacaaagctgcttcacacatatgagggttagtgtttggctgctgctttttctttttaaatactgaacactatacagaattatatcaggagtttctaaagcagtagttccttgttgaacttcaaaaaaatacccaggcctgcattccctctcagagttctgattttcaaaggttagaatgaggtctggacatctgggggggttttgggggaattgtgatggctctgctttgcagtctgggtcacacaggggacattgcttgttgagagttgaaaggtctggcttgatcagtgtcttcctttgctggaggtttagctcgggatgtagtgacccctctgtgttgattatttcggtggccttacttgggaggacctggctaactaatgaaaggctcatgatgaatggttctgtagctgtcccatattactaggaagttatacattgagaagggtgaaaaagaacttggattcaaacaatgtaagttttggttattgtcgatcatccttttatagcacaaagaaaagttcaagcttttttgaagtatattcatgactcagccacctttattttgatcatgaaaatgacatcttaggttttctaaatatgattactctgtttagtcgtgatttgttttgtgctttttagcacatactc

SEQ ID NO: 335 - DNA, 1766 bp, Homo sapiens
gagaggaggaaggggggcaggagaaaaaagcttttccaaaaaagtattggctgtcttgaggaatgcggtcgcccccttgggaaagtacatatctgggagaagcaggcggctccgcgctcgcactcccgctcctccgcccgaccgcgcgctcgccccgccgctcctgctgcagccccagggcccctcgccgccgccaccatggacgccatcaagaagaagatgcagatgctgaagctcgacaaggagaacgccttggatcgagctgagcaggcggaggccgacaagaaggcggcggaagacaggagcaagcagctcgaggaggacatcgcggccaaggagaagttgctgcgggtgtcggaggacgagcgggaccgggtgctggaggagctgcacaaggcggaggacagcctcctggccgccgaagaggccgccgccaaggctgaagccgacgtagcttctctgaacagacgcatccagctggytgaggaagagttggatcgtgcccaggagcgtctggcaacagctttgcagaagctggaggaagctgagaaggcagcagatgagagtgagagaggcatgaaagtcattgagagtcgagcccaaaaagatgaagaaaaaatggaaattcaggagatccaactgaaagaggcmaagcacattgctgaagatgccgaccgcaaatatgaagaggtggcccgtaagctggtcatcattgagagcgacctggaacgtgcagaggagcgggctgagctctcagaaggccaagtccgacagctggaagaacaattaagaataatggatcagaccttgaaagcattaatggctgcagaggataagtactcgcagaaggaagacagatatgaggaagagatcaaggtcctttccgacaagctgaaggaggctgagactcgggctgagtttgcggagaggtcagtaactaaattggagaaaagcattgatgacttagaagagaaagtggctcatgccaaagaagaaaaccttagtatgcatcagatgctggatcagactttactggagttaaacaacatgtgaaaacctccttagctgcgaccacattctttcattttkttttgttttgttttgtttttaaacacctgcttaccccttaaatgcaatwtatttacttttaccactgtcacagaaacatccacaagataccagctaggtcagggggtggggaaaacacatacaaaaaggcaagcccatgtcagggcgatcctggttcaaatgtgccatttcccgggttgatgctgccacactttgtagagagtttagcaacacagtgtgcttagtcagygtaggaatcctcaytwaagcagragaagttaatgttggaaacacaatcaggtgtggattggtgctacyttgaacaaaaggtccccctgtggtcttttgttcaacattgtacaatgtagaactctgtccaacactaatttattttgtcttgagttttactacaagatgagactatggatcccgcatgcctgaattcactaaagccaagggtctgtaagccacgctgctcttcygagacttccattcctttctgattggcacacgtgcagctcatgacaatctgtaggataacaatcagtgtggatttccactctttkcagtccttcatgttaaagatttagacaccacatacaactggtaaaggacgttttcttgagagttttaactatatgtaaacattgtataatgatatggaataaaatgcacattktaggacattttctaaattt

SEQ ID NO: 336 - DNA, 1685 bp, Homo sapiens
cgcgcccctcccagccgcgcgcgcccgcctgcggtttgtctgcgcagccctggaggcygcgacttccggactgctcctggccgcagggggcgccgccrtcgcacagagaggcctgggcggggcggaccggcgctgggcagccaggacagccgcggcagccgggtccgcagggcagcagccggcctctcccactgcagccctcccgcccgcctaccgtccggcgcgatggcggggagtagctcgctggaggcggtgcgcaggaagatccggagcctgcaggagcaggcggacgccgctgaggagcgcgcgggcaccctgcagcgcgagctggaccacgagaggaagctgagggagaccgctgaagccgacgtagcttctctgaacagacgcatccagctggytgaggaagagttggatcgtgcccaggagcgtctggcaacagctttgcagaagctggaggaagctgagaaggcagcagatgagagtgagagaggcatgaaagtcattgagagtcgagcccaaaaagatgaagaaaaaatggaaattcaggagatccaactgaaagaggcmaagcacattgctgaagatgccgaccgcaaatatgaagaggtggcccgtaagctggtcatcattgagagcgacctggaacgtgcagaggagcgggctgagctctcagaaggcaaatgtgccgagcttgaagargaattgaaaactgtgacgaacaacttgaagtcactggaggctcaggctgagaagtactcgcagaaggaagacagatatgaggaagagatcaaggtcctttccgacaagctgaaggaggctgagactcgggctgagtttgcggagaggtcagtaactaaattggagaaaagcattgatgacttagaagagaaagtggctcatgccaaagaagaaaaccttagtatgcatcagatgctggatcagactttactggagttaaacaacatgtgaaaacctccttagctgcgaccacattctttcattttkttttgttttgttttgtttttaaacacctgcttaccccttaaatgcaatwtatttacttttaccactgtcacagaaacatccacaagataccagctaggtcagggggtggggaaaacacatacaaaaaggcaagcccatgtcagggcgatcctggttcaaatgtgccatttcccgggttgatgctgccacactttgtagagagtttagcaacacagtgtgcttagtcagygtaggaatcctcaytwaagcagragaagttaatgttggaaacacaatcaggtgtggattggtgctacyttgaacaaaaggtccccctgtggtcttttgttcaacattgtacaatgtagaactctgtccaacactaatttattttgtcttgagttttactacaagatgagactatggatcccgcatgcctgaattcactaaagccaagggtctgtaagccacgctgctcttcygagacttccattcctttctgattggcacacgtgcagctcatgacaatctgtaggataacaatcagtgtggatttccactctttkcagtccttcatgttaaagatttagacaccacatacaactggtaaaggacgttttcttgagagttttaactatatgtaaacattgtataatgatatggaataaaatgcacattktaggacattttctaaattt

SEQ ID NO: 337 - DNA, 1685 bp, Homo sapiens
cgcgcccctcccagccgcgcgcgcccgcctgcggtttgtctgcgcagccctggaggcygcgacttccggactgctcctggccgcagggggcgccgccrtcgcacagagaggcctgggcggggcggaccggcgctgggcagccaggacagccgcggcagccgggtccgcagggcagcagccggcctctcccactgcagccctcccgcccgcctaccgtccggcgcgatggcggggagtagctcgctggaggcggtgcgcaggaagatccggagcctgcaggagcaggcggacgccgctgaggagcgcgcgggcaccctgcagcgcgagctggaccacgagaggaagctgagggagaccgctgaagccgacgtagcttctctgaacagacgcatccagctggytgaggaagagttggatcgtgcccaggagcgtctggcaacagctttgcagaagctggaggaagctgagaaggcagcagatgagagtgagagaggcatgaaagtcattgagagtcgagcccaaaaagatgaagaaaaaatggaaattcaggagatccaactgaaagaggcmaagcacattgctgaagatgccgaccgcaaatatgaagaggtggcccgtaagctggtcatcattgagagcgacctggaacgtgcagaggagcgggctgagctctcagaaggccaagtccgacagctggaagaacaattaagaataatggatcagaccttgaaagcattaatggctgcagaggataagtactcgcagaaggaagacagatatgaggaagagatcaaggtcctttccgacaagctgaaggaggctgagactcgggctgagtttgcggagaggtcagtaactaaattggagaaaagcattgatgacttagaagagaaagtggctcatgccaaagaagaaaaccttagtatgcatcagatgctggatcagactttactggagttaaacaacatgtgaaaacctccttagctgcgaccacattctttcattttkttttgttttgttttgtttttaaacacctgcttaccccttaaatgcaatwtatttacttttaccactgtcacagaaacatccacaagataccagctaggtcagggggtggggaaaacacatacaaaaaggcaagcccatgtcagggcgatcctggttcaaatgtgccatttcccgggttgatgctgccacactttgtagagagtttagcaacacagtgtgcttagtcagygtaggaatcctcaytwaagcagragaagttaatgttggaaacacaatcaggtgtggattggtgctacyttgaacaaaaggtccccctgtggtcttttgttcaacattgtacaatgtagaactctgtccaacactaatttattttgtcttgagttttactacaagatgagactatggatcccgcatgcctgaattcactaaagccaagggtctgtaagccacgctgctcttcygagacttccattcctttctgattggcacacgtgcagctcatgacaatctgtaggataacaatcagtgtggatttccactctttkcagtccttcatgttaaagatttagacaccacatacaactggtaaaggacgttttcttgagagttttaactatatgtaaacattgtataatgatatggaataaaatgcacattktaggacattttctaaattt

SEQ ID NO: 338 - DNA, 1883 bp, Homo sapiens
cgcgcccctcccagccgcgcgcgcccgcctgcggtttgtctgcgcagccctggaggcygcgacttccggactgctcctggccgcagggggcgccgccrtcgcacagagaggcctgggcggggcggaccggcgctgggcagccaggacagccgcggcagccgggtccgcagggcagcagccggcctctcccactgcagccctcccgcccgcctaccgtccggcgcgatggcggggagtagctcgctggaggcggtgcgcaggaagatccggagcctgcaggagcaggcggacgccgctgaggagcgcgcgggcaccctgcagcgcgagctggaccacgagaggaagctgagggagaccgctgaagccgacgtagcttctctgaacagacgcatccagctggytgaggaagagttggatcgtgcccaggagcgtctggcaacagctttgcagaagctggaggaagctgagaaggcagcagatgagagtgagagaggcatgaaagtcattgagagtcgagcccaaaaagatgaagaaaaaatggaaattcaggagatccaactgaaagaggcmaagcacattgctgaagatgccgaccgcaaatatgaagaggtggcccgtaagctggtcatcattgagagcgacctggaacgtgcagaggagcgggctgagctctcagaaggcaaatgtgccgagcttgaagargaattgaaaactgtgacgaacaacttgaagtcactggaggctcaggctgagaagtactcgcagaaggaagacagatatgaggaagagatcaaggtcctttccgacaagctgaaggaggctgagactcgggctgagtttgcggagaggtcagtaactaaattggagaaaagcattgatgacttagaagacgagctgtacgctcagaaactgaagtacaaagccatcagcgaggagctggaccacgctctcaacgatatgacttccatgtaaactttctttgcttcacttctcccaagactccctcgtcgagctggatgtcccacctctctgagctctgcatttgtctattctccagctgaccctggttctctctcttagcatcctgccttagagccaggcacacactgtgctttctattktacagaagctcttcgtttcagtgtcaaataaacactgtgtaagctatttctgtttgctattctttttacttcttatttattgacattttagtttcaacattgaataaaactacaaagctgcttcacacatatgagggttagtgtttggctgctgctttttctttttaaatactgaacactatacagaattatatcaggagtttctaaagcagtagttccttgttgaacttcaaaaaaatacccaggcctgcattccctctcagagttctgattttcaaaggttagaatgaggtctggacatctgggggggttttgggggaattgtgatggctctgctttgcagtctgggtcacacaggggacattgcttgttgagagttgaaaggtctggcttgatcagtgtcttcctttgctggaggtttagctcgggatgtagtgacccctctgtgttgattatttcggtggccttacttgggaggacctggctaactaatgaaaggctcatgatgaatggttctgtagctgtcccatattactaggaagttatacattgagaagggtgaaaaagaacttggattcaaacaatgtaagttttggttattgtcgatcatccttttatagcacaaagaaaagttcaagcttttttgaagtatattcatgactcagccacctttattttgatcatgaaaatgacatcttaggttttctaaatatgattactctgtttagtcgtgatttgttttgtgctttttagcacatactc

SEQ ID NO: 339 - DNA, 2706 bp, Homo sapiens
gagaggaggaaggggggcaggagaaaaaagcttttccaaaaaagtattggctgtcttgaggaatgcggtcgcccccttgggaaagtacatatctgggagaagcaggcggctccgcgctcgcactcccgctcctccgcccgaccgcgcgctcgccccgccgctcctgctgcagccccagggcccctcgccgccgccaccatggacgccatcaagaagaagatgcagatgctgaagctcgacaaggagaacgccttggatcgagctgagcaggcggaggccgacaagaaggcggcggaagacaggagcaagcagctgraagatgagctggtgtcactgcaaaagaaactcaagggcaccraagatgaactggacaaatactctgaggytctcaaagatgcccaggagaagctggagctggcagagaaaaaggccaccgatgctgaagccgacgtagcttctctgaacagacgcatccagctggytgaggaagagttggatcgtgcccaggagcgtctggcaacagctttgcagaagctggaggaagctgagaaggcagcagatgagagtgagagaggcatgaaagtcattgagagtcgagcccaaaaagatgaagaaaaaatggaaattcaggagatccaactgaaagaggcmaagcacattgctgaagatgccgaccgcaaatatgaagaggtggcccgtaagctggtcatcattgagagcgacctggaacgtgcagaggagcgggctgagctctcagaaggcaaatgtgccgagcttgaagargaattgaaaactgtgacgaacaacttgaagtcactggaggctcaggctgagaagtactcgcagaaggaagacagatatgaggaagagatcaaggtcctttccgacaagctgaaggaggctgagactcgggctgagtttgcggagaggtcagtaactaaattggagaaaagcattgatgacttagaagatcaactctaccagcaacttgagcaaaatcgccgcctcactaatgaactaaagctggccctgaatgaggattaaacttaagagtgaaaaaacttgggctgaattctaggcgtggagcccatgtgcagaaaatctaagactgtcctaccttcaactaatagagttgaaaacagttgctttctgcagaaatgcaaatgcaaggaattggctgaaaggctggccttgcctgcttgtttctctatatggctggaataattacgttctctttaatcacaaaacagcttttatggtagaatacttatatcaattcakcactgctccttgaaatagcaggtcctcttgtttgaactgataaataatgaggagcccccccaaaaaatgttttctatttcctgacagccatgagtcctactttaagtatgtatatatatatatatatgtgtgtgtgtgtgtgtgtgtgatatattcctatcagatactcatattcctaacttctaaatatctggtatagtgtttgaaatatgattaaatgtacctatgcttgggcaaaatagcttttgaaaacaggaactcatgccagaagcccctggttgtctgaaaggtatgctttactcagtctaatggtgctgttggagtctggggagaatgtcatgctaataaatagaacactataaaaatattaagagaatgtcctaatgaagtgtgcatgaaacatgttgacaattttttatgagcaacagaaataaatcattttaaaagttctcagaaaacctatttatgtcatctttgcttttgtgagtttgtgttaccgcacaactcccagacttttaactgcctgtaccttggaaatgtctgctgttcgtaacttcttcagtttgtataacagtgctgcagctgtatttggtttttacctctccctgttcccacggcacaccgtcagtgaaccytcaccaaacmcyacgtgcattttatcctcagtgaattgttggtggaggtgcacctgactgctctgtgagaatccgtgccatggctcctttgggtcaaagatgccctcccctccgtcttaggttcttgtctagaaatgagtaatgtcttacaagcatgcctagttctaatcatctcatcctgtgtttgtgattgatgtttgcctgcctaaatgtacaaaccaccattgtgtccaaagcacagctattcatgacttaattttctaatctcaccacagagaaagtggctcatgccaaagaagaaaaccttagtatgcatcagatgctggatcagactttactggagttaaacaacatgtgaaaacctccttagctgcgaccacattctttcattttkttttgttttgttttgtttttaaacacctgcttaccccttaaatgcaatwtatttacttttaccactgtcacagaaacatccacaagataccagctaggtcagggggtggggaaaacacatacaaaaaggcaagcccatgtcagggcgatcctggttcaaatgtgccatttcccgggttgatgctgccacactttgtagagagtttagcaacacagtgtgcttagtcagygtaggaatcctcaytwaagcagragaagttyyattcaaagtgccaatgatagagtcaacaggaaggttaatgttggaaacacaatcaggtgtggattggtgctacyttgaacaaaagtaatttattttgtcttgagttttactacaagatgagactatggatcccgc

SEQ ID NO: 340 - DNA, 1766 bp, Homo sapiens
gagaggaggaaggggggcaggagaaaaaagcttttccaaaaaagtattggctgtcttgaggaatgcggtcgcccccttgggaaagtacatatctgggagaagcaggcggctccgcgctcgcactcccgctcctccgcccgaccgcgcgctcgccccgccgctcctgctgcagccccagggcccctcgccgccgccaccatggacgccatcaagaagaagatgcagatgctgaagctcgacaaggagaacgccttggatcgagctgagcaggcggaggccgacaagaaggcggcggaagacaggagcaagcagctgraagatgagctggtgtcactgcaaaagaaactcaagggcaccraagatgaactggacaaatactctgaggytctcaaagatgcccaggagaagctggagctggcagagaaaaaggccaccgatgctgaagccgacgtagcttctctgaacagacgcatccagctggytgaggaagagttggatcgtgcccaggagcgtctggcaacagctttgcagaagctggaggaagctgagaaggcagcagatgagagtgagagaggcatgaaagtcattgagagtcgagcccaaaaagatgaagaaaaaatggaaattcaggagatccaactgaaagaggcmaagcacattgctgaagatgccgaccgcaaatatgaagaggtggcccgtaagctggtcatcattgagagcgacctggaacgtgcagaggagcgggctgagctctcagaaggcaaatgtgccgagcttgaagargaattgaaaactgtgacgaacaacttgaagtcactggaggctcaggctgagaagtactcgcagaaggaagacagatatgaggaagagatcaaggtcctttccgacaagctgaaggaggctgagactcgggctgagtttgcggagaggtcagtaactaaattggagaaaagcattgatgacttagaagagaaagtggctcatgccaaagaagaaaaccttagtatgcatcagatgctggatcagactttactggagttaaacaacatgtgaaaacctccttagctgcgaccacattctttcattttkttttgttttgttttgtttttaaacacctgcttaccccttaaatgcaatwtatttacttttaccactgtcacagaaacatccacaagataccagctaggtcagggggtggggaaaacacatacaaaaaggcaagcccatgtcagggcgatcctggttcaaatgtgccatttcccgggttgatgctgccacactttgtagagagtttagcaacacagtgtgcttagtcagygtaggaatcctcaytwaagcagragaagttaatgttggaaacacaatcaggtgtggattggtgctacyttgaacaaaaggtccccctgtggtcttttgttcaacattgtacaatgtagaactctgtccaacactaatttattttgtcttgagttttactacaagatgagactatggatcccgcatgcctgaattcactaaagccaagggtctgtaagccacgctgctcttcygagacttccattcctttctgattggcacacgtgcagctcatgacaatctgtaggataacaatcagtgtggatttccactctttkcagtccttcatgttaaagatttagacaccacatacaactggtaaaggacgttttcttgagagttttaactatatgtaaacattgtataatgatatggaataaaatgcacattktaggacattttctaaattt

SEQ ID NO: 341 - DNA, 1168 bp, Homo sapiens
gagaggaggaaggggggcaggagaaaaaagcttttccaaaaaagtattggctgtcttgaggaatgcggtcgcccccttgggaaagtacatatctgggagaagcaggcggctccgcgctcgcactcccgctcctccgcccgaccgcgcgctcgccccgccgctcctgctgcagccccagggcccctcgccgccgccaccatggacgccatcaagaagaagatgcagatgctgaagctcgacaaggagaacgccttggatcgagctgagcaggcggaggccgacaagaaggcggcggaagacaggagcaagcagctgraagatgagctggtgtcactgcaaaagaaactcaagggcaccraagatgaactggacaaatactctgaggytctcaaagatgcccaggagaagctggagctggcagagaaaaaggccaccgatgctgaagccgacgtagcttctctgaacagacgcatccagctggytgaggaagagttggatcgtgcccaggagcgtctggcaacagctttgcagaagctggaggaagctgagaaggcagcagatgagagtgagagaggcatgaaagtcattgagagtcgagcccaaaaagatgaagaaaaaatggaaattcaggagatccaactgaaagaggcmaagcacattgctgaagatgccgaccgcaaatatgaagaggtggcccgtaagctggtcatcattgagagcgacctggaacgtgcagaggagcgggctgagctctcagaaggcaaatgtgccgagcttgaagargaattgaaaactgtgacgaacaacttgaagtcactggaggctcaggctgagaagtactcgcagaaggaagacagatatgaggaagagatcaaggtcctttccgacaagctgaaggaggctgagactcgggctgagtttgcggagaggtcagtaactaaattggagaaaagcattgatgacttagaagataagtttctttgcttcacttctcccaagactccctcgtcgagctggatgtcccacctctctgagctctgcatttgtctattctccagctgaccctggttctctctcttagcatcctgccttagagccaggcacacactgtgctttctattktacagaagctcttcgtttcagtgtcaaataaacactgtgtaagcta

SEQ ID NO: 342 - DNA, 1964 bp, Homo sapiens
gagaggaggaaggggggcaggagaaaaaagcttttccaaaaaagtattggctgtcttgaggaatgcggtcgcccccttgggaaagtacatatctgggagaagcaggcggctccgcgctcgcactcccgctcctccgcccgaccgcgcgctcgccccgccgctcctgctgcagccccagggcccctcgccgccgccaccatggacgccatcaagaagaagatgcagatgctgaagctcgacaaggagaacgccttggatcgagctgagcaggcggaggccgacaagaaggcggcggaagacaggagcaagcagctgraagatgagctggtgtcactgcaaaagaaactcaagggcaccraagatgaactggacaaatactctgaggytctcaaagatgcccaggagaagctggagctggcagagaaaaaggccaccgatgctgaagccgacgtagcttctctgaacagacgcatccagctggytgaggaagagttggatcgtgcccaggagcgtctggcaacagctttgcagaagctggaggaagctgagaaggcagcagatgagagtgagagaggcatgaaagtcattgagagtcgagcccaaaaagatgaagaaaaaatggaaattcaggagatccaactgaaagaggcmaagcacattgctgaagatgccgaccgcaaatatgaagaggtggcccgtaagctggtcatcattgagagcgacctggaacgtgcagaggagcgggctgagctctcagaaggccaagtccgacagctggaagaacaattaagaataatggatcagaccttgaaagcattaatggctgcagaggataagtactcgcagaaggaagacagatatgaggaagagatcaaggtcctttccgacaagctgaaggaggctgagactcgggctgagtttgcggagaggtcagtaactaaattggagaaaagcattgatgacttagaagacgagctgtacgctcagaaactgaagtacaaagccatcagcgaggagctggaccacgctctcaacgatatgacttccatgtaaactttctttgcttcacttctcccaagactccctcgtcgagctggatgtcccacctctctgagctctgcatttgtctattctccagctgaccctggttctctctcttagcatcctgccttagagccaggcacacactgtgctttctattktacagaagctcttcgtttcagtgtcaaataaacactgtgtaagctatttctgtttgctattctttttacttcttatttattgacattttagtttcaacattgaataaaactacaaagctgcttcacacatatgagggttagtgtttggctgctgctttttctttttaaatactgaacactatacagaattatatcaggagtttctaaagcagtagttccttgttgaacttcaaaaaaatacccaggcctgcattccctctcagagttctgattttcaaaggttagaatgaggtctggacatctgggggggttttgggggaattgtgatggctctgctttgcagtctgggtcacacaggggacattgcttgttgagagttgaaaggtctggcttgatcagtgtcttcctttgctggaggtttagctcgggatgtagtgacccctctgtgttgattatttcggtggccttacttgggaggacctggctaactaatgaaaggctcatgatgaatggttctgtagctgtcccatattactaggaagttatacattgagaagggtgaaaaagaacttggattcaaacaatgtaagttttggttattgtcgatcatccttttatagcacaaagaaaagttcaagcttttttgaagtatattcatgactcagccacctttattttgatcatgaaaatgacatcttaggttttctaaatatgattactctgtttagtcgtgatttgttttgtgctttttagcacatactc

SEQ ID NO: 343 - DNA, 1911 bp, Homo sapiens
tgtaacaactctcagaggagcattgcccrtcagacagcaactcagagaataaccagagaacaaccagattgaaacaatggaggatctttgtgtggcaaacacactctttgccctcaatttattcaagcatctggcaaaagcaagccccacccagaacctcttcctctccccatggagcatctcgtccaccatggccatggtctacatgggctccaggggcagcaccgaagaccagatggccaaggtgcttcagtttaatgaagtgggagccaatgcagttacccccatgactccagagaactttaccagctgtgggttcatgcagcagatccagaagggtagttatcctgatgcvattttgcaggcacaagctgcagataaaatccattcatccttccgctctctcagctctgcaatcaatgcatccacagggrattatttactggaaagtgtcaataagctgtttggtgagaagtctgcgagcttccgggaagaatatattcgactctgtcagaaatattactcctcagaaccccaggcagtagayttcctagaatgtgcagaagaagctagaaaaaarattaattcctgggtsaagactcaaaccaaaggcaaaatcccaaacttgttacctgaaggttctgtagatggggataccaggatggtcctggtgaatgctgtctacttcaaaggaaagtggaaaactccatttgagaagaaactaaatgggctttatcctttccgtgtaaactcggctcagcrcacacctgtacagatgatgtacttgcgtgaaaagctaaacattggatacatagaagacctaaaggctcagattctagaactcccatatgctggagatgttagcatgttcttgttgcttccagatgaaattgccgatgtgtccactggcttggagctgctggaaagtgaaataacctatgacaaactcaacaagtggaccagcaaagacaaaatggctgaagatgaagttgaggtatacataccccagttcaaattagaagagcattatgaactcagatccattctgagaagcatgggcatggaggacgccttcaacaagggacgggccaatttctcagggatgtcggagaggaatgacctgtttctttctgaagtgttccaccaagccatggtggatgtgaatgaggagggcactgaagcagccgctggcacagsaggtgttatgacagggagaactggacatggaggcccacagtttgtggcagatcatccktttctttttcttattatgcataagataaccaastgcattttatttttcggcagattttsctcaccctaaaactaagcgtgytgcttctgcaaaagatttttgtagatgagctgtgtgcctcagaattgctatttcaaattgccaaaaatttagagatgttttctacatatttctgctcttctgaacaacttctgctacccactaaataaaaacacagaaataattagacaattgtctattataacatgacaaccctattaatcatttggtcttctaaaatgggatcatgcccatttagattttccttactatcagtttatttttataacattaacttttactttgttatttattattttatataatggtgagtttttaaattattgctcactgcctatttaatgtagctaataaagttatagaagcagatgatctgttaatttcctatctaataaatgcctttaattgttctcataatgaagaataagtaggtatccctccatgcccttctrtaataaatatctggaaaaaacattaaacaataggcaaatatatgttatgtgcatttctagaaatacataacacatatatatgtctgtatcttatattcaattgcaagtatataataaataaacctgcttccaaacaacaataca

SEQ ID NO: 344 - DNA, 1736 bp, Homo sapiens
atggaggatctttgtgtggcaaacacactctttgccctcaatttattcaagcatctggcaaaagcaagccccacccagaacctcttcctctccccatggagcatctcgtccaccatggccatggtctacatgggctccaggggcagcaccgaagaccagatggccaagaattccttctttcttttcaaggcacaagctgcagataaaatccattcatccttccgctctctcagctctgcaatcaatgcatccacagggrattatttactggaaagtgtcaataagctgtttggtgagaagtctgcgagcttccgggaagaatatattcgactctgtcagaaatattactcctcagaaccccaggcagtagayttcctagaatgtgcagaagaagctagaaaaaarattaattcctgggtsaagactcaaaccaaaggcaaaatcccaaacttgttacctgaaggttctgtagatggggataccaggatggtcctggtgaatgctgtctacttcaaaggaaagtggaaaactccatttgagaagaaactaaatgggctttatcctttccgtgtaaactcggctcagcrcacacctgtacagatgatgtacttgcgtgaaaagctaaacattggatacatagaagacctaaaggctcagattctagaactcccatatgctggagatgttagcatgttcttgttgcttccagatgaaattgccgatgtgtccactggcttggagctgctggaaagtgaaataacctatgacaaactcaacaagtggaccagcaaagacaaaatggctgaagatgaagttgaggtatacataccccagttcaaattagaagagcattatgaactcagatccattctgagaagcatgggcatggaggacgccttcaacaagggacgggccaatttctcagggatgtcggagaggaatgacctgtttctttctgaagtgttccaccaagccatggtggatgtgaatgaggagggcactgaagcagccgctggcacagsaggtgttatgacagggagaactggacatggaggcccacagtttgtggcagatcatccktttctttttcttattatgcataagataaccaastgcattttatttttcggcagattttsctcaccctaaaactaagcgtgytgcttctgcaaaagatttttgtagatgagctgtgtgcctcagaattgctatttcaaattgccaaaaatttagagatgttttctacatatttctgctcttctgaacaacttctgctacccactaaataaaaacacagaaataattagacaattgtctattataacatgacaaccctattaatcatttggtcttctaaaatgggatcatgcccatttagattttccttactatcagtttatttttataacattaacttttactttgttatttattattttatataatggtgagtttttaaattattgctcactgcctatttaatgtagctaataaagttatagaagcagatgatctgttaatttcctatctaataaatgcctttaattgttctcataatgaagaataagtaggtatccctccatgcccttctrtaataaatatctggaaaaaacattaaacaataggcaaatatatgttatgtgcatttctagaaatacataacacatatatatgtctgtatcttatattcaattgcaagtatataataaataaacctgcttccaaacaacaataca

SEQ ID NO: 345 - DNA, 2020 bp, Homo sapiens
atcttagaaggcagggggctcgcaccgagacgctcctagcaagcccctcacgcgagcgaatgactggcgccaggagaaacgcataggacctcccgaagccgccgagagcaaaaggacccatcagagctgtgctgagacccgcygcgggccgggctcgcactcgagattctcgcccgtgggattccagtcctgagctgaacgagagataagtctttgtcaccccccagtctttactgtttcgagaaaccctaagattttttaaaaaaaagcccaaracgtcaagtcggggaactccaacattggggtgtccagaaacactggggtttcaggcgctctgtaaatgcgtccgaggtccgcggttctgcccgcargcccagaccccggcctcacttccgccccgcgccccgcgccccggcctcacgtcccgcccgcggcaggcctgtgggctgcgaggaggagctttgcctagcttgcaggcagcgcagggcagacggcggcaggagaagcaagatgaatgcaggctcagatcctgtggtcatcgtctcggcggcgcggaccatcataggttccttcaatggtgccttagctgctgttcctgtccaggacctgggctccactgtcatcaaagaagtcttgaagagggccactgtggctccggaagatgtgtctgaggtcatctttggacatgtcttggcagcaggctgtgggcagaatcctgttagacaagccagtgtgggtgcaggaattccctactctgttccagcatggagctgccagatgatctgtgggtcaggcctaaaagctgtgtgccttgcagtccagtcaatagggataggagactccagcattgtggttgcaggaggcatggaaaatatgagcaaggctcctcacttggcttacttgagaacaggagtaaagataggtgagatgccactgactgacagtatactctgtgatggtcttacagatgcatttcacaactgtcatatgggtattacagctgaaaatgtagccaaaaaatggcaagtgagtagagaagatcaggacaaggttgcagttctgtcccagaacaggacagagaatgcacagaaagctggccattttgacaaagagattgtaccagttttggtgtcaactagaaraggtcttattgaagttaaaacagatgagtttcctcgccatgggagcaacatagaagccatgtccaagctaaagccttactttcttactgatggaacgggaacagtcaccccagccaatgcttcaggaataaatgatggtgctgcagctgtygttcttatgaagaagtcagaagctgataaacgtggrcttacacctttagcacggatagtttcctggtcccaagtgggtgtggagccttccattatgggaataggaccaattccagccataaagcaagctgttacaaaagcaggttggtcactggaagatgttgacatatttgaaatcaatgaagcctttgcagctgtctctgctgcaatagttaaagaacttggattaaacccagagaaggtcaatattgaaggaggggctatagccttgggccaccctcttggagcatctggctgtcgaattcttgtgaccctgttacacacactggagagaatgggcagaartcgtggtgttgcagccctgtgcattgggggtgggatgggaatagcaatgtgtgttcagagagaatgaattgcttaaactttgaacaacctcaatttctttttaaactaataaagtactaggttgcaatatgtgaaatcagaggaccaaagtacagatggaaaccatttcctacatcacaaaaacccaagtttacagcttgtactttactttaatgtgtaatactcaactcamggtacaagacaattgcatytaacattgttataaataaaaggaacatcagatcaatcawwaagggctccagagtgaacagcatcttcataacttccatgtttatcatctttactttctggatgtaatttaataagatcatcaattcgaagaa

SEQ ID NO: 346 - DNA, 2639 bp, Homo sapiens
atcttagaaggcagggggctcgcaccgagacgctcctagcaagcccctcacgcgagcgaatgactggcgccaggagaaacgcataggacctcccgaagccgccgagagcaaaaggacccatcagagctgtgctgagacccgcygcgggccgggctcgcactcgagattctcgcccgtgggattccagtcctgagctgaacgagagataagtctttgtcaccccccagtctttactgtttcgagaaaccctaagattttttaaaaaaaagcccaaracgtcaagtcggggaactccaacattggggtgtccagaaacactggggtttcaggcgctctgtaaatgcgtccgaggtccgcggttctgcccgcargcccagaccccggcctcacttccgccccgcgccccgcgccccggcctcacgtcccgcccgcggcaggcctgtgggctgcgaggaggagctttgcctagcttgcaggcagcgcagggcagacggcggcaggagaagcaagatgaatgcaggctcagatcctgtggtcatcgtctcggcggcgcggaccatcataggttccttcaatggtgccttagctgctgttcctgtccaggacctgggctccactgtcatcaaagaagtcttgaagagggccactgtggctccggaagatgtgtctgaggtcatctttggacatgtcttggcagcaggctgtgggcagaatcctgttagacaagccagtgtgggtgcaggaattccctactctgttccagcatggagctgccagatgatctgtgggtcaggcctaaaagctgtgtgccttgcagtccagtcaatagggataggagactccagcattgtggttgcaggaggcatggaaaatatgagcaaggctcctcacttggcttacttgagaacaggagtaaagataggtgagatgccactgactgacagtatactctgtgatggtcttacagatgcatttcacaactgtcatatgggtattacagctgaaaatgtagccaaaaaatggcaagtgagtagagaagatcaggacaaggttgcagttctgtcccagaacaggacagagaatgcacagaaagctggccattttgacaaagagattgtaccagttttggtgtcaactagaaraggtcttattgaagttaaaacagatgagtttcctcgccatgggagcaacatagaagccatgtccaagctaaagccttactttcttactgatggaacgggaacagtcaccccagccaatgcttcaggaataaatgatggtgctgcagctgtygttcttatgaagaagtcagaagctgataaacgtggrcttacacctttagcacggatagtttcctggtcccaagtgggtgtggagccttccattatgggaataggaccaattccagccataaagcaagctgttacaaaagcaggttggtcactggaagatgttgacatatttgaaatcaatgaagcctttgcagctgtctctgctgcaatagttaaagaacttggattaaacccagagaaggtcaatattgaaggaggggctatagccttgggccaccctcttggagcatctggctgtcgaattcttgtgaccctgttacacacactggagagaatgggcagaartcgtggtgttgcagccctgtgcattgggggtgggatgggaatagcaatgtgtgttcagagagaatgaattgcttaaactttgaacaacctcaatttctttttaaactaataaagtactaggttgcaatatgtgaaatcagaggaccaaagtacagatggaaaccatttcctacatcacaaaaacccaagtttacagcttgtactttactttaatgtgtaatactcaactcamggtacaagacaattgcatytaacattgttataaataaaaggaacatcagatcaatcawwaagggctccagagtgaacagcatcttcataacttccatgtttatcatctttactttctggcattttagatttttacgttctgggttaacctgggcctcattatgaaaagctcttaattttgcaaccagatctgtggagtcctgggcagcattaactgctagtgtattgggaataacaagaagtgatcttgcaaactctgcaatcgcaagctgttcccgagaccccatgctggttgcatagttttcaaggtatatggaaagggctgcttctacagcacccccaccgggaaccacagattttgactccaaaactctcttcactacacaaagtgcatcatgtaaagagcgctccatctcatcacacatgaaatcatttgccccacgtaagataatcgatgcagacgtacgagccttagtatttttgattaagatcagctcatcatcacaaattctctcctgtaccacttcttctgcctgtcccaacattgcagcttcaaaagtttcttcaccttccaaattggccagggttgacagaatagttgctccagaagctttggcaatgcgtttaaggtccctttttaaaactcttctaactgccatagcaccagcctccacaaaatacttcagacacatatcatcaattccaccagtggttagaataacattggcaccagttgccaggatcttctgaattctctccttggtgatatct

SEQ ID NO: 347 - DNA, 1599 bp, Homo sapiens
gtcccgcccgcggcaggcctgtgggctgcgaggaggagctttgcctagcttgcaggcagcgcagggcagacggcggcaggagaagcaagatgaatgcaggctcagatcctgtggtcatcgtctcggcggcgcggaccatcataggttccttcaatggtgccttagctgctgttcctgtccaggacctgggctccactgtcatcaaagaagtcttgaagagggccactgtggctccggaagatgtgtctgaggtcatctttggacatgtcttggcagcaggctgtgggcagaatcctgttagacaagccagtgtgggtgcaggaattccctactctgttccagcatggagctgccagatgatctgtgggtcaggcctaaaagctgtgtgccttgcagtccagtcaatagggataggagactccagcattgtggttgcaggaggcatggaaaatatgagcaaggctcctcacttggcttacttgagaacaggagtaaagataggtgagatgccactgactgacagtatactctgtgatggtcttacagatgcatttcacaactgtcatatgggtattacagctgaaaatgtagccaaaaaatggcaagtgagtagagaagatcaggacaaggttgcagttctgtcccagaacaggacagagaatgcacagaaagctggccattttgacaaagagattgtaccagttttggtgtcaactagaaraggtcttattgaagttaaaacagatgagtttcctcgccatgggagcaacatagaagccatgtccaagctaaagccttactttcttactgatggaacgggaacagtcaccccagccaatgcttcaggaataaatgatggtgctgcagctgtygttcttatgaagaagtcagaagctgataaacgtggrcttacacctttagcacggatagtttcctggtcccaagtgggtgtggagccttccattatgggaataggaccaattccagccataaagcaagctgttacaaaagcaggttggtcactggaagatgttgacatatttgaaatcaatgaagcctttgcagctgtctctgctgcaatagttaaagaacttggattaaacccagagaaggtcaatattgaaggaggggctatagccttgggccaccctcttggagcatctggctgtcgaattcttgtgaccctgttacacacactggagagaatgggcagaartcgtggtgttgcagccctgtgcattgggggtgggatgggaatagcaatgtgtgttcagagagaatgaattgcttaaactttgaacaacctcaatttctttttaaactaataaagtactaggttgcaatatgtgaaatcagaggaccaaagtacagatggaaaccatttcctacatcacaaaaacccaagtttacagcttgtactttactttaatgtgtaatactcaactcamggtacaagacaattgcatytaacattgttataaataaaaggaacatcagatcaatcawwaagggctccagagtgaacagcatcttcataacttccatgtttatcatctttactttctggatgtaatttaataagatcatcaattcgaagaa

SEQ ID NO: 348 - DNA, 3717 bp, Homo sapiens
gctgaagacggaggcagctccacactgtgaactaaaatcatattctaagaactcagccactcaggtatccaccatggtgctgggtcctgaacagaagatgtcagatgacagtgtttctggagatcatggggagtctgccagtcttggtaacatcaaccctgcctatagtaatccctctctttcacagtcccctggggactcagaggagtacttcgccacttactttaatgagaagatctccattcctgaggaggagtactcttgttttagctttcgtaaactctgggctttcaccggaccaggttttcttatgagcattgcctacctggatccaggaaatattgaatccgatttgcagtctggagcagtggctggatttaagttgctctggatccttctgttggccacccttgtggggctgctgctccagcggcttgcagctagactgggagtggttactgggctgcatcttgctgaagtatgtcaccgtcagtatcccaaggtcccacgagtcatcctgtggctgatggtggagttggctatcatcggctcagacatgcaagaagtcattggctcagccattgctatcaatcttctgtctgtaggaagaattcctctgtggggtggcgttctcatcaccattgcagatacttttgtatttctcttcttggacaaatatggcttgcggaagctagaagcattttttggctttctcatcactattatggccctcacatttggatatgaggcaagtgtgaaacccagccagagccaggtactcaagggcatgttcgtaccatcctgttcaggctgtcgcactccacagattgaacaggctgtgggcatcgtgggagctgtcatcatgccacacaacatgtacctgcattctgccttagtcaagtctagacaggtaaaccggaacaataagcaggaagttcgagaagccaataagtactttttcattgaatcctgcattgcactctttgtttccttcatcatcaatgtctttgttgtctcagtctttgctgaagcattttttgggaaaaccaacgagcaggtggttgaagtctgtacaaataccagcagtcctcatgctggcctctttcctaaagataactcgacactggctgtggacatctacaaagggggtgttgtgctgggatgttactttgggcctgctgcactctacatttgggcagtggggatcctggctgcaggacagagctccaccatgacaggaacctattctggccagtttgtcatggagggattcctgaacctaaagtggtcacgctttgcccgagtggttctgactcgctctatygccatcatccccactctgcttgttgctgtcttccaagatgtagagcatctaacagggatgaatgactttctgaatgttctacagagcttacagcttccctttgctctcatacccatcctcacatttacgagcttgcggccagtaatgagtgactttgccaatggactaggctggcggattgcaggaggaatcttggtccttatcatctgttccatcaatatgtactttgtagtggtttatgtccgggacctagggcatgtggcattatatgtggtggctgctgtggtcagcgtggcttatctgggctttgtgttctacttgggttggcaatgtttgattgcactgggcatgtccttcctggactgtgggcatacggtaagcatctctaaaggcctgctgacagaagaagccacccgtggctacgttaaataacactggattagtctgtcttctgcaggtagccatcagagccagtgtgtttctatggtttactgtgtgaacatagccaaaagtatgtgccgttgcacagactgtgtttatgactcaaccgttggttggaaaagactttgtttcatgtgtatttgaaagatggaattattttttccttcctgacctaaccttagaactggattagggtgggatctttgaaaagctgmcatttgctgctatcattccaacactaaattcttaagtagttgcccaagggccagctcagtttatccttcggagagacaaggatatgcatgattcttaaccaggctatatgttaaaaaaaaattggaaaatgcartacattttttattatacaaactacagaatgartatgcaagttttatttatcaaaatgtaatggatttttaaaggctgagaaattttccttatacctaccttttcagttattttaattataccaaattatcaactagaatagcttcatccatatgaaatataaaatgaagagacacctagctctatcaggcttaggattctttgaacttatttccactttaatttctcagtggaagttaagaggggtgagaaaacaaagaaggggaaaaactgacaactaacaaaaccagcaccacatcgctaggtggtgcttactaattaccttctcaggattttcctcagattgaaaagcttatgaggatttcttgggagtcttaataacctgcctgttagtacagagctttcctgatgatatttactcttgagcacatgtggttgtaaaaccttaactttctttctccaggagggtggtgatagaaacagatggtagtatttatgaactgatgttctcgtgaaatgttgagggtggggacagaatcgtcatgtttttctgatgcaccgctctgcttcatgcccaagatgacttgcgaggcaatctcaggagctgtggacttaaccrttgcaaagcacactgtctttctcagcgttctctgcaagtcagtaggtgttagtatggttgcaaagttcactgtctcagcaaagttgaactgggctacctctctacagctgtttcctcagagggaaaaatcttgagaccagatggtggagctctggagtcagaggaaatgggtgtcttcagcacaaagctgctgcttttacttcagccacttctgacatttttacataccgagcctgagattrtgtgattatctcaaatcaaatcactttgatggagataaataatcaaaactgttttatagtcattgatttkgtgagaacagtaatggaaaatggtgttgaaggacttctcatttttggagctttccttccagagtcctggctgattggtgttcgctgttcatctgagcccccaaaagcattattactgatacttgcacacagtcaaaagcgcagactggatggatggtcttttataaggcatttaagggtacactactgtgtttcactgaccatacatttttcttagcccctcaagtaatatagcacagagttatgaatgacaattcccctaaccattcctcttcatatctgcctcttccccttaccatcgtaattctccaaactggtcataaaggcactctgtgaagatattggggactgacatcttaagctctcacctggctgcagtaggaaaggccaaactgacgacaaaaaaaaaattctttataaagatgatatggtaacatgtatctttgccctgggtctgggtgggtccagtcagtctcagatttacaagcatttaggagcctaggtaaaagctgctagtattcttttaaaagttayatttatgacttgcaatgatagaaaactccttccaattaaatggcattttataatattatgtgtgtacttcacagtgttaaaatactctgggtgcaataaataatatgtagaaatttaagtcctccaattccagcatatcc

SEQ ID NO: 349 - DNA, 4134 bp, Homo sapiens
agccagcktggcgctggctcccggaatatggagccctggrcgcgggggcggcgtgtcaggtggttgcggagctggtaagaatcatattctaagaactcagccactcaggtatccaccatggtgctgggtcctgaacagaagatgtcagatgacagtgtttctggagatcatggggagtctgccagtcttggtaacatcaaccctgcctatagtaatccctctctttcacagtcccctggggactcagaggagtacttcgccacttactttaatgagaagatctccattcctgaggaggagtactcttgttttagctttcgtaaactctgggctttcaccggaccaggttttcttatgagcattgcctacctggatccaggaaatattgaatccgatttgcagtctggagcagtggctggatttaagttgctctggatccttctgttggccacccttgtggggctgctgctccagcggcttgcagctagactgggagtggttactgggctgcatcttgctgaagtatgtcaccgtcagtatcccaaggtcccacgagtcatcctgtggctgatggtggagttggctatcatcggctcagacatgcaagaagtcattggctcagccattgctatcaatcttctgtctgtaggaagaattcctctgtggggtggcgttctcatcaccattgcagatacttttgtatttctcttcttggacaaatatggcttgcggaagctagaagcattttttggctttctcatcactattatggccctcacatttggatatgagtatgttacagtgaaacccagccagagccaggtactcaagggcatgttcgtaccatcctgttcaggctgtcgcactccacagattgaacaggctgtgggcatcgtgggagctgtcatcatgccacacaacatgtacctgcattctgccttagtcaagtctagacaggtaaaccggaacaataagcaggaagttcgagaagccaataagtactttttcattgaatcctgcattgcactctttgtttccttcatcatcaatgtctttgttgtctcagtctttgctgaagcattttttgggaaaaccaacgagcaggtggttgaagtctgtacaaataccagcagtcctcatgctggcctctttcctaaagataactcgacactggctgtggacatctacaaagggggtgttgtgctgggatgttactttgggcctgctgcactctacatttgggcagtggggatcctggctgcaggacagagctccaccatgacaggaacctattctggccagtttgtcatggagggattcctgaacctaaagtggtcacgctttgcccgagtggttctgactcgctctatygccatcatccccactctgcttgttgctgtcttccaagatgtagagcatctaacagggatgaatgactttctgaatgttctacagagcttacagcttccctttgctctcatacccatcctcacatttacgagcttgcggccagtaatgagtgactttgccaatggactaggctggcggattgcaggaggaatcttggtccttatcatctgttccatcaatatgtactttgtagtggtttatgtccgggacctagggcatgtggcattatatgtggtggctgctgtggtcagcgtggcttatctgggctttgtgttctacttgggttggcaatgtttgattgcactgggcatgtccttcctggactgtgggcatacggtaagcatctctaaaggcctgctgacagaagaagccacccgtggctacgttaaataacactggattagtctgtcttctgcaggtagccatcagagccagtgtgtttctatggtttactgtgtgaacatagccaaaagtatgtgccgttgcacagactgtgtttatgactcaaccgttggttggaaaagactttgtttcatgtgtatttgaaagatggaattattttttccttcctgacctaaccttagaactggattagggtgggatctttgaaaagctgmcatttgctgctatcattccaacactaaattcttaagtagttgcccaagggccagctcagtttatccttcggagagacaaggatatgcatgattcttaaccaggctatatgttaaaaaaaaattggaaaatgcartacattttttattatacaaactacagaatgartatgcaagttttatttatcaaaatgtaatggatttttaaaggctgagaaattttccttatacctaccttttcagttattttaattataccaaattatcaactagaatagcttcatccatatgaaatataaaatgaagagacacctagctctatcaggcttaggattctttgaacttatttccactttaatttctcagtggaagttaagaggggtgagaaaacaaagaaggggaaaaactgacaactaacaaaaccagcaccacatcgctaggtggtgcttactaattaccttctcaggattttcctcagattgaaaagcttatgaggatttcttgggagtcttaataacctgcctgttagtacagagctttcctgatgatatttactcttgagcacatgtggttgtaaaaccttaactttctttctccaggagggtggtgatagaaacagatggtagtatttatgaactgatgttctcgtgaaatgttgagggtggggagaaaagactttaagggaggagagccatctattttgttcctaaagccacctctcagcagaatcgtcatgtttttctgatgcaccgctctgcttcatgcccaagatgacttgcgaggcaatctcaggagctgtggacttaaccrttgcaaagcacactgtctttctcagcgttctctgcaagtcagtaggtgttagtatggttgcaaagttcactgtctcagcaaagttgaactgggctacctctctacagctgtttcctcagagggaaaaatcttgagaccagatggtggagctctggagtcagaggaaatgggtgtcttcagcacaaagctgctgcttttacttcagccacttctgacatttttacataccgagcctgagattrtgtgattatctcaaatcaaatcactttgatggagataaataatcaaaactgttttatagtcattgatttkgtgagaacagtaatggaaaatggtgttgaaggacttctcatttttggagctttccttccagagtcctggctgattggtgttcgctgttcatctgagcccccaaaagcattattactgatacttgcacacagtcaaaagcgcagactggatggatggtcttttataaggcatttaagggtacactactgtgtttcactgaccatacatttttcttagcccctcaagtaatatagcacagagttatgaatgacaattcccctaaccattcctcttcatatctgcctcttccccttaccatcgtaattctccaaactggtcataaaggcactctgtgaagatattggggactgacatcttaagctctcacctggctgcagtaggaaaggccaaactgacgacaaaaaaaaaattctttataaagatgatatggtaacatgtatctttgccctgggtctgggtgggtccagtcagtctcagatttacaagcatttaggagcctaggtaaaagctgctagtattcttttaaaagttayatttatgacttgcaatgatagaaaactccttccaattaaatggcattttataatattatgtgtgtacttcacagtgttaaaaataccctcatacgttattgcatttgatcttcacagaaagtgcattttaaccagtactctgggtgcaataaataatatgtagaaatttaagtcctccaattccagcatatccagtgagttttgacagtgtgtttatgtggaatgtttaaggatatacaattgtactttatataaattggttcttgttcttcttaaatgtgacatgaaataattgtgctgctacattatactggaaattaacaggggaaaagggaagagctcttggctcccttgaggttctgctagtggtgttaggagtggttacaactgagcttttagtaaccatttaaccgtatgtaaacttggtttctaattaaaaaaaaatttctttttcc

SEQ ID NO: 350 - DNA, 4069 bp, Homo sapiens
ggagccctggrcgcgggggcggcgtgtcaggtggttgcggagctggtaagcatggtgctgggtcctgaacagaagatgtcagatgacagtgtttctggagatcatggggagtctgccagtcttggtaacatcaaccctgcctatagtaatccctctctttcacagtcccctggggactcagaggagtacttcgccacttactttaatgagaagatctccattcctgaggaggagtactcttgttttagctttcgtaaactctgggctttcaccggaccaggttttcttatgagcattgcctacctggatccaggaaatattgaatccgatttgcagtctggagcagtggctggatttaagttgctctggatccttctgttggccacccttgtggggctgctgctccagcggcttgcagctagactgggagtggttactgggctgcatcttgctgaagtatgtcaccgtcagtatcccaaggtcccacgagtcatcctgtggctgatggtggagttggctatcatcggctcagacatgcaagaagtcattggctcagccattgctatcaatcttctgtctgtaggaagaattcctctgtggggtggcgttctcatcaccattgcagatacttttgtatttctcttcttggacaaatatggcttgcggaagctagaagcattttttggctttctcatcactattatggccctcacatttggatatgaggcaagtgtgaaacccagccagagccaggtactcaagggcatgttcgtaccatcctgttcaggctgtcgcactccacagattgaacaggctgtgggcatcgtgggagctgtcatcatgccacacaacatgtacctgcattctgccttagtcaagtctagacaggtaaaccggaacaataagcaggaagttcgagaagccaataagtactttttcattgaatcctgcattgcactctttgtttccttcatcatcaatgtctttgttgtctcagtctttgctgaagcattttttgggaaaaccaacgagcaggtggttgaagtctgtacaaataccagcagtcctcatgctggcctctttcctaaagataactcgacactggctgtggacatctacaaagggggtgttgtgctgggatgttactttgggcctgctgcactctacatttgggcagtggggatcctggctgcaggacagagctccaccatgacaggaacctattctggccagtttgtcatggagggattcctgaacctaaagtggtcacgctttgcccgagtggttctgactcgctctatygccatcatccccactctgcttgttgctgtcttccaagatgtagagcatctaacagggatgaatgactttctgaatgttctacagagcttacagcttccctttgctctcatacccatcctcacatttacgagcttgcggccagtaatgagtgactttgccaatggactaggctggcggattgcaggaggaatcttggtccttatcatctgttccatcaatatgtactttgtagtggtttatgtccgggacctagggcatgtggcattatatgtggtggctgctgtggtcagcgtggcttatctgggctttgtgttctacttggtaaggttggcaatgtttgattgcactgggcatgtccttcctggactgtgggcatacggtaagcatctctaaaggcctgctgacagaagaagccacccgtggctacgttaaataacactggattagtctgtcttctgcaggtagccatcagagccagtgtgtttctatggtttactgtgtgaacatagccaaaagtatgtgccgttgcacagactgtgtttatgactcaaccgttggttggaaaagactttgtttcatgtgtatttgaaagatggaattattttttccttcctgacctaaccttagaactggattagggtgggatctttgaaaagctgmcatttgctgctatcattccaacactaaattcttaagtagttgcccaagggccagctcagtttatccttcggagagacaaggatatgcatgattcttaaccaggctatatgttaaaaaaaaattggaaaatgcartacattttttattatacaaactacagaatgartatgcaagttttatttatcaaaatgtaatggatttttaaaggctgagaaattttccttatacctaccttttcagttattttaattataccaaattatcaactagaatagcttcatccatatgaaatataaaatgaagagacacctagctctatcaggcttaggattctttgaacttatttccactttaatttctcagtggaagttaagaggggtgagaaaacaaagaaggggaaaaactgacaactaacaaaaccagcaccacatcgctaggtggtgcttactaattaccttctcaggattttcctcagattgaaaagcttatgaggatttcttgggagtcttaataacctgcctgttagtacagagctttcctgatgatatttactcttgagcacatgtggttgtaaaaccttaactttctttctccaggagggtggtgatagaaacagatggtagtatttatgaactgatgttctcgtgaaatgttgagggtggggagaaaagactttaagggaggagagccatctattttgttcctaaagccacctctcagcagaatcgtcatgtttttctgatgcaccgctctgcttcatgcccaagatgacttgcgaggcaatctcaggagctgtggacttaaccrttgcaaagcacactgtctttctcagcgttctctgcaagtcagtaggtgttagtatggttgcaaagttcactgtctcagcaaagttgaactgggctacctctctacagctgtttcctcagagggaaaaatcttgagaccagatggtggagctctggagtcagaggaaatgggtgtcttcagcacaaagctgctgcttttacttcagccacttctgacatttttacataccgagcctgagattrtgtgattatctcaaatcaaatcactttgatggagataaataatcaaaactgttttatagtcattgatttkgtgagaacagtaatggaaaatggtgttgaaggacttctcatttttggagctttccttccagagtcctggctgattggtgttcgctgttcatctgagcccccaaaagcattattactgatacttgcacacagtcaaaagcgcagactggatggatggtcttttataaggcatttaagggtacactactgtgtttcactgaccatacatttttcttagcccctcaagtaatatagcacagagttatgaatgacaattcccctaaccattcctcttcatatctgcctcttccccttaccatcgtaattctccaaactggtcataaaggcactctgtgaagatattggggactgacatcttaagctctcacctggctgcagtaggaaaggccaaactgacgacaaaaaaaaaattctttataaagatgatatggtaacatgtatctttgccctgggtctgggtgggtccagtcagtctcagatttacaagcatttaggagcctaggtaaaagctgctagtattcttttaaaagttayatttatgacttgcaatgatagaaaactccttccaattaaatggcattttataatattatgtgtgtacttcacagtgttaaaaataccctcatacgttattgcatttgatcttcacagaaagtgcattttaaccagtactctgggtgcaataaataatatgtagaaatttaagtcctccaattccagcatatccagtgagttttgacagtgtgtttatgtggaatgtttaaggatatacaattgtactttatataaattggttcttgttcttcttaaatgtgacatgaaataattgtgctgctacattatactggaaattaacaggggaaaagggaagagctcttggctcccttgaggttctgctagtggtgttaggagtggttacaactgagcttttagtaaccatttaaccgtatgtaaacttggtttctaattaaaaaaaaatttctttttcc

SEQ ID NO: 351 - DNA, 2138 bp, Homo sapiens
gctgaagacggaggcagctccacactgtgaactaaaatcatattctaagaactcagccactcaggtatccaccatggtgctgggtcctgaacagaagatgtcagatgacagtgtttctggagatcatggggagtctgccagtcttggtaacatcaaccctgcctatagtaatccctctctttcacagtcccctggggactcagaggagtacttcgccacttactttaatgagaagatctccattcctgaggaggagtactcttgttttagctttcgtaaactctgggctttcaccggaccaggttttcttatgagcattgcctacctggatccaggaaatattgaatccgatttgcagtctggagcagtggctggatttaagttgctctggatccttctgttggccacccttgtggggctgctgctccagcggcttgcagctagactgggagtggttactgggctgcatcttgctgaagtatgtcaccgtcagtatcccaaggtcccacgagtcatcctgtggctgatggtggagttggctatcatcggctcagacatgcaagaagtcattggctcagccattgctatcaatcttctgtctgtaggaagaattcctctgtggggtggcgttctcatcaccattgcagatacttttgtatttctcttcttggacaaatatggcttgcggaagctagaagcattttttggctttctcatcactattatggccctcacatttggatatgaggcaagtgtgaaacccagccagagccaggtactcaagggcatgttcgtaccatcctgttcaggctgtcgcactccacagattgaacaggctgtgggcatcgtgggagctgtcatcatgccacacaacatgtacctgcattctgccttagtcaagtctagacaggtaaaccggaacaataagcaggaagttcgagaagccaataagtactttttcattgaatcctgcattgcactctttgtttccttcatcatcaatgtctttgttgtctcagtctttgctgaagcattttttgggaaaaccaacgagcaggtggttgaagtctgtacaaataccagcagtcctcatgctggcctctttcctaaagataactcgacactggctgtggacatctacaaagggggtgttgtgctgggatgttactttgggcctgctgcactctacatttgggcagtggggatcctggctgcaggacagagctccaccatgacaggaacctattctggccagtttgtcatggagggattcctgaacctaaagtggtcacgctttgcccgagtggttctgactcgctctatygccatcatccccactctgcttgttgctgtcttccaagatgtagagcatctaacagggatgaatgactttctgaatgttctacagagcttacagcttccctttgctctcatacccatcctcacatttacgagcttgcggccagtaatgagtgactttgccaatggactaggctggcggattgcaggaggaatcttggtccttatcatctgttccatcaatatgtactttgtagtggtttatgtccgggacctagggcatgtggcattatatgtggtggctgctgtggtcagcgtggcttatctgggctttgtgttctacttgggttggcaatgtttgattgcactgggcatgtccttcctggactgtgggcatacgtgccatctgggattgacagctcagcctgaactctatcttctgaacaccatggacgctgactcacttgtgtctagatgactgacagcctgagagactctataagaacatgtttttctaagccctttttgtgccaggtgtcccgttaacgtctctgttagttcagagagacgggatttcaccatgttgcccaggctggtgttgaactcatgagctcaagtaatctgctggccttggcctcccaaagtgctgagattataggcgtgarccactgcatccagctcactcctcatttctttctagccccaaaggtgttgagtcagcaaatcctgcagcctttgtgtgactttgagcatcactttcccctttcagcattaaatatatgacctctctgccttattttagaacttactacatttcaataaaactttttaaaaaatcc

SEQ ID NO: 352 - DNA, 3448 bp, Homo sapiens
cccgggttcaagagattctcctgtctcagcctcccgagtagctgggactacaggtaygtgccaccacacctggctaatttttgtatttttagtagagacaagagttacaccatattggccaggatcttttgctttctatagcttcaaaatgttcttaawgttaagacattcttaatactctgaaccatatgaatttgccattttggtaagtcacagacgccagatggtggcaatttcacatggcrcaacccgaaagattaacaaactatccagcagatgaaaggattttttttagtttcattgggtttactgaagaaattgtttgaattctcattgcatctccagttcaacagataatgagtgagtgatgccacactctcaagagttaaaaacaaaacaacaaaaaaattaaaacaaaagcacacaactttctctctctgtcccaaaatacatacttgcatacccccgctccagataaaatccaaagggtaaaactgtcttcatgcctgcaaattcctaaggagggcacctaaagtacttgacagcgagtgtgctgaggaaatcrgcagctgttgaagtcacctcctgtgctcttgccaaatgtttgaaagggaatacactgggttaccgggtgtatgttgggaggggagcattatcagtgctcgggtgaggcaagttcggagtacccagatggagacatccgtgtctgtgtcgctctggatgcctccaagccagcgtgtgtttactttctgtgtgtgtcaccatgtctttgtgcttctgggtgcttctgtgtttgtttctggccgcgtttctgtgttggacaggggtgactttgtgccggatggcttctgtgtgagagcgcgcgcgagtgtgcatgtcggtgagctgggagggtgtgtctcagtgtctatggctgtggttcggtataagtctgagcatgtctgccagggtgtatttgtgcctgtatgtgcgtgcctcggtgggcactctcgtttccttccgaatgtggggcagtgccggtgtgctgccctctgccttgagacctcaagccgcgcaggcgcccagggcaggcaggtagcggccacagaagagccaaaagctcccgggttggctggtaagsacaccacctccagctttagccctctggggccagccagggtagccgggaagcagtggtggcccgccctccagggagcagttgggccccgcccgggccagccccaggagaaggagggcgaggggaggggagggaaaggggaggagtgcctcgccccttcgcggctgccggcgtgccattggccgaaagttcccgtacgtcacggcgagggcagttcccctaaagtcctgtgcacataacgggcagaacgcactgcgaagcggcttcttcagagcacgggctggaactggcaggcaccgcgagcccctagcacccgacaagctgagtgtgcaggacgagtccccaccacacccacaccacagccgctgaatgaggcttccaggcgtccgctcgcggcccgcagagccccgccgtgggtccgccygctgaggcgcccccagccagtgcgctyacctgccagactgcgcgccatggggcaacccgggaacggcagcgccttcttgctggcacccartrgaagccatgcgccggaccacgacgtcacgcagsaaagggacgaggtgtgggtggtgggcatgggcatcgtcatgtctctcatcgtcctggccatcgtgtttggcaatgtgctggtcatcacagccattgccaagttcgagcgtctgcagacggtcaccaactacttcatcacttcactggcctgtgctgatctggtcatgggcctrgcagtggtgccctttggggccgcccatattcttatgaaaatgtggacttttggcaacttctggtgcgagttttggacttccattgatgtgctgtgcgtcacggccagcattgagaccctgtgcgtgatcgcagtggatcgctactttgccattacttcacctttcaagtaccagagcctgctgaccaagaataaggcccgggtgatcattctgatggtgtggattgtgtcaggccttayctccttcttgcccattcagatgcactggtacmgggccacccaccaggaagccatcaactgctatgccaatgagacctgctgtgacttcttcacgaaccaagcctatgccattgcctcttccatcgtgtccttctacgttcccctggtgatcatggtcttcgtctactscagggtctttcaggaggccaaaaggcagctccagaagattgacaaatctgagggccgcttccatgtccagaaccttagccaggtggagcaggatgggcggacggggcatggactccgcagatcttccaagttctgcttgaaggagcacaaagccctcaagacgttaggcatcatcatgggcactttcaccctctgctggctgcccttcttcatcgttaacattgtgcatgtgatccaggataacctcatccgtaaggaagtttacatcctcctaaattggataggctatgtcaattctggtttcaatccccttatctactgccggagcccagatttcaggattgccttccaggagcttctgtgcctgcgcaggtcttctttgaaggcctatggsaatggctactccagcaacggcaacacaggggagcagagtggatatcacgtggaacaggagaaagaaaataaactgctgtgtgaagacctcccaggcacggaagactttgtgggccatcaaggtacygtgcctagcgataacattgattcacaagggaggaattgtagtacaaatgactcactgctgtaaagcagtttttctacttttaaagaccccccccccccaacagaacactaaacagactatttaacttgagggtaataaacttagaataaaattgtaaaattgtatagagatatgcagaaggaagggcatccttctgccttttttatttttttaagctgtaaaaagagagaaaacttatttgagtgattatttgttatttgtacagttcagttcctctttgcatggaatttgtaagtttatgtctaaagagctttagtcctagaggacctgagtctgctatattttcatgacttttccatgtatctacctcactattcaagtattaggggtaatatattgctgctggtaatttgtatctgaaggagattttccttcctamacccttggacttgaggattttgagtatctcggacctttcagctgtgaacatggactcttcccccactcctcttatttgctcacacggggtattttaggcagggatttgaggagcagcttcagttgttttcccgagcaaagtctaaagtttacagtaaataaawtgtttgaccatgccttcattgcacctgtttctccaaaaccccttgactggagtgctgttgcctcccccactggaaaccgc

SEQ ID NO: 353 - DNA, 1441 bp, Homo sapiens
actcccaggctggaatggtgtcctcatatcgaggaagaggatactgaggcycagaaatgtgccctagctttactaggagcgcccccacctaaagatcctccccctaaatacacccccagaccccgcccagctgtggtcattggagtgtttactctgcaggcagggggaggagggcgggactgagcaggcggagacggacaaagtccggggactataaaggccggtccggcagcatctggtcagtcccagctcagagccgcaacctgcacagccatgcccgggcaagaactcaggacgstgaatggctctcagatgctcctggtgttgctggtgctctcgtggctgccgcatgggggcgccctgtctctggccgaggcgagccgcgcaagtttcccgggaccctcagagttrcacwccgaagactccagattccgagagttgcggaaacgctacgaggacctgctaaccaggctgcgggccaaccagagctgggaagattcgaacaccgacctcgtcccggcccctgcagtccggatactcacgccagaagtgcggctgggatccggcggccacctgcacctgcgtatctctcgggccgcccttccygaggggctccccgaggcctcccgccttcaccgggctctgttccggctgtccccgacggcgtcaaggtcgtgggacgtgacacgacckctgcggcgtcagctcagccttgcaagaccccaggcgcccgcgctgcacctgmgactgtcgccgccgccgtcgcagtcggaccaactgctggcagaatcttcgtccgcacggccccagctggagttgcacttgcggccgcaagccgccagggggcgccgcagagcgcgtgcgcgcaacggggacsactgtccgctcgggcccgggcgttgctgccgtctgcacacggtccgcgcgtcgctggaagacctgggctgggccgattgggtgctgtcgccacgggaggtgcaagtgaccatgtgcatcggcgcgtgcccgagccagttcsgggcggcaaacatgcacgcgcagatcaagacgagcctgcaccgcctgaagcccgacacggtgccagcgccctgctgcgtgcccgccagctacaatcccatggtgctcattcaaaagaccgacaccggggtgtcgctccagacctatgatgacttgttagccaaagactgccactgcatatgagcagtcctggtccttccactgtgcacctgcgcggrggasgcgacctcagttgtcctgccctgtggaatgsgctcaaggttcctgagacacccgattcctgcccaaacagctgyatttatataagtctgttatttattattaatttattggggtgaccttcttggggactcgggggctggtctgatggaactgtgtatttatttaaaactctggtgataaaaataaagctgtctgaactgtt

SEQ ID NO: 354 - DNA, 1799 bp, Homo sapiens
caggagaaccgagtcttggccttaactggctggcaacgtaaaacctgccctccacaaggacaagatgaaaacttggggatttggaggggacaacaaattagactcaatcacaatttcaaacttttggatgtcaatatatccatcaagaaattgaaaagaggcctggcatggtggccgatgcctgtcatcccagcactttgggagaccaacgtcggaggatcacttgaggtcaggagttccagaccagcctgggcaacgtggtcccaggagttgcagaaacgccaccaggaccttcagagcaccagttagacaaggagagccaggaggagctgggccccaacctcatccaaaagcacagactcccaggctggaatggtgtcctcatatcgaggaagaggatactgaggcycagaaatgtgccctagctttactaggagcgcccccacctaaagatcctccccctaaatacacccccagaccccgcccagctgtggtcattggagtgtttactctgcaggcagggggaggagggcgggactgagcaggcggagacggacaaagtccggggactataaaggccggtccggcagcatctggtcagtcccagctcagagccgcaacctgcacagccatgcccgggcaagaactcaggacgstgaatggctctcagatgctcctggtgttgctggtgctctcgtggctgccgcatgggggcgccctgtctctggccgaggcgagccgcgcaagtttcccgggaccctcagagttrcacwccgaagactccagattccgagagttgcggaaacgctacgaggacctgctaaccaggctgcgggccaaccagagctgggaagattcgaacaccgacctcgtcccggcccctgcagtccggatactcacgccagaagtgcggctgggatccggcggccacctgcacctgcgtatctctcgggccgcccttccygaggggctccccgaggcctcccgccttcaccgggctctgttccggctgtccccgacggcgtcaaggtcgtgggacgtgacacgacckctgcggcgtcagctcagccttgcaagaccccaggcgcccgcgctgcacctgmgactgtcgccgccgccgtcgcagtcggaccaactgctggcagaatcttcgtccgcacggccccagctggagttgcacttgcggccgcaagccgccagggggcgccgcagagcgcgtgcgcgcaacggggacsactgtccgctcgggcccgggcgttgctgccgtctgcacacggtccgcgcgtcgctggaagacctgggctgggccgattgggtgctgtcgccacgggaggtgcaagtgaccatgtgcatcggcgcgtgcccgagccagttcsgggcggcaaacatgcacgcgcagatcaagacgagcctgcaccgcctgaagcccgacacggtgccagcgccctgctgcgtgcccgccagctacaatcccatggtgctcattcaaaagaccgacaccggggtgtcgctccagacctatgatgacttgttagccaaagactgccactgcatatgagcagtcctggtccttccactgtgcacctgcgcggrggasgcgacctcagttgtcctgccctgtggaatgsgctcaaggttcctgagacacccgattcctgcccaaacagctgyatttatataagtctgttatttattattaatttattggggtgaccttcttggggactcgggggctggtctgatggaactgtgtatttatttaaaactctggtgataaaaataaagctgtctgaactgtt

SEQ ID NO: 355 - DNA, 1865 bp, Homo sapiens
aggaggaaggggagggaaaaggggaggaggaggaggatgtgagactgggttagagaaatgaaagaaagcaaggctttctgttgacattcagtgcagtctacctgcagcacagcacactccctttgggcaaggacctgagacccttgtgctaagtcaagaggctcaatgggctgcagaagaactagagaaggaccaagcaaagccatgatatttccatggaaatgtcagagcacccagagggacttatggaacatcttcaagttgtgggggtggacaatgctctgttgtgatttcctggcacatcatggaaccgactgctggacttaccattattctgaaaaacccatgaactggcaaagggctagaagattctgccgagacaattacacagatttagttgccatacaaaacaaggcggaaattgagtatctggagaagactctgcctttcagtcgttcttactactggataggaatccggaagataggaggaatatggacgtgggtgggaaccaacaaatctctyactgaagaagcagagaactggggagatggygagcccaacaacaagaagaacaaggaggactgcgtggagatctatatcaagagaaacaaagatgcaggcaaatggaacgatgacgcctgccacaaactaaaggcagccctctgttacacagcttcttgccagccctggtcatgcagtggccatggagaatgtgtagaaatcatcaataattacacctgcaactgtgatgtggggtactatgggccccagtgtcagyttgtgattcagtgtgagcctttggaggccccagagctgggtaccatggactgtactcacyctttgggaaacttcagcttcagctcacagtgtgccttcagctgctctgaaggaacaaacttaactgggattgaagaaaccacctgtggaccatttggaaactggtcatctccagaaccaacctgtcaagtgattcagtgtgagcctctatcagcaccagatttggggatcatgaactgtagccatcccctggccagcttcagctttacctctgcatgtaccttcatctgctcagaaggaactgagttaattgggaagaagaaaaccatttgtgaatcatctggaatctggtcaaatcctagtccaatatgtcaaaaattggacaaaagtttctcaatgattaaggagggtgattataaccccctcttcattccagtggcagtcatggttactgcattctctgggttggcatttatcatttggctggcaaggagattaaaaaaaggcaagaaatccaagagaagtatgaatgacccatattaaatcgcccttggtgaaagaaaattcttggaatactaaaaatcatgagatcctttaaatccttccatgaaacgttttgtgtggtggcacctcctacgtcaaacatgaagtgtgtttccttcagtgcatctgggaagatttctaccygaccaacagttccttcagcttccatttcgcccctcatttatccctcaacccccagcccacaggtstttatacagctcagctttttgtcttttctgaggagaaacaaataagaccayaaagggaaaggattcatgtggaatataaagatggctgactttgctctttcttgactcttgttttcagtttcaattcagtgctgtacttgatgacagacacttctaaatgaagtgcaaatttgatacatatgtgaatatggactcagttttcttgcagatcaaatttcacgtcgtcttctgtatactgtggaggtacactcttatagaaagttcaaaaattgaaagagtcctatttgcactgtagcctcgccgtctgtgaattggaccatcctatttaactgg

SEQ ID NO: 356 - DNA, 2448 bp, Homo sapiens
aggaggaaggggagggaaaaggggaggaggaggaggatgtgagactgggttagagaaatgaaagaaagcaaggctttctgttgacattcagtgcagtctacctgcagcacagcacactccctttgggcaaggacctgagacccttgtgctaagtcaagaggctcaatgggctgcagaagaactagagaaggaccaagcaaagccatgatatttccatggaaatgtcagagcacccagagggacttatggaacatcttcaagttgtgggggtggacaatgctctgttgtgatttcctggcacatcatggaaccgactgctggacttaccattattctgaaaaacccatgaactggcaaagggctagaagattctgccgagacaattacacagatttagttgccatacaaaacaaggcggaaattgagtatctggagaagactctgcctttcagtcgttcttactactggataggaatccggaagataggaggaatatggacgtgggtgggaaccaacaaatctctyactgaagaagcagagaactggggagatggygagcccaacaacaagaagaacaaggaggactgcgtggagatctatatcaagagaaacaaagatgcaggcaaatggaacgatgacgcctgccacaaactaaaggcagccctctgttacacagcttcttgccagccctggtcatgcagtggccatggagaatgtgtagaaatcatcaataattacacctgcaactgtgatgtggggtactatgggccccagtgtcagyttgtgattcagtgtgagcctttggaggccccagagctgggtaccatggactgtactcacyctttgggaaacttcagcttcagctcacagtgtgccttcagctgctctgaaggaacaaacttaactgggattgaagaaaccacctgtggaccatttggaaactggtcatctccagaaccaacctgtcaagtgattcagtgtgagcctctatcagcaccagatttggggatcatgaactgtagccatcccctggccagcttcagctttacctctgcatgtaccttcatctgctcagaaggaactgagttaattgggaagaagaaaaccatttgtgaatcatctggaatctggtcaaatcctagtccaatatgtcaaaaattggacaaaagtttctcaatgattaaggagggtgattataaccccctcttcattccagtggcagtcatggttactgcattctctgggttggcatttatcatttggctggcaaggagattaaaaaaaggtatgtgagtttaacttcacatgaaaatatgaatgacccatattaaatcgcccttggtgaaagaaaattcttggaatactaaaaatcatgagatcctttaaatccttccatgaaacgttttgtgtggtggcacctcctacgtcaaacatgaagtgtgtttccttcagtgcatctgggaagatttctaccygaccaacagttccttcagcttccatttcgcccctcatttatccctcaacccccagcccacaggtstttatacagctcagctttttgtcttttctgaggagaaacaaataagaccayaaagggaaaggattcatgtggaatataaagatggctgactttgctctttcttgactcttgttttcagtttcaattcagtgctgtacttgatgacagacacttctaaatgaagtgcaaatttgatacatatgtgaatatggactcagttttcttgcagatcaaatttcacgtcgtcttctgtatactgtggaggtacactcttatagaaagttcaaaaagtctacgctctcctttctttctaactccagtgaagtaatggggtcctgctcaagttgaaagagtcctatttgcactgtagcctcgccgtctgtgaattggaccatcctatttaactggcttcagcctccccaccttcttcagccacctctctttttcagttggctgacttccacacctagcatctcatgagtgccaagcaaaaggagagaagagagaaatagcctgcgctgttttttagtttgggggttttgctgtttccttttatgagacccattcctatttcttatagtcaatgtttcttttatcacgatattattagtaagaaaacatcactgaaatgctagctgcaagtgacatctctttgatgtcatatggaagagttaaaacaggtggagaaattccttgattcacaatgaaatgctctcctttcccctgcccccagamcttttatccacttacctagattctacatattctttaaatttcatctcaggcctccctcaaccccaccacttcttttataactagtcctttactaatccaacccatgatgagctcctcttcctggcttcttactgaaaggttaccctgtaacatgcaattttgcatttgaataaagcctgctttttaagtgttaa

SEQ ID NO: 357 - DNA, 1875 bp, Homo sapiens
aggaggaaggggagggaaaaggggaggaggaggaggatgtgagactgggttagagaaatgaaagaaagcaaggctttctgttgacattcagtgcagtctacctgcagcacagcacactccctttgggcaaggacctgagacccttgtgctaagtcaagaggctcaatgggctgcagaagaactagagaaggaccaagcaaagccatgatatttccatggaaatgtcagagcacccagagggacttatggaacatcttcaagttgtgggggtggacaatgctctgttgtgatttcctggcacatcatggaaccgactgctggacttaccattattctgaaaaacccatgaactggcaaagggctagaagattctgccgagacaattacacagatttagttgccatacaaaacaaggcggaaattgagtatctggagaagactctgcctttcagtcgttcttactactggataggaatccggaagataggaggaatatggacgtgggtgggaaccaacaaatctctyactgaagaagcagagaactggggagatggygagcccaacaacaagaagaacaaggaggactgcgtggagatctatatcaagagaaacaaagatgcaggcaaatggaacgatgacgcctgccacaaactaaaggcagccctctgttacacagcttcttgccagccctggtcatgcagtggccatggagaatgtgtagaaatcatcaataattacacctgcaactgtgatgtggggtactatgggccccagtgtcagyttgtgattcagtgtgagcctttggaggccccagagctgggtaccatggactgtactcacyctttgggaaacttcagcttcagctcacagtgtgccttcagctgctctgaaggaacaaacttaactgggattgaagaaaccacctgtggaccatttggaaactggtcatctccagaaccaacctgtcaagtgattcagtgtgagcctctatcagcaccagatttggggatcatgaactgtagccatcccctggccagcttcagctttacctctgcatgtaccttcatctgctcagaaggaactgatttcaattcagtgctgtacttgatgacagacacttctaaatgaagtgcaaatttgatacatatgtgaatatggactcagttttcttgcagatcaaatttcacgtcgtcttctgtatactgtggaggtacactcttatagaaagttcaaaaagtctacgctctcctttctttctaactccagtgaagtaatggggtcctgctcaagttgaaagagtcctatttgcactgtagcctcgccgtctgtgaattggaccatcctatttaactggcttcagcctccccaccttcttcagccacctctctttttcagttggctgacttccacacctagcatctcatgagtgccaagcaaaaggagagaagagagaaatagcctgcgctgttttttagtttgggggttttgctgtttccttttatgagacccattcctatttcttatagtcaatgtttcttttatcacgatattattagtaagaaaacatcactgaaatgctagctgcaagtgacatctctttgatgtcatatggaagagttaaaacaggtggagaaattccttgattcacaatgaaatgctctcctttcccctgcccccagamcttttatccacttacctagattctacatattctttaaatttcatctcaggcctccctcaaccccaccacttcttttataactagtcctttactaatccaacccatgatgagctcctcttcctggcttcttactgaaaggttaccctgtaacatgcaattttgcatttgaataaagcctgctttttaagtgttaa

SEQ ID NO: 358 - DNA, 2040 bp, Homo sapiens
aggaggaaggggagggaaaaggggaggaggaggaggatgtgagactgggttagagaaatgaaagaaagcaaggctttctgttgacattcagtgcagtctacctgcagcacagcacactccctttgggcaaggacctgagacccttgtgctaagtcaagaggctcaatgggctgcagaagaactagagaaggaccaagcaaagccatgatatttccatggaaatgtcagagcacccagagggacttatggaacatcttcaagttgtgggggtggacaatgctctgttgtgatttcctggcacatcatggaaccgactgctggacttaccattattctgaaaaacccatgaactggcaaagggctagaagattctgccgagacaattacacagatttagttgccatacaaaacaaggcggaaattgagtatctggagaagactctgcctttcagtcgttcttactactggataggaatccggaagataggaggaatatggacgtgggtgggaaccaacaaatctctyactgaagaagcagagaactggggagatggygagcccaacaacaagaagaacaaggaggactgcgtggagatctatatcaagagaaacaaagatgcaggcaaatggaacgatgacgcctgccacaaactaaaggcagccctctgttacacagcttcttgccagccctggtcatgcagtggccatggagaatgtgtagaaatcatcaataattacacctgcaactgtgatgtggggtactatgggccccagtgtcagyttgtgattcagtgtgagcctttggaggccccagagctgggtaccatggactgtactcacyctttgggaaacttcagcttcagctcacagtgtgccttcagctgctctgaaggaacaaacttaactgggattgaagaaaccacctgtggaccatttggaaactggtcatctccagaaccaacctgtcaagtgattcagtgtgagcctctatcagcaccagatttggggatcatgaactgtagccatcccctggccagcttcagctttacctctgcatgtaccttcatctgctcagaaggaactgagttaattgggaagaagaaaaccatttgtgaatcatctggaatctggtcaaatcctagtccaatatgtcaaaaattggacaaaagtttctcaatgattaaggagggtgattataaccccctcttcattccagtggcagtcatggttactgcattctctggtttcaattcagtgctgtacttgatgacagacacttctaaatgaagtgcaaatttgatacatatgtgaatatggactcagttttcttgcagatcaaatttcacgtcgtcttctgtatactgtggaggtacactcttatagaaagttcaaaaagtctacgctctcctttctttctaactccagtgaagtaatggggtcctgctcaagttgaaagagtcctatttgcactgtagcctcgccgtctgtgaattggaccatcctatttaactggcttcagcctccccaccttcttcagccacctctctttttcagttggctgacttccacacctagcatctcatgagtgccaagcaaaaggagagaagagagaaatagcctgcgctgttttttagtttgggggttttgctgtttccttttatgagacccattcctatttcttatagtcaatgtttcttttatcacgatattattagtaagaaaacatcactgaaatgctagctgcaagtgacatctctttgatgtcatatggaagagttaaaacaggtggagaaattccttgattcacaatgaaatgctctcctttcccctgcccccagamcttttatccacttacctagattctacatattctttaaatttcatctcaggcctccctcaaccccaccacttcttttataactagtcctttactaatccaacccatgatgagctcctcttcctggcttcttactgaaaggttaccctgtaacatgcaattttgcatttgaataaagcctgctttttaagtgttaactagtt

SEQ ID NO: 359 - DNA, 2440 bp, Homo sapiens
aggaggaaggggagggaaaaggggaggaggaggaggatgtgagactgggttagagaaatgaaagaaagcaaggctttctgttgacattcagtgcagtctacctgcagcacagcacactccctttgggcaaggacctgagacccttgtgctaagtcaagaggctcaatgggctgcagaagaactagagaaggaccaagcaaagccatgatatttccatggaaatgtcagagcacccagagggacttatggaacatcttcaagttgtgggggtggacaatgctctgttgtgatttcctggcacatcatggaaccgactgctggacttaccattattctgaaaaacccatgaactggcaaagggctagaagattctgccgagacaattacacagatttagttgccatacaaaacaaggcggaaattgagtatctggagaagactctgcctttcagtcgttcttactactggataggaatccggaagataggaggaatatggacgtgggtgggaaccaacaaatctctyactgaagaagcagagaactggggagatggygagcccaacaacaagaagaacaaggaggactgcgtggagatctatatcaagagaaacaaagatgcaggcaaatggaacgatgacgcctgccacaaactaaaggcagccctctgttacacagcttcttgccagccctggtcatgcagtggccatggagaatgtgtagaaatcatcaataattacacctgcaactgtgatgtggggtactatgggccccagtgtcagyttgtgattcagtgtgagcctttggaggccccagagctgggtaccatggactgtactcacyctttgggaaacttcagcttcagctcacagtgtgccttcagctgctctgaaggaacaaacttaactgggattgaagaaaccacctgtggaccatttggaaactggtcatctccagaaccaacctgtcaagtgattcagtgtgagcctctatcagcaccagatttggggatcatgaactgtagccatcccctggccagcttcagctttacctctgcatgtaccttcatctgctcagaaggaactgagttaattgggaagaagaaaaccatttgtgaatcatctggaatctggtcaaatcctagtccaatatgtcaaaaattggacaaaagtttctcaatgattaaggagggtgattataaccccctcttcattccagtggcagtcatggttactgcattctctgggttggcatttatcatttggctggcaaggagattaaaaaaaggcaagaaatccaagagaagtatgaatgacccatattaaatcgcccttggtgaaagaaaattcttggaatactaaaaatcatgagatcctttaaatccttccatgaaacgttttgtgtggtggcacctcctacgtcaaacatgaagtgtgtttccttcagtgcatctgggaagatttctaccygaccaacagttccttcagcttccatttcgcccctcatttatccctcaacccccagcccacaggtstttatacagctcagctttttgtcttttctgaggagaaacaaataagaccayaaagggaaaggattcatgtggaatataaagatggctgactttgctctttcttgactcttgttttcagtttcaattcagtgctgtacttgatgacagacacttctaaatgaagtgcaaatttgatacatatgtgaatatggactcagttttcttgcagatcaaatttcacgtcgtcttctgtatactgtggaggtacactcttatagaaagttcaaaaagtctacgctctcctttctttctaactccagtgaagtaatggggtcctgctcaagttgaaagagtcctatttgcactgtagcctcgccgtctgtgaattggaccatcctatttaactggcttcagcctccccaccttcttcagccacctctctttttcagttggctgacttccacacctagcatctcatgagtgccaagcaaaaggagagaagagagaaatagcctgcgctgttttttagtttgggggttttgctgtttccttttatgagacccattcctatttcttatagtcaatgtttcttttatcacgatattattagtaagaaaacatcactgaaatgctagctgcaagtgacatctctttgatgtcatatggaagagttaaaacaggtggagaaattccttgattcacaatgaaatgctctcctttcccctgcccccagamcttttatccacttacctagattctacatattctttaaatttcatctcaggcctccctcaaccccaccacttcttttataactagtcctttactaatccaacccatgatgagctcctcttcctggcttcttactgaaaggttaccctgtaacatgcaattttgcatttgaataaagcctgctttttaagtgttaa

SEQ ID NO: 360 - DNA, 4663 bp, Homo sapiens
cctgctcctgctcctccgctcctcctgcgcggggtgctgaaacagcccggggaagtagagccgcctccggggagcccaaccagccgaacgccgccggcgtcmgcagccttgcgcggccacagcatgaccgctcgcggcctggcccttggcctcctcctgctgctactgtgtccagcgcaggtgttttcacagtcctgtgtttggtatggagagtgtggaattgcatatggggacaagaggtacaattgcgaatattctggcccaccaaaaccattgccaaaggatggatatgacttagtgcaggaactctgtccaggattcttctttggcaatgtcagtctctgttgtgatgttcggcagcttcagacactaaaagacaacctgcagctgcctctacrgtttctgtccagatgtccatcctgtttttataacctactgaacctgttttgtgagctgacaygtagccctygacagagtcagtttttgaatgttacagctactgaagattaygttgatcctgttacaaaccagacgaaaacaaatgtgaaagagttacaatactacgtcggacagagttttgccaatgcaatgtacaatgcctgccgggatgtggaggccccctcaagtaatgacaaggccctgggactcctgkrtgggaaggacgctgacgcctgtaatgccaccaactggattgaatacatgttcaataaggacaatggacaggcaccttttaccatcactcctgtgttttmagattttccagtccrtgggatggagcccatgaacaatgccaccaaaggctgtgacgagtctgkggatgaggtcacagcaycatgtagctgccaasactgctctattgtctgtggccccaagccccagcccccacctcctcctgctccctggacgatccttggcttggacgccatgtatgtcatcakgtggatcacctacatggcgtttttgcttgtgttttttggagcattttttgcagtgtggtgctacagaaaacggtattttgtctccgagtacactcccatcgatagcaatatagctttttctgttaatgcaagtgacaaaggagaggcgtcytgctgtgaccctgtcagcgcagcatttgagggctgcttgaggcggctgttcacacgctgggggtctttctgcgtccgaaaccctggctgtgtcattttcttctcrctggtcttcattactgcgtgttcgtcaggcctggtgtttgtccgggtcacaaccaatccagytgacctctggtcagcccccagcagccaggctcgcctggaaaaagagtactttgaccagcactttgggcctttcttccrgacggagcagctcatcatccgggcccctctcactgacaaacacatttaccagccatacccttcgggagctgatgtaccctttggacctycgcttgacatacagatactgcaccaggttcttgacttacaaatagccatcgaaaacattactgcctcttatgacaatgagactgtgacacttcaagacatctgcttggcccctcttycaccgtataacacgaactgcaccattttgagtgtgttaaattacttccagaacagccattccgtgctggaccacaagaaaggggacgacttctttgtgtatgccgattaccacacgcrctttctgtactgcgtaygggctcctgcctctctgaatgatacaagtttgctccatgacccttgtctgggtacgtttggtggaccagtgttcccgtggcttgtgttgggaggctatgatgatcaaaactacaataacgccactgcccttgtgattaccttccctgtcaataattactataatgatacagagaagctccagagggcccaggcctgggaaaaagagtttattaattttgtgaaaaactacaagaatcccaatctgaccatttccttcactgytgaaygaagtattgaagatgaactaaatcgtgaaagtgacagtgatgtcttcaccgttgtaattagctatgccatcakgtttctatatatttccctagccttggggcacatsaaaagctgtcgcaggcttctggtggattcgaaggtctcactaggcatcgcgggcatcttgatcgtgctgagctcggtggcttgstccttgggtgtcttcagctacattgggttgcccttgaccctcattgtgattgaagtcatcccgttcctggtgctggctgttggagtggacaayatctycattctggtgcaggcctaccagagagatgaacgtcttcaaggggaaaccctggatcagcagcygggcagggtcctaggagaagtggctcccagtatgttcctgtcatccttttctgagactgtagcatttttyttaggagcattgtccgtgatgccagccgtgcacaccttctctctctttgcgggattggcagtcttcattgactttcttctgcmgattacctgtttcgtgagtctcttggggttagacattaaacgtcaagagaaaaatcggctagacatcttttgctgtgtcagaggtgctgaagatggaacaagcgtccaggcctsagagagctgtttgtttcgcttcttcaaaaactcctrttctccacttctgctaaaggactggatgagaccaattgtgatagcaatatttgtgggtgttctgtcattcagcatcgcagtcctgaacaaagtagatrttggattggatcagtctctttcgatgccagatgactcctacatggtggwttatttcaaatccatcagtcagtacctgcatgcgggtccrcctrtgtactttgtcctggaggaagggcacgactacacttcttccaaggggcagaacatggtgtgcggcrgcatgggctgcaacaatgattccctggtgcagcagatatttaacgcggcgcmgctggacaaytatacccraataggcttcgccccctcgtcctggatcgacgattatttcractggrtgaagccacagtygtcttrctgtcgagtggacartatcactgaccagttctgcaatgcttcagtggttgaccctgcctgcgttygctgcaggcctctgactccggaargcaaacagaggcctcagkggggagacttcakgagattcctgcccatgttcctttcggataaccctaaccccaagtgtggcaaagggggacatgctgcctatagttctgcagttaacatcctccttggccatggcaccagggtcggagycaygtacttcatgacctaccacaccgtgctgcagacctctgctgactttattgacrctctgaagaaagcccgacttayagccagtaatgtcaccgaaaccatgggcattaacggcagtgcctaccgagtatttccttacagtgtgttttatgtcttctrcgaacagtacctgaccatcattgacgacactatcttcaacctcggtgtgtccctgggcgcgatatttctggtgaccatgktcctcctgggctgtgagctctggtctgcagtcatcatgtgtgccaccatcgccatggtcttggtcaacatgtttggagttaygtrgctctggggcatcagtctgaaygctgtatccttggtcarcctggtgatgagctgtggcatctccgtggagttctgcagccacataaccagagcgttcacggtgagcrtgaaaggcagccgcgtggagcgcgcggaagaggcacttgcccacatgggcagctccgtgttcrgtggaatcacacttasaaaatttggagggattgtggtgktsgcttttgccaaatctcaaattttccagatattctacttcaggatgtatttggccatggtcttactggragccactcayggattaatatttctycctgtcttactcagttacatagggccatcagtaaataaagccaaaagttgtgccactgaagagcratacaaaggaacagagcgcgaacggcttctaaatttctagccctctcgcagggcatcctgactgaactgtgtctaagggtcggtcggtttaccactggacgggtgctgcatcggcaaggccaagttgaacaccggatggtgccaaccatcggttgtttggcagcagctttgaacgtagcgcctgtgaactcaggaatgcacagytgacttgggaagcagtattactagatctggaggcaaccacaggacactaaacttctcccagcctcttcaggaaagaaacctcattctttggcaagcaggaggtgacactagatggctgtgaatgtgatccgctcactgacactctgtaaaggccaatcaatgcactgtctgtctctccttttaggagtaagccatcccacaagttctataccatatttttagtgacagttgaggttgtagatacactttataacattttatagtttaaagagctttattaatgcaataaattaactttgtacacatttttatataaaaaaacagcaagtgatttcagaatgttgtaggcctcattagagcttggtctccaaaaatctgtttgaaaaaagcaacatgttcttcacagtgttcccctagaaaggaagagatttaattgccagttagatgtggcatgaaatgagggacaaagaaagcatctcgtaggtgtgtctactgggttttaacttatttttctttaataaaatacattgttttcctaa

SEQ ID NO: 361 - DNA, 2313 bp, Homo sapiens
cggattgtcagactgctcctccctcttctttagactgccacgaggaaaaagcagatgtgagaactcaaggttcagggctgctcttctaasaaacaagtctgccataatctccatctgtgttggaatctgttaactaatgaactggtctctgtgcaaatccygagtgctaaagcttccaacaagactgatgctagctcgtgtcaccaggaagatgctacgtcatgccaagtgttttcagcgcctagcartttttggttctgtgagggcactgcataaagataatagaacagcaacccctcagaatttctccaactatgaatccatgaaacaggacttcaaactggggattccagagtatttcaactttgctaaagatgtcctggaccaatggactgataaggaaaaggctggaaagaaaccttcaaatccagccttctggtggatcaacagaaatggagaagagatgcgatggagttttgaggaacygggatctctgtccagaaaatttgccaatatactttcagaagcctgttccctacaaagaggagatcgggtaattctgattctgcccagggtcccagagtggtggcttgcaaatgtggcctgtctgcgaacagggacagttttaattccaggaaccactcagctgacccagaaagacattctctacagactacaatcttcaaaagcaaactgcattatcaccaatgatgttttagccccagcagtagacgctgttgcatccaaatgtgaaaatctgcactccaagctgatygtatcagagaactccagagaggggtgggggaacctcaaggagttgatgaaacatgccagtgacagccacacctgtgtgaagacaaaacacaatgagatcatggccatattctttaccagtggaacaagtggatatccgaaaatgactgcacacacccacagcagttttggtttaggattatctgtaaatggaaggttctggctagatttgacaccctcagatgtgatgtggaatacctcagatacgggctgggcaaagtctgcatggagtagtgttttttctccgtrgatccagggagcatgtgtattcacacaccatttaccccgttttgagccgacttctatcttgcaaacactctccaagtaccccatcacagtcttctgttcagcaccaactgtataccgaatgcttgtacagaatgatataaccagctataagtttaaaagcttaaagcactgtgtgagtgctggggaaccaattacccctgacgtgactgaaaaatggagaaacaasacgggcctggatatctacgaaggatatggacagactgaaacggtgctaatctgtggaaattttaagggaatgaaaattaaacctggctcaatgggaaaaccttctcctgctttygatgttaagattgtagatgtaaatggcaatgttctacctcctggacaagaaggagatattggcattcaagttctacccaaccgaccatttggcctttttactcattasgtagataatccttcaaaaacagcttcaactctacgaggcaatttctatatcactggggacagagsatatatggataaagatgggtatttctggtttgttgcaagagcagatgatgtyatattatcctctggctatcgaattggaccatttgaggtagaaaatgccctgaatgaacacccttcagttgcagagtcagctgttgtcagcagcccagaccccatcagaggagaggtagtaaaggcttttgtcgttctaaatcctgattacaagtcacatgatcaagaacaactaataaaggagattcaggagcatgttaaaaaaactacagcaccttacaaatatcccagaaaggtagaatttattcaagagctgccaaagactatcagwgggaagacaaaaagaaatgaactgaggaagaaagaatggaagacaatttaaagttgtttcattaattaccatatctataaaacaaacatagtatctgtcaatctctagaaaccacaagatgatggagaggtcataaaaactgtggtagtatgcttagaaactgttgatttaaaatatcttgtggttatgatatcagaggctaaattttgaaataaaatatttggcaaattcctccacattagtgtcaatgttcctatcatttcttaatataaaaataataccatcaattgctgattaatttttaaatgtatagtatagaagcagtttctgaaccagatctctgctacataggttttcaaactttagttgactaattcttctgatatgttgatatacaaatcagaaccaatgttcaa

SEQ ID NO: 362 - DNA, 1568 bp, Homo sapiens
cggattgtcagactgctcctccctcttctttagactgccacgaggaaaaagcagatgtgagaactcaaggttcagggctgctcttctaasaaacaagtctgccataatctccatctgtgttggaatctgttaactaatgaactggtctctgtgcaaatccygagtgctaaagcttccaacaagactgatgctagctcgtgtcaccaggaagatgctacgtcatgccaagtgttttcagcgcctagcartttttggttctgtgagggcactgcataaagataatagaacagcaacccctcagaatttctccaactatgaatccatgaaacaggacttcaaactggggattccagagtatttcaactttgctaaagatgtcctggaccaatggactgataaggaaaaggctggaaagaaaccttcaaatccagccttctggtggatcaacagaaatggagaagagatgcgatggagttttgaggaacygggatctctgtccagaaaatttgccaatatactttcagaagcctgttccctacaaagaggagatcgggtaattctgattctgcccagggtcccagagtggtggcttgcaaatgtggcctgtctgcgaacagggacagttttaattccaggaaccactcagctgacccagaaagacattctctacagactacaatcttcaaaagcaaactgcattatcaccaatgatgttttagccccagcagtagacgctgttgcatccaaatgtgaaaatctgcactccaagctgatygtatcagagaactccagagaggggtgggggaacctcaaggagttgatgaaacatgccagtgacagccacacctgtgtgaagacaaaacacaatgagatcatggccatattctttaccagtggaacaagtggatatccgaaaatgactgcacacacccacagcagttttggtttaggattatctgtaaatggaaggttctggctagatttgacaccctcagatgtgatgtggaatacctcagatacgggctgggcaaagtctgcatggagtagtgttttttctccgtrgatccagggagcatgtgtattcacacaccatttaccccgttttgagccgacttctatcttgcaaacactctccaagtaccccatcacagtcttctgttcagcaccaactgtataccgaatgcttgtacagaatgatataaccagctataagtttaaaagcttaaagcactgtgtgagtgctggggaaccaattacccctgacgtgactgaaaaatggagaaacaasacgggcctggatatctacgaaggatatggacagactgaaacggtgctaatctgtggaaattttaagggaatgaaaattaaacctggctcaatgggaaaaccttctcctgctttygatgttaaggtttgcacatccccttccaggagaatgtttaacaacccaatctgtacactacctacctaccgcttacccccatataaactttctttgttatgatggtgattccattttacttccatgatactttaatttttataaatatgtgaaaatgattagaaat

SEQ ID NO: 363 - DNA, 3919 bp, Homo sapiens
actccctcactggctgccattgaaagagtccacttctcagtgactcctagctgggcactggatgcagttgaggattgctggtcaatatgattcttcttgctgtgctttttctctgcttcatttcstcatattcagcttctgttaaaggtcacacaactggtctctcattaaataatgaccggctgtacaagctcacgtactccactgaagttcttcttgatcggggcaaaggaaaactgcaagacagcgtgggctaccgcatttcctccaacgtggatgtggccttactatggaggaatcctgatggtgatgatgaccagttgatccaaataacgatgaaggatgtaaatgttgaaaatgtgaatcagcasagaggagasaagagcatcttcaaaggaaaaagcccatctaaaataatgggaaaggaaaacttggaagctctgcaaagacctacgctccttcatctaayccatggaaaggtcaaagagttctactcatatcaaartgaggcagtggccatagaaaatatcaagagaggyctggctagcctatttcagacacagttaagctctggaaccaccartgagrtagatatctctggaaattgyaaagtgacctaccaggctcatcaagacaaagtgatcaaaattaaggccttggattcatgcaaaatagcgaggtctggatttacgaccccaaatcaggtcttgggtgtcagttcaaaagctacatctgtcaccacctataagatagaagacagctttgttatagctgtgcttgctgaagaaacacacaattttggactgaatttcctacaaaccattaaggggaaaatagtatcgaagcagaaattagagctgaagacaaccgaagcaggcccaagaytgatgtctggaaagcaggctgcagccataatcaaagcagttgattcaaagtacacggccattcccattgtggggcaggtcttccagagccastgtaaaggatgtccttctctctcggagctctggcggtccacmaggaaatacctgcagcctgacaacctttccaaggcygaggctgtcagaaacttcctggccttcattcagcacctcaggactgcgaagaaagaagagatccttcaaatactaaagatggaaaataaggaagtattacctcagctggtggatgctgtcacctctgctcagacctcagactcattagaagccattttggactttttggatttcaaaagtgmcagcagcattatcctccaggagaggtttctctatgcctgtggatttgcttctcatcccaatgaagaactcctgagagccctcattagtaagttcaaaggttctattggtagcagtgacatcagagaaactgttatgatcatcactgggacacttgtcagaaagttgtgtcagaatgaaggctgcaaactcwaagcagtagtggaagctaagaagttaatcctgggaggacttgaaaaagcagagaaaaaagaggacaccaggatgtatctgctggctttgaagaatgccctgcttccagaaggcatcccaagtcttctgaagtatgcagaagcaggagaagggcccatcagccacctggctaccactgctctccagagatatgatctccctttcataactgatgaggtgaagaagaccttaaacagaatataccaccaaaaccgtaaagttcatgaaaagactgtgcrcactgctgcagctgctatcattttaaataacaatccatcctacatggacgtcaagaacatcctgctgtctattggggagcttccccaagaaatgaataaatacatgctcgccattgttcaagacatcctacgttttgaaatgcctgcaakcaaaattgtccgtcgagttctgaaggaaatggtcgctcacaattatgaccgtttctccaggagtggatcttcttctgcctacactggctacatagaacgtagtccccgttcggcatctacttacagcctagacattctctactcgggttctggcattctaaggagaagtaacctgaacatctttcagtacattgggaaggctggtcttcacggtagccaggtggttattgaagcccaaggactggaagccttaatcgcagccacccctgacgagggggaggagaaccttgactcctatgctggtatgtcagccatcctctttgatgttcagctcagacctgtcacctttttcaacggatacagtgatttgatgtccaaaatgctgtcagcatctggcgaccctatcagtgtggtgaaaggacttattctgctaatagatcattctcaggaacttcagttacaatctggactaaaagccaatatagaggtccagggtggtctagctattgatatttcaggtgcaatggagtttagcttgtggtatcgtgagtctaaaacccgagtgaaawatagggtgactgtggtaataaccactgacatcacagtggactcctcttttgtgaaagctggcctggaaaccagtacagaaacagaagcaggcttggagtttatctccacagtgcagttttctcagtacccattcttagtttgcatgcagatggacaaggatgaagctccattcaggcaatttgagwaaaagtacgaaaggctgtccacaggcagaggttatgtctctcagaaaagaaaagaaagcgtattagcakgatgtgaattcccgctccatcaagagaactcagagatgtgcaaagtggtgtttgcccctcagccggatagtacttccagcggatggttttgaaactgacctgtgatattttacttgaatttgtctccccgaaagggacacaatgtggcatgactaagtacttgctctctgagagcacagcgtttacatatttacctgtatttaagatttttgtaaaaagctacaaaaaactgcagtttgatcaaatttgggtatatgcagtatgctacccacagcgtcattttgaatcatcatgtgacgctttcaacaacgttcttagtttacttatacctctctcaaatctcatttggtacagtcagaatagttattctctaagaggaaactagtgtttgttaaaaacaaaaataaaaacaaaaccacacaaggagaacccaattttgtttcaacaatttttgatcaatgtatatgaagctcttgataggacttccttaagcatgacgggaaaaccaaacacgttccctaatcaggaaaaaaaaaaaaaaaaaaagtaagacacaaacaaaccattttttttctctttttttggagttgggggcccagggagaagggacaagrcttttaaaagacttgttagccaacttcaagaattaatatttatgtctctgttattgttagttttaagccttaaggtagaaggcacatagaaataacatctcatctttctgctgaccattttagtgaggttgttccaaagacattcaggtctctacctccagccctgcaaaaatattggacctagcacagaggaatcaggaaaattaatttcagaaactccatttgatttttcttttgctgtgtctttttgagactgtaatatggtacactgtcctctaagggacatcctcattttatctcacctttttgggggtgagagctctagttcatttaactgtamtctgcacaatagctaggatgactaagagaacattgcttcaagaaactggtggatttggatttccaaaatatgaaataaggaaaaaaatgtttttatttgtatgaattaaaagatccatgttgaacatttgcaaatatttattaataaacagatgtggtgataaacccaaaacaaatgacaggtscttattttccactaaacacagacacatgaaatgaaagtttagctagcccactatttgttgtaaattgaaaacgaagtgtgataaaataaatatgtagaaatc

SEQ ID NO: 364 - DNA, 5600 bp, Homo sapiens
ggagtgggccaggccgccagccccgycagccccgccagccccgccagccccgcgatggcttgggccgcgctcctcggcctcctggccgcactgttgctgctgytgctactgagccgccgccgcacgcggcgacctggtgagcctcccctggacctgggcagcatcccctggttggggtatgccttggactttggaaaagatgctgccagcttcctcacgaggatgaaggagaagcacggtgacatctttactatactggttgggggcaggtatgtcaccgttctcctggacccacactcctacgacgcggtkgtgtgggagcctcgcaccaggctcgacttccatgcctatgccatcttcctcatggagaggatttttgatgtgcagcttccacattacagccccagwgatgaaaaggccaggatgaaactgactcttctccacagagagctccaggcactcacagaagccatgtataccaacctccatgcagtgctgttgggcgatgctacagmagcaggcagtggctggcacgagatgggtctcctcgacttctcctacagcytcctgctcagagccggctayctgactctttacggaattgaggcgctgccacgcacccatgaaagccaggcccaggaccgygtccactcagctgatgtcttccacacctttcgccagctcgaccggctgctccccaaactggcccgtggctccctgtcagtgggggacaaggaccacatgtgcagtgtcaaaagtygcctgtggaagctgctrtccccagccaggctggccaggcgggcccaccggagcaaatggctrgagagttacctgctgcacctggaggagatgggtgtgtcagaggagatgcaggcacrggccctggtgctgcagctgtgggccacacaggggaatatgggtcccgctgccttctggctcctgctcttccttctcaagaatcctgaagccctggctgctgtccgcggagagctcgagagtatcctttggcaagcggagcagcctgtctcgcagacgaccactctcccacagaaggttctagacagcacacctgtgcttgatagcgtgctgagtgagagcctcaggcttacagctgcccccttcatcacccgcgaggttgtggtggacctggccatgcccatggcagacgggmgagaattcaacctgcgacgtggtgaccgcctcctcctcttccccttcctgagcccccagagagacccagaaatctacacagacccagaggtatttaaatacaaccgattcctgaaccctgayggatcagagaagaaagacttttacaaggatgggaaacggctgaagaattacaacatgccctggggggcggggcacaatcactgcctggggaggagttatgcggtcaacagcatcaaacaatttgtgttccttgtgctggtgcacttggacttggagctgatcaacgcagatgtggagatccctgagtttgacctcagcaggtacggcttcggtctgatgcagccggaacacgacgtgcccgtccgctaccgcatccgcycatgacacagggagcagatggatccacgtgctcgcctctgcccagcctgccccagcctgccccagcctcccagctttctgtgtgcacagttggcccgggtgcaggtgctagcattaccacytccctgcttttctcccagaaggctgggtccaggggagkgaaaagctaagagggtgaacaaagaaaagacattgaaagctctatggattatccactgcaaagttttctttccaaaatcaggctttgtctgytcccaattcacctcgttactctcacctcgtgatatccacaaatgctattcagayaaggcagaactaggagtcttcactgctctgcccccaactcccggaggtgtcaccttcctagttcttatgagctagcatggcccgggccttatccagtcaaagcggatgctggccacakaaagrccactcaggatgtcctttgtgtccattgatgtcattcagcagtcagtcccccaataatccttaaactagctaaaaccaaaggagtcccttagaagatctgcttccctggggccccatttgccagattgccccattgctcacactacttgagaaaatgcaggagagcttcccccaaggctgatgcattcccggtgcagaacaggggcaccctccaaacactgggctctgaggagtggagttctctgttctagagtgacaggcaccagatgggatgggctttctcagtgtcagcactcaggtagggagctaaggaagacacagcccagacaagatggctggaaggagccagccaggactccttagactgatmaagccaaaaaagaaggtgccgatttcatgcattctagtgcagaagccccaactgtgatcacgatccagtctgcagacgtgttttgtttggacttcacttaaaaaaatgccttagttgttatcatctttgggagagttcattcaaaatgtccagcttctcttgaaaacttggtatatctggccacactgggctcacattcccaagggtaactcttggccagagctgagtggcagccgcctcccttatgcaggacatgtgctctcggcttcaccagggttctgaccgggtctgcttctgcattcacagygcctcctggacctgaaggcatctgagtgtgagaccctgttctaactcttagaagtgacattgtaagaggtggtggggaccagctaattggtccaacccagcctgagtgcaccaccctttgaacaaatgtatcagtgatgaaaatttgcctttgccccggcttgcctgtaatcccagcactttgggaggccgaggtgggcggatcacttgaggtcgggagttcaagaccagcctggccaacatggcgaaaycccgtctctactaaamatamaaaaattagtcaggtgtggcrgtgcgtgcctgtaatcccagctattcaggaggctgaggcaccagaattgcttgaacccaggaggtggaggttgcagtgaactgagactgcgccacggcactccagcctgggcgacagagcaagactctgtctcaataaataaataattaattaaaataaaaaacagcttaaagagaaaaatggcctgcaaaccttttttatgatgctatttktattaatataaagtcytgtttattgagaccctttaaatgcctgcgagagaccctacagacagtatgtctactcctcacagcatctctatgargagaaggagggttgtgcccacttcatagatgagaaaactgagaggtgaggtgacttgcctggggccacatagctcataagctgtagaactctgcaggcagatttactgtcccaggagcaaatgctggatgagcaactcctgttctttgggctcaaggggactggtgatgggacaattcttctcgacttcaggagctgacagagccagaggcacctaaacttgggtacatcttgtaagacacataatgaggtccctctagctttagctggagggagataaaagaaccccagacctctgaatgtcccagaggctagtctcttctcagagcagcactggggtttgggggcttccctgggcctcagcctccaggcacccccaggattcccagagagacgctgtgattggcaggaggcaggatatccccagggaaacccatcttcacgcctgggtgacccccactgccgcctccttcttaactctgcaggaaatcagagctggcagcctccagtgggaggacagagccggtttccgtggcaaccctcagctgcctcatcgtggctgggaagggaaggaagcaagccggcagaaatagctatggaaggtcttgcgcaggctgcaaccytggtgtgctgggcgaaaacccttatgactccccccttccaaatcaggctgggttgtcactgagactagattctcacctgccttcaaagaagggccaattccctttaaaggtcgcacctccttggaaccacagtcattagtgaattacactcaaggaaaagaygtgctcccaccaggcagctccagctgttacctgagatactgaagtgcagctcaggagacgattatttaaacctgcccttgttttaatcgttatttttctctttaaaaaaaatagaagctataaagaaaagagggagagatgagtgggttagctacctgctatgcgctagttaggaagttacctggatgccattgtatttcttcatcccttgcttaagaatcaaaattactggacatatgttaggaatactctttctttctttctttctttttaagctcagtggcaagaatgaaatactctttttttttttttttttttgagatggagtctcgctctgctgcccaggctagagtgcagtggcgtgatctcggcycactgcaagctctgcctcccgtgttcacaccattctcctgcctcagcctcctgagtagctgggactacaggcacccgccaccacacccggctaatttttggatttttagtagagatgggatttcaccgtaytagccaggatggtcttgatctcctgagctcgtgatctgcccgcctcggcctcccaaagtgctgggattacaggtgtragccaccgcgcccagccaagaataaamtactcttaagttgatctaatgaagtgtttccttaccattgtgattattgttactattatttgctatattttaatattgttgtttaccaaatattytcctttaaacagactcgctttttaaacttttttttttttttttgagacggagtttcacgcttattgcccaggctggagtrcaatggcacgatctcagctcaccacaacctccacctcctgggtttaagcaatgcttctgcctcagcttcccaagtagctgagattacaggcgcacaccaccacgcccaactgatttttgtwtttttagtagagacggggtttccccatgttggtcaggctggtctcgaactcctgacctcgtgatttgcctgcctkggcctcccaaagtgctaggattacaggcatgarccaccatgcccrgcctaaactttgtttttaaaatgaactttttttccccccaattgctgccaatagtggataacatgtatcactcactgccaaaaatagaaagtgaccatgaaaaataaattygctggggaagggggctccatgctggtgtggccaaggctgagagctctctcttctctgttacaaaaygagataagcaagtgttagaattgccttaaggccacactggcatctccctgaccttctccagggacagaagcaggagtaagtttctcatcccatgggcgaccagggccatctcctcccaccagtggcccccactcacagggagctggcaatgccctacctgcctgttctccagatggagaaacaggctctgagatttcacaggtcttgcccaaagtcattgattttgatgattaraaagaataaacacagtgtttcctgagtagcagtgattgttatgccttgctattttaataaagattctattttcgtataacattgtcaagtggaaacatgctgaaatctattaaaccatctttgtttgtg

SEQ ID NO: 365 - DNA, 3470 bp, Homo sapiens
ggagcgcggggagcgcgggccggcggcggcgagggaggacgggggcgcagacggccggcgcgcggcgcggctaccatgggcgtgcggtgagcagccgctcgggacgacttcctcggctgcgcggcgctcgcgcggagctccccggccggcggtgcgtccccacggtcaccatgaaagacgacttcgcagaggaggaggaggtgcaatccttcggttacaagcggtttggtattcaggaaggaacacaatgtaccaaatgtaaaaataactgggcactgaagttttctatcatattattatacattttstgtgccttgctaacaatcacagtagccattttgggatataaagttgtagagaaaatggacaatgtcacaggtggcatggaaacatctcgccaaacctatgatgacaagctcacagcagtggaaagtgacctgaaaaaattaggtgaccaaactgggaagaaagctatcagcaccaactcagaactctccaccttcagatcagacattctagatctccgtcagcaacttcgtgagattacagaaaaaaccagcaagaacaaggatacgctggagaagttacaggcgagyggggatgctctggtggacaggcagagtcaattgaaagaaactttggagaataactctttcctcatcaccactgtaaacaaaaccctccaggcgtataatggctatgtcacgaatctgcagcaagataccagcgtgctccagggcaatctgcagaaccaaatgtattctcataatgtggtcatcatgaacctcaacaacctgaacctgacccaggtgcagcagaggaacctcatcacgaatctgcagcggtctgtggatgacacaagccaggctatccagcgaatcaagaacgactttcaaaatctgcagcaggtttttcttcaagccaagaaggacacggattggctgaaggagaaagtgcagagcttgcagacrctggctgccaacaactctgcgttggccaaagccaacaacgacaccctggaggatatgaacagccagctcaactcattcacaggtcagatggagaacatcaccactatctctcaagccaacgagcagaacctgaaagacctgcaggacttacacaaagatgcagagaatagaacagccatcaagttcaaccaactggaggaacgcttccagctctttgagacggatattgtgaacatcattagcaatatcagttacacagcccaccacctgcggacgctgaccagcaatctaaatgaagtcaggaccacttgcacagatacccttaccaaacacacagatgatctgacctccttgaataataccctggccaacatccgtttggattctgtttctctcaggatgcaacaagatttgatgaggtcgaggttagacactgaagtagccaacttatcagtgattatggaagaaatgaagctagtagactccaagcatggtcagctcatcaagaattttacaatactacaaggtccaccgggccccaggggtccaagaggtgacagaggatcccagggaccccctggcccaactggcaacaagggacagaaaggagagaagggggagcctggaccacctggccctgcgggtgagagaggcccarttggaccagctggtccccccggagagcgtggcggcaaaggatctaaaggctcccagggccccaaaggctcccgtggttcccctgggaagcccggccctcagggcyccagtggggacccaggccccccgggcccaccaggcaaagagggactccccggccctcagggccctcctggcttccagggacttcagggcaccgttggggagcctggggtgcctggacctcggggactgccaggcttgcctggggtaccaggcatgccaggccccaagggcccccccggccctcctggcccatcaggagcggtggtgcccctggccctgcagaatgagccaaccccrgcaccggaggacaatrgctgcccgcctcactggaagaacttcacagacaaatgctactatttttcagttgagaaagaaatttttgaggatgcaaagcttttctgtgaagacaagtcttcacatcttgttttcataaacactagagaggaacagcaatggataaaaaaacagatggtagggagagagagccactggatyggcctcacagactcagagcgtgaaaatgaatggaagtggctggatgggacatctccagactacaaaaattggaaagctggacagccggataactggggtcatggccatgggccaggagaagactgtgctgggttgatttatgctgggcagtggaacgatttccaatgtgaagacgtcaataacttcatttgcgaaaaagacagggagacagtactgtcatctgcattataacggactgtgatgggatcacatgagcaaattttcagctctcaaaggcmaaggacactcctttytaattgcatcaccttctcatcagattgaaaaaaaaaaagcactgaaarccaattactgaaaaaaaattgacagctagtgttttttaccatccgtcattacccaaagacttgggaactaaaatgttccccagggtgatatgctgattttcattgtgcacatggactgaatcacatagattctcctccgtcagtaaccgtgcgattatacaaattatgtcttccaaagtatggaacactccaatcagaaaaaggttatcattggtcgttgagttatgggaagaacttaagcatatactgtgtaaacagtgccatacatttctaaaatcccaagtgtaggaaaaatatgcagacatacagatatataggccaactattagtaataatatgaaatatacttaaagagcttttaaaactttgtatttttgtacaaaatatttgtcttttacaatttttttcctttttttttttttgtcattttaccgacataatacatggagccaaagaaaacaataatggtactaataaaaactcctaggktttcctgtcagatttaattctacccagtggcaaagaattttttcaattgtggctttaaaaaaataattaaatatacatgtatatatatatatatatatatatttttttttttttttaatgtttcatttcctcagaggaaccaatcacttggaatgtctagaaatayccttgcagattttgccagtgtcaatcaagcctgcacacatgcacagtgaagcgggctgtgcctgccttgagcccatcaccagccaacattcttgacgtgtgcctgaccagacacagaagaaatgggcaactcaagacgtgcttccacttcattttggtggagtcgggaggtgtrggggatggagaggcatctgttgggaagggcactgaatctggcctatctggaaggccctgtgtcatggctgagctatgactgtacttggcatcagatccctacagagccaacattaactgtcaggaacgtatg

SEQ ID NO: 366 - DNA, 4840 bp, Homo sapiens
gtattcaggaaggaacacaatgtaccaaatgtaaaaataactgggcactgaagttttctatcatattattatacattttstgtgccttgctaacaatcacagtagccattttgggatataaagttgtagagaaaatggacaatgtcacaggtggcatggaaacatctcgccaaacctatgatgacaagctcacagcagtggaaagtgacctgaaaaaattaggtgaccaaactgggaagaaagctatcagcaccaactcagaactctccaccttcagatcagacattctagatctccgtcagcaacttcgtgagattacagaaaaaaccagcaagaacaaggatacgctggagaagttacaggcgagyggggatgctctggtggacaggcagagtcaattgaaagaaactttggagaataactctttcctcatcaccactgtaaacaaaaccctccaggcgtataatggctatgtcacgaatctgcagcaagataccagcgtgctccagggcaatctgcagaaccaaatgtattctcataatgtggtcatcatgaacctcaacaacctgaacctgacccaggtgcagcagaggaacctcatcacgaatctgcagcggtctgtggatgacacaagccaggctatccagcgaatcaagaacgactttcaaaatctgcagcaggtttttcttcaagccaagaaggacacggattggctgaaggagaaagtgcagagcttgcagacrctggctgccaacaactctgcgttggccaaagccaacaacgacaccctggaggatatgaacagccagctcaactcattcacaggtcagatggagaacatcaccactatctctcaagccaacgagcagaacctgaaagacctgcaggacttacacaaagatgcagagaatagaacagccatcaagttcaaccaactggaggaacgcttccagctctttgagacggatattgtgaacatcattagcaatatcagttacacagcccaccacctgcggacgctgaccagcaatctaaatgaagtcaggaccacttgcacagatacccttaccaaacacacagatgatctgacctccttgaataataccctggccaacatccgtttggattctgtttctctcaggatgcaacaagatttgatgaggtcgaggttagacactgaagtagccaacttatcagtgattatggaagaaatgaagctagtagactccaagcatggtcagctcatcaagaattttacaatactacaaggtccaccgggccccaggggtccaagaggtgacagaggatcccagggaccccctggcccaactggcaacaagggacagaaaggagagaagggggagcctggaccacctggccctgcgggtgagagaggcccarttggaccagctggtccccccggagagcgtggcggcaaaggatctaaaggctcccagggccccaaaggctcccgtggttcccctgggaagcccggccctcagggcyccagtggggacccaggccccccgggcccaccaggcaaagagggactccccggccctcagggccctcctggcttccagggacttcagggcaccgttggggagcctggggtgcctggacctcggggactgccaggcttgcctggggtaccaggcatgccaggccccaagggcccccccggccctcctggcccatcaggagcggtggtgcccctggccctgcagaatgagccaaccccrgcaccggaggacaatrgtaagtccaagccctccctccagccagggggacagggcagtgcatgtgcttgagactgagccaacccccagtgtgtggccccacccatgttatttttgtttttgtttttgttttgagacagggtctcactctgttgcccaggctggagtgcagtggcgtgatctcggctcactgcaaccyccacatcccgggttcaagtgattctcctgccttagcctcccaggtagctgggactacaagcgtgtgcccccacagccagctaatttttgtatttttagtagagagggggtttcaccgtgttggccaggctggtctcaaactcctggcctcaagtgatccacctaccttagtctcccaaagtgctgggattacaggtgtgagccaccacgtcttgtcccccgctgcatattatttaacagcaaaggcatcataggggctggcacaggagccctgctgccagaacaggcctccataccaggcatgtgtttctctctaaacgccattgggttctctagtgctcatttgttttatgtattatgtgtgtatgtatgggacagggtctcactctgtcacccaggctggaatgacgaagtgaagtagtgcaaacatagctcactgcagctttgacctcctgggcttaggtgatcttcccactcagactcctgcgtagctgggaccacaggggtatgccaccacacctggctaattttttattttcctttttgtagagacagggtcttgctatgttgcccaggctggtcttgaactcctggcctcaagcaaccctcctgcctcagtcttgcaaagtgctgggattccaggtgggagccactgcacctggctcttgcacttgtttatttataggagccagccctcagaagacaaacacaatgcaaaacatttccttcagggaagcctgctggccrccctgagcgctcttccctcgttttacatcctcactctggagatagatgggctccctcggttagctccatcaacatgyggatggaaccctctgctattgatgactacatttaatttctttttgagaaaggtgttagatgttacggtgccttctagtcttttgataattaaacctttggcaaaactcgaatgtttggttagcaaccaagcctatttttctctcctttgacccaaccgctattctacttgattttggtcggtgaggcccgggttatttttgttgatccgtgagcccagttttggtgctgggttctcacatccaagtgttcctgggttccgtatgattccagactgacgctgaacatctgtgcctgccctgcttcttgttgttgcttctgttatttctgtcattgtgaagacggatccagacacagaagaacaaagacccagtcaaagatcttttccagattatgtggttttggcttgtgctctgcagtccactttgggtcatgcttgctgcgagcacgtccgtgaacgtcagctgtgggcctcgtgcagggacgctcaggctgctcccagcgggaccacagttttggcctctgaaacacagctgaagaaaggcagagtgctttctgtgatcttttaatcaatgttttccacttttgcattcctaggctgcccgcctcactggaagaacttcacagacaaatgctactatttttcagttgagaaagaaatttttgaggatgcaaagcttttctgtgaagacaagtcttcacatcttgttttcataaacactagagaggaacagcaatggataaaaaaacagatggtagggagagagagccactggatyggcctcacagactcagagcgtgaaaatgaatggaagtggctggatgggacatctccagactacaaaaattggaaagctggacagccggataactggggtcatggccatgggccaggagaagactgtgctgggttgatttatgctgggcagtggaacgatttccaatgtgaagacgtcaataacttcatttgcgaaaaagacagggagacagtactgtcatctgcattataacggactgtgatgggatcacatgagcaaattttcagctctcaaaggcmaaggacactcctttytaattgcatcaccttctcatcagattgaaaaaaaaaaagcactgaaarccaattactgaaaaaaaattgacagctagtgttttttaccatccgtcattacccaaagacttgggaactaaaatgttccccagggtgatatgctgattttcattgtgcacatggactgaatcacatagattctcctccgtcagtaaccgtgcgattatacaaattatgtcttccaaagtatggaacactccaatcagaaaaaggttatcattggtcgttgagttatgggaagaacttaagcatatactgtgtaaacagtgccatacatttctaaaatcccaagtgtaggaaaaatatgcagacatacagatatataggccaactattagtaataatatgaaatatacttaaagagcttttaaaactttgtatttttgtacaaaatatttgtcttttacaatttttttcctttttttttttttgtcattttaccgacataatacatggagccaaagaaaacaataatggtactaataaaaactcctaggktttcctgtcagatttaattctacccagtggcaaagaattttttcaattgtggctttaaaaaaataattaaatatacatgtatatatatatatatatatatatttttttttttttttaatgtttcatttcctcagaggaaccaatcacttggaatgtctagaaatayccttgcagattttgccagtgtcaatcaagcctgcacacatgcacagtgaagcgggctgtgcctgccttgagcccatcaccagccaacattcttgacgtgtgcctgaccagacacagaagaaatgggcaactcaagacgtgcttccacttcattttggtggagtcgggaggtgtrggggatggagaggcatctgttgggaagggcactgaatctggcctatctggaaggccctgtgtcatggctgagctatgactgtacttggcatcagatccctacagagccaacattaactgtcaggaacgtatg

SEQ ID NO: 367 - DNA, 5068 bp, Homo sapiens
ggagcgcggggagcgcgggccggcggcggcgagggaggacgggggcgcagacggccggcgcgcggcgcggctaccatgggcgtgcggtgagcagccgctcgggacgacttcctcggctgcgcggcgctcgcgcggagctccccggccggcggtgcgtccccacggtcaccatgaaagacgacttcgcagaggaggaggaggtgcaatccttcggttacaagcggtttggtattcaggaaggaacacaatgtaccaaatgtaaaaataactgggcactgaagttttctatcatattattatacattttstgtgccttgctaacaatcacagtagccattttgggatataaagttgtagagaaaatggacaatgtcacaggtggcatggaaacatctcgccaaacctatgatgacaagctcacagcagtggaaagtgacctgaaaaaattaggtgaccaaactgggaagaaagctatcagcaccaactcagaactctccaccttcagatcagacattctagatctccgtcagcaacttcgtgagattacagaaaaaaccagcaagaacaaggatacgctggagaagttacaggcgagyggggatgctctggtggacaggcagagtcaattgaaagaaactttggagaataactctttcctcatcaccactgtaaacaaaaccctccaggcgtataatggctatgtcacgaatctgcagcaagataccagcgtgctccagggcaatctgcagaaccaaatgtattctcataatgtggtcatcatgaacctcaacaacctgaacctgacccaggtgcagcagaggaacctcatcacgaatctgcagcggtctgtggatgacacaagccaggctatccagcgaatcaagaacgactttcaaaatctgcagcaggtttttcttcaagccaagaaggacacggattggctgaaggagaaagtgcagagcttgcagacrctggctgccaacaactctgcgttggccaaagccaacaacgacaccctggaggatatgaacagccagctcaactcattcacaggtcagatggagaacatcaccactatctctcaagccaacgagcagaacctgaaagacctgcaggacttacacaaagatgcagagaatagaacagccatcaagttcaaccaactggaggaacgcttccagctctttgagacggatattgtgaacatcattagcaatatcagttacacagcccaccacctgcggacgctgaccagcaatctaaatgaagtcaggaccacttgcacagatacccttaccaaacacacagatgatctgacctccttgaataataccctggccaacatccgtttggattctgtttctctcaggatgcaacaagatttgatgaggtcgaggttagacactgaagtagccaacttatcagtgattatggaagaaatgaagctagtagactccaagcatggtcagctcatcaagaattttacaatactacaaggtccaccgggccccaggggtccaagaggtgacagaggatcccagggaccccctggcccaactggcaacaagggacagaaaggagagaagggggagcctggaccacctggccctgcgggtgagagaggcccarttggaccagctggtccccccggagagcgtggcggcaaaggatctaaaggctcccagggccccaaaggctcccgtggttcccctgggaagcccggccctcagggcyccagtggggacccaggccccccgggcccaccaggcaaagagggactccccggccctcagggccctcctggcttccagggacttcagggcaccgttggggagcctggggtgcctggacctcggggactgccaggcttgcctggggtaccaggcatgccaggccccaagggcccccccggccctcctggcccatcaggagcggtggtgcccctggccctgcagaatgagccaaccccrgcaccggaggacaatrgtaagtccaagccctccctccagccagggggacagggcagtgcatgtgcttgagactgagccaacccccagtgtgtggccccacccatgttatttttgtttttgtttttgttttgagacagggtctcactctgttgcccaggctggagtgcagtggcgtgatctcggctcactgcaaccyccacatcccgggttcaagtgattctcctgccttagcctcccaggtagctgggactacaagcgtgtgcccccacagccagctaatttttgtatttttagtagagagggggtttcaccgtgttggccaggctggtctcaaactcctggcctcaagtgatccacctaccttagtctcccaaagtgctgggattacaggtgtgagccaccacgtcttgtcccccgctgcatattatttaacagcaaaggcatcataggggctggcacaggagccctgctgccagaacaggcctccataccaggcatgtgtttctctctaaacgccattgggttctctagtgctcatttgttttatgtattatgtgtgtatgtatgggacagggtctcactctgtcacccaggctggaatgacgaagtgaagtagtgcaaacatagctcactgcagctttgacctcctgggcttaggtgatcttcccactcagactcctgcgtagctgggaccacaggggtatgccaccacacctggctaattttttattttcctttttgtagagacagggtcttgctatgttgcccaggctggtcttgaactcctggcctcaagcaaccctcctgcctcagtcttgcaaagtgctgggattccaggtgggagccactgcacctggctcttgcacttgtttatttataggagccagccctcagaagacaaacacaatgcaaaacatttccttcagggaagcctgctggccrccctgagcgctcttccctcgttttacatcctcactctggagatagatgggctccctcggttagctccatcaacatgyggatggaaccctctgctattgatgactacatttaatttctttttgagaaaggtgttagatgttacggtgccttctagtcttttgataattaaacctttggcaaaactcgaatgtttggttagcaaccaagcctatttttctctcctttgacccaaccgctattctacttgattttggtcggtgaggcccgggttatttttgttgatccgtgagcccagttttggtgctgggttctcacatccaagtgttcctgggttccgtatgattccagactgacgctgaacatctgtgcctgccctgcttcttgttgttgcttctgttatttctgtcattgtgaagacggatccagacacagaagaacaaagacccagtcaaagatcttttccagattatgtggttttggcttgtgctctgcagtccactttgggtcatgcttgctgcgagcacgtccgtgaacgtcagctgtgggcctcgtgcagggacgctcaggctgctcccagcgggaccacagttttggcctctgaaacacagctgaagaaaggcagagtgctttctgtgatcttttaatcaatgttttccacttttgcattcctaggctgcccgcctcactggaagaacttcacagacaaatgctactatttttcagttgagaaagaaatttttgaggatgcaaagcttttctgtgaagacaagtcttcacatcttgttttcataaacactagagaggaacagcaatggataaaaaaacagatggtagggagagagagccactggatyggcctcacagactcagagcgtgaaaatgaatggaagtggctggatgggacatctccagactacaaaaattggaaagctggacagccggataactggggtcatggccatgggccaggagaagactgtgctgggttgatttatgctgggcagtggaacgatttccaatgtgaagacgtcaataacttcatttgcgaaaaagacagggagacagtactgtcatctgcattataacggactgtgatgggatcacatgagcaaattttcagctctcaaaggcmaaggacactcctttytaattgcatcaccttctcatcagattgaaaaaaaaaaagcactgaaarccaattactgaaaaaaaattgacagctagtgttttttaccatccgtcattacccaaagacttgggaactaaaatgttccccagggtgatatgctgattttcattgtgcacatggactgaatcacatagattctcctccgtcagtaaccgtgcgattatacaaattatgtcttccaaagtatggaacactccaatcagaaaaaggttatcattggtcgttgagttatgggaagaacttaagcatatactgtgtaaacagtgccatacatttctaaaatcccaagtgtaggaaaaatatgcagacatacagatatataggccaactattagtaataatatgaaatatacttaaagagcttttaaaactttgtatttttgtacaaaatatttgtcttttacaatttttttcctttttttttttttgtcattttaccgacataatacatggagccaaagaaaacaataatggtactaataaaaactcctaggktttcctgtcagatttaattctacccagtggcaaagaattttttcaattgtggctttaaaaaaataattaaatatacatgtatatatatatatatatatatatttttttttttttttaatgtttcatttcctcagaggaaccaatcacttggaatgtctagaaatayccttgcagattttgccagtgtcaatcaagcctgcacacatgcacagtgaagcgggctgtgcctgccttgagcccatcaccagccaacattcttgacgtgtgcctgaccagacacagaagaaatgggcaactcaagacgtgcttccacttcattttggtggagtcgggaggtgtrggggatggagaggcatctgttgggaagggcactgaatctggcctatctggaaggccctgtgtcatggctgagctatgactgtacttggcatcagatccctacagagccaacattaactgtcaggaacgtatg

SEQ ID NO: 368 - DNA, 450 bp, Homo sapiens
ggagcgcggggagcgcgggccggcggcggcgagggaggacgggggcgcagacggccggcgcgcggcgcggctaccatgggcgtgcggtgagcagccgctcgggacgacttcctcggctgcgcggcgctcgcgcggagctccccggccggcggtgcgtccccacggtcaccatgaaagacgacttcgcagaggaggaggaggtgcaatccttcggttacaagcggtttggtattcaggaaggaacacaatgtaccaaatgtaaaaataactgggcactgaagttttctatcatattattatacattttstgtgccttgctaacaatcacagtagccattttgggatataaagttgtagagaaaatggacaatgtcacaggtggcatggaaacatctcgccaaacctatgatgacaagctcacagcagtggaaagtgacctgaaaaaattag

SEQ ID NO: 369 - DNA, 3242 bp, Homo sapiens
gtattcaggaaggaacacaatgtaccaaatgtaaaaataactgggcactgaagttttctatcatattattatacattttstgtgccttgctaacaatcacagtagccattttgggatataaagttgtagagaaaatggacaatgtcacaggtggcatggaaacatctcgccaaacctatgatgacaagctcacagcagtggaaagtgacctgaaaaaattaggtgaccaaactgggaagaaagctatcagcaccaactcagaactctccaccttcagatcagacattctagatctccgtcagcaacttcgtgagattacagaaaaaaccagcaagaacaaggatacgctggagaagttacaggcgagyggggatgctctggtggacaggcagagtcaattgaaagaaactttggagaataactctttcctcatcaccactgtaaacaaaaccctccaggcgtataatggctatgtcacgaatctgcagcaagataccagcgtgctccagggcaatctgcagaaccaaatgtattctcataatgtggtcatcatgaacctcaacaacctgaacctgacccaggtgcagcagaggaacctcatcacgaatctgcagcggtctgtggatgacacaagccaggctatccagcgaatcaagaacgactttcaaaatctgcagcaggtttttcttcaagccaagaaggacacggattggctgaaggagaaagtgcagagcttgcagacrctggctgccaacaactctgcgttggccaaagccaacaacgacaccctggaggatatgaacagccagctcaactcattcacaggtcagatggagaacatcaccactatctctcaagccaacgagcagaacctgaaagacctgcaggacttacacaaagatgcagagaatagaacagccatcaagttcaaccaactggaggaacgcttccagctctttgagacggatattgtgaacatcattagcaatatcagttacacagcccaccacctgcggacgctgaccagcaatctaaatgaagtcaggaccacttgcacagatacccttaccaaacacacagatgatctgacctccttgaataataccctggccaacatccgtttggattctgtttctctcaggatgcaacaagatttgatgaggtcgaggttagacactgaagtagccaacttatcagtgattatggaagaaatgaagctagtagactccaagcatggtcagctcatcaagaattttacaatactacaaggtccaccgggccccaggggtccaagaggtgacagaggatcccagggaccccctggcccaactggcaacaagggacagaaaggagagaagggggagcctggaccacctggccctgcgggtgagagaggcccarttggaccagctggtccccccggagagcgtggcggcaaaggatctaaaggctcccagggccccaaaggctcccgtggttcccctgggaagcccggccctcagggcyccagtggggacccaggccccccgggcccaccaggcaaagagggactccccggccctcagggccctcctggcttccagggacttcagggcaccgttggggagcctggggtgcctggacctcggggactgccaggcttgcctggggtaccaggcatgccaggccccaagggcccccccggccctcctggcccatcaggagcggtggtgcccctggccctgcagaatgagccaaccccrgcaccggaggacaatrgctgcccgcctcactggaagaacttcacagacaaatgctactatttttcagttgagaaagaaatttttgaggatgcaaagcttttctgtgaagacaagtcttcacatcttgttttcataaacactagagaggaacagcaatggataaaaaaacagatggtagggagagagagccactggatyggcctcacagactcagagcgtgaaaatgaatggaagtggctggatgggacatctccagactacaaaaattggaaagctggacagccggataactggggtcatggccatgggccaggagaagactgtgctgggttgatttatgctgggcagtggaacgatttccaatgtgaagacgtcaataacttcatttgcgaaaaagacagggagacagtactgtcatctgcattataacggactgtgatgggatcacatgagcaaattttcagctctcaaaggcmaaggacactcctttytaattgcatcaccttctcatcagattgaaaaaaaaaaagcactgaaarccaattactgaaaaaaaattgacagctagtgttttttaccatccgtcattacccaaagacttgggaactaaaatgttccccagggtgatatgctgattttcattgtgcacatggactgaatcacatagattctcctccgtcagtaaccgtgcgattatacaaattatgtcttccaaagtatggaacactccaatcagaaaaaggttatcattggtcgttgagttatgggaagaacttaagcatatactgtgtaaacagtgccatacatttctaaaatcccaagtgtaggaaaaatatgcagacatacagatatataggccaactattagtaataatatgaaatatacttaaagagcttttaaaactttgtatttttgtacaaaatatttgtcttttacaatttttttcctttttttttttttgtcattttaccgacataatacatggagccaaagaaaacaataatggtactaataaaaactcctaggktttcctgtcagatttaattctacccagtggcaaagaattttttcaattgtggctttaaaaaaataattaaatatacatgtatatatatatatatatatatatttttttttttttttaatgtttcatttcctcagaggaaccaatcacttggaatgtctagaaatayccttgcagattttgccagtgtcaatcaagcctgcacacatgcacagtgaagcgggctgtgcctgccttgagcccatcaccagccaacattcttgacgtgtgcctgaccagacacagaagaaatgggcaactcaagacgtgcttccacttcattttggtggagtcgggaggtgtrggggatggagaggcatctgttgggaagggcactgaatctggcctatctggaaggccctgtgtcatggctgagctatgactgtacttggcatcagatccctacagagccaacattaactgtcaggaacgtatg

SEQ ID NO: 370 - DNA, 2149 bp, Homo sapiens
ctggcccactgcactgggaatctaggatgggggccttggccagagccctgcygtccatactgctggcattgctgcttacgtccaccccagaggctctgggtgccaaccccggcttggtcgccaggatcaccgacaagggactgcagtatgcggcccaggaggggctattrgctctgcagagtgagctgctcaggatcacgctgcctgacttcaccggggacttraggatcccccacgtcggccgtgggcgctatgagttccacagcctgaacatccacagctgtgagctgcttcactctgcgctgaggcctgtcccyggccagggcctgagtctcagcatctccgactcctccatcyrggtccagggcaggtggaaggtgcgcaagtcattcttcaaamtacagggctcctttgatgtcagtgtcaagggcatcagcatttcggtcaacctcctgttgggcagcragtcctccgggaggcccacrgttactgcctscagctgcagcagtgacatcgctgacrtggaggtggacatgtcgggagacttggggtggctgttkaacctcttccacaaccagattgagtccaagttccagaaagtactggagagcaggatttgcgaaatgatccagaaatcrgtgtcctccratctacagccttatctccaaactctgccagttacaacagagattgacagtttcgccgacattgattatagcttagtggaagcccctcgggcaacagcccagatrctggaggtgatgtttaagggtgaaatctttcatcgtaaccaccgttctccagttaccctccttgctgcagtcatgagccttcctgaggaacacaacaaaatggtctactttgccatctcggrttatgtcttcaacacggccagcctggtttatcrtgaggaaggatatctgaacttctccatcacagatgacatgataccgcctgactctaatatccgactgaccaccaagtccttccgacccttcgtcccacrgttagccaggctctaccycaacatgaacctggaactccagggatcagtgccctctgctccgctcctgaacttcagccctgggaatctgtctgtggacccstatatggagayagatgcctttgtgctcctgcccagctccagcaaggagcctgtcttccggctcagtgtggccactaatgtgtccgccaccttgaccttcaataccagcaagatcactgggttcctgaagccaggaaaggtaaaagtggaactgaaagaatccaaagttggactattcaatgcagagctgttggaagcgctcctcaactattacatccttaacaccytctaccccaagttcaatgataagttgrcygaaggcttcccccttcctctgctgaagcgtgttcagctctacgaccttgggctgcagatccataaggacttcctgttcttgggtgccaatgtccaatacatgagagtttgaggacaagaaagatgaagcttggaggtcacagctggatctgcttgttscatttccagctgtgcagcaygtctcagagattcttgaagaatgaagacatttctgctctcagctccgggggtgaggtgtgcctggcctctgcctccaccctcctcctcttcaccaggtgcatgcatgccctctctgagtctggactttgcttcccctccaggagggaccaccctcccygactggcctgggatatctttacaagcaggcactgtatttttttattcgccatctgatccccatgcctagcagagtgctggcacttagtaggtcctcaataaatatttattaaatgatgagatgatggaatcacctggtattctagctgagcctcatcactgcctgccctcttctgacctcaggggtctttggatagtcagccacatctatggtctccaaggcccctttctcatcgccgctgctatgggagcctcaatgagagaaccagggattctgtacatcatgtagccctggatctggcgctggtgctccgtctctaaggcccttgtcctgtctcaggcaggggctcacttcgacatcgctccctccctcatttcttgcctgctacagccaagggagccaatgatctcccggagcaaaaactcagcctcccgctgcttttccctcattga

SEQ ID NO: 371 - DNA, 2308 bp, Homo sapiens
tttgaaaggaaggcagagagggcactgggaggaggcagtgggagggcggagggcgggggccttcggggtgggcgcccagggtagggcaggtggccgcsgcgtggaggcagggagaatgcgactctccaaaaccctcgtcgacatggacatggccgactacagtgctgcactggacccagcctacaccaccctggaatttgagaatgtgcaggtgttgacgatgggcaatgattttgttgccgctgcgtctcgccagattgaggcatcccctccgacatcactggagcatatctggaggggtggacagttctccacagggagacacgtccccatcagaaggcaccaacctcaacgcgcccaacagcctgggtgtcagcgccctgtgtgccatctgcggggaccgggcyacgggcaaacactacggtgcctcgagctgtgacggctgcaagggcttcttccggaggagcgtgcggaagaaccacatgtactcctgcagatttagccggcagtgcgtggtggacaaagacaagaggaaccagtgccgctactgcaggctcaagaaatgcttccgggctggcatgaagaaggaagccgtccagaatgagcgggaccggatcagcaytcgaaggtcaagctatgaggacagcagcctgccctccatcaatgcgctcctgcaggcggaggtcctgtccyracagatcacctcccccgtctccgggatcaacggcgacattcgggcgaagaagattgccagcatcgcagatgtgtgtgagtccatgaaggagcagctgctggttctcgttgagtgggccaagtacatcccrgctttctgcgagctccccctggacgaccaggtggccctgctcagagcccatgctggcgagcacctgctgctcggagccaccaagagatccatggtgttcaaggacgtgctgctcctaggcaatgactacattgtccctcggcactgcccggagctggcggagatgagccggrtgtccatacgcatccttgacgagctggtgctgcccttcyaggagctgcagatcgatgacaatgagtatgcctacctcaaagccatcatcttctttgacccagatgccaaggggctgagcgatccagggaagatcaagcggctgcgttcccaggtgcaggtgagcttggaggactacatcaacgaccgccagtatgactcgcgtggccrctttggagagctgctgctgctgctgcccaccttgcagagcatcacctggcagatgatcgagcagatccagttcatcaagctcttcggcatggccaagattgacaacctgttgcaggagatgctgctgggagggtcccccagcgatgcaccccatgcccaccaccccctgcaccctcacctgatgcaggaacatatgggaaccaayrtcatcgttgccaacacaatgcccactcacctcagcaacggacagatgtgtgagtggccccgacccaggggacaggcagccacccctgagaccccacagccctcacckccaggtggctcagggtctgagycctataagctcctgccgggagccgtcgccacaatcgtcaagcccctctctgccrtcccccagccgaccatcaccaagcaggaagttatctagcaagccgctggggcttgggggctccactggctccccccagccccctaagagagcacctggtgatcacgtggtcacggcaaaggaagacgtgatgccaggaccagtcccagagcaggaatgggaaggatgaagggcccgagaacatggcctaagggccacatcccactgccacccttgacgccctgctctggataacaagactttgacttggggagacctctactgccttggacaacttttctcatgttgaagccactgccttcaccttcaccttcatccatgtccaacccccgacttcatcccaaaggacagccgcctggagatgacttgaggccttacttaaacccagctcccttcttccctagcctggtgcttctcctctcctagcccckgtcatggtgtccagacagagccctgtgaggctgggtccaattgtggcacttggggcaccttgctcctccttctgctgctgcccccacctctgctgcctccctctgctgtcaccttgctcagccatcccgtcttctccaacaccacctctccagaggccaaggaggccttggaaacgattcccccagtcattctgggaacatgttgtaagcactgactgggaccaggcaccaggcagggtctagaaggctgtggtgagggaagacrcctttctcctccaacccaac

SEQ ID NO: 372 - DNA, 2391 bp, Homo sapiens
cttctgctccggccctgtcctcaaattggggggctgatgtccccatacacctggctctgggttcccctaaccccagagtgcaggactaggacccgagtggacctcaggtctggccaggtcgccattgccatggagacagcaacagtccccagccgcgggttccctaagtgactggttactctttaacgtatccacccaccttgggtgattagaagaatcaataagataaccgggcggtggcagctggccgcactcaccgccttcctggtggacgggctcctggtggctgtgctgctgctgtgagcgggcccctgctcctccatgcccccagctctccggctgggtgggcttggccatggtcagcgtgaacgcgcccctcggggctccagtggagagttcttacgacacgtccccatcagaaggcaccaacctcaacgcgcccaacagcctgggtgtcagcgccctgtgtgccatctgcggggaccgggcyacgggcaaacactacggtgcctcgagctgtgacggctgcaagggcttcttccggaggagcgtgcggaagaaccacatgtactcctgcagatttagccggcagtgcgtggtggacaaagacaagaggaaccagtgccgctactgcaggctcaagaaatgcttccgggctggcatgaagaaggaagccgtccagaatgagcgggaccggatcagcaytcgaaggtcaagctatgaggacagcagcctgccctccatcaatgcgctcctgcaggcggaggtcctgtccyracagatcacctcccccgtctccgggatcaacggcgacattcgggcgaagaagattgccagcatcgcagatgtgtgtgagtccatgaaggagcagctgctggttctcgttgagtgggccaagtacatcccrgctttctgcgagctccccctggacgaccaggtggccctgctcagagcccatgctggcgagcacctgctgctcggagccaccaagagatccatggtgttcaaggacgtgctgctcctaggcaatgactacattgtccctcggcactgcccggagctggcggagatgagccggrtgtccatacgcatccttgacgagctggtgctgcccttcyaggagctgcagatcgatgacaatgagtatgcctacctcaaagccatcatcttctttgacccagatgccaaggggctgagcgatccagggaagatcaagcggctgcgttcccaggtgcaggtgagcttggaggactacatcaacgaccgccagtatgactcgcgtggccrctttggagagctgctgctgctgctgcccaccttgcagagcatcacctggcagatgatcgagcagatccagttcatcaagctcttcggcatggccaagattgacaacctgttgcaggagatgctgctgggagggtcccccagcgatgcaccccatgcccaccaccccctgcaccctcacctgatgcaggaacatatgggaaccaayrtcatcgttgccaacacaatgcccactcacctcagcaacggacagatgtgtgagtggccccgacccaggggacaggcagccacccctgagaccccacagccctcacckccaggtggctcagggtctgagycctataagctcctgccgggagccgtcgccacaatcgtcaagcccctctctgccrtcccccagccgaccatcaccaagcaggaagttatctagcaagccgctggggcttgggggctccactggctccccccagccccctaagagagcacctggtgatcacgtggtcacggcaaaggaagacgtgatgccaggaccagtcccagagcaggaatgggaaggatgaagggcccgagaacatggcctaagggccacatcccactgccacccttgacgccctgctctggataacaagactttgacttggggagacctctactgccttggacaacttttctcatgttgaagccactgccttcaccttcaccttcatccatgtccaacccccgacttcatcccaaaggacagccgcctggagatgacttgaggccttacttaaacccagctcccttcttccctagcctggtgcttctcctctcctagcccckgtcatggtgtccagacagagccctgtgaggctgggtccaattgtggcacttggggcaccttgctcctccttctgctgctgcccccacctctgctgcctccctctgctgtcaccttgctcagccatcccgtcttctccaacaccacctctccagaggccaaggaggccttggaaacgattcccccagtcattctgggaacatgttgtaagcactgactgggaccaggcaccaggcagggtctagaaggctgtggtgagggaagacrcctttctcctccaacccaac

SEQ ID NO: 373 - DNA, 2392 bp, Homo sapiens
cttctgctccggccctgtcctcaaattggggggctgatgtccccatacacctggctctgggttcccctaaccccagagtgcaggactaggacccgagtggacctcaggtctggccaggtcgccattgccatggagacagcaacagtccccagccgcgggttccctaagtgactggttactctttaacgtatccacccaccttgggtgattagaagaatcaataagataaccgggcggtggcagctggccgcactcaccgccttcctggtggacgggctcctggtggctgtgctgctgctgtgagcgggcccctgctcctccatgcccccagctctccggctgggtgggcttggccatggtcagcgtgaacgcgcccctcggggctccagtggagagttcttacggtaagtggggctgggggaagactggacagggcgggactgcggtcagctttgggaggccatgggacacctccccgtgtgtttcttacgggcccaaagctcctcctggagctcctctggaagggcaggaagccccacggaggcaatgtgaccgcttccctaagctctcaagccggggcatggcctgcttggtgcgagaagtgctgggaggggccgagaagccctggggcagaggcttggctcattttgtctgtccagaggccttcctgggaatgcatctcaggggtctttccaaaaccccacagagggtggggcttggaagcaccgtcctgtttcgatgcggggcaaattgaggtccaccaggagaggcttgctgggcctaggtcacgttgctggtgcattatcaagctgggcgtgggaccgggcagctcggtcgctccgcacctccgttggctctggataatggggaggaggtagaaagcgccgcgcagggtggagcgttggaaaatgagaatatcttgtgcggacgtgtgaaactcagatgcagggctagaaagcatgtgttactgagagtgaaaggctcaggctcactccttagggtgacccccacattggaagcaacccaatgtccctcagcagagggaagacgggtaaataaagcgtgagacgtctttacagtggaatgctatcccattgttcaaggaaacaacgcacatctgtgtgtgacagggaagaacctctcagttaaattaagtgaaaacggtacactgaagaactgtgtagttgctgatagcgaaacggatatagatgtatatatgtacacacgcgtatacgtgtacattccacgcatagaaaattcgtggaatgacacaataaaattggtgacaggtttgtttctgaggagggaaattcaagagaatgttttatcttttggggacacattttggattttttaaaagttgggtgccttttataaacctgttcaaatcacacacccgcacagaacttggtctctggaatccagcagacctcggggtctagttgtgactctgtcacacggctcaacattcacgtgcctcttgctttctttctgaagtggagacaggactaggatgtgtcttaagatcatggtggatgccgtggggaacaaggatgtaaagcccttgataccacgtgcattgcaaagacacaatcaacatttatgtcatcaattgctgaggacagagrgccagggaatgacagaatcagggcctgatctcctgactctagtcaggaagaatcttctttgctttgacccccatcaaacaggaatatgtgatgcactggaaatggcagaggctgaagaaaccaacagcctgggaacccatcccacacaccagctgtgtgaccttgggcaagacatttcccctctctgaacctatttcctcatctgtaaaatgaagataacaacaggacctatctcccagagagcggggagattagaggagatagcatagaggagattaagggtgaggccacccttaatccacaattttaagacctggagtatagatgccaatggatgacttggttgaacctgtggctaggggaagacattgtctctcaaaggggccagacagcttctggggaaggacagcccaggtcataaggctaagctaggggtgaacagaaggccccacagtgtctcttaaaggatgatacaataatataacctgacagcctttcactgtctcccacgtctctgcaccttgtaggatgtcctcatgtctcttcatctctgctcctgtgtcatactcattatatagcaracattcagcaattattagaatggttgcttctatcgacaggtaggtgggtgaatggatggatgaatgggttagtgaatgttctactattatctctcagacagctgtttcattttccaaacggctgtctgagataaataatattgtaatctccaaggacagaagaaaaaactaaggttcaagatt

SEQ ID NO: 374 - DNA, 1629 bp, Homo sapiens
tttgaaaggaaggcagagagggcactgggaggaggcagtgggagggcggagggcgggggccttcggggtgggcgcccagggtagggcaggtggccgcsgcgtggaggcagggagaatgcgactctccaaaaccctcgtcgacatggacatggccgactacagtgctgcactggacccagcctacaccaccctggaatttgagaatgtgcaggtgttgacgatgggcaatgacacgtccccatcagaaggcaccaacctcaacgcgcccaacagcctgggtgtcagcgccctgtgtgccatctgcggggaccgggcyacgggcaaacactacggtgcctcgagctgtgacggctgcaagggcttcttccggaggagcgtgcggaagaaccacatgtactcctgcagatttagccggcagtgcgtggtggacaaagacaagaggaaccagtgccgctactgcaggctcaagaaatgcttccgggctggcatgaagaaggaagccgtccagaatgagcgggaccggatcagcaytcgaaggtcaagctatgaggacagcagcctgccctccatcaatgcgctcctgcaggcggaggtcctgtccyracagatcacctcccccgtctccgggatcaacggcgacattcgggcgaagaagattgccagcatcgcagatgtgtgtgagtccatgaaggagcagctgctggttctcgttgagtgggccaagtacatcccrgctttctgcgagctccccctggacgaccaggtggccctgctcagagcccatgctggcgagcacctgctgctcggagccaccaagagatccatggtgttcaaggacgtgctgctcctaggcaatgactacattgtccctcggcactgcccggagctggcggagatgagccggrtgtccatacgcatccttgacgagctggtgctgcccttcyaggagctgcagatcgatgacaatgagtatgcctacctcaaagccatcatcttctttgacccagatgccaaggggctgagcgatccagggaagatcaagcggctgcgttcccaggtgcaggtgagcttggaggactacatcaacgaccgccagtatgactcgcgtggccrctttggagagctgctgctgctgctgcccaccttgcagagcatcacctggcagatgatcgagcagatccagttcatcaagctcttcggcatggccaagattgacaacctgttgcaggagatgctgctgggaggtccgtgccaagcccaggaggggcggggttggagtggggactccccaggagacaggcctcacacagtgagctcacccctcagctccttggcttccccactgtgccgctttgggcaagttgcttaacctgtctgtgcctcagtttcctcaccagaaaaatgggaacaaggcaatggtctatttgttcaggcaccgagaacctagcacgtgccagtcactgttctaagtgctggcaattcagcaaagaacaagatctttgccctcggggaggctgtgtgtgtgtgagtatgtatggatgcgtggatatctgtgtatatgcccgtatgtgcgtgcatgtgtatataaagcctcacattttatgattttgaaataaacaggtaatatga

SEQ ID NO: 375 - DNA, 2217 bp, Homo sapiens
tttgaaaggaaggcagagagggcactgggaggaggcagtgggagggcggagggcgggggccttcggggtgggcgcccagggtagggcaggtggccgcsgcgtggaggcagggagaatgcgactctccaaaaccctcgtcgacatggacatggccgactacagtgctgcactggacccagcctacaccaccctggaatttgagaatgtgcaggtgttgacgatgggcaatgacacgtccccatcagaaggcaccaacctcaacgcgcccaacagcctgggtgtcagcgccctgtgtgccatctgcggggaccgggcyacgggcaaacactacggtgcctcgagctgtgacggctgcaagggcttcttccggaggagcgtgcggaagaaccacatgtactcctgcagatttagccggcagtgcgtggtggacaaagacaagaggaaccagtgccgctactgcaggctcaagaaatgcttccgggctggcatgaagaaggaagccgtccagaatgagcgggaccggatcagcaytcgaaggtcaagctatgaggacagcagcctgccctccatcaatgcgctcctgcaggcggaggtcctgtccyracagatcacctcccccgtctccgggatcaacggcgacattcgggcgaagaagattgccagcatcgcagatgtgtgtgagtccatgaaggagcagctgctggttctcgttgagtgggccaagtacatcccrgctttctgcgagctccccctggacgaccaggtggccctgctcagagcccatgctggcgagcacctgctgctcggagccaccaagagatccatggtgttcaaggacgtgctgctcctaggcaatgactacattgtccctcggcactgcccggagctggcggagatgagccggrtgtccatacgcatccttgacgagctggtgctgcccttcyaggagctgcagatcgatgacaatgagtatgcctacctcaaagccatcatcttctttgacccagatgccaaggggctgagcgatccagggaagatcaagcggctgcgttcccaggtgcaggtgagcttggaggactacatcaacgaccgccagtatgactcgcgtggccrctttggagagctgctgctgctgctgcccaccttgcagagcatcacctggcagatgatcgagcagatccagttcatcaagctcttcggcatggccaagattgacaacctgttgcaggagatgctgctgggagggtcccccagcgatgcaccccatgcccaccaccccctgcaccctcacctgatgcaggaacatatgggaaccaayrtcatcgttgccaacacaatgcccactcacctcagcaacggacagatgtgtgagtggccccgacccaggggacaggcagccacccctgagaccccacagccctcacckccaggtggctcagggtctgagycctataagctcctgccgggagccgtcgccacaatcgtcaagcccctctctgccrtcccccagccgaccatcaccaagcaggaagttatctagcaagccgctggggcttgggggctccactggctccccccagccccctaagagagcacctggtgatcacgtggtcacggcaaaggaagacgtgatgccaggaccagtcccagagcaggaatgggaaggatgaagggcccgagaacatggcctaagggccacatcccactgccacccttgacgccctgctctggataacaagactttgacttggggagacctctactgccttggacaacttttctcatgttgaagccactgccttcaccttcaccttcatccatgtccaacccccgacttcatcccaaaggacagccgcctggagatgacttgaggccttacttaaacccagctcccttcttccctagcctggtgcttctcctctcctagcccckgtcatggtgtccagacagagccctgtgaggctgggtccaattgtggcacttggggcaccttgctcctccttctgctgctgcccccacctctgctgcctccctctgctgtcaccttgctcagccatcccgtcttctccaacaccacctctccagaggccaaggaggccttggaaacgattcccccagtcattctgggaacatgttgtaagcactgactgggaccaggcaccaggcagggtctagaaggctgtggtgagggaagacrcctttctcctccaacccaac

SEQ ID NO: 376 - DNA, 3010 bp, Homo sapiens
gcgacttccggcagctggacttggaaaagcaaggagtgtcgggaatggcgaccaagcggctcgcgcggcagcttggattaattaggagaaagtcaattgcgccagcaaatggaaatctcggaagaagcaaatccaagcagttgtttgactacttaattgtcattgattttgaatcgacatgctggaatgatgggaagcaccaccatagccaggaaataattgagtttccagcagtgttgctgaacacatcaactggacagattgactctgagttccaggcttatgttcaacctcaggaacatccaattctttcagaattttgcatggaattgacaggcataaagcaggctcaagttgatgaaggagtccctctgaagatttgcttatctcagttctgtaaatggattcataagattcagcaacagaagaacattatttttgctactgggatttcagagccttctgcttctgaagtaaaattatgtgcatttgttacttggtcagactgggacttgggggtttgcctggagtatgagtgtaaaagaaarcagctgttaaaacctgtgtttttaaattcttggattgatctcagagcaacttacaagcttttctataggagaaaaccaaaaggactaagtggtgccttgcaggaagtaggaatagaattctcaggacgagaacattctgggttggacgattctcggaatactgcccttcttgcttggaaaatgatcagagatggttgtgtaatgaaaattacaaggtcgttgaacaaggttcccactaagaagaatttcagcattctggccagaaatttgaatacaattcaagttgaagaaatgtctgcctgtaacattagcatccagggtcccagcatatataataaggagcctaaaaatrtaataaatcctcatgaaaaagttcaaatgaagtcaatttgtgcaaattctcctataaaggcacaacaggatcaattacaagtaaaaaacaatataaaagcaagtcttcacaatgtcaaaagttccttacctctttttaatactaagtcctctacttctgtggggcagttgcagtctcctaccttgaattcayctatctrtatgcaaaagcaaggaaaaaatgaacatcttgcatttaataccaaatctaaggcttcaacagttggttcagaattggtacttgtttctaccaccgttccaactgttcatcatgtttctgatttggaaatgagctctactctggactgtttacctgtgttggctgattgggaggatgtggttttactgccagcatctcagcctgaggaaaacgtagactgtacagttcccattagtgactcagacttagagatttcatttaattctggagaaagattaatggttttgaaagaattggaaatgtcaagtcatgaaaactttggagacatagaggaaactcctcaaaaatctgagacttctaagtctattgtgtacaagagtcctcacactactatttataatgtaaaagaagccaaagatccaggttcagatatttctgcctttaagttacctgaacacaaatcaagtaccttcaacagagttaatgccaatatgtctcatcctttagttttggggaaacatcctcttctttcaggtggtaccaaaaggaatccatgcagtccccaagctttcccacyagcaaaaaaacaacccttcactattcatgaagaaaagcctacatcatctgattgctccccagtaagaagttcttcctggaggcgtctcccatctatattaacttctacagttaacctacaagagccatggaagagtgggaaaatgacacctccattatgcaagtgtggtcggagatctaagagacttgttgtttctaataatggacckaaccatggaaaagtcttctattgttgccctatcgggaaatacmaagaaaacagaaaatgttgtggttatttcaaatgggaacaaacacttcaaaaggaargagccaacagcatggttccatctcattccacagggggactcacttttagttctccagaaacaagccatatttgtgacagaaatttaagtatttccaccaaaaattctttgagactcaggccttcaatgaggaattgataacctttcatgtatgaatcctaattgttccttgaatttccaaacatgagtattctgataacatcttacactattttatttttattttatatattaatgtttactgcatttaccatactttcttcaggaaccacaagtgtaatcttttgtaaacagtatttattagattacatataataagcaacaatagtatatgatccttcttttatagttagaccttgaaacaagtctaaactatttttaaattatttgcaaaaaatgtgactaataaaaatccctagtctattttcaggtagattcttgtactttgagattatcataatcttctaactgatattttatatttttctaaaaacttttataagttctttagttttatttcaggcttgaacattggttctgatttgtatatcaacatatcagaagaattagtcaactaaagtttgaaaacctatgtagcagagatctggttcagaaactgcttctatactatacatttaaaaattaatcagcaattgatggtattatttttatattaagaaatgataggaacattgacactaatgtggaggaatttgccaaatattttatttcaaaatttagcctctgatatcataaccacaagatattttaaatcaacagtttctaagcatactaccacagtttttatgacctctccatcatcttgtggtttctagagattgacagatactatgtttgttttatagatatggtaattaatgaaacaactttaaattgtcttccattctttcttcctcagttcatttctttttgtcttcccwctgatagtctttggcagctcttgaataaattctacctgttggcatcaaggggaagaaaattagcctggaaatttttatctttacata

SEQ ID NO: 377 - DNA, 1790 bp, Homo sapiens
agacagagggagcagtgaatagcaatagggtgtttccaccatggtcttcactcaggccccggctgaaatcatgggccacctccrgatacgcagcctcctggcccggcagtgcctggcagagtttctgggtgtgtttgtactcatgctcctcacccaaggagctgtggcccaggctgtcaccagtggagaaaccaaaggcaacttcttcaccatgtttctggctggctctctggccgttacgatagccatctacgtgggtggtaacgtctcaggggcccacctgaatccagccttctccctggccatgtgcatcgttggacgcctcccctgggtcaagctccccatttacatcttggtgcagttgctgtctgctttctgtgcttcgggagccacctatgttctctacyaygatgccctacagaactatacaggtgggaacctgacagtgactggccccaaggagacagcctccatttttgccacctatcctgccccctatctgtccctgaacaatggcttcctggatcaggttctgggcacygggatgctgattgtggggctcttggccatcctggacagacggaacaagggagtccctgcgggtctggagcctgtggtggtggggatgctgatcctggccctcgggttatccatgggtgccaactgcgggattccactcaaccctgcccgggacctgggcccacgtctcttcacctacgtggctggctggggtcctgaagtcttcagtgctggtaatggctggtggtgggtgcctgtggtggcccctctggtgggggccaccgttggcacagccacttaccagctgttggtggctctgcaccaccctgagggcccagagccagctcaggatctggtgtctgctcaacacaaagcctcagagttggaaactcctgcctcagctcagatgctggagtgtaagctatgattaggacaaccctcacttcactcatggaccctggagccagccactgaccccgcctgggaacaacagwcattcttcctctttgttaatgtgccagaacctgggaggcttctctgtttatctgtttggcatcccttcctcctaaactaagaaggatcctggacagggagaagtggaggaggataaggtaccaggactcaggcttctcatcccctcctcccgcaaagcggttttctgaccctcagggcctctcggaatgtagttgctcgaggtaaccgctagagggtgcgcacctggatgctggatggggacggctgcgggcatctgcagggtggagggggccaccatccagtgtagggcacaaccctggggactgccctccatagcctgtcccgactgccgactcctagctctcatcgcctcggcgcctcccaccttcaccctctcggggatgcctccccaagagggtagttaggggtggggaagccgcctccacccagggggcgtggtgggggcggagggaaggagggcggcggggcacagagacagagagcaaggctgtgaaactgaggcaccgttcctagacatctcggtgctgtgtcgttcattcaaggagagttgagatacagtgaaatgagccagggcgaggagggagggtgaaggaacggagggcgggcggctccgaggagcgagagtcgggctgagggcaacctggcgccagggaaaattctggttattcaccacttctacagctctcctgccgctccctgcagaggatgctcgttttgcagagaaggcagtgttcctctattcccttcttccgaattaaaaataccccctcagagcg

SEQ ID NO: 378 - DNA, 1651 bp, Homo sapiens
cagtgaatagcaatagggtgtttccaccatggtcttcactcaggccccggctgaaatcatgggccacctccrgatacgcagcctcctggcccggcagtgcctggcagagtttctgggtgtgtttgtactcatggggcccacctgaatccagccttctccctggccatgtgcatcgttggacgcctcccctgggtcaagctccccatttacatcttggtgcagttgctgtctgctttctgtgcttcgggagccacctatgttctctacyaygatgccctacagaactatacaggtgggaacctgacagtgactggccccaaggagacagcctccatttttgccacctatcctgccccctatctgtccctgaacaatggcttcctggatcaggttctgggcacygggatgctgattgtggggctcttggccatcctggacagacggaacaagggagtccctgcgggtctggagcctgtggtggtggggatgctgatcctggccctcgggttatccatgggtgccaactgcgggattccactcaaccctgcccgggacctgggcccacgtctcttcacctacgtggctggctggggtcctgaagtcttcagtgctggtaatggctggtggtgggtgcctgtggtggcccctctggtgggggccaccgttggcacagccacttaccagctgttggtggctctgcaccaccctgagggcccagagccagctcaggatctggtgtctgctcaacacaaagcctcagagttggaaactcctgcctcagctcagatgctggagtgtaagctatgattaggacaaccctcacttcactcatggaccctggagccagccactgaccccgcctgggaacaacagwcattcttcctctttgttaatgtgccagaacctgggaggcttctctgtttatctgtttggcatcccttcctcctaaactaagaaggatcctggacagggagaagtggaggaggataaggtaccaggactcaggcttctcatcccctcctcccgcaaagcggttttctgaccctcagggcctctcggaatgtagttgctcgaggtaaccgctagagggtgcgcacctggatgctggatggggacggctgcgggcatctgcagggtggagggggccaccatccagtgtagggcacaaccctggggactgccctccatagcctgtcccgactgccgactcctagctctcatcgcctcggcgcctcccaccttcaccctctcggggatgcctccccaagagggtagttaggggtggggaagccgcctccacccagggggcgtggtgggggcggagggaaggagggcggcggggcacagagacagagagcaaggctgtgaaactgaggcaccgttcctagacatctcggtgctgtgtcgttcattcaaggagagttgagatacagtgaaatgagccagggcgaggagggagggtgaaggaacggagggcgggcggctccgaggagcgagagtcgggctgagggcaacctggcgccagggaaaattctggttattcaccacttctacagctctcctgccgctccctgcagaggatgctcgttttgcagagaaggcagtgttcctctattcccttcttccgaattaaaaataccccctcagagcg

SEQ ID NO: 379 - DNA, 2265 bp, Homo sapiens
agacagagggagcagtgaatagcaatagggtgtttccaccatggtcttcactcaggccccggctgaaatcatgggccacctccrgatacgcagcctcctggcccggcagtgcctggcagagtttctgggtgtgtttgtactcatgctcctcacccaaggagctgtggcccaggctgtcaccagtggagaaaccaaaggcaacttcttcaccatgtttctggctggctctctggccgttacgatagccatctacgtgggtggtaacgtctcaggggcccacctgaatccagccttctccctggccatgtgcatcgttggacgcctcccctgggtcaagctccccatttacatcttggtgcagttgctgtctgctttctgtgcttcgggagccacctatgttctctacyaygatgccctacagaactatacaggtgggaacctgacagtgactggccccaaggagacagcctccatttttgccacctatcctgccccctatctgtccctgaacaatggcttcctggatcaggttctgggcacygggatgctgattgtggggctcttggccatcctggacagacggaacaagggagtccctgcgggtctggagcctgtggtggtggggatgctgatcctggccctcgggttatccatgggtgccaactgcgggattccactcaaccctgcccgggacctgggcccacgtctcttcacctacgtggctggctggggtcctgaagtcttcaggtgggagacagactctcctggtgctggcctccactcaccttcctctgctaagggctctgtccctgggtccacagcactctgcctttaaaatagctctcttggcttcttaggacagtgttctttctccaagtcatattctccccctttctcccttgcttccctcccaacttttcactgaaacagtaagatttagaggttgtgttcttaggcatgccacattacttccatgcacattagtgacttcatcagcaaaattaatatattcagataattccctaaggcaagaggctggaccaagctctcctggggttccctcttctaaatactatgctttggtgacaaggcaatcctcttcctggtgtctaccaccctgggaacaactttagggcactctcttgttactgccccccgtccttggagaggggaaggctaagggagtcactcctgataccttcccactgtccttcttttgcagtgctggtaatggctggtggtgggtgcctgtggtggcccctctggtgggggccaccgttggcacagccacttaccagctgttggtggctctgcaccaccctgagggcccagagccagctcaggatctggtgtctgctcaacacaaagcctcagagttggaaactcctgcctcagctcagatgctggagtgtaagctatgattaggacaaccctcacttcactcatggaccctggagccagccactgaccccgcctgggaacaacagwcattcttcctctttgttaatgtgccagaacctgggaggcttctctgtttatctgtttggcatcccttcctcctaaactaagaaggatcctggacagggagaagtggaggaggataaggtaccaggactcaggcttctcatcccctcctcccgcaaagcggttttctgaccctcagggcctctcggaatgtagttgctcgaggtaaccgctagagggtgcgcacctggatgctggatggggacggctgcgggcatctgcagggtggagggggccaccatccagtgtagggcacaaccctggggactgccctccatagcctgtcccgactgccgactcctagctctcatcgcctcggcgcctcccaccttcaccctctcggggatgcctccccaagagggtagttaggggtggggaagccgcctccacccagggggcgtggtgggggcggagggaaggagggcggcggggcacagagacagagagcaaggctgtgaaactgaggcaccgttcctagacatctcggtgctgtgtcgttcattcaaggagagttgagatacagtgaaatgagccagggcgaggagggagggtgaaggaacggagggcgggcggctccgaggagcgagagtcgggctgagggcaacctggcgccagggaaaattctggttattcaccacttctacagctctcctgccgctccctgcagaggatgctcgttttgcagagaaggcagtgttcctctattcccttcttccgaattaaaaataccccctcagagcg

SEQ ID NO: 380 - DNA, 2440 bp, Homo sapiens
aatacagagagcatggtggagcttctggacttgtatcagttggaggatgaagcctacagcagccttgcagaagctacaaccgaactctatcagtatttactacagccattccgagacatgagagaacttgccatgctrcgaagacagcagatcaagatttccatggagaatgattatctgggacctcgaagaattgagagtctacaaaaagaagatgctgattggcagcggaaagctcacatggctgtactgtctattcaagatcttactgtcaagtactttgaaataacagctaaagctcaaaaagctgtgtatgatcgaatgcgagctgatcagaagaaatttggtaaagcatcatgggcagcggctgctgaacggatggaaaaactccagtatgcagtttctaaggaaactttgcagatgatgagagctaaagagatatgcttggaacagcggaaacatgcactaaaggaagagatgcagagtttgcggggtggtacagaagcgatagcacgattggatcagttagaagctgattattatgacctgcaacttcagttgtatgaagtacagtttgaaatcttgaagtgtgaagagttactattgacagcgcaactagaaagcatcaaaagacttatatcagaaaaaagagatgaagtggtatactatgacacttacgaaagcatggaggccatgctggagaaggaygagatggcagcatctgcgtacttacagagagaagagctgcagaaacttcagcagaaagcacgccagctggaagcaagacgtggacgggtttctgccaagaaatcctacctcagaaataaaaaggaaatatgtattgcaaaacacaatgaaaaaatccaacagcgcactcggattgaagatgaatatagaacccatcacacagtacaactaaagagagaaaaattacatgatgaagaagaaagaaaaagtgmctgggttagccaagagagacagagaacactggatagacttcgaacatttaaacagaggtatcctgggcaagtcatacttaaatcaaccagattacgactagctcatgcaagaagaaaaggtgcagcaagtcctgttctccaagaggatcattgtgactctttaccaagtgtgttacaggtagaagagaaaactgaagaggtgggagaaggaagagtcaagcgtgggccatcacagacaacagaaccccagagccttgtgcaacttgaagatacttcattaacacaacttgaagccacctcattacctctcagtggtgttacctctgaactgcctcccactatatctcttccacttttgaataacaacctcgaaccatgttctgttaccataaatccactcccatcccctcttcctccaacaccaccacctcccccacctcctccccctcccccaccaccaccacctctgcctgttgctaaggacagtggcccagagacactggagaaagatctgcctagaaaggaggggaatgagaagaggatcccaaagtcagccagtgccccctcagcacacctctttgacagcagccagctggtcagtgcacggaagaagctcagaaagactgctgaaggtttgcagargaggakagtgawctcacccatggatgaggtgctagcctccttgaagcgtggtagttttcatctgaaaaaggttgaacagcgaactctgcctccttttcctgatgaagatgatagtaataatatcttggcacaaataaggaaaggggtaaaattgaagaaggtacagaaggatgttttgagagaatccttcacacttctacccgatacagaccctctaacacggagcatccatgaagctcttagaagaattaaagaagcatccccagagtcagaggacgaagaggaggctttaccttgcacagactgggagaactaacaagtgacataacagaagaaaaatatcattcaagattggttctgattcttttggaaaatgacagtttaagcacttggttcctcagttggataacattagatccaaagtgcattggttcagtggtgtgaagaaaggaagcacaattggcaggttatcactttccagtcgttccaatagatgatggttaacatgaattttacaygtgcaatgttcrtgactgcaatgaagaaaaggccttctggagatttctgttttttaagcacattctccttccatccacatatttacatccttgtaatggccagttaagctagggcttgcygtaagttggaagaacactgggttgacagagatctactgtgagctgtattgggactgctytgagaaccatctttcaatgcactgaaaagtcatctgaaaaaatagcttcttccatatcagcttatattaaatactgtgacactctgagaaagtttatcatcatgatagctgtaagtcaggcattaaaatcaaatggaaatac

SEQ ID NO: 381 - DNA, 2344 bp, Homo sapiens
ttttatagtgtcagtcagtcaccccacagtctcctctctcttcttttctactgtgctatcctagaatcaaggatttcagcaacaatgcctctgttcaaactcccaggtaggtgtacaaaaaattgatgatgcaatgcgcaactttgctgaaaaagtgtttgcctctgaagtcaaagatgaaggaggtcgtcaggagatttccccctttgatgtggatgagatctgtcygatttctcatcatgagatgcaagcacacatattccatctggagactctgtccacctccacagaagccaggagaaaaaagyrtttccaaggacggaagactgttaatttgtccattccactaagtgaaacatcttccaccaaactgtcccacattgatgaatacatttcctcatctccaacctaccagaccrtgcctgattttcagagagtgcagattactggtgactatgcctctggggttacagttgaagattttgaaattgtttgcaaaggtctgtatcgggcactatgcatacgtgagaaatacatgcagaagtcgtttcakaggttccctaaaaccccttccaaatacttgcggaacattgatggtgaggcttgggtagcaaatgagagcttctatccagtcttyactcctcctgtgaagaagggagaggaccccttccgaacagacaaccttcctgaaaacctgggctatcacctcaaaatgaaggacggtgtagtttacgtctatcctaatgaagcagcagtcagcaaagatgagcctaagccacttccttacccaaatctggacaccttcttagacgatatgaattttttacttgctttaattgctcaaggacctgttaagacctatacccaccggcgcctgaagttcctctcctcsaagttccaggtccatcagatgcttaacgagatggacgagttaaaggagctgawaaacaacccccaccgagatttttataactgcaggaaggtggacacccatatccatgcagccgcttgcatgaaccagaaacatctgctgcgttttattaagaaatcttaccaaattgatgctgacagagtggtctatagcaccaaagagaagaatctgaccctaaaggaactttttgctaaattaaaaatgcatccttatgacctgactgttgattctctggatgttcatgctggacgccagaccttccagcgttttgataagttcaatgacaaatataatcctgtaggagcaagtgagctaygggacctctacttgaagacagacaattacattaatggggaatattttgccactatcatcaaggaggtaggtgcggacctggtggaggccaagtaccagcatgctgagccccrcctgtccatctatggccgcagtcctgatgagtggagcaaactctcctcctggttcgtctgcaatcgcatccactgccccaacatgacatggatgatccaggttcccaggatctatgatgtgttccgttccaagaatttccttccacattttggaaaaatgctggagaatattttcatgccagtgtttgaggccaccatcaacccccaggctgacccagaactcagtgtcttcctcaagcatatcactggctttgacagtgtggatgatgagtccaaacacagtggccacatgttctcctccaagagtcccaagccccaggagtggacattggaaaagaatccatcttacacttactatgcctactacatgtatgcaaacatcatggtgctcaacagcctgagaaaggaacgaggcatgaatacgtttctgttccgacctcactgtggagaagctggagccctcacccatctcatgacagcattcatgatagcagatgatatctctcatggcctaaatttaaaaaagagtcccgtgctacagtacttgtttttcttagcccaaattcccatygccatgtcaccactaagtaacaatagcctatttctagagtatgccaaaaatccttttttggatttycttcagaaagggctaatgatctcactgtctacagaygacccaatgcaattccactttaccaaggagcccctaatggaagaatatgctattgctgcacaagtcttcaagctgagcacctgtgatatgtgcgaagtggcaaggaacagtgtcttgcagtgtggaatttctcatgaggagaaagtaaagtttctgggcgacaattaccttgaggaaggccctgctggaaatgatatccggaggacaaatgtagcccaaatccgcatggcctatcgctatgaaacctggtgttatgaactcaatttaattgctgagggtcttaaatcaacagaataaaaaaaagtaaaccaa

SEQ ID NO: 382 - DNA, 4269 bp, Homo sapiens
gagcgcgccgcctgggccaggcagccgagccgtccgagcagctgggctgggagcmgggaacccggagctgsgaatcgggagccgggcgcggggagctgcgcgaagccggggcggagcacgcgagctatgcatgcggggcgtgtggccgcccccggtgtccgccctgctgtcggcgctggggatgtcgacgtacaagcgggccacgctggacgaggaggacctggtggactcgctctccgagggcgacgcataccccaacggcctgcaggtgaacttccacagcccccggagtggccagaggtgctgggctgcacggacccaggtggagaagcggctggtggtgttggtggtacttctggcggcaggactggtggcctgcttggcagcactgggcatccagtaccagacaagatccccctctgtgtgcctgagcgaagcttgtgtctcagtgaccagctccatcttgagctccatggaccccacagtggacccctgccatgacttcttcagctacgcctgtgggggctggatcaaggccaacccagtccctgatggccactcacgctgggggaccttcagcaacctctgggaacacaaccaagcaatcatcaagcacctcctcgaaaactccacrgccagcgtgagcgaggcagagagaaaggcgcaagtatactaccgtgcgtgcatgaacgagaccaggatcgaggagctcagggccaaacctctaatggagttgattgagaggctcgggggctggaacatcacaggtccctgggccaaggacaacttccaggacaccctgcaggtggtcaccgcccactaccgcacctcacccttcttctctgtctatgtcagtgccgattccaagaactccaacagcaacgtgatccaggtggaccagtctggcctgggcttgccctcgagagactattacctgaacaaaactgaaaacgagaaggtgctgaccggatatctgaactacatggtccagctggggaarctgctkggcggcggggacgaggaggccatccggccccagatgcagcagatcttggactttgagacggcaytggccaacatcaccatcccacaggagaagcgccgtgatgaggagctcatctaccacaaagtgacggcagccgagctgcagaycttggcacccgccatcaactggttgccttttctcaacaccatcttctaccccgtggagatcaatgaatccgagcctattgtggtctatgacaaggaataccttgagcagatctccactctcatcaacaccacygacagatgcctgctcaacaactacatgatctggaacctggtgcggaaaacaagctccttccttgaccagcgctttcaggacgccgatgagaagttcatggaagtcatgtacgggaccaagaagacctgtcttcctcgctggaagttttgcgtgagtgacacagaaaacaacctgggctttgcgttgggccccatgtttgtcaaagcaaccttcgccgaggacagcaagagcatagccaccgagatcatcctggagattaagaaggcatttgaggaaagcctgagcaccctgaagtggatggatgaggaaacccgaaaatcagccaaggaaaaggccgatgccatctacaacatgataggataccccaacttcatcatggatcccaaggagctggacaaagtgtttaatgactacactgcagttccagacctctactttgaaaatgccatgcggtttttcaacttctcatggagggtcactgccgaycagctcaggaaagcccccaacagagatcagtggagcatgaccccgcccatggtgaacgcctactactcgcccaccaagaatgagattgtgtttccggccgggatccwgcaggcaccattctacacacgctcctcacccaaggccttaaactttggtggcataggtgtcgtcgtgggccatgagctgactcatgcttttgatgatcaaggacgggagtatgacaaggacgggaacctccggccatggtggaagaactcatccgtggaggccttcaagcgtcagaccgagtgcatggtagagcagtacagcaactacagcgtgaacggggagccggtgaacgggcggcacaccctgggggagaacatcgccgacaacgggggtctcaaggcggcctatcgggcttaccagaactgggtgaagaagaacggggctgagcactcgctccccaccctgggcctcaccaataaccagctcttcttcctgggctttgcacaggtctggtgctccgtccgcacacctgagagctcccacgaaggcctcatcaccgatccccacagcccctctcgcttccgggtcatcggctccctctccaattccaaggagttctcagaacacttcygctgcccacctggctcacccatgaacccgcctcacaagtgcgaagtctggtaaggacgaagcggagagagccaagacggaggaggggaaggggctgaggacgagacccccatccagcctccagggcattgctcagcccgcttggmcacccggggccctgcttcctcacactggcgggttttcagccrgaaccgagcccatggtgttggctctcaacgtgacccgcagtctgatcccctgtgaagagccggacatcccaggcacacgtgtgcgccaccttcagcaggcattcgggtgctgggctggtggctcatcaggcctgggccccacactgacaagcgccagatacgccacaaataccactgtgtcaaatgctttcaagatayatttttggggaaactattttttaaacactgtggaatacactggaaatcttcagggaaaaacacatttaaacacttttttttttaaggaaagaattggtatatttattatgttctgtttttctaaataacctgtggacaagggaagccccactgatttactccctctcttccccactccctgtgaggctgggctgaggcacggatccctgggccacagagcaagtctccaaatcagacagctgcctcagcccctgggatgtgtgatttcagctcctgtcacctcatgcaagggcgtggagaccagtagaggtgtggaggccaggcagagagaggagccygctctgcggggggcccagctcatgggcactgccccttcagctagsctgcctccgtcccctgagtccaacagtgggagccctagctgggaagttctgatccccaaagccacagcaggggactgatggctatagcagaatgaggtcgggtcaggaccctcaaacaccatctgggaacaccaagcaccctgaatcgagrctgcaggagccctgcggggtgagactgtgtcagagatacactgctggccacaagtgtcccctctcagtcccaccttttcgggctgtcccatgtctatctcaggggcccgttacctctctgcagcagtcccccatcccagccacaccagggtctgtccggccaaccctcttccccagggaaaggagaaaagagaaaacaggctgggcccggtggctcactcctgtaatcccagcactttgggaggttgaggtgggcggatcacctgaggtcaggagtttgagaccagcctggccaacgtggtgaaaccccatctctactaaaaaaaattacaaaaattagccgggagtggtggtgggcacctgtaatcccagttactcgggaggctgaggcaagagaatctcttgagctcaggaggcagaggttgcagtgagctgagattgcgccactgcactccagcctgggtgacagagggagactccgtcccaaaaaaaagaaaagagaaacagctgtcacctcccgcaggacccaaatcctctctctgagcaccgtcatccaccacatggctgggcctggctcccaggaccagtccagtcctctagtgccttatctgaggctgcagccgccagtctccaccccaaggagacagcccctgctcctagatgcccttggcctccgcagtgcagcccccaggtgtcctgactgaagcacaggccatagccccatttccccggtgcctgcagggctaacctccacgggagcccaggagctctggccggcaggtccatggcacagggcatcggaagactgcaaaactgctggacttaccctgggctgcagtccattgtcrgcccctgggttgaatcaagatagtacttgcagctagatggatgcttttagccaggggacattgtgasgggaagattcctccacccagtctggcctgtggtgtctgtctcctcc

SEQ ID NO: 383 - DNA, 4169 bp, Homo sapiens
tcgggcgcgagagccatggaggcgctgagggagtccgtgctgcatttggccttgcagatgtcgacgtacaagcgggccacgctggacgaggaggacctggtggactcgctctccgagggcgacgcataccccaacggcctgcaggtgaacttccacagcccccggagtggccagaggtgctgggctgcacggacccaggtggagaagcggctggtggtgttggtggtacttctggcggcaggactggtggcctgcttggcagcactgggcatccagtaccagacaagatccccctctgtgtgcctgagcgaagcttgtgtctcagtgaccagctccatcttgagctccatggaccccacagtggacccctgccatgacttcttcagctacgcctgtgggggctggatcaaggccaacccagtccctgatggccactcacgctgggggaccttcagcaacctctgggaacacaaccaagcaatcatcaagcacctcctcgaaaactccacrgccagcgtgagcgaggcagagagaaaggcgcaagtatactaccgtgcgtgcatgaacgagaccaggatcgaggagctcagggccaaacctctaatggagttgattgagaggctcgggggctggaacatcacaggtccctgggccaaggacaacttccaggacaccctgcaggtggtcaccgcccactaccgcacctcacccttcttctctgtctatgtcagtgccgattccaagaactccaacagcaacgtgatccaggtggaccagtctggcctgggcttgccctcgagagactattacctgaacaaaactgaaaacgagaaggtgctgaccggatatctgaactacatggtccagctggggaarctgctkggcggcggggacgaggaggccatccggccccagatgcagcagatcttggactttgagacggcaytggccaacatcaccatcccacaggagaagcgccgtgatgaggagctcatctaccacaaagtgacggcagccgagctgcagaycttggcacccgccatcaactggttgccttttctcaacaccatcttctaccccgtggagatcaatgaatccgagcctattgtggtctatgacaaggaataccttgagcagatctccactctcatcaacaccacygacagatgcctgctcaacaactacatgatctggaacctggtgcggaaaacaagctccttccttgaccagcgctttcaggacgccgatgagaagttcatggaagtcatgtacgggaccaagaagacctgtcttcctcgctggaagttttgcgtgagtgacacagaaaacaacctgggctttgcgttgggccccatgtttgtcaaagcaaccttcgccgaggacagcaagagcatagccaccgagatcatcctggagattaagaaggcatttgaggaaagcctgagcaccctgaagtggatggatgaggaaacccgaaaatcagccaaggaaaaggccgatgccatctacaacatgataggataccccaacttcatcatggatcccaaggagctggacaaagtgtttaatgactacactgcagttccagacctctactttgaaaatgccatgcggtttttcaacttctcatggagggtcactgccgaycagctcaggaaagcccccaacagagatcagtggagcatgaccccgcccatggtgaacgcctactactcgcccaccaagaatgagattgtgtttccggccgggatccwgcaggcaccattctacacacgctcctcacccaaggccttaaactttggtggcataggtgtcgtcgtgggccatgagctgactcatgcttttgatgatcaaggacgggagtatgacaaggacgggaacctccggccatggtggaagaactcatccgtggaggccttcaagcgtcagaccgagtgcatggtagagcagtacagcaactacagcgtgaacggggagccggtgaacgggcggcacaccctgggggagaacatcgccgacaacgggggtctcaaggcggcctatcgggtctggtgctccgtccgcacacctgagagctcccacgaaggcctcatcaccgatccccacagcccctctcgcttccgggtcatcggctccctctccaattccaaggagttctcagaacacttcygctgcccacctggctcacccatgaacccgcctcacaagtgcgaagtctggtaaggacgaagcggagagagccaagacggaggaggggaaggggctgaggacgagacccccatccagcctccagggcattgctcagcccgcttggmcacccggggccctgcttcctcacactggcgggttttcagccrgaaccgagcccatggtgttggctctcaacgtgacccgcagtctgatcccctgtgaagagccggacatcccaggcacacgtgtgcgccaccttcagcaggcattcgggtgctgggctggtggctcatcaggcctgggccccacactgacaagcgccagatacgccacaaataccactgtgtcaaatgctttcaagatayatttttggggaaactattttttaaacactgtggaatacactggaaatcttcagggaaaaacacatttaaacacttttttttttaaggaaagaattggtatatttattatgttctgtttttctaaataacctgtggacaagggaagccccactgatttactccctctcttccccactccctgtgaggctgggctgaggcacggatccctgggccacagagcaagtctccaaatcagacagctgcctcagcccctgggatgtgtgatttcagctcctgtcacctcatgcaagggcgtggagaccagtagaggtgtggaggccaggcagagagaggagccygctctgcggggggcccagctcatgggcactgccccttcagctagsctgcctccgtcccctgagtccaacagtgggagccctagctgggaagttctgatccccaaagccacagcaggggactgatggctatagcagaatgaggtcgggtcaggaccctcaaacaccatctgggaacaccaagcaccctgaatcgagrctgcaggagccctgcggggtgagactgtgtcagagatacactgctggccacaagtgtcccctctcagtcccaccttttcgggctgtcccatgtctatctcaggggcccgttacctctctgcagcagtcccccatcccagccacaccagggtctgtccggccaaccctcttccccagggaaaggagaaaagagttgaggtgggcggatcacctgaggtcaggagtttgagaccagcctggccaacgtggtgaaaccccatctctactaaaaaaaattacaaaaattagccgggagtggtggtgggcacctgtaatcccagttactcgggaggctgaggcaagagaatctcttgagctcaggaggcagaggttgcagtgagctgagattgcgccactgcactccagcctgggtgacagagggagactccgtcccaaaaaaaagaaaagagaaacagctgtcacctcccgcaggacccaaatcctctctctgagcaccgtcatccaccacatggctgggcctggctcccaggaccagtccagtcctctagtgccttatctgaggctgcagccgccagtctccaccccaaggagacagcccctgctcctagatgcccttggcctccgcagtgcagcccccaggtgtcctgactgaagcacaggccatagccccatttccccggtgcctgcagggctaacctccacgggagcccaggagctctggccggcaggtccatggcacagggcatcggaagactgcaaaactgctggacttaccctgggctgcagtccattgtcrgcccctgggttgaatcaagatagtacttgcagctagatggatgcttttagccaggggacattgtgasgggaagattcctccacccagtctggcctgtggtgtctgtctcctccctggaatcctcctgcccgagaggaagcagacggcacagggacacccctgccaccttgggatctgcctccaagctggtgcagggtatcgagagtggattccagatggaggtcctggtcccagcacgcagcagtcctggtagctctgcagaggagacaggaacccgagaagtag

SEQ ID NO: 384 - DNA, 4282 bp, Homo sapiens
cctggattagggctgaatctgtgggaaccagaccacccctgagacaggaggcagccctgatgcctctccagggcctgggcctgcagcggaaccccttcctccaagggaagcggggcccggggctcacgtcttccccrcccctcctgcctccttccctgcaggtgaacttccacagcccccggagtggccagaggtgctgggctgcacggacccaggtggagaagcggctggtggtgttggtggtacttctggcggcaggactggtggcctgcttggcagcactgggcatccagtaccagacaagatccccctctgtgtgcctgagcgaagcttgtgtctcagtgaccagctccatcttgagctccatggaccccacagtggacccctgccatgacttcttcagctacgcctgtgggggctggatcaaggccaacccagtccctgatggccactcacgctgggggaccttcagcaacctctgggaacacaaccaagcaatcatcaagcacctcctcgaaaactccacrgccagcgtgagcgaggcagagagaaaggcgcaagtatactaccgtgcgtgcatgaacgagaccaggatcgaggagctcagggccaaacctctaatggagttgattgagaggctcgggggctggaacatcacaggtccctgggccaaggacaacttccaggacaccctgcaggtggtcaccgcccactaccgcacctcacccttcttctctgtctatgtcagtgccgattccaagaactccaacagcaacgtgatccaggtggaccagtctggcctgggcttgccctcgagagactattacctgaacaaaactgaaaacgagaaggtgctgaccggatatctgaactacatggtccagctggggaarctgctkggcggcggggacgaggaggccatccggccccagatgcagcagatcttggactttgagacggcaytggccaacatcaccatcccacaggagaagcgccgtgatgaggagctcatctaccacaaagtgacggcagccgagctgcagaycttggcacccgccatcaactggttgccttttctcaacaccatcttctaccccgtggagatcaatgaatccgagcctattgtggtctatgacaaggaataccttgagcagatctccactctcatcaacaccacygacagatgcctgctcaacaactacatgatctggaacctggtgcggaaaacaagctccttccttgaccagcgctttcaggacgccgatgagaagttcatggaagtcatgtacgggaccaagaagacctgtcttcctcgctggaagttttgcgtgagtgacacagaaaacaacctgggctttgcgttgggccccatgtttgtcaaagcaaccttcgccgaggacagcaagagcatagccaccgagatcatcctggagattaagaaggcatttgaggaaagcctgagcaccctgaagtggatggatgaggaaacccgaaaatcagccaaggaaaaggccgatgccatctacaacatgataggataccccaacttcatcatggatcccaaggagctggacaaagtgtttaatgactacactgcagttccagacctctactttgaaaatgccatgcggtttttcaacttctcatggagggtcactgccgaycagctcaggaaagcccccaacagagatcagtggagcatgaccccgcccatggtgaacgcctactactcgcccaccaagaatgagattgtgtttccggccgggatccwgcaggcaccattctacacacgctcctcacccaaggccttaaactttggtggcataggtgtcgtcgtgggccatgagctgactcatgcttttgatgatcaaggacgggagtatgacaaggacgggaacctccggccatggtggaagaactcatccgtggaggccttcaagcgtcagaccgagtgcatggtagagcagtacagcaactacagcgtgaacggggagccggtgaacgggcggcacaccctgggggagaacatcgccgacaacgggggtctcaaggcggcctatcgggcttaccagaactgggtgaagaagaacggggctgagcactcgctccccaccctgggcctcaccaataaccagctcttcttcctgggctttgcacaggtctggtgctccgtccgcacacctgagagctcccacgaaggcctcatcaccgatccccacagcccctctcgcttccgggtcatcggctccctctccaattccaaggagttctcagaacacttcygctgcccacctggctcacccatgaacccgcctcacaagtgcgaagtctggtaaggacgaagcggagagagccaagacggaggaggggaaggggctgaggacgagacccccatccagcctccagggcattgctcagcccgcttggmcacccggggccctgcttcctcacactggcgggttttcagccrgaaccgagcccatggtgttggctctcaacgtgacccgcagtctgatcccctgtgaagagccggacatcccaggcacacgtgtgcgccaccttcagcaggcattcgggtgctgggctggtggctcatcaggcctgggccccacactgacaagcgccagatacgccacaaataccactgtgtcaaatgctttcaagatayatttttggggaaactattttttaaacactgtggaatacactggaaatcttcagggaaaaacacatttaaacacttttttttttaaggaaagaattggtatatttattatgttctgtttttctaaataacctgtggacaagggaagccccactgatttactccctctcttccccactccctgtgaggctgggctgaggcacggatccctgggccacagagcaagtctccaaatcagacagctgcctcagcccctgggatgtgtgatttcagctcctgtcacctcatgcaagggcgtggagaccagtagaggtgtggaggccaggcagagagaggagccygctctgcggggggcccagctcatgggcactgccccttcagctagsctgcctccgtcccctgagtccaacagtgggagccctagctgggaagttctgatccccaaagccacagcaggggactgatggctatagcagaatgaggtcgggtcaggaccctcaaacaccatctgggaacaccaagcaccctgaatcgagrctgcaggagccctgcggggtgagactgtgtcagagatacactgctggccacaagtgtcccctctcagtcccaccttttcgggctgtcccatgtctatctcaggggcccgttacctctctgcagcagtcccccatcccagccacaccagggtctgtccggccaaccctcttccccagggaaaggagaaaagagttgaggtgggcggatcacctgaggtcaggagtttgagaccagcctggccaacgtggtgaaaccccatctctactaaaaaaaattacaaaaattagccgggagtggtggtgggcacctgtaatcccagttactcgggaggctgaggcaagagaatctcttgagctcaggaggcagaggttgcagtgagctgagattgcgccactgcactccagcctgggtgacagagggagactccgtcccaaaaaaaagaaaagagaaacagctgtcacctcccgcaggacccaaatcctctctctgagcaccgtcatccaccacatggctgggcctggctcccaggaccagtccagtcctctagtgccttatctgaggctgcagccgccagtctccaccccaaggagacagcccctgctcctagatgcccttggcctccgcagtgcagcccccaggtgtcctgactgaagcacaggccatagccccatttccccggtgcctgcagggctaacctccacgggagcccaggagctctggccggcaggtccatggcacagggcatcggaagactgcaaaactgctggacttaccctgggctgcagtccattgtcrgcccctgggttgaatcaagatagtacttgcagctagatggatgcttttagccaggggacattgtgasgggaagattcctccacccagtctggcctgtggtgtctgtctcctccctggaatcctcctgcccgagaggaagcagacggcacagggacacccctgccaccttgggatctgcctccaagctggtgcagggtatcgagagtggattccagatggaggtcctggtcccagcacgcagcagtcctggtagctctgcagaggagacaggaacccgagaagtag

SEQ ID NO: 385 - DNA, 4145 bp, Homo sapiens
tcgggcgcgagagccatggaggcgctgagggagtccgtgctgcatttggccttgcagatgtcgacgtacaagcgggccacgctggacgaggaggacctggtggactcgctctccgagggcgacgcataccccaacggcctgcaggtgaacttccacagcccccggagtggccagaggtgctgggctgcacggacccaggtggagaagcggctggtggtgttggtggtacttctggcggcaggactggtggcctgcttggcagcactgggcatccagtaccagacaagatccccctctgtgtgcctgagcgaagcttgtgtctcagtgaccagctccatcttgagctccatggaccccacagtggacccctgccatgacttcttcagctacgcctgtgggggctggatcaaggccaacccagtccctgatggccactcacgctgggggaccttcagcaacctctgggaacacaaccaagcaatcatcaagcacctcctcgaaaactccacrgccagcgtgagcgaggcagagagaaaggcgcaagtatactaccgtgcgtgcatgaacgagaccaggatcgaggagctcagggccaaacctctaatggagttgattgagaggctcgggggctggaacatcacaggtccctgggccaaggacaacttccaggacaccctgcaggtggtcaccgcccactaccgcacctcacccttcttctctgtctatgtcagtgccgattccaagaactccaacagcaacgtgatccaggtggaccagtctggcctgggcttgccctcgagagactattacctgaacaaaactgaaaacgagaaggtgctgaccggatatctgaactacatggtccagctggggaarctgctkggcggcggggacgaggaggccatccggccccagatgcagcagatcttggactttgagacggcaytggccaacatcaccatcccacaggagaagcgccgtgatgaggagctcatctaccacaaagtgacggcagccgagctgcagaycttggcacccgccatcaactggttgccttttctcaacaccatcttctaccccgtggagatcaatgaatccgagcctattgtggtctatgacaaggaataccttgagcagatctccactctcatcaacaccacygacagatgcctgctcaacaactacatgatctggaacctggtgcggaaaacaagctccttccttgaccagcgctttcaggacgccgatgagaagttcatggaagtcatgtacgggaccaagaagacctgtcttcctcgctggaagttttgcgtgagtgacacagaaaacaacctgggctttgcgttgggccccatgtttgtcaaagcaaccttcgccgaggacagcaagagcatagccaccgagatcatcctggagattaagaaggcatttgaggaaagcctgagcaccctgaagtggatggatgaggaaacccgaaaatcagccaaggaaaaggccgatgccatctacaacatgataggataccccaacttcatcatggatcccaaggagctggacaaagtgtttaatgactacactgcagttccagacctctactttgaaaatgccatgcggtttttcaacttctcatggagggtcactgccgaycagctcaggaaagcccccaacagagatcagtggagcatgaccccgcccatggtgaacgcctactactcgcccaccaagaatgagattgtgtttccggccgggatccwgcaggcaccattctacacacgctcctcacccaaggccttaaactttggtggcataggtgtcgtcgtgggccatgagctgactcatgcttttgatgatcaaggacgggagtatgacaaggacgggaacctccggccatggtggaagaactcatccgtggaggccttcaagcgtcagaccgagtgcatggtagagcagtacagcaactacagcgtgaacggggagccggtgaacgggcggcacaccctgggggagaacatcgccgacaacgggggtctcaaggcggcctatcgggcttaccagaactgggtgaagaagaacggggctgagcactcgctccccaccctgggcctcaccaataaccagctcttcttcctgggctttgcacaggtctggtgctccgtccgcacacctgagagctcccacgaaggcctcatcaccgatccccacagcccctctcgcttccgggtcatcggctccctctccaattccaaggagttctcagaacacttcygctgcccacctggctcacccatgaacccgcctcacaagtgcgaagtctggtaaggacgaagcggagagagccaagacggaggaggggaaggggctgaggacgagacccccatccagcctccagggcattgctcagcccgcttggmcacccggggccctgcttcctcacactggcgggttttcagccrgaaccgagcccatggtgttggctctcaacgtgacccgcagtctgatcccctgtgaagagccggacatcccaggcacacgtgtgcgccaccttcagcaggcattcgggtgctgggctggtggctcatcaggcctgggccccacactgacaagcgccagatacgccacaaataccactgtgtcaaatgctttcaagatayatttttggggaaactattttttaaacactgtggaatacactggaaatcttcagggaaaaacacatttaaacacttttttttttaaggaaagaattggtatatttattatgttctgtttttctaaataacctgtggacaagggaagccccactgatttactccctctcttccccactccctgtgaggctgggctgaggcacggatccctgggccacagagcaagtctccaaatcagacagctgcctcagcccctgggatgtgtgatttcagctcctgtcacctcatgcaagggcgtggagaccagtagaggtgtggaggccaggcagagagaggagccygctctgcggggggcccagctcatgggcactgccccttcagctagsctgcctccgtcccctgagtccaacagtgggagccctagctgggaagttctgatccccaaagccacagcaggggactgatggctatagcagaatgaggtcgggtcaggaccctcaaacaccatctgggaacaccaagcaccctgaatcgagrctgcaggagccctgcggggtgagactgtgtcagagatacactgctggccacaagtgtcccctctcagtcccaccttttcgggctgtcccatgtctatctcaggggcccgttacctctctgcagcagtcccccatcccagccacaccagggtctgtccggccaaccctcttccccagggaaaggagaaaagagaaaacaggctgggcccggtggctcactcctgtaatcccagcactttgggaggttgaggtgggcggatcacctgaggtcaggagtttgagaccagcctggccaacgtggtgaaaccccatctctactaaaaaaaattacaaaaattagccgggagtggtggtgggcacctgtaatcccagttactcgggaggctgaggcaagagaatctcttgagctcaggaggcagaggttgcagtgagctgagattgcgccactgcactccagcctgggtgacagagggagactccgtcccaaaaaaaagaaaagagaaacagctgtcacctcccgcaggacccaaatcctctctctgagcaccgtcatccaccacatggctgggcctggctcccaggaccagtccagtcctctagtgccttatctgaggctgcagccgccagtctccaccccaaggagacagcccctgctcctagatgcccttggcctccgcagtgcagcccccaggtgtcctgactgaagcacaggccatagccccatttccccggtgcctgcagggctaacctccacgggagcccaggagctctggccggcaggtccatggcacagggcatcggaagactgcaaaactgctggacttaccctgggctgcagtccattgtcrgcccctgggttgaatcaagatagtacttgcagctagatggatgcttttagccaggggacattgtgasgggaagattcctccacccagtctggcctgtggtgtctgtctcctcc

SEQ ID NO: 386 - DNA, 4265 bp, Homo sapiens
tcgggcgcgagagccatggaggcgctgagggagtccgtgctgcatttggccttgcagatgtcgacgtacaagcgggccacgctggacgaggaggacctggtggactcgctctccgagggcgacgcataccccaacggcctgcaggtgaacttccacagcccccggagtggccagaggtgctgggctgcacggacccaggtggagaagcggctggtggtgttggtggtacttctggcggcaggactggtggcctgcttggcagcactgggcatccagtaccagacaagatccccctctgtgtgcctgagcgaagcttgtgtctcagtgaccagctccatcttgagctccatggaccccacagtggacccctgccatgacttcttcagctacgcctgtgggggctggatcaaggccaacccagtccctgatggccactcacgctgggggaccttcagcaacctctgggaacacaaccaagcaatcatcaagcacctcctcgaaaactccacrgccagcgtgagcgaggcagagagaaaggcgcaagtatactaccgtgcgtgcatgaacgagaccaggatcgaggagctcagggccaaacctctaatggagttgattgagaggctcgggggctggaacatcacaggtccctgggccaaggacaacttccaggacaccctgcaggtggtcaccgcccactaccgcacctcacccttcttctctgtctatgtcagtgccgattccaagaactccaacagcaacgtgatccaggtggaccagtctggcctgggcttgccctcgagagactattacctgaacaaaactgaaaacgagaaggtgctgaccggatatctgaactacatggtccagctggggaarctgctkggcggcggggacgaggaggccatccggccccagatgcagcagatcttggactttgagacggcaytggccaacatcaccatcccacaggagaagcgccgtgatgaggagctcatctaccacaaagtgacggcagccgagctgcagaycttggcacccgccatcaactggttgccttttctcaacaccatcttctaccccgtggagatcaatgaatccgagcctattgtggtctatgacaaggaataccttgagcagatctccactctcatcaacaccacygacagatgcctgctcaacaactacatgatctggaacctggtgcggaaaacaagctccttccttgaccagcgctttcaggacgccgatgagaagttcatggaagtcatgtacgggaccaagaagacctgtcttcctcgctggaagttttgcgtgagtgacacagaaaacaacctgggctttgcgttgggccccatgtttgtcaaagcaaccttcgccgaggacagcaagagcatagccaccgagatcatcctggagattaagaaggcatttgaggaaagcctgagcaccctgaagtggatggatgaggaaacccgaaaatcagccaaggaaaaggccgatgccatctacaacatgataggataccccaacttcatcatggatcccaaggagctggacaaagtgtttaatgactacactgcagttccagacctctactttgaaaatgccatgcggtttttcaacttctcatggagggtcactgccgaycagctcaggaaagcccccaacagagatcagtggagcatgaccccgcccatggtgaacgcctactactcgcccaccaagaatgagattgtgtttccggccgggatccwgcaggcaccattctacacacgctcctcacccaaggccttaaactttggtggcataggtgtcgtcgtgggccatgagctgactcatgcttttgatgatcaaggacgggagtatgacaaggacgggaacctccggccatggtggaagaactcatccgtggaggccttcaagcgtcagaccgagtgcatggtagagcagtacagcaactacagcgtgaacggggagccggtgaacgggcggcacaccctgggggagaacatcgccgacaacgggggtctcaaggcggcctatcgggcttaccagaactgggtgaagaagaacggggctgagcactcgctccccaccctgggcctcaccaataaccagctcttcttcctgggctttgcacaggtctggtgctccgtccgcacacctgagagctcccacgaaggcctcatcaccgatccccacagcccctctcgcttccgggtcatcggctccctctccaattccaaggagttctcagaacacttcygctgcccacctggctcacccatgaacccgcctcacaagtgcgaagtctggtaaggacgaagcggagagagccaagacggaggaggggaaggggctgaggacgagacccccatccagcctccagggcattgctcagcccgcttggmcacccggggccctgcttcctcacactggcgggttttcagccrgaaccgagcccatggtgttggctctcaacgtgacccgcagtctgatcccctgtgaagagccggacatcccaggcacacgtgtgcgccaccttcagcaggcattcgggtgctgggctggtggctcatcaggcctgggccccacactgacaagcgccagatacgccacaaataccactgtgtcaaatgctttcaagatayatttttggggaaactattttttaaacactgtggaatacactggaaatcttcagggaaaaacacatttaaacacttttttttttaaggaaagaattggtatatttattatgttctgtttttctaaataacctgtggacaagggaagccccactgatttactccctctcttccccactccctgtgaggctgggctgaggcacggatccctgggccacagagcaagtctccaaatcagacagctgcctcagcccctgggatgtgtgatttcagctcctgtcacctcatgcaagggcgtggagaccagtagaggtgtggaggccaggcagagagaggagccygctctgcggggggcccagctcatgggcactgccccttcagctagsctgcctccgtcccctgagtccaacagtgggagccctagctgggaagttctgatccccaaagccacagcaggggactgatggctatagcagaatgaggtcgggtcaggaccctcaaacaccatctgggaacaccaagcaccctgaatcgagrctgcaggagccctgcggggtgagactgtgtcagagatacactgctggccacaagtgtcccctctcagtcccaccttttcgggctgtcccatgtctatctcaggggcccgttacctctctgcagcagtcccccatcccagccacaccagggtctgtccggccaaccctcttccccagggaaaggagaaaagagttgaggtgggcggatcacctgaggtcaggagtttgagaccagcctggccaacgtggtgaaaccccatctctactaaaaaaaattacaaaaattagccgggagtggtggtgggcacctgtaatcccagttactcgggaggctgaggcaagagaatctcttgagctcaggaggcagaggttgcagtgagctgagattgcgccactgcactccagcctgggtgacagagggagactccgtcccaaaaaaaagaaaagagaaacagctgtcacctcccgcaggacccaaatcctctctctgagcaccgtcatccaccacatggctgggcctggctcccaggaccagtccagtcctctagtgccttatctgaggctgcagccgccagtctccaccccaaggagacagcccctgctcctagatgcccttggcctccgcagtgcagcccccaggtgtcctgactgaagcacaggccatagccccatttccccggtgcctgcagggctaacctccacgggagcccaggagctctggccggcaggtccatggcacagggcatcggaagactgcaaaactgctggacttaccctgggctgcagtccattgtcrgcccctgggttgaatcaagatagtacttgcagctagatggatgcttttagccaggggacattgtgasgggaagattcctccacccagtctggcctgtggtgtctgtctcctccctggaatcctcctgcccgagaggaagcagacggcacagggacacccctgccaccttgggatctgcctccaagctggtgcagggtatcgagagtggattccagatggaggtcctggtcccagcacgcagcagtcctggtagctctgcagaggagacaggaacccgagaagtag

SEQ ID NO: 387 - DNA, 3083 bp, Homo sapiens
gagcgcgccgcctgggccaggcagccgagccgtccgagcagctgggctgggagcmgggaacccggagctgsgaatcgggagccgggcgcggggagctgcgcgaagccggggcggagcacgcgagctatgcatgcggggcgtgtggccgcccccggtgtccgccctgctgtcggcgctggggatgtcgacgtacaagcgggccacgctggacgaggaggacctggtggactcgctctccgagggcgacgcataccccaacggcctgcaggtgaacttccacagcccccggagtggccagaggtgctgggctgcacggacccaggtggagaagcggctggtggtgttggtggtacttctggcggcaggactggtggcctgcttggcagcactgggcatccagtaccagacaagatccccctctgtgtgcctgagcgaagcttgtgtctcagtgaccagctccatcttgagctccatggaccccacagtggacccctgccatgacttcttcagctacgcctgtgggggctggatcaaggccaacccagtccctgatggccactcacgctgggggaccttcagcaacctctgggaacacaaccaagcaatcatcaagcacctcctcgaaaactccacrgccagcgtgagcgaggcagagagaaaggcgcaagtatactaccgtgcgtgcatgaacgagaccaggatcgaggagctcagggccaaacctctaatggagttgattgagaggctcgggggctggaacatcacaggtccctgggccaaggacaacttccaggacaccctgcaggtggtcaccgcccactaccgcacctcacccttcttctctgtctatgtcagtgccgattccaagaactccaacagcaacgtgatccaggtggaccagtctggcctgggcttgccctcgagagactattacctgaacaaaactgaaaacgagaaggtgctgaccggatatctgaactacatggtccagctggggaarctgctkggcggcggggacgaggaggccatccggccccagatgcagcagatcttggactttgagacggcaytggccaacatcaccatcccacaggagaagcgccgtgatgaggagctcatctaccacaaagtgacggcagccgagctgcagaycttggcacccgccatcaactggttgccttttctcaacaccatcttctaccccgtggagatcaatgaatccgagcctattgtggtctatgacaaggaataccttgagcagatctccactctcatcaacaccacygacagatgcctgctcaacaactacatgatctggaacctggtgcggaaaacaagctccttccttgaccagcgctttcaggacgccgatgagaagttcatggaagtcatgtacgggaccaagaagacctgtcttcctcgctggaagttttgcgtgagtgacacagaaaacaacctgggctttgcgttgggccccatgtttgtcaaagcaaccttcgccgaggacagcaagagcatagccaccgagatcatcctggagattaagaaggcatttgaggaaagcctgagcaccctgaagtggatggatgaggaaacccgaaaatcagccaaggaaaaggccgatgccatctacaacatgataggataccccaacttcatcatggatcccaaggagctggacaaagtgtttaatgactacactgcagttccagacctctactttgaaaatgccatgcggtttttcaacttctcatggagggtcactgccgaycagctcaggaaagcccccaacagagatcagtggagcatgaccccgcccatggtgaacgcctactactcgcccaccaagaatgagattgtgtttccggccgggatccwgcaggcaccattctacacacgctcctcacccaaggccttaaactttggtggcataggtgtcgtcgtgggccatgagctgactcatgcttttgatgatcaaggacgggagtatgacaaggacgggaacctccggccatggtggaagaactcatccgtggaggccttcaagcgtcagaccgagtgcatggtagagcagtacagcaactacagcgtgaacggggagccggtgaacgggcggcacaccctgggggagaacatcgccgacaacgggggtctcaaggcggcctatcgggcttaccagaactgggtgaagaagaacggggctgagcactcgctccccaccctgggcctcaccaataaccagctcttcttcctgggctttgcacaggtctggtgctccgtccgcacacctgagagctcccacgaaggcctcatcaccgatccccacagcccctctcgcttccgggtcatcggctccctctccaattccaaggagttctcagaacacttcygctgcccacctggctcacccatgaacccgcctcacaagtgcgaagtctggtaaggacgaagcggagagagccaagacggaggaggggaaggggctgaggacgagacccccatccagcctccagggcattgctcagcccgcttggmcacccggggccctgcttcctcacactggcgggttttcagccrgaaccgagcccatggtgttggctctcaacgtgacccgcagtctgatcccctgtgaagagccggacatcccaggcacacgtgtgcgccaccttcagcaggcattcgggtgctgggctggtggctcatcaggcctgggccccacactgacaagcgccagatacgccacaaataccactgtgtcaaatgctttcaagatayatttttggggaaactattttttaaacactgtggaatacactggaaatcttcagggaaaaacacatttaaacacttttttttttaaggaaagaattggtatatttattatgttctgtttttctaaataacctgaagcccctgccactgccactacccgctccagagctttaaggaaaatgaagtgagacccctccccttaggcctggggagccatagggctggcttctctgtgggtgcgtggacgtggggttgggagctgggartctattttttgtattatgttttgagctactgtagttttggcgtgg

SEQ ID NO: 388 - DNA, 4140 bp, Homo sapiens
catgcggggcgtgtggccgcccccggtgtccgccctgctgtcggcgctggggatgtcgacgtacaagcgggccacgctggacgaggaggacctggtggactcgctctccgagggcgacgcataccccaacggcctgcaggtgaacttccacagcccccggagtggccagaggtgctgggctgcacggacccaggtggagaagcggctggtggtgttggtggtacttctggcggcaggactggtggcctgcttggcagcactgggcatccagtaccagacaagatccccctctgtgtgcctgagcgaagcttgtgtctcagtgaccagctccatcttgagctccatggaccccacagtggacccctgccatgacttcttcagctacgcctgtgggggctggatcaaggccaacccagtccctgatggccactcacgctgggggaccttcagcaacctctgggaacacaaccaagcaatcatcaagcacctcctcgaaaactccacrgccagcgtgagcgaggcagagagaaaggcgcaagtatactaccgtgcgtgcatgaacgagaccaggatcgaggagctcagggccaaacctctaatggagttgattgagaggctcgggggctggaacatcacaggtccctgggccaaggacaacttccaggacaccctgcaggtggtcaccgcccactaccgcacctcacccttcttctctgtctatgtcagtgccgattccaagaactccaacagcaacgtgatccaggtggaccagtctggcctgggcttgccctcgagagactattacctgaacaaaactgaaaacgagaaggtgctgaccggatatctgaactacatggtccagctggggaarctgctkggcggcggggacgaggaggccatccggccccagatgcagcagatcttggactttgagacggcaytggccaacatcaccatcccacaggagaagcgccgtgatgaggagctcatctaccacaaagtgacggcagccgagctgcagaycttggcacccgccatcaactggttgccttttctcaacaccatcttctaccccgtggagatcaatgaatccgagcctattgtggtctatgacaaggaataccttgagcagatctccactctcatcaacaccacygacagatgcctgctcaacaactacatgatctggaacctggtgcggaaaacaagctccttccttgaccagcgctttcaggacgccgatgagaagttcatggaagtcatgtacgggaccaagaagacctgtcttcctcgctggaagttttgcgtgagtgacacagaaaacaacctgggctttgcgttgggccccatgtttgtcaaagcaaccttcgccgaggacagcaagagcatagccaccgagatcatcctggagattaagaaggcatttgaggaaagcctgagcaccctgaagtggatggatgaggaaacccgaaaatcagccaaggaaaaggccgatgccatctacaacatgataggataccccaacttcatcatggatcccaaggagctggacaaagtgtttaatgactacactgcagttccagacctctactttgaaaatgccatgcggtttttcaacttctcatggagggtcactgccgaycagctcaggaaagcccccaacagagatcagtggagcatgaccccgcccatggtgaacgcctactactcgcccaccaagaatgagattgtgtttccggccgggatccwgcaggcaccattctacacacgctcctcacccaaggccttaaactttggtggcataggtgtcgtcgtgggccatgagctgactcatgcttttgatgatcaaggacgggagtatgacaaggacgggaacctccggccatggtggaagaactcatccgtggaggccttcaagcgtcagaccgagtgcatggtagagcagtacagcaactacagcgtgaacggggagccggtgaacgggcggcacaccctgggggagaacatcgccgacaacgggggtctcaaggcggcctatcgggcttaccagaactgggtgaagaagaacggggctgagcactcgctccccaccctgggcctcaccaataaccagctcttcttcctgggctttgcacaggtctggtgctccgtccgcacacctgagagctcccacgaaggcctcatcaccgatccccacagcccctctcgcttccgggtcatcggctccctctccaattccaaggagttctcagaacacttcygctgcccacctggctcacccatgaacccgcctcacaagtgcgaagtctggtaaggacgaagcggagagagccaagacggaggaggggaaggggctgaggacgagacccccatccagcctccagggcattgctcagcccgcttggmcacccggggccctgcttcctcacactggcgggttttcagccrgaaccgagcccatggtgttggctctcaacgtgacccgcagtctgatcccctgtgaagagccggacatcccaggcacacgtgtgcgccaccttcagcaggcattcgggtgctgggctggtggctcatcaggcctgggccccacactgacaagcgccagatacgccacaaataccactgtgtcaaatgctttcaagatayatttttggggaaactattttttaaacactgtggaatacactggaaatcttcagggaaaaacacatttaaacacttttttttttaaggaaagaattggtatatttattatgttctgtttttctaaataacctgtggacaagggaagccccactgatttactccctctcttccccactccctgtgaggctgggctgaggcacggatccctgggccacagagcaagtctccaaatcagacagctgcctcagcccctgggatgtgtgatttcagctcctgtcacctcatgcaagggcgtggagaccagtagaggtgtggaggccaggcagagagaggagccygctctgcggggggcccagctcatgggcactgccccttcagctagsctgcctccgtcccctgagtccaacagtgggagccctagctgggaagttctgatccccaaagccacagcaggggactgatggctatagcagaatgaggtcgggtcaggaccctcaaacaccatctgggaacaccaagcaccctgaatcgagrctgcaggagccctgcggggtgagactgtgtcagagatacactgctggccacaagtgtcccctctcagtcccaccttttcgggctgtcccatgtctatctcaggggcccgttacctctctgcagcagtcccccatcccagccacaccagggtctgtccggccaaccctcttccccagggaaaggagaaaagagaaaacaggctgggcccggtggctcactcctgtaatcccagcactttgggaggttgaggtgggcggatcacctgaggtcaggagtttgagaccagcctggccaacgtggtgaaaccccatctctactaaaaaaaattacaaaaattagccgggagtggtggtgggcacctgtaatcccagttactcgggaggctgaggcaagagaatctcttgagctcaggaggcagaggttgcagtgagctgagattgcgccactgcactccagcctgggtgacagagggagactccgtcccaaaaaaaagaaaagagaaacagctgtcacctcccgcaggacccaaatcctctctctgagcaccgtcatccaccacatggctgggcctggctcccaggaccagtccagtcctctagtgccttatctgaggctgcagccgccagtctccaccccaaggagacagcccctgctcctagatgcccttggcctccgcagtgcagcccccaggtgtcctgactgaagcacaggccatagccccatttccccggtgcctgcagggctaacctccacgggagcccaggagctctggccggcaggtccatggcacagggcatcggaagactgcaaaactgctggacttaccctgggctgcagtccattgtcrgcccctgggttgaatcaagatagtacttgcagctagatggatgcttttagccaggggacattgtgasgggaagattcctccacccagtctggcctgtggtgtctgtctcctcc

SEQ ID NO: 389 - DNA, 4162 bp, Homo sapiens
cctggattagggctgaatctgtgggaaccagaccacccctgagacaggaggcagccctgatgcctctccagggcctgggcctgcagcggaaccccttcctccaagggaagcggggcccggggctcacgtcttccccrcccctcctgcctccttccctgcaggtgaacttccacagcccccggagtggccagaggtgctgggctgcacggacccaggtggagaagcggctggtggtgttggtggtacttctggcggcaggactggtggcctgcttggcagcactgggcatccagtaccagacaagatccccctctgtgtgcctgagcgaagcttgtgtctcagtgaccagctccatcttgagctccatggaccccacagtggacccctgccatgacttcttcagctacgcctgtgggggctggatcaaggccaacccagtccctgatggccactcacgctgggggaccttcagcaacctctgggaacacaaccaagcaatcatcaagcacctcctcgaaaactccacrgccagcgtgagcgaggcagagagaaaggcgcaagtatactaccgtgcgtgcatgaacgagaccaggatcgaggagctcagggccaaacctctaatggagttgattgagaggctcgggggctggaacatcacaggtccctgggccaaggacaacttccaggacaccctgcaggtggtcaccgcccactaccgcacctcacccttcttctctgtctatgtcagtgccgattccaagaactccaacagcaacgtgatccaggtggaccagtctggcctgggcttgccctcgagagactattacctgaacaaaactgaaaacgagaaggtgctgaccggatatctgaactacatggtccagctggggaarctgctkggcggcggggacgaggaggccatccggccccagatgcagcagatcttggactttgagacggcaytggccaacatcaccatcccacaggagaagcgccgtgatgaggagctcatctaccacaaagtgacggcagccgagctgcagaycttggcacccgccatcaactggttgccttttctcaacaccatcttctaccccgtggagatcaatgaatccgagcctattgtggtctatgacaaggaataccttgagcagatctccactctcatcaacaccacygacagatgcctgctcaacaactacatgatctggaacctggtgcggaaaacaagctccttccttgaccagcgctttcaggacgccgatgagaagttcatggaagtcatgtacgggaccaagaagacctgtcttcctcgctggaagttttgcgtgagtgacacagaaaacaacctgggctttgcgttgggccccatgtttgtcaaagcaaccttcgccgaggacagcaagagcatagccaccgagatcatcctggagattaagaaggcatttgaggaaagcctgagcaccctgaagtggatggatgaggaaacccgaaaatcagccaaggaaaaggccgatgccatctacaacatgataggataccccaacttcatcatggatcccaaggagctggacaaagtgtttaatgactacactgcagttccagacctctactttgaaaatgccatgcggtttttcaacttctcatggagggtcactgccgaycagctcaggaaagcccccaacagagatcagtggagcatgaccccgcccatggtgaacgcctactactcgcccaccaagaatgagattgtgtttccggccgggatccwgcaggcaccattctacacacgctcctcacccaaggccttaaactttggtggcataggtgtcgtcgtgggccatgagctgactcatgcttttgatgatcaaggacgggagtatgacaaggacgggaacctccggccatggtggaagaactcatccgtggaggccttcaagcgtcagaccgagtgcatggtagagcagtacagcaactacagcgtgaacggggagccggtgaacgggcggcacaccctgggggagaacatcgccgacaacgggggtctcaaggcggcctatcgggcttaccagaactgggtgaagaagaacggggctgagcactcgctccccaccctgggcctcaccaataaccagctcttcttcctgggctttgcacaggtctggtgctccgtccgcacacctgagagctcccacgaaggcctcatcaccgatccccacagcccctctcgcttccgggtcatcggctccctctccaattccaaggagttctcagaacacttcygctgcccacctggctcacccatgaacccgcctcacaagtgcgaagtctggtaaggacgaagcggagagagccaagacggaggaggggaaggggctgaggacgagacccccatccagcctccagggcattgctcagcccgcttggmcacccggggccctgcttcctcacactggcgggttttcagccrgaaccgagcccatggtgttggctctcaacgtgacccgcagtctgatcccctgtgaagagccggacatcccaggcacacgtgtgcgccaccttcagcaggcattcgggtgctgggctggtggctcatcaggcctgggccccacactgacaagcgccagatacgccacaaataccactgtgtcaaatgctttcaagatayatttttggggaaactattttttaaacactgtggaatacactggaaatcttcagggaaaaacacatttaaacacttttttttttaaggaaagaattggtatatttattatgttctgtttttctaaataacctgtggacaagggaagccccactgatttactccctctcttccccactccctgtgaggctgggctgaggcacggatccctgggccacagagcaagtctccaaatcagacagctgcctcagcccctgggatgtgtgatttcagctcctgtcacctcatgcaagggcgtggagaccagtagaggtgtggaggccaggcagagagaggagccygctctgcggggggcccagctcatgggcactgccccttcagctagsctgcctccgtcccctgagtccaacagtgggagccctagctgggaagttctgatccccaaagccacagcaggggactgatggctatagcagaatgaggtcgggtcaggaccctcaaacaccatctgggaacaccaagcaccctgaatcgagrctgcaggagccctgcggggtgagactgtgtcagagatacactgctggccacaagtgtcccctctcagtcccaccttttcgggctgtcccatgtctatctcaggggcccgttacctctctgcagcagtcccccatcccagccacaccagggtctgtccggccaaccctcttccccagggaaaggagaaaagagaaaacaggctgggcccggtggctcactcctgtaatcccagcactttgggaggttgaggtgggcggatcacctgaggtcaggagtttgagaccagcctggccaacgtggtgaaaccccatctctactaaaaaaaattacaaaaattagccgggagtggtggtgggcacctgtaatcccagttactcgggaggctgaggcaagagaatctcttgagctcaggaggcagaggttgcagtgagctgagattgcgccactgcactccagcctgggtgacagagggagactccgtcccaaaaaaaagaaaagagaaacagctgtcacctcccgcaggacccaaatcctctctctgagcaccgtcatccaccacatggctgggcctggctcccaggaccagtccagtcctctagtgccttatctgaggctgcagccgccagtctccaccccaaggagacagcccctgctcctagatgcccttggcctccgcagtgcagcccccaggtgtcctgactgaagcacaggccatagccccatttccccggtgcctgcagggctaacctccacgggagcccaggagctctggccggcaggtccatggcacagggcatcggaagactgcaaaactgctggacttaccctgggctgcagtccattgtcrgcccctgggttgaatcaagatagtacttgcagctagatggatgcttttagccaggggacattgtgasgggaagattcctccacccagtctggcctgtggtgtctgtctcctcc

SEQ ID NO: 390 - DNA, 3169 bp, Homo sapiens
gccgagcttggttctggtcccagccggatgtggggggctcggggtccccggttcgctttggggacggttgctgcggtctgttttgggttgttctgaagtccctggactcagcttggcttggagacccagggcagccgggctgggtcgggctcgcgggtggcggcgatttcgaggtgcctggatgcagctggacctgagcgtcccgggacactgagcatgcggggcgtgtggccgcccccggtgtccgccctgctgtcggcgctggggatgtcgacgtacaagcgggccacgctggacgaggaggacctggtggactcgctctccgagggcgacgcataccccaacggcctgcaggtgaacttccacagcccccggagtggccagaggtgctgggctgcacggacccaggtggagaagcggctggtggtgttggtggtacttctggcggcaggactggtggcctgcttggcagcactgggcatccagtaccagacaagatccccctctgtgtgcctgagcgaagcttgtgtctcagtgaccagctccatcttgagctccatggaccccacagtggacccctgccatgacttcttcagctacgcctgtgggggctggatcaaggccaacccagtccctgatggccactcacgctgggggaccttcagcaacctctgggaacacaaccaagcaatcatcaagcacctcctcgaaaactccacrgccagcgtgagcgaggcagagagaaaggcgcaagtatactaccgtgcgtgcatgaacgagaccaggatcgaggagctcagggccaaacctctaatggagttgattgagaggctcgggggctggaacatcacaggtccctgggccaaggacaacttccaggacaccctgcaggtggtcaccgcccactaccgcacctcacccttcttctctgtctatgtcagtgccgattccaagaactccaacagcaacgtgatccaggtggaccagtctggcctgggcttgccctcgagagactattacctgaacaaaactgaaaacgagaaggtgctgaccggatatctgaactacatggtccagctggggaarctgctkggcggcggggacgaggaggccatccggccccagatgcagcagatcttggactttgagacggcaytggccaacatcaccatcccacaggagaagcgccgtgatgaggagctcatctaccacaaagtgacggcagccgagctgcagaycttggcacccgccatcaactggttgccttttctcaacaccatcttctaccccgtggagatcaatgaatccgagcctattgtggtctatgacaaggaataccttgagcagatctccactctcatcaacaccacygacagatgcctgctcaacaactacatgatctggaacctggtgcggaaaacaagctccttccttgaccagcgctttcaggacgccgatgagaagttcatggaagtcatgtacgggaccaagaagacctgtcttcctcgctggaagttttgcgtgagtgacacagaaaacaacctgggctttgcgttgggccccatgtttgtcaaagcaaccttcgccgaggacagcaagagcatagccaccgagatcatcctggagattaagaaggcatttgaggaaagcctgagcaccctgaagtggatggatgaggaaacccgaaaatcagccaaggaaaaggccgatgccatctacaacatgataggataccccaacttcatcatggatcccaaggagctggacaaagtgtttaatgactacactgcagttccagacctctactttgaaaatgccatgcggtttttcaacttctcatggagggtcactgccgaycagctcaggaaagcccccaacagagatcagtggagcatgaccccgcccatggtgaacgcctactactcgcccaccaagaatgagattgtgtttccggccgggatccwgcaggcaccattctacacacgctcctcacccaaggccttaaactttggtggcataggtgtcgtcgtgggccatgagctgactcatgcttttgatgatcaaggacgggagtatgacaaggacgggaacctccggccatggtggaagaactcatccgtggaggccttcaagcgtcagaccgagtgcatggtagagcagtacagcaactacagcgtgaacggggagccggtgaacgggcggcacaccctgggggagaacatcgccgacaacgggggtctcaaggcggcctatcgggcttaccagaactgggtgaagaagaacggggctgagcactcgctccccaccctgggcctcaccaataaccagctcttcttcctgggctttgcacaggtctggtgctccgtccgcacacctgagagctcccacgaaggcctcatcaccgatccccacagcccctctcgcttccgggtcatcggctccctctccaattccaaggagttctcagaacacttcygctgcccacctggctcacccatgaacccgcctcacaagtgcgaagtctggtaaggacgaagcggagagagccaagacggaggaggggaaggggctgaggacgagacccccatccagcctccagggcattgctcagcccgcttggmcacccggggccctgcttcctcacactggcgggttttcagccrgaaccgagcccatggtgttggctctcaacgtgacccgcagtctgatcccctgtgaagagccggacatcccaggcacacgtgtgcgccaccttcagcaggcattcgggtgctgggctggtggctcatcaggcctgggccccacactgacaagcgccagatacgccacaaataccactgtgtcaaatgctttcaagatayatttttggggaaactattttttaaacactgtggaatacactggaaatcttcagggaaaaacacatttaaacacttttttttttaaggaaagaattggtatatttattatgttctgtttttctaaataacctgaagcccctgccactgccactacccgctccagagctttaaggaaaatgaagtgagacccctccccttaggcctggggagccatagggctggcttctctgtgggtgcgtggacgtggggttgggagctgggartctattttttgtattatgttttgagctactgtagttttggcgtgg

SEQ ID NO: 391 - DNA, 4389 bp, Homo sapiens
gagcgcgccgcctgggccaggcagccgagccgtccgagcagctgggctgggagcmgggaacccggagctgsgaatcgggagccgggcgcggggagctgcgcgaagccggggcggagcacgcgagctatgcatgcggggcgtgtggccgcccccggtgtccgccctgctgtcggcgctggggatgtcgacgtacaagcgggccacgctggacgaggaggacctggtggactcgctctccgagggcgacgcataccccaacggcctgcaggtgaacttccacagcccccggagtggccagaggtgctgggctgcacggacccaggtggagaagcggctggtggtgttggtggtacttctggcggcaggactggtggcctgcttggcagcactgggcatccagtaccagacaagatccccctctgtgtgcctgagcgaagcttgtgtctcagtgaccagctccatcttgagctccatggaccccacagtggacccctgccatgacttcttcagctacgcctgtgggggctggatcaaggccaacccagtccctgatggccactcacgctgggggaccttcagcaacctctgggaacacaaccaagcaatcatcaagcacctcctcgaaaactccacrgccagcgtgagcgaggcagagagaaaggcgcaagtatactaccgtgcgtgcatgaacgagaccaggatcgaggagctcagggccaaacctctaatggagttgattgagaggctcgggggctggaacatcacaggtccctgggccaaggacaacttccaggacaccctgcaggtggtcaccgcccactaccgcacctcacccttcttctctgtctatgtcagtgccgattccaagaactccaacagcaacgtgatccaggtggaccagtctggcctgggcttgccctcgagagactattacctgaacaaaactgaaaacgagaaggtgctgaccggatatctgaactacatggtccagctggggaarctgctkggcggcggggacgaggaggccatccggccccagatgcagcagatcttggactttgagacggcaytggccaacatcaccatcccacaggagaagcgccgtgatgaggagctcatctaccacaaagtgacggcagccgagctgcagaycttggcacccgccatcaactggttgccttttctcaacaccatcttctaccccgtggagatcaatgaatccgagcctattgtggtctatgacaaggaataccttgagcagatctccactctcatcaacaccacygacagatgcctgctcaacaactacatgatctggaacctggtgcggaaaacaagctccttccttgaccagcgctttcaggacgccgatgagaagttcatggaagtcatgtacgggaccaagaagacctgtcttcctcgctggaagttttgcgtgagtgacacagaaaacaacctgggctttgcgttgggccccatgtttgtcaaagcaaccttcgccgaggacagcaagagcatagccaccgagatcatcctggagattaagaaggcatttgaggaaagcctgagcaccctgaagtggatggatgaggaaacccgaaaatcagccaaggaaaaggccgatgccatctacaacatgataggataccccaacttcatcatggatcccaaggagctggacaaagtgtttaatgactacactgcagttccagacctctactttgaaaatgccatgcggtttttcaacttctcatggagggtcactgccgaycagctcaggaaagcccccaacagagatcagtggagcatgaccccgcccatggtgaacgcctactactcgcccaccaagaatgagattgtgtttccggccgggatccwgcaggcaccattctacacacgctcctcacccaaggccttaaactttggtggcataggtgtcgtcgtgggccatgagctgactcatgcttttgatgatcaaggacgggagtatgacaaggacgggaacctccggccatggtggaagaactcatccgtggaggccttcaagcgtcagaccgagtgcatggtagagcagtacagcaactacagcgtgaacggggagccggtgaacgggcggcacaccctgggggagaacatcgccgacaacgggggtctcaaggcggcctatcgggcttaccagaactgggtgaagaagaacggggctgagcactcgctccccaccctgggcctcaccaataaccagctcttcttcctgggctttgcacaggtctggtgctccgtccgcacacctgagagctcccacgaaggcctcatcaccgatccccacagcccctctcgcttccgggtcatcggctccctctccaattccaaggagttctcagaacacttcygctgcccacctggctcacccatgaacccgcctcacaagtgcgaagtctggtaaggacgaagcggagagagccaagacggaggaggggaaggggctgaggacgagacccccatccagcctccagggcattgctcagcccgcttggmcacccggggccctgcttcctcacactggcgggttttcagccrgaaccgagcccatggtgttggctctcaacgtgacccgcagtctgatcccctgtgaagagccggacatcccaggcacacgtgtgcgccaccttcagcaggcattcgggtgctgggctggtggctcatcaggcctgggccccacactgacaagcgccagatacgccacaaataccactgtgtcaaatgctttcaagatayatttttggggaaactattttttaaacactgtggaatacactggaaatcttcagggaaaaacacatttaaacacttttttttttaaggaaagaattggtatatttattatgttctgtttttctaaataacctgtggacaagggaagccccactgatttactccctctcttccccactccctgtgaggctgggctgaggcacggatccctgggccacagagcaagtctccaaatcagacagctgcctcagcccctgggatgtgtgatttcagctcctgtcacctcatgcaagggcgtggagaccagtagaggtgtggaggccaggcagagagaggagccygctctgcggggggcccagctcatgggcactgccccttcagctagsctgcctccgtcccctgagtccaacagtgggagccctagctgggaagttctgatccccaaagccacagcaggggactgatggctatagcagaatgaggtcgggtcaggaccctcaaacaccatctgggaacaccaagcaccctgaatcgagrctgcaggagccctgcggggtgagactgtgtcagagatacactgctggccacaagtgtcccctctcagtcccaccttttcgggctgtcccatgtctatctcaggggcccgttacctctctgcagcagtcccccatcccagccacaccagggtctgtccggccaaccctcttccccagggaaaggagaaaagagttgaggtgggcggatcacctgaggtcaggagtttgagaccagcctggccaacgtggtgaaaccccatctctactaaaaaaaattacaaaaattagccgggagtggtggtgggcacctgtaatcccagttactcgggaggctgaggcaagagaatctcttgagctcaggaggcagaggttgcagtgagctgagattgcgccactgcactccagcctgggtgacagagggagactccgtcccaaaaaaaagaaaagagaaacagctgtcacctcccgcaggacccaaatcctctctctgagcaccgtcatccaccacatggctgggcctggctcccaggaccagtccagtcctctagtgccttatctgaggctgcagccgccagtctccaccccaaggagacagcccctgctcctagatgcccttggcctccgcagtgcagcccccaggtgtcctgactgaagcacaggccatagccccatttccccggtgcctgcagggctaacctccacgggagcccaggagctctggccggcaggtccatggcacagggcatcggaagactgcaaaactgctggacttaccctgggctgcagtccattgtcrgcccctgggttgaatcaagatagtacttgcagctagatggatgcttttagccaggggacattgtgasgggaagattcctccacccagtctggcctgtggtgtctgtctcctccctggaatcctcctgcccgagaggaagcagacggcacagggacacccctgccaccttgggatctgcctccaagctggtgcagggtatcgagagtggattccagatggaggtcctggtcccagcacgcagcagtcctggtagctctgcagaggagacaggaacccgagaagtag

SEQ ID NO: 392 - DNA, 4337 bp, Homo sapiens
gagcgcgccgcctgggccaggcagccgagccgtccgagcagctgggctgggagcmgggaacccggagctgsgaatcgggagccgggcgcggggagctgcgcgaagccggggcggagcacgcgagctatgatgtcgacgtacaagcgggccacgctggacgaggaggacctggtggactcgctctccgagggcgacgcataccccaacggcctgcaggtgaacttccacagcccccggagtggccagaggtgctgggctgcacggacccaggtggagaagcggctggtggtgttggtggtacttctggcggcaggactggtggcctgcttggcagcactgggcatccagtaccagacaagatccccctctgtgtgcctgagcgaagcttgtgtctcagtgaccagctccatcttgagctccatggaccccacagtggacccctgccatgacttcttcagctacgcctgtgggggctggatcaaggccaacccagtccctgatggccactcacgctgggggaccttcagcaacctctgggaacacaaccaagcaatcatcaagcacctcctcgaaaactccacrgccagcgtgagcgaggcagagagaaaggcgcaagtatactaccgtgcgtgcatgaacgagaccaggatcgaggagctcagggccaaacctctaatggagttgattgagaggctcgggggctggaacatcacaggtccctgggccaaggacaacttccaggacaccctgcaggtggtcaccgcccactaccgcacctcacccttcttctctgtctatgtcagtgccgattccaagaactccaacagcaacgtgatccaggtggaccagtctggcctgggcttgccctcgagagactattacctgaacaaaactgaaaacgagaaggtgctgaccggatatctgaactacatggtccagctggggaarctgctkggcggcggggacgaggaggccatccggccccagatgcagcagatcttggactttgagacggcaytggccaacatcaccatcccacaggagaagcgccgtgatgaggagctcatctaccacaaagtgacggcagccgagctgcagaycttggcacccgccatcaactggttgccttttctcaacaccatcttctaccccgtggagatcaatgaatccgagcctattgtggtctatgacaaggaataccttgagcagatctccactctcatcaacaccacygacagatgcctgctcaacaactacatgatctggaacctggtgcggaaaacaagctccttccttgaccagcgctttcaggacgccgatgagaagttcatggaagtcatgtacgggaccaagaagacctgtcttcctcgctggaagttttgcgtgagtgacacagaaaacaacctgggctttgcgttgggccccatgtttgtcaaagcaaccttcgccgaggacagcaagagcatagccaccgagatcatcctggagattaagaaggcatttgaggaaagcctgagcaccctgaagtggatggatgaggaaacccgaaaatcagccaaggaaaaggccgatgccatctacaacatgataggataccccaacttcatcatggatcccaaggagctggacaaagtgtttaatgactacactgcagttccagacctctactttgaaaatgccatgcggtttttcaacttctcatggagggtcactgccgaycagctcaggaaagcccccaacagagatcagtggagcatgaccccgcccatggtgaacgcctactactcgcccaccaagaatgagattgtgtttccggccgggatccwgcaggcaccattctacacacgctcctcacccaaggccttaaactttggtggcataggtgtcgtcgtgggccatgagctgactcatgcttttgatgatcaaggacgggagtatgacaaggacgggaacctccggccatggtggaagaactcatccgtggaggccttcaagcgtcagaccgagtgcatggtagagcagtacagcaactacagcgtgaacggggagccggtgaacgggcggcacaccctgggggagaacatcgccgacaacgggggtctcaaggcggcctatcgggcttaccagaactgggtgaagaagaacggggctgagcactcgctccccaccctgggcctcaccaataaccagctcttcttcctgggctttgcacaggtctggtgctccgtccgcacacctgagagctcccacgaaggcctcatcaccgatccccacagcccctctcgcttccgggtcatcggctccctctccaattccaaggagttctcagaacacttcygctgcccacctggctcacccatgaacccgcctcacaagtgcgaagtctggtaaggacgaagcggagagagccaagacggaggaggggaaggggctgaggacgagacccccatccagcctccagggcattgctcagcccgcttggmcacccggggccctgcttcctcacactggcgggttttcagccrgaaccgagcccatggtgttggctctcaacgtgacccgcagtctgatcccctgtgaagagccggacatcccaggcacacgtgtgcgccaccttcagcaggcattcgggtgctgggctggtggctcatcaggcctgggccccacactgacaagcgccagatacgccacaaataccactgtgtcaaatgctttcaagatayatttttggggaaactattttttaaacactgtggaatacactggaaatcttcagggaaaaacacatttaaacacttttttttttaaggaaagaattggtatatttattatgttctgtttttctaaataacctgtggacaagggaagccccactgatttactccctctcttccccactccctgtgaggctgggctgaggcacggatccctgggccacagagcaagtctccaaatcagacagctgcctcagcccctgggatgtgtgatttcagctcctgtcacctcatgcaagggcgtggagaccagtagaggtgtggaggccaggcagagagaggagccygctctgcggggggcccagctcatgggcactgccccttcagctagsctgcctccgtcccctgagtccaacagtgggagccctagctgggaagttctgatccccaaagccacagcaggggactgatggctatagcagaatgaggtcgggtcaggaccctcaaacaccatctgggaacaccaagcaccctgaatcgagrctgcaggagccctgcggggtgagactgtgtcagagatacactgctggccacaagtgtcccctctcagtcccaccttttcgggctgtcccatgtctatctcaggggcccgttacctctctgcagcagtcccccatcccagccacaccagggtctgtccggccaaccctcttccccagggaaaggagaaaagagttgaggtgggcggatcacctgaggtcaggagtttgagaccagcctggccaacgtggtgaaaccccatctctactaaaaaaaattacaaaaattagccgggagtggtggtgggcacctgtaatcccagttactcgggaggctgaggcaagagaatctcttgagctcaggaggcagaggttgcagtgagctgagattgcgccactgcactccagcctgggtgacagagggagactccgtcccaaaaaaaagaaaagagaaacagctgtcacctcccgcaggacccaaatcctctctctgagcaccgtcatccaccacatggctgggcctggctcccaggaccagtccagtcctctagtgccttatctgaggctgcagccgccagtctccaccccaaggagacagcccctgctcctagatgcccttggcctccgcagtgcagcccccaggtgtcctgactgaagcacaggccatagccccatttccccggtgcctgcagggctaacctccacgggagcccaggagctctggccggcaggtccatggcacagggcatcggaagactgcaaaactgctggacttaccctgggctgcagtccattgtcrgcccctgggttgaatcaagatagtacttgcagctagatggatgcttttagccaggggacattgtgasgggaagattcctccacccagtctggcctgtggtgtctgtctcctccctggaatcctcctgcccgagaggaagcagacggcacagggacacccctgccaccttgggatctgcctccaagctggtgcagggtatcgagagtggattccagatggaggtcctggtcccagcacgcagcagtcctggtagctctgcagaggagacaggaacccgagaagtag

SEQ ID NO: 393 - DNA, 1895 bp, Homo sapiens
ccctccccagccattgggctgtttgcctccatggctgcggtgctcctaggtggggcccgggcatccaggttgctcttccagaggctcctgtgggatgtggtgygatctcccatcagcttctttgagcggacacccattggtcacctgctaaaccgcttctccaaggagacagacacggttgacgtggacattccagacaaactccggtccctgctgatgtacgcctttggactcctggaggtcagcctggtggtggcagtggctaccccactggccactgtggccatcctgccactgtttctcmtctacgctgggtttcaggtggcttgcggccaatgtggagctcctggggaatggcctggtgtttgcagctgccacgtgtgctgtgctgagcaaagcccacctcagtgctggcctcgtgggcttctctgtctctgctgccctccaggtgacccagacactgcagtgggttgttcgcaactggacagacctagagaacagcatcgtgtcagtggagcggatgcaggactatgcctggacgcccaaggaggctccctggaggctgcccacatgtgcagctcagcccccctggcctcagggcgggcagatcgagttccrggactttgggctaagataccgacctgagctcccgctggctgtgcagggcgtgtccttcaagatccacrcaggagagaaggtgggcatckttggcaggaycrgggcagggaagtcctccctggccagtgggctgctgyrgctccaggaggcagctgagrgtgggatctggatcgacggggtccccattgcccacgtggggctgcacacactgcgctccaggatcagcatcatcccccasgaccccatcctgttccctsgctctctgcggatgaacctcracctgctgcaggagcactcggacgaggctatctgggcagccctggagacggtgcagctcaaagccttggtggccagcctgcccggccagctgcagtacaagtgtgctgacygaggcgaggacctgagcgtgggccagaaacagctcctgtgtctggcacgtgcccttctccgraagacccagatcctcaycctggacgaggctactgctgccgtggaccctggcacggagctgcagatgcaggccatgctcgggagctggtttgcacagtgcactgtgctgctcattgcccaccgcctgcgctccgtgatggactgtgcccgggttctggtcatggacaaggggcaggtggcagagagcggcagcccggcccagctgctggcccagaagggcctgttttacagactggcccaggagtcaggcctggtctgagccaggaccctcaaccrtaccccagttggaccagcccgcacagcctgcagtgctggagatggaagtgacccgtggtcatcgatagctccacacgatattgagtctagacctgtgtttgctctctgggaggaaaatggcagagaaagtggccaattatcacagagcatcagagccggaaggacctagcaatacacaggtctgcccgggcagggcccatctcgccctgtccaccctgcagccaatgtcaacagcgactctcagccccgctgtactctggactcacctgggggcctcaagcacatgcccaggctcccrgctagacccttaaatcagaatctctgaggctgggaactgccatgctgtgtgtactttttacaaattaacacttttattttgggataatcccagactcacatgcagttaaagaaacaataatatagagagattcgtgtacttggtaccccatttcacccaatggtaacatcttgcaaaactctaggataaagcatcacagccagggtgttgacattgacacaacaatcttgctcgatttcccgttttacctgta

SEQ ID NO: 394 - DNA, 3910 bp, Homo sapiens
cgccaggtcctggctctgtccagcggctccagaaaggccagtgcggtgggtgatgtggtcaakctggtgtccgtagacgtgcagcggctgaccgagagcgtcctctacctcaacgggctgtggctgcctctcgtctggatcgtggtctgcttcgtctatctctggcagctcctrgggccctcygccctcactgccatcgctgtcttcctgagcctcctccctctgaatttcttcatctccaagaaaaggaaccaccatcaggaggagcaaatgaggcagaaggactcacgggcacggctcaccagctctatcctcaggaactcgaagaccatcaagttccatggctgggagggagcctttctggacagartcctgggcatcyraggccaggagctgggcgccttgcggacctccggcctcctcttctctgtgtcgctggtgtccttccaagtgtctacatttctggtcgcactggtggtgtttgctgtccacactctggtggccgagaatgctatgaatgcagagaaagcctytgtgactctcacagttctcaacatcctcaacaaggcccaggctttcctgcccttctccatccactccctcgtccaggcccgggtgtcctttgaccgtctggtcaccttcctctgcctggaagaagttgaccctggtgycgtagactcaagttcctctggaagcgctgccgggaaggattgcatcacsatacamagtgccaccttcgcctggtcccaggaaagccctccctgcctccacagaataaacctcacggtgccccagggctgtctgctggctgttgtcggtccagygggggcagggaagtcctccctgcygtccgccctccttggggagctgtcaaaggtggaggggttcgtgagcatygagggtgctgtggcctacgtgccccaggaggcctgggtgcagaacacctctgtggtagagaatgtgtgcttcgggcaggagctggacccaccctggctggagaragtwctagaagcctgtgccctgcagccagatgtggacagcttccctgagggartccacacttcaattggggagcagggcatgaatctctccggaggccagaagcagcggctgagcctggcccrggctgtatamagaaaggcagctgtgtacctgctggatgaccccctggcggccctggatgcccacgttggccagcatgtcttcaaccaggtcattgggcctggtggrctactccagggaacaacacggattctcgtgacgcacgcactccacatcctgccccaggctgattggatcatagtgctggcaaatggggcyatcgcagagatgggttcctaccaggagcttctgcagaggaagggggccctcrtgtgtcttctggatcaagccagacagccaggagatagaggagaaggagaaacagaacctgggaccagcaccaaggaccccagaggcacctctgcaggcaggaggcccgagcttagacgcgagaggtccatcaagtcagtccctgagaaggacygtaccacttcagaagcccagacagaggttcctctggatgaccctgacagggcaggatggccagcaggaaaggacagcatccaatayggcagggtgaaggccacagtgcacctggcctacctgcgtgccgtgggcaccccyctctgcctctacgcactcttcctcttcctctgccagcaagtggcctccttctgccggggctactggctgagcctgtgggcggacgaccctgcagtaggtgggcagcagacgcaggcagccctgcgtggcgggatcttcgggctcctcggctgtctccaagccattgggctgtttgcctccatggctgcggtgctcctaggtggggcccgggcatccaggttgctcttccagaggctcctgtgggatgtggtgygatctcccatcagcttctttgagcggacacccattggtcacctgctaaaccgcttctccaaggagacagacacggttgacgtggacattccagacaaactccggtccctgctgatgtacgcctttggactcctggaggtcagcctggtggtggcagtggctaccccactggccactgtggccatcctgccactgtttctcmtctacgctgggtttcagagcctgtatgtggttagctcatgccagctgagacgcttggagtcagccagctactsgtctgtctgctcccacatggctgagaygttccagggcagcacagtggtcyvggcattcygaacccaggccccctttgtggctcagaacaatgctcgcgtagatgaaagccagaggatcagtttcccgygactggtggctgacaggtggcttgcggccaatgtggagctcctggggaatggcctggtgtttgcagctgccacgtgtgctgtgctgagcaaagcccacctcagtgctggcctcgtgggcttctctgtctctgctgccctccaggtgacccagacactgcagtgggttgttcgcaactggacagacctagagaacagcatcgtgtcagtggagcggatgcaggactatgcctggacgcccaaggaggctccctggaggctgcccacatgtgcagctcagcccccctggcctcagggcgggcagatcgagttccrggactttgggctaagataccgacctgagctcccgctggctgtgcagggcgtgtccttcaagatccacrcaggagagaaggtgggcatckttggcaggaycrgggcagggaagtcctccctggccagtgggctgctgyrgctccaggaggcagctgagrgtgggatctggatcgacggggtccccattgcccacgtggggctgcacacactgcgctccaggatcagcatcatcccccasgaccccatcctgttccctsgctctctgcggatgaacctcracctgctgcaggagcactcggacgaggctatctgggcagccctggagacggtgcagctcaaagccttggtggccagcctgcccggccagctgcagtacaagtgtgctgacygaggcgaggacctgagcgtgggccagaaacagctcctgtgtctggcacgtgcccttctccgraagacccagatcctcaycctggacgaggctactgctgccgtggaccctggcacggagctgcagatgcaggccatgctcgggagctggtttgcacagtgcactgtgctgctcattgcccaccgcctgcgctccgtgatggactgtgcccgggttctggtcatggacaaggggcaggtggcagagagcggcagcccggcccagctgctggcccagaagggcctgttttacagactggcccaggagtcaggcctggtctgagccaggaccctcaaccrtaccccagttggaccagcccgcacagcctgcagtgctggagatggaagtgacccgtggtcatcgatagctccacacgatattgagtctagacctgtgtttgctctctgggaggaaaatggcagagaaagtggccaattatcacagagcatcagagccggaaggacctagcaatacacaggtctgcccgggcagggcccatctcgccctgtccaccctgcagccaatgtcaacagcgactctcagccccgctgtactctggactcacctgggggcctcaagcacatgcccaggctcccrgctagacccttaaatcagaatctctgaggctgggaactgccatgctgtgtgtactttttacaaattaacacttttattttgggataatcccagactcacatgcagttaaagaaacaataatatagagagattcgtgtacttggtaccccatttcacccaatggtaacatcttgcaaaactctaggataaagcatcacagccagggtgttgacattgacacaacaatcttgctcgatttcccgttttacctgta

SEQ ID NO: 395 - DNA, 1500 bp, Homo sapiens
cgccaggtcctggctctgtccagcggctccagaaaggccagtgcggtgggtgatgtggtcaakctggtgtccgtagacgtgcagcggctgaccgagagcgtcctctacctcaacgggctgtggctgcctctcgtctggatcgtggtctgcttcgtctatctctggcagctcctrgggccctcygccctcactgccatcgctgtcttcctgagcctcctccctctgaatttcttcatctccaagaaaaggaaccaccatcaggaggagcaaatgaggcagaaggactcacgggcacggctcaccagctctatcctcaggaactcgaagaccatcaagttccatggctgggagggagcctttctggacagartcctgggcatcyraggccaggagctgggcgccttgcggacctccggcctcctcttctctgtgtcgctggtgtccttccaagtgtctacatttctggtcgcactggtggtgtttgctgtccacactctggtggccgagaatgctatgaatgcagagaaagcctytgtgactctcacagttctcaacatcctcaacaaggcccaggctttcctgcccttctccatccactccctcgtccaggcccgggtgtcctttgaccgtctggtcaccttcctctgcctggaagaagttgaccctggtgycgtagactcaagttcctctggaagcgctgccgggaaggattgcatcacsatacamagtgccaccttcgcctggtcccaggaaagccctccctgcctccacagaataaacctcacggtgccccagggctgtctgctggctgttgtcggtccagygggggcagggaagtcctccctgcygtccgccctccttggggagctgtcaaaggtggaggggttcgtgagcatygagggtgctgtggcctacgtgccccaggaggcctgggtgcagaacacctctgtggtagagaatgtgtgcttcgggcaggagctggacccaccctggctggagaragtwctagaagcctgtgccctgcagccagatgtggacagcttccctgagggartccacacttcaattggggagcagggcatgaatctctccggaggccagaagcagcggctgagcctggcccrggctgtatamagaaaggcagctgtgtacctgctggatgaccccctggcggccctggatgcccacgttggccagcatgtcttcaaccaggtcattgggcctggtggrctactccagggaacaacacggattctcgtgacgcacgcactccacatcctgccccaggctgattggatcatagtgctggcaaatggggcyatcgcagagatgggttcctaccaggagcttctgcagaggaagggggccctcrtgtgtcttctggatcaagccagacagccaggagatagaggagaaggaggtactaggtgggctttgctgattctccaggcctggctcctgccacccttgggggaaaaggctcgaagggtcctactggca

SEQ ID NO: 396 - DNA, 3201 bp, Homo sapiens
agccgcctctgccgccgccgccgcgttggcctcgccgcccctgctcggacaccatgccacaaggagagtgatctcttcccctgttttcacaatggaggactccggaaagactttcagctccgaggaggaagaagctaactattggaaagatctggcgatgacctacaaacagagggcagaaaatacgcaagaggaactccgagaattccaggagggaagccgagaatatgaagctgaattggagacgcagctgcaacaaattgaaaccaggaacagagacctcctgtccgaaaataaccgccttcgcatggagctggaaaccatcaaggagaagtttgaagtgcagcactctgaaggctaccggcagatctcagccttggaggatgacctcgcgcagaccaaagccattaaagaccaattgcagaaatacatcagagagctggagcaagcaaatgacgacctggaaagagccaagcgcgccacgatcatgtctctcgaagactttgagcagcgcttgaatcaggccatcgaaagaaatgccttcctggaaagtgaacttgatgaaaaagagaatctcctggaatctgttcagagactgaaggatgaagccagagatttgcggcaggaactggccgtgcagcagaagcaggagaaacccaggacccccatgcccagctcagtggaagctgagaggacagacacagctgtgcaggccacgggctccgtgccgtccacgcccattgctcaccgaggacccagctcaagtttaaacacacctgggagcttcagacgtggcctggacgactccaccggggggacccccctcacacctgcrgcccggatatcagccctcaacattgtgggagacctactgcggaaagtcggggcactggagtccaaactcgcttcctgccggaacctcgtgtaygatcagtccccaaaccgaacaggtggcccagcctctgggcggagcagcaagaacagagatggcggggagagacggccaagcagcaccagcgtgcctttgggtgataaggggttggacacgagttgccgctggttgtccaaatcaacaaccaggtcgtccagctcctgctgaagcctgttcttggtcttttccagtttatcatamgcggccgccttctcctcgtactgctgggtgaggttctcgatctccttctggaacctcttcttcccctcttccagagcttccacggtgctggcaaagtcctgcagcttcttcttcgagtcggagagctacaaggacagcgtccagggtagggtgagagggggaccatgartggcccctgtccctggccccacagactctgagaagsgaagaccatgtctcctcgttggagaaacccaatagcaggggaagctgrggggtcaagcaccatcgcaccaacactccaccgcgatctgcctgcgggggatctcagcgcagagaagttgagaggacccatgaaggaagcaaggacacggggcaggcacctggatgttgagagtggagatgtggcgctccaggttctgcttggcctccatctcctcgtccagctggtcttgcaggctgttccgctcctcctccagctggcgcagcttcgtagacacgttgagcttctgccgggtttcttcttgaagcarctcctgcaaaagggatgcaaagaggtcccagggacctgccccgaggaaggccaccccccaggtcccctggatgatgtggcaggacactcacctgggtgtcctggagctgggaactgagggacgccaygtccttggccagcttaatggccttcccctcggcctcgttaagcatccctgtgacgctctcaacttcattctaagggtgccaagagactggttagtcaaagcctctagaaggggatcctcgttgaaaggagccctttttactcaaaacacatgggctagtacttgaggtgttcactgattgagaaaataccsgtgaggtatgggactctgataaaaaaaaaaaaaaacacacacacacacamaaaaaacagaatctgtggcttgaagggaactccrtcacctatgagttgggaccctggccctagactctgtggttctaagaacttatttgagccccaatggtattgactgggacctgatcccactaaatggatcctagatccctgccaaggttggtagagacaaagcagcaggtctgagagtccagacgaggtgctctggctggtccactctctaaggctggagaagggagaccaggatggtacttgaacgtcccagggatgctgtcccatcccttccttcctcactcctactctttgaccctgatggccaaagccagagacgcaggccctaaaggtaaaaacgtcctctctgtattctctggcttttactccctagtgtctctgcataagtccctttgaggctgttagcctacccctccatctcttccattgacaaggaggatatgaatgatcttgacactgcttatatgagggcggcaaaagccctgctctcaactgcatgtgagaaaaaaacatctcacttaattcttccctcgccccttggtccctggctgtggacatgttaaacatttgtgaaaactttggccacgtccccatgagtggcaaggcagggtaaatggctatgccaagtgaaagaagaccaaagacaaaaagaccatgtcattcagcagcttaaaacccctcaacagcttcacattgcccagagtaaggatcaacatacatgtaataggttctcaaaagccctacatcatctgggtacaagctccccctccaaccccactctgtactatctccccctacccccaaccccagctgggcactccagctctactggctgtatgtctctctcctaatttttctacttaccacagggcctttgcacacgctgttccctctgcctggtagacttatccatgctccttagggaagcctttcgtggctcctcctcccccaggttaggccccctggttatttacacttgggcatcatgtgccttccctttgctgcatcatttgacattcatttgtgtgattattcatgtctttcccttcccttcccttccccttactcggctggagtcctactggggcagcgacagtgtctcttcttccttgctgttggatctcaggattaagcacagtgcctggcatacagcaggtgctcaataaatacttatcaaattggaaaa

SEQ ID NO: 397 - DNA, 3049 bp, Homo sapiens
agccgcctctgccgccgccgccgcgttggcctcgccgcccctgctcggacaccatgccacaaggagagtgatctcttcccctgttttcacaatggaggactccggaaagactttcagctccgaggaggaagaagctaactattggaaagatctggcgatgacctacaaacagagggcagaaaatacgcaagaggaactccgagaattccaggagggaagccgagaatatgaagctgaattggagacgcagctgcaacaaattgaaaccaggaacagagacctcctgtccgaaaataaccgccttcgcatggagctggaaaccatcaaggagaagtttgaagtgcagcactctgaaggctaccggcagatctcagccttggaggatgacctcgcgcagaccaaagccattaaagaccaattgcagaaatacatcagagagctggagcaagcaaatgacgacctggaaagagccaagcgcgccacgatcatgtctctcgaagactttgagcagcgcttgaatcaggccatcgaaagaaatgccttcctggaaagtgaacttgatgaaaaagagaatctcctggaatctgttcagagactgaaggatgaagccagagatttgcggcaggaactggccgtgcagcagaagcaggagaaacccaggacccccatgcccagctcagtggaagctgagaggacagacacagctgtgcaggccacgggctccgtgccgtccacgcccattgctcaccgaggacccagctcaagtttaaacacacctgggagcttcagacgtggcctggacgactccaccggggggacccccctcacacctgcrgcccggatatcagccctcaacattgtgggagacctactgcggaaagtcggggttggacacgagttgccgctggttgtccaaatcaacaaccaggtcgtccagctcctgctgaagcctgttcttggtcttttccagtttatcatamgcggccgccttctcctcgtactgctgggtgaggttctcgatctccttctggaacctcttcttcccctcttccagagcttccacggtgctggcaaagtcctgcagcttcttcttcgagtcggagagctacaaggacagcgtccagggtagggtgagagggggaccatgartggcccctgtccctggccccacagactctgagaagsgaagaccatgtctcctcgttggagaaacccaatagcaggggaagctgrggggtcaagcaccatcgcaccaacactccaccgcgatctgcctgcgggggatctcagcgcagagaagttgagaggacccatgaaggaagcaaggacacggggcaggcacctggatgttgagagtggagatgtggcgctccaggttctgcttggcctccatctcctcgtccagctggtcttgcaggctgttccgctcctcctccagctggcgcagcttcgtagacacgttgagcttctgccgggtttcttcttgaagcarctcctgcaaaagggatgcaaagaggtcccagggacctgccccgaggaaggccaccccccaggtcccctggatgatgtggcaggacactcacctgggtgtcctggagctgggaactgagggacgccaygtccttggccagcttaatggccttcccctcggcctcgttaagcatccctgtgacgctctcaacttcattctaagggtgccaagagactggttagtcaaagcctctagaaggggatcctcgttgaaaggagccctttttactcaaaacacatgggctagtacttgaggtgttcactgattgagaaaataccsgtgaggtatgggactctgataaaaaaaaaaaaaaacacacacacacacamaaaaaacagaatctgtggcttgaagggaactccrtcacctatgagttgggaccctggccctagactctgtggttctaagaacttatttgagccccaatggtattgactgggacctgatcccactaaatggatcctagatccctgccaaggttggtagagacaaagcagcaggtctgagagtccagacgaggtgctctggctggtccactctctaaggctggagaagggagaccaggatggtacttgaacgtcccagggatgctgtcccatcccttccttcctcactcctactctttgaccctgatggccaaagccagagacgcaggccctaaaggtaaaaacgtcctctctgtattctctggcttttactccctagtgtctctgcataagtccctttgaggctgttagcctacccctccatctcttccattgacaaggaggatatgaatgatcttgacactgcttatatgagggcggcaaaagccctgctctcaactgcatgtgagaaaaaaacatctcacttaattcttccctcgccccttggtccctggctgtggacatgttaaacatttgtgaaaactttggccacgtccccatgagtggcaaggcagggtaaatggctatgccaagtgaaagaagaccaaagacaaaaagaccatgtcattcagcagcttaaaacccctcaacagcttcacattgcccagagtaaggatcaacatacatgtaataggttctcaaaagccctacatcatctgggtacaagctccccctccaaccccactctgtactatctccccctacccccaaccccagctgggcactccagctctactggctgtatgtctctctcctaatttttctacttaccacagggcctttgcacacgctgttccctctgcctggtagacttatccatgctccttagggaagcctttcgtggctcctcctcccccaggttaggccccctggttatttacacttgggcatcatgtgccttccctttgctgcatcatttgacattcatttgtgtgattattcatgtctttcccttcccttcccttccccttactcggctggagtcctactggggcagcgacagtgtctcttcttccttgctgttggatctcaggattaagcacagtgcctggcatacagcaggtgctcaataaatacttatcaaattggaaaa

SEQ ID NO: 398 - DNA, 3156 bp, Homo sapiens
agccgcctctgccgccgccgccgcgttggcctcgccgcccctgctcgggtaagactccggaaagactttcagctccgaggaggaagaagctaactattggaaagatctggcgatgacctacaaacagagggcagaaaatacgcaagaggaactccgagaattccaggagggaagccgagaatatgaagctgaattggagacgcagctgcaacaaattgaaaccaggaacagagacctcctgtccgaaaataaccgccttcgcatggagctggaaaccatcaaggagaagtttgaagtgcagcactctgaaggctaccggcagatctcagccttggaggatgacctcgcgcagaccaaagccattaaagaccaattgcagaaatacatcagagagctggagcaagcaaatgacgacctggaaagagccaagcgcgccacgatcatgtctctcgaagactttgagcagcgcttgaatcaggccatcgaaagaaatgccttcctggaaagtgaacttgatgaaaaagagaatctcctggaatctgttcagagactgaaggatgaagccagagatttgcggcaggaactggccgtgcagcagaagcaggagaaacccaggacccccatgcccagctcagtggaagctgagaggacagacacagctgtgcaggccacgggctccgtgccgtccacgcccattgctcaccgaggacccagctcaagtttaaacacacctgggagcttcagacgtggcctggacgactccaccggggggacccccctcacacctgcrgcccggatatcagccctcaacattgtgggagacctactgcggaaagtcggggcactggagtccaaactcgcttcctgccggaacctcgtgtaygatcagtccccaaaccgaacaggtggcccagcctctgggcggagcagcaagaacagagatggcggggagagacggccaagcagcaccagcgtgcctttgggtgataaggggttggacacgagttgccgctggttgtccaaatcaacaaccaggtcgtccagctcctgctgaagcctgttcttggtcttttccagtttatcatamgcggccgccttctcctcgtactgctgggtgaggttctcgatctccttctggaacctcttcttcccctcttccagagcttccacggtgctggcaaagtcctgcagcttcttcttcgagtcggagagctacaaggacagcgtccagggtagggtgagagggggaccatgartggcccctgtccctggccccacagactctgagaagsgaagaccatgtctcctcgttggagaaacccaatagcaggggaagctgrggggtcaagcaccatcgcaccaacactccaccgcgatctgcctgcgggggatctcagcgcagagaagttgagaggacccatgaaggaagcaaggacacggggcaggcacctggatgttgagagtggagatgtggcgctccaggttctgcttggcctccatctcctcgtccagctggtcttgcaggctgttccgctcctcctccagctggcgcagcttcgtagacacgttgagcttctgccgggtttcttcttgaagcarctcctgcaaaagggatgcaaagaggtcccagggacctgccccgaggaaggccaccccccaggtcccctggatgatgtggcaggacactcacctgggtgtcctggagctgggaactgagggacgccaygtccttggccagcttaatggccttcccctcggcctcgttaagcatccctgtgacgctctcaacttcattctaagggtgccaagagactggttagtcaaagcctctagaaggggatcctcgttgaaaggagccctttttactcaaaacacatgggctagtacttgaggtgttcactgattgagaaaataccsgtgaggtatgggactctgataaaaaaaaaaaaaaacacacacacacacamaaaaaacagaatctgtggcttgaagggaactccrtcacctatgagttgggaccctggccctagactctgtggttctaagaacttatttgagccccaatggtattgactgggacctgatcccactaaatggatcctagatccctgccaaggttggtagagacaaagcagcaggtctgagagtccagacgaggtgctctggctggtccactctctaaggctggagaagggagaccaggatggtacttgaacgtcccagggatgctgtcccatcccttccttcctcactcctactctttgaccctgatggccaaagccagagacgcaggccctaaaggtaaaaacgtcctctctgtattctctggcttttactccctagtgtctctgcataagtccctttgaggctgttagcctacccctccatctcttccattgacaaggaggatatgaatgatcttgacactgcttatatgagggcggcaaaagccctgctctcaactgcatgtgagaaaaaaacatctcacttaattcttccctcgccccttggtccctggctgtggacatgttaaacatttgtgaaaactttggccacgtccccatgagtggcaaggcagggtaaatggctatgccaagtgaaagaagaccaaagacaaaaagaccatgtcattcagcagcttaaaacccctcaacagcttcacattgcccagagtaaggatcaacatacatgtaataggttctcaaaagccctacatcatctgggtacaagctccccctccaaccccactctgtactatctccccctacccccaaccccagctgggcactccagctctactggctgtatgtctctctcctaatttttctacttaccacagggcctttgcacacgctgttccctctgcctggtagacttatccatgctccttagggaagcctttcgtggctcctcctcccccaggttaggccccctggttatttacacttgggcatcatgtgccttccctttgctgcatcatttgacattcatttgtgtgattattcatgtctttcccttcccttcccttccccttactcggctggagtcctactggggcagcgacagtgtctcttcttccttgctgttggatctcaggattaagcacagtgcctggcatacagcaggtgctcaataaatacttatcaaattggaaaa

SEQ ID NO: 399 - DNA, 3489 bp, Homo sapiens
cagcatttgtcactcaacctctgaatgttagtgacactattgggacgaaaaaggactgtgctggcccaaatggcaggcatctcatatgtggcatctttctttctccttctgactaagctcagcattggccagagagaagtaacagttcagaaaggaccactgtttagagctgaaggttacccagtcagcattggctgcaaygtaactggccaccagggaccttctgagcagcatttccagtggtctgtttacctgccgacaaacccgacccaggaagtccagatcattagcaccaaggatgctgccttctcttacgcagtatatacgcagcgggtgcgaagcggagacgtctacgtggagagggtccagggcaactcagtcttgttgcacatctcaaaactccagatgaaggatgctggcgagtatgagtgtcacacaccaaacactgatgagaaatactatggaagttacagtgcaaagactaatctaattgttattccagataccctctctgccaccatgagttctcagactctcrgtaaggaggaaggtgagccattagccctcacctgtgaggcatccaaagccacagcccaacatactcacctctctgtcacctggtacctaacacagratggaggaggaagccaagccactgagattatttctctctccaaagattttatattggtccctgggcccttgtatacagagcrgtttgcagccagtgacgtacagctcarcaaactgggacccactacattcaggctgtccatagagaggctccagtcctcagatcagggtcagctgttctgtgaggcaacggaatggattcaggatccagatgaaacttggatgttcatcaccaaaaagcagaccgatcaaaccactctgaggatccagccagcagtgaaagattttcaagtcaacattacagctgacagcttgtttgctgaagggaaacccttagaactggtttgcctggttgtaagcagtggccgtgacccacagcttcaaggcatttggttcttcaatgggactgaaattgctcacattgatgctggtggagtcctgggcctgaagaatgactacaaagagagagcaagtcaaggagagctccaggtttcaaagttaggccccaaggctttctctcycaagatcttctctctgggcccagaggatgaaggcgcctacagatgtgtggtagcagaggtcatgaaaacacgcacaggttcctggcaggtgcttcagagaaagcagtcaccagacagccacgtgcacctgaggaagccagcagcaagaagtgtggtcrtgtctaccaagaacaagcagcaagttgtgtgggaaggagagacactcgcctttctctgtaaggctggtggagctgaaagtcccctgtctgtgagctggtggcacatcccacgggaccagacacagcccgagtttgtggctggcatggggcaggatggcattgtgcagctgggtgcctcctatggggtacccagttaccatggcaacacaaggctggagaaaatggactgggccaccttccagctggagatcaccttcactgccatcacagacagtggcacatatgagtgcagagtatctgagaagtctcrgaaccaggccagagatctgagstggactcagaagatttcagttactgtaaagtctctggagtcaagtttacaagttagtctgatgagccgtcagccgcargtgatgttaaccaacacctttgacctgtcctgtgtcgtgagggcyggttactctgacctcaaggtgccactcactgtgacgtggcagttccagccagctagctctcacatmttccaccagcttattcgaatcacccacaatggcactattgaatgggggaatttcctatcccggttccaaaagaagacgaaagtgtcgcagtctttatttcgttcacaactcctagtccatgatgccastgaggaagagacaggagtgtatcagtgtgaagtagaagtttatgacagaaattccctakacaacaaccgccccccgagggcttctgccatctctcacccactgaggatagccgtcactttaccagagagcaagctaaaagtgaattcaaggagtcaagtccaagagctctccatcaactccaacactgatatagaatgtagcatcttgtcccggtccaatggaaaccttcagttagccattatttggtatttttctcctgtttccactaatgcctcttggctaaagatcctggagatggaccaaaccaatgttataaaaactggggatgagtttcacaccccacagagaaaacaaaaatttcatactgagaaggtttcccaagacttatttcagctgcacattctgaatgtggaagacagcgatcggggcaaatatcactgtgctgtggaggaatggctcctgtctacaaatggcacttggcacaagcttggagaaaagaagtcaggactaacagaattgaaactcaagcccacaggaagtaaggtacgtgtctccaaagtgtactggaccgaaaatgtgactgagcacagagaagtggccatccrctgcagcctggagagtrtaggcagctcagccactctgtactctgtgatgtggtactggaacagagaaaactctggaagtaaattgctggtgcacttgcaacatgatggcttgctggagtatggggaagaggggctcaggaggcacctgcactgttaccgttcatcctctacagactttgtcctgaagcttcatcaggtggagatggaggatgcaggaatgtactggtgtagggtggcagagtggcagctccatggacacccaagcaagtggattaatcaagcatccgatgagtcacagcggatggtgctcacggtgctgccttcagagcccacgcttccttccaggatctgctcctcggccccttthctctatttcctgttcatctgtcccttcgtcctgctcctccttctgctcatctccctcctctgcttatactggaaggccaggaagttgtcracactgcgttccaacacayggaaagaaaaagctctctgggtggacttgaaagaggctggaggtgtgaccacaaataggagggaagacgaggaggaagatgaaggcaactgaatcccaagaggcacctgcagccaggaaggaaagcttgttttacagcttcctgccttgctgcctgtttcttcccaagccccgtgtggaatgtggtgacctagtcacctggaaccagctcctgacagaccccggcaacttctagatgaacccaagtgaactttcctcattaccatcctgaagtcactaccccagggggagctatagcttcatgaccgtaamatgtgacctgtgtgctggcaggacgactcactgcggctgcgccactgggacccctcccctacatgcaccaatgcactctctcccctctccatcaccccataaaaccctcctgtcactttccttcagagacaccgc

SEQ ID NO: 400 - DNA, 3387 bp, Homo sapiens
cagcatttgtcactcaacctctgaatgttagtgacactattgggacgaaaaaggactgtgctggcccaaatggcaggcatctcatatgtggcatctttctttctccttctgactaagctcagcattggccagagagaagtaacagttcagaaaggaccactgtttagagctgaaggttacccagtcagcattggctgcaaygtaactggccaccagggaccttctgagcagcatttccagtggtctgtttacctgccgacaaacccgacccaggaagtccagatcattagcaccaaggatgctgccttctcttacgcagtatatacgcagcgggtgcgaagcggagacgtctacgtggagagggtccagggcaactcagtcttgttgcacatctcaaaactccagatgaaggatgctggcgagtatgagtgtcacacaccaaacactgatgagaaatactatggaagttacagtgcaaagactaatctaattgttattccagataccctctctgccaccatgagttctcagactctcrgtaaggaggaaggtgagccattagccctcacctgtgaggcatccaaagccacagcccaacatactcacctctctgtcacctggtacctaacacagratggaggaggaagccaagccactgagattatttctctctccaaagattttatattggtccctgggcccttgtatacagagcrgtttgcagccagtgacgtacagctcarcaaactgggacccactacattcaggctgtccatagagaggctccagtcctcagatcagggtcagctgttctgtgaggcaacggaatggattcaggatccagatgaaacttggatgttcatcaccaaaaagcagaccgatcaaaccactctgaggatccagccagcagtgaaagattttcaagtcaacattacagctgacagcttgtttgctgaagggaaacccttagaactggtttgcctggttgtaagcagtggccgtgacccacagcttcaaggcatttggttcttcaatgggactgaaattgctcacattgatgctggtggagtcctgggcctgaagaatgactacaaagagagagcaagtcaaggagagctccaggtttcaaagttaggccccaaggctttctctcycaagatcttctctctgggcccagaggatgaaggcgcctacagatgtgtggtagcagaggtcatgaaaacacgcacaggttcctggcaggtgcttcagagaaagcagtcaccagacagccacgtgcacctgaggaagccagcagcaagaagtgtggtcrtgtctaccaagaacaagcagcaagttgtgtgggaaggagagacactcgcctttctctgtaaggctggtggagctgaaagtcccctgtctgtgagctggtggcacatcccacgggaccagacacagcccgagtttgtggctggcatggggcaggatggcattgtgcagctgggtgcctcctatggggtacccagttaccatggcaacacaaggctggagaaaatggactgggccaccttccagctggagatcaccttcactgccatcacagacagtggcacatatgagtgcagagtatctgagaagtctcrgaaccaggccagagatctgagstggactcagaagatttcagttactgtaaagtctctggagtcaagtttacaagttagtctgatgagccgtcagccgcargtgatgttaaccaacacctttgacctgtcctgtgtcgtgagggcyggttactctgacctcaaggtgccactcactgtgacgtggcagttccagccagctagctctcacatmttccaccagcttattcgaatcacccacaatggcactattgaatgggggaatttcctatcccggttccaaaagaagacgaaagtgtcgcagtctttatttcgttcacaactcctagtccatgatgccastgaggaagagacaggagtgtatcagtgtgaagtagaagtttatgacagaaattccctakacaacaaccgccccccgagggcttctgccatctctcacccactgaggatagccgtcactttaccagagagcaagctaaaagtgaattcaaggagtcaagtccaagagctctccatcaactccaacactgatatagaatgtagcatcttgtcccggtccaatggaaaccttcagttagccattatttggtatttttctcctgtttccactaatgcctcttggctaaagatcctggagatggaccaaaccaatgttataaaaactggggatgagtttcacaccccacagagaaaacaaaaatttcatactgagaaggtttcccaagacttatttcagctgcacattctgaatgtggaagacagcgatcggggcaaatatcactgtgctgtggaggaatggctcctgtctacaaatggcacttggcacaagcttggagaaaagaagtcaggactaacagaattgaaactcaagcccacaggaagtaaggtacgtgtctccaaagtgtactggaccgaaaatgtgactgagcacagagaagtggccatccrctgcagcctggagagtrtaggcagctcagccactctgtactctgtgatgtggtactggaacagagaaaactctggaagtaaattgctggtgcacttgcaacatgatggcttgctggagtatggggaagaggggctcaggaggcacctgcactgttaccgttcatcctctacagactttgtcctgaagcttcatcaggtggagatggaggatgcaggaatgtactggtgtagggtggcagagtggcagctccatggacacccaagcaagtggattaatcaagcatccgatgagtcacagcggatggtgctcacggtgctgccttcagagcccacgcttccttccaggatctgctcctcggccccttthctctatttcctgttcatctgtcccttcgtcctgctcctccttctgctcatctccctcctctgcttatactggaaggccaggaagttgtcracactgcgttccaacacayggaaagaaaaagctctctgggtggacttgaaagaggctggaggtgtgaccacaaataggagggaagacgaggaggaagatgaaggcaactgaatcccaagaggcacctgcagccaggaaggaaagccccgtgtggaatgtggtgacctagtcacctggaaccagctcctgacagaccccggcaacttctagatgaacccaagtgaactttcctcattaccatcctgaagtcactaccccagggggagctatagcttcatgaccgtaamatgtgacctgtgtgctggcaggacgactcactgcggctgcgccactgggacccctcccctacatgcaccaatgcac

SEQ ID NO: 401 - DNA, 833 bp, Homo sapiens
aggtgggcgtggccagaccagctttaggtccggggagtgtctcgccagcggcagcacacccctgtaagtggtggccagrgctgccgtggcaaaatgagctgtcaactttaggttgacaggggtgtggccgcgaccgcaagggcttttgttgccgggtggacccaacagggatgggctgctggggacagctgctggtgtggttcggagccgcgggcgccattctctgctctagcccggggtcccaggagacttttctgcggtcctcgcccctgccgctggcaagtcccagcccccrggacccgaaagtcagcgccccgcctagtatcttggagccagcctccccgctgaattctccgggcaccgaggggtcttggctgttttctacctgcggggccagcggccggcatgggcccacacagacacaatgtgacggggcgtacgcggggaccagcgtggtggtgaccgtgggggccgccgggcagctgagaggcgtgcagctgtggcgcgtgccgggccctggccagtatctgatctcagcctacggagccgcgggcggcaaaggcgccaagaaccacctgtcgcgggcgcatggcgtcttcgtctcagcaatcttctccctcggtctcggggagtcgctgtacatcctggtggggcagcagggagaggacgcctgtcccggagtgagcgcagccagtggggatgggscggcgccggcgccgggggcgagggctgcctgggggccgggggagcgtgctttcctcggtgccgggtcaccagcacagcgaggggaggctcccgggccccgccgattccctcccccgctgcccgcaggg

SEQ ID NO: 402 - DNA, 3421 bp, Homo sapiens
aggtgggcgtggccagaccagctttaggtccggggagtgtctcgccagcggcagcacacccctgtaagtggtggccagrgctgccgtggcaaaatgagctgtcaactttaggttgacaggggtgtggccgcgaccgcaagggcttttgttgccgggtggacccaacagggatgggctgctggggacagctgctggtgtggttcggagccgcgggcgccattctctgctctagcccggggtcccaggagacttttctgcggtcctcgcccctgccgctggcaagtcccagcccccrggacccgaaagtcagcgccccgcctagtatcttggagccagcctccccgctgaattctccgggcaccgaggggtcttggctgttttctacctgcggggccagcggccggcatgggcccacacagacacaatgtgacggggcgtacgcggggaccagcgtggtggtgaccgtgggggccgccgggcagctgagaggcgtgcagctgtggcgcgtgccgggccctggccagtatctgatctcagcctacggagccgcgggcggcaaaggcgccaagaaccacctgtcgcgggcgcatggcgtcttcgtctcagcaatcttctccctcggtctcggggagtcgctgtacatcctggtggggcagcagggagaggacgcctgtcccggaggtagcccggagagccagctcgtctgcctcggggagtctcgagccgttgaagagcacgcggcgatggatgggagcgaaggggtcccggggccccctgggcgggagccctctcccagtggcagtgcccctggacagctggagggcgcttcctggamcacgccgctggccccacaggtgcgcgctggcgagctggaacygttgctggtggcggccggaggcggcggtcgggcctacctgaggccgcrggaccgaggccggactcaggcctcccccgagaaactggagaaccgctcggaggcgcccgggagcggcgggagaggcggggcggcaggtggtgggggcggctggacgtcgcgggctccctctccgcaggccggccgctcactgcaggagggggcggagggcggccagggctgctccgaggcttgggcgacccttggctgggccgcggccggcggcttcgggggcggcggcggggcctgcactgcgggcggaggcggcggcggctacagggggggcgacgcttcagagactgacaacctctgggctgatggggaagatggagtatccttcatacaccccagcagcgagctcttcctgcagcctctggcagtcaccgagaaccacggagaggtagagatccgaaggcacctcaactgcagtcactgccctttgagagactgccaatggcaggcagagctccagctggctgaatgcctgtgcccagaaggcatggagctagctgtggataacgtcacctgcatggacctgcacaagcccccaggccctctggttctgatggtggctgtggtggcaacctcaacactgagcctccttatggtgtgtggggtcctgattctgggtacgaagcgtctagcaggcacagttgattcaaggctgctcctctccartgagctgggatgggtttctgcggggtcccggggctgacttcaagaccactcaccgcagcagagccgtggtagactcctctgggattctaagataggaaggagctggggaggcctggggaaaacgtttaccttaatgagcatctggaggggtgtcctgggcaggtgggggagggagagttgatgggcaggtggagggtgtgccgttattcttcccacccccagtgaagcagaagaagtggcagggcctgcaggagatgaggctgccgagccctgagcttgagctgagcaagcttcgaacctctgccatcaggacagcccccaatccctattattgccaggtggggcttggcccggcccagtcctggcctctgccaccaggtgtcaccgaggtttccccagccaatgttactctgctcagagccctgggccatggtgcctttggggaggtgtatgagggactggtaattggccttcctgggractccagtcccctgcaggtagctatcaagaccctgccagaactctgctcgcctcaggatgagctggatttcctcatggaggccctcatcatcagcaagtttcgccatcagaacattgtgcggtgtgtggggctcagcctcagggccacccctcgcctcattctgctggaactgatgtctggaggggacatgaagagtttcctgaggcacagtcggccacacctgggccagccatcacctctggtcatgcgggacctgctgcaactggcccaggacatagcccagggctgccactacctggaggaaaatcacttcatccacagggatattgccgcccggaactgcctgctgagctgcgctggacccagccgagtggccaagattggggactttgggatggcacgagatatctaccgggccagttattaccgcaggggggaccgggccttgctcccagtcaagtggatgcccccagaggccttcctggagggcatcttcacatccaagacagattcctrgtcttttggggtgctgctctgggagatcttctcactgggctacatgccctatcctgggcgcaccaaccaggaggtgctggacttcgtcgttggaggaggccggatggaccctcctaggggctgcccagggcctgtgtaccgcatcatgacccagtgttggcagcacgagcctgagctccgccctagctttgccagcatcttggagcgtctgcagtactgcactcaggacccggatgtgctgaattcactcctgccaatggagctggggcccaccccagaggaggaagggacttctgggctggggaacagatctttggagtgcctaagacccccacagccccaggaactgagtccagagaagttgaaaagctggggaggtagccctcttggcccctggctgtcctctggcctcaagcccctcaaatccaggggcctccaacctcagaacctttggaatcccacttatcgctcctgagccccaaggggccctgagggtaaggactgaggcactgagggtccctccctatactcctcaggctcctgggtggcctgttatgccagcggcctctgttccctgcagtctgtgctgtgtgtctgggcctgtctcggggctggcctggcagcgctgcacttgccatgctggaaaccagcccaggcctcccagggaagggcccagccacttccagcttttgatcttggggccagaggccgccttacacacaccccaggtgtccatggggagcactggattgctctcccattatgagcrtccttcatctgggcagaccccccaccctgcagatgcttctaataaaaagctcttctcatcctcc

SEQ ID NO: 403 - DNA, 2861 bp, Homo sapiens
gtggtggccagrgctgccgtggcaaaatgagctgtcaactttaggttgacaggggtgtggccgcgaccgcaagggcttttgttgccgggtggacccaacagggatgggctgctggggacagctgctggtgtggttcggagccgcgggcgccacctacgttttccgggtacgtgctcccttcggcgctcagcgttggggtcccaatcctctccccaggggcgctcacgcaccggctctccgtccgtcccttggggtccccctatccyygcgctgggctgggctggcctgggctgggctgggggcccctgcccttatccaggccccctgggcgggagccctctcccagtggcagtgcccctggacagctggagggcgcttcctggamcacgccgctggccccacaggtgcgcgctggcgagctggaacygttgctggtggcggccggaggcggcggtcgggcctacctgaggccgcrggaccgaggccggactcaggcctcccccgagaaactggagaaccgctcggaggcgcccgggagcggcgggagaggcggggcggcagggggcgacgcttcagagactgacaacctctgggctgatggggaagatggagtatccttcatacaccccagcagcgagctcttcctgcagcctctggcagtcaccgagaaccacggagaggtagagatccgaaggcacctcaactgcagtcactgccctttgagagactgccaatggcaggcagagctccagctggctgaatgcctgtgcccagaaggcatggagctagctgtggataacgtcacctgcatggacctgcacaagcccccaggccctctggttctgatggtggctgtggtggcaacctcaacactgagcctccttatggtgtgtggggtcctgattctgggtacgaagcgtctagcaggcacagttgattcaaggctgctcctctccartgagctgggatgggtttctgcggggtcccggggctgacttcaagaccactcaccgcagcagagccgtggtagactcctctgggattctaagataggaaggagctggggaggcctggggaaaacgtttaccttaatgagcatctggaggggtgtcctgggcaggtgggggagggagagttgatgggcaggtggagggtgtgccgttattcttcccacccccagtgaagcagaagaagtggcagggcctgcaggagatgaggctgccgagccctgagcttgagctgagcaagcttcgaacctctgccatcaggacagcccccaatccctattattgccaggtggggcttggcccggcccagtcctggcctctgccaccaggtgtcaccgaggtttccccagccaatgttactctgctcagagccctgggccatggtgcctttggggaggtgtatgagggactggtaattggccttcctgggractccagtcccctgcaggtagctatcaagaccctgccagaactctgctcgcctcaggatgagctggatttcctcatggaggccctcatcatcagcaagtttcgccatcagaacattgtgcggtgtgtggggctcagcctcagggccacccctcgcctcattctgctggaactgatgtctggaggggacatgaagagtttcctgaggcacagtcggccacacctgggccagccatcacctctggtcatgcgggacctgctgcaactggcccaggacatagcccagggctgccactacctggaggaaaatcacttcatccacagggatattgccgcccggaactgcctgctgagctgcgctggacccagccgagtggccaagattggggactttgggatggcacgagatatctaccgggccagttattaccgcaggggggaccgggccttgctcccagtcaagtggatgcccccagaggccttcctggagggcatcttcacatccaagacagattcctrgtcttttggggtgctgctctgggagatcttctcactgggctacatgccctatcctgggcgcaccaaccaggaggtgctggacttcgtcgttggaggaggccggatggaccctcctaggggctgcccagggcctgtgtgagttgagtgctgcccgggaagggaggtccttcacaaccatgggtgggcatgaactcctgcctctccccaggtaccgcatcatgacccagtgttggcagcacgagcctgagctccgccctagctttgccagcatcttggagcgtctgcagtactgcactcaggacccggatgtgctgaattcactcctgccaatggagctggggcccaccccagaggaggaagggacttctgggctggggaacagatctttggagtgcctaagacccccacagccccaggaactgagtccagagaagttgaaaagctggggaggtagccctcttggcccctggctgtcctctggcctcaagcccctcaaatccaggggcctccaacctcagaacctttggaatcccacttatcgctcctgagccccaaggggccctgagggtaaggactgaggcactgagggtccctccctatactcctcaggctcctgggtggcctgttatgccagcggcctctgttccctgcagtctgtgctgtgtgtctgggcctgtctcggggctggcctggcagcgctgcacttgccatgctggaaaccagcccaggcctcccagggaagggcccagccacttccagcttttgatcttggggccagaggccgccttacacacaccccaggtgtccatggggagcactggattgctctcccattatgagcrtccttcatctgggcagaccccccaccctgcagatgcttctaataaaaagctcttctcatcctcc

SEQ ID NO: 404 - DNA, 3209 bp, Homo sapiens
aggtgggcgtggccagaccagctttaggtccggggagtgtctcgccagcggcagcacacccctgtaagtggtggccagrgctgccgtggcaaaatgagctgtcaactttaggttgacaggggtgtggccgcgaccgcaagggcttttgttgccgggtggacccaacagggatgggctgctggggacagctgctggtgtggttcggagccgcgggcgccattctctgctctagcccggggtcccaggagacttttctgcggtcctcgcccctgccgctggcaagtcccagcccccrggacccgaaagtcagcgccccgcctagtatcttggagccagcctccccgctgaattctccgggcaccgaggggtcttggctgttttctacctgcggggccagcggccggcatgggcccacacagacacaatgtgacggggcgtacgcggggaccagcgtggtggtgaccgtgggggccgccgggcagctgagaggcgtgcagctgtggcgcgtgccgggccctggccagtatctgatctcagcctacggagccgcgggcggcaaaggcgccaagaaccacctgtcgcgggcgcatggcgtcttcgtctcagcaatcttctccctcggtctcggggagtcgctgtacatcctggtggggcagcagggagaggacgcctgtcccggaggtagcccggagagccagctcgtctgcctcggggagtctcgagccgttgaagagcacgcggcgatggatgggagcgaaggggtcccggggccccctgggcgggagccctctcccagtggcagtgcccctggacagctggagggcgcttcctggamcacgccgctggccccacaggtgcgcgctggcgagctggaacygttgctggtggcggccggaggcggcggtcgggcctacctgaggccgcrggaccgaggccggactcaggcctcccccgagaaactggagaaccgctcggaggcgcccgggagcggcgggagaggcggggcggcaggtggtgggggcggctggacgtcgcgggctccctctccgcaggccggccgctcactgcaggagggggcggagggcggccagggctgctccgaggcttgggcgacccttggctgggccgcggccggcggcttcgggggcggcggcggggcctgcactgcgggcggaggcggcggcggctacaggggtaggtgcaccggggcgacgcttcagagactgacaacctctgggctgatggggaagatggagtatccttcatacaccccagcagcgagctcttcctgcagcctctggcagtcaccgagaaccacggagaggtagagatccgaaggcacctcaactgcagtcactgccctttgagagactgccaatggcaggcagagctccagctggctgaatgcctgtgcccagaaggcatggagctagctgtggataacgtcacctgcatggacctgcacaagcccccaggccctctggttctgatggtggctgtggtggcaacctcaacactgagcctccttatggtgtgtggggtcctgattctgggtacgaagcgtctagcaggcacagttgattcaaggctgctcctctccrtgaagcagaagaagtggcagggcctgcaggagatgaggctgccgagccctgagcttgagctgagcaagcttcgaacctctgccatcaggacagcccccaatccctattattgccaggtggggcttggcccggcccagtcctggcctctgccaccaggtgtcaccgaggtttccccagccaatgttactctgctcagagccctgggccatggtgcctttggggaggtgtatgagggactggtaattggccttcctgggractccagtcccctgcaggtagctatcaagaccctgccagaactctgctcgcctcaggatgagctggatttcctcatggaggccctcatcatcagcaagtttcgccatcagaacattgtgcggtgtgtggggctcagcctcagggccacccctcgcctcattctgctggaactgatgtctggaggggacatgaagagtttcctgaggcacagtcggccacacctgggccagccatcacctctggtcatgcgggacctgctgcaactggcccaggacatagcccagggctgccactacctggaggaaaatcacttcatccacagggatattgccgcccggaactgcctgctgagctgcgctggacccagccgagtggccaagattggggactttgggatggcacgagatatctaccgggccagttattaccgcaggggggaccgggccttgctcccagtcaagtggatgcccccagaggccttcctggagggcatcttcacatccaagacagattcctrgtcttttggggtgctgctctgggagatcttctcactgggctacatgccctatcctgggcgcaccaaccaggaggtgctggacttcgtcgttggaggaggccggatggaccctcctaggggctgcccagggcctgtgtaccgcatcatgacccagtgttggcagcacgagcctgagctccgccctagctttgccagcatcttggagcgtctgcagtactgcactcaggacccggatgtgctgaattcactcctgccaatggagctggggcccaccccagaggaggaagggacttctgggctggggaacagatctttggagtgcctaagacccccacagccccaggaactgagtccagagaagttgaaaagctggggaggtagccctcttggcccctggctgtcctctggcctcaagcccctcaaatccaggggcctccaacctcagaacctttggaatcccacttatcgctcctgagccccaaggggccctgagggtaaggactgaggcactgagggtccctccctatactcctcaggctcctgggtggcctgttatgccagcggcctctgttccctgcagtctgtgctgtgtgtctgggcctgtctcggggctggcctggcagcgctgcacttgccatgctggaaaccagcccaggcctcccagggaagggcccagccacttccagcttttgatcttggggccagaggccgccttacacacaccccaggtgtccatggggagcactggattgctctcccattatgagcrtccttcatctgggcagaccccccaccctgcagatgcttctaataaaaagctcttctcatcctcc

SEQ ID NO: 405 - DNA, 2565 bp, Homo sapiens
gtggtggccagrgctgccgtggcaaaatgagctgtcaactttaggttgacaggggtgtggccgcgaccgcaagggcttttgttgccgggtggacccaacagggatgggctgctggggacagctgctggtgtggttcggagccgcgggcgccacctacgttttccgggtacgtgctcccttcggcgctcagcgttggggtcccaatcctctccccaggggcgctcacgcaccggctctccgtccgtcccttggggtccccctatccyygcgctgggctgggctggcctgggctgggctgggggcccctgcccttatccaggccccctgggcgggagccctctcccagtggcagtgcccctggacagctggagggcgcttcctggamcacgccgctggccccacaggtgcgcgctggcgagctggaacygttgctggtggcggccggaggcggcggtcgggcctacctgaggccgcrggaccgaggccggactcaggcctcccccgagaaactggagaaccgctcggaggcgcccgggagcggcgggagaggcggggcggcagggggcgacgcttcagagactgacaacctctgggctgatggggaagatggagtatccttcatacaccccagcagcgagctcttcctgcagcctctggcagtcaccgagaaccacggagaggtagagatccgaaggcacctcaactgcagtcactgccctttgagagactgccaatggcaggcagagctccagctggctgaatgcctgtgcccagaaggcatggagctagctgtggataacgtcacctgcatggacctgcacaagcccccaggccctctggttctgatggtggctgtggtggcaacctcaacactgagcctccttatggtgtgtggggtcctgattctgggtacgaagcgtctagcaggcacagttgattcaaggctgctcctctccrtgaagcagaagaagtggcagggcctgcaggagatgaggctgccgagccctgagcttgagctgagcaagcttcgaacctctgccatcaggacagcccccaatccctattattgccaggtggggcttggcccggcccagtcctggcctctgccaccaggtgtcaccgaggtttccccagccaatgttactctgctcagagccctgggccatggtgcctttggggaggtgtatgagggactggtaattggccttcctgggractccagtcccctgcaggtagctatcaagaccctgccagaactctgctcgcctcaggatgagctggatttcctcatggaggccctcatcatcagcaagtttcgccatcagaacattgtgcggtgtgtggggctcagcctcagggccacccctcgcctcattctgctggaactgatgtctggaggggacatgaagagtttcctgaggcacagtcggccacacctgggccagccatcacctctggtcatgcgggacctgctgcaactggcccaggacatagcccagggctgccactacctggaggaaaatcacttcatccacagggatattgccgcccggaactgcctgctgagctgcgctggacccagccgagtggccaagattggggactttgggatggcacgagatatctaccgggccagttattaccgcaggggggaccgggccttgctcccagtcaagtggatgcccccagaggccttcctggagggcatcttcacatccaagacagattcctrgtcttttggggtgctgctctgggagatcttctcactgggctacatgccctatcctgggcgcaccaaccaggaggtgctggacttcgtcgttggaggaggccggatggaccctcctaggggctgcccagggcctgtgtaccgcatcatgacccagtgttggcagcacgagcctgagctccgccctagctttgccagcatcttggagcgtctgcagtactgcactcaggacccggatgtgctgaattcactcctgccaatggagctggggcccaccccagaggaggaagggacttctgggctggggaacagatctttggagtgcctaagacccccacagccccaggaactgagtccagagaagttgaaaagctggggaggtagccctcttggcccctggctgtcctctggcctcaagcccctcaaatccaggggcctccaacctcagaacctttggaatcccacttatcgctcctgagccccaaggggccctgagggtaaggactgaggcactgagggtccctccctatactcctcaggctcctgggtggcctgttatgccagcggcctctgttccctgcagtctgtgctgtgtgtctgggcctgtctcggggctggcctggcagcgctgcacttgccatgctggaaaccagcccaggcctcccagggaagggcccagccacttccagcttttgatcttggggccagaggccgccttacacacaccccaggtgtccatggggagcactggattgctctcccattatgagcrtccttcatctgggcagaccccccaccctgcagatgcttctaataaaaagctcttctcatcctcc

SEQ ID NO: 406 - DNA, 3123 bp, Homo sapiens
aggtgggcgtggccagaccagctttaggtccggggagtgtctcgccagcggcagcacacccctgtaagtggtggccagrgctgccgtggcaaaatgagctgtcaactttaggttgacaggggtgtggccgcgaccgcaagggcttttgttgccgggtggacccaacagggatgggctgctggggacagctgctggtgtggttcggagccgcgggcgccattctctgctctagcccggggtcccaggagacttttctgcggtcctcgcccctgccgctggcaagtcccagcccccrggacccgaaagtcagcgccccgcctagtatcttggagccagcctccccgctgaattctccgggcaccgaggggtcttggctgttttctacctgcggggccagcggccggcatgggcccacacagacacaatgtgacggggcgtacgcggggaccagcgtggtggtgaccgtgggggccgccgggcagctgagaggcgtgcagctgtggcgcgtgccgggccctggccagtatctgatctcagcctacggagccgcgggcggcaaaggcgccaagaaccacctgtcgcgggcgcatggcgtcttcgtctcagcaatcttctccctcggtctcggggagtcgctgtacatcctggtggggcagcagggagaggacgcctgtcccggaggtagcccggagagccagctcgtctgcctcggggagtctcgagccgttgaagagcacgcggcgatggatgggagcgaaggggtcccggggtcgcggcgctgggcgggaggtggcgggggtggcgggggcgccacctacgttttccgggtgcgcgctggcgagctggaacygttgctggtggcggccggaggcggcggtcgggcctacctgaggccgcrggaccgaggccggactcaggcctcccccgagaaactggagaaccgctcggaggcgcccgggagcggcgggagaggcggggcggcaggtggtgggggcggctggacgtcgcgggctccctctccgcaggccggccgctcactgcaggagggggcggagggcggccagggctgctccgaggcttgggcgacccttggctgggccgcggccggcggcttcgggggcggcggcggggcctgcactgcgggcggaggcggcggcggctacagggggggcgacgcttcagagactgacaacctctgggctgatggggaagatggagtatccttcatacaccccagcagcgagctcttcctgcagcctctggcagtcaccgagaaccacggagaggtagagatccgaaggcacctcaactgcagtcactgccctttgagagactgccaatggcaggcagagctccagctggctgaatgcctgtgcccagaaggcatggagctagctgtggataacgtcacctgcatggacctgcacaagcccccaggccctctggttctgatggtggctgtggtggcaacctcaacactgagcctccttatggtgtgtggggtcctgattctggtgaagcagaagaagtggcagggcctgcaggagatgaggctgccgagccctgagcttgagctgagcaagcttcgaacctctgccatcaggacagcccccaatccctattattgccaggtggggcttggcccggcccagtcctggcctctgccaccaggtgtcaccgaggtttccccagccaatgttactctgctcagagccctgggccatggtgcctttggggaggtgtatgagggactggtaattggccttcctgggractccagtcccctgcaggtagctatcaagaccctgccagaactctgctcgcctcaggatgagctggatttcctcatggaggccctcatcatcagcaagtttcgccatcagaacattgtgcggtgtgtggggctcagcctcagggccacccctcgcctcattctgctggaactgatgtctggaggggacatgaagagtttcctgaggcacagtcggccacacctgggccagccatcacctctggtcatgcgggacctgctgcaactggcccaggacatagcccagggctgccactacctggaggaaaatcacttcatccacagggatattgccgcccggaactgcctgctgagctgcgctggacccagccgagtggccaagattggggactttgggatggcacgagatatctaccgggccagttattaccgcaggggggaccgggccttgctcccagtcaagtggatgcccccagaggccttcctggagggcatcttcacatccaagacagattcctrgtcttttggggtgctgctctgggagatcttctcactgggctacatgccctatcctgggcgcaccaaccaggaggtgctggacttcgtcgttggaggaggccggatggaccctcctaggggctgcccagggcctgtgtaccgcatcatgacccagtgttggcagcacgagcctgagctccgccctagctttgccagcatcttggagcgtctgcagtactgcactcaggacccggatgtgctgaattcactcctgccaatggagctggggcccaccccagaggaggaagggacttctgggctggggaacagatctttggagtgcctaagacccccacagccccaggaactgagtccagagaagttgaaaagctggggaggtagccctcttggcccctggctgtcctctggcctcaagcccctcaaatccaggggcctccaacctcagaacctttggaatcccacttatcgctcctgagccccaaggggccctgagggtaaggactgaggcactgagggtccctccctatactcctcaggctcctgggtggcctgttatgccagcggcctctgttccctgcagtctgtgctgtgtgtctgggcctgtctcggggctggcctggcagcgctgcacttgccatgctggaaaccagcccaggcctcccagggaagggcccagccacttccagcttttgatcttggggccagaggccgccttacacacaccccaggtgtccatggggagcactggattgctctcccattatgagcrtccttcatctgggcagaccccccaccctgcagatgcttctaataaaaagctcttctcatcctcc

SEQ ID NO: 407 - DNA, 2940 bp, Homo sapiens
aggtgggcgtggccagaccagctttaggtccggggagtgtctcgccagcggcagcacacccctgtaagtggtggccagrgctgccgtggcaaaatgagctgtcaactttaggttgacaggggtgtggccgcgaccgcaagggcttttgttgccgggtggacccaacagggatgggctgctggggacagctgctggtgtggttcggagccgcgggcgccattctctgctctagcccggggtcccaggagacttttctgcggtcctcgcccctgccgctggcaagtcccagcccccrggacccgaaagtcagcgccccgcctagtatcttggagccagcctccccgctgaattctccgggcaccgaggggtcttggctgttttctacctgcggggccagcggccggcatgggcccacacagacacaatgtgacggggcgtacgcggggaccagcgtggtggtgaccgtgggggccgccgggcagctgagaggcgtgcagctgtggcgcgtgccgggccctggccagtatctgatctcagcctacggagccgcgggcggcaaaggcgccaagaaccacctgtcgcgggcgcatggcgtcttcgtctcagcaatcttctccctcggtctcggggagtcgctgtacatcctggtggggcagcagggagaggacgcctgtcccggaggtagcccggagagccagctcgtctgcctcggggagtctcgagccgttgaagagcacgcggcgatggatgggagcgaaggggtcccggggtcgcggcgctgggcgggaggtggcgggggtggcgggggcgccacctacgttttccgggtgcgcgctggcgagctggaacygttgctggtggcggccggaggcggcggtcgggcctacctgaggccgcrggaccgaggccggactcaggcctcccccgagaaactggagaaccgctcggaggcgcccgggagcggcgggagaggcggggcggcagggggcgacgcttcagagactgacaacctctgggctgatggggaagatggagtatccttcatacaccccagcagcgagctcttcctgcagcctctggcagtcaccgagaaccacggagaggtagagatccgaaggcacctcaactgcagtcactgccctttgagagactgccaatggcaggcagagctccagctggctgaatgcctgtgcccagaaggcatggagctagctgtggataacgtcacctgcatggacctgcacaagcccccaggccctctggttctgatggtggctgtggtggcaacctcaacactgagcctccttatggtgtgtggggtcctgattctggtgaagcagaagaagtggcagggcctgcaggagatgaggctgccgagccctgagcttgagctgagcaagcttcgaacctctgccatcaggacagcccccaatccctattattgccaggtggggcttggcccggcccagtcctggcctctgccaccaggtgtcaccgaggtttccccagccaatgttactctgctcagagccctgggccatggtgcctttggggaggtgtatgagggactggtaattggccttcctgggractccagtcccctgcaggtagctatcaagaccctgccagaactctgctcgcctcaggatgagctggatttcctcatggaggccctcatcatcagcaagtttcgccatcagaacattgtgcggtgtgtggggctcagcctcagggccacccctcgcctcattctgctggaactgatgtctggaggggacatgaagagtttcctgaggcacagtcggccacacctgggccagccatcacctctggtcatgcgggacctgctgcaactggcccaggacatagcccagggctgccactacctggaggaaaatcacttcatccacagggatattgccgcccggaactgcctgctgagctgcgctggacccagccgagtggccaagattggggactttgggatggcacgagatatctaccgggccagttattaccgcaggggggaccgggccttgctcccagtcaagtggatgcccccagaggccttcctggagggcatcttcacatccaagacagattcctrgtcttttggggtgctgctctgggagatcttctcactgggctacatgccctatcctgggcgcaccaaccaggaggtgctggacttcgtcgttggaggaggccggatggaccctcctaggggctgcccagggcctgtgtaccgcatcatgacccagtgttggcagcacgagcctgagctccgccctagctttgccagcatcttggagcgtctgcagtactgcactcaggacccggatgtgctgaattcactcctgccaatggagctggggcccaccccagaggaggaagggacttctgggctggggaacagatctttggagtgcctaagacccccacagccccaggaactgagtccagagaagttgaaaagctggggaggtagccctcttggcccctggctgtcctctggcctcaagcccctcaaatccaggggcctccaacctcagaacctttggaatcccacttatcgctcctgagccccaaggggccctgagggtaaggactgaggcactgagggtccctccctatactcctcaggctcctgggtggcctgttatgccagcggcctctgttccctgcagtctgtgctgtgtgtctgggcctgtctcggggctggcctggcagcgctgcacttgccatgctggaaaccagcccaggcctcccagggaagggcccagccacttccagcttttgatcttggggccagaggccgccttacacacaccccaggtgtccatggggagcactggattgctctcccattatgagcrtccttcatctgggcagaccccccaccctgcagatgcttctaataaaaagctcttctcatcctcc

SEQ ID NO: 408 - DNA, 2066 bp, Homo sapiens
caaactcccttactgctttggatataaatccaggcaggaggaggtagctytaaggcaagagatctaggacttctagcccctgaactttcagccgaatacatcttttccaaaggagtgaattcaggcccttgtatcactggcagcaggacgtgaccatggagaagctgttgtgtttcttggtcttgaccagcctctctcatgcttttggccagacagacatgtcgaggaaggcttttgtgtttcccaaagagtcggatacktcctatgtatccctcaaagcaccgttaacgaagcctctcaaagccttcactgtgtgcctccacttctacacggaactgtcctcgacccgtgggtacagtattttctcgtatgccaccaagagacaagacaatgagattctcatattttggtctaaggatataggatacagttttacagtgggtgggtctgaaatattattcgaggttcctgaagtcacagtagctccagtacacatttgtacaagctgggagtccgcctcagggatcgtggagttctgggtagatgggaagcccagggtgaggaagagtctgaagaagggatacactgtgggggcagaagcaagcatcatcttggggcaggagcaggattccttcggtgggaactttgaaggaagccagtccctggtgggagacattggaaatgtgaacatgtgggactttgtgctstcaccagatgagattaacaccatctatcttggcgggcccttcagtcctaatgtcctgaactggcgggcactgaagtatgaagtgcaaggcgaagtgttcaccaaaccccagctgtggccctgaggcccagctgtgggtcctgaaggtacctcccggttttttacaccgcatgggccccacgtctctgtctctggtacctcccgcttttttacactgcatggttcycacgtctctgtctctgggcctttgttcccctatatgcattgcaggcctgctccaccctcctcagcgcctgagaatggaggtaaagtgtctggtctgggagctcgttaactatgmtgggaaayggtccaaaagaatcagaatttgaggtgttttgttttcatttttatttcaagttggacagatcttggagataatttcttacctcacatagatgagaaaactaacacccagaaaggagaaatgatgttataaaaaactcataaggcaagagctgagaaggaagcgctgatcttctatttaattccccacccatgacccccagaaagcaggagggcattgcccacattcacagggctcttcagtmtcagaatcaggacactggccaggtgtctggtttgggtccagagtgctcatcatcatgtcatagaactgctgggcccaggtctcctgaaatgggaagcccagcaataccacgcagtccctccactttctcaaagcacactggaaaggccattagaattgccccagcagagcagatctgctttttttccagagcaaaatgaagcactaggtataaatatgttgttactgccaagaacttaaatgactggtttttgtttgcttgcagtgctttcttaattttatggctcttctgggaaactcctccccttttccacacgaaccttgtggggctgtgaattctttcttcatccccgcattcccaatatacccaggccacaagagtggacgtgaaccacagggtgtcctgtcagaggagcccatctcccatytccccagctccctatytggaggatagttggatagttacgtgttcctagcaggaccaactacagtcttcccaaggattgagttatggactttgggagtgagacatcttyttgctgctggatttccaagctgagaggacgtgaacctgggaccaccagtagccatcttgtttgccacatggagagagactrtgaggacagaagccaaactggaagtggaggagccaagggattgacaaacaacagagccttgaccacgtggagtctctgaatcagccttgtctggaaccagatctacacctggactgcccaggtctataagccaataaagcccctgtttacttga

SEQ ID NO: 409 - DNA, 2045 bp, Homo sapiens
caaactcccttactgctttggatataaatccaggcaggaggaggtagctytaaggcaagagatctaggacttctagcccctgaactttcagccgaatacatcttttccaaaggagtgaattcaggcccttgtatcactggcagcaggacgtgaccatggagaagctgttgtgtttcttggtcttgaccagcctctctcatgcttttggccagacagacatgtcgaggaaggcttttgtgtttcccaaagagtcggatacktcctatgtatccctcaaagcaccgttaacgaagcctctcaaagccttcactgtgtgcctccacttctacacggaactgtcctcgacccgtgggtacagtattttctcgtatgccaccaagagacaagacaatgagattctcatattttggtctaaggatataggatacagttttacagtgggtgggtctgaaatattattcgaggttcctgaagtcacagtagctccagtacacatttgtacaagctgggagtccgcctcagggatcgtggagttctgggtagatgggaagcccagggtgaggaagagtctgaagaagggatacactgtgggggcagaagcaagcatcatcttggggcaggagcaggattccttcggtgggaactttgaaggaagccagtccctggtgggagacattggaaatgtgaacatgtgggactttgtgctstcaccagatgagattaacaccatctatcttggcgggcccttcagtcctaatgtcctgaactggcgggcactgaagtatgaagtgcaaggcgaagtgttcaccaaaccccagctgtggccctgaggcccagctgtgggtcctgaaggtacctcccggttttttacaccgcatgggccccacgtctctgtctctggtacctcccgcttttttacactgcatggttcycacgtctctgtctctgggcctttgttcccctatatgcattgcaggcctgctccaccctcctcagcgcctgagaatggaggtaaagtgtctggtctgggagctcgttaactatgmtgggaaayggtccaaaagaatcagaatttgaggtgttttgttttcatttttatttcaagttggacagatcttggagataatttcttacctcacatagatgagaaaactaacacccagaaaggagaaatgatgttataaaaaactcataaggcaagagctgagaaggaagcgctgatcttctatttaattccccacccatgacccccagaaagcaggagggcattgcccacattcacagggctcttcagtmtcagaatcaggacactggccaggtgtctggtttgggtccagagtgctcatcatcatgtcatagaactgctgggcccaggtctcctgaaatgggaagcccagcaataccacgcagtccctccactttctcaaagcacactggaaaggccattagaattgccccagcagagcagatctgctttttttccagagcaaaatgaagcactaggtataaatatgttgttactgccaagaacttaaatgactggtttttgtttgcttgcagtgctttcttaattttatggctcttctgggaaactcctccccttttccacacgaaccttgtggggctgtgaattctttcttcatccccgcattcccaatatacccaggccacaagagtggacgtgaaccacagggtgtcctgtcagaggagcccatctcccatytccccagctccctatytggaggatagttggatagttacgtgttcctagcaggaccaactacagtcttcccaaggattgagttatggactttgggagtgagacatcttyttgctgacgtgaacctgggaccaccagtagccatcttgtttgccacatggagagagactrtgaggacagaagccaaactggaagtggaggagccaagggattgacaaacaacagagccttgaccacgtggagtctctgaatcagccttgtctggaaccagatctacacctggactgcccaggtctataagccaataaagcccctgtttacttga

SEQ ID NO: 410 - DNA, 838 bp, Homo sapiens
caaactcccttactgctttggatataaatccaggcaggaggaggtagctytaaggcaagagatctaggacttctagcccctgaactttcagccgaatacatcttttccaaaggagtgaattcaggcccttgtatcactggcagcaggacgtgaccatggagaagctgttgtgtttcttggtcttgaccagcctctctcatgcttttggccagacagacatgtcgaggaaggcttttgtgtttcccaaagagtcggatacktcctatgtatccctcaaagcaccgttaacgaagcctctcaaagccttcactgtgtgcctccacttctacacggaactgtcctcgacccgtggtcctaatgtcctgaactggcgggcactgaagtatgaagtgcaaggcgaagtgttcaccaaaccccagctgtggccctgaggcccagctgtgggtcctgaagtgctttcttaattttatggctcttctgggaaactcctccccttttccacacgaaccttgtggggctgtgaattctttcttcatccccgcattcccaatatacccaggccacaagagtggacgtgaaccacagggtgtcctgtcagaggagcccatctcccatytccccagctccctatytggaggatagttggatagttacgtgttcctagcaggaccaactacagtcttcccaaggattgagttatggactttgggagtgagacatcttyttgctgctggatttccaagctgagaggacgtgaacctgggaccaccagtagccatcttgtttgccacatggagagagactrtgaggacagaagccaaactggaagtggaggagc

SEQ ID NO: 411 - DNA, 2652 bp, Homo sapiens
cgggcgcgtcctacctaaaccaggcagtttatggcaaatacctgccttgaccgtgcttaaattagtgaacttttgggcaccaactggtcgatttaccatagaaattggtagttgctgcaaaaagacttataatatgactcgatggaggaaaatttgataagcatgagagaagaccattcttttcatgttcgttacagaatggaagcttcttgcctagagctggccttggaaggggaacgtctatgtaaatcaggagactgccgcgctggcgtgtcattctttgaagctgcagttcaagttggaactgaagacctaaaaacacttagcgctatttacagccagttgggcaatgcttatttctatttgcatgattatgccaaagcattagaatatcaccatcatgatttaacccttgcaaggactattggagaccagctgggggaagcgaaagctagtggtaatctgggaaacaccttaaaagttcttgggaattttgacgaagccatagtttgttgtcagcgacacctagatatttccagagagcttaatgacaaggtgggagaagcaagagcactttacaatcttgggaatgtgtatcatgccaaagggaaaagttttggttgccctggtccccaggatgtaggagaatttccagaagaagtgagagatgctctgcaggcagccgtggatttttatgaggaaaacctatcattagtgactgctttgggtgaccgagcggcacaaggacgtgcrtttggaaatcttggaaacacacattacctccttggcaacttcagggatgcagttatagctcatgagcagcgtctccttattgcaaaagaatttggagataaagcagctgaaagaagagcatatagcaaccttggaaatgcatatatatttcttggtgaatttgaaactgcctcggaatactacaagaagacactactgttggcccgacagcttaaagaccgagctgtagaagcacagtcttgttacagtcttggaaatacatatactttacttcaagactatgaaaaggccattgattatcatctgaagcacttagcaattgctcaagagctgaatgatagaattggtgaaggaagagcatgttggagcttargaaatgcatacacagcactaggaaatcatgatcaagcaatgcattttgctgaaaagcacttggaaatttcaagaraggttggggataaaagtggtgaactaacagcacgacttaatctctcagaccttcaaatggttcttggtctgagctacagcacaaataactccataatgtctgaaaatactgaaattgatagcagtttgaatggtgtacgccccaagttgggacgccggcatagtatggaaaatatggaacttatgaagttaacaccagaaaaggtacagaactggaacagtgaaattcttgctaagcaaaaacctcttattgccaaaccttctgcaaagctactctttgtcaacagactgaaggggaaaaaatacaaaacgaattcctccactaaagttctccaagatgccagtaattctattgaccaccgaattccaaattctcagaggaaaatcagtgcagatactattggagatgaagggttctttgacttattaagccgatttcaaagcaataggatggatgatcagagatgttgcttacaagaaaagaactgccatacagcttcaacaacaacttcttccactccccctaaaatgatgctaaaaacytcatctgttcctgtggtatcccccaacacggatgagtttttagatcttcttgccagctcacagagtcgccgtctggatgaccagagggctagtttcagtaatttgccagggcttcgtctaacacaaaacagccagtcggtacttagccacctgatgactaatgacaacaaagaggctgatgaagatttctttgacatccttgtaaaatgtcaaggatccagattagatgatcaaagatgtgctccaccacctgctaccacaaagggtccgacagtaccagatgaagactttttcagccttattttacggtcccagggaaagagaatggatgaacagagagttcttttacaaagagatcaaaacagagacactgactttgggctaaaggactttttgcaaaataatgctttgttggagtttaaaaattcagggaaaaaatcggcagaccaytagttactatggatttattttttttcctttcaaacacggtaaggaaacaatctattacttttttccttaaaaggagaatttatagcactgtyatacagcttaaaatatttttagaatgatgtaaatagttaaccttcagtagtctattaaggcattaatacttctctggacatgcgcgtttgagggtggaggggtcctgtaaggtgcttcatcgtctgtgattactgcttgggatgtgttctttggcagcttgtgagattactttacctagtgtttataaagtaggaagttaagtgaatcatagattagaatttaatactcttatggaaataattttttaacatcttaattgacaatggcgtttttttatacataaccatggatgtagtggraaacaatgttgtttggtaaaaataatgtacttgatcaatytaaaaaagtatataaaatagtcttact

SEQ ID NO: 412 - DNA, 2884 bp, Homo sapiens
cgggcgcgtcctacctaaaccaggcagtttatggcaaatacctgccttgaccgtgcttaaattagtgaacttttgggcaccaactggtcgatttaccatagaaattggtagttgctgcaaaaagaaaatgttgctgaagtgctgctgaaagggccagagatgcaaggatttgggatacattttgaacctttaagctgtctgacattgacctcctttcattattaataaagaagaatcaggagcttaggatgtattaacaccaactcattaatatactaaccggacaatgttctacaaacaattctacattgtaaaggactggattggcacaaaataaaataattttattttattcagcttataatatgactcgatggaggaaaatttgataagcatgagagaagaccattcttttcatgttcgttacagaatggaagcttcttgcctagagctggccttggaaggggaacgtctatgtaaatcaggagactgccgcgctggcgtgtcattctttgaagctgcagttcaagttggaactgaagacctaaaaacacttagcgctatttacagccagttgggcaatgcttatttctatttgcatgattatgccaaagcattagaatatcaccatcatgatttaacccttgcaaggactattggagaccagctgggggaagcgaaagctagtggtaatctgggaaacaccttaaaagttcttgggaattttgacgaagccatagtttgttgtcagcracacctagatatttccagagagcttaatgacaaggtgggagaagcaagagcactttacaatcttgggaatgtgtatcatgccaaagggaaaagttttggttgccctggtccccaggatgtaggagaatttccagaagaagtgagagatgctctgcaggcagccgtggatttttatgaggaaaacctatcattagtgactgctttgggtgaccgagcggcacaaggacgtgcctttggaaatcttggaaacacacattacctccttggcaacttcagggatgcagttatagctcatgagcagcgtctccttattgcaaaagaatttggagataaagcagctgaaagaagagcatatagcaaccttggaaatgcrtatatatttcttggtgaatttgaaactgcctcggaatactacaagaagacactactgttggcccgacagcttaargaccgagctgtagaagcacagtcttgttacagtcttggaaatacatatactttacttcaagactatgaaaaggccattgattatcatctgaagcacttagcaattgctcaagagctgaatgatagaattggtgaaggaagagcatgttggagcttaggaaatgcatacacagcactaggaaatcatgatcaagcaatgcattttgctgaaaagcacttggaaatttcaagagaggttggggataaaagtggtgaactaacagcacgacttaatctctcagaccttcaaatggttcttggtctgagctacagcacaaataactccataatgtctgaaaatactgaaattgatagcagtttgaatggtgtacgccccaagttgggacgccggcatagtatggaaaatatggaacttatgaagttaacaccagaaaaggtacagaactggaacagtgaaattcttgctaagcaaaaacctcttattgccaaaccttctgcaaagctactctttgtcaacagactgaaggggaaaaaatacaaaaygaattcctccactaaagttctccaagatgccagtaattctattgaccaccgaattccaaattctcagaggaaaatcagtgcagatactattggagatgaagggttctttgacttattaagccgatttcaaagcaataggatggatgatcagagatgttgcttacaagaaaagaactgccatacagcttcaacaacaacttcttccactccccctaaaatgatgctaaaaacatcatctgttcctgtggtatcccccaacacggatgagtttttagatcttcttgccagctcacagagtcgccgtctggatgaccagagggctagtttcagtaatttgccagggcttcgtctaacacaaaacagccagtcggtacttagccacctgatgactaatgacaacaaagaggctgatgaagatttctttgacatccttgtaaaatgtcaaggatycagattagatgatcaaagatgtgctccaccacctgctaccacaaagggtccgacagtaccagatgaagactttttcagccttattttacggycccagggaaagagaatggatgaacagagagttcttttacaaagagatcaaaacagagacactgactttgggctaaaggactttttgcaaaataatgctttgttggagtttaaaaattcagggaaaaaatcggcagaccattagttactatggatttattttttttcctttcaaacacggtaaggaaacaatctattacttttttccttaaaaggagaatttatagcactgtaatacagcttaaaatatttttagaatgatgtaaatagttaaccttcagtagtctattaaggcattaatacttctctggacatgcgcgtttgagggtggaggggtcctgtaaggtgcttcatcrtctgtgattactgcttgggatgtgttctttggcagcttgygagattactttacctagtgtttataaagtaggaagttaagtgaatcatagattagaatttaatactcttatggaaataattttttaacatcttaattgacaatggcgkttttttatacataaccatggatgtagtgggaaacaatgttgtttggtaaaaataatgtacttgatcaatgtaaaaaagtatataaaatagtcttayt

SEQ ID NO: 413 - DNA, 2763 bp, Homo sapiens
gggcggtgttgagaccggcggagcggcgggacccctaggtggcggagggacgctccgggaaagcgaggggcgctacgagctctggcccacgtgacctgccgggggcgggagcagggggcgcgccggcctcctgcggtgcccctgccttggggaggggccgtgaccacccgtctgtcgcccgaggcggccgccgctgcaccttcaccgcgtacccgggacccgcccgcccgcgggagcttataatatgactcgatggaggaaaatttgataagcatgagagaagaccattcttttcatgttcgttacagaatggaagcttcttgcctagagctggccttggaaggggaacgtctatgtaaatcaggagactgccgcgctggcgtgtcattctttgaagctgcagttcaagttggaactgaagacctaaaaacacttagcgctatttacagccagttgggcaatgcttatytctatttgcatgattatgccaaagcattagaatatcaccatcatgatttaacccttgcaaggactattggagaccagctgggggaagcgaaagctagtggtaatctgggaaacaccttaaaagttcttgggaattttgacgaagccatagtttgttgtcagcgacacctagatatttccagagagcttaatgacaaggtgggagaagcaagagcactttacaatcttgggaatgtgtatcatgccaaagggaaaagttttggttgccctggtccccaggatgtaggagaatttccagaagaagtgagagatgctctgcaggcagccgtggatttttatgaggaaaacctatcattagtgactgctttgggtgaccgagcggcacaaggacgtgcctttggaaatcttggaaacacacattacctccttggcaacttcagggatgcagttatagctcatgagcagcgtctccttattgcaaaagaatttggagataaagcagctgaaagaagagcatatagcaaccttggaaatgcatatatatttcttggtgaatttgaaactgcctcggaatactacaagaagacactactgttggcccgacagcttaaagaccgagctgtagaagcacagtcttgttacagtcttggaaatacatatactttacttcaagactatgaaaaggccattgattatcatctgaagcacttagcaattgctcaagagctgaatgatagaattggtgaaggaagagcatgttggagcttaggaaatgcatacacagcactaggaaatcatgatcaagcaatgcattttgctgaaaagcacttggaaatttcaagagaggttggggataaaagtggtgaactaacagcacgacttaatctctcagaccttcaaatggttcttggtctgagctacagcacaaataactccataatgtctgaaaatactgaaattgatagcagtttgaatggtgtacgccccaagttgggacgccggcatagtatggaaaatatggaacttatgaagttaacaccagaaaaggtacagaactggaacagtgaaattcttgctaagcraaaacctcttattgccaaaccttctgcaaagctactctttgtcaacagactgaaggggaaaaaatacaaaacgaattcctccactaaagttctccaagatgccagtaattctattgaccaccgaattccaaattctcagaggaaaatcagtgcagatactattggagatgaagggttctttgacttattaagccgatttcaaagcaataggatggatgatcagagatgttgcttacaagaaaagaactgccatacagcttcaacaacaacttcttccactccccctaaaatgatgctaaaaacatcatctgttcctgtggtatcccccaacacggatgagtttttagatcttcttgccagctcacagagtcgrcgtctggatgaccagagggctagtttcagtaatttgccagggcttcgtctaacacaaaacagccagtcggtactragccacctgatgactaatgacaacaaagaggctgatgaagatttctttgacatccttgtaaaatgtcaaggatccagattagatgatcaaagatgtgctccaccacctgctaccacaaagggtccgacagtaccagatgaagactttttcagccttattttacggtcccagggaaagagaatggatgaacagagagttcttttacaaagagatcaaaacagagacactgactttgggctaaaggactttttgcaaaataatgctttgttggagtttaaaaattcagggaaaaaatcggcagaccattagttactatggatttattttttttcctttcaaacacggtaaggaaacaatctattacttttttccttaaaaggagaatttatagcactgtaatacagcttaaaatatttttagaatgatgtaaatagttaaccttcagtagtctattaaggcattaytacttctctggacatgcgcgtttgagggtggaggggtcctgtaaggtgcttcatcgtctgtgattactgcttgggatgtgttctttggcagcttgtgagattactttacctagtgtttataaagtaggaagttaagtgaatcatagattagaatttaatactcttatggaaataattttttaacatcttaattgacaatggcgtttttttatacataaccatggatgtagtgggaaacaatgttgtttggtaaaaataatgtacttgatcaatgtaaaaaagtatataaaatagtcttact

SEQ ID NO: 414 - DNA, 2995 bp, Homo sapiens
gggcggtgttgagaccggcggagcggcgggacccctaggtggcggagggacgctccgggaaagcgaggggcgctacgagctctggcccacgtgacctgccgggggcgggagcagggggcgcgccggcctcctgcggtgcccctgccttggggaggggccgtgaccacccgtctgtcgcccgaggcggccgccgctgcaccttcaccgcgtacccgggacccgcccgcccgcgggagaaatgttgctgaagtgctgctgaaagggccagagatgcaaggatttgggatacattttgaacctttaagctgtctgacattgacctcctttcattattaataaagaagaatcaggagcttaggatgtattaacaccaactcattaatatactaaccggacaatgttctacaaacaattctacattgtaaaggactggattggcacaaaataaaataattttattttattcagyttataatatgactcgatggaggaaaatttgataagcatgagagaagaccattcttttcatgttcgttacagaatggaagcttcttgcctagagctggccttggaaggggaacgtctatgtaaatcaggagactgccgcgctggcgtgtcattctttgaagctgcagttcaagttggaactgaagacctaaaaacacttagcgctatttacagccagttgggcaatgcttatttctatttgcatgattatgccaaagcattagaatatcaccatcatgatttaacccttgcaaggactattggagaccagctgggggaagcgaaagctagtggtaatctgggaaacaccttaaaagttcttgggaattttgacgaagccatagtttgttgtcagcgacacctagatatttccagagagcttaatgacaaggtgggagaagcaagagcactttacaatcttgggaatgtgtatcatgccaaagggaaaagttttggttgccctggtccccaggatgtaggagaatttccagaagaagtgagagatgctctgcaggcagccgtggatttttatgaggaaaacctatcattagtgactgctttgggtgaccgagcggcacaaggacgtgcctttggaaatcttggaaacacacattacctccttggcaacttcagggatgcagttatagctcatgagcagcgtctccttattgcaaaagaatttggagataaagcagctgaaagaagagcatatagcaaccttggaaatgcatatatatttcttggtgaatttgaaactgcctcggaatactacaagaagacactactgttggcccgacagcttaaagaccgagctgtagaagcacagtcttgttacagtcttggaaatacatatactttacttcaagactatgaaaaggccattgattatcatctgaagcacttagcaattgctcaagagctgaatgatagaattggtgaaggaagagcatgttggagcttaggaaatgcatacacagcactaggaaatcatgatcaagcaatgcattttgctgaaaagcacttggaaatttcaagagaggttrgggataaaagtggtgaactaacagcacgacttaatctctcagaccttcaaatggttcttggtctgagctacagcacaaataactccataatgtctgaaaatactgaaattgatagcagtttgaatggtgtacgccccaagttgggacgccggcatagtatggaaaatatggaacttatgaagttaacaccagaaaaggtacagaactggaacagtgaaattcttgctaagcaaaaacctcttattgccaaaccttctgcaaagctactctttgtcaacagactgaaggggaaaaaatacaaaacgaattcctccactaaagttctccaagatgccagtaattctattgaccaccgaattccaaattctcagargaaaatcagtgcagatactattggagatgaagggttctttgacttattaagccgatttcaaagcaataggatggrtgatcagagatgttgcttacaagaaaagaactgccatacagcttcaacaacaacttcttccactccccctaaaatgatgctaaaaacatcatctgttcctgtggtatcccccaacacggatgagtttttagatcttcttgccagctcacagagtcgccgtctggatgaccagagggctagtttcagtaatttgccagggcttcgtctaacacaaaacagccagtcggtacttagccacctgatgactaatgacaacaaagaggctgatgaagatttctttgacatccttgtaaaatgtcaaggatccagattagatgatcaaagatgtgctccaccacctgctaccacaaagggtccgacagtaccagatgaagactttttcagccttattttacggtcccagggaaagagaatggatgaacagagagttcttttacaaagagatcaaaacagagacactgactttgggctaaaggactttttgcaaaataatgctttgttggagtttaaaaattcagggaaaaaatcggcagaccattagytactatggatttattttttttcctttcaaacacggtaaggaaacaatctattacttttttccttaaaaggagaatttatagcactgtaatacagcttaaaatatttttagaatgatgtaaatagttaaccttcagtagtctattaaggcattaatacttctctggacatgcgcgtttgagggtggaggggtcctgtaaggtgcttcatcgtctgtgattactgcttgggatgtgttctttggcagcttgtgagattactttacctagtgtttataaagtaggaagttaagtgaatcatagattagaatttaatactcttatggaaataattttttaacatcttaattgacaatggcgtttttttatacataaccatggatgtagtgggaaacaatgttgtttggtaaaaataatgtacttgatcaatgtaaaaaagtatataaaatagtyttact

SEQ ID NO: 415 - DNA, 2938 bp, Homo sapiens
gtaaatagttgttatatggtattgtttagggaacaatgccaaggaaaaaagtctacatgttcagtagagacacaacttttcattttctttcctgaatatttttgatacgcggttggttgaatccactatgcagaacccacagatctggaggacctactataatttaatttaattctaagaaatgttgctgaagtgctgctgaaagggccagagatgcaaggatttgggatacattttgaacctttaagctgtctgacattgacctcctttcattattaataaagaagaatcaggagcttaggatgtattaacaccaactcattaatatactaaccggacaatgttctacaaacaattctacattgtaaaggactggattggcacaaaataaaataattttattttattcagcttataatatgactcgatggaggaaaatttgataagcatgagagaagaccattcttttcatgttcgttacagaatggaagcttcttgcctagagctggccttggaaggggaacgtctatgtaaatcaggagactgccgcgctggcgtgtcattctttgaagctgcagttcaagttggaactgaagacctaaaaacacttagcgctatttacagccarttgggcaatgcttatttctatttgcatgattatgccaaagcattagaatatcaccatcatgatttaacccttgcaaggactattggagaccagctgggggaagcgaaagctagtggtaatctgggaaacaccttaaaagttcttgggaattttgacgaagccatagtttgttgtcagcgacacctagatatttccagagagcttaatgacaaggtgggagaagcaagagcactttacaatcttgggaatgtgtatcatgccaaagggaaaagttttggttgccctggtccccaggatgtaggagaatttccagaagaagtgagagatgctctgcaggcagccgtggatttttatgaggaaaacctatcattartgactgctttgggtgaccgagcggcacaaggacgtgcctttggaaatcttggaaacacacattacctccttggcracttcagggatgcagttatagctcatgagcagcgtctccttattgcaaaagaatttggagataaagcagctgaaagaagagcatatagcaaccttggaaatgcatatatatttcttggtgaatttgaaactgcctcggaatactacaagaagacactactgttggcccgacagcttaaagaccgagctgtagaagcacagtcttgttacagtcttggaaatacatatactttacttcaagactatgaaaaggccattgattatcatctgaagcacttagcaattgctcaagagctgaatgatagaattggtgaaggaagagcatgttggagcttaggaaatgcatacacagcactaggaaatcatgatcaagcaatgcattttgctgaaaagcacttggaaatttcaagagaggttggggataaaagtggtgaactaacagcacgacttaatctctcagaccttcaaatggttcttggtctgagctacagcacaaataactccataatgtctgaaaatactgaaattgatagcagtttgaayggtgtacgccccaagttgggacgccggcatagtatggaaaatatggaacttatgaagttaacaccagaaaaggtacagaactggaacagtgaaattcttgctaagcaaaaacctcttattgccaaaccttctgcaaagctactctttgtcaacagactgaaggggaaaaaatacaaaacgaattcctccactaaagttctccaagatgccagtaattctattgaccaccgaattccaaattctcagaggaaaatcagtgcagatactattggagatgaagggttctttgacttattaagccgatttcaaagcaataggatggatgatcagagatgttgcttacaagaaaagaactgccatacagcttcaacaacaacttcttccactccccctaaaatgatgctaaaaacatcatctgttcctgtggtatcccccaacacggatgagttyttagatcttcttgccagctcacagagtcgccgtctggatgaccagagggctagtttcagtaatttgccagggcttcgtctaacacaaaacayccagtcggtacttagccacctgatgactaatgacaacaaagaggctgatgaagatttctttgacatccttgtaaaatgtcaaggatccagattagatgatcaaagatgtgctccaccacctgctaccacaaagggtccgacagtaccagatgaagactttttcagccttattttacggtcccagggaaagagaatggatgaacagagagttcttttacaaagagatcaaaacagagacactgactttgggctaaaggactttttgcaaaataatgctttgttggagtttaaaaattcagggaaaaaatcggcagaccattagttactatggatttattttttttcctttcaaaracggtaaggaaacaatctattacttttttccttaaaaggygaatttatagcactgtaatacagcttaaaatatttttagaatgatgtaaatagttaaccttcagtagtctattaaggcattaatacttctctggacatgcgcgtttgkgggtggaggggtcctgtaaggtgcttcatcgtctgtgattactgcttgggatgtgttctttggcagcttgtgagattactttacctagtgtttatyaagtaggaagttaagtgaatcatagattagaatttaatactcttatggaaataattttttaacatcttaattgacaatggcgtttttttatacataaccatggatgtagtgggaaacaatgttgtttggtaaaaataatgtacttgatcaatgtaaaaaagtatataaaatagtcttact

SEQ ID NO: 416 - DNA, 4996 bp, Homo sapiens
  misc_feature (1)...(4996): n = A,T,C or G, or insertion/deletion polymorphism (see Tables 1-2)
cagccgaacaattcgatgacgaggcccaggaagcacgctgaaaccctgggcggcggcaagctgtgcgacctcttctgcggccggcctgggcaggtgtcttcctcgagaggcaggcaggggatcccggacactagctttatcgtcatctgggaaattgttaaaaatgcaaattcgcaagtttgagagccatggttccaagaaactgcataagcatacgaaataagttgcagcctcccgacttataccctggtacttctagtctaaaacaggattrgactctactaatccagccttatacaggatgctgtgttctttgctcctttgtgaatgtctgttgctggtagctggttatgctcatgatgatgactggattgaccccacagacatgcttaactatgatgctgcttcaggaacaatgagaaaatctcaggcaaaatatggtatttcaggggaaaaggatgtcagtcctgacttgtcatgtgctgatgaaatatcagaatgttatcacaaacttgattctttaacttataagattgatgagtgtgaaaagaaaaagagggaagactatgaaagtcaaagcaatcctgtttttaggagatacttaaataagattttaattgaagctggaaagcttggacttcctgatgaaaacaaaggcgatatgcattatgatgctgagattatccttaaaagagaaactttgttagaaayacagaagtttctcaatggagaagactggaaaccaggtgccttggatgatgcactaagtgatattttaattaattttaagtttcatgattttgaaacatggaagtggcgnttcgaagattcctttggagtggatccatataatgtgttaatggtacttctttgtctgctctgcatcgtggttttagtggctactgagctgtggacatatgtacgttggtacactcagttgagacgtgttttaatcatcagctttctgtrcagtttgggatggaattggatgtatttatataagctagcttttgcacagcatcaggctgaagtcgccaagatggagccattaaacaatgtgtgtgccaaaaagatggactggactggaagtatctgggaatggtttagaagttcatggacctataaggatgacccatgccaaaaatactatgagctcttactagtcaaccctatttggttggtcccaccaacaaaggcacttgcagttacattcaccacatttgtaacggagccattgaagcatattggaaaaggaactggggaatttattaaagcactcatgaaggaaattccagcgctgcttcatcttccagtgctgataattatggcattagccatcctgagtttctgctatggtgctggaaaatcagttcatgtgctgagacatataggcggtcctgagagcgaacctccccaggcacttcggccacgggatagaagacggcaggaggaaattgattatagacctgatggtggagcaggtgatgccgatttccattataggggccaaatgggccccactgagcaaggcccttatgccaaaacgtatgagggtagaagagagattttgagagagagagatgttgacttgagatttcagactggcaacaagagccctgaagtgctccgggcatttgatgtaccagacgcagaggcacgagagcatcccacggtggtacccagtcataaatcacctgttttggatacaaagcccaaggagacaggtggaatcctgggggaaggcacaccgaaagaaagcagtactgaaagcagccagtcggccaagcctgtctctggccaagacacatcagggaatacagaaggttcacccgcagcggaaaaggcccagctcaagtctgaagccgcaggcagcccagaccaaggcagcacatacagccccgcaagaggtgtggctggaccacgtggacaggatccggtcagcagcccctgtggctagagraacaccagcacaaacgacagcctcaagtctccttcgagctttatatccatttggggatgaagtctactttgacagctagcaaggcgacatgcaactgttgttgaatgatgacagcaattcaggaaagacttaaatatgaaagcaaattgaacacatcgggtgtttgttatcagaaaagagatgagatgagataagacttgtttattgactagccaatatgtcattaaaattaaggtttatattgtgaagcttttttgaaattttacttttttttgagagttttgctctgtcacccaggctggagtgaggtggtacaatctcggctcactgcaacctccacctcccaggttcaagagattrtcctgcctcagtctcccgagtagctaggattacagatgtgcatcaccatgcctggctaatttttgtattttttagtagagatggggtttcaccatgttggtcaggctggtctcgaactcctgacctcaagtgacccgcccttgtcggcctcccaaagtgctgggattacaggcatgagccattgtgcccagcctatatagtgtgaagcttttaggaaaatcagaacagggtagacagctgttaaaaacaatgtttaaatggaataatgttgaatgtttacaggctgtaagaactattgtatacacaaaataatacacaaagtttgtactttgtgtacaaatacaaatttgtactttgtgtacaaataatacaaaaagtttgtatacacaaacttyttacgttgtggtttggtatattgtcttaactgaattttcttataagaaccccatgaaacttacctgagtttttaaaatgctatccaggacatcataccttatagtatacatgaaacataatgtaatccaggttgtaatttagaactttttttttttttttagctgagcacttaatgtaattaattccaggttatgactcttaaaaaacattggccattagagaaatagttctatttgcccatccaaatcacctgaatgactttttgaaagaataggggtccacatccccagatcccatrccagctgtgcacagtctgaagcaagcagagtgaaacaagttggcaacttgttccaagcgtgggcctttgcagtctgtgatccagtgttactccaggtcccagtctgtcccatacttgtcttttgctacagttagttagttactttgttatcatccccttgtaaactgccttcaatatctgggataaggaagacaaagcttaatgacaactaaggttctagctgacatctttctttcatatttaatttttgtgagttttcatctgttttctgtttgtttatgtgtcctaggttcttgacctaaccacatgggttttgttttttgtttttatattagaacttagaaaagtttgttttacagcagtattatggaacagaagagaccattttaaataatttttttaaacagcccaaaacacacaaaagatacttgttttctagagacagggtcttgctctgtcacccaggctggagtgcagtggcacgatcatagctcagtgcagcctccacctcctgggctcaagtggtcctcctgcctcagcctcttaagcagttgggactacaggtgtgtgccagcatgcttgctgttttttttttttttgagacagagtcttgctctgtcactcaggctggagtccagtggcttggtctcagctcactgcaatctctgcctcccaggggttcaagtgattctcctgcctcagcctcccaagtagctgaaactacaggcgcatgccaccatgcccagctaatttttgtatttttagtagagacagggtttcactatgttggccaggctggtctcaaactcccgacctcaagtgatccgcccgcttcggcctcccaaagtgctgggattacaggtgtgagccactgcgcctggctgctgatttatttttcatagacacgggggtctatgttgcccaggttggtcttgaactcctagcctcaagcgatcctcctgcctcagcctcccaatgtgctgggattacaggaatgagccaccatgcccagcccaagaagtagagtttcttttatactgactttggcctaaaaaaacagattttcatggaggaaaaaaaaacctagatttttagtaagactattttatatacttttttacattgatcaagtacattatttttaccaaacaacattgtttcccactacatccatggttatgtataaaaaaacgccattgtcaattaagatgttaaaaaattatttccataagagtattaaattctaatctatgattcacttaacttcctactttataaacactaggtaaagtaatctcacaagctgccaaagaacacatcccaagcagtaatcacagacgatgaagcaccttacaggacccctccaccctcaaacgcgcatgtccagagaagtattaatgccttaatagactactgaaggttaactatttacatcattctaaaaatattttaagctgtattacagtgctataaattctccttttaaggaaaaaagtaatagattgtttccttaccgtgtttgaaaggaaaaaaaataaatccatagtaactaatggtctgccgattttttccctgaatttttaaactccaacaaagcattattttgcaaaaagtcctttagcccaaagtcagtgtctctgttttgatctctttgtaaaagaactctctgttcatccattctctttccctgggaccgtaaaataaggctgaaaaagtcttcatctggtactgtcggaccctttgtggtagcaggtggtggagcacatctttgatcatctaatctggatccctagaagtttatgagagagattaaaagacatactgtgggaaagaaagcaccaagctatgttaaatctctcagtcacaacaagaaaacgcagttgtaaacttttatttggggcttctcagaaattaatctttgtttttatattgttctctttagttcccagcctgatttctgaaagaaataatctttaaacctg

SEQ ID NO: 417 - DNA, 3954 bp, Homo sapiens
cagccgaacaattcgatgacgaggcccaggaagcacgctgaaaccctgggcggcggcaagctgtgcgacctcttctgcggccggcctgggcaggtgtcttcctcgagaggcaggcaggggatcccggacactagctttatcgtcatctgggaaattgttaaaaatgcaaattcgcaagtttgagagccatggttccaagaaactgcataagcatacgaaataagttgcagcctcccgacttataccctggtacttctagtctaaaacaggattrgactctactaatccagccttatacaggatgctgtgttctttgctcctttgtgaatgtctgttgctggtagctggttatgctcatgatgatgactggattgaccccacagacatgcttaactatgatgctgcttcaggaacaatgagaaaatctcaggcaaaatatggtatttcaggggaaaaggatgtcagtcctgacttgtcatgtgctgatgaaatatcagaatgttatcacaaacttgattytttaacttataagattgatgagtgtgaaaagaaaaagagggaagactatgaaagtcaaagcaatcctgtttttaggagatacttaaataagattttaattgaagctggmaagcttggacttcctgatgaaaacaaaggcgatatgcattatgatgctgagattatccttaaaagagaaactttgttagaaatacagaagtttctcaatggagaagactggaaaccaggtgccttggatgatgcactaagtgatatttraattaattttaagtttcatgattttgaaacatggaagtggcgattcgaagattcctttggagtggatccatataatgtgttaatggtacttctttgtctgctctgcatcgtggttttagtggctactgagctgtggacatatgtacgttggtacactcagttgagacgtgttttaatcatcagctttctgttcagtttgggatggaattggatgtatttatataagctagcttttgcacagcatcaggctgaagtcgccaagatggagccattaaacaatgtgtgtgccaaaaagatggactggactggaagtatctgggaatggtttagaagttcatggacctataaggatgacccatgccaaaaatactatgagctcttactagtcaaccctatttggttggtcccaccaacaaaggcacttgcagttacattcaccacatttgtaacggagccattgaagcatattggaaaaggaactggggaatttattaaagcactcatgaaggaaattccagcgctgcttcatcttccagtgctgataattatggcattagccatcctgagtttctgctatggtgctggaaaatcagttcatgtgctgagacatataggcggtcctgagagcgaacctccccaggcacttcggccacgggatagaagacggcaggaggaaattgattatagacctgatggtggagcaggtgatgccgatttccattataggggccaaatgggccccactgagcaaggcccttatgccaaaacgtatgagggtagaagagagattttgagagagagagatgttgacttgagatttcagactggcaacaagagccctgaagtgctccgggcatttgatgtaccagacgcagaggcacgagagcatcccacggtggtacccagtcataaatcacctgttttggatacaaagcccaaggagacaggtggaatcctgggggaaggcacaccgaaagaaagcagtactgayagcagccagtcggccaagcctgtctctggccaagacacatcagggaatacagaaggttcacccgcagcggaaaaggcccagctcaagtctgaagccgcaggcagcccagaccaaggcagcacatacagccccgcaagaggtgtggctggaccacgtggacaggatccggtcagcagcccctgtggctagaggaacaccagcacaaacgacagcctcaagtctccttcgagctttgtaaagtatactcttcactctctttctcttctctgcaagaattctgattactacaaaggtgccaacttcaacattcacatttcaacttcaacattcacatttttactgacaattagaattaacaaycacgttatatatgtaaaagcttttcatttcatcttctctttgatatttacatcccataaagtaagaagtgtttattttaagatgaacagatgacaggcatcactgattctggatagttaaggaggccagtttgaattggggacattgaaaaagaaattttattgttacaggcacttacgggaacccactaaccaatttacattgcctagtgaatccactagagttaaggccacccacttgatgcctccagcatcttcatgcagccatggagtatcgttaccaggatcagtctgactgacacctcagcttatctctacgcaggctgcccacaggtcactgtggctgtagtttcatcttttccacagctattactacgcctgcatccttattgttcrttttactttgtttacttagagaaaactgaagactgccagggcaatttagataacatagcttgttatattggtaatctgttttacagagtcagtcgactgaaaatgactttattcttttcccccaccaattgaagtgcatgggctttttataaaacctattttttgtgttactcagaatcctagcagtggagactattagatattaccatatcttaattcatattatagcaaatcatattgtcttgtccataggaagtttgcatttttagagatctatacatagagaataccatgatgaygaagaagagagttgggtgtcttccttaactgcagacaggacatcagtcagcactttacattagtctttctgattatcaaaagcattcctcattttaaactttttaaaaagcaatgcataaattttgtacctgtccttagcagacttcacagacatcaggtgtcctttgttttaaccatattcacactacaagttatgttcaactgcttactaaaagtgataccagtcaggaataaagtctttaaattttcatgcagatatttgtatcccaagcacttgcttttttattttaatatgaaatgcagaatacacatttttggatccaggaagtgttacttacgtgcctgtaacaatgtaattttaggccaggtgcagtggctcatgcctacagtcctagcactttggaaggttgagggaggatgatcgcttaagttcagttgttgaaatgcagaatacacatttttggatccaggaagtgttacttacgtgcctgtaacaatgtaattttaggccaggtgcagtggctcatgcctacagtcctagcactttggaaggttgagggaggatgatcgcttaagctcagttgttcaaggctatgtactaaaaataaaactagccaggcatggtggtacacgcctgtagtcccagctacttggagggctgaggcaagaggatcgtgaggtggcagtgagttatgatcgagccactgtactccagcctgggtgacagagcaagaccttgtctcaaaattatacatgttaatatattctagtttaatattgcaaacatctttagaatttcatcagaaacgtgattttttctaagaaatgcaaaaggattttaggatttttaacacagaggacatgtttaacaaatgaatcctgacagacacctgcagtttagaataaatttgtgaacatccatgcgtataaagtgtcctcttgggacaagacatgttcacactgacttggggaatatgcccccaaggtgagagctgtcttttgaactgtgatctgactctgaaaagtagtgaatgccccaggtgatagactgtaactgtgagtggaattaatgctgcttgcatgccttttaatccaaaaccaaattcttttaaaaaatttttaaataaaatt

SEQ ID NO: 418 - DNA, 4685 bp, Homo sapiens
cagccgaacaattcgatgacgaggcccaggaagcacgctgaaaccctgggcggcggcaagctgtgcgacctcttctgcggccggcctgggcaggtgtcttcctcgagaggcaggcaggggatcccggacccttatacaggatgctgtgttctttgctcctttgtgaatgtctgttgctggtagctggttatgctcatgatgatgactggattgaccccacagacatgcttaactatgatgctgcttcaggaacaatgagaaaatctcaggcaaaatatggtatttcaggggaaaaggatgtcagtcctgacttgtcatgtgctgatgaaaratcagaatgttatcacaaacttgattctttaacttataagattgatgagtgtgaaaagaaaaagagggaagactatgaaagtcaaagcaatcctgtttttaggagatacttaaataagattttaattgaagctggaaagcttggactttttcatgattttgaaacatggaagtggcgattcgaagattcctttggagtggatccatataatgtgttaatggtacttctttgtctgctctgcatcgtggttttagtggytactgagctgtggacatatgtacgttggtacactcagttgagacgtgttttaatcatcagctttctgttcagtttgggatggaattggatgtatttatataagctagcttttgcacagcatcaggctgaagtcgccaagatggagccattaaacaatgtgtgtgccaaaaagatggactggactggaagtatctgggaatggtttagaagttcatggacctataaggatgacccatgccaaaaatactatgagctcttactagtcaaccctatttggttggtcccaccaacaaaggcacttgcagttacattcaccacatttgtaacggagccattgaagcatattggaaaaggaactggggaatttattaaagcactcatgaaggaaattycagcgctgcttcatcttccagtgctgataattatggcattagccatcctgagtttctgctatggtgctggaaaatcagttcatgtgctgagacatataggcggtcctgmgagcgaacctccccaggcacttcggccacgggatagaagacggcaggaggaaattgattatagacctgatggtggagcaggtgatgccgatttccattataggggccaaatgggccccactgagcaaggcccttatgccaaaacgtatragggtagaagagagattttgagagagagagatgttgacttgagatttcagactggcaacaagagccctgaagtgctccgggcatttgatgtaccagacgcagaggcacgagagcatcccacggtggtacccagtcataaatcacctgttttggatacaaagcccaaggagacaggtggaatcctgggggaaggcacaccgaaagaaagcagtactgaaagcagccagtcggccaagcctgtctctggccaagacacatcagggaatacagaaggttcacccgcagcggaaaaggcccagctcaagtctgaagccgcaggcagcccagaccaaggcagcacatacagccccgcaagaggtgtggctggaccacgtggacaggatccggtcagcagcccctgtggctagaggaacaccagcacaaacgacagcctcaagtctccttcgagctttatatccatttggggatgaagtctactttgacagctagcaaggcgacatgcaactgttgttgaatgatgacagcaattcaggaaagacttaaatatgaaagcaaattgaacacatcgggtgtttgttatcagaaaagagatgagatgagataagacttgtttattgactagccaatatgtcattaaaattaaggtttatattgtgaagcttttttgaaattttacttttttttgagagttttgctctgtcacccaggctggagtgaggtggtacaatctcggctcactgcaacctccacctcccaggttcaagagattctcctgcctcagtctcccgagtagctaggattacagatgtgcatcaccatgcctggctaatttttgtattttttagtagagatggggtttcaccatgttggtcaggctggtctcgaactcctgacctcaagtgacccgcccttgtcggcctcccaaagtgctgggattacaggcatgagccattgtgcccagcctatatagtgtgaagcttttaggaaaatragaacagggtagacagctgttaaaaacaatgtttaaatggaataatgttgaatgtttacaggctgtaagaactattgtatacacaaaataatacacaaagtttgtactttgtgtacaaatacaaatttgtactttgtgtacaaataatacaaaaagtttgtatacacaaactttttacgttgtggtttggtatattgtcttaactgaattttcttataagaaccccatgaaacttacctgagtttttaaaatgctatccaggacatcataccttatagtatacatgaaacataatgtaatccaggttgtaatttagaactttttttttttttttagctgagcacttaatgtaattaattrcaggttatgactcttaaaaaacattggccattagagaaatagttctatttgcccatccaaatcacctgaatgactttttgaaagaataggggtccacatccccagatcccatcccagctgtgcacagtctgaagcaagcagagtgaaacaagttggcaacttgttccaagcgtgggcctttgcagtctgtgatccagtgttactccaggtcccagtctgtcccatacttgtcttttgctacagttagttagttactttgttatcatccccttgtaaactgccttcaatatctgggataaggaagacaaagcttaatgacaactaaggttctagctgacatctttctttcatatttaatttttgtgagttttcatctgttttctgtttgtttatgygtcctaggttcttgacctaaccacatgggttttgttttttgtttttatattagaacttagaaaagtttgttttacagcagtattatggaacagaagagaccattttaaataatttttttaaacagcccaaaacacacaaaagatacttgttttctagagacagggtcttgctctgtcacccaggctggagtgcagtggcacgatcatagctcagtgcagcctccacctcctgggctcaagtggtcctcctgcctcagcctcttaagcagttgggactacaggtgtgtgccagcatgctrgctgttttttttttttttgagacagagtcttgctctgtcactcaggctggagtccagtggcttggtctcagctcactgcaatctctgcctcccaggggttcaagtgattctcctgcctcagcctcccaagtagctgaaactacaggcgcatgccaccatgcccagctaatttttgtatttttagtagagacagggtttcactatgttggccaggctggtctcaaactcccgacctcaagtgatccgcccgcttcggcctcccaaagtgctgggattacaggtgtgagccactgcgcctggctgctgatttatttttcatagacacgggggtctatgttgcccaggtyggtcttgaactcctagcctcaagcgatcctcctgcctcagcctcccaatgtgctgggattacaggaatgagccaccatgcccagcccaagaagtagagtttcttttatactgactttggcctaaaaaaacagattttcatggaggaaaaaaaaacctagattrttagtaagactattttatatacttttttacattgatcaagtacattatttttaccaaacaacattgtttcccactacatccatggttatgtataamaaaacgccattgtcaattaagatgttaaaaaattatttccataagagtattaaattctaatctatgattcacttaacttcctactttataaacactaggtaaagtaarctcacaagctgccaaagaacacatcccaagcagtaatcayagacgatgaagcaccttacaggacccctccaccctcaaacgcgcatgtccagagaagtattaatgccttaatagactactgaaggttaactatttacatcattctaaaaatattttaagctgtattacagtgctataaattctccttttaaggaaaaaagtaatagattgtttccttaccgtgtttgaaaggaaaaaaaataaatccatagtaactaatggtctgccgattttttccctgaatttttaaactccaacaaagcattattttgcaaaaagtcctttagcccaaagtcagtgtctctgttttgatctctttgtaaaagaactctctgttcatccattctctttcccrgggaccgtaaaataaggctgaaaaagtcttcatctggtactgtcggaccctttgtggtagcaggtggtggagcacatctttgatcatctaarctggatccctagaagtttatgagagagattaaaagacatactgtgggaaagaaagcaccaagctatgttaaatctctcagtcacaacaagaaaacgcagttgtaaacttttatttggggcttctcagaaattaatctttgtttttatattgttctctttagttcccagcctgatttctgaaagaaataatctttaaacctg

SEQ ID NO: 419 - DNA, 4835 bp, Homo sapiens
cagccgaacaattcgatgacgaggcccaggaagcacgctgaaaccctgggcggcggcaagctgtgcgacctcttctgcggccggcctgggcaggtgtcttcctcgagaggcaggcaggggatcccggacccttatacaggatgctgtgttctttgctcctttgtgaatgtctgttgctggtagctggttatgctcatgatgatgactggattgaccccacagacatgcttaactatgatgctgcttcaggaacaatgagaaaatctcaggcaaratatggtatttcaggggaaaaggatgtcagtcctgacttgtcatgtgctgatgaaatatcagaatgttatcacaaacttgattctttaacttataagattgatgagtgtgaaaagaaaaagagggaagactatgaaagtcaaagcaatcctgtttttaggagatacttaaataagattttaattgaagctggaaagcttggacttcctgatgaaaacaaaggcgatatgcattatgatgctgagattatccttaaaagagaaactttgttrgaaatacagaagtttctcaatggagaagactggaaaccaggtgccttggatgatgcactaagtgatattttaattaattttaagtttcatgattttgaaacatggaagtggcgattcgaagattcctttggagtggytccatataatgtgttaatggtacttctttgtctgctctgcatcgtggttttagtggctactgagctgtggacatatgtacgttggtacactcagttgagacgtgttttaatcatcagctttctgttcagtttgggatggaattggatgtatttatataagctagcttttgcacagcatcaggctgaagtcgccaagatggagccattaaacaatgtgtgtgccaaaaagatggactggactggaagtatctgggaatggtttagaagttcatggacctataaggatgacccatgccaaaaatactatgagctcttactagtcaaccctatttggttggtcccaccaacaaaggcacttgcagttacattcaccacatttgtaacggagccaytgaagcatattggaaaaggaactggggaatttattaaagcactcatgaaggaaattccagcgctgcttcatcttccagtgctgataattatggcattagccatcctgamtttctgctatggtgctggaaaatcagttcatgtgctgagacatataggcggtcctgagagcgaacctccccaggcacttcggccacgggatagaagacggcaggaggaaattgattatagacctgatggtggagcaggtgatgccgatrtccattataggggccaaatgggccccactgagcaaggcccttatgccaaaacgtatgagggtagaagagagattttgagagagagagatgttgacttgagatttcagactggcaacaagagccctgaagtgctccgggcatttgatgtaccagacgcagaggcacgagagcatcccacggtggtacccagtcataaatcacctgttttggatacaaagcccaaggagacaggtggaatcctgggggaaggcacaccgaaagaaagcagtactgaaagcagccagtcggccaagcctgtctctggccaagacacatcagggaatacagaaggttcacccgcagcggaaaaggcccagctcaagtctgaagccgcaggcagcccagaccaaggcagcacatacagccccgcaagaggtgtggctggaccacgtggacaggatccggtcagcagcccctgtggctagaggaacaccagcacaaacgacagcctcaagtctccttcgagctttatatccatttggggatgaagtctactttgacagctagcaaggcgacatgcaactgttgttgaatgatgacagcaattcaggaaagacttaaatatgaaagcaaattgaacacatcgggtgtttgttatcagaaaagagatgagatgagataagacttgtttattgactagccaatatgtcattaaaattaaggtttatattgtgaagcttttttgaaattttacttttttttgagagttttgctctgtcacccaggctggagtgaggtggtacaatctcggctcactgcaacctccacctcccaggttcaagagattctcctgcctcagtctcccgagtagctaggattacagatgtgcatcaccatgcctggctaatttttgtattttttagtagagatggggtttcaccatgttggtcaggctggtctcgaactcctgacctcaagtgacccgcccttgtcggcctcccaaagtgctggrattacaggcatgagccattgtgcccagcctatatagtgtgaagcttttaggaaaatcagaacagggtagacagctgttaaaaacaatgtttaaatggaataatgttgaatgtttacaggctgtaagaactattgtatacacaaaataatacacaaagtttgtactttgtgtacaaatacaaatttgtactttgtgtacaaataatacaaaaagtttgtatacacaaactttttacgttgtggtttggtatattgtcttaactgaattttcttataagaaccccatgaaacttacctgagtttttaaaatgctatccaggacatcataccttatagtatacatgaaacataatgtaatccrggttgtaatttagaactttttttttttttttagctgagcacttaatgtaattaattccaggttatgactcttaaaaaacattggccattagagaaatagttctatttgcccatccaaatcacctgaatgactttttgaaagaataggggtccacatccccagatcccatcccagctgtgcacagtctgaagcaagcagagtgaaacaagttggcaacttgttccaagcgtgggcctttgcagtctgtgatccagtgttactccaggtcccagtctgtcccatacttgtcttttgctacagttagttagttactttgttatcatccccttgtaaactgccttcaatatctgggataaggaagacaaagcttaatgacaactaaggttctagctgayatctttctttcatatttaatttttgtgagttttcatctgttttctgtttgtttatgtgtcctaggttcttgacctaaccacatgggttttgttttttgtttttatattagaacttagaaaagtttgttttacagcagtattatggaacagaagagaccattttaaataatttttttaaacagcccaaaacacacaaaagatacttgttttctagagacagggtcttgctctgtcacccaggctggagtgcagtggcacgatcatagctcagtgcagcctccacctcctgggctcaagtrgtcctcctgcctcagcctcttaagcagttgggactacaggtgtgtgccagcatgcttgctgttttttttttttttgagacagagtcttgctctgtcactcaggctggagtccagtggcttggtctcagctcactgcaatctctgcctcccaggggttcaagtgattctcctgcctcagcctcccaagtagctgaaactacaggcgcatgccaccatgcccagctaatttttgtatttttagtagagacagggtttcactatgttggccaggctggtctcaaactcccgacctcaagtgatccgcccgcttcggcctcccaaagtgctgggattacaggtgtgagccactgcgcctggctgctgatttatttttcatagacacgggggtctatgttgcccaggttggtcttgaactcctagcctcaagcgatcctcctgcctcagcctcccaatgtgctgggattacaggaatgagccaccatgcccagcccaagaagtagagtttcttttatactgactttggcctaaaaaaacagattttcatggaggaaaaaaaaacctagatttttagtaagactattttatatacttttttacattgatcaagtacattatttttaccaaacaacattgtttcccactacatccatggttatgtataaaaaaacgccattgtcaattaagatgttaaaaaattatttccataagagtattaaattctaatctatgattcacttaacttcctactttataaacactaggtaaagtaatctcacaagctgccaaagaacacatcccaagcagtaatcacagacgatgaagcaccttacaggacccctccaccctcaaacgcgcatgtccagagaagtattaatgccttaatagactactgaaggttaactatttacatcattctaaaaatattttaagctgtattacagtgctataaattctccttttaaggaaaaaagtaatagattgtttccttaccgtgtttgaaaggaaaaaaaataaatccatagtaactaatggtctgccgattttttccctgaatttttaaactccaacaaagcattattttgcaaaaagtcctttagcccaaagtcagtgtctctgttttgatctctttgtaaaagaactctctgttcatccattctctttccctgggaccgtaaaataaggctgaaaaagtcttcatctggtactgtcggaccctttgtggtagcaggtggtggagcacatctttgatcatctaatctggatccctagaagtttatgagagagattaaaagacatactgtgggaaagaaagcaccaagctatgttaaatctctcagtcacaacaagaaaacgcagttgtaaacttttatttggggcttctcagaaattaatctttgtttttatattgttctctttagttcccagcctgatttctgaaagaaataatctttaaacctg

SEQ ID NO: 420 - DNA, 4846 bp, Homo sapiens
  misc_feature (1)...(4846): n = A,T,C or G, or insertion/deletion polymorphism (see Tables 1-2)
cagccgaacaattcgatgacgaggcccaggaagcacgctgaaaccctgggcggcggcaagctgtgcgacctcttctgcggccggcctgggcaggtgtcttcctcgagaggcaggcaggggatcccggacactagctttatcgtcatctgggaaattgttaaaaatgcaaattcgcaagtttgagagccatggttccaagaaactgcataagcatacgaaataagttgcagcctcccgacttataccctggtacttctagtctaaaacaggattrgactctactaatccagccttatacaggatgctgtgttctttgctcctttgtgaatgtctgttgctggtagctggttatgctcatgatgatgactggattgaccccacagacatgcttaactatgatgctgcttcaggaacaatgagaaaatctcaggcaaaatatggtatttcaggggaaaaggatgtcagtcctgacttgtcatgtgctgatgaaatatcagaatgttatcacaaacttgattctttaacttataayattgatgagtgtgaaaagaaaaagagggaagactatgaaagtcaaagcaatcctgtttttaggagatacttaaataagattttaattgaagctggaaagcttggactttttcatgattttgaaacatggaagtggcgattcgaagattcctttggagtggatccatataatgtgttaatggtacttctttgtctgctctgcatcgtggttttagtggctactgagctgtggacatatgtacgttggtacactcagttgagacgtgttttaatcatcagctttctgttcagtttgggatggaattggatgtatttatataagctagcttttgcacagcatcaggctgaagtcgccaagatggagccattaaacaatgtgtgtgccaaaaagayggactggactggaagtatctgggaatggtttagaagttcatggacctataaggatgacccatgccaaaaatactatgagctcttactagtcaaccctatttggttggtnccaccaacaaaggcacttgcagttacattcaccacatttgtaacggagccattgaagcatattggaaaaggaactggggaatttattaaagcactcatgaaggaaattccagcgctgcttcatcttccagtgctgataattatggcatragccatcctgagtttctgctatggtgctggaaaatcagttcatgtgctgagacatataggcggtcctgagagcgaacctccccaggcacttcggccacgggatagaagacggcaggaggaaattgattatagacctgatggtggagcaggtgatgccgatttccattataggggccaaatgggccccactgagcaaggcccttatgccaaaacgtatgagggtagaagagagattttgagagagagagatgttgacttgagatttcagactggcaacaagagccctgaagtgctccgggcatttgatgtaccagacgcagaggcacgagagcatcccacggtggtacccagtcataaatcacctgttttggatacaaagcccaaggagacaggtggaatcctgggggaaggcacaccgaaagaaagcagtactgaaagcagccagtcggccaagcctgtctctggccaagacacatcagggaatacagaaggttcacccgcagcggaaaaggcccagctcaagtctgaagccgcaggcagcccagaccaaggcagcacatacagccccgcaagaggtgtggctggaccacgtggacaggatccggtcagcagcccctgtggctagaggaacaccagcacaaacgacagcctcaagtctccttcgagctttatatccatttggggatgaagtctactttgacagctagcaaggcgacatgcaactgttgttgaatgatgacagcaattcaggaaagacttaaatatgaaagcaaattgaacacatcgggtgtttgttatcagaaaagagatgagatgagataagacttgtttattgactagccaatatgtcattaaaattaaggtttatattgtgaagcttttttgaaattttacttttttttgagagttttgctctgtcacccaggctggagtgaggtggtacaatctcggctcactgcaacctccacctcccaggttcaagagattctcrtgcctcagtctcccgagtagctaggattacagatgtgcatcaccatgcctggctaatttttgtattttttagtagagatggggtttcaccatgttggtcaggctggtctcgaactcctgacctcaagtgacccgcccttgtcggcctcccaaagtgctgggattacaggcatgagccattgtgcccagcctatatagtgtgaagcttttaggaaaatcagaacagggtagacagctgttaaaaacaatgtttaaatggaataatgttgaatgtttacaggctgtaagaactattgtatacacaaaataatacacaaagtttgtactttgtgtacaaatacaaatttgtactttgtgtacraataatacaaaaagtttgtatacacaaactttttacgttgtggtttggtatattgtcttaactgaattttcttataagaaccccatgaaacttacctgagtttttaaaatgctatccaggacatcataccttatagtatacatgaaacataatgtaatccaggttgtaatttagaactttttttttttttttagctgagcacttaatgtaattaattccaggttatgactcttaaaaaacattggccattagagaaatagttctatttgcccatccaaatcacctgaatgactttttgaaagaataggggtccacatccccagatcccatcccagctgtgcacagtctgaagcaagcagagtgaaacaagttggcaacttgttccaagcgtgggyctttgcagtctgtgatccagtgttactccaggtcccagtctgtcccatacttgtcttttgctacagttagttagttactttgttatcatccccttgtaaactgccttcaatatctgggataaggaagacaaagcttaatgacaactaaggttctagctgacatctttctttcatatttaatttttgtgagttttcatctgttttctgtttgtttatgtgtcctaggttcttgacctaaccacatgggttttgttttttgtttttatattagaacttagaaaagtttgttttacagcagrattatggaacagaagagaccattttaaataatttttttaaacagcccaaaacacacaaaagatacttgttttctagagacagggtcttgctctgtcacccaggctggagtgcagtggcacgatcatagctcagtgcagcctccacctcctgggctcaagtggtcctcctgcctcagcctcttaagcagttgggactacaggtgtgtgccagcatgcttgctgttttttttttttttgagacagagtcttgctctgtcactcaggctggagtccagtggcttggtctcagctcactgcaatctctgcctcccaggggttcaagtgattctcctgcctcagcctcccaagtagctgaaactacaggcgcatgccaccatgcccagctaatttttgtatttttagtagagacagggtttcactatgttggccaggctggtctcaaactcccgacctcaagtgatccgcccgcttcggcctcccaaagtgctgggattacaggtgtgagccactgcgcctggctgctgatttatttttcatagacacgggggtctatgttgcccaggttggtcttgaactcctagcctcaagcgatcctcctgcctcagcctcccaatgtgctgggattacaggaatgagccaccatgcccagcccaagaagtagagtttcttttatactgactttggcctaaaaaaacagattttcatggaggaaaaaaaaacctagatttttagtaagactattttatatacttttttacattgatcaagtacattatttttaccaaacaacattgtttcccactacatccatggttatgtataaaaaaacgccattgtcaattaagatgttaaaaaattatttccataagagtattaaattctaatctatgattcacttaacttcctactttataaacactaggtaaagtaatctcacaagctgccaaagaacacatcccaagcagtaatcacagacgatgaagcaccttacaggacccctccaccctcaaacgcgcatgtccagagaagtattaatgccttaatagactactgaaggttaactatttacatcattctaaaaatattttaagctgtattacagtgctataaattctccttttaaggaaaaaagtaatagattgtttccttaccgtgtttgaaaggaaaaaaaataaatccatagtaactaatggtctgccgattttttccctgaatttttaaactccaacaaagcattattttgcaaaaagtcctttagcccaaagtcagtgtctctgttttgatctctttgtaaaagaactctctgttcatccattctctttccctgggaccgtaaaataaggctgaaaaagtcttcatctggtactgtcggaccctttgtggtagcaggtggtggagcacatctttgatcatctaatctggatccctagaagtttatgagagagattaaaagacatactgtgggaaagaaagcaccaagctatgttaaatctctcagtcacaacaagaaaacgcagttgtaaacttttatttggggcttctcagaaattaatctttgtttttatattgttctctttagttcccagcctgatttctgaaagaaataatctttaaacctg

SEQ ID NO: 421 - DNA, 1978 bp, Homo sapiens
cccggatgggccgttagtcggggctcagccgcggagtgagcgagggagacgggaggagccgaacccggcgccatccgccgccatcctcccccgccccaccgccatcccgtcccggggagcccctaggcccgggtcccggatccccgcgcacccggccaggctctggcacgttttgggggaggtgcctgcaggacccaacatactcaatgagcttccagcgcaatgtccgatcgctcggggccgactgccaagggaaaggatggaaagaagtattcctcgctcaacctgtttgatacgtataagggcaagtccttagagatccagaaacccgctgttgcccctcgccatggcctgcagagtctcgggaaagttgccattgcccggcgtatgcsacctccagccaaccttccaagcctgaaagccgagaacaaaggcaatgaccccaatgtctcactagtgccaaaagwcggaacaggatgggcaagcaaacaggagcagtccgaccccaagagttccgatgcctcaaccgctcagccgcyggaatcgcagccactgccggcttcacagacgcctgcctccaaccagccgaaacgacccccagcagcccccgagaacactcctttggttccaagcggggtaaagtcctgggcacaagccagcgtcacccatggagcacatggagatggtggaagggcatcaagcctactgtcacgattctctcgagaggaatttccgaccctgcaggcggctggcgaccaggacaaggctgccaaggaaagggagtctgccgaacagtcgtctgggcccggaccaagcctccgcccccaaaattctacaacttggagggacggaggtggkcgtggccctgatgagctggagggcccggactccaaacttcatcatggtcatgatccccggggtgggctacagccttcaggcccaccccagttccctccctaccgcggaatgatgccgcctttcatgtatcccccatatctcccgttccctccgccctatggaccccaggggccttaccgataccccactcctgatgggcccagccgttttccccgtgtggcgggcccccgaggctcagggccaccaatgcrcttagtagagcctgtgggtcgtccctctattctcaaagaggataatctcaaagagtttgatcagttggatcaggagaatgatgatggttgggcaggggcccatgaagaggttgactacactgaaaagctcaagttcagcgatgaggaagatgggcgagactctgatgaggagggwgctgagggccacagggattcccaatcagcttctggtgaggaacggccccctgaagcagatggcaaaaagggcaactcccccaacagcgaaccgcccactcctaagacggcctgggcagaaacctctcggcctccagagacagagccgggacctcctgccccaaagcctcccctacccccacctcaccggggccccgccrggaactggggcccccctggggactacccagatcgtgggggtcctccctgcaagcccccagcacctgaagatgaggatgaggcatggcggcagcgacgaaagcagtcgtcatctgagatttccctggcagtggagcgggcccggcgacggcgagaagaagaggagcggcgcatgcaagaagagcgccgggcagcctgtgctgagaagctcaagcgactcgatgaaaagtttggggcacctgacaagcggctcaaagcagagcctgctgccccacctgctgccccttctaccccagctccaccacctgcagtccctaaagaactccctgcacctccagctccacctccagcatcagcctcccaaagtgctgggattacaggcgtgagccactgcacctggccctgttgcaatcctgtattttttagtagagacagggtttcaccatgttggccaggctggtctcgaactcctgacctcaggtgatctgcccgcctck

SEQ ID NO: 422 - DNA, 6833 bp, Homo sapiens
  misc_feature (1)...(6833): n = A,T,C or G, or insertion/deletion polymorphism (see Tables 1-2)
cccggatgggccgttagtcggggctcagccgcggagtgagcgagggagacgggaggagccgaacccggcgccatccgccgccatcctcccccgccccaccgccatcccgtcccggggagcccctaggcccgggtcccggatccccgcgcacccggccaggctctggcacgttttgggggaggtgcctgcaggacccaacatactcaatgagcttccagcgcaatgtccgatcgctcggggccgactgccaagggaaaggatggaaagaagtattcctcgctcaacctgtttgatacgtataagggcaagtccttagagatccagaaacccgctgttgcccctcgccatggcctgcagagtctcgggaaagttgccattgcccggcgtatgcsacctccagccaaccttccaagcctgaaagccgagaacaaaggcaatgaccccaatgtctcactagtgccaaaagwcggaacaggatgggcaagcaaacaggagcagtccgaccccaagagttccgatgcctcaaccgctcagccgcyggaatcgcagccactgccggcttcacagacgcctgcctccaaccagccgaaacgacccccagcagcccccgagaacactcctttggttccaagcggggtaaagtcctgggcacaagccagcgtcacccatggagcacatggagatggtggaagggcatcaagcctactgtcacgattctctcgagaggaatttccgaccctgcaggcggctggcgaccaggacaaggctgccaaggaaagggagtctgccgaacagtcgtctgggcccggaccaagcctccgcccccaaaattctacaacttggagggacggaggtggkcgtggccctgatgagctggagggcccggactccaaacttcatcatggtcatgatccccggggtgggctacagccttcaggcccaccccagttccctccctaccgcggaatgatgccgcctttcatgtatcccccatatctcccgttccctccgccctatggaccccaggggccttaccgataccccactcctgatgggcccagccgttttccccgtgtggcgggcccccgaggctcagggccaccaatgcrcttagtagagcctgtgggtcgtccctctattctcaaagaggataatctcaaagagtttgatcagttggatcaggagaatgatgatggttgggcaggggcccatgaagaggttgactacactgaaaagctcaagttcagcgatgaggaagatgggcgagactctgatgaggagggwgctgagggccacagggattcccaatcagcttctggtgaggaacggccccctgaagcagatggcaaaaagggcaactcccccaacagcgaaccgcccactcctaagacggcctgggcagaaacctctcggcctccagagacagagccgggacctcctgccccaaagcctcccctacccccacctcaccggggatcgtgggggtcctccctgcaagcccccagcacctgaagatgaggatgaggcatggcggcagcgacgaaagcagtcgtcatctgagatttccctggcagtggagcgggcccggcgacggcgagaagaagaggagcggcgcatgcaagaagagcgccgggcagcctgtgctgagaagctcaagcgactcgatgaaaagtttggggcacctgacaagcggctcaaagcagagcctgctgccccacctgctgccccttctaccccagctccaccacctgcagtccctaaagaactccctgcacctccagctccacctccagcatcagccccaacaccagagamagaacctgaagagccagcacaggcccctcctgcccaatctactcctactccaggtgtggctgcggctcccactctggtgagtggtggtggcagtaccagtagcaccagcagtggcagcttcgaagccagcccagtggaaccacaactgccctcaaaagagggtcctgaaccaccagaagaggttcctcctcctaccacacccccagttccaaaggtggaacccaagggtgatgggattggtcccacccgccagccccctagtcagggcttgggctaccccaaatatcagaagtcgttgcctcctcgtttccagcggcagcagcaggagcagctcctgaagcagcagcagcagcaccagtggcagcagcatcaacagggctctgcccctcctaccccagtgcccccatcaccaccacagcctgtgaccctgggggctgtgccagctccamaggctccacccccgccccccaaggccctgtacccaggtgctctgggccggcccccacccatgcccccaatgaactttgatccccgatggatgatgattcctccttatgtggacccccggctcctccagggtcgtccccctctagacttctaccctcctggtgtgcatccctctggcctagttccccgagagcgttcagacagtgggggctcaagctcagagccatttgaccgtcatgcacctgctatgttacgggaacggggcactccaccggtggatccaaagttggcctgggtrggagatgtcttcaccgccacacccgctgaaccccgcccacttacctcacctctgcgccaggctgcggatgaggatgacaaggggatgaggagcgagactcctccagtacctcccccaccaccctatctggccagttatccaggctttcctgagaatggrrcccctgggcccccaatctctcgctttcctctggaggaaccagggccccgtccactcccctggcccccaggcagtgatgaagtggccaagatacaaactccaccacccaagaaggagccccctaaggaggagactgcacagctgacggggccagaagcaggccgaaagcctgcccgcggagtcgggagtggaggccagggccccccmccaccacgcagagagagtcgcacagagacccgctggggccctcgtccagggagcagtcgtcgtggaatccctccagaggagccaggggccccaccccgccgggctgggcctataaagaaacctccaccacctacaaaagtagaagagctgcctcccaagcccctcgaacagggggatgaaacccccaaacccccaaagccagacccactcaagataaccaaggggaagctagggggccccaaggagaccccacccaatggaaatctttcccctgccccaaggcttcggagggactattcgtatgaaagagtgggtcctacctcttgccggggtcggggccgaggcgagtattttgccagagggaggggttttcgggggacctatgggggacgagggcggggagsccgaagccgggaattccgcagttaccgagagtttcgaggagatgatgggcgtggaggtgggacagggggaccaaaccaccctcctgctccccgaggccgcactgccagcgagacacggagcgagggttcagagtatgaggaaatccccaagcggygccggcagcggggctcagaaacaggcagcgagacccatgagagtgatctggctccttcagacaaggaggctcccacacccaaggagggaacactcacccaggtccctctcgctcccccaccaccaggagccccaccttcaccagcsccagcccgcttcactgcccggggtsggcgagtcttcactcccagaggggtgccatctcgccggggccgaggaggagggaggccccctcctcaagtttgcccaggctggagccctccagccaagtctctggctcccaagaaacctcccacaggccctttgccaccaagtaaggagcctttgaaagagaagttgatcccagggcctctgtcccctgtggcgcgcggaggcagcaatggaggtagcaatgtgggcatggaagatggggagcgaccccgaaggaggcgacatgggagggctcagcagcaggataaaccgcctcgtttccggaggctgaagcaggaacgggagaatgccgcaagggggtctgagggcaagccctccctaacccttccagcctccrctcctgsacctgaggaggccctcacaacagtcacagtggccccagcacctcgccgggcagctgccaagtctcctgatctgtcaaaccagaactcagaccaagccaatgaggaatgggagactgcatcagagagcagtgacttcaccagtgagcgccgaggggacaaagaggcacccccaccagtactgctgacacccaaggctgtgggaactcctgggggaggtggaggtggagccgtaccaggtatttcagccatgtcccgyggagatctgagccagagagccaaggatttgagtaaacggagcttctcaagtcagcggccaggcatggaacggcagaatcggcgccctggcccagggggcaaggctggcarcagtggcagcagcagtggaggagscrgtgggggtcctggaggaaggaccgggccaggacgaggcgacaagaggagctggccctctcccaagaaccgaagtcgtcctccagaggagcgtcccccggggcttcccctgcctcccccacctcccagcagttctgctgtcttccgcctggaccaagttatccacagcaaccctgctggcatccaacaggctctggcccagcttagtagccgtcaagggagtgtaactgcaccagggggtcatccaaggcacaagcctgggcntccccaagcccctcagggcccctctcctaggcccccaacccgatacgagccccagagggtcaacagcggcctcagttctgacccccactttgaggagccggggccaatggtgagaggggtggrtgggactcctcgggactctgccggggttagtccctttccccctaaacgtcgggagcrgcctcccagaaaaccagagctgctacaggaggaatctttgccacctcctcatagctctggattcttgggctctaagcctgagggcccaggccctcaggcagagtccagagatacaggcacagaggccctgacccctcacatctggaaccgtttacatactgccactagccgaaagagttaccggcccagctccatggagccttggatggagcccctgagtccttttgaggatgtggctggcacagaaatgagtcagtctgacagtggggtggacctgagtggggattctcaggtgtcatcaggtccctgcagccagcgaagttcccctgatggaggactcaagggggcagcagagggaccccccaagaggcctggaggctcctcacccctgaatgctgttccttgtgagggtccacctggctctgaacctcctaggagaccaccacctgccccccacgatggggacagaaaggagctgccccgggagcagcctctgccccctggccccattggcacagaacgatcacagcrtacagaccgagscacagagcctggccccattcggccatcccatcgacctggtcccccagtccagtttggcactagtgrcaaggactcagacttacgcctartggtaggagacagcttgaaagcagagaaggagctaacagcatcagtcactgargccattcctgtatcacgagactgggagctgcttcccagtgctgctgcctctgctgagccacaatccaagaacctggattctgggcactgtgtcccggagcccagctcctcaggccagcgcctgtatcctgaggttttctatggcagtgctgggccttccagttctcagatctctgggggagccatggactctcarttacatccaaacagtggaggcttccgccctgggacaccctcactgcacccttacagatcacagcccctatacctacccccsggcccagcccctccctcagcactgctctctgggktagctctcaagggccagtttctggatttctccacaatgcaagctacagagctggggaagttgccggctggaggagttctctaccctccaccttccttcctctactctccggctttctgccccagtcctttgcctgacacatcgttgcttcaggtacgccaggatctgccatccccttcggatttttattctactcctctgcagcctggtggccaaagtggmtttctcccttcaggggctcctgcccagcagatgcttctacccatggtagactcacagctgcctgtggtgaactttggctccctgccgccagcaccacctcctgccccacctyccctttctctgttacctgtgggccctgctctgcagccccccagcctggctgtgcggcccccacctgctcctgctactcgggtgctgccttcacctgccaggcccttccccgctagcttggggcgagcagagctgcatccagtggaactaaagccgttccaggattatcaaaaactgagcagcaaccttgggggacctggatcatcayggactcccccaactggaaggtcctyctctggcctcaattcccgtctsaaggccacgccttccacctacagtggagtcttccgcacccagcgcgtcgacctttaccagcaggcctccccaccagatgccctgcgctggatacctaagccttgggagcggacagggcygccacctcgagaagggccctcccgacgggcagaggagcctgggtcccgaggggacaaggagcctgggttgcccccaccccgctgagggagttcctcttgccccctacccccggggcttgtatatagattataaatatataagggggaaaggggtgggcggggaggggttstggggctggggcctcacttcccctcctcccccttcccctggtcccctgtccctggggctgtttgttaaaaaagagtaataaaaggatttk

SEQ ID NO: 423 - DNA, 6700 bp, Homo sapiens
  misc_feature (1)...(6700): n = A,T,C or G, or insertion/deletion polymorphism (see Tables 1-2)
atgtccgatcgctcggggccgactgccaagggaaaggatggaaagaagtattcctcgctcaacctgtttgatacgtataagggcaagtccttagagatccagaaacccgctggcattttcgaccctctctccgtcttgttctccagttgcccctcgccatggcctgcagagtctcgggaaagttgccattgcccggcgtatgcsacctccagccaaccttccaagcctgaaagccgagaacaaaggcaatgaccccaatgtctcactagtgccaaaagwcggaacaggatgggcaagcaaacaggagcagtccgaccccaagagttccgatgcctcaaccgctcagccgcyggaatcgcagccactgccggcttcacagacgcctgcctccaaccagccgaaacgacccccagcagcccccgagaacactcctttggttccaagcggggtaaagtcctgggcacaagccagcgtcacccatggagcacatggagatggtggaagggcatcaagcctactgtcacgattctctcgagaggaatttccgaccctgcaggcggctggcgaccaggacaaggctgccaaggaaagggagtctgccgaacagtcgtctgggcccggaccaagcctccgcccccaaaattctacaacttggagggacggaggtggkcgtggccctgatgagctggagggcccggactccaaacttcatcatggtcatgatccccggggtgggctacagccttcaggcccaccccagttccctccctaccgcggaatgatgccgcctttcatgtatcccccatatctcccgttccctccgccctatggaccccaggggccttaccgataccccactcctgatgggcccagccgttttccccgtgtggcgggcccccgaggctcagggccaccaatgcrcttagtagagcctgtgggtcgtccctctattctcaaagaggataatctcaaagagtttgatcagttggatcaggagaatgatgatggttgggcaggggcccatgaagaggttgactacactgaaaagctcaagttcagcgatgaggaagatgggcgagactctgatgaggagggwgctgagggccacagggattcccaatcagcttctggtgaggaacggccccctgaagcagatggcaaaaagggcaactcccccaacagcgaaccgcccactcctaagacggcctgggcagaaacctctcggcctccagagacagagccgggacctcctgccccaaagcctcccctacccccacctcaccggggccccgccrggaactggggcccccctggggactacccagatcgtgggggtcctccctgcaagcccccagcacctgaagatgaggatgaggcatggcggcagcgacgaaagcagtcgtcatctgagatttccctggcagtggagcgggcccggcgacggcgagaagaagaggagcggcgcatgcaagaagagcgccgggcagcctgtgctgagaagctcaagcgactcgatgaaaagtttggggcacctgacaagcggctcaaagcagagcctgctgccccacctgctgccccttctaccccagctccaccacctgcagtccctaaagaactccctgcacctccagctccacctccagcatcagccccaacaccagagamagaacctgaagagccagcacaggcccctcctgcccaatctactcctactccaggtgtggctgcggctcccactctggtgagtggtggtggcagtaccagtagcaccagcagtggcagcttcgaagccagcccagtggaaccacaactgccctcaaaagagggtcctgaaccaccagaagaggttcctcctcctaccacacccccagttccaaaggtggaacccaagggtgatgggattggtcccacccgccagccccctagtcagggcttgggctaccccaaatatcagaagtcgttgcctcctcgtttccagcggcagcagcaggagcagctcctgaagcagcagcagcagcaccagtggcagcagcatcaacagggctctgcccctcctaccccagtgcccccatcaccaccacagcctgtgaccctgggggctgtgccagctccamaggctccacccccgccccccaaggccctgtacccaggtgctctgggccggcccccacccatgcccccaatgaactttgatccccgatggatgatgattcctccttatgtggacccccggctcctccagggtcgtccccctctagacttctaccctcctggtgtgcatccctctggcctagttccccgagagcgttcagacagtgggggctcaagctcagagccatttgaccgtcatgcacctgctatgttacgggaacggggcactccaccggtggatccaaagttggcctgggtrggagatgtcttcaccgccacacccgctgaaccccgcccacttacctcacctctgcgccaggctgcggatgaggatgacaaggggatgaggagcgagactcctccagtacctcccccaccaccctatctggccagttatccaggctttcctgagaatggrrcccctgggcccccaatctctcgctttcctctggaggaaccagggccccgtccactcccctggcccccaggcagtgatgaagtggccaagatacaaactccaccacccaagaaggagccccctaaggaggagactgcacagctgacggggccagaagcaggccgaaagcctgcccgcggagtcgggagtggaggccagggccccccmccaccacgcagagagagtcgcacagagacccgctggggccctcgtccagggagcagtcgtcgtggaatccctccagaggagccaggggccccaccccgccgggctgggcctataaagaaacctccaccacctacaaaagtagaagagctgcctcccaagcccctcgaacagggggatgaaacccccaaacccccaaagccagacccactcaagataaccaaggggaagctagggggccccaaggagaccccacccaatggaaatctttcccctgccccaaggcttcggagggactattcgtatgaaagagtgggtcctacctcttgccggggtcggggccgaggcgagtattttgccagagggaggggttttcgggggacctatgggggacgagggcggggagsccgaagccgggaattccgcagttaccgagagtttcgaggagatgatgggcgtggaggtgggacagggggaccaaaccaccctcctgctccccgaggccgcactgccagcgagacacggagcgagggttcagagtatgaggaaatccccaagcggygccggcagcggggctcagaaacaggcagcgagacccatgagagtgatctggctccttcagacaaggaggctcccacacccaaggagggaacactcacccaggtccctctcgctcccccaccaccaggagccccaccttcaccagcsccagcccgcttcactgcccggggtsggcgagtcttcactcccagaggggtgccatctcgccggggccgaggaggagggaggccccctcctcaagtttgcccaggctggagccctccagccaagtctctggctcccaagaaacctcccacaggccctttgccaccaagtaaggagcctttgaaagagaagttgatcccagggcctctgtcccctgtggcgcgcggaggcagcaatggaggtagcaatgtgggcatggaagatggggagcgaccccgaaggaggcgacatgggagggctcagcagcaggataaaccgcctcgtttccggaggctgaagcaggaacgggagaatgccgcaagggggtctgagggcaagccctccctaacccttccagcctccrctcctgsacctgaggaggccctcacaacagtcacagtggccccagcacctcgccgggcagctgccaagtctcctgatctgtcaaaccagaactcagaccaagccaatgaggaatgggagactgcatcagagagcagtgacttcaccagtgagcgccgaggggacaaagaggcacccccaccagtactgctgacacccaaggctgtgggaactcctgggggaggtggaggtggagccgtaccaggtatttcagccatgtcccgyggagatctgagccagagagccaaggatttgagtaaacggagcttctcaagtcagcggccaggcatggaacggcagaatcggcgccctggcccagggggcaaggctggcarcagtggcagcagcagtggaggagscrgtgggggtcctggaggaaggaccgggccaggacgaggcgacaagaggagctggccctctcccaagaaccgaagtcgtcctccagaggagcgtcccccggggcttcccctgcctcccccacctcccagcagttctgctgtcttccgcctggaccaagttatccacagcaaccctgctggcatccaacaggctctggcccagcttagtagccgtcaagggagtgtaactgcaccagggggtcatccaaggcacaagcctgggcntccccaagcccctcagggcccctctcctaggcccccaacccgatacgagccccagagggtcaacagcggcctcagttctgacccccactttgaggagccggggccaatggtgagaggggtggrtgggactcctcgggactctgccggggttagtccctttccccctaaacgtcgggagcrgcctcccagaaaaccagagctgctacaggaggaatctttgccacctcctcatagctctggattcttgggctctaagcctgagggcccaggccctcaggcagagtccagagatacaggcacagaggccctgacccctcacatctggaaccgtttacatactgccactagccgaaagagttaccggcccagctccatggagccttggatggagcccctgagtccttttgaggatgtggctggcacagaaatgagtcagtctgacagtggggtggacctgagtggggattctcaggtgtcatcaggtccctgcagccagcgaagttcccctgatggaggactcaagggggcagcagagggaccccccaagaggcctggaggctcctcacccctgaatgctgttccttgtgagggtccacctggctctgaacctcctaggagaccaccacctgccccccacgatggggacagaaaggagctgccccgggagcagcctctgccccctggccccattggcacagaacgatcacagcrtacagaccgagscacagagcctggccccattcggccatcccatcgacctggtcccccagtccagtttggcactagtgrcaaggactcagacttacgcctartggtaggagacagcttgaaagcagagaaggagctaacagcatcagtcactgargccattcctgtatcacgagactgggagctgcttcccagtgctgctgcctctgctgagccacaatccaagaacctggattctgggcactgtgtcccggagcccagctcctcaggccagcgcctgtatcctgaggttttctatggcagtgctgggccttccagttctcagatctctgggggagccatggactctcarttacatccaaacagtggaggcttccgccctgggacaccctcactgcacccttacagatcacagcccctatacctacccccsggcccagcccctccctcagcactgctctctgggktagctctcaagggccagtttctggatttctccacaatgcaagctacagagctggggaagttgccggctggaggagttctctaccctccaccttccttcctctactctccggctttctgccccagtcctttgcctgacacatcgttgcttcaggtacgccaggatctgccatccccttcggatttttattctactcctctgcagcctggtggccaaagtggmtttctcccttcaggggctcctgcccagcagatgcttctacccatggtagactcacagctgcctgtggtgaactttggctccctgccgccagcaccacctcctgccccacctyccctttctctgttacctgtgggccctgctctgcagccccccagcctggctgtgcggcccccacctgctcctgctactcgggtgctgccttcacctgccaggcccttccccgctagcttggggcgagcagagctgcatccagtggaactaaagccgttccaggattatcaaaaactgagcagcaaccttgggggacctggatcatcayggactcccccaactggaagacgcccttcttcccttaggtcctyctctggcctcaattcccgtctsaaggccacgccttccacctacagtggagtcttccgcacccagcgcgtcgacctttaccagcaggcctccccaccagatgccctgcgctggatacctaagccttgggagcggacagggcygccacctcgagaagggccctcccgacgggcagaggagcctgggtcccgaggggacaaggagcctgggttgcccccaccccgctgagggagttcctcttgccccctacccccggggcttgtatatagattataaatatataagggggaaaggggtgggcggggaggggttstggggctggggcctcacttcccctcctcccccttcccctggtcccctgtccctggggctgtttgttaaaaaagagtaataaaaggattt

SEQ ID NO: 424 - DNA, 6683 bp, Homo sapiens
  misc_feature (1)...(6683): n = A,T,C or G, or insertion/deletion polymorphism (see Tables 1-2)
atgtccgatcgctcggggccgactgccaagggaaaggatggaaagaagtattcctcgctcaacctgtttgatacgtataagggcaagtccttagagatccagaaacccgctggcattttcgaccctctctccgtcttgttctccagttgcccctcgccatggcctgcagagtctcgggaaagttgccattgcccggcgtatgcsacctccagccaaccttccaagcctgaaagccgagaacaaaggcaatgaccccaatgtctcactagtgccaaaagwcggaacaggatgggcaagcaaacaggagcagtccgaccccaagagttccgatgcctcaaccgctcagccgcyggaatcgcagccactgccggcttcacagacgcctgcctccaaccagccgaaacgacccccagcagcccccgagaacactcctttggttccaagcggggtaaagtcctgggcacaagccagcgtcacccatggagcacatggagatggtggaagggcatcaagcctactgtcacgattctctcgagaggaatttccgaccctgcaggcggctggcgaccaggacaaggctgccaaggaaagggagtctgccgaacagtcgtctgggcccggaccaagcctccgcccccaaaattctacaacttggagggacggaggtggkcgtggccctgatgagctggagggcccggactccaaacttcatcatggtcatgatccccggggtgggctacagccttcaggcccaccccagttccctccctaccgcggaatgatgccgcctttcatgtatcccccatatctcccgttccctccgccctatggaccccaggggccttaccgataccccactcctgatgggcccagccgttttccccgtgtggcgggcccccgaggctcagggccaccaatgcrcttagtagagcctgtgggtcgtccctctattctcaaagaggataatctcaaagagtttgatcagttggatcaggagaatgatgatggttgggcaggggcccatgaagaggttgactacactgaaaagctcaagttcagcgatgaggaagatgggcgagactctgatgaggagggwgctgagggccacagggattcccaatcagcttctggtgaggaacggccccctgaagcagatggcaaaaagggcaactcccccaacagcgaaccgcccactcctaagacggcctgggcagaaacctctcggcctccagagacagagccgggacctcctgccccaaagcctcccctacccccacctcaccggggccccgccrggaactggggcccccctggggactacccagatcgtgggggtcctccctgcaagcccccagcacctgaagatgaggatgaggcatggcggcagcgacgaaagcagtcgtcatctgagatttccctggcagtggagcgggcccggcgacggcgagaagaagaggagcggcgcatgcaagaagagcgccgggcagcctgtgctgagaagctcaagcgactcgatgaaaagtttggggcacctgacaagcggctcaaagcagagcctgctgccccacctgctgccccttctaccccagctccaccacctgcagtccctaaagaactccctgcacctccagctccacctccagcatcagccccaacaccagagamagaacctgaagagccagcacaggcccctcctgcccaatctactcctactccaggtgtggctgcggctcccactctggtgagtggtggtggcagtaccagtagcaccagcagtggcagcttcgaagccagcccagtggaaccacaactgccctcaaaagagggtcctgaaccaccagaagaggttcctcctcctaccacacccccagttccaaaggtggaacccaagggtgatgggattggtcccacccgccagccccctagtcagggcttgggctaccccaaatatcagaagtcgttgcctcctcgtttccagcggcagcagcaggagcagctcctgaagcagcagcagcagcaccagtggcagcagcatcaacagggctctgcccctcctaccccagtgcccccatcaccaccacagcctgtgaccctgggggctgtgccagctccamaggctccacccccgccccccaaggccctgtacccaggtgctctgggccggcccccacccatgcccccaatgaactttgatccccgatggatgatgattcctccttatgtggacccccggctcctccagggtcgtccccctctagacttctaccctcctggtgtgcatccctctggcctagttccccgagagcgttcagacagtgggggctcaagctcagagccatttgaccgtcatgcacctgctatgttacgggaacggggcactccaccggtggatccaaagttggcctgggtrggagatgtcttcaccgccacacccgctgaaccccgcccacttacctcacctctgcgccaggctgcggatgaggatgacaaggggatgaggagcgagactcctccagtacctcccccaccaccctatctggccagttatccaggctttcctgagaatggrrcccctgggcccccaatctctcgctttcctctggaggaaccagggccccgtccactcccctggcccccaggcagtgatgaagtggccaagatacaaactccaccacccaagaaggagccccctaaggaggagactgcacagctgacggggccagaagcaggccgaaagcctgcccgcggagtcgggagtggaggccagggccccccmccaccacgcagagagagtcgcacagagacccgctggggccctcgtccagggagcagtcgtcgtggaatccctccagaggagccaggggccccaccccgccgggctgggcctataaagaaacctccaccacctacaaaagtagaagagctgcctcccaagcccctcgaacagggggatgaaacccccaaacccccaaagccagacccactcaagataaccaaggggaagctagggggccccaaggagaccccacccaatggaaatctttcccctgccccaaggcttcggagggactattcgtatgaaagagtgggtcctacctcttgccggggtcggggccgaggcgagtattttgccagagggaggggttttcgggggacctatgggggacgagggcggggagsccgaagccgggaattccgcagttaccgagagtttcgaggagatgatgggcgtggaggtgggacagggggaccaaaccaccctcctgctccccgaggccgcactgccagcgagacacggagcgagggttcagagtatgaggaaatccccaagcggygccggcagcggggctcagaaacaggcagcgagacccatgagagtgatctggctccttcagacaaggaggctcccacacccaaggagggaacactcacccaggtccctctcgctcccccaccaccaggagccccaccttcaccagcsccagcccgcttcactgcccggggtsggcgagtcttcactcccagaggggtgccatctcgccggggccgaggaggagggaggccccctcctcaagtttgcccaggctggagccctccagccaagtctctggctcccaagaaacctcccacaggccctttgccaccaagtaaggagcctttgaaagagaagttgatcccagggcctctgtcccctgtggcgcgcggaggcagcaatggaggtagcaatgtgggcatggaagatggggagcgaccccgaaggaggcgacatgggagggctcagcagcaggataaaccgcctcgtttccggaggctgaagcaggaacgggagaatgccgcaagggggtctgagggcaagccctccctaacccttccagcctccrctcctgsacctgaggaggccctcacaacagtcacagtggccccagcacctcgccgggcagctgccaagtctcctgatctgtcaaaccagaactcagaccaagccaatgaggaatgggagactgcatcagagagcagtgacttcaccagtgagcgccgaggggacaaagaggcacccccaccagtactgctgacacccaaggctgtgggaactcctgggggaggtggaggtggagccgtaccaggtatttcagccatgtcccgyggagatctgagccagagagccaaggatttgagtaaacggagcttctcaagtcagcggccaggcatggaacggcagaatcggcgccctggcccagggggcaaggctggcarcagtggcagcagcagtggaggagscrgtgggggtcctggaggaaggaccgggccaggacgaggcgacaagaggagctggccctctcccaagaaccgaagtcgtcctccagaggagcgtcccccggggcttcccctgcctcccccacctcccagcagttctgctgtcttccgcctggaccaagttatccacagcaaccctgctggcatccaacaggctctggcccagcttagtagccgtcaagggagtgtaactgcaccagggggtcatccaaggcacaagcctgggcntccccaagcccctcagggcccctctcctaggcccccaacccgatacgagccccagagggtcaacagcggcctcagttctgacccccactttgaggagccggggccaatggtgagaggggtggrtgggactcctcgggactctgccggggttagtccctttccccctaaacgtcgggagcrgcctcccagaaaaccagagctgctacaggaggaatctttgccacctcctcatagctctggattcttgggctctaagcctgagggcccaggccctcaggcagagtccagagatacaggcacagaggccctgacccctcacatctggaaccgtttacatactgccactagccgaaagagttaccggcccagctccatggagccttggatggagcccctgagtccttttgaggatgtggctggcacagaaatgagtcagtctgacagtggggtggacctgagtggggattctcaggtgtcatcaggtccctgcagccagcgaagttcccctgatggaggactcaagggggcagcagagggaccccccaagaggcctggaggctcctcacccctgaatgctgttccttgtgagggtccacctggctctgaacctcctaggagaccaccacctgccccccacgatggggacagaaaggagctgccccgggagcagcctctgccccctggccccattggcacagaacgatcacagcrtacagaccgagscacagagcctggccccattcggccatcccatcgacctggtcccccagtccagtttggcactagtgrcaaggactcagacttacgcctartggtaggagacagcttgaaagcagagaaggagctaacagcatcagtcactgargccattcctgtatcacgagactgggagctgcttcccagtgctgctgcctctgctgagccacaatccaagaacctggattctgggcactgtgtcccggagcccagctcctcaggccagcgcctgtatcctgaggttttctatggcagtgctgggccttccagttctcagatctctgggggagccatggactctcarttacatccaaacagtggaggcttccgccctgggacaccctcactgcacccttacagatcacagcccctatacctacccccsggcccagcccctccctcagcactgctctctgggktagctctcaagggccagtttctggatttctccacaatgcaagctacagagctggggaagttgccggctggaggagttctctaccctccaccttccttcctctactctccggctttctgccccagtcctttgcctgacacatcgttgcttcaggtacgccaggatctgccatccccttcggatttttattctactcctctgcagcctggtggccaaagtggmtttctcccttcaggggctcctgcccagcagatgcttctacccatggtagactcacagctgcctgtggtgaactttggctccctgccgccagcaccacctcctgccccacctyccctttctctgttacctgtgggccctgctctgcagccccccagcctggctgtgcggcccccacctgctcctgctactcgggtgctgccttcacctgccaggcccttccccgctagcttggggcgagcagagctgcatccagtggaactaaagccgttccaggattatcaaaaactgagcagcaaccttgggggacctggatcatcayggactcccccaactggaaggtcctyctctggcctcaattcccgtctsaaggccacgccttccacctacagtggagtcttccgcacccagcgcgtcgacctttaccagcaggcctccccaccagatgccctgcgctggatacctaagccttgggagcggacagggcygccacctcgagaagggccctcccgacgggcagaggagcctgggtcccgaggggacaaggagcctgggttgcccccaccccgctgagggagttcctcttgccccctacccccggggcttgtatatagattataaatatataagggggaaaggggtgggcggggaggggttstggggctggggcctcacttcccctcctcccccttcccctggtcccctgtccctggggctgtttgttaaaaaagagtaataaaaggattta

SEQ ID NO: 425 - DNA, 6871 bp, Homo sapiens
  misc_feature (1)...(6871): n = A,T,C or G, or insertion/deletion polymorphism (see Tables 1-2)
cccggatgggccgttagtcggggctcagccgcggagtgagcgagggagacgggaggagccgaacccggcgccatccgccgccatcctcccccgccccaccgccatcccgtcccggggagcccctaggcccgggtcccggatccccgcgcacccggccaggctctggcacgttttgggggaggtgcctgcaggacccaacatactcaatgagcttccagcgcaatgtccgatcgctcggggccgactgccaagggaaaggatggaaagaagtattcctcgctcaacctgtttgatacgtataagggcaagtccttagagatccagaaacccgctgttgcccctcgccatggcctgcagagtctcgggaaagttgccattgcccggcgtatgcsacctccagccaaccttccaagcctgaaagccgagaacaaaggcaatgaccccaatgtctcactagtgccaaaagwcggaacaggatgggcaagcaaacaggagcagtccgaccccaagagttccgatgcctcaaccgctcagccgcyggaatcgcagccactgccggcttcacagacgcctgcctccaaccagccgaaacgacccccagcagcccccgagaacactcctttggttccaagcggggtaaagtcctgggcacaagccagcgtcacccatggagcacatggagatggtggaagggcatcaagcctactgtcacgattctctcgagaggaatttccgaccctgcaggcggctggcgaccaggacaaggctgccaaggaaagggagtctgccgaacagtcgtctgggcccggaccaagcctccgcccccaaaattctacaacttggagggacggaggtggkcgtggccctgatgagctggagggcccggactccaaacttcatcatggtcatgatccccggggtgggctacagccttcaggcccaccccagttccctccctaccgcggaatgatgccgcctttcatgtatcccccatatctcccgttccctccgccctatggaccccaggggccttaccgataccccactcctgatgggcccagccgttttccccgtgtggcgggcccccgaggctcagggccaccaatgcrcttagtagagcctgtgggtcgtccctctattctcaaagaggataatctcaaagagtttgatcagttggatcaggagaatgatgatggttgggcaggggcccatgaagaggttgactacactgaaaagctcaagttcagcgatgaggaagatgggcgagactctgatgaggagggwgctgagggccacagggattcccaatcagcttctggtgaggaacggccccctgaagcagatggcaaaaagggcaactcccccaacagcgaaccgcccactcctaagacggcctgggcagaaacctctcggcctccagagacagagccgggacctcctgccccaaagcctcccctacccccacctcaccggggccccgccrggaactggggcccccctggggactacccagatcgtgggggtcctccctgcaagcccccagcacctgaagatgaggatgaggcatggcggcagcgacgaaagcagtcgtcatctgagatttccctggcagtggagcgggcccggcgacggcgagaagaagaggagcggcgcatgcaagaagagcgccgggcagcctgtgctgagaagctcaagcgactcgatgaaaagtttggggcacctgacaagcggctcaaagcagagcctgctgccccacctgctgccccttctaccccagctccaccacctgcagtccctaaagaactccctgcacctccagctccacctccagcatcagccccaacaccagagamagaacctgaagagccagcacaggcccctcctgcccaatctactcctactccaggtgtggctgcggctcccactctggtgagtggtggtggcagtaccagtagcaccagcagtggcagcttcgaagccagcccagtggaaccacaactgccctcaaaagagggtcctgaaccaccagaagaggttcctcctcctaccacacccccagttccaaaggtggaacccaagggtgatgggattggtcccacccgccagccccctagtcagggcttgggctaccccaaatatcagaagtcgttgcctcctcgtttccagcggcagcagcaggagcagctcctgaagcagcagcagcagcaccagtggcagcagcatcaacagggctctgcccctcctaccccagtgcccccatcaccaccacagcctgtgaccctgggggctgtgccagctccamaggctccacccccgccccccaaggccctgtacccaggtgctctgggccggcccccacccatgcccccaatgaactttgatccccgatggatgatgattcctccttatgtggacccccggctcctccagggtcgtccccctctagacttctaccctcctggtgtgcatccctctggcctagttccccgagagcgttcagacagtgggggctcaagctcagagccatttgaccgtcatgcacctgctatgttacgggaacggggcactccaccggtggatccaaagttggcctgggtrggagatgtcttcaccgccacacccgctgaaccccgcccacttacctcacctctgcgccaggctgcggatgaggatgacaaggggatgaggagcgagactcctccagtacctcccccaccaccctatctggccagttatccaggctttcctgagaatggrrcccctgggcccccaatctctcgctttcctctggaggaaccagggccccgtccactcccctggcccccaggcagtgatgaagtggccaagatacaaactccaccacccaagaaggagccccctaaggaggagactgcacagctgacggggccagaagcaggccgaaagcctgcccgcggagtcgggagtggaggccagggccccccmccaccacgcagagagagtcgcacagagacccgctggggccctcgtccagggagcagtcgtcgtggaatccctccagaggagccaggggccccaccccgccgggctgggcctataaagaaacctccaccacctacaaaagtagaagagctgcctcccaagcccctcgaacagggggatgaaacccccaaacccccaaagccagacccactcaagataaccaaggggaagctagggggccccaaggagaccccacccaatggaaatctttcccctgccccaaggcttcggagggactattcgtatgaaagagtgggtcctacctcttgccggggtcggggccgaggcgagtattttgccagagggaggggttttcgggggacctatgggggacgagggcggggagsccgaagccgggaattccgcagttaccgagagtttcgaggagatgatgggcgtggaggtgggacagggggaccaaaccaccctcctgctccccgaggccgcactgccagcgagacacggagcgagggttcagagtatgaggaaatccccaagcggygccggcagcggggctcagaaacaggcagcgagacccatgagagtgatctggctccttcagacaaggaggctcccacacccaaggagggaacactcacccaggtccctctcgctcccccaccaccaggagccccaccttcaccagcsccagcccgcttcactgcccggggtsggcgagtcttcactcccagaggggtgccatctcgccggggccgaggaggagggaggccccctcctcaagtttgcccaggctggagccctccagccaagtctctggctcccaagaaacctcccacaggccctttgccaccaagtaaggagcctttgaaagagaagttgatcccagggcctctgtcccctgtggcgcgcggaggcagcaatggaggtagcaatgtgggcatggaagatggggagcgaccccgaaggaggcgacatgggagggctcagcagcaggataaaccgcctcgtttccggaggctgaagcaggaacgggagaatgccgcaagggggtctgagggcaagccctccctaacccttccagcctccrctcctgsacctgaggaggccctcacaacagtcacagtggccccagcacctcgccgggcagctgccaagtctcctgatctgtcaaaccagaactcagaccaagccaatgaggaatgggagactgcatcagagagcagtgacttcaccagtgagcgccgaggggacaaagaggcacccccaccagtactgctgacacccaaggctgtgggaactcctgggggaggtggaggtggagccgtaccaggtatttcagccatgtcccgyggagatctgagccagagagccaaggatttgagtaaacggagcttctcaagtcagcggccaggcatggaacggcagaatcggcgccctggcccagggggcaaggctggcarcagtggcagcagcagtggaggagscrgtgggggtcctggaggaaggaccgggccaggacgaggcgacaagaggagctggccctctcccaagaaccgaagtcgtcctccagaggagcgtcccccggggcttcccctgcctcccccacctcccagcagttctgctgtcttccgcctggaccaagttatccacagcaaccctgctggcatccaacaggctctggcccagcttagtagccgtcaagggagtgtaactgcaccagggggtcatccaaggcacaagcctgggcntccccaagcccctcagggcccctctcctaggcccccaacccgatacgagccccagagggtcaacagcggcctcagttctgacccccactttgaggagccggggccaatggtgagaggggtggrtgggactcctcgggactctgccggggttagtccctttccccctaaacgtcgggagcrgcctcccagaaaaccagagctgctacaggaggaatctttgccacctcctcatagctctggattcttgggctctaagcctgagggcccaggccctcaggcagagtccagagatacaggcacagaggccctgacccctcacatctggaaccgtttacatactgccactagccgaaagagttaccggcccagctccatggagccttggatggagcccctgagtccttttgaggatgtggctggcacagaaatgagtcagtctgacagtggggtggacctgagtggggattctcaggtgtcatcaggtccctgcagccagcgaagttcccctgatggaggactcaagggggcagcagagggaccccccaagaggcctggaggctcctcacccctgaatgctgttccttgtgagggtccacctggctctgaacctcctaggagaccaccacctgccccccacgatggggacagaaaggagctgccccgggagcagcctctgccccctggccccattggcacagaacgatcacagcrtacagaccgagscacagagcctggccccattcggccatcccatcgacctggtcccccagtccagtttggcactagtgrcaaggactcagacttacgcctartggtaggagacagcttgaaagcagagaaggagctaacagcatcagtcactgargccattcctgtatcacgagactgggagctgcttcccagtgctgctgcctctgctgagccacaatccaagaacctggattctgggcactgtgtcccggagcccagctcctcaggccagcgcctgtatcctgaggttttctatggcagtgctgggccttccagttctcagatctctgggggagccatggactctcarttacatccaaacagtggaggcttccgccctgggacaccctcactgcacccttacagatcacagcccctatacctacccccsggcccagcccctccctcagcactgctctctgggktagctctcaagggccagtttctggatttctccacaatgcaagctacagagctggggaagttgccggctggaggagttctctaccctccaccttccttcctctactctccggctttctgccccagtcctttgcctgacacatcgttgcttcaggtacgccaggatctgccatccccttcggatttttattctactcctctgcagcctggtggccaaagtggmtttctcccttcaggggctcctgcccagcagatgcttctacccatggtagactcacagctgcctgtggtgaactttggctccctgccgccagcaccacctcctgccccacctyccctttctctgttacctgtgggccctgctctgcagccccccagcctggctgtgcggcccccacctgctcctgctactcgggtgctgccttcacctgccaggcccttccccgctagcttggggcgagcagagctgcatccagtggaactaaagccgttccaggattatcaaaaactgagcagcaaccttgggggacctggatcatcayggactcccccaactggaaggtcctyctctggcctcaattcccgtctsaaggccacgccttccacctacagtggagtcttccgcacccagcgcgtcgacctttaccagcaggcctccccaccagatgccctgcgctggatacctaagccttgggagcggacagggcygccacctcgagaagggccctcccgacgggcagaggagcctgggtcccgaggggacaaggagcctgggttgcccccaccccgctgagggagttcctcttgccccctacccccggggcttgtatatagattataaatatataagggggaaaggggtgggcggggaggggttstggggctggggcctcacttcccctcctcccccttcccctggtcccctgtccctggggctgtttgttaaaaaagagtaataaaaggatttk

SEQ ID NO: 426 - DNA, 2733 bp, Homo sapiens
gagcgttctgaacacctccccgtcccagcccctgggccaggcaagggccggccttacctctcctgggttggtggcagcagagctgggctctgagggaggcctgcaatgtgagacagtagcagctcagaggcggcactaggcaggtgcaaccccaaaagacccctctgccatgaaccagtccatcccagtggctcccaccccaccccgccgcgtgcggctgaagccctggctggtggcccaggtgaacagctgccagtacccagggcttcaatgggtcaacggggaaaagaaattattctgcatcccctggaggcatgccacaaggcatggtcccagccaggacggagataacaccatcttcaaggcctgggccaaggagacagggaaatacaccgaaggcgtggatgaagccgatccggccaagtggaaggccaacctgcgctgtgcccttaacaagagccgggacttccgcctcatctacgaygggccccgggacatgccacctcagccctacaagatctacgaggtctgctccaatggccctgctcccacagactcccagccccctgaggattactcttttggtgcaggagaggaggaggaagaagaggaagagctgcagaggatgttgccaagcctgagcctcacagatgcagtgcagtctggcccccacatgacaccctattctttactcaaagaggatgtcaagtggccgcccactctgcagccgcccactctgcggccgcctactctgcagccgcccactctgcrgccgcccgtggtgctgggtccccctgctccagaccccagccccctggctcctccccctggcaaccctgctggcttcagggagcttctctctgaggtcctggagcctgggcccctgcctgccagcctgccccctgcaggcgaacagctcctgccagacctgctgatcagcccccacatgctgcctctgaccgacctggagatcaagtttcagtaccgggggcggccaccccgggccctcaccatcagcaacccccatggctgccggctcttctacagccagctggaggccacccaggagcaggtggaactcttcggccccataagcctggagcaagtgcgcttccccagccctgaggacatccccagtgacaagcagcgcttctacacgaaccagctgctggatgtcctggaccgcgggctcatcctccagctacagggccaggacctktatgccatccgcctgtgtcagtgcaaggtgttctggagcgggccttgtgcctcagcccatgactcatgccccaaccccatccagcgggaggtcaagaccaagcttttcagcctggagcattttctcaatgagctcatcctgttccaaaagggccagaccaacaccccaccacccttcgagatcttcttctgctttggggaagaatggcctgaccgcaaaccccgagagaagaagctcattactgtacaggtggtgcctgtagcagctcgactgctgctggagatgttctcaggggagctatcttggtcagctgatagtatccggctacagatctcaaacccagacctcaaagaccgcatggtggagcaattcaaggagctccatcacatctggcagtcccagcagcggttgcagcctgtggcccaggcccctcctggagcaggccttggtgttggccaggggccctggcctatgcacccagctggcatgcaataacaaggctgcagacggtgactggccctggcttcctgggtggcggtgcggactgatgtggagatgtgacagccccgatgagcwcctggctggctgcagggtcctacctctgggtttcctggaagtggatytgggccaagaaggagagggagaaaggcccgagcccctgccttcccgggcctttctctcctgggctgtctctggtctggtcagcctggctctcgggaaattcagccatgagcagggaaagaactctcccaaccctggggcctagctgtataggaggaattgcctaagggtggcccactcttgtgattgccccatttcctctggcaacaaaagccagagtgttgtgggccaagtccccccacagggcctctgcagggcatggccctgatttccctggtttgagactcacttcctcatctccctgtcctctgagataatatgagtgagcacttaggtatcatatcagatgctcaaggctggcagctacccccttcttgagagtccaagaacctggagcagaaataatttttatgtatttttggattaatgaatgttaaaaacagactcagctgtttctttccttttactactaccagttgctcccatgctgctccaccaggccctgtttcggatgccaactggcccactccccaagcacttgcccccagcttgcgaccattggcactgggagggcctggcttctgggctgatgggtcagttgggccttcataaacactcacctggctggctttgctttccaggaggaagctggctgaagcaagggtgtggaattttaaatgtgtgcacagtctggaaaactgtcagaatcagttttcccataaaagggtgggctagcattgcagctgcatttgggaccattcaaatctgtcactctcttgtgtatattcctgtgctattaaatatatcagggcagtgcatgtaaatcatcctgatatatttaatatatttattatattgtcccccgaggtggggacagtgagtgagttctctta

SEQ ID NO: 427 - DNA, 2641 bp, Homo sapiens
aagtgcccggcaggttggcggaccggcgggaggcgcagcctgggcagagctcagcttggtcccgccgcccggccggtgctccctggcgcagccacgcaggcgcaccgcagacagacccctctgccatgaaccagtccatcccagtggctcccaccccaccccgccgcgtgcggctgaagccctggctggtggcccaggtgaacagctgccagtacccagggcttcaatgggtcaacggggaaaagaaattattctgcatcccctggaggcatgccacaaggcatggtcccagccaggacggagataacaccatcttcaaggcctgggccaaggagacagggaaatacaccgaaggcgtggatgaagccgatccggccaagtggaaggccaacctgcgctgtgcccttaacaagagccgggacttccgcctcatctacgaygggccccgggacatgccacctcagccctacaagatctacgaggtctgctccaatggccctgctcccacagactcccagccccctgaggattactcttttggtgcaggagaggaggaggaagaagaggaagagctgcagaggatgttgccaagcctgagcctcacagaggatgtcaagtggccgcccactctgcagccgcccactctgcggccgcctactctgcagccgcccactctgcrgccgcccgtggtgctgggtccccctgctccagaccccagccccctggctcctccccctggcaaccctgctggcttcagggagcttctctctgaggtcctggagcctgggcccctgcctgccagcctgccccctgcaggcgaacagctcctgccagacctgctgatcagcccccacatgctgcctctgaccgacctggagatcaagtttcagtaccgggggcggccaccccgggccctcaccatcagcaacccccatggctgccggctcttctacagccagctggaggccacccaggagcaggtggaactcttcggccccataagcctggagcaagtgcgcttccccagccctgaggacatccccagtgacaagcagcgcttctacacgaaccagctgctggatgtcctggaccgcgggctcatcctccagctacagggccaggacctktatgccatccgcctgtgtcagtgcaaggtgttctggagcgggccttgtgcctcagcccatgactcatgccccaaccccatccagcgggaggtcaagaccaagcttttcagcctggagcattttctcaatgagctcatcctgttccaaaagggccagaccaacaccccaccacccttcgagatcttcttctgctttggggaagaatggcctgaccgcaaaccccgagagaagaagctcattactgtacaggtggtgcctgtagcagctcgactgctgctggagatgttctcaggggagctatcttggtcagctgatagtatccggctacagatctcaaacccagacctcaaagaccgcatggtggagcaattcaaggagctccatcacatctggcagtcccagcagcggttgcagcctgtggcccaggcccctcctggagcaggccttggtgttggccaggggccctggcctatgcacccagctggcatgcaataacaaggctgcagacggtgactggccctggcttcctgggtggcggtgcggactgatgtggagatgtgacagccccgatgagcwcctggctggctgcagggtcctacctctgggtttcctggaagtggatytgggccaagaaggagagggagaaaggcccgagcccctgccttcccgggcctttctctcctgggctgtctctggtctggtcagcctggctctcgggaaattcagccatgagcagggaaagaactctcccaaccctggggcctagctgtataggaggaattgcctaagggtggcccactcttgtgattgccccatttcctctggcaacaaaagccagagtgttgtgggccaagtccccccacagggcctctgcagggcatggccctgatttccctggtttgagactcacttcctcatctccctgtcctctgagataatatgagtgagcacttaggtatcatatcagatgctcaaggctggcagctacccccttcttgagagtccaagaacctggagcagaaataatttttatgtatttttggattaatgaatgttaaaaacagactcagctgtttctttccttttactactaccagttgctcccatgctgctccaccaggccctgtttcggatgccaactggcccactccccaagcacttgcccccagcttgcgaccattggcactgggagggcctggcttctgggctgatgggtcagttgggccttcataaacactcacctggctggctttgctttccaggaggaagctggctgaagcaagggtgtggaattttaaatgtgtgcacagtctggaaaactgtcagaatcagttttcccataaaagggtgggctagcattgcagctgcatttgggaccattcaaatctgtcactctcttgtgtatattcctgtgctattaaatatatcagggcagtgcatgtaaatcatcctgatatatttaatatatttattatattgtcccccgaggtggggacagtgagtgagttctctta

SEQ ID NO: 428 - DNA, 2689 bp, Homo sapiens
aagtgcccggcaggttggcggaccggcgggaggcgcagcctgggcagagctcagcttggtcccgccgcccggccggtgctccctggcgcagccacgcaggcgcaccgcagacagacccctctgccatgaaccagtccatcccagtggctcccaccccaccccgccgcgtgcggctgaagccctggctggtggcccaggtgaacagctgccagtacccagggcttcaatgggtcaacggggaaaagaaattattctgcatcccctggaggcatgccacaaggcatggtcccagccaggacggagataacaccatcttcaaggcctgggccaaggagacagggaaatacaccgaaggcgtggatgaagccgatccggccaagtggaaggccaacctgcgctgtgcccttaacaagagccgggacttccgcctcatctacgaygggccccgggacatgccacctcagccctacaagatctacgaggtctgctccaatggccctgctcccacagactcccagccccctgaggattactcttttggtgcaggagaggaggaggaagaagaggaagagctgcagaggatgttgccaagcctgagcctcacagatgcagtgcagtctggcccccacatgacaccctattctttactcaaagaggatgtcaagtggccgcccactctgcagccgcccactctgcggccgcctactctgcagccgcccactctgcrgccgcccgtggtgctgggtccccctgctccagaccccagccccctggctcctccccctggcaaccctgctggcttcagggagcttctctctgaggtcctggagcctgggcccctgcctgccagcctgccccctgcaggcgaacagctcctgccagacctgctgatcagcccccacatgctgcctctgaccgacctggagatcaagtttcagtaccgggggcggccaccccgggccctcaccatcagcaacccccatggctgccggctcttctacagccagctggaggccacccaggagcaggtggaactcttcggccccataagcctggagcaagtgcgcttccccagccctgaggacatccccagtgacaagcagcgcttctacacgaaccagctgctggatgtcctggaccgcgggctcatcctccagctacagggccaggacctktatgccatccgcctgtgtcagtgcaaggtgttctggagcgggccttgtgcctcagcccatgactcatgccccaaccccatccagcgggaggtcaagaccaagcttttcagcctggagcattttctcaatgagctcatcctgttccaaaagggccagaccaacaccccaccacccttcgagatcttcttctgctttggggaagaatggcctgaccgcaaaccccgagagaagaagctcattactgtacaggtggtgcctgtagcagctcgactgctgctggagatgttctcaggggagctatcttggtcagctgatagtatccggctacagatctcaaacccagacctcaaagaccgcatggtggagcaattcaaggagctccatcacatctggcagtcccagcagcggttgcagcctgtggcccaggcccctcctggagcaggccttggtgttggccaggggccctggcctatgcacccagctggcatgcaataacaaggctgcagacggtgactggccctggcttcctgggtggcggtgcggactgatgtggagatgtgacagccccgatgagcwcctggctggctgcagggtcctacctctgggtttcctggaagtggatytgggccaagaaggagagggagaaaggcccgagcccctgccttcccgggcctttctctcctgggctgtctctggtctggtcagcctggctctcgggaaattcagccatgagcagggaaagaactctcccaaccctggggcctagctgtataggaggaattgcctaagggtggcccactcttgtgattgccccatttcctctggcaacaaaagccagagtgttgtgggccaagtccccccacagggcctctgcagggcatggccctgatttccctggtttgagactcacttcctcatctccctgtcctctgagataatatgagtgagcacttaggtatcatatcagatgctcaaggctggcagctacccccttcttgagagtccaagaacctggagcagaaataatttttatgtatttttggattaatgaatgttaaaaacagactcagctgtttctttccttttactactaccagttgctcccatgctgctccaccaggccctgtttcggatgccaactggcccactccccaagcacttgcccccagcttgcgaccattggcactgggagggcctggcttctgggctgatgggtcagttgggccttcataaacactcacctggctggctttgctttccaggaggaagctggctgaagcaagggtgtggaattttaaatgtgtgcacagtctggaaaactgtcagaatcagttttcccataaaagggtgggctagcattgcagctgcatttgggaccattcaaatctgtcactctcttgtgtatattcctgtgctattaaatatatcagggcagtgcatgtaaatcatcctgatatatttaatatatttattatattgtcccccgaggtggggacagtgagtgagttctctta

SEQ ID NO: 429 - DNA, 2527 bp, Homo sapiens
acccctctgccatgaaccagtccatcccagtggctcccaccccaccccgccgcgtgcggctgaagccctggctggtggcccaggtgaacagctgccagtacccagggcttcaatgggtcaacggggaaaagaaattattctgcatcccctggaggcatgccacaaggcatggtcccagccaggacggagataacaccatcttcaaggcctgggccaaggagacagggaaatacaccgaaggcgtggatgaagccgatccggccaagtggaaggccaacctgcgctgtgcccttaacaagagccgggacttccgcctcatctacgaygggccccgggacatgccacctcagccctacaagatctacgaggtctgctccaatggccctgctcccacagactcccagccccctgaggattactcttttggtgcaggagaggaggaggaagaagaggaagagctgcagaggatgttgccaagcctgagcctcacagaggatgtcaagtggccgcccactctgcagccgcccactctgcggccgcctactctgcagccgcccactctgcrgccgcccgtggtgctgggtccccctgctccagaccccagccccctggctcctccccctggcaaccctgctggcttcagggagcttctctctgaggtcctggagcctgggcccctgcctgccagcctgccccctgcaggcgaacagctcctgccagacctgctgatcagcccccacatgctgcctctgaccgacctggagatcaagtttcagtaccgggggcggccaccccgggccctcaccatcagcaacccccatggctgccggctcttctacagccagctggaggccacccaggagcaggtggaactcttcggccccataagcctggagcaagtgcgcttccccagccctgaggacatccccagtgacaagcagcgcttctacacgaaccagctgctggatgtcctggaccgcgggctcatcctccagctacagggccaggacctktatgccatccgcctgtgtcagtgcaaggtgttctggagcgggccttgtgcctcagcccatgactcatgccccaaccccatccagcgggaggtcaagaccaagcttttcagcctggagcattttctcaatgagctcatcctgttccaaaagggccagaccaacaccccaccacccttcgagatcttcttctgctttggggaagaatggcctgaccgcaaaccccgagagaagaagctcattactgtacaggtggtgcctgtagcagctcgactgctgctggagatgttctcaggggagctatcttggtcagctgatagtatccggctacagatctcaaacccagacctcaaagaccgcatggtggagcaattcaaggagctccatcacatctggcagtcccagcagcggttgcagcctgtggcccaggcccctcctggagcaggccttggtgttggccaggggccctggcctatgcacccagctggcatgcaataacaaggctgcagacggtgactggccctggcttcctgggtggcggtgcggactgatgtggagatgtgacagccccgatgagcwcctggctggctgcagggtcctacctctgggtttcctggaagtggatytgggccaagaaggagagggagaaaggcccgagcccctgccttcccgggcctttctctcctgggctgtctctggtctggtcagcctggctctcgggaaattcagccatgagcagggaaagaactctcccaaccctggggcctagctgtataggaggaattgcctaagggtggcccactcttgtgattgccccatttcctctggcaacaaaagccagagtgttgtgggccaagtccccccacagggcctctgcagggcatggccctgatttccctggtttgagactcacttcctcatctccctgtcctctgagataatatgagtgagcacttaggtatcatatcagatgctcaaggctggcagctacccccttcttgagagtccaagaacctggagcagaaataatttttatgtatttttggattaatgaatgttaaaaacagactcagctgtttctttccttttactactaccagttgctcccatgctgctccaccaggccctgtttcggatgccaactggcccactccccaagcacttgcccccagcttgcgaccattggcactgggagggcctggcttctgggctgatgggtcagttgggccttcataaacactcacctggctggctttgctttccaggaggaagctggctgaagcaagggtgtggaattttaaatgtgtgcacagtctggaaaactgtcagaatcagttttcccataaaagggtgggctagcattgcagctgcatttgggaccattcaaatctgtcactctcttgtgtatattcctgtgctattaaatatatcagggcagtgcatgtaaatcatcctgatatatttaatatatttattatattgtcccccgaggtggggacagtgagtgagttctctta

SEQ ID NO: 430 - DNA, 2598 bp, Homo sapiens
aagtgcccggcaggttggcggaccggcgggaggcgcagcctgggcagagctcagcttggtcccgccgcccggccggtgctccctggcgcagccacgcaggcgcaccgcagacagacccctctgccatgaaccagtccatcccagtggctcccaccccaccccgccgcgtgcggctgaagccctggctggtggcccaggtgaacagctgccagtacccagggcttcaatgggtcaacggggaaaagaaattattctgcatcccctggaggcatgccacaaggcatggtcccagccaggacggagataacaccatcttcaaggcctgggccaaggagacagggaaatacaccgaaggcgtggatgaagccgatccggccaagtggaaggccaacctgcgctgtgcccttaacaagagccgggacttccgcctcatctacgaygggccccgggacatgccacctcagccctacaagatctacgaggtctgctccaatggccctgctcccacagactcccagccccctgaggattactcttttggtgcaggagaggaggaggaagaagaggaagagctgcagaggatgttgccaagcctgagcctcacaggccgcctactctgcagccgcccactctgcrgccgcccgtggtgctgggtccccctgctccagaccccagccccctggctcctccccctggcaaccctgctggcttcagggagcttctctctgaggtcctggagcctgggcccctgcctgccagcctgccccctgcaggcgaacagctcctgccagacctgctgatcagcccccacatgctgcctctgaccgacctggagatcaagtttcagtaccgggggcggccaccccgggccctcaccatcagcaacccccatggctgccggctcttctacagccagctggaggccacccaggagcaggtggaactcttcggccccataagcctggagcaagtgcgcttccccagccctgaggacatccccagtgacaagcagcgcttctacacgaaccagctgctggatgtcctggaccgcgggctcatcctccagctacagggccaggacctktatgccatccgcctgtgtcagtgcaaggtgttctggagcgggccttgtgcctcagcccatgactcatgccccaaccccatccagcgggaggtcaagaccaagcttttcagcctggagcattttctcaatgagctcatcctgttccaaaagggccagaccaacaccccaccacccttcgagatcttcttctgctttggggaagaatggcctgaccgcaaaccccgagagaagaagctcattactgtacaggtggtgcctgtagcagctcgactgctgctggagatgttctcaggggagctatcttggtcagctgatagtatccggctacagatctcaaacccagacctcaaagaccgcatggtggagcaattcaaggagctccatcacatctggcagtcccagcagcggttgcagcctgtggcccaggcccctcctggagcaggccttggtgttggccaggggccctggcctatgcacccagctggcatgcaataacaaggctgcagacggtgactggccctggcttcctgggtggcggtgcggactgatgtggagatgtgacagccccgatgagcwcctggctggctgcagggtcctacctctgggtttcctggaagtggatytgggccaagaaggagagggagaaaggcccgagcccctgccttcccgggcctttctctcctgggctgtctctggtctggtcagcctggctctcgggaaattcagccatgagcagggaaagaactctcccaaccctggggcctagctgtataggaggaattgcctaagggtggcccactcttgtgattgccccatttcctctggcaacaaaagccagagtgttgtgggccaagtccccccacagggcctctgcagggcatggccctgatttccctggtttgagactcacttcctcatctccctgtcctctgagataatatgagtgagcacttaggtatcatatcagatgctcaaggctggcagctacccccttcttgagagtccaagaacctggagcagaaataatttttatgtatttttggattaatgaatgttaaaaacagactcagctgtttctttccttttactactaccagttgctcccatgctgctccaccaggccctgtttcggatgccaactggcccactccccaagcacttgcccccagcttgcgaccattggcactgggagggcctggcttctgggctgatgggtcagttgggccttcataaacactcacctggctggctttgctttccaggaggaagctggctgaagcaagggtgtggaattttaaatgtgtgcacagtctggaaaactgtcagaatcagttttcccataaaagggtgggctagcattgcagctgcatttgggaccattcaaatctgtcactctcttgtgtatattcctgtgctattaaatatatcagggcagtgcatgtaaatcatcctgatatatttaatatatttattatattgtcccccgaggtggggacagtgagtgagttctctta

SEQ ID NO: 431 - DNA, 2658 bp, Homo sapiens
aagtgcccggcaggttggcggaccggcgggaggcgcagcctgggcagagctcagcttggtcccgccgcccggccggtgctccctggcgcagccacgcaggcgcaccgcagacagacccctctgccatgaaccagtccatcccagtggctcccaccccaccccgccgcgtgcggctgaagccctggctggtggcccaggtgaacagctgccagtacccagggcttcaatgggtcaacggggaaaagaaattattctgcatcccctggaggcatgccacaaggcatggtcccagccaggacggagataacaccatcttcaaggcctgggccaaggagacagggaaatacaccgaaggcgtggatgaagccgatccggccaagtggaaggccaacctgcgctgtgcccttaacaagagccgggacttccgcctcatctacgaygggccccgggacatgccacctcagccctacaagatctacgaggtctgctccaatggccctgctcccacagactcccagccccctgaggattactcttttggtgcaggagaggaggaggaagaagaggaagagctgcagaggatgttgccaagcctgagcctcacagatgcagtgcagtctggcccccacatgacaccctattctttactcaaagaggatgtcaacggccgcctactctgcagccgcccactctgcrgccgcccgtggtgctgggtccccctgctccagaccccagccccctggctcctccccctggcaaccctgctggcttcagggagcttctctctgaggtcctggagcctgggcccctgcctgccagcctgccccctgcaggcgaacagctcctgccagacctgctgatcagcccccacatgctgcctctgaccgacctggagatcaagtttcagtaccgggggcggccaccccgggccctcaccatcagcaacccccatggctgccggctcttctacagccagctggaggccacccaggagcaggtggaactcttcggccccataagcctggagcaagtgcgcttccccagccctgaggacatccccagtgacaagcagcgcttctacacgaaccagctgctggatgtcctggaccgcgggctcatcctccagctacagggccaggacctktatgccatccgcctgtgtcagtgcaaggtgttctggagcgggccttgtgcctcagcccatgactcatgccccaaccccatccagcgggaggtcaagaccaagcttttcagcctggagcattttctcaatgagctcatcctgttccaaaagggccagaccaacaccccaccacccttcgagatcttcttctgctttggggaagaatggcctgaccgcaaaccccgagagaagaagctcattactgtacaggtggtgcctgtagcagctcgactgctgctggagatgttctcaggggagctatcttggtcagctgatagtatccggctacagatctcaaacccagacctcaaagaccgcatggtggagcaattcaaggagctccatcacatctggcagtcccagcagcggttgcagcctgtggcccaggcccctcctggagcaggccttggtgttggccaggggccctggcctatgcacccagctggcatgcaataacaaggctgcagacggtgactggccctggcttcctgggtggcggtgcggactgatgtggagatgtgacagccccgatgagcwcctggctggctgcagggtcctacctctgggtttcctggaagtggatytgggccaagaaggagagggagaaaggcccgagcccctgccttcccgggcctttctctcctgggctgtctctggtctggtcagcctggctctcgggaaattcagccatgagcagggaaagaactctcccaaccctggggcctagctgtataggaggaattgcctaagggtggcccactcttgtgattgccccatttcctctggcaacaaaagccagagtgttgtgggccaagtccccccacagggcctctgcagggcatggccctgatttccctggtttgagactcacttcctcatctccctgtcctctgagataatatgagtgagcacttaggtatcatatcagatgctcaaggctggcagctacccccttcttgagagtccaagaacctggagcagaaataatttttatgtatttttggattaatgaatgttaaaaacagactcagctgtttctttccttttactactaccagttgctcccatgctgctccaccaggccctgtttcggatgccaactggcccactccccaagcacttgcccccagcttgcgaccattggcactgggagggcctggcttctgggctgatgggtcagttgggccttcataaacactcacctggctggctttgctttccaggaggaagctggctgaagcaagggtgtggaattttaaatgtgtgcacagtctggaaaactgtcagaatcagttttcccataaaagggtgggctagcattgcagctgcatttgggaccattcaaatctgtcactctcttgtgtatattcctgtgctattaaatatatcagggcagtgcatgtaaatcatcctgatatatttaatatatttattatattgtcccccgaggtggggacagtgagtgagttctctta

SEQ ID NO: 432 - DNA, 7886 bp, Homo sapiens
ccccatccccaccgcctccaggctgccggggctgggccgctgtacgggagccaaggtgcggtgccccgcgtgtggacgagccgaggtgcagcccgcggggccgcagggccggggtggggcggggcgcggcsggagcagatccggtgtttgcggaatcaggaggggcgggcyggggcgggccctcggcgctgcaggagctgcccagaaacttttccctgctctcaccgggcgggggagagaagccctctggacagcttctagagtgtgcaggttctcgtatccctcggccaagggtatcctctgcaaacctctgcaaacccagcgcaactacggtcccccggtcagacccaggatggggccagaacggacaggggccgcgccgctgccgctgctgctggtgttagcgctcagtcaaggcattttaaattgttgtttggcctacaatgttggtctcccagaagcaaaaatattttccggtccttcaagtgaacagtttggctatgcagtgcagcagtttataaatccaaaaggcaactggttactggttggttcaccctggagtggctttcctgagaaccgaatgggagatgtgtataaatgtcctgttgacctatccactgccacatgtgaaaaactaaatttgcaaacttcaacaagcattccaaatgttactgagatgaaaaccaacatgagcctcggcttgatcctcaccaggaacatgggaactggaggttttctcacatgtggtcctctgtgggcacagcaatgtgggaatcagtattacacaacgggtgtgtgttctgacatcagtcctgattttcagctctcagccagcttctcacctgcaactcagccctgcccttccctcatagatgttgtggttgtgtgtgatgaatcaaatagtatttatccttgggatgcagtaaagaattttttggaaaaatttgtacaaggcctggatataggccccacaaagacacaggtrgggttaattcagtatgccaataatccaagagttgtgtttaacttgaacacatataaaaccaaagaagaaatgattgtagcaacatcccagacatcccaatatggtggggacctcacaaacacmttyggagcaattcaatatgcaagaaaatatgcytattcagcagcttctggtgggcgacgaagtgctacraaagtaatggtagttgtaactgayggtgaatcacatgatggttcaatgttgaaagctgtgattgatcaatgcaaccatgacaatatactgaggtttggcatagcagttcttgggtacttaaacagaaacgcccttgatactaaaaatttaataaaagaaataaaagcratcgctagtattccaacagaaagatactttttcaatgtgtctgatgaagcagctctactagaaaaggctgggacattaggagaacaaattttcagcattgaaggtactgttcaaggaggagacaactttcagatggaaatgtcacaagtgggattcagtgcagattactcttctcaaaatgatattctgatgctgggtgcagtgggagcttttggctggagtgggaccattgtccagaagacatctcatggccatttgatctttcctaaacaagcctttgaccaaattctgcaggacagaaatcacagttcatatttaggttactctgtggctgcaatttctactggagaaagcactcactttgttgctggtgctcctcgggcaaattataccggccagatagtgctatatagtgtgaatgagaatggcaatatcacggttattcaggctcaccgaggtgaccagattggctcctattttggtagtgtgctgtgttcagttgatgtggataaagacaccattacagacgtgctcttggtaggtgcaccaatgtacatgagtgacctaaagaaagaggaaggaagagtctacctgtttactatcaaaragggcattttgggtcagcaccaatttcttgaaggccccgagggcattgaaaacactcgatttggttcagcaattgcagctctttcagacatcaacatggatggctttaatgatgtgattgttggttcaccactagaaaatcagaattctggagctgtatacatttacaatggtcatcagggcactatccgcacaaagtattcccagaaaatcttgggatccgatggagcctttaggagccatctccagkactttgggaggtccttggatggctatggagatttaaatggggattccatcaccgatgtgtctattggtgcctttggacaagtggttcaactctggtcacaaagtattgctgatgtagctatagaagcttcattcacaccagaaaaaatcactttggtcaacaagaatgctcagataattctcaaactctgcttcagtgcaaagttcagacctactaagcaaaacaatcaagtggccattgtatataacatcacacttgatgcagatggattttcatccagagtaacctccagggggttatttaaagaaaacaatgaaaggtgcctgcagaagaatatggtagtaaatcaagcacagagttgccccgagcacatcatttatatacaggagccctctgatgttgtcaactctttggatttgcgtgtggacatcagtctggaaaaccctggcactagccctgcccttgaagcctattctgagactgccaaggtcttcagtattcctttccacaaagactgtggtgaggayggactttgcatttctgatctagtcctagatgtccgacaaataccagctgctcaagaacaaccctttattgtcagcaaccaaaacaaaaggttaacattttcagtaacrctgaaaaataaaagggaaagtgcatacaacactggaattgttgttgatttttcagaaaacttgttttttgcatcattctccctrccggttgatgggacagaagtaacatgccaggtggctgcatctcagaagtctgttgcctgcgatgtaggctaccctgctttaaagagagaacaacaggtgacttttactattaactttgacttcaatcttcaaaaccttcagaatcaggcgtctctcagtttccaagccttaagtgaaagccaagaagaaaacaaggctgataatttggtcarcctcaaaattcctctcctgtatgatgctgaaattcacttaacaagatctaccaacataaatttttatgaaatctcttcggatgggaatgttccttcaatcgtgcacagttttgaagatgttggtccaaaattcatcttctccctgaaggtaacaacaggaagtgttccagtaagcatggcaactgtaatcatccacatccctcagtataccaaagaaaagaacccactgatgtacctaactggggtgcaaacagacaaggctggtgacatcagttgtaatgcagatatcaatccactgaaaataggacaaacatcttcttctgtatctttcaaaagtgaaaatttcaggcacaccaaagaattgaactgcagaactgcttcctgtagtaatgttacctgctggttgaaagacgttcacatgaaaggagaatactttgttaatgtgactaccagaatttggaacgggactttygcatcatcaacgttccagacagtacagctaacggcagctgcagaaatcaacacctataaccytgagatatatgtgattgaagataacactgttacgattcccctgatgataatgaaacctgatgagaaagccgaagtaccaacaggagttataataggaagtataattgctggaatccttttgctgttagctctggttgcaattttatggaagctcggcttcttcaaaagaaaatatgaaaagatgaccaaaaatccagatgagattgatgagaccacagagctcagtagctgaaccagcagacctacctgcagtgggaaccrgcagcatcccagccagggtttgctgtttgcgtgaatggatttctttttaaatcccatattttttttatcatgtcgtaggtaaactaacctggtattttaagagaaaactgcaggtcagtttggaatgaagaaattgtggggggtgggggaggtgcggggggcaggtagggaaataatagggaaaatacctattttatatgatgggggaaaaaaagtaatctttaaactggctggcccagagtttacattctaatttgcattgtgtcagaaacatgaaatgcttccaagcatgacaacttttaaagaaaaatatgatactctcagattttaagggggaaaactgttctctttaaaatatttgtctttaaacagcaactacagaagtggaagtgcttgatatgtaagtacttccacttgtgtatattttaatgaatattgatgttaacaagaggggaaaacaaaacacaggttttttcaatttatgctgctcatccaaagttgccacagatgatacttccaagtgataattttatttataaactaggtaaaatttgttgttggttccttttakaccacggctgccccttccacaccccatcttgctctaatgatcaaaacatgcttgaataactgagcttagagtatacctcctrtatgtccatttaagttaggagagggggcgatatagagamtaaggcacaaaattttgtttaaaactcagaatataacatgtaaaatcccatctgctagaagcccatcctgtgccagaggaaggaaaaggaggaaatttcctttctcttttaggaggcacaacagttctcttctaggatttgtttggctgactggcagtaacctagtgaatttytgaaagatgagtaatttctttggcaaccttcctcctcccttactgaaccactctcccacctcctggtggtaccattattatagaagccctctacagcctgactttctctccagcggtccaaagttatcccctcctttacccctcatccaaagttcccactccttcaggacagctgctgtgcattagatattaggggggaaagtcatctgtttaatttacacacttgcatgaattactgtatataaactccttaacttcagggagctattttcatttagtgctaaacaagtaagaaaaataagctmgagtgaatttctaaatgttggaatgttatgggatgtaaacaatgtaaagtaaracatctcaggatttcaccagaagttacagatgaggcactggaarccaccaaattagcaggtgcaccttctgtggctgtcttgtttctgaagtacttaaacttccacaagagtgaatttgacctaggcaagtttgttcaaaaggtagatcctgagatgatttggtcagattgggataaggcccagcaatctgcattttaacaagcaccccagtcactaggatgcagatggaccacactttgagaaacaccacccatttctactttttgcaccttattttctctgttcctgagcccccacattctctaggagaaacttagaggaaaagggcacagacactacatatctaaagctttggacaagtccttgacctctataaacttcagagtcctcattataaaatgggaagactgagctggagttcagcagtgatgcttttagttttaaaagtctatgatctggacttcctataatacaaatacacaatcctccaagaatttgacttggaaaaaaatgtcaaaggaaaacaggttatctgcccatgtgcatatggacaaccttgactaccctggcctggcccgtggtggcagtccagggctatctgtactgtttacagaattactttgtagttgacaacacaaaacaaacaaaaaaggcataaaatgccagcggtttatagaaaaaacagcatggtattctccagttaggtatgccagagtccaattcttttaacagctgtgagaatttgctgcttcattccaacaaaattttatttaaaaaaaaaaaaaaaagactggagaaactagtcattagcttgataaagaatatttaacagctagtggtgctggtgtgtacctgaagctccagctacttgagagactgagacaggaagatcgcttgagcccaggagttcaagtccagcctaagcaacatagcaagaccctgtctcaaaaaaatgactatttaaaaagacaatgtggccaggcacggtggctcacacctgtaatcccaacactttgggaggctgaggccggtggatcacgaggtcaggagtttgagactagcctggccaacatggtgaaaccccatctctaataatataaaaattagctgggcgtagtagcaggtgcctgtaatcccagttactcgggaagctgaggcaggagaatcacttgaacccgggaggcagaggtttcagtgagccgagatcgcgccactgcactccagcctgggtgacagggcaagactctgtctcaaacaaacaaacaaaaaaaaagttagtactgtatatgtaaatactagcttttcaatgtgctatayaaacaattatagcacatccttccttttactctgtctcacctcctttaggtgagtacttccttaaataagtgctaaacatacatatacggaacttgaaagctttggttagccttgccttaggtaatcagcctagtttacactgtttccagggagtagttgaattactataaaccattagccacttgtctctgcaccatttatcacaccaggacagggtctctcaacctgggcgctactgtcatttggggccaggtgattcttccttgcaggggctgtcctgtaccttgtaggacagcagccctgtcctagaaggtatgtttagcagcattcctggcctctagctacccgatgccagagcatgctcccccyrcagtcatgacaatcaaaaaatgtctccagacattgtcaaatgcctcctggggggcagtrtttctcaagcacttttaagcaaaggtragtattcatacaagaaatttagggggaaaaaacattgtttaaataaaagctatgtgttcctattcaacaatatttttgctttaaaagtaagtagagggcataaaagatgtcatattcaaatttccatttcataaatgrtgtacagacaaggtctatagaatgtggtaaaaacttgactgcaacacaaggcttataaaatagtaagatagtaaaatagcttatgaagaaactacagagatttaaaattgtgcatgactcatttcagcagcaaaataagaactcctaactgaacagaaatttttctacctagcaatgttattcttgtaaaatagttacctattaaaactgtgaagagtaaaactaaagccaatttattatagtcacacaagtgattatactaaaaattattataaaggktataattttataatgtatttacctgtcctgatatatagctataacccaatatatgaaaatctcaaaaattaagacatcatcatacagaaggcaggattccttaaactgagatccctgatccatctttaatatttcaatttgcacacataaaacaatgcccttttgtgtacattcaggcatacccattttaatcaatttgaaaggttaatttaaacctctagaggtgaatgagaaacatgggggaaaagtatgaaataggtgaaaatcttaactatttctttgaactctaaagactgaaactgtagccattatgtaaataaagtttcatatgtacctgtttattttggcagattaagtcaaaatatgaatgtatatattgcataactatgttagaattgtatatattttaaagaaattgtcttggatattttcctttatacataatagataagtcttttttcaaatgtggtgtttgatgtttttgattaaatgtgttttgcctctttccacaaaaactgtaaaaataaatgcatgtttgtacamaa

SEQ ID NO: 433 - DNA, 4780 bp, Homo sapiens
ccccatccccaccgcctccaggctgccggggctgggccgctgtacgggagccaaggtgcggtgccccgcgtgtggacgagccgaggtgcagcccgcggggccgcagggccggggtggggcggggcgcggcsggagcagatccggtgtttgcggaatcaggaggggcgggcyggggcgggccctcggcgctgcaggagctgcccagaaacttttccctgctctcaccgggcgggggagagaagccctctggacagcttctagagtgtgcaggttctcgtatccctcggccaagggtatcctctgcaaacctctgcaaacccagcgcaactacggtcccccggtcagacccaggatggggccagaacggacaggggccgcgccgctgccgctgctgctggtgttagcgctcagtcaaggcattttaaattgttgtttggcctacaatgttggtctcccagaagcaaaaatattttccggtccttcaagtgaacagtttggctatgcagtgcagcagtttataaatccaaaaggcaactggttactggttggttcaccctggagtggctttcctgagaaccgaatgggagatgtgtataaatgtcctgttgacctatccactgccacatgtgaaaaactaaatttgcaaacttcaacaagcattccaaatgttactgagatgaaaaccaacatgagcctcggcttgatcctcaccaggaacatgggaactggaggttttctcacatgtggtcctctgtgggcacagcaatgtgggaatcagtattacacaacgggtgtgtgttctgacatcagtcctgattttcagctctcagccagcttctcacctgcaactcagccctgcccttccctcatagatgttgtggttgtgtgtgatgaatcaaatagtatttatccttgggatgcagtaaagaattttttggaaaaatttgtacaaggcctggatataggccccacaaagacacaggtrgggttaattcagtatgccaataatccaagagttgtgtttaacttgaacacatataaaaccaaagaagaaatgattgtagcaacatcccagacatcccaatatggtggggacctcacaaacacmttyggagcaattcaatatgcaagaaaatatgcytattcagcagcttctggtgggcgacgaagtgctacraaagtaatggtagttgtaactgayggtgaatcacatgatggttcaatgttgaaagctgtgattgatcaatgcaaccatgacaatatactgaggtttggcatagcagttcttgggtacttaaacagaaacgcccttgatactaaaaatttaataaaagaaataaaagcratcgctagtattccaacagaaagatactttttcaatgtgtctgatgaagcagctctactagaaaaggctgggacattaggagaacaaattttcagcattgaaggtactgttcaaggaggagacaactttcagatggaaatgtcacaagtgggattcagtgcagattactcttctcaaaatgatattctgatgctgggtgcagtgggagcttttggctggagtgggaccattgtccagaagacatctcatggccatttgatctttcctaaacaagcctttgaccaaattctgcaggacagaaatcacagttcatatttaggttactctgtggctgcaatttctactggagaaagcactcactttgttgctggtgctcctcgggcaaattataccggccagatagtgctatatagtgtgaatgagaatggcaatatcacggttattcaggctcaccgaggtgaccagattggctcctattttggtagtgtgctgtgttcagttgatgtggataaagacaccattacagacgtgctcttggtaggtgcaccaatgtacatgagtgacctaaagaaagaggaaggaagagtctacctgtttactatcaaaragggcattttgggtcagcaccaatttcttgaaggccccgagggcattgaaaacactcgatttggttcagcaattgcagctctttcagacatcaacatggatggctttaatgatgtgattgttggttcaccactagaaaatcagaattctggagctgtatacatttacaatggtcatcagggcactatccgcacaaagtattcccagaaaatcttgggatccgatggagcctttaggagccatctccagkactttgggaggtccttggatggctatggagatttaaatggggattccatcaccgatgtgtctattggtgcctttggacaagtggttcaactctggtcacaaagtattgctgatgtagctatagaagcttcattcacaccagaaaaaatcactttggtcaacaagaatgctcagataattctcaaactctgcttcagtgcaaagttcagacctactaagcaaaacaatcaagtggccattgtatataacatcacacttgatgcagatggattttcatccagagtaacctccagggggttatttaaagaaaacaatgaaaggtgcctgcagaagaatatggtagtaaatcaagcacagagttgccccgagcacatcatttatatacaggagccctctgatgttgtcaactctttggatttgcgtgtggacatcagtctggaaaaccctggcactagccctgcccttgaagcctattctgagactgccaaggtcttcagtattcctttccacaaagactgtggtgaggayggactttgcatttctgatctagtcctagatgtccgacaaataccagctgctcaagaacaaccctttattgtcagcaaccaaaacaaaaggttaacattttcagtaacrctgaaaaataaaagggaaagtgcatacaacactggaattgttgttgatttttcagaaaacttgttttttgcatcattctccctrccggttgatgggacagaagtaacatgccaggtggctgcatctcagaagtctgttgcctgcgatgtaggctaccctgctttaaagagagaacaacaggtgacttttactattaactttgacttcaatcttcaaaaccttcagaatcaggcgtctctcagtttccaagccttaagtgaaagccaagaagaaaacaaggctgataatttggtcarcctcaaaattcctctcctgtatgatgctgaaattcacttaacaagatctaccaacataaatttttatgaaatctcttcggatgggaatgttccttcaatcgtgcacagttttgaagatgttggtccaaaattcatcttctccctgaaggttggaagtgttccagtaagcatggcaactgtaatcatccacatccctcagtataccaaagaaaagaacccactgatgtacctaactggggtgcaaacagacaaggctggtgacatcagttgtaatgcagatatcaatccactgaaaataggacaaacatcttcttctgtatctttcaaaagtgaaaatttcaggcacaccaaagaattgaactgcagaactgcttcctgtagtaatgttacctgctggttgaaagacgttcacatgaaaggagaatactttgttaatgtgactaccagaatttggaacgggactttygcatcatcaacgttccagacagtacagctaacggcagctgcagaaatcaacacctataaccytgagatatatgtgattgaagataacactgttacgattcccctgatgataatgaaacctgatgagaaagccgaagtaccaacaggagttataataggaagtataattgctggaatccttttgctgttagctctggttgcaattttatggaagctcggcttcttcaaaagaaaatatgaaaagatgaccaaaaatccagatgagattgatgagaccacagagctcagtagctgaaccagcagacctacctgcagtgggaaccrgcagcatcccagccagggtttgctgtttgcgtgaatggatttctttttaaatcccatattttttttatcatgtcgtaggtaaactaacctggtattttaagagaaaactgcaggtcagtttggaatgaagaaattgtggggggtgggggaggtgcggggggcaggtagggaaataatagggaaaatacctattttatatgatgggggaaaaaaagtaatctttaaactggctggcccagagtttacattctaatttgcattgtgtcagaaacatgaaatgcttccaagcatgacaacttttaaagaaaaatatgatactctcagattttaagggggaaaactgttctctttaaaatatttgtctttaaacagcaactacagaagtggaagtgcttgatatgtaagtacttccacttgtgtatattttaatgaatattgatgttaacaagaggggaaaacaaaacacaggttttttcaatttatgctgctcatccaaagttgccacagatgatacttccaagtgataattttatttataaactaggtaaaatttgttgttggttccttttakaccacggctgccccttccacaccccatcttgctctaatgatcaaaacatgcttgaataactgagcttagagtatacctcctrtatgtccatttaagttaggagagggggcgatatagagamtaaggcacaaaattttgtttaaaactcagaatataacatgtaaaatcccatctgctagaagcccatcctgtgccagaggaagatttgtttggctgactggcagtaacctagtgaatttytgaaagatgagtaatttctttggcaaccttcctcctcccttactgaac

SEQ ID NO: 434 - DNA, 3899 bp, Homo sapiens
aattcttggaagaggagaactggacgttgtgaacagasttagctggtaaatgtcctcttaaaagatccaaaaaatgagacttctagcaaagattatttgccttatgttatgggctatttgtgtagcagaagattgcaatgaacttcctccaagaagaaatacagaaattctgacaggttcctggtctgaccaaacatatccagaaggcacccaggctatctataaatgccgccctggatatagatctcttggaaatrtaataatggtatgcaggaagggagaatgggttgctcttaatccattaaggaaatgtcagaaaaggccctgtggacatcctggagatactccttttggtacttttacccttacaggaggaaatgtgtttgaatatggtgtaaaagctgtgtatacatgtaatgaggggtatcaattgctaggtgagattaattaccgtgaatgtgacacagatggatggaccaatgatattcctatatgtgaagttgtgaagtgtttaccagtgacagcaccagagaatggaaaaattgtcagtagtgcaatggaaccagatcgggaataccattttggacaagcagtacggtttgtatgtaactcaggctacaagattgaaggagatgaakaaatgcattgttcagacgatggtttttggagtaaagagaaaccaaagtgtgtggaaatttcatgcaaatccccagatgttataaatggatctcctatatctcagaagattatttataaggagaatgaacgatttcaatataaatgtaacatgggttatgaatacagtgaaagaggagatgctgtatgcactgaatctggatggcgtccgttgccttcatgtgaagaaaaatcatgtgataatccttatattccaaatggtgactactcacctttaaggattaaacacagaactggagatgaaatcacgtaccagtgtagaaatggtttttatcctgcaacccggggaaatacagcmaaatgcacaagtactggctggatacctgctccgagatgtaccttgaaaccttgtgattatccagacattaaacatggaggtctatatcatgagaatatgcgtagaccatactttccagtagctgtaggaaaatattactcctattactgtgatgaacattttgagactccgtcaggaagttactgggatcacattcattgcacacaagatggatggtcgccagcagtaccatgcctcagaaaatgttattttccttatttggaaaatggatataatcaaaatyatggaagaaagtttgtacagggtaaatctatagacgttgcctgccatcctggctacgctcttccaaaagcgcagaccacagttacatgtatggagaatggctggtctcctactcccagatgcatccgtgtcaaaacatgttccaaatcaagtatagatattgagaatgggtttatttctgaatctcagtatacatatgccttaaaagaaaaagcraaatatcaatgcaaactaggatatgtaacagcagatggtgaaacatcaggatcaattasatgtgggaaagatggatggtcagctcaacccacgtgcattaaatcttgtgatatcccagtatttatgaatgccagaactaaaaatgacttcacatggtttaagctgaatgacacattggactatgaaygccatgatggttatgaaagcaatactggaagcaccactggttccatagtgtgtggttacaatggttggtctgatttacccatatgttatgaaagagaatgcgaacttcctaaaatagatgtacacttagttcctgatcgcaagaaagaccagtataaagttggagaggtgttgaaattctcctgcaaaccaggatttacaatagttggacctaattccgttcagtgctaccactttggattgtctcctgacctcccaatatgtaaagagcaagtacaatcatgtggtccacctcctgaactcctcaatgggaatgttaaggaaaaaacgaaagaagaatatggacacagtgaagtggtggaatattattgcaatcctagatttctaatgaagggacctaataaaattcartgtgttgatggagagtggacaactttaccagtgtgtattgtggaggagagtacctgtggagatatacctgaacttgaacatggctgggcccagctttcttcccctccttattactatggagattcagtggaattcaattgctcagaatcatttacaatgattggacacagatcaattacgtgtattcatggagtmtggacccaacttccccagtgtgtggcaatagataaacttaagaagtgcaaatcatcaaatttaattatacttgaggaacatttaaaaaacaagaaggaattcgatcataattctaacataaggtacakatgtagaggaaaagaaggatggatacacacagtctgcataaatggaagatgggatccagaagtgaactgctcaatggcacaaatacaattatgcccacctccacctcagattcccaattctcacaatatgacaaccacactgaattatygggatggagaaaaagtatctgttctttgccaagaaaattatctaattcaggaaggagaagaaattacatgcaaagatggaagatggcagtcaataccactctgtgttgaaaaaattccatgttcacaaccacctcagatagaacacggaaccattaattcatccaggtcttcacaagaaakttatgcacatgggactaaattgagttatacttgtgagggtggtttcaggatatctgaagaaaatgaaacaacatgctacatgggaaaatggagttctccacctcagtgtgaaggccttccttgtaaatctccacctgakatttctcatggtgttgtagctcacatgtcagacagttatcagtatggagaagaagttaygtacaaatrttttgaaggttttggaattgatgggcctgcaattgcaaaatgcttaggagaaaaatggtctcaccctccatcatgcataaaaacagattgtctcagtttacctagctttgaaaatgccatacccatgggagagaagaaggatktgtataaggcgggtgagcaagtgacttacaywtgtgcaacatattacaaaatggatggagccagtaatgtaacatgcattaatagcagatggacaggaaggccaacatgcagagacacytcctgtgtgaatccgcccacagtacaaaatgctyatatastgtcgagacagatgagtaaatatccatcyggtgagagagtacgttatsaatgtaggagcccttatgaaatgtttggggatgaagaagtgatgtgtttaaatggaaactggacrgaaccacctcaatgcaaagattctacrggaaaatgtgggccccctccacctattgacaatggggrcattacttcattcccgttgtcagtatatgctccagcttcatcagttgagtaccaatgccagaacttgtatcaacttgagggtaacaagcgaataacatgtagaaatggacaatggtcagaaccaccaaaatgcttacatccgtgtgtaatatcccgagaaattatggaaaattataacatagcattaaggtkgasagccaaacagaagckttattygagaacaggtgaatcagytgaatttgtgtgtaaacgkggatatcgtctttcatcacgttctcacacattgsgwacaacatgttgggatgggaaactggagtatccaacttgtgcaaaaagrtagaatcaatcataaatattgttttactcctttttattcatacgtaaaattttggattaatttgtgaaaatgtaattataagctgagaccggtggctctcttcttaaaagcaccatattaaawcctggaaaac

SEQ ID NO: 435 - DNA, 3829 bp, Homo sapiens
attgcaatgaacttcctccaagaagaaatacagaaattctgacaggttcctggtctgaccaaacatatccagaaggcacccaggctatctataaatgccgccctggatatagatctcttggaaatrtaataatggtatgcaggaagggagaatgggttgctcttaatccattaaggaaatgtcagaaaaggccctgtggacatcctggagatactccttttggtacttttacccttacaggaggaaatgtgtttgaatatggtgtaaaagctgtgtatacatgtaatgaggggtatcaattgctaggtgagattaattaccgtgaatgtgacacagatggatggaccaatgatattcctatatgtgaagttgtgaagtgtttaccagtgacagcaccagagaatggaaaaattgtcagtagtgcaatggaaccagatcgggaataccattttggacaagcagtacggtttgtatgtaactcaggctacaagattgaaggagatgaakaaatgcattgttcagacgatggtttttggagtaaagagaaaccaaagtgtgtggaaatttcatgcaaatccccagatgttataaatggatctcctatatctcagaagattatttataaggagaatgaacgatttcaatataaatgtaacatgggttatgaatacagtgaaagaggagatgctgtatgcactgaatctggatggcgtccgttgccttcatgtgaagaaaaatcatgtgataatccttatattccaaatggtgactactcacctttaaggattaaacacagaactggagatgaaatcacgtaccagtgtagaaatggtttttatcctgcaacccggggaaatacagcmaaatgcacaagtactggctggatacctgctccgagatgtaccttgaaaccttgtgattatccagacattaaacatggaggtctatatcatgagaatatgcgtagaccatactttccagtagctgtaggaaaatattactcctattactgtgatgaacattttgagactccgtcaggaagttactgggatcacattcattgcacacaagatggatggtcgccagcagtaccatgcctcagaaaatgttattttccttatttggaaaatggatataatcaaaatyatggaagaaagtttgtacagggtaaatctatagacgttgcctgccatcctggctacgctcttccaaaagcgcagaccacagttacatgtatggagaatggctggtctcctactcccagatgcatccgtgtcaaaacatgttccaaatcaagtatagatattgagaatgggtttatttctgaatctcagtatacatatgccttaaaagaaaaagcraaatatcaatgcaaactaggatatgtaacagcagatggtgaaacatcaggatcaattasatgtgggaaagatggatggtcagctcaacccacgtgcattaaatcttgtgatatcccagtatttatgaatgccagaactaaaaatgacttcacatggtttaagctgaatgacacattggactatgaaygccatgatggttatgaaagcaatactggaagcaccactggttccatagtgtgtggttacaatggttggtctgatttacccatatgttatgaaagagaatgcgaacttcctaaaatagatgtacacttagttcctgatcgcaagaaagaccagtataaagttggagaggtgttgaaattctcctgcaaaccaggatttacaatagttggacctaattccgttcagtgctaccactttggattgtctcctgacctcccaatatgtaaagagcaagtacaatcatgtggtccacctcctgaactcctcaatgggaatgttaaggaaaaaacgaaagaagaatatggacacagtgaagtggtggaatattattgcaatcctagatttctaatgaagggacctaataaaattcartgtgttgatggagagtggacaactttaccagtgtgtattgtggaggagagtacctgtggagatatacctgaacttgaacatggctgggcccagctttcttcccctccttattactatggagattcagtggaattcaattgctcagaatcatttacaatgattggacacagatcaattacgtgtattcatggagtmtggacccaacttccccagtgtgtggcaatagataaacttaagaagtgcaaatcatcaaatttaattatacttgaggaacatttaaaaaacaagaaggaattcgatcataattctaacataaggtacakatgtagaggaaaagaaggatggatacacacagtctgcataaatggaagatgggatccagaagtgaactgctcaatggcacaaatacaattatgcccacctccacctcagattcccaattctcacaatatgacaaccacactgaattatygggatggagaaaaagtatctgttctttgccaagaaaattatctaattcaggaaggagaagaaattacatgcaaagatggaagatggcagtcaataccactctgtgttgaaaaaattccatgttcacaaccacctcagatagaacacggaaccattaattcatccaggtcttcacaagaaakttatgcacatgggactaaattgagttatacttgtgagggtggtttcaggatatctgaagaaaatgaaacaacatgctacatgggaaaatggagttctccacctcagtgtgaaggccttccttgtaaatctccacctgakatttctcatggtgttgtagctcacatgtcagacagttatcagtatggagaagaagttaygtacaaatrttttgaaggttttggaattgatgggcctgcaattgcaaaatgcttaggagaaaaatggtctcaccctccatcatgcataaaaacagattgtctcagtttacctagctttgaaaatgccatacccatgggagagaagaaggatktgtataaggcgggtgagcaagtgacttacaywtgtgcaacatattacaaaatggatggagccagtaatgtaacatgcattaatagcagatggacaggaaggccaacatgcagagacacytcctgtgtgaatccgcccacagtacaaaatgctyatatastgtcgagacagatgagtaaatatccatcyggtgagagagtacgttatsaatgtaggagcccttatgaaatgtttggggatgaagaagtgatgtgtttaaatggaaactggacrgaaccacctcaatgcaaagattctacrggaaaatgtgggccccctccacctattgacaatggggrcattacttcattcccgttgtcagtatatgctccagcttcatcagttgagtaccaatgccagaacttgtatcaacttgagggtaacaagcgaataacatgtagaaatggacaatggtcagaaccaccaaaatgcttacatccgtgtgtaatatcccgagaaattatggaaaattataacatagcattaaggtkgasagccaaacagaagckttattygagaacaggtgaatcagytgaatttgtgtgtaaacgkggatatcgtctttcatcacgttctcacacattgsgwacaacatgttgggatgggaaactggagtatccaacttgtgcaaaaagatagaatcaatcataaartgcacacytttattcagaactttagtattaaatcagttctyaatttmatttttwatgtattgttttactcctttttattcatacgtaaaattttggattaatttgtgaaaatgtaattataagctgagaccggtggctctcttcttaaaagcaccatattaaawcctggaaaactaa

SEQ ID NO: 436 - DNA, 3960 bp, Homo sapiens
aattcttggaagaggagaactggacgttgtgaacagasttagctggtaaatgtcctcttaaaagatccaaaaaatgagacttctagcaaagattatttgccttatgttatgggctatttgtgtagcagaagattgcaatgaacttcctccaagaagaaatacagaaattctgacaggttcctggtctgaccaaacatatccagaaggcacccaggctatctataaatgccgccctggatatagatctcttggaaatrtaataatggtatgcaggaagggagaatgggttgctcttaatccattaaggaaatgtcagaaaaggccctgtggacatcctggagatactccttttggtacttttacccttacaggaggaaatgtgtttgaatatggtgtaaaagctgtgtatacatgtaatgaggggtatcaattgctaggtgagattaattaccgtgaatgtgacacagatggatggaccaatgatattcctatatgtgaagttgtgaagtgtttaccagtgacagcaccagagaatggaaaaattgtcagtagtgcaatggaaccagatcgggaataccattttggacaagcagtacggtttgtatgtaactcaggctacaagattgaaggagatgaakaaatgcattgttcagacgatggtttttggagtaaagagaaaccaaagtgtgtggaaatttcatgcaaatccccagatgttataaatggatctcctatatctcagaagattatttataaggagaatgaacgatttcaatataaatgtaacatgggttatgaatacagtgaaagaggagatgctgtatgcactgaatctggatggcgtccgttgccttcatgtgaagaaaaatcatgtgataatccttatattccaaatggtgactactcacctttaaggattaaacacagaactggagatgaaatcacgtaccagtgtagaaatggtttttatcctgcaacccggggaaatacagcmaaatgcacaagtactggctggatacctgctccgagatgtaccttgaaaccttgtgattatccagacattaaacatggaggtctatatcatgagaatatgcgtagaccatactttccagtagctgtaggaaaatattactcctattactgtgatgaacattttgagactccgtcaggaagttactgggatcacattcattgcacacaagatggatggtcgccagcagtaccatgcctcagaaaatgttattttccttatttggaaaatggatataatcaaaatyatggaagaaagtttgtacagggtaaatctatagacgttgcctgccatcctggctacgctcttccaaaagcgcagaccacagttacatgtatggagaatggctggtctcctactcccagatgcatccgtgtcaaaacatgttccaaatcaagtatagatattgagaatgggtttatttctgaatctcagtatacatatgccttaaaagaaaaagcraaatatcaatgcaaactaggatatgtaacagcagatggtgaaacatcaggatcaattasatgtgggaaagatggatggtcagctcaacccacgtgcattaaatcttgtgatatcccagtatttatgaatgccagaactaaaaatgacttcacatggtttaagctgaatgacacattggactatgaaygccatgatggttatgaaagcaatactggaagcaccactggttccatagtgtgtggttacaatggttggtctgatttacccatatgttatgaaagagaatgcgaacttcctaaaatagatgtacacttagttcctgatcgcaagaaagaccagtataaagttggagaggtgttgaaattctcctgcaaaccaggatttacaatagttggacctaattccgttcagtgctaccactttggattgtctcctgacctcccaatatgtaaagagcaagtacaatcatgtggtccacctcctgaactcctcaatgggaatgttaaggaaaaaacgaaagaagaatatggacacagtgaagtggtggaatattattgcaatcctagatttctaatgaagggacctaataaaattcartgtgttgatggagagtggacaactttaccagtgtgtattgtggaggagagtacctgtggagatatacctgaacttgaacatggctgggcccagctttcttcccctccttattactatggagattcagtggaattcaattgctcagaatcatttacaatgattggacacagatcaattacgtgtattcatggagtmtggacccaacttccccagtgtgtggcaatagataaacttaagaagtgcaaatcatcaaatttaattatacttgaggaacatttaaaaaacaagaaggaattcgatcataattctaacataaggtacakatgtagaggaaaagaaggatggatacacacagtctgcataaatggaagatgggatccagaagtgaactgctcaatggcacaaatacaattatgcccacctccacctcagattcccaattctcacaatatgacaaccacactgaattatygggatggagaaaaagtatctgttctttgccaagaaaattatctaattcaggaaggagaagaaattacatgcaaagatggaagatggcagtcaataccactctgtgttgaaaaaattccatgttcacaaccacctcagatagaacacggaaccattaattcatccaggtcttcacaagaaakttatgcacatgggactaaattgagttatacttgtgagggtggtttcaggatatctgaagaaaatgaaacaacatgctacatgggaaaatggagttctccacctcagtgtgaaggccttccttgtaaatctccacctgakatttctcatggtgttgtagctcacatgtcagacagttatcagtatggagaagaagttaygtacaaatrttttgaaggttttggaattgatgggcctgcaattgcaaaatgcttaggagaaaaatggtctcaccctccatcatgcataaaaacagattgtctcagtttacctagctttgaaaatgccatacccatgggagagaagaaggatktgtataaggcgggtgagcaagtgacttacaywtgtgcaacatattacaaaatggatggagccagtaatgtaacatgcattaatagcagatggacaggaaggccaacatgcagagacacytcctgtgtgaatccgcccacagtacaaaatgctyatatastgtcgagacagatgagtaaatatccatcyggtgagagagtacgttatsaatgtaggagcccttatgaaatgtttggggatgaagaagtgatgtgtttaaatggaaactggacrgaaccacctcaatgcaaagattctacrggaaaatgtgggccccctccacctattgacaatggggrcattacttcattcccgttgtcagtatatgctccagcttcatcagttgagtaccaatgccagaacttgtatcaacttgagggtaacaagcgaataacatgtagaaatggacaatggtcagaaccaccaaaatgcttacatccgtgtgtaatatcccgagaaattatggaaaattataacatagcattaaggtkgasagccaaacagaagckttattygagaacaggtgaatcagytgaatttgtgtgtaaacgkggatatcgtctttcatcacgttctcacacattgsgwacaacatgttgggatgggaaactggagtatccaacttgtgcaaaaagatagaatcaatcataaartgcacacytttattcagaactttagtattaaatcagttctyaatttmatttttwatgtattgttttactcctttttattcatacgtaaaattttggattaatttgtgaaaatgtaattataagctgagaccggtggctctcttcttaaaagcaccatattaaawcctggaaaactaa

SEQ ID NO: 437 - DNA, 3783 bp, Homo sapiens
aattcttggaagaggagaactggacgttgtgaacagasttagctggtaaatgtcctcttaaaagatccaaaaaatgagacttctagcaaagattatttgccttatgttatgggctatttgtgtagcagaagattgcaatgaacttcctccaagaagaaatacagaaattctgacaggttcctggtctgaccaaacatatccagaaggcacccaggctatctataaatgccgccctggatatagatctcttggaaatrtaataatggtatgcaggaagggagaatgggttgctcttaatccattaaggaaatgtcagaaaaggccctgtggacatcctggagatactccttttggtacttttacccttacaggaggaaatgtgtttgaatatggtgtaaaagctgtgtatacatgtaatgaggggtatcaattgctaggtgagattaattaccgtgaatgtgacacagatggatggaccaatgatattcctatatgtgaagttgtgaagtgtttaccagtgacagcaccagagaatggaaaaattgtcagtagtgcaatggaaccagatcgggaataccattttggacaagcagtacggtttgtatgtaactcaggctacaagattgaaggagatgaakaaatgcattgttcagacgatggtttttggagtaaagagaaaccaaagtgtgtggaaatttcatgcaaatccccagatgttataaatggatctcctatatctcagaagattatttataaggagaatgaacgatttcaatataaatgtaacatgggttatgaatacagtgaaagaggagatgctgtatgcactgaatctggatggcgtccgttgccttcatgtgaagaaaaatcatgtgataatccttatattccaaatggtgactactcacctttaaggattaaacacagaactggagatgaaatcacgtaccagtgtagaaatggtttttatcctgcaacccggggaaatacagcmaaatgcacaagtactggctggatacctgctccgagatgtaccttgaaaccttgtgattatccagacattaaacatggaggtctatatcatgagaatatgcgtagaccatactttccagtagctgtaggaaaatattactcctattactgtgatgaacattttgagactccgtcaggaagttactgggatcacattcattgcacacaagatggatggtcgccagcagtaccatgcctcagaaaatgttattttccttatttggaaaatggatataatcaaaatyatggaagaaagtttgtacagggtaaatctatagacgttgcctgccatcctggctacgctcttccaaaagcgcagaccacagttacatgtatggagaatggctggtctcctactcccagatgcatccgtgtcaaaacatgttccaaatcaagtatagatattgagaatgggtttatttctgaatctcagtatacatatgccttaaaagaaaaagcraaatatcaatgcaaactaggatatgtaacagcagatggtgaaacatcaggatcaattasatgtgggaaagatggatggtcagctcaacccacgtgcattaaatcttgtgatatcccagtatttatgaatgccagaactaaaaatgacttcacatggtttaagctgaatgacacattggactatgaaygccatgatggttatgaaagcaatactggaagcaccactggttccatagtgtgtggttacaatggttggtctgatttacccatatgttatgaaagagaatgcgaacttcctaaaatagatgtacacttagttcctgatcgcaagaaagaccagtataaagttggagaggtgttgaaattctcctgcaaaccaggatttacaatagttggacctaattccgttcagtgctaccactttggattgtctcctgacctcccaatatgtaaagagcaagtacaatcatgtggtccacctcctgaactcctcaatgggaatgttaaggaaaaaacgaaagaagaatatggacacagtgaagtggtggaatattattgcaatcctagatttctaatgaagggacctaataaaattcartgtgttgatggagagtggacaactttaccagtgtgtattgtggaggagagtacctgtggagatatacctgaacttgaacatggctgggcccagctttcttcccctccttattactatggagattcagtggaattcaattgctcagaatcatttacaatgattggacacagatcaattacgtgtattcatggagtmtggacccaacttccccagtgtgtggtggcacaaatacaattatgcccacctccacctcagattcccaattctcacaatatgacaaccacactgaattatygggatggagaaaaagtatctgttctttgccaagaaaattatctaattcaggaaggagaagaaattacatgcaaagatggaagatggcagtcaataccactctgtgttgaaaaaattccatgttcacaaccacctcagatagaacacggaaccattaattcatccaggtcttcacaagaaakttatgcacatgggactaaattgagttatacttgtgagggtggtttcaggatatctgaagaaaatgaaacaacatgctacatgggaaaatggagttctccacctcagtgtgaaggccttccttgtaaatctccacctgakatttctcatggtgttgtagctcacatgtcagacagttatcagtatggagaagaagttaygtacaaatrttttgaaggttttggaattgatgggcctgcaattgcaaaatgcttaggagaaaaatggtctcaccctccatcatgcataaaaacagattgtctcagtttacctagctttgaaaatgccatacccatgggagagaagaaggatktgtataaggcgggtgagcaagtgacttacaywtgtgcaacatattacaaaatggatggagccagtaatgtaacatgcattaatagcagatggacaggaaggccaacatgcagagacacytcctgtgtgaatccgcccacagtacaaaatgctyatatastgtcgagacagatgagtaaatatccatcyggtgagagagtacgttatsaatgtaggagcccttatgaaatgtttggggatgaagaagtgatgtgtttaaatggaaactggacrgaaccacctcaatgcaaagattctacrggaaaatgtgggccccctccacctattgacaatggggrcattacttcattcccgttgtcagtatatgctccagcttcatcagttgagtaccaatgccagaacttgtatcaacttgagggtaacaagcgaataacatgtagaaatggacaatggtcagaaccaccaaaatgcttacatccgtgtgtaatatcccgagaaattatggaaaattataacatagcattaaggtkgasagccaaacagaagckttattygagaacaggtgaatcagytgaatttgtgtgtaaacgkggatatcgtctttcatcacgttctcacacattgsgwacaacatgttgggatgggaaactggagtatccaacttgtgcaaaaagatagaatcaatcataaartgcacacytttattcagaactttagtattaaatcagttctyaatttmatttttwatgtattgttttactcctttttattcatacgtaaaattttggattaatttgtgaaaatgtaattataagctgagaccggtggctctcttcttaaaagcaccatattaaawcctggaaaactaa

SEQ ID NO: 438 - DNA, 3722 bp, Homo sapiens
aattcttggaagaggagaactggacgttgtgaacagasttagctggtaaatgtcctcttaaaagatccaaaaaatgagacttctagcaaagattatttgccttatgttatgggctatttgtgtagcagaagattgcaatgaacttcctccaagaagaaatacagaaattctgacaggttcctggtctgaccaaacatatccagaaggcacccaggctatctataaatgccgccctggatatagatctcttggaaatrtaataatggtatgcaggaagggagaatgggttgctcttaatccattaaggaaatgtcagaaaaggccctgtggacatcctggagatactccttttggtacttttacccttacaggaggaaatgtgtttgaatatggtgtaaaagctgtgtatacatgtaatgaggggtatcaattgctaggtgagattaattaccgtgaatgtgacacagatggatggaccaatgatattcctatatgtgaagttgtgaagtgtttaccagtgacagcaccagagaatggaaaaattgtcagtagtgcaatggaaccagatcgggaataccattttggacaagcagtacggtttgtatgtaactcaggctacaagattgaaggagatgaakaaatgcattgttcagacgatggtttttggagtaaagagaaaccaaagtgtgtggaaatttcatgcaaatccccagatgttataaatggatctcctatatctcagaagattatttataaggagaatgaacgatttcaatataaatgtaacatgggttatgaatacagtgaaagaggagatgctgtatgcactgaatctggatggcgtccgttgccttcatgtgaagaaaaatcatgtgataatccttatattccaaatggtgactactcacctttaaggattaaacacagaactggagatgaaatcacgtaccagtgtagaaatggtttttatcctgcaacccggggaaatacagcmaaatgcacaagtactggctggatacctgctccgagatgtaccttgaaaccttgtgattatccagacattaaacatggaggtctatatcatgagaatatgcgtagaccatactttccagtagctgtaggaaaatattactcctattactgtgatgaacattttgagactccgtcaggaagttactgggatcacattcattgcacacaagatggatggtcgccagcagtaccatgcctcagaaaatgttattttccttatttggaaaatggatataatcaaaatyatggaagaaagtttgtacagggtaaatctatagacgttgcctgccatcctggctacgctcttccaaaagcgcagaccacagttacatgtatggagaatggctggtctcctactcccagatgcatccgtgtcaaaacatgttccaaatcaagtatagatattgagaatgggtttatttctgaatctcagtatacatatgccttaaaagaaaaagcraaatatcaatgcaaactaggatatgtaacagcagatggtgaaacatcaggatcaattasatgtgggaaagatggatggtcagctcaacccacgtgcattaaatcttgtgatatcccagtatttatgaatgccagaactaaaaatgacttcacatggtttaagctgaatgacacattggactatgaaygccatgatggttatgaaagcaatactggaagcaccactggttccatagtgtgtggttacaatggttggtctgatttacccatatgttatgaaagagaatgcgaacttcctaaaatagatgtacacttagttcctgatcgcaagaaagaccagtataaagttggagaggtgttgaaattctcctgcaaaccaggatttacaatagttggacctaattccgttcagtgctaccactttggattgtctcctgacctcccaatatgtaaagagcaagtacaatcatgtggtccacctcctgaactcctcaatgggaatgttaaggaaaaaacgaaagaagaatatggacacagtgaagtggtggaatattattgcaatcctagatttctaatgaagggacctaataaaattcartgtgttgatggagagtggacaactttaccagtgtgtattgtggaggagagtacctgtggagatatacctgaacttgaacatggctgggcccagctttcttcccctccttattactatggagattcagtggaattcaattgctcagaatcatttacaatgattggacacagatcaattacgtgtattcatggagtmtggacccaacttccccagtgtgtggtggcacaaatacaattatgcccacctccacctcagattcccaattctcacaatatgacaaccacactgaattatygggatggagaaaaagtatctgttctttgccaagaaaattatctaattcaggaaggagaagaaattacatgcaaagatggaagatggcagtcaataccactctgtgttgaaaaaattccatgttcacaaccacctcagatagaacacggaaccattaattcatccaggtcttcacaagaaakttatgcacatgggactaaattgagttatacttgtgagggtggtttcaggatatctgaagaaaatgaaacaacatgctacatgggaaaatggagttctccacctcagtgtgaaggccttccttgtaaatctccacctgakatttctcatggtgttgtagctcacatgtcagacagttatcagtatggagaagaagttaygtacaaatrttttgaaggttttggaattgatgggcctgcaattgcaaaatgcttaggagaaaaatggtctcaccctccatcatgcataaaaacagattgtctcagtttacctagctttgaaaatgccatacccatgggagagaagaaggatktgtataaggcgggtgagcaagtgacttacaywtgtgcaacatattacaaaatggatggagccagtaatgtaacatgcattaatagcagatggacaggaaggccaacatgcagagacacytcctgtgtgaatccgcccacagtacaaaatgctyatatastgtcgagacagatgagtaaatatccatcyggtgagagagtacgttatsaatgtaggagcccttatgaaatgtttggggatgaagaagtgatgtgtttaaatggaaactggacrgaaccacctcaatgcaaagattctacrggaaaatgtgggccccctccacctattgacaatggggrcattacttcattcccgttgtcagtatatgctccagcttcatcagttgagtaccaatgccagaacttgtatcaacttgagggtaacaagcgaataacatgtagaaatggacaatggtcagaaccaccaaaatgcttacatccgtgtgtaatatcccgagaaattatggaaaattataacatagcattaaggtkgasagccaaacagaagckttattygagaacaggtgaatcagytgaatttgtgtgtaaacgkggatatcgtctttcatcacgttctcacacattgsgwacaacatgttgggatgggaaactggagtatccaacttgtgcaaaaagrtagaatcaatcataaatattgttttactcctttttattcatacgtaaaattttggattaatttgtgaaaatgtaattataagctgagaccggtggctctcttcttaaaagcaccatattaaawcctggaaaac

SEQ ID NO: 439 - DNA, 1987 bp, Homo sapiens
tactgactttcagcaccaacttgtggtcccaggtaagtttccacgctggtactttagccctgggctcgaacctgcggacacgctgtggctgcaactccccgcccgccagacctcagtacgcagcgcggctggtgagaaacataatgcactctgacttccacgcgtggaatggggagatggactgcacggcgggcggacctgctcgggctgatggacggcaggtggactgatgtgcgcagggactggcggcagcgcggtcagagccagtcagccaaagccaggccagcacaatagactgtcccggttcccgccaggagggcagcccagcaccaactgtacggtactgcgcctgcgccgcgaccgccaacgcgcccagtctacgcttgccggcgcaacagggccgactgcagctggaagatggcggcgtccgtggtctgtcgggccgctaccgccggggcacaagtgctattgcgcgcccgccgctcgccggccctgctgcggacgccagccttgcggagtacggcaaccttcgctcaggcgctccagttcgtgccggagacgcaggttagcctgctggacaacggcctgcgtgtggcctccgagcagtcctctcagcccacttgcacggtgggagtgtggattgatgttggcagccgttttgagactgagaagaataatggggcaggctactttttggagcatctggctttcaagggaacaaagaatcggcctggcagtgccctggagaaggaggtggagagcatgggggcccatcttaatgcctacagcacccgggagcacacagcttactacatcaaggcgctgtccaaggatctgccgaaagctgtggagctcctgggtgacattgtgcagaactgtagtctggaagactcacagattgagaaggaacgtgatgtgatcctgcgggagatgcaggagaatgatgcatctatgcgagatgtggtctttaactacctgcatgccacagcattccagggcacacctctagcccaggctgtggaggggcccagtgagaatgtcaggaagctgtctcgtgcagacttgaccgagtacctcagcacacattacaaggcccctcgaatggtgctggcagcagctggaggagtggagcaccagcaactgttagacctcgcccagaagcacctcggtggcatcccatggacatatgcagaggacgctgtgcccactcttactccatgccrcttcactggcagtgagatccgccaccgtgatgatgctctaccttttgcccacgtggccattgcagtagagggtcctggctgggccagcccggacaatgtggccttgcaagtggccaatgccatcatcggccactatgactgcacttatggtggtggcgtgcacctgtccagcccactggcttcaggtgctgtggccaacaagctatgccagagtttccagaccttcagcatctgctatgcagagacgggcttgctgggtgcacactttgtctgtgaccgaatgaaaatcgatgacatgatgttcgtcctgcaagggcagtggatgcgcctgtgtaccagtgccacggagagtgaggtggcccggggcaaaaacatcctcagaaatgccctggtatctcatctagatggcactactcctgtgtgtgaggacatcggacgcagcctcctgacctatggccgccgcatccccctggctgaatgggaaagccggattgcggaggtggatgccagtgtggtacgtgagatctgctccaagtacatctatgaccagtgcccagcagtggctggatatggccccattgagcagctcccagactacaaccggatccgtagcggcatgttctggctgcgcttytaggcgggaagyctatgtaagcaagagggcagggccggggtttgtggtccccccycmaccacaaacacagcacttcggctcctctaacctgtgccacaggtgaccaccaataaaatcctctgctgagaag

SEQ ID NO: 440 - DNA, 2296 bp, Homo sapiens
atgggactgggccaagggtggggctgggaagcatcctgttttgcatgtttgatcaggagctgctgccaagttgtgactttcactttcccttttgggttccagggtatatctcagagmctggagaacgtgtctggttattatgcagatgcacggctggaggtgggatccacayagctcagaacagctggatcttgctcacactctttcaagagaagcttccttggacaaaaggaccctgccttggtgtgagagtgagggcagagggagctggagcaagtagaatttctctaaataccagctggctggggcccaggagattaaaaaacaccgggctagggttaagaaaaaaaacgaacccttccagtcaggtcagtgactggagagctccawggaaagtctctcagtgacctggctgctggcaccatggactcagaaaagaaacgctttactgaagaggccaccaaatacttccgggagagagtcagcccagtgcatctgcaaatcctgctgactaacaatgaagcctggaagagattygtgactgcggctgaattgcccagggatgaggcagatgctctctacgaagctctgaagaagcttagaacatatgcagctattgaggacgaatatgtgcagcagaaagatgagcagtttagggaatggtttttgaaagagtttccccaagtcaagaggaagatccaggagtccatagaaaagcttcgtgcccttgcaaatggtattgaagaggtccacagaggctgcaccatctccaaygtggtgtccagctccactggcgctgcctctggcatcatgtcccttgctggtcttgttttggcaccatttacagcagggacgagtctggcccttactgcagctggggtagggctgggagcagcgtctgctrtgactgggatcaccaccagcatcgtggagcactcatayacatcatcagcagaagctgaagccagcaggctgactgcaaccagcattgaccgmttgaaggtatttaaggaagttatgcgtgacatcacacccaacttactttcccttcttaataattattacgaagccacacaaaccattgggagtgaaatccgtgccatcaggcaagccagagccagggcccgactccctgtgaccacctggcgaatctcagctggaagtggwggtcaagcagagagaacgattgcaggcaccacccgggcagtgagcagaggagcccggatcctgagtgcgaccacttcaggcatcttccttgcactggatgtggtcaaccttgtatacgagtcaaagcacttgcatgagggggcaaagtctgcatctgctgaggagctgaggcggcaggctcaggagctggaggagaatctaatggagctcactcagatctatcagcgtctgaatccatgccatacccactgaccccagaccagtgcagccagcaggggaggtgagccatacacaggccacgacaaaatgcaggcattttattagggggataaagagggcaaggtaaagtttatggagctgagtgttagtgactttggcatttctgtagctgagcacagcaggggaggggttaatgcagatggcaagtgcaccaaggagaaggcaggaatgctggagcctggaataagggargagaggggactggagagtgtggggaataggaagaagaaatttcctttagactaacgaatatattggggggaggaatagaggggaggtgtgcaggaaccagcaatgagaaggccaggaaaagaaagagctgaaaatgcagaaagccgaagagttagaacttttggatacagcagaagaaacagcggctccactaccgacctgcccccggttcgatgtccttccaagaatgaagtctttccctggtgatggtcccctgccctgtctttccagcatccactctgtcttgtcctcctggaagtgtatctcagtcagccagtggcttcttgatgatggcggtggaggtggtggttgtagtgtgatggatcccctttaggttatttaggggtatatgtcccctgcttgaaccctgaaggccaggtaatgagccatggccattgtccccagctgaggaccaggtgtctctaaaaacccaaacatcctggagagtatgcgagaacctaccaagaaaaacagtctcattactcatatacagcaggcaaagagacagaaaattaactgaaaagcagtttagagactgggggaggccggatctctagagccatcctgctgagtgccctgtgtgtaagtcctaataaactcacctactcaccaagctgga

SEQ ID NO: 441 - DNA, 2183 bp, Homo sapiens
atgggactgggccaagggtggggctgggaagcatcctgttttgcatgtttgatcaggagctgctgccaagttgtgactttcactttcccttttgggttccagggtatatctcagagmctggagaacgtgtctggttattatgcagatgcacggctggaggtgggatccacayagctcagaacagctggatcttgctcacactctttcaagagaagcttccttgggttaagaaaaaaaacgaacccttccagtcaggtcagtgactggagagctccawggaaagtctctcagtgacctggctgctggcaccatggactcagaaaagaaacgctttactgaagaggccaccaaatacttccgggagagagtcagcccagtgcatctgcaaatcctgctgactaacaatgaagcctggaagagattygtgactgcggctgaattgcccagggatgaggcagatgctctctacgaagctctgaagaagcttagaacatatgcagctattgaggacgaatatgtgcagcagaaagatgagcagtttagggaatggtttttgaaagagtttccccaagtcaagaggaagatccaggagtccatagaaaagcttcgtgcccttgcaaatggtattgaagaggtccacagaggctgcaccatctccaaygtggtgtccagctccactggcgctgcctctggcatcatgtcccttgctggtcttgttttggcaccatttacagcagggacgagtctggcccttactgcagctggggtagggctgggagcagcgtctgctrtgactgggatcaccaccagcatcgtggagcactcatayacatcatcagcagaagctgaagccagcaggctgactgcaaccagcattgaccgmttgaaggtatttaaggaagttatgcgtgacatcacacccaacttactttcccttcttaataattattacgaagccacacaaaccattgggagtgaaatccgtgccatcaggcaagccagagccagggcccgactccctgtgaccacctggcgaatctcagctggaagtggwggtcaagcagagagaacgattgcaggcaccacccgggcagtgagcagaggagcccggatcctgagtgcgaccacttcaggcatcttccttgcactggatgtggtcaaccttgtatacgagtcaaagcacttgcatgagggggcaaagtctgcatctgctgaggagctgaggcggcaggctcaggagctggaggagaatctaatggagctcactcagatctatcagcgtctgaatccatgccatacccactgaccccagaccagtgcagccagcaggggaggtgagccatacacaggccacgacaaaatgcaggcattttattagggggataaagagggcaaggtaaagtttatggagctgagtgttagtgactttggcatttctgtagctgagcacagcaggggaggggttaatgcagatggcaagtgcaccaaggagaaggcaggaatgctggagcctggaataagggargagaggggactggagagtgtggggaataggaagaagaaatttcctttagactaacgaatatattggggggaggaatagaggggaggtgtgcaggaaccagcaatgagaaggccaggaaaagaaagagctgaaaatgcagaaagccgaagagttagaacttttggatacagcagaagaaacagcggctccactaccgacctgcccccggttcgatgtccttccaagaatgaagtctttccctggtgatggtcccctgccctgtctttccagcatccactctgtcttgtcctcctggaagtgtatctcagtcagccagtggcttcttgatgatggcggtggaggtggtggttgtagtgtgatggatcccctttaggttatttaggggtatatgtcccctgcttgaaccctgaaggccaggtaatgagccatggccattgtccccagctgaggaccaggtgtctctaaaaacccaaacatcctggagagtatgcgagaacctaccaagaaaaacagtctcattactcatatacagcaggcaaagagacagaaaattaactgaaaagcagtttagagactgggggaggccggatctctagagccatcctgctgagtgccctgtgtgtaagtcctaataaactcacctactcaccaagctgga

SEQ ID NO: 442 - DNA, 2086 bp, Homo sapiens
atgggactgggccaagggtggggctgggaagcatcctgttttgcatgtttgatcaggagctgctgccaagttgtgactttcactttcccttttgggttccagggtatatctcagagmctggagaacgtgtctggttattatgcagatgcacggctggaggtgggatccacayagctcagaacagctggatcttgctcacactctttcaagagaagcttccttgaaaagaaacgctttactgaagaggccaccaaatacttccgggagagagtcagcccagtgcatctgcaaatcctgctgactaacaatgaagcctggaagagattygtgactgcggctgaattgcccagggatgaggcagatgctctctacgaagctctgaagaagcttagaacatatgcagctattgaggacgaatatgtgcagcagaaagatgagcagtttagggaatggtttttgaaagagtttccccaagtcaagaggaagatccaggagtccatagaaaagcttcgtgcccttgcaaatggtattgaagaggtccacagaggctgcaccatctccaaygtggtgtccagctccactggcgctgcctctggcatcatgtcccttgctggtcttgttttggcaccatttacagcagggacgagtctggcccttactgcagctggggtagggctgggagcagcgtctgctrtgactgggatcaccaccagcatcgtggagcactcatayacatcatcagcagaagctgaagccagcaggctgactgcaaccagcattgaccgmttgaaggtatttaaggaagttatgcgtgacatcacacccaacttactttcccttcttaataattattacgaagccacacaaaccattgggagtgaaatccgtgccatcaggcaagccagagccagggcccgactccctgtgaccacctggcgaatctcagctggaagtggwggtcaagcagagagaacgattgcaggcaccacccgggcagtgagcagaggagcccggatcctgagtgcgaccacttcaggcatcttccttgcactggatgtggtcaaccttgtatacgagtcaaagcacttgcatgagggggcaaagtctgcatctgctgaggagctgaggcggcaggctcaggagctggaggagaatctaatggagctcactcagatctatcagcgtctgaatccatgccatacccactgaccccagaccagtgcagccagcaggggaggtgagccatacacaggccacgacaaaatgcaggcattttattagggggataaagagggcaaggtaaagtttatggagctgagtgttagtgactttggcatttctgtagctgagcacagcaggggaggggttaatgcagatggcaagtgcaccaaggagaaggcaggaatgctggagcctggaataagggargagaggggactggagagtgtggggaataggaagaagaaatttcctttagactaacgaatatattggggggaggaatagaggggaggtgtgcaggaaccagcaatgagaaggccaggaaaagaaagagctgaaaatgcagaaagccgaagagttagaacttttggatacagcagaagaaacagcggctccactaccgacctgcccccggttcgatgtccttccaagaatgaagtctttccctggtgatggtcccctgccctgtctttccagcatccactctgtcttgtcctcctggaagtgtatctcagtcagccagtggcttcttgatgatggcggtggaggtggtggttgtagtgtgatggatcccctttaggttatttaggggtatatgtcccctgcttgaaccctgaaggccaggtaatgagccatggccattgtccccagctgaggaccaggtgtctctaaaaacccaaacatcctggagagtatgcgagaacctaccaagaaaaacagtctcattactcatatacagcaggcaaagagacagaaaattaactgaaaagcagtttagagactgggggaggccggatctctagagccatcctgctgagtgccctgtgtgtaagtcctaataaactcacctactcaccaagctgga

SEQ ID NO: 443 - DNA, 2412 bp, Homo sapiens
atgggactgggccaagggtggggctgggaagcatcctgttttgcatgtttgatcaggagctgctgccaagttgtgactttcactttcccttttgggttccagggtatatctcagagmctggagaacgtgtctggttattatgcagatgcacggctggaggtgggatccacayagctcagaacagctggatcttgctcacactctttcaagagaagcttccttggacaaaaggaccctgccttggtgtgagagtgagggcagagggagctggagcaagtagaatttctctaaataccagctggctggggcccaggagattaaaaaacaccgggctaggttggtcttggcatttgctgacacgcaaagggattgcagagatccagcccctccaacctccctctgtccacaggtggctcacattcagtcccacaatttgctttctcctcctcaagggttaagaaaaaaaacgaacccttccagtcaggtcagtgactggagagctccawggaaagtctctcagtgacctggctgctggcaccatggactcagaaaagaaacgctttactgaagaggccaccaaatacttccgggagagagtcagcccagtgcatctgcaaatcctgctgactaacaatgaagcctggaagagattygtgactgcggctgaattgcccagggatgaggcagatgctctctacgaagctctgaagaagcttagaacatatgcagctattgaggacgaatatgtgcagcagaaagatgagcagtttagggaatggtttttgaaagagtttccccaagtcaagaggaagatccaggagtccatagaaaagcttcgtgcccttgcaaatggtattgaagaggtccacagaggctgcaccatctccaaygtggtgtccagctccactggcgctgcctctggcatcatgtcccttgctggtcttgttttggcaccatttacagcagggacgagtctggcccttactgcagctggggtagggctgggagcagcgtctgctrtgactgggatcaccaccagcatcgtggagcactcatayacatcatcagcagaagctgaagccagcaggctgactgcaaccagcattgaccgmttgaaggtatttaaggaagttatgcgtgacatcacacccaacttactttcccttcttaataattattacgaagccacacaaaccattgggagtgaaatccgtgccatcaggcaagccagagccagggcccgactccctgtgaccacctggcgaatctcagctggaagtggwggtcaagcagagagaacgattgcaggcaccacccgggcagtgagcagaggagcccggatcctgagtgcgaccacttcaggcatcttccttgcactggatgtggtcaaccttgtatacgagtcaaagcacttgcatgagggggcaaagtctgcatctgctgaggagctgaggcggcaggctcaggagctggaggagaatctaatggagctcactcagatctatcagcgtctgaatccatgccatacccactgaccccagaccagtgcagccagcaggggaggtgagccatacacaggccacgacaaaatgcaggcattttattagggggataaagagggcaaggtaaagtttatggagctgagtgttagtgactttggcatttctgtagctgagcacagcaggggaggggttaatgcagatggcaagtgcaccaaggagaaggcaggaatgctggagcctggaataagggargagaggggactggagagtgtggggaataggaagaagaaatttcctttagactaacgaatatattggggggaggaatagaggggaggtgtgcaggaaccagcaatgagaaggccaggaaaagaaagagctgaaaatgcagaaagccgaagagttagaacttttggatacagcagaagaaacagcggctccactaccgacctgcccccggttcgatgtccttccaagaatgaagtctttccctggtgatggtcccctgccctgtctttccagcatccactctgtcttgtcctcctggaagtgtatctcagtcagccagtggcttcttgatgatggcggtggaggtggtggttgtagtgtgatggatcccctttaggttatttaggggtatatgtcccctgcttgaaccctgaaggccaggtaatgagccatggccattgtccccagctgaggaccaggtgtctctaaaaacccaaacatcctggagagtatgcgagaacctaccaagaaaaacagtctcattactcatatacagcaggcaaagagacagaaaattaactgaaaagcagtttagagactgggggaggccggatctctagagccatcctgctgagtgccctgtgtgtaagtcctaataaactcacctactcaccaagctgga

SEQ ID NO: 444 - DNA, 1715 bp, Homo sapiens
gggggcggccgggcggcgggggcggggaaggggcgggcgcggaggcggtgccgcagcccgagccggagcccgagccggatcccgaggcgacgggagccgaacaggagccgccgctgaagccaccgccgggtgcccagcgccgccgccgcccccgagctcccccgcgcccctgcccgcgggcggccggtgggcagcgggcgccatggccgcgccggagccgctgcggccgcgcctgtgccgcttggtgcgcggagagcagggctacggcttccacctgcacggcgagaagggccgccgcgggcagttcatccggcgcgtggaacccggttcccccgccgaggccgccgcgctgcgcgctggggaccgcctggtcgaggtcaacggcgtcaacgtggagggcgagacgcaccaccaggtggtgcaaaggatcaaggctgtggaggggcwgactcggctgctggtggtggaccaggagacagatgaggagctccgccggcggcagctgacctgtaccgaggagatggcccagcgagggctcccacccgcccacgacccctgggagccgaagccagactgggcacacaccggcagccacagctccgaagctggcaagaaggatgtcagtgggcccctgagggagctgcgccctcggctctgccacctgcgaaagggacctcagggctatgggttcaacctgcatagtgwcaagtcccggcccggccagtacatccgctctgtggacscgggctcacctgccgcccgctctggcctccgcgcccaggaccggctcattgaggtgaacgggcagaatgtggagggactgcgccatgctgaggtggtggccagcatcaaggcacgggaggacgaggcccggctgctggtcgtggaccccgagacagatgaacacttcaagcggcttcgggtcacacccaccgaggagcacgtggaaggtcctctgccgtcacccgtcaccaatggaaccagccctgcccagctcaatggtggctctgcgtgctcgtcccgaagtgacctgcctggttccgacaaggacactgaggatggcagtgcctggaagcaagatcccttccaggagagcggcctccacctgagccccacggcggccgaggccaaggagaaggctcgagccatgcgagtcaacaagcgcgcgccacagatggactggaacaggaagcgtgaaatcttcagcaacttctgagccccttcctgcctgtctcgggaccctgggacccctcccgcacggaccttgggcctcagcctgccccgagctcccccagcctcagtggactggagggtggtcctgccattgcccagaaatcagccccagccccggtgagcccccatcctgcccctgcccaccaggtactgggggcctgtggcagcaagatagggggagagagacccagagatgtgagagagagtcagagacagagacagagagagagagagagagacacagagagagacagagagagagcgagcgagcgcgcggcagccgcggggcgagggcctttgctgctctgcyggggcctgctgactgaaaggaatttgtgtttttgctttttttccaaaaagatctccagctccacacatgtttccacttaataccagagaccccccccccttcccctcccccttcccctcccccttgggacgcgctctaaataattgcaataaaacaaacctttctctgcaaa

SEQ ID NO: 445 - DNA, 1661 bp, Homo sapiens
gggggcggccgggcggcgggggcggggaaggggcgggcgcggaggcggtgccgcagcccgagccggagcccgagccggatcccgaggcgacgggagccgaacaggagccgccgctgaagccaccgccgggtgcccagcgccgccgccgcccccgagctcccccgcgcccctgcccgcgggcggccggtgggcagcgggcgccatggccgcgccggagccgctgcggccgcgcctgtgccgcttggtgcgcggagagcagggctacggcttccacctgcacggcgagaagggccgccgcgggcagttcatccggcgcgtggaacccggttcccccgccgaggccgccgcgctgcgcgctggggaccgcctggtcgaggtcaacggcgtcaacgtggagggcgagacgcaccaccaggtggtgcaaaggatcaaggctgtggaggggcwgactcggctgctggtggtggaccaggagacagatgaggagctccgccggcggcagctgacctgtaccgaggagatggcccagcgagggctcccacccgcccacgacccctgggagccgaagccagactgggcacacaccggcagccacagctccgaagctggcaagaaggatgtcagtgggcccctgagggagctgcgccctcggctctgccacctgcgaaagggacctcagggctatgggttcaacctgcatagtgwcaagtcccggcccggccagtacatccgctctgtggacscgggctcacctgccgcccgctctggcctccgcgcccaggaccggctcattgaggtgaacgggcagaatgtggagggactgcgccatgctgaggtggtggccagcatcaaggcacgggaggacgaggcccggctgctggtcgtggaccccgagacagatgaacacttcaagcggcttcgggtcacacccaccgaggagcacgtggaaggtcctctgccgtcacccgtcaccaatggaaccagccctgcccagctcaatggtggctctgcgtgctcgtcccgaagtgacctgcctggttccgacaaggacactgaggatggcagtgcctggaagcaagatcccttccaggagagcggcctccacctgagccccacggcggccgaggccaaggagaaggctcgagccatgcgagtcaacaagcgcgcgccacagatggactggaacaggaagcgtgaaatcttcagcaacttctgagccccttcctgcctgtctcgggaccctgggacccctcccgcacggaccttgggcctcagcctgccccgagctcccccagcctcagtggactggagggtggtcctgccattgcccagaaatcagccccagccccggtgagcccccatcctgcccctgcccaccaggtactgggggcctgtggcagcaagatagggggagagagacccagagatgtgagagagagtcagagacagagacagaccgcggggcgagggcctttgctgctctgcyggggcctgctgactgaaaggaatttgtgtttttgctttttttccaaaaagatctccagctccacacatgtttccacttaataccagagaccccccccccttcccctcccccttcccctcccccttgggacgcgctctaaataattgcaataaaacaaacctttctctgcaaacca

SEQ ID NO: 446 - DNA, 1628 bp, Homo sapiens
gggggcggccgggcggcgggggcggggaaggggcgggcgcggaggcggtgccgcagcccgagccggagcccgagccggatcccgaggcgacgggagccgaacaggagccgccgctgaagccaccgccgggtgcccagcgccgccgccgcccccgagctcccccgcgcccctgcccgcgggcggccggtgggcagcgggcgccatggccgcgccggagccgctgcggccgcgcctgtgccgcttggtgcgcggagagcagggctacggcttccacctgcacggcgagaagggccgccgcgggcagttcatccggcgcgtggaacccggttcccccgccgaggccgccgcgctgcgcgctggggaccgcctggtcgaggtcaacggcgtcaacgtggagggcgagacgcaccaccaggtggtgcaaaggatcaaggctgtggaggggcwgactcggctgctggtggtggaccaggagacagatgaggagctccgccggcggcagctgacctgtaccgaggagatggcccagcgagggctcccacccgcccacgacccctgggagccgaagccagactgggcacacaccggcagccacagctccgaagctggcaagaaggatgtcagtgggcccctgagggagctgcgccctcggctctgccacctgcgaaagggacctcagggctatgggttcaacctgcatagtgwcaagtcccggcccggccagtacatccgctctgtggacscgggctcacctgccgcccgctctggcctccgcgcccaggaccggctcattgaggtgaacgggcagaatgtggagggactgcgccatgctgaggtggtggccagcatcaaggcacgggaggacgaggcccggctgctggtcgtggaccccgagacagatgaacacttcaagcggcttcgggtcacacccaccgaggagcacgtggaaggtcctctgccgtcacccgtcaccaatggaaccagccctgcccagctcaatggtggctctgcgtgctcgtcccgaagtgacctgcctggttccgacaaggacactgaggagagcggcctccacctgagccccacggcggccgaggccaaggagaaggctcgagccatgcgagtcaacaagcgcgcgccacagatggactggaacaggaagcgtgaaatcttcagcaacttctgagccccttcctgcctgtctcgggaccctgggacccctcccgcacggaccttgggcctcagcctgccccgagctcccccagcctcagtggactggagggtggtcctgccattgcccagaaatcagccccagccccggtgagcccccatcctgcccctgcccaccaggtactgggggcctgtggcagcaagatagggggagagagacccagagatgtgagagagagtcagagacagagacagaccgcggggcgagggcctttgctgctctgcyggggcctgctgactgaaaggaatttgtgtttttgctttttttccaaaaagatctccagctccacacatgtttccacttaataccagagaccccccccccttcccctcccccttcccctcccccttgggacgcgctctaaataattgcaataaaacaaacctttctctgcaaacca

SEQ ID NO: 447 - DNA, 1507 bp, Homo sapiens
tcccarcccacgattcccctgacccgactccctttcccagaactcagtcgcctgaacccccagcctgtggttctcmcctaggcctcagcctttcctgcctttgactgaaacagcagtatcttctaagccctgggggcttccccgggccccagccccgacctagaacccgcccgctgcctgccacgctgccactgccgcttcctytataaagggacctgagcgtccgggcccaggggctccgcacagcaggttctccccatgacaccacctgaacgtctcttcctcccaagggtgtgtggcaccaccctacacctcctccttctggggctgctgctggttcsgctgcctggggcccaggggctccctggtgttggcctcacaccttcagctgcccagactgcccgmcagyaccccaagatgcatcttgcccamagcaccctcaaacctgctgctcacctcattggagaccccagcaagcagaactcactgctctggagagcaaacacggaccgtgccttcctccaggatggtttctccttgagcaacaattctctcctggtccccaccagtggcatctacttcgtctactcccaggtggtcttctctgggaaagcctactctcccaaggccacctcctccccactctacctggcccatgaggtccagctcttctcctcccagtaccccttccatgtgcctctcctcagctcccagaagatggtgtatccagggctgcaggaaccctggctgcactcgatgtaccacggggctgcgttccagctcacccagggagaccagctatccacccacacagatggcatcccccacctagtcctcagccctagtactgtcttctttggagccttcgctctgtagaacttggaaaaatccagaaagaaaaaataattgatttcaagaccttctccccattctgcctccattctgaccatttcaggggtcgtcaccacctctcctttggccattccaacagctcaagtcttccctgatcaagtcaccggagctttcaaagaaggaattctaggcatcccaggggaccacacctccctgaaccatccctgatgtctgtctggctgaggatttcaagcctgcctaggaattcccagcccaaagctgttggtctgtcccaccagctaggtggggcctagatccacacacagaggaagagcaggcacatggaggagcttgggggatgactagaggcagggaggggactatttatgaaggcaaaaaaattaaattatttatttatggaggatggagagaggggaataatagaagaacatccaaggagaaacagagacaggcccaagagatgaagagtgagagggcatgcgcacaaggctgaccaagagagaaagaagtaggcatgagggatcacagggccccagaaggcagggaaaggctctgaaagccagctgccgaccagagccccacacggaggcatctgcaccctcgatgaagcccaataaacctcttttctctgaaa

SEQ ID NO: 448 - DNA, 1416 bp, Homo sapiens
gctccrcacagcaggtgaggctctcctgccccatctccttgggctgcccgtgcttcgtgctttggactaccgcccmgcagtgtcctgccctctgcctgggcctcggtccctcctgcacctgctgcctggatccccggcctgcctgggcctgggccttggttctccccatgacaccacctgaacgtctcttcctcccaagggtgygtggcaccaccctacacctcctccttctggggctgctgctggttctgctgcctggggcccaggggctccctggtgttggcctcacaccttcagctgcccagactgcccgtcagcmcccyaagatgcatcttgcccacagcamcctcaaacctgctgctcacctcattggagaccccagcaagcagaactcactgctctggagagcaaacacggaccgtgccttcctccaggatggtttctccttgagcaacaattctctcctggtccccaccagtggcatctacttcgtctactcccaggtggtcttctctgggaaagcctactctcccaaggccacctcctccccactctacctggcccatgaggtccagctcttctcctcccagtaccccttccatgtgcctctcctcagctcccagaagatggtgtatccagggctgcaggaaccctggctgcactcgatgtaccacggggctgcgttccagctcacccagggagaccagctatccacccacacagatggcatcccccacctagtcctcagccctagtactgtcttctttggagccttcgctctgtagaacttggaaaaatccagaaagaaaaaataattgatttcaagaccttctccccattctgcctccattctgaccatttcaggggtcgtcaccacctctcctttggccattccaacagctcaagtcttccctgatcaagtcaccggagctttcaaagaaggaattctaggcatcccaggggaccacacctccctgaaccatccctgatgtctgtctggctgaggatttcaagcctgcctaggaattcccagcccaaagctgttggtctgtcccaccagctaggtggggcctagatccacacacagaggaagagcaggcacatggaggagcttgggggatgactagaggcagggaggggactatttatgaaggcaaaaaaattaaattatttatttatggaggatggagagaggggaataatagaagaacatccaaggagaaacagagacaggcccaagagatgaagagtgagagggcatgcgcacaaggctgaccaagagagaaagaagtaggcatgagggatcacagggccccagaaggcagggaaaggctctgaaagccagctgccgaccagagccccacacggaggcatctgcaccctcgatgaagcccaataaacctcttttctctgaaa

SEQ ID NO: 449 - DNA, 5576 bp, Homo sapiens
agggaccgctggacagacctgggawctgacagagggcctggwgggaaacaggccaaagacccacaggatggagctgacctcaagggaaagagggaggggacagcctctgccctgggaacttcgactgggcctactgctaagcgtgctggctgccacactggcacaggcccctgccccggatgtscctggctgttccaggggaagctgctaccccgccacgggcgacctgctggtgggccgagctgacagactgactgcctcatccacttgtggcctgaatggcccccagccctactgcatcgtcagtcacctgcaggacgaaaagaagtgcttcctttgtgactcccggcgccccttctctgctagagacaacccacacasccatcgcatccagaatgtagtcaccagctttgcaccacagcggcgggcagcctggtggcagtcagagaatggtatccctgcggtcaccatccasctggacctggaggctgagtttcatttcacacacctcattatgaccttcaagacatttcgccctgctgccatgctggtggaacgctcagcagactttggccgcacctggcatgtgtaccgatatttctcctatsactgtggggctgacttcccaggagtcccactagcacccccacggcactgggatgatgtagtctgtgagtcccgctactcagagattgagccatccactgaaggcgaggtcatctatcgtgtgctggaccctgccatccctatcccagacccctacagctcacggattcagaacctgttgaagatcaccaacctacgggtgaacctgactcgtctacacacgttgggagacaacctactcgacccacggagggagatccgagagaagtactactatgccctctatgagctggttgtacgtggcaactgcttctgctacggacacgcctcagagtgtgcacccgccccaggggcaccagcccatgctgagggcatggtgcacggagcttgcatctgcaaacacaacacacgtggcctcaactgcgagcagtgtcaggatttctatcgtgacctgccctggcgtccggctgaggacggccatagtcatgcctgtaggaagtgtgagtgccatgggcacacccacagctgccacttcgacatggccgtatacctggcatctggcaatgtgagtggaggtgtgtgtgatggatgtcagcataacacagctgggcgccactgtgagctctgtcggcccttcttctaccgtgacccaaccaaggacctgcgggatccggctgtgtgccgctcctgtgattgtgaccccatgggttctcaagacggtggtcgctgtgattcccatgatgaccctgcactgggactggtctccggccagtgtcgctgcaaagaacaygtggtgggcactcgctgccagcaatgccgtgatggcttctttgggctcagcatcagtgaccgtctgggctgccggcgatgtcaatgtaatgcacggggcacagtgcctgggagcactccttgtgaccccaacagtggatcctgttactgcaaacgtctagtgactggacgtggatgtgaccgctgcctgcctggccactggggcctgagccacgacctgctcggctgcygcccctgtgactgcgacgtgggtggtgctttggatccccagtgtgatgagggcacaggtcaatgccactgccgccagcacatggttgggcgacgctgtgagcaggtgcaacctggctacttccggcccttcctggaccacctaatttgggaggctgaggacacccragggcaggtgctcgatgtggtggagcgcctggtgaccccyggggaaactccatcctggactggctcaggcttcgtgcgrctacaggaaggtcagaccctggagttcctggtggcctctgtgccgaasgctatggactatgacctgctgctgcgcttagagccccaggtccctgagcaatgggcagagttggaactgattgtgcagcgtccagggcctgtgcctgcccacagcctgtgtgggcatttggtgcccarggatgatcgcatccaagggactctgcaaccacatgccaggtacttgatatttcctaatcctgtctgccttgagcctggtatctcctacaagctgcatctgaagctggtacggacagggggaagtgcccagcctgagactccctactctggacctggcctgctcattgactcgctggtgctgctgccccgtgtcctggtgctagagatgtttagtgggggtgatgctgctgccctggagcgccaggccacctttgaacgctaccaatgccatgaggagggtctggtgcccagcaagacttctccctctgaggcctgcgcacccctcctcatcagcctgtccaccctcatctacaatggtgccctgccatgtcagtgcaaccctcaaggttcactgagttctgagtgcaaccctcatggtggtcagtgcctgtgcaagcctggagtggttgggcgccgctgtgacckctgtgcccctggctactatggctttggccccacaggctgtcaagcctgccagtgcagccacgagggggcactcagcagtctctgtgaaaagaccagtgggcaatgtctctgtcgaactggtgcctttgggcttcgctgtgaccgctgccagcgtggccagtggggattccctagctgccggccatgtgtctgcaatgggcatgcagatgagtgcaacacccacacaggcgcttgcctgggctgccgtgatcacacagggggtgagcactgtgaaaggtgcattgctggtttccacrgggacccacggctgccatatgggggccagtgccggccctgtccctgtcctgaaggccctgggagccaacggcactttgctacttcttgccaccaggatgaatattcccagcagattgtgtgccactgccgggcaggctatacggggctgcgatgtgaagcttgtgcccctgggcactttggggacccatcaaggccaggtggccggtgccaactgtgtragtgcagtgggaacattgacccaatggatcctgatgcctgtgacccmcacacggggcaatgcctgcgctgtttacaccacacagagggtccacactgtgcccactgcaagcctggcttccatgggcaggctgcccgacagagctgtcaccgctgcacatgcaacctgctgggcacaaatccgcagcagtgcccatctcctgaccagtgccactgtgatccaagcagtgggcagtgcccatgcctccccaatgtccagggccctagctgtgaccgctgtgcccccaacttctggaacctcaccagtggccatggttgccagccttgtgcctgccacccaagccgggccagaggccccacctgcaacgagttcacagggcagtgccactgccgtgccggctttggagggcggacttgttctgagtgccargagctccactggggagaccctgggttgcagtgccatgcctgtgattgtgactctcgtggaatagatacacctcagtgtcaccgcttcacaggtcactgcagctgccgcccaggggtgtctggtgtgcgctgtgaccagtgtgcccgtggcttctcaggaatctttcctgcctgccatccctgccatgcatgcttcggggattgggaccgagtggtgcaggacttggcagcccgtacacagcgcctagagcagcgggcrcaggagttgcaacagacgggtgtgctgggtgcctttgagagcagcttctggcacatgcaggagaagctgggcattgtgcagggcatcgtaggtgcccgcaacacctcagccgcctccactgcacagcttgtggaggccacagaggagctgcggcgtgaaattggggaggccactgagcacctgactcagctcgaggcagacctgacagatgtkcaagatgagaacttcaatgccaaccatgcactaagtggtctggagcgagataggcttgcacttaatctcacactgcggcagctcgaccagcatcttgacttgctcaaacattcaaacttcctgggtgcctatgacagcatccggcatgcccatagccagtctgcagaggcagaacgtcgtgccaatacctcagccctggcagtacctagccctgtgagcaactcggcaagtgctcggcatcggacagaggcactgatggatgctcagaaggaggacttcaacagcaaacacatggccaaccagcgggcacttggcaagctctctgcccatacccacaccctgagcctgacagacataaatgagctggtgtgtggggcaccaggggatgcaccctgtgctacaagcccttgtgggggtgccggctgtcgagatgaggatgggcagccgcgctgtgggggcctcagctgcaatggggcagcggctacagcagacctagcactgggccgggcccggcacacacaggcagagctgcagcgggcactggcagaaggtggtagcatcctcagcagagtggctgagactcgtcggcaggcaagcgaggcacagcagcgggcccaggcagccctggacaaggctaatgcttccaggggacaggtggaacaggccaaccaggaacttcaagaacttatccagagtgtgaaggacttcctcaaccaggagggggctgatcctgatagcattgaaatggtggccacacgggtgctagagctctccatcccagcttcagctgagcagatccagcacctggcgggygcgattgcagagcgagtccggagcctggcagatgtggatgcgatcctggcacgtactgtaggagatgtgcgtcgtgccgagcagctactgcaggatgcacggygggcaaggagctgggctgaggatgagaaacagaaggcagagacagtacaggcagcactggaggaggcccagcgggcacagggtattgcccagggtgccatccggggggcagtggctgacacacgggacacagagcagaccctgtaccaggtacaggagaggatggcaggtgcagagcgggcactgagctctgcaggtgaaagggctcggcagttggatgctctcctggaggctctgaaattgaaacgggcaggaaatagtctggcagcctctacagcagaagaaacggcaggcagtgcccagggtcgtgcccaggaggctgagcagctgctacgcggtcctctgggtgatcagtaccagacggtgaaggccctagctgagcgcaaggcccaaggtgtgctggctgcacaggcaagggcagaacaactgcgggatgaggctcggracctgttgcaagccgctcaggacaagctgcagcggctacaggaattggaaggcacctatgaggaaaatgagcgggcactggagagtaaggcagcccagttggacgggttggaggccaggatgcgcagcgtgcttcaagccatcaacttgcaggtgcagatctacaacacctgccagtgacccctgcccaaggcctaccccagttcctagcactgccccacatgcatgtctgcctatgcactgaagagctcttggcccggcagggcccccaataaaccagtgtgaaccccca

SEQ ID NO: 450 - DNA, 5808 bp, Homo sapiens
gaaggcagtttccggagggaaggggtagggttggggtgggggcgctctccgcccggtgttgcgctccttcccagaatccgctccggcctttccttcctgccgcgattcccaactttgctcaaagtcgctggactctaagctgtcggagggaccgctggacagacctgggawctgacagagggcctggwgggaaacaggccaaagacccacaggcagagttgacacggaaccccaaagcaaggaggagggctcgggcccgagaccgttcacctccccttatccctgttcccctcttcaggatggagctgacctcaagggaaagagggaggggacagcctctgccctgggaacttcgactgggcctactgctaagcgtgctggctgccacactggcacaggcccctgccccggatgtscctggctgttccaggggaagctgctaccccgccacgggcgacctgctggtgggccgagctgacagactgactgcctcatccacttgtggcctgaatggcccccagccctactgcatcgtcagtcacctgcaggacgaaaagaagtgcttcctttgtgactcccggcgccccttctctgctagagacaacccacacasccatcgcatccagaatgtagtcaccagctttgcaccacagcggcgggcagcctggtggcagtcagagaatggtatccctgcggtcaccatccasctggacctggaggctgagtttcatttcacacacctcattatgaccttcaagacatttcgccctgctgccatgctggtggaacgctcagcagactttggccgcacctggcatgtgtaccgatatttctcctatsactgtggggctgacttcccaggagtcccactagcacccccacggcactgggatgatgtagtctgtgagtcccgctactcagagattgagccatccactgaaggcgaggtcatctatcgtgtgctggaccctgccatccctatcccagacccctacagctcacggattcagaacctgttgaagatcaccaacctacgggtgaacctgactcgtctacacacgttgggagacaacctactcgacccacggagggagatccgagagaagtactactatgccctctatgagctggttgtacgtggcaactgcttctgctacggacacgcctcagagtgtgcacccgccccaggggcaccagcccatgctgagggcatggtgcacggagcttgcatctgcaaacacaacacacgtggcctcaactgcgagcagtgtcaggatttctatcgtgacctgccctggcgtccggctgaggacggccatagtcatgcctgtaggaagtgtgagtgccatgggcacacccacagctgccacttcgacatggccgtatacctggcatctggcaatgtgagtggaggtgtgtgtgatggatgtcagcataacacagctgggcgccactgtgagctctgtcggcccttcttctaccgtgacccaaccaaggacctgcgggatccggctgtgtgccgctcctgtgattgtgaccccatgggttctcaagacggtggtcgctgtgattcccatgatgaccctgcactgggactggtctccggccagtgtcgctgcaaagaacaygtggtgggcactcgctgccagcaatgccgtgatggcttctttgggctcagcatcagtgaccgtctgggctgccggcgatgtcaatgtaatgcacggggcacagtgcctgggagcactccttgtgaccccaacagtggatcctgttactgcaaacgtctagtgactggacgtggatgtgaccgctgcctgcctggccactggggcctgagccacgacctgctcggctgcygcccctgtgactgcgacgtgggtggtgctttggatccccagtgtgatgagggcacaggtcaatgccactgccgccagcacatggttgggcgacgctgtgagcaggtgcaacctggctacttccggcccttcctggaccacctaatttgggaggctgaggacacccragggcaggtgctcgatgtggtggagcgcctggtgaccccyggggaaactccatcctggactggctcaggcttcgtgcgrctacaggaaggtcagaccctggagttcctggtggcctctgtgccgaasgctatggactatgacctgctgctgcgcttagagccccaggtccctgagcaatgggcagagttggaactgattgtgcagcgtccagggcctgtgcctgcccacagcctgtgtgggcatttggtgcccarggatgatcgcatccaagggactctgcaaccacatgccaggtacttgatatttcctaatcctgtctgccttgagcctggtatctcctacaagctgcatctgaagctggtacggacagggggaagtgcccagcctgagactccctactctggacctggcctgctcattgactcgctggtgctgctgccccgtgtcctggtgctagagatgtttagtgggggtgatgctgctgccctggagcgccaggccacctttgaacgctaccaatgccatgaggagggtctggtgcccagcaagacttctccctctgaggcctgcgcacccctcctcatcagcctgtccaccctcatctacaatggtgccctgccatgtcagtgcaaccctcaaggttcactgagttctgagtgcaaccctcatggtggtcagtgcctgtgcaagcctggagtggttgggcgccgctgtgacckctgtgcccctggctactatggctttggccccacaggctgtcaagcctgccagtgcagccacgagggggcactcagcagtctctgtgaaaagaccagtgggcaatgtctctgtcgaactggtgcctttgggcttcgctgtgaccgctgccagcgtggccagtggggattccctagctgccggccatgtgtctgcaatgggcatgcagatgagtgcaacacccacacaggcgcttgcctgggctgccgtgatcacacagggggtgagcactgtgaaaggtgcattgctggtttccacrgggacccacggctgccatatgggggccagtgccggccctgtccctgtcctgaaggccctgggagccaacggcactttgctacttcttgccaccaggatgaatattcccagcagattgtgtgccactgccgggcaggctatacggggctgcgatgtgaagcttgtgcccctgggcactttggggacccatcaaggccaggtggccggtgccaactgtgtragtgcagtgggaacattgacccaatggatcctgatgcctgtgacccmcacacggggcaatgcctgcgctgtttacaccacacagagggtccacactgtgcccactgcaagcctggcttccatgggcaggctgcccgacagagctgtcaccgctgcacatgcaacctgctgggcacaaatccgcagcagtgcccatctcctgaccagtgccactgtgatccaagcagtgggcagtgcccatgcctccccaatgtccagggccctagctgtgaccgctgtgcccccaacttctggaacctcaccagtggccatggttgccagccttgtgcctgccacccaagccgggccagaggccccacctgcaacgagttcacagggcagtgccactgccgtgccggctttggagggcggacttgttctgagtgccargagctccactggggagaccctgggttgcagtgccatgcctgtgattgtgactctcgtggaatagatacacctcagtgtcaccgcttcacaggtcactgcagctgccgcccaggggtgtctggtgtgcgctgtgaccagtgtgcccgtggcttctcaggaatctttcctgcctgccatccctgccatgcatgcttcggggattgggaccgagtggtgcaggacttggcagcccgtacacagcgcctagagcagcgggcrcaggagttgcaacagacgggtgtgctgggtgcctttgagagcagcttctggcacatgcaggagaagctgggcattgtgcagggcatcgtaggtgcccgcaacacctcagccgcctccactgcacagcttgtggaggccacagaggagctgcggcgtgaaattggggaggccactgagcacctgactcagctcgaggcagacctgacagatgtkcaagatgagaacttcaatgccaaccatgcactaagtggtctggagcgagataggcttgcacttaatctcacactgcggcagctcgaccagcatcttgacttgctcaaacattcaaacttcctgggtgcctatgacagcatccggcatgcccatagccagtctgcagaggcagaacgtcgtgccaatacctcagccctggcagtacctagccctgtgagcaactcggcaagtgctcggcatcggacagaggcactgatggatgctcagaaggaggacttcaacagcaaacacatggccaaccagcgggcacttggcaagctctctgcccatacccacaccctgagcctgacagacataaatgagctggtgtgtggggcaccaggggatgcaccctgtgctacaagcccttgtgggggtgccggctgtcgagatgaggatgggcagccgcgctgtgggggcctcagctgcaatggggcagcggctacagcagacctagcactgggccgggcccggcacacacaggcagagctgcagcgggcactggcagaaggtggtagcatcctcagcagagtggctgagactcgtcggcaggcaagcgaggcacagcagcgggcccaggcagccctggacaaggctaatgcttccaggggacaggtggaacaggccaaccaggaacttcaagaacttatccagagtgtgaaggacttcctcaaccaggagggggctgatcctgatagcattgaaatggtggccacacgggtgctagagctctccatcccagcttcagctgagcagatccagcacctggcgggygcgattgcagagcgagtccggagcctggcagatgtggatgcgatcctggcacgtactgtaggagatgtgcgtcgtgccgagcagctactgcaggatgcacggygggcaaggagctgggctgaggatgagaaacagaaggcagagacagtacaggcagcactggaggaggcccagcgggcacagggtattgcccagggtgccatccggggggcagtggctgacacacgggacacagagcagaccctgtaccaggtacaggagaggatggcaggtgcagagcgggcactgagctctgcaggtgaaagggctcggcagttggatgctctcctggaggctctgaaattgaaacgggcaggaaatagtctggcagcctctacagcagaagaaacggcaggcagtgcccagggtcgtgcccaggaggctgagcagctgctacgcggtcctctgggtgatcagtaccagacggtgaaggccctagctgagcgcaaggcccaaggtgtgctggctgcacaggcaagggcagaacaactgcgggatgaggctcggracctgttgcaagccgctcaggacaagctgcagcggctacaggaattggaaggcacctatgaggaaaatgagcgggcactggagagtaaggcagcccagttggacgggttggaggccaggatgcgcagcgtgcttcaagccatcaacttgcaggtgcagatctacaacacctgccagtgacccctgcccaaggcctaccccagttcctagcactgccccacatgcatgtctgcctatgcactgaagagctcttggcccggcagggcccccaataaaccagtgtgaaccccca

SEQ ID NO: 451 - protein, 323 aa, Homo sapiens
MGLSNILFVMAFLLSGAAPLKIQAYFNETADLPCQFANSQNQSLSELVVFWQDQENLVLNEVYLGKEKFDSVHSKYMGRTSFDSDSWTLRLHNLQIKDKGLYQCIIHHKKPTGMIRIHQMNSELSVLANFSQPEIVPISNITENVYINLTCSSIHGYPEPKKMSVLLRTKNSTIEYDGIMQKSQDNVTELYDVSISLSVSFPDVTSNMTIFCILETDKTRLLSSPFSIELEDPQPPPDHIPWITAVLPTVIICVMVFCLILWKWKKKKRPRNSYKCGTNTMEREESEQTKKREKIHIPERSDEAQRVFKSSKTSSCDKSDTCF

SEQ ID NO: 452 - protein, 329 aa, Homo sapiens
MDPQCTMGLSNILFVMAFLLSGAAPLKIQAYFNETADLPCQFANSQNQSLSELVVFWQDQENLVLNEVYLGKEKFDSVHSKYMGRTSFDSDSWTLRLHNLQIKDKGLYQCIIHHKKPTGMIRIHQMNSELSVLANFSQPEIVPISNITENVYINLTCSSIHGYPEPKKMSVLLRTKNSTIEYDGIMQKSQDNVTELYDVSISLSVSFPDVTSNMTIFCILETDKTRLLSSPFSIELEDPQPPPDHIPWITAVLPTVIICVMVFCLILWKWKKKKRPRNSYKCGTNTMEREESEQTKKREKIHIPERSDEAQRVFKSSKTSSCDKSDTCF

SEQ ID NO: 453 - protein, 543 aa, Homo sapiens
MGTSLSPNDPWPLNPLSIQQTTLLLLLSVLATVHVGQRLLRQRRRQLRSAPPGPFAWPLIGNAAAVGQAAHLSFARLARRYGDVFQIRLGSCPIVVLNGERAIHQALVQQGSAFADRPAFASFRVVSGGRSMAFGHYSEHWKVQRRAAHSMMRNFFTRQPRSRQVLEGHVLSEARELVALLVRGSADGAFLDPRPLTVVAVANVMSAVCFGCRYSHDDPEFRELLSHNEEFGRTVGAGSLVDVMPWLQYFPNPVRTVFREFEQLNRNFSNFILDKFLRHCESLRPGAAPRDMMDAFILSAEKKAAGDSHGGGARLDLENVPATITDIFGASQDTLSTALQWLLLLFTRYPDVQTRVQAELDQVVGRDRLPCMGDQPNLPYVLAFLYEAMRFSSFVPVTIPHATTANTSVLGYHIPKDTVVFVNQWSVNHDPVKWPNPENFDPARFLDKDGLINKDLTSRVMIFSVGKRRCIGEELSKMQLFLFISILAHQCDFRANPNEPAKMNFSYGLTIKPKSFKVNVTLRESMELLDSAVQNLQAKETCQ

SEQ ID NO: 454 - protein, 543 aa, Homo sapiens; identical to SEQ ID NO: 453

SEQ ID NO: 455 - protein, 534 aa, Homo sapiens
MMEALGFLKLEVNGPMVTVALSVALLALLKWYSTSAFSRLEKLGLRHPKPSPFIGNLTFFRQGFWESQMELRKLYGPLCGYYLGRRMFIVISEPDMIKQVLVENFSNFTNRMASGLEFKSVADSVLFLRDKRWEEVRGALMSAFSPEKLNEMVPLISQACDLLLAHLKRYAESGDAFDIQRCYCNYTTDVVASVAFGTPVDSWQAPEDPFVKHCKRFFEFCIPRPILVLLLSFPSIMVPLARILPNKNRDELNGFFNKLIRNVIALRDQQAAEERRRDFLQMVLDARHSASPMGVQDFDIVRDVFSSTGCKPNPSRQHQPSPMARPLTVDEIVGQAFIFLIAGYEIITNTLSFATYLLATNPDCQEKLLREVDVFKEKHMAPEFCSLEEGLPYLDMVIAETLRMYPPAFRFTREAAQDCEVLGQRIPAGAVLEMAVGALHHDPEHWPSPETFNPERFTAEARQQHRPFTYLPFGAGPRSCLGVRLGLLEVKLTLLHVLHKFRFQACPETQVPLQLESKSALGPKNGVYIKIVSR

SEQ ID NO: 456 - protein, 460 aa, Homo sapiens
MMEALGFLKLEVNGPMVTVALSVALLALLKWYSTSAFSRLEKLGLRHPKPSPFIGNLTFFRQGFWESQMELRKLYGPLCGYYLGRRMFIVISEPDMIKQVLVENFSNFTNRMASGLEFKSVADSVLFLRDKRWEEVRGALMSAFSPEKLNEMVPLISQACDLLLAHLKRYAESGDAFDIQRCYCNYTTDVVASVAFGTPVDSWQAPEDPFVKHCKRFFEFCIPRPILVLLLSFPSIMVPLARILPNKNRDELNGFFNKLIRNVIALRDQQAAEERRRDFLQMVLDARHSASPMGVQDFDIVRDVFSSTGCKPNPSRQHQPSPMARPLTVDEIVGQAFIFLIAGYEIITNTLSFATYLLATNPDCQEKLLREVDVFKEKHMAPEFCSLEEGLPYLDMVIAETLRMYPPAFRFTREAAQDCEVLGQRIPAGAVLEMAVGALHHDPEHWPSPETFNPERYRCS

SEQ ID NO: 457 - protein, 262 aa, Homo sapiens
MDPRLSTVRQTCCCFNVRIATTALAIYHVIMSVLLFIEHSVEVAHGKASCKLSQMGYLRIADLISSFLLITMLFIISLSLLIGVVKNREKYLLPFLSLQIMDYLLCLLTLLGSYIELPAYLKLASRSRASSSKFPLMTLQLLDFCLSILTLCSSYMEVPTYLNFKSMNHMNYLPSQEDMPHNQFIKMMIIFSIAFITVLIFKVYMFKCVWRCYRLIKCMNSVEEKRNSKMLQKVVLPSYEEALSLPSKTPEGGPAPPPYSEV

SEQ ID NO: 458 - protein, 262 aa, Homo sapiens; identical to SEQ ID NO: 457

SEQ ID NO: 459 - protein, 352 aa, Homo sapiens [sequence omitted]

SEQ ID NO: 460 - protein, 216 aa, Homo sapiens [sequence omitted]

SEQ ID NO: 461 - protein, 122 aa, Homo sapiens [sequence omitted]

SEQ ID NO: 462 - protein, 122 aa, Homo sapiens [sequence omitted]

SEQ ID NO: 463 - protein, 41 aa, Homo sapiens
MKLLTGLVFCSLVLSVSSRSFFSFLGEAFDGYESQAHLGIT

SEQ ID NO: 464 - protein, 355 aa, Homo sapiens
MDYTLDLSVTTVTDYYYPDIFSSPCDAELIQTNGKLLLAVFYCLLFVFSLLGNSLVILVLVVCKKLRSITDVYLLNLALSDLLFVFSFPFQTYYLLDQWVFGTVMCKVVSGFYYIGFYSSMFFITLMSVDRYLAVVHAVYALKVRTIRMGTTLCLAVWLTAIMATIPLLVFYQVASEDGVLQCYSFYNQQTLKWKIFTNFKMNILGLLIPFTIFMFCYIKILHQLKRCQNHNKTKAIRLVLIVVIASLLFWVPFNVVLFLTSLHSMHILDGCSISQQLTYATHVTEIISFTHCCVNPVIYAFVGEKFKKHLSEIFQKSCSQIFNYLGRQMPRESCEKSSSCQQHSSRSSSVDYIL

SEQ ID NO: 465 - protein, 331 aa, Homo sapiens [sequence omitted]

SEQ ID NO: 466 - protein, 393 aa, Homo sapiens
MDAATLTYDTLRFAEFEDFPETSEPVWILGRKYSIFTEKDEILSDVASRLWFTYRKNFPAIGGTGPTSDTGWGCMLRCGQMIFAQALVCRHLGRDWRWTQRKRQPDSYFSVLNAFIDRKDSYYSIHQIAQMGVGEGKSIGQWYGPNTVAQVLKKLAVFDTWSSLAVHIAMDNTVVMEEIRRLCRTSVPCAGATAFPADSDRHCNGFPAGAEVTNRPSPWRPLVLLIPLRLGLTDINEAYVETLKHCFMMPQSLGVIGGKPNSAHYFIGYVGEELIYLDPHTTQPAVEPTDGCFIPDESFHCQHPPCRMSIAELDPSIAVGFFCKTEDDFNDWCQQVKKLSLLGGALPMFELVEQQPSHLACPDVLNLSLDSSDVERLERFFDSEDEDFEILSL

SEQ ID NO: 467 - protein, 319 aa, Homo sapiens
MLRCGQMIFAQALVCRHLGRDWRWTQRKRQPDSYFSVLNAFIDRKDSYYSIHQIAQMGVGEGKSIGQWYGPNTVAQVLKKLAVFDTWSSLAVHIAMDNTVVMEEIRRLCRTSVPCAGATAFPADSDRHCNGFPAGAEVTNRPSPWRPLVLLIPLRLGLTDINEAYVETLKHCFMMPQSLGVIGGKPNSAHYFIGYVGEELIYLDPHTTQPAVEPTDGCFIPDESFHCQHPPCRMSIAELDPSIAVGFFCKTEDDFNDWCQQVKKLSLLGGALPMFELVEQQPSHLACPDVLNLSLDSSDVERLERFFDSEDEDFEILSL

SEQ ID NO: 468 - protein, 415 aa, Homo sapiens
MDAATLTYDTLRFAEFEDFPETSEPVWILGRKYSIFTEKDEILSDVASRLWFTYRKNFPAIGGTGPTSDTGWGCMLRCGQMIFAQALVCRHLGRDWRWTQRKRQPDSYFSVLNAFIDRKDSYYSIHQIAQMGVGEGKSIGQWYGPNTVAQVLKKLAVFDTWSSLAVHIAMDNTVVMEEIRRLCRTSVPCAGATAFPADSDRHCNGFPAGAEVTNRPSPWRPLVLLIPLRLGLTDINEAYVETLKHCFMMPQSLGVIGGKPNSAHYFIGYVGEELIYLDPHTTQPAVEPTDGCFIPDESFHCQHPPCRMSIAELDPSIAVGFFCKTEDDFNDWCQQVKKLSLLGGALPMFELVEQQPSHLACPDVLNLSLGESCQVQVGSLGGTICALASPVLAPLVLTIKVCVSLSREHLAVVRL

SEQ ID NO: 469 - protein, 354 aa, Homo sapiens
MDAATLTYDTLRFAEFEDFPETSEPVWILGRKYSIFTEKDEILSDVASRLWFTYRKNFPAIGGTGPTSDTGWGCMLRCGQMIFAQALVCRHLGRDWRWTQRKRQPDSYFSVLNAFIDRKDSYYSIHQIAQMGVGEGKSIGQWYGPNTVAQVLKKLAVFDTWSSLAVHIAMDNTVVMEEIRRLCRTSVPCAGATAFPADSDRHCNGFPAGAEVTNRPSPWRPLVLLIPLRLGLTDINEAYVETLKHCFMMPQSLGVIGGKPNSAHYFIGYVGEELIYLDPHTTQPAVEPTDGCFIPDESFHCQHPPCRMSIAELDPSIAVVRGGHLSTQAFGAECCLGMTRKTFGFLRFFFQHVG

SEQ ID NO: 470 - protein, 891 aa, Homo sapiens [sequence omitted]

SEQ ID NO: 471 - protein, 27 aa, Homo sapiens
MRIWDLAYLTNHQKATNSASFICKTKK

SEQ ID NO: 472 - protein, 267 aa, Homo sapiens
  VARIANT (1)...(267): Xaa = Any Amino Acid
MTMETQMSQNVCPRNLWLLQPLTVLLLLASADSQAAAPPKAVLKLEPPWINVLQEDSVTLTCQGARSPESDSIQWFHNGNLIPTHTQPSYRFKANNNDSGEYTCQTGQTSLSDPVHLTVLSEWLVLQTPHLEFQEGETIMLRCHSWKDKPLVKVTFFQNGKSQKFSHLDPTFSIPQANHSHSGDYHCTGNIGYTLFSSKPVTITVQVPSMGSSSPMGIIVAVVIATAVAAIVAAVVALIYCRKKRISALPGDPECREMGETLPEKPX

SEQ ID NO: 473 - protein, 266 aa, Homo sapiens
  VARIANT (1)...(266): Xaa = Any Amino Acid
MTMETQMSQNVCPRNLWLLQPLTVLLLLASADSQAAPPKAVLKLEPPWINVLQEDSVTLTCQGARSPESDSIQWFHNGNLIPTHTQPSYRFKANNNDSGEYTCQTGQTSLSDPVHLTVLSEWLVLQTPHLEFQEGETIMLRCHSWKDKPLVKVTFFQNGKSQKFSHLDPTFSIPQANHSHSGDYHCTGNIGYTLFSSKPVTITVQVPSMGSSSPMGIIVAVVIATAVAAIVAAVVALIYCRKKRISALPGDPECREMGETLPEKPX

SEQ ID NO: 474 - protein, 360 aa, Homo sapiens
MSIQKTYLEGDFVFPVSSSSFLRTLLEPQLGSALLTAMNASCCLPSVQPTLPNGSEHLQAPFFSNQSSSAFCEQVFIKPEVFLSLGIVSLLENILVILAVVRNGNLHSPMYFFLCSLAVADMLVSVSNALETIMIAIVHSDYLTFEDQFIQHMDNIFDSMICISLVASICNLLAIAVDRYVTIFYALRYHSIMTVRKALTLIVAIWVCCGVCGVVFIVYSESKMVIVCLITMFFAMMLLMGTLYVHMFLFARLHVKRIAALPPADGVAPQQHSCMKGAVTITILLGVFIFCWAPFFLHLVLIITCPTNPYCICYTAHFNTYLVLIMCNSVIDPLIYAFRSLELRNTFREILCGCNGMNLG

SEQ ID NO: 475 - protein, 194 aa, Homo sapiens
KCPKFLKMVELQISLKNYDPQKDKRFSGTVRLKSTPCPKCGSWGNSSTVARPRPRISPQVDTEVPKKLKNKNLVKKLAKKYDAFLPSESLIKQIPRILGIGLTKAVKFPSLLTHDENTVAKVDEAKSTIKFHMNMLCLAVAVGHVKMTDDELVHNIHLAVNFLVSLLEKKLAECPGLIYQEHHGQAPAPILRHI

SEQ ID NO: 476 - protein, 260 aa, Homo sapiens
MRPEDRMFHIRAVILRALSLAFLLSLRGAGAIKADHVSTYAAFVQTHRPTGEFMFEFDEDEMFYVDLDKKETVWHLEEFGQAFSFEAQGGLANIAILNNNLNTLIQRSNHTQATNDPPEVTVFPKEPVELGQPNTLICHIDKFFPPVLNVTWLCNGELVTEGVAESLFLPRTDYSFHKFHYLTFVPSAEDFYDCRVEHWGLDQPLLKHWEAQEPIQMPETTETVLCALGLVLGLVGIIVGTVLIIKSLRSGHDPRAQGTL

SEQ ID NO: 477 - protein, 260 aa, Homo sapiens; identical to SEQ ID NO: 476

SEQ ID NO: 478 - protein, 260 aa, Homo sapiens; identical to SEQ ID NO: 476

SEQ ID NO: 479 - protein, 168 aa, Homo sapiens
MRMRMKMTLISQNIILMPVKKKIVIKRNLIDEVAQSLDLHIHDLHHAHPPPQVQGLGPGPVQEVLPVRSQDLVPVPENVRDLVGRNQDPAPGPTGALLPHEKDLIQVHHLLLRGTEREVVLDLLHLVIAKKDEQDHGHPKDATGHHLDHPILVPVQVQKRNNVLKFTS

SEQ ID NO: 480 - protein, 330 aa, Homo sapiens [sequence omitted]

SEQ ID NO: 481 - protein, 330 aa, Homo sapiens [sequence omitted]

SEQ ID NO: 482 - protein, 320 aa, Homo sapiens [sequence omitted]

SEQ ID NO: 483 - protein, 134 aa, Homo sapiens
LSLEGFDENLVVSPEVDIPSLPEGVVPLAPDEEGVAVPAEVVRDPEEAGSLVCVCPEASVLSAWWVWVMAAAVSGEVLAEADVHCPSGPPGVDTTELARVRAPVLESDVPPEGPRVASWLLGAACSAVVGAWVV

SEQ ID NO: 484 - protein, 499 aa, Homo sapiens [sequence omitted]

SEQ ID NO: 485 - protein, 482 aa, Homo sapiens
MTMSKEAVTFKDVAVVFTEEELGLLDLAQRKLYRDVMLENFRNLLSVGHQPFHRDTFHFLREEKFWMMDIATQREGNSGGKIQPEMKTFPEAGPHEGWSCQQIWEEIASDLTRPQDSTIKSSQFFEQGDAHSQVEEGLSIMHTGQKPSNCGKCKQSFSDMSIFDLPQQIRSAEKSHSCDECGKSFCYISALHIHQRVHLGEKLFKCDVCGKEFSQSLHLQTHQRVHTGEKPFKCEQCGRGFRCRSALTVHCKLHMGEKHYNCEACGRAFIHDFQLQKHQRIHTGEKPFKCEICSVSFRLRSSLNRHCVVHTGKKPNSTGEYGKGFIRRLDLCKHQTIHTGEKPYNCKECGKSFRRSSYLLIHQRVHTGEKPYKCDKCGKSYITKSGLDLHHRAHTGERPYNCDDCGKSFRQASSILNHKRLHCRKKPFKCEDCGKKLVYRSYRKDQQKNHSGENPSKCEDCGKRYKRRLNLDIILSLFLNDT

SEQ ID NO: 486 - protein, 339 aa, Homo sapiens
MTMSKEAVTFKDVAVVFTEEELGLLDLAQRKLYRDVMLENFRNLLSVGHQPFHRDTFHFLREEKFWMMDIATQREGNSGGKIQPEMKTFPEAGPHEGWSCQQIWEEIASDLTRPQDSTIKSSQFFEQGDAHSQVEEGLSIMHTGQKPSNCGKCKQSFSDMSIFDLPQQIRSAEKSHSCDECGKSFCYISALHIHQRVHLGEKLFKCDVCGKEFSQSLHLQTHQRVHTGEKPFKCEQCGRGFRCRSALTVHCKLHMGEKHYNCEACGRAFIHDFQLQKHQRIHTGEKPFKCEICSVSFRLRSSLNRHCVVHTVSIRRSTQERNHIIVKNVGRASDGPPIF

SEQ ID NO: 487 - protein, 811 aa, Homo sapiens
MRLIRNIYIFCSIVMTAEGDAPELPEERELMTNCSNMSLRKVPADLTPATTTLDLSYNLLFQLQSSDFHSVSKLRVLILCHNRIQQLDLKTFEFNKELRYLDLSNNRLKSVTWYLLAGLRYLDLSFNDFDTMPICEEAGNMSHLEILGLSGAKIQKSDFQKIAHLHLNTVFLGFRTLPHYEEGSLPILNTTKLHIVLPMDTNFWVLLRDGIKTSKILEMTNIDGKSQFVSYEMQRNLSLENAKTSVLLLNKVDLLWDDLFLILQFVWHTSVEHFQIRNVTFGGKAYLDHNSFDYSNTVMRTIKLEHVHFRVFYIQQDKIYLLLTKMDIENLTISNAQMPHMLFPNYPTKFQYLNFANNILTDELFKRTIQLPHLKTLILNGNKLETLSLVSCFANNTPLEHLDLSQNLLQHKNDENCSWPETVVNMNLSYNKLSDSVFRCLPKSIQILDLNNNQIQTVPKETIHLMALRELNIAFNFLTDLPGCSHFSRLSVLNIEMNFILSPSLDFVQSCQEVKTLNAGRNPFRCTCELKNFIQLETYSEVMMVGWSDSYTCEYPLNLRGTRLKDVHLHELSCNTALLIVTIVVIMLVLGLAVAFCCLHFDLPWYLRMLGQCTQTWHRVRKTTQEQLKRNVRFHAFISYSEHDSLWVKNELIPNLEKEDGSILICLYESYFDPGKSISENIVSFIEKSYKSIFVLSPNFVQNEWCHYEFYFAHHNLFHENSDHIILILLEPIPFYCIPTRYHKLKALLEKKAYLEWPKDRRKCGLFWANLRAAINVNVLATREMYELQTFTELNEESRGSTISLMRTDCL

SEQ ID NO: 488 - protein, 811 aa, Homo sapiens; identical to SEQ ID NO: 487

SEQ ID NO: 489 - protein, 119 aa, Homo sapiens
MAGLMTIVTSLLFLGVCAHHIIPTGSVVIPSPCCMFFVSKRIPENRVVSYQLSSRSTCLKAGVIFTTKKGQQFCGDPKQEWVQRYMKNLDAKQKKASPRARAVAVKGPVQRYPGNQTTC

SEQ ID NO: 490 - protein, 1035 aa, Homo sapiens
MGGPAAPRGAGRLRALLLALVVAGIPAGAYNLDPQRPVHFQGPADSFFGYAVLEHFHDNTRWVLVGAPKADSKYSPSVKSPGAVFKCRVHTNPDRRCTELDMARGKNRGTSCGKTCREDRDDEWMGVSLARQPKADGRVLACAHRWKNIYYEADHILPHGFCYIIPSNLQAKGRTLIPCYEEYKKKYGEEHGSCQAGIAGFFTEELVVMGAPGSFYWAGTIKVLNLTDNTYLKLNDEVIMNRRYTYLGYAVTAGHFSHPSTIDVVGGAPQDKGIGKVYIFRADRRSGTLIKIFQASGKKMGSYFGSSLCAVDLNGDGLSDLLVGAPMFSEIRDEGQVTVYINRGNGALEEQLALTGDGAYNAHFGESIASLDDLDNDGFPDVAIGAPKEDDFAGAVYIYHGDAGGIVPQYSMKLSGQKINPVLRMFGQSISGGIDMDGNGYPDVTVGAFMSDSVVLLRARPVITVDVSIFLPGSINITAPQCHDGQQPVNCLNVTTCFSFHGKHVPGEIGLNYVLMADVAKKEKGQMPRVYFVLLGETMGQVTEKLQLTYMEETCRHYVAHVKRRVQDVISPIVFEAAYSLSEHVTGEEERELPPLTPVLRWKKGQKIAQKNQTVFERNCRSEDCAADLQLQGKLLLSSMDEKTLYLALGAVKNISLNISISNLGDDAYDANVSFNVSRELFFINMWQKEEMGISCELLESDFLKCSVGFPFMRSKSKYEFSVIFDTSHLSGEEEVLSFIVTAQSGNTERSESLHDNTLVLMVPLMHEVDTSITGIMSPTSFVYGESVDAANFIQLDDLECHFQPINITLQVYNTGPSTLPGSSVSISFPNRLSSGGAEMFHVQEMVVGQEKGNCSFQKNPTPCIIPQEQENIFHTIFAFFTKSGRKVLDCEKPGISCLTAHCNFSALAKEESRTIDIYMLLNTEILKKDSSSVIQFMSRAKVKVDPALRVVEIAHGNPEEVTVVFEALHNLEPRGYVVGWIIAISLLVGILIFLLLAVLLWKMGFFRRRYKEIIEAEKNRKENEDSWDWVQKNQ

SEQ ID NO: 491 - protein, 1035 aa, Homo sapiens; identical to SEQ ID NO: 490

SEQ ID NO: 492 - protein, 263 aa, Homo sapiens [sequence omitted]

SEQ ID NO: 493 - protein, 423 aa, Homo sapiens [sequence omitted]

SEQ ID NO: 494 - protein, 423 aa, Homo sapiens [sequence omitted]

SEQ ID NO: 495 - protein, 423 aa, Homo sapiens [sequence omitted]

SEQ ID NO: 496 - protein, 513 aa, Homo sapiens
MKRLLLLFLFFITFSSAFPLVRMMENEENVQLAQAYLNQFYSLEIEGNHLVQSKNRSLIDDKIREMQAFFGLTVTGKLDSNTLEIMKTPRCGVPDVGQYGYTLPGWRKYNLTYRIINYTPDMARAAVDEAIQEGLEVWSKVTPLKFTKISKGIADIMIAFRTRVHGRCPRYFDGPLGVLGHAFPPGPGLGGDTHFDEDENWTKDGAGFNLFLVAAHEFGHALGLSHSNDQTALMFPNYVSLDPRKYPLSQDDINGIQSIYGGLPKEPAKPKEPTIPHACDPDLTFDAITTFRREVMFFKGRHLWRIYYDITDVEFELIASFWPSLPADLQAAYENPRDKILVFKDENFWMIRGYAVLPDYPKSIHTLGFPGRVKKIDAAVCDKTTRKTYFFVGIWCWRFDEMTQTMDKGFPQRVVKHFPGISIRVDAAFQYKGFFFFSRGSKQFEYDIKTKNITRIMRTNTWFQCKEPKNSSFGFDINKEKAHSGGIKILYHKSLSLFIFGIVHLLKNTSIYQ

SEQ ID NO: 497 - protein, 159 aa, Homo sapiens
MALETICRPSGRKSSKMQAFRIWDVNQKTFYLRNNQLVAGYLQGPNVNLEEKIDVVPIEPHALFLGIHGGKMCLSCVKSGDETRLQLEAVNITDLSENRKQDKRFAFIRSDSGPTTSFESAACPGWFLCTAMEADQPVSLTNMPDEGVMVTKFYFQEDE

SEQ ID NO: 498 - protein, 143 aa, Homo sapiens
MQAFRIWDVNQKTFYLRNNQLVAGYLQGPNVNLEEKIDVVPIEPHALFLGIHGGKMCLSCVKSGDETRLQLEAVNITDLSENRKQDKRFAFIRSDSGPTTSFESAACPGWFLCTAMEADQPVSLTNMPDEGVMVTKFYFQEDE

SEQ ID NO: 499 - protein, 143 aa, Homo sapiens; identical to SEQ ID NO: 498

SEQ ID NO: 500 - protein, 143 aa, Homo sapiens; identical to SEQ ID NO: 498

SEQ ID NO: 501 - protein, 177 aa, Homo sapiens
MEICRGLRSHLITLLLFLFHSETICRPSGRKSSKMQAFRIWDVNQKTFYLRNNQLVAGYLQGPNVNLEEKIDVVPIEPHALFLGIHGGKMCLSCVKSGDETRLQLEAVNITDLSENRKQDKRFAFIRSDSGPTTSFESAACPGWFLCTAMEADQPVSLTNMPDEGVMVTKFYFQEDE

SEQ ID NO: 502 - protein, 574 aa, Homo sapiens [sequence omitted]

SEQ ID NO: 503 - protein, 525 aa, Homo sapiens [sequence omitted]

SEQ ID NO: 504 - protein, 329 aa, Homo sapiens
MLLKVGILYIGGQLVTSGAVSSGNLVTFVLYQMQFTQAVEVLLSIYPRVQKAVGSSEKIFEYLDRTPRCPPSGLLTPLHLEGLVQFQDVSFAYPNRPDVLVLQGLTFTLRPGEVTALVGPNGSGKSTVAALLQNLYQPTGGQLLLDGKPLPQYEHRYLHRQVAAVGQEPQVFGRSLQENIAYGLTQKPTMEEITAAAVKSGAHSFISGLPQGYDTEVDEAGSQLSGGQRQAVALARALIRKPCVLILDDATSALDANSQLQVEQLLYESPERYSRSVLLITQHLSLVEQADHILFLEGGAIREGGTHQQLMEKKGCYWAMVQAPADAPE

SEQ ID NO: 505 - protein, 659 aa, Homo sapiens [sequence omitted]

SEQ ID NO: 506 - protein, 359 aa, Homo sapiens
MAELLASAGSACSWDFPRAPPSFPPPAASRGGLGGTRSFRPHRGAESPRPGRDRDGVRVPMASSRCPAPRGCRCLPGASLAWLGTVLLLLADWVLLRTALPRIFSLLVPTALPLLRVWAVGLSRWAVLWLGACGVLRATVGSKSENAGAQGWLAALKPLAAALGLALPGLALFRELISWGAPGSADSTRLLHWGSHPTAFVVSYAAALPAAALWHKLGSLWVPGGQGGSGNPVRRLLGCLGSETRRLSLFLVLVVLSSLGEMAIPFFTGRLTDWILQDGSADTFTRNLTLMSILTIASAVLEFVGDGIYNNTMGHVHSHLQGEVFGAVLRQETEFFQQNQTVAGSAGAGISGKVQPGGH

SEQ ID NO: 507 - protein, 701 aa, Homo sapiens
MAGDSTATSRRLGAAPDRAAPHILPAGVLRATVGSKSENAGAQGWLAALKPLAAALGLALPGLALFRELISWGAPGSADSTRLLHWGSHPTAFVVSYAAALPAAALWHKLGSLWVPGGQGGSGNPVRRLLGCLGSETRRLSLFLVLVVLSSLGEMAIPFFTGRLTDWILQDGSADTFTRNLTLMSILTIASAVLEFVGDGIYNNTMGHVHSHLQGEVFGAVLRQETEFFQQNQTGNIMSRVTEDTSTLSDSLSENLSLFLWYLVRGLCLLGIMLWGSVSLTMVTLITLPLLFLLPKKVGKWYQLLEVQVRESLAKSSQVAIEALSAMPTVRSFANEEGEAQKFREKLQEIKTLNQKEAVAYAVNSWTTSISGMLLKVGILYIGGQLVTSGAVSSGNLVTFVLYQMQFTQAVEVLLSIYPRVQKAVGSSEKIFEYLDRTPRCPPSGLLTPLHLEGLVQFQDVSFAYPNRPDVLVLQGLTFTLRPGEVTALVGPNGSGKSTVAALLQNLYQPTGGQLLLDGKPLPQYEHRYLHRQVAAVGQEPQVFGRSLQENIAYGLTQKPTMEEITAAAVKSGAHSFISGLPQGYDTEVDEAGSQLSGGQRQAVALARALIRKPCVLILDDATSALDANSQLQVEQLLYESPERYSRSVLLITQHLSLVEQADHILFLEGGAIREGGTHQQLMEKKGCYWAMVQAPADAPE

SEQ ID NO: 508 - protein, 808 aa, Homo sapiens
MAELLASAGSACSWDFPRAPPSFPPPAASRGGLGGTRSFRPHRGAESPRPGRDRDGVRVPMASSRCPAPRGCRCLPGASLAWLGTVLLLLADWVLLRTALPRIFSLLVPTALPLLRVWAVGLSRWAVLWLGACGVLRATVGSKSENAGAQGWLAALKPLAAALGLALPGLALFRELISWGAPGSADSTRLLHWGSHPTAFVVSYAAALPAAALWHKLGSLWVPGGQGGSGNPVRRLLGCLGSETRRLSLFLVLVVLSSLGEMAIPFFTGRLTDWILQDGSADTFTRNLTLMSILTIASAVLEFVGDGIYNNTMGHVHSHLQGEVFGAVLRQETEFFQQNQTGNIMSRVTEDTSTLSDSLSENLSLFLWYLVRGLCLLGIMLWGSVSLTMVTLITLPLLFLLPKKVGKWYQLLEVQVRESLAKSSQVAIEALSAMPTVRSFANEEGEAQKFREKLQEIKTLNQKEAVAYAVNSWTTSISGMLLKVGILYIGGQLVTSGAVSSGNLVTFVLYQMQFTQAVEVLLSIYPRVQKAVGSSEKIFEYLDRTPRCPPSGLLTPLHLEGLVQFQDVSFAYPNRPDVLVLQGLTFTLRPGEVTALVGPNGSGKSTVAALLQNLYQPTGGQLLLDGKPLPQYEHRYLHRQVAAVGQEPQVFGRSLQENIAYGLTQKPTMEEITAAAVKSGAHSFISGLPQGYDTEVDEAGSQLSGGQRQAVALARALIRKPCVLILDDATSALDANSQLQVEQLLYESPERYSRSVLLITQHLSLVEQADHILFLEGGAIREGGTHQQLMEKKGCYWAMVQAPADAPE

SEQ ID NO: 509 - protein, 751 aa, Homo sapiens
MAELLASAGSACSWDFPRAPPSFPPPAASRGGLGGTRSFRPHRGAESPRPGRDRDGVRVPMASSRCPAPRGCRCLPGASLAWLGTVLLLLADWVLLRTALPRIFSLLVPTALPLLRVWAVGLSRWAVLWLGACGVLRATVGSKSENAGAQGWLAALKPLAAALGLALPGLALFRELISWGAPGSADSTRLLHWGSHPTAFVVSYAAALPAAALWHKLGSLWVPGGQGGSGNPVRRLLGCLGSETRRLSLFLVLVVLSSLGEMAIPFFTGRLTDWILQDGSADTFTRNLTLMSILTIASAVLEFVGDGIYNNTMGHVHSHLQGEVFGAVLRQETEFFQQNQTGNIMSRVTEDTSTLSDSLSENLSLFLWYLVRGLCLLGIMLWGSVSLTMVTLITLPLLFLLPKKVGKWYQLLEVQVRESLAKSSQVAIEALSAMPTVRSFANEEGEAQKFREKLQEIKTLNQKEAVAYAVNSWTTSISGMLLKVGILYIGGQLVTSGAVSSGNLVTFVLYQMQFTQAVEVLLSIYPRVQKAVGSSEKIFEYLDRTPRCPPSGLLTPLHLEGLVQFQDVSFPLPQYEHRYLHRQVAAVGQEPQVFGRSLQENIAYGLTQKPTMEEITAAAVKSGAHSFISGLPQGYDTEVDEAGSQLSGGQRQAVALARALIRKPCVLILDDATSALDANSQLQVEQLLYESPERYSRSVLLITQHLSLVEQADHILFLEGGAIREGGTHQQLMEKKGCYWAMVQAPADAPE

SEQ ID NO: 510 - protein, 258 aa, Homo sapiens
MMVLQVSAAPRTVALTALLMVLLTSVVQGRATPENYLFQGRQECYAFNGTQRFLERYIYNREEFARFDSDVGEFRAVTELGRPAAEYWNSQKDILEEKRAVPDRMCRHNYELGGPMTLQRRVQPRVNVSPSKKGPLQHHNLLVCHVTDFYPGSIQVRWFLNGQEETAGVVSTNLIRNGDWTFQILVMLEMTPQQGDVYTCQVEHTSLDSPVTVEWKAQSDSARSKTLTGAGGFVLGLIICGVGIFMHRRSKKVQRGSA

SEQ ID NO: 511 - protein, 295 aa, Homo sapiens [sequence omitted]

SEQ ID NO: 512 - protein, 305 aa, Homo sapiens [sequence omitted]

SEQ ID NO: 513 - protein, 149 aa, Homo sapiens
MMVLQVSAAPRTVALTALLMVLLTSVVQGRATPENYLFQGRQECYAFNGTQRFLERYIYNREEFARFDSDVGEFRAVTELGRPAAEYWNSQKDILEEKRAVPDRMCRHNYELGGPMTLQRRGWSAVAPSWLTAASTSWAQVILLPQPPM

SEQ ID NO: 514 - protein, 438 aa, Homo sapiens
MGRTVVVLGGGISGLAASYHLSRAPCPPKVVLVESSERLGGWIRSVRGPNGAIFELGPRGIRPAGALGARTLLLVSELGLDSEVLPVRGDHPAAQNRFLYVGGALHALPTGLRGLLRPSPPFSKPLFWAGLRELTKPRGKEPDETVHSFAQRRLGPEVASLAMDSLCRGVFAGNSRELSIRSCFPSLFQAEQTHRSILLGLLLGAGRTPQPDSALIRQALAERWSQWSLRGGLEMLPQALETHLTSRGVSVLRGQPVCGLSLQAEGRWKVSLRDSSLEADHVISAIPASVLSELLPAEAAPLARALSAITAVSVAVVNLQYQGAHLPVQGFGHLVPSSEDPGVLGIVYDSVAFPEQDGSPPGLRVTVMLGGSWLQTLEASGCVLSQELFQQRAQEAAATQLGLKEMPSHCLVHLHKNCIPQYTLGHWQKLGKLGKQLG

SEQ ID NO: 515 - protein, 158 aa, Homo sapiens
MGRTVVVLGGGISGLAASYHLSRAPCPPKVVLVESSERLGGWIRSVRGPNGAIFELGPRGIRPAGALGARTLLLVSELGLDSEVLPVRGDHPAAQNRFLYVGGALHALPTGLRGLLRPSPPFSKPLFWAGLRELTKPRGKEPDETVHSFAQRRLGPES

SEQ ID NO: 516 - protein, 103 aa, Homo sapiens
MGRTVVVLGGGISGLAASYHLSRAPCPPKVVLVESSERLGGWIRSVRGPNGAIFELGPRGIRPAGALGARTLLLGATPPFTPLLQTSVLGWAEGADQAPGQRA

SEQ ID NO: 517 - protein, 477 aa, Homo sapiens
MGRTVVVLGGGISGLAASYHLSRAPCPPKVVLVESSERLGGWIRSVRGPNGAIFELGPRGIRPAGALGARTLLLVSELGLDSEVLPVRGDHPAAQNRFLYVGGALHALPTGLRGLLRPSPPFSKPLFWAGLRELTKPRGKEPDETVHSFAQRRLGPEVASLAMDSLCRGVFAGNSRELSIRSCFPSLFQAEQTHRSILLGLLLGAGRTPQPDSALIRQALAERWSQWSLRGGLEMLPQALETHLTSRGVSVLRGQPVCGLSLQAEGRWKVSLRDSSLEADHVISAIPASVLSELLPAEAAPLARALSAITAVSVAVVNLQYQGAHLPVQGFGHLVPSSEDPGVLGIVYDSVAFPEQDGSPPGLRVTVMLGGSWLQTLEASGCVLSQELFQQRAQEAAATQLGLKEMPSHCLVHLHKNCIPQYTLGHWQKLESARQFLTAHRLPLTLAGASYEGVAVNDCIESGRQAAVSVLGTEPNS

SEQ ID NO: 518 - protein, 158 aa, Homo sapiens; identical to SEQ ID NO: 515

SEQ ID NO: 519 - protein, 477 aa, Homo sapiens; identical to SEQ ID NO: 517

SEQ ID NO: 520 - protein, 532 aa, Homo sapiens
MIQAQESITLEDVAVDFTWEEWQLLGAAQKDLYRDVMLENYSNLVAVGYQASKPDALFKLEQGEQLWTIEDGIHSGACSDIWKVDHVLERLQSESLVNRRKPCHEHDAFENIVHCSKSQFLLGQNHDIFDLRGKSLKSNLTLVNQSKGYEIKNSVEFTGNGDSFLHANHERLHTAIKFPASQKLISTKSQFISPKHQKTRKLEKHHVCSECGKAFIKKSWLTDHQVMHTGEKPHRCSLCEKAFSRKFMLTEHQRTHTGEKPYECPECGKAFLKKSRLNIHQKTHTGEKPYICSECGKGFIQKGNLIVHQRIHTGEKPYICNECGKGFIQKTCLIAHQRFHTGKTPFVCSECGKSCSQKSGLIKHQRIHTGEKPFECSECGKAFSTKQKLIVHQRTHTGERPYGCNECGKAFAYMSCLVKHKRIHTREKQEAAKVENPPAERHSSLHTSDVMQEKNSANGATTQVPSVAPQTSLNISGLLANRNVVLVGQPVVRCAASGDNRGFAQDRNLVNAVNVVVPSVINYVLFYVTENP

SEQ ID NO: 521 - protein, 532 aa, Homo sapiens; identical to SEQ ID NO: 520

SEQ ID NO: 522 - protein, 444 aa, Homo sapiens [sequence omitted]

SEQ ID NO: 523 - protein, 400 aa, Homo sapiens
MSGRVGDLSPKQAETLAKFRENVQDVLPALPNPDDYFLLRWLRARNFDLQKSEALLRKYMEFRKTMDIDHILDWQPPEVIQKYMPGGLCGYDRDGCPVWYDIIGPLDPKGLLFSVTKQDLLKTKMRDCERILHECDLQTERLGKKIETIVMIFDCEGLGLKHFWKPLVEVYQEFFGLLEENYPETLKFMLIVKATKLFPVGYNLMKPFLSEDTRRKIIVLGNNWKEGLLKLISPEELPAQFGGTLTDPDGNPKCLTKINYGGEIPKSMYVRDQVKTQYEHSVQINRGSSHQVEYEILFPGCVLRWQFSSDGADIGFGVFLKTKMGERQRAGEMTDVLPSQRYNAHMVPEDGNLTCSEAGVYVLRFDNTYSFVHAKKVSFTVEVLLPDEGMQKYDKELTPV

SEQ ID NO: 524 - protein, 252 aa, Homo sapiens
MACWPQLRLLLWKNLTFRRRQTCQLLLEVAWPLFIFLILISVRLSYPPYEQHECHFPNKAMPSAGTLPWVQGIICNANNPCFRYPTPGEAPGVVGNFNKSIVARLFSDARRLLLYSQKDTSMKDMRKVLRTLQQIKKSSSNLKLQDFLVDNETFSGFLYHNLSLPKSTVDKMLRADVILHKVFLQGYQLHLTSLCNGSKSEEMIQLGDQEVSELCGLPREKLAAAERVLRSNMDILKPILVSRLAHWRNFKH

SEQ ID NO: 525 - protein, 2201 aa, Homo sapiens [sequence omitted]

SEQ ID NO: 526 - protein, 363 aa, Homo sapiens
MACWPQLRLLLWKNLTFRRRQTCQLLLEVAWPLFIFLILISVRLSYPPYEQHECHFPNKAMPSAGTLPWVQGIICNANNPCFRYPTPGEAPGVVGNFNKSIVARLFSDARRLLLYSQKDTSMKDMRKVLRTLQQIKKSSSNLKLQDFLVDNETFSGFLYHNLSLPKSTVDKMLRADVILHKVFLQGYQLHLTSLCNGSKSEEMIQLGDQEVSELCGLPREKLAAAERVLRSNMDILKPILMDVTCDDIAHGQLTVPRSAAVAATGDAKPNMMGRETLLSICASVPKVEFHERHILKHFSFCVCVSVSLFPAKGIVSFSWASFRIWVLWKAVFWQHGESMAVWEGQLGLGLNIAFEYFTSIDVG

SEQ ID NO: 527 - protein, 2261 aa, Homo sapiens [sequence omitted]

SEQ ID NO: 528 - protein, 2201 aa, Homo sapiens [sequence omitted]

SEQ ID NO: 529 - protein, 210 aa, Homo sapiens
MAGHSMGRAVTERPPIQRGMETWTGGGRGYNPQHHQGLERPPRQKDVVTGVFSNRISGAPPSHSCPCVFSTNVGRGHGATLGHSSKGSSTGTDWSWVRTLASASNPSSTSPPAVAPRSSPSGSGSGSLSTVWGACVPSPFSASSSPSVPALSSSPADQTGTAAGDNISPSGGGAGKLGRRPGESGEKGRLVLEVVAAAGGGCCAERVPRA

SEQ ID NO: 530 - protein, 250 aa, Homo sapiens
MCDQQKQPQFPPSCVKGSGLGAGQGSNGASVKCPVPCQTQTVCVTGPAPCPTQTYVKYQVPCQTQTYVKCPAPCQRTYVKYPTPCQTYVKCPAPCQTTYVKCPTPCQTYVKCPAPCQMTYIKSPAPCQTQTCYVQGASPCQSYYVQAPASGSTSQYCVTDPCSAPCSTSYCCLAPRTFGVSPLRRWIQRPQNCNTGSSGCCENSGSSGCCGSGGCGCSCGCGSSGCCCLGIIPMRSRGPACCDHEDDCCC

SEQ ID NO: 531 - protein, 416 aa, Homo sapiens
MAALRYAGLDDTDSEDELPPGWEERTTKDGWVYYANHTEEKTQWEHPKTGKRKRVAGDLPYGWEQETDENGQVFFVDHINKRTTYLDPRLAFTVDDNPTKPTTRQRYDGSTTAMEILQGRDFTGKVVVVTGANSGIGFETAKSFALHGAHVILACRNMARASEAVSRILEEWHKAKVETMTLDLALLRSVQHFAEAFKAKNVPLHVLVCNAATFALPWSLTKDGLETTFQVNHLGHFYLVQLLQDVLCRSAPARVIVVSSESHRWRFTDINDSLGKLDFSRLSPTKNDYWAMLAYNRSKLCNILFSNELHRRLSPRGVTSNAVHPGNMMYSNIHRSWWVYTLLFTLARPFTKSMQQGAATTVYCAAVPELEGLGGMYFNNCCRCMPSPEAQSEETARTLWALSERLIQERLGSQSG

SEQ ID NO: 532 - protein, 287 aa, Homo sapiens
MPIFTFLSEQGTLKLPEKRTNGLRRTPKQVDPGLPKMQVIRNYSGTPPPALHEGPPLQLQAGDTVELLKGDAHSLFWQGRNLASGEVGFFPSDAVKPCPCVPKPVDYSCQPWYAGAMERLQAETELINRVNSTYLVRHRTKESGEYAISIKYNNEAKHIKILTRDGFFHIAENRKFKSLMELVEYYKHHSLKEGFRTLDTTLQFPYKEPEHSAGQRGNRAGNSLLSPKVLGIAIARYDFCARDMRELSLLKGDVVKIYTKMSANGWWRGEVNGRVGWFPSTYVEEDE

SEQ ID NO: 533 - protein, 847 aa, Homo sapiens
MEPWKQCAQWLIHCKVLPTNHRVTWDSAQVFDLAQTLRDGVLLCQLLNNLRAHSINLKEINLRPQMSQFLCLKNIRTFLTACCETFGMRKSELFEAFDLFDVRDFGKVIETLSRLSRTPIALATGIRPFPTEESINDEDIYKGLPDLIDETLVEDEEDLYDCVYGEDEGGEVYEDLMKAEEAHQPKCPENDIRSCCLAEIKQTEEKYTETLESIEKYFMAPLKRFLTAAEFDSVFINIPELVKLHRNLMQEIHDSIVNKNDQNLYQVFINYKERLVIYGQYCSGVESAISSLDYISKSKEDVKLKLEECSKRANNGKFTLRDLLVVPMQRVLKYHLLLQELVKHTTDPTEKANLKLALDAMKDLAQYVNEVKRDNETLREIKQFQLSIENLNQPVLLFGRPQGDGEIRITTLDKHTKQERHIFLFDLAVIVCKRKGDNYEMKEIIDLQQYKIANNPTTDKENKKWSYGFYLIHTQGQNGLEFYCKTKDLKKKWLEQFEMALSNIRPDYADSNFHDFKMHTFTRVTSCKVCQMLLRGTFYQGYLCFKCGARAHKECLGRVDNCGRVNSGEQGTLKLPEKRTNGLRRTPKQVDPGLPKMQVIRNYSGTPPPALHEGPPLQLQAGDTVELLKGDAHSLFWQGRNLASGEVGFFPSDAVKPCPCVPKPVDYSCQPWYAGAMERLQAETELINRVNSTYLVRHRTKESGEYAISIKYNNEAKHIKILTRDGFFHIAENRKFKSLMELVEYYKHHSLKEGFRTLDTTLQFPYKEPEHSAGQRGNRAGNSLLSPKVLGIAIARYDFCARDMRELSLLKGDVVKIYTKMSANGWWRGEVNGRVGWFPSTYVEEDE

SEQ ID NO: 534 - protein, 1899 aa, Homo sapiens
MKLRRQQQIERELNGYRAWIDKAEEVMLAEENKNAGTSALEVLRRATIKRSRTEAMTRDSSDEHCVDISSVGTPLARASIKSAKVDGVSYFRHKERLLRISIRHMVKSQVFYWIVLSLVALNTACVAIVHHNQPQWLTHLLYYAEFLFLGLFLLEMSLKMYGMGPRLYFHSSFNCFDFGVTVGSIFEVVWAIFRPGTSFGISVLRALRLLRIFKITKYWASLRNLVVSLMSSMKSIISLLFLLFLFIVVFALLGMQLFGGRFNFNDGTPSANFDTFPAAIMTVFQILTGEDWNEVMYNGIRSQGGVSSGMWSAIYFIVLTLFGNYTLLNVFLAIAVDNLANAQELTKDEQEEEEAFNQKHALQKAKEVSPMSAPNMPSIERDRRRRHHMSMWEPRSSHLRERRRRHHMSVWEQRTSQLRKHMQMSSQEALNREEAPTMNPLNPLNPLSSLNPLNAHPSLYRRPRAIEGLALGLALEKFEEERISRGGSLKGDGGDRSSALDNQRTPLSLGQREPPWLARPCHGNCDPTQQEAGGGEAVVTFEDRARHRQSQRRSRHRRVRTEGKESSSASRSRSASQERSLDEAMPTEGEKDHELRGNHGAKEPTIQEERAQDLRRTNSLMVSRGSGLAGGLDEADTPLVLPHPELEVGKHVVLTEQEPEGSSEQALLGNVQLDMGRVISQSEPDLSCITANTDKATTESTSVTVAIPDVDPLVDSTVVHISNKTDGEASPLKEAEIREDEEEVEKKKQKKEKRETGKAMVPHSSMFIFSTTNPIRRACHYIVNLRYFEMCILLVIAASSIALAAEDPVLTNSERNKVLRYFDYVFTGVFTFEMVIKMIDQGLILQDGSYFRDLWNILDFVVVVGALVAFALATNKGRDIKTIKSLRVLRVLRPLKTIKRLPKLKAVFDCVVTSLKNVFNILIVYKLFMFIFAVIAVQLFKGKFFYCTDSSKDTEKECIGNYVDHEKNKMEVKGREWKRHEFHYDNIIWALLTLFTVSTGEGWPQVLQHSVDVTEEDRGPSRSNRMEMSIFYVVYFVVFPFFFVNIFVALIIITFQEQGDKMMEECSLEKNERACIDFAISAKPLTRYMPQNRHTFQYRVWHFVVSPSFEYTIMAMIALNTVVLMMKYYSAPCTYELALKYLNIAFTMVFSLECVLKVIAFGFLNYFRDTWNIFDFITVIGSITEIILTDSKLVNTSGFNMSFLKLFRAARLIKLLRQGYTIRILLWTFVQSFKALPYVCLLIAMLFFIYAIIGMQVFGNIKLDEESHINRHNNFRSFFGSLMLLFRSATGEAWQEIMLSCLGEKGCEPDTTAPSGQNENERCGTDLAYVYFVSFIFFCSFLMLNLFVAVIMDNFEYLTRDSSILGPHHLDEFVRVWAEYDRAACGRIHYTEMYEMLTLMSPPLGLGKRCPSKVAYKRLVLMNMPVAEDMTVHFTSTLMALIRTALDIKIAKGGADRQQLDSELQKETLAIWPHLSQKMLDLLVPMPKASDLTVGKIYAAMMIMDYYKQSKVKKQRQQLEEQKNAPMFQRMEPSSLPQEIIANAKALPYLQQDPVSGLSGRSGYPSMSPLSPQDIFQLACMDPADDGQFQERQSLVVTDPSSMRRSFSTIRDKRSNSSWLEEFSMERSSENTYKSRRRSYHSSLRLSAHRLNSDSGHKSDTHRSGGRERGRSKERKHLLSPDVSRCNSEERGTQADWESPERRQSRSPSEGRSQTPNRQGTGSLSESSIPSVSDTSTPRRSRRQLPPVPPKPRPLLSYSSLIRHAGSISPPADGSEEGSPLTSQALESNNACLTESSNSPHPQQSQHASPQRYISEPYLALHEDSHASDCGEEETLTFEAAVATSLGRSNTIGSAPPLRHSWQMPNGHYRRRRRGGPGPGMMCGAVNNLLSDTEEDDKC

SEQ ID NO: 535 - protein, 1147 aa, Homo sapiens
MILATIIANCIVLALEQHLPEDDKTPMSRRLEKTEPYFIGIFCFEAGIKIVALGFIFHKGSYLRNGWNVMDFIVVLSGILATAGTHFNTHVDLRTLRAVRVLRPLKLVSGIPSLQIVLKSIMKAMVPLLQIGLLLFFAILMFAIIGLEFYSGKLHRACFMNNSGILEGFDPPHPCGVQGCPAGYECKDWIGPNDGITQFDNILFAVLTVFQCITMEGWTTVLYNTNDALGATWNWLYFIPLIIIGSFFVLNLVLGVLSGEFAKERERVENRRAFMKLRRQQQIERELNGYRAWIDKAEEVMLAEENKNAGTSALEVLRRATIKRSRTEAMTRDSSDEHCVDISSVGTPLARASIKSAKVDGVSYFRHKERLLRISIRHMVKSQVFYWIVLSLVALNTACVAIVHHNQPQWLTHLLYYAEFLFLGLFLLEMSLKMYGMGPRLYFHSSFNCFDFGVTVGSIFEVVWAIFRPGTSFGISVLRALRLLRIFKITKYWASLRNLVVSLMSSMKSIISLLFLLFLFIVVFALLGMQLFGGRFNFNDGTPSANFDTFPAAIMTVFQILTGEDWNEVMYNGIRSQGGVSSGMWSAIYFIVLTLFGNYTLLNVFLAIAVDNLANAQELTKDEQEEEEAFNQKHALQKAKEVSPMSAPNMPSIERDRRRRHHMSMWEPRSSHLRERRRRHHMSVWEQRTSQLRKHMQMSSQEALNREEAPTMNPLNPLNPLSSLNPLNAHPSLYRRPRAIEGLALGLALEKFEEERISRGGSLKGDGGDRSSALDNQRTPLSLGQREPPWLARPCHGNCDPTQQEAGGGEAVVTFEDRARHRQSQRRSRHRRVRTEGKESSSASRSRSASQERSLDEAMPTEGEKDHELRGNHGAKEPTIQEERAQDLRRTNSLMVSRGSGLAGGLDEADTPLVLPHPELEVGKHVVLTEQEPEGSSEQALLGNVQLDMGRVISQSEPDLSCITANTDKATTESTSVTVAIPDVDPLVDSTVVHISNKTDGEASPLKEAEIREDEEEVEKKKQKKEKRETGKAMVPHSSMFIFSTTNPIRRACHYIVNLRYFEMCILLVIAASSIALAAEDPVLTNSERNKVLRYFDYVFTGVFTFEMVIKMIDQGLILQDGSYFRDLWNILDFVVVVGALVAFALA

SEQ ID NO: 536 - protein, 1381 aa, Homo sapiens
MRGLSPDRRLPEPAPCPAAGSPEPRSAGRRQRHVLALPEEEAWRPQQCALLEADASDEVGMLPASPRAASGFDNFFQVQEGEGQGWEGAMALEAGSSPFLPVSPEVMKRRRGGLIEQRDIIKAHEAHKMQSTPQARRKEWEMARFGEAVVARPGSGDGDSDQSRNRQGTPVPASGQAAAYKQTKAQRARTMALYNPIPVRQNCFTVNRSLFIFGEDNIVRKYAKKLIDWPPFEYMILATIIANCIVLALEQHLPEDDKTPMSRRLEKTEPYFIGIFCFEAGIKIVALGFIFHKGSYLRNGWNVMDFIVVLSGILATAGTHFNTHVDLRTLRAVRVLRPLKLVSGIPSLQIVLKSIMKAMVPLLQIGLLLFFAILMFAIIGLEFYSGKLHRACFMNNSGILEGFDPPHPCGVQGCPAGYECKDWIGPNDGITQFDNILFAVLTVFQCITMEGWTTVLYNTNDALGATWNWLYFIPLIIIGSFFVLNLVLGVLSGEFAKERERVENRRAFMKLRRQQQIERELNGYRAWIDKAEEVMLAEENKNAGTSALEVLRRATIKRSRTEAMTRDSSDEHCVDISSVGTPLARASIKSAKVDGVSYFRHKERLLRISIRHMVKSQVFYWIVLSLVALNTACVAIVHHNQPQWLTHLLYYAEFLFLGLFLLEMSLKMYGMGPRLYFHSSFNCFDFGVTVGSIFEVVWAIFRPGTSFGISVLRALRLLRIFKITKYWASLRNLVVSLMSSMKSIISLLFLLFLFIVVFALLGMQLFGGRFNFNDGTPSANFDTFPAAIMTVFQILTGEDWNEVMYNGIRSQGGVSSGMWSAIYFIVLTLFGNYTLLNVFLAIAVDNLANAQELTKDEQEEEEAFNQKHALQKAKEVSPMSAPNMPSIERDRRRRHHMSMWEPRSSHLRERRRRHHMSVWEQRTSQLRKHMQMSSQEALNREEAPTMNPLNPLNPLSSLNPLNAHPSLYRRPRAIEGLALGLALEKFEEERISRGGSLKGDGGDRSSALDNQRTPLSLGQREPPWLARPCHGNCDPTQQEAGGGEAVVTFEDRARHRQSQRRSRHRRVRTEGKESSSASRSRSASQERSLDEAMPTEGEKDHELRGNHGAKEPTIQEERAQDLRRTNSLMVSRGSGLAGGLDEADTPLVLPHPELEVGKHVVLTEQEPEGSSEQALLGNVQLDMGRVISQSEPDLSCITANTDKATTESTSVTVAIPDVDPLVDSTVVHISNKTDGEASPLKEAEIREDEEEVEKKKQKKEKRETGKAMVPHSSMFIFSTTNPIRRACHYIVNLRYFEMCILLVIAASSIALAAEDPVLTNSERNKVLRYFDYVFTGVFTFEMVIKMIDQGLILQDGSYFRDLWNILDFVVVVGALVAFALA

SEQ ID NO: 537 - protein, 1381 aa, Homo sapiens; identical to SEQ ID NO: 536

SEQ ID NO: 538 - protein, 1942 aa, Homo sapiens
MKLRRQQQIERELNGYRAWIDKAEEVMLAEENKNAGTSALEVLRRATIKRSRTEAMTRDSSDEHCVDISSVGTPLARASIKSAKVDGVSYFRHKERLLRISIRHMVKSQVFYWIVLSLVALNTACVAIVHHNQPQWLTHLLYYAEFLFLGLFLLEMSLKMYGMGPRLYFHSSFNCFDFGVTVGSIFEVVWAIFRPGTSFGISVLRALRLLRIFKITKYWASLRNLVVSLMSSMKSIISLLFLLFLFIVVFALLGMQLFGGRFNFNDGTPSANFDTFPAAIMTVFQILTGEDWNEVMYNGIRSQGGVSSGMWSAIYFIVLTLFGNYTLLNVFLAIAVDNLANAQELTKDEQEEEEAFNQKHALQKAKEVSPMSAPNMPSIERDRRRRHHMSMWEPRSSHLRERRRRHHMSVWEQRTSQLRKHMQMSSQEALNREEAPTMNPLNPLNPLSSLNPLNAHPSLYRRPRAIEGLALGLALEKFEEERISRGGSLKGDGGDRSSALDNQRTPLSLGQREPPWLARPCHGNCDPTQQEAGGGEAVVTFEDRARHRQSQRRSRHRRVRTEGKESSSASRSRSASQERSLDEAMPTEGEKDHELRGNHGAKEPTIQEERAQDLRRTNSLMVSRGSGLAGGLDEADTPLVLPHPELEVGKHVVLTEQEPEGSSEQALLGNVQLDMGRVISQSEPDLSCITANTDKATTESTSVTVAIPDVDPLVDSTVVHISNKTDGEASPLKEAEIREDEEEVEKKKQKKEKRETGKAMVPHSSMFIFSTTNPIRRACHYIVNLRYFEMCILLVIAASSIALAAEDPVLTNSERNKVLRYFDYVFTGVFTFEMVIKMIDQGLILQDGSYFRDLWNILDFVVVVGALVAFALATNKGRDIKTIKSLRVLRVLRPLKTIKRLPKLKAVFDCVVTSLKNVFNILIVYKLFMFIFAVIAVQLFKGKFFYCTDSSKDTEKECIGNYVDHEKNKMEVKGREWKRHEFHYDNIIWALLTLFTVSTGEGWPQVLQHSVDVTEEDRGPSRSNRMEMSIFYVVYFVVFPFFFVNIFVALIIITFQEQGDKMMEECSLEKNERACIDFAISAKPLTRYMPQNRHTFQYRVWHFVVSPSFEYTIMAMIALNTVVLMMKYYSAPCTYELALKYLNIAFTMVFSLECVLKVIAFGFLNYFRDTWNIFDFITVIGSITEIILTDSKLVNTSGFNMSFLKLFRAARLIKLLRQGYTIRILLWTFVQSFKALPYVCLLIAMLFFIYAIIGMQVFGNIKLDEESHINRHNNFRSFFGSLMLLFRSATGEAWQEIMLSCLGEKGCEPDTTAPSGQNENERCGTDLAYVYFVSFIFFCSFLMLNLFVAVIMDNFEYLTRDSSILGPHHLDEFVRVWAEYDRAACGRIHYTEMYEMLTLMSPPLGLGKRCPSKVAYKRLVLMNMPVAEDMTVHFTSTLMALIRTALDIKIAKGGADRQQLDSELQKETLAIWPHLSQKMLDLLVPMPKASDLTVGKIYAAMMIMDYYKQSKVKKQRQQLEEQKNAPMFQRMEPSSLPQEIIANAKALPYLQQDPVSGLSGRSGYPSMSPLSPQDIFQLACMDPADDGQFQERQSLEPEVSELKSVQPSNHGIYLPSDTQEHAGSGRASSMPRLTVDPQVVTDPSSMRRSFSTIRDKRSNSSWLEEFSMERSSENTYKSRRRSYHSSLRLSAHRLNSDSGHKSDTHRSGGRERGRSKERKHLLSPDVSRCNSEERGTQADWESPERRQSRSPSEGRSQTPNRQGTGSLSESSIPSVSDTSTPRRSRRQLPPVPPKPRPLLSYSSLIRHAGSISPPADGSEEGSPLTSQALESNNACLTESSNSPHPQQSQHASPQRYISEPYLALHEDSHASDCGEEETLTFEAAVATSLGRSNTIGSAPPLRHSWQMPNGHYRRRRRGGPGPGMMCGAVNNLLSDTEEDDKC

SEQ ID NO: 539 - protein, 1362 aa, Homo sapiens
MRGLSPDRRLPEPAPCPAAGSPEPRSAGRRQRHVLALPEEEAWRPQQCALLEADASDEVGMLPASPRAASGFDNFFQVQEGEGQGWEGAMALEAGSSPFLPVSPEVMKRRRGGLIEQRDIIKAHEAHKMQSTPQARRKEWEMARFGEAVVARPGSGDGDSDQSRNRQGTPVPASGQAAAYKQTKAQRARTMALYNPIPVRQNCFTVNRSLFIFGEDNIVRKYAKKLIDWPPFEYMILATIIANCIVLALEQHLPEDDKTPMSRRLEKTEPYFIGIFCFEAGIKIVALGFIFHKGSYLRNGWNVMDFIVVLSGILATAGTHFNTHVDLRTLRAVRVLRPLKLVSGIPSLQIVLKSIMKAMVPLLQIGLLLFFAILMFAIIGLEFYSGKLHRACFMNNSGILEGFDPPHPCGVQGCPAGYECKDWIGPNDGITQFDNILFAVLTVFQCITMEGWTTVLYNTNDALGATWNWLYFIPLIIIGSFFVLNLVLGVLSGEFAKERERVENRRAFMKLRRQQQIERELNGYRAWIDKAEEVMLAEENKNAGTSALEVLRRATIKRSRTEAMTRDSSDEHCVDISSVGTPLARASIKSAKVDGVSYFRHKERLLRISIRHMVKSQVFYWIVLSLVALNTACVAIVHHNQPQWLTHLLYYAEFLFLGLFLLEMSLKMYGMGPRLYFHSSFNCFDFGVTVGSIFEVVWAIFRPGTSFGISVLRALRLLRIFKITKYWASLRNLVVSLMSSMKSIISLLFLLFLFIVVFALLGMQLFGGRFNFNDGTPSANFDTFPAAIMTVFQILTGEDWNEVMYNGIRSQGGVSSGMWSAIYFIVLTLFGNYTLLNVFLAIAVDNLANAQELTKDEQEEEEAFNQKHALQKAKEVSPMSAPNMPSIERERRRRHHMSVWEQRTSQLRKHMQMSSQEALNREEAPTMNPLNPLNPLSSLNPLNAHPSLYRRPRAIEGLALGLALEKFEEERISRGGSLKGDGGDRSSALDNQRTPLSLGQREPPWLARPCHGNCDPTQQEAGGGEAVVTFEDRARHRQSQRRSRHRRVRTEGKESSSASRSRSASQERSLDEAMPTEGEKDHELRGNHGAKEPTIQEERAQDLRRTNSLMVSRGSGLAGGLDEADTPLVLPHPELEVGKHVVLTEQEPEGSSEQALLGNVQLDMGRVISQSEPDLSCITANTDKATTESTSVTVAIPDVDPLVDSTVVHISNKTDGEASPLKEAEIREDEEEVEKKKQKKEKRETGKAMVPHSSMFIFSTTNPIRRACHYIVNLRYFEMCILLVIAASSIALAAEDPVLTNSERNKVLRYFDYVFTGVFTFEMVIKMIDQGLILQDGSYFRDLWNILDFVVVVGALVAFALA

SEQ ID NO: 540 - protein, 1880 aa, Homo sapiens
MKLRRQQQIERELNGYRAWIDKAEEVMLAEENKNAGTSALEVLRRATIKRSRTEAMTRDSSDEHCVDISSVGTPLARASIKSAKVDGVSYFRHKERLLRISIRHMVKSQVFYWIVLSLVALNTACVAIVHHNQPQWLTHLLYYAEFLFLGLFLLEMSLKMYGMGPRLYFHSSFNCFDFGVTVGSIFEVVWAIFRPGTSFGISVLRALRLLRIFKITKYWASLRNLVVSLMSSMKSIISLLFLLFLFIVVFALLGMQLFGGRFNFNDGTPSANFDTFPAAIMTVFQILTGEDWNEVMYNGIRSQGGVSSGMWSAIYFIVLTLFGNYTLLNVFLAIAVDNLANAQELTKDEQEEEEAFNQKHALQKAKEVSPMSAPNMPSIERERRRRHHMSVWEQRTSQLRKHMQMSSQEALNREEAPTMNPLNPLNPLSSLNPLNAHPSLYRRPRAIEGLALGLALEKFEEERISRGGSLKGDGGDRSSALDNQRTPLSLGQREPPWLARPCHGNCDPTQQEAGGGEAVVTFEDRARHRQSQRRSRHRRVRTEGKESSSASRSRSASQERSLDEAMPTEGEKDHELRGNHGAKEPTIQEERAQDLRRTNSLMVSRGSGLAGGLDEADTPLVLPHPELEVGKHVVLTEQEPEGSSEQALLGNVQLDMGRVISQSEPDLSCITANTDKATTESTSVTVAIPDVDPLVDSTVVHISNKTDGEASPLKEAEIREDEEEVEKKKQKKEKRETGKAMVPHSSMFIFSTTNPIRRACHYIVNLRYFEMCILLVIAASSIALAAEDPVLTNSERNKVLRYFDYVFTGVFTFEMVIKMIDQGLILQDGSYFRDLWNILDFVVVVGALVAFALATNKGRDIKTIKSLRVLRVLRPLKTIKRLPKLKAVFDCVVTSLKNVFNILIVYKLFMFIFAVIAVQLFKGKFFYCTDSSKDTEKECIGNYVDHEKNKMEVKGREWKRHEFHYDNIIWALLTLFTVSTGEGWPQVLQHSVDVTEEDRGPSRSNRMEMSIFYVVYFVVFPFFFVNIFVALIIITFQEQGDKMMEECSLEKNERACIDFAISAKPLTRYMPQNRHTFQYRVWHFVVSPSFEYTIMAMIALNTVVLMMKYYSAPCTYELALKYLNIAFTMVFSLECVLKVIAFGFLNYFRDTWNIFDFITVIGSITEIILTDSKLVNTSGFNMSFLKLFRAARLIKLLRQGYTIRILLWTFVQSFKALPYVCLLIAMLFFIYAIIGMQVFGNIKLDEESHINRHNNFRSFFGSLMLLFRSATGEAWQEIMLSCLGEKGCEPDTTAPSGQNENERCGTDLAYVYFVSFIFFCSFLMLNLFVAVIMDNFEYLTRDSSILGPHHLDEFVRVWAEYDRAACGRIHYTEMYEMLTLMSPPLGLGKRCPSKVAYKRLVLMNMPVAEDMTVHFTSTLMALIRTALDIKIAKGGADRQQLDSELQKETLAIWPHLSQKMLDLLVPMPKASDLTVGKIYAAMMIMDYYKQSKVKKQRQQLEEQKNAPMFQRMEPSSLPQEIIANAKALPYLQQDPVSGLSGRSGYPSMSPLSPQDIFQLACMDPADDGQFQERQSLVVTDPSSMRRSFSTIRDKRSNSSWLEEFSMERSSENTYKSRRRSYHSSLRLSAHRLNSDSGHKSDTHRSGGRERGRSKERKHLLSPDVSRCNSEERGTQADWESPERRQSRSPSEGRSQTPNRQGTGSLSESSIPSVSDTSTPRRSRRQLPPVPPKPRPLLSYSSLIRHAGSISPPADGSEEGSPLTSQALESNNACLTESSNSPHPQQSQHASPQRYISEPYLALHEDSHASDCGEEETLTFEAAVATSLGRSNTIGSAPPLRHSWQMPNGHYRRRRRGGPGPGMMCGAVNNLLSDTEEDDKC

SEQ ID NO: 541 - protein, 39 aa, Homo sapiens
MLLFSMVCKTFETIEIFLNNNFQILLNTSIVLINVLIMR

SEQ ID NO: 542 - protein, 1306 aa, Homo sapiens
MTMYLWLKLLAFGFAFLDTEVFVTGQSPTPSPTGLTTAKMPSVPLSSDPLPTHTTAFSPASTFERENDFSETTTSLSPDNTSTQVSPDSLDNASAFNTTGVSSVQTPHLPTHADSQTPSAGTDTQTFSGSAANAKLNPTPGSNAISDVPGERSTASTFPTDPVSPLTTTLSLAHHSSAALPARTSNTTITANTSDAYLNASETTTLSPSGSAVISTTTIATTPSKPTCDEKYANITVDYLYNKETKLFTAKLNVNENVECGNNTCTNNEVHNLTECKNASVSISHNSCTAPDKTLILDVPPGVEKFQLHDCTQVEKADTTICLKWKNIETFTCDTQNITYRFQCGNMIFDNKEIKLENLEPEHEYKCDSEILYNNHKFTNASKIIKTDFGSPGEPQIIFCRSEAAHQGVITWNPPQRSFHNFTLCYIKETEKDCLNLDKNLIKYDLQNLKPYTKYVLSLHAYIIAKVQRNGSAAMCHFTTKSAPPSQVWNMTVSMTSDNSMHVKCRPPRDRNGPHERYHLEVEAGNTLVRNESHKNCDFRVKDLQYSTDYTFKAYFHNGDYPGEPFILHHSTSYNSKALIAFLAFLIIVTSIALLVVLYKIYDLHKKRSCNLDEQQELVERDDEKQLMNVEPIHADILLETYKRKIADEGRLFLAEFQSIPRVFSKFPIKEARKPFNQNKNRYVDILPYDYNRVELSEINGDAGSNYINASYIDGFKEPRKYIAAQGPRDETVDDFWRMIWEQKATVIVMVTRCEEGNRNKCAEYWPSMEEGTRAFGDVVVKINQHKRCPDYIIQKLNIVNKKEKATGREVTHIQFTSWPDHGVPEDPHLLLKLRRRVNAFSNFFSGPIVVHCSAGVGRTGTYIGIDAMLEGLEAENKVDVYGYVVKLRRQRCLMVQVEAQYILIHQALVEYNQFGETEVNLSELHPYLHNMKKRDPPSEPSPLEAEFQRLPSYRSWRTQHIGNQEENKSKNRNSNVIPYDYNRVPLKHELEMSKESEHDSDESSDDDSDSEEPSKYINASFIMSYWKPEVMIAAQGPLKETIGDFWQMIFQRKVKVIVMLTELKHGDQEICAQYWGEGKQTYGDIEVDLKDTDKSSTYTLRVFELRHSKRKDSRTVYQYQYTNWSVEQLPAEPKELISMIQVVKQKLPQKNSSEGNKHHKSTPLLIHCRDGSQQTGIFCALLNLLESAETEEVVDIFQVVKALRKARPGMVSTFEQYQFLYDVIASTYPAQNGQVKKNNHQEDKIEFDNEVDKVKQDANCVNPLGAPEKLPEAKEQAEGSEPTSGTEGPEHSVNGPASPALNQGS

SEQ ID NO: 543 - protein, 1258 aa, Homo sapiens
MTMYLWLKLLAFGFAFLDTEVFVTGQSPTPSPTGLTTAKMPSVPLSSDPLPTHTTAFSPASTFERENDFSETTTSLSPDNTSTQVSPDSLDNASAFNTTGVSSVQTPHLPTHADSQTPSAGTDTQTFSGSAANAKLNPTPGSNAISDAYLNASETTTLSPSGSAVISTTTIATTPSKPTCDEKYANITVDYLYNKETKLFTAKLNVNENVECGNNTCTNNEVHNLTECKNASVSISHNSCTAPDKTLILDVPPGVEKFQLHDCTQVEKADTTICLKWKNIETFTCDTQNITYRFQCGNMIFDNKEIKLENLEPEHEYKCDSEILYNNHKFTNASKIIKTDFGSPGEPQIIFCRSEAAHQGVITWNPPQRSFHNFTLCYIKETEKDCLNLDKNLIKYDLQNLKPYTKYVLSLHAYIIAKVQRNGSAAMCHFTTKSAPPSQVWNMTVSMTSDNSMHVKCRPPRDRNGPHERYHLEVEAGNTLVRNESHKNCDFRVKDLQYSTDYTFKAYFHNGDYPGEPFILHHSTSYNSKALIAFLAFLIIVTSIALLVVLYKIYDLHKKRSCNLDEQQELVERDDEKQLMNVEPIHADILLETYKRKIADEGRLFLAEFQSIPRVFSKFPIKEARKPFNQNKNRYVDILPYDYNRVELSEINGDAGSNYINASYIDGFKEPRKYIAAQGPRDETVDDFWRMIWEQKATVIVMVTRCEEGNRNKCAEYWPSMEEGTRAFGDVVVKINQHKRCPDYIIQKLNIVNKKEKATGREVTHIQFTSWPDHGVPEDPHLLLKLRRRVNAFSNFFSGPIVVHCSAGVGRTGTYIGIDAMLEGLEAENKVDVYGYVVKLRRQRCLMVQVEAQYILIHQALVEYNQFGETEVNLSELHPYLHNMKKRDPPSEPSPLEAEFQRLPSYRSWRTQHIGNQEENKSKNRNSNVIPYDYNRVPLKHELEMSKESEHDSDESSDDDSDSEEPSKYINASFIMSYWKPEVMIAAQGPLKETIGDFWQMIFQRKVKVIVMLTELKHGDQEICAQYWGEGKQTYGDIEVDLKDTDKSSTYTLRVFELRHSKRKDSRTVYQYQYTNWSVEQLPAEPKELISMIQVVKQKLPQKNSSEGNKHHKSTPLLIHCRDGSQQTGIFCALLNLLESAETEEVVDIFQVVKALRKARPGMVSTFEQYQFLYDVIASTYPAQNGQVKKNNHQEDKIEFDNEVDKVKQDANCVNPLGAPEKLPEAKEQAEGSEPTSGTEGPEHSVNGPASPALNQGS

SEQ ID NO: 544 - protein, 1267 aa, Homo sapiens
MPSVPLSSDPLPTHTTAFSPASTFERENDFSETTTSLSPDNTSTQVSPDSLDNASAFNTTGVSSVQTPHLPTHADSQTPSAGTDTQTFSGSAANAKLNPTPGSNAISDVPGERSTASTFPTDPVSPLTTTLSLAHHSSAALPARTSNTTITANTSDAYLNASETTTLSPSGSAVISTTTIATTPSKPTCDEKYANITVDYLYNKETKLFTAKLNVNENVECGNNTCTNNEVHNLTECKNASVSISHNSCTAPDKTLILDVPPGVEKFQLHDCTQVEKADTTICLKWKNIETFTCDTQNITYRFQCGNMIFDNKEIKLENLEPEHEYKCDSEILYNNHKFTNASKIIKTDFGSPGEPQIIFCRSEAAHQGVITWNPPQRSFHNFTLCYIKETEKDCLNLDKNLIKYDLQNLKPYTKYVLSLHAYIIAKVQRNGSAAMCHFTTKSAPPSQVWNMTVSMTSDNSMHVKCRPPRDRNGPHERYHLEVEAGNTLVRNESHKNCDFRVKDLQYSTDYTFKAYFHNGDYPGEPFILHHSTSYNSKALIAFLAFLIIVTSIALLVVLYKIYDLHKKRSCNLDEQQELVERDDEKQLMNVEPIHADILLETYKRKIADEGRLFLAEFQSIPRVFSKFPIKEARKPFNQNKNRYVDILPYDYNRVELSEINGDAGSNYINASYIDGFKEPRKYIAAQGPRDETVDDFWRMIWEQKATVIVMVTRCEEGNRNKCAEYWPSMEEGTRAFGDVVVKINQHKRCPDYIIQKLNIVNKKEKATGREVTHIQFTSWPDHGVPEDPHLLLKLRRRVNAFSNFFSGPIVVHCSAGVGRTGTYIGIDAMLEGLEAENKVDVYGYVVKLRRQRCLMVQVEAQYILIHQALVEYNQFGETEVNLSELHPYLHNMKKRDPPSEPSPLEAEFQRLPSYRSWRTQHIGNQEENKSKNRNSNVIPYDYNRVPLKHELEMSKESEHDSDESSDDDSDSEEPSKYINASFIMSYWKPEVMIAAQGPLKETIGDFWQMIFQRKVKVIVMLTELKHGDQEICAQYWGEGKQTYGDIEVDLKDTDKSSTYTLRVFELRHSKRKDSRTVYQYQYTNWSVEQLPAEPKELISMIQVVKQKLPQKNSSEGNKHHKSTPLLIHCRDGSQQTGIFCALLNLLESAETEEVVDIFQVVKALRKARPGMVSTFEQYQFLYDVIASTYPAQNGQVKKNNHQEDKIEFDNEVDKVKQDANCVNPLGAPEKLPEAKEQAEGSEPTSGTEGPEHSVNGPASPALNQGS

SEQ ID NO: 545 - protein, 960 aa, Homo sapiens
MIFDNKEIKLENLEPEHEYKCDSEILYNNHKFTNASKIIKTDFGSPGEPQIIFCRSEAAHQGVITWNPPQRSFHNFTLCYIKETEKDCLNLDKNLIKYDLQNLKPYTKYVLSLHAYIIAKVQRNGSAAMCHFTTKSAPPSQVWNMTVSMTSDNSMHVKCRPPRDRNGPHERYHLEVEAGNTLVRNESHKNCDFRVKDLQYSTDYTFKAYFHNGDYPGEPFILHHSTSYNSKALIAFLAFLIIVTSIALLVVLYKIYDLHKKRSCNLDEQQELVERDDEKQLMNVEPIHADILLETYKRKIADEGRLFLAEFQSIPRVFSKFPIKEARKPFNQNKNRYVDILPYDYNRVELSEINGDAGSNYINASYIDGFKEPRKYIAAQGPRDETVDDFWRMIWEQKATVIVMVTRCEEGNRNKCAEYWPSMEEGTRAFGDVVVKINQHKRCPDYIIQKLNIVNKKEKATGREVTHIQFTSWPDHGVPEDPHLLLKLRRRVNAFSNFFSGPIVVHCSAGVGRTGTYIGIDAMLEGLEAENKVDVYGYVVKLRRQRCLMVQVEAQYILIHQALVEYNQFGETEVNLSELHPYLHNMKKRDPPSEPSPLEAEFQRLPSYRSWRTQHIGNQEENKSKNRNSNVIPYDYNRVPLKHELEMSKESEHDSDESSDDDSDSEEPSKYINASFIMSYWKPEVMIAAQGPLKETIGDFWQMIFQRKVKVIVMLTELKHGDQEICAQYWGEGKQTYGDIEVDLKDTDKSSTYTLRVFELRHSKRKDSRTVYQYQYTNWSVEQLPAEPKELISMIQVVKQKLPQKNSSEGNKHHKSTPLLIHCRDGSQQTGIFCALLNLLESAETEEVVDIFQVVKALRKARPGMVSTFEQYQFLYDVIASTYPAQNGQVKKNNHQEDKIEFDNEVDKVKQDANCVNPLGAPEKLPEAKEQAEGSEPTSGTEGPEHSVNGPASPALNQGS

SEQ ID NO: 546 - protein, 1219 aa, Homo sapiens [sequence omitted]

SEQ ID NO: 547 - protein, 586 aa, Homo sapiens
MSAGDAVCTGWLVKSPPERKLQRYAWRKRWFVLRRGRMSGNPDVLEYYRNKHSSKPIRVIDLSECAVWKHVGPSFVRKEFQNNFVFIVKTTSRTFYLVAKTEQEMQVWVHSISQVCNLGHLEDGADSMESLSYTPSSLQPSSASSLLTAHAASSSLPRDDPNTNAVATEETRSESELLFLPDYLVLSNCETGRLHHTSLPTRCDSWSNSDRSLEQASFDDVFVDCLQPLPSSHLVHPSCHGSGAQEVPSSRPQAALIWSREINGPPRDHLSSSPLLESSLSSTIQVDKNQGSLPCGAKELDIMSNTPPPRPPKPSHLSERRQEEWSTHSGSKKPECTLVPRRISLSGLDNMRTWKADVEGQSLRHRDKRLSLNLPCRFSPMYPTASASIEDSYVPMSPQAGASGLGPHCSPDDYIPMNSGSISSPLPELPANLEPPPVNRDLKPQRKSRPPPLDLRNLSIIREHASLTRTRTVPCSRTSFLSPERNGINSARFFANPVSREDEESYIEMEEHRTASSLSSGALTWTKKFSLDYLALDFNSASPAPMQQKLLLSEEQRVDYVQVDEQKTQALQSTKQEWTDERQSKV

SEQ ID NO: 548 - protein, 942 aa, Homo sapiens [sequence omitted]

SEQ ID NO: 549 - protein, 503 aa, Homo sapiens
MALAPERAAPRVLFGEWLLGEISSGCYEGLQWLDEARTCFRVPWKHFARKDLSEADARIFKAWAVARGRWPPSSRGGGPPPEAETAERAGWKTNFRCALRSTRRFVMLRDNSGDPADPHKVYALSRELCWREGPGTDQTEAEAPAAVPPPQGGPPGPFLAHTHAGLQAPGPLPAPAGDKGDLLLQAVQQSCLADHLLTASWGADPVPTKAPGEGQEGLPLTGACAGGPGLPAGELYGWAVETTPSPGPQPAALTTGEAAAPESPHQAEPYLSPSPSACTAVQEPSPGALDVTIMYKGRTVLQKVVGHPSCTFLYGPPDPAVRATDPQQVAFPSPAELPDQKQLRYTEELLRHVAPGLHLELRGPQLWARRMGKCKVYWEVGGPPGSASPSTPACLLPRNCDTPIFDFRVFFQELVEFRARQRRGSPRYTIYLGFGQDLSAGRPKEKSLVLVKLEPWLCRVHLEGTQREGVSSLDSSSLSLCLSSANSLYDDIECFLMELEQPA

SEQ ID NO: 550 - protein, 474 aa, Homo sapiens
MALAPERAAPRVLFGEWLLGEISSGCYEGLQWLDEARTCFRVPWKHFARKDLSEADARIFKAWAVARGRWPPSSRGGGPPPEAETAERAGWKTNFRCALRSTRRFVMLRDNSGDPADPHKVYALSRELCWREGPGTDQTEAEAPAAVPPPQGGPPGPFLAHTHAGLQAPGPLPAPAGDKGDLLLQAVQQSCLADHLLTASWGADPVPTKAPGEGQEGLPLTGACAGGEAAAPESPHQAEPYLSPSPSACTAVQEPSPGALDVTIMYKGRTVLQKVVGHPSCTFLYGPPDPAVRATDPQQVAFPSPAELPDQKQLRYTEELLRHVAPGLHLELRGPQLWARRMGKCKVYWEVGGPPGSASPSTPACLLPRNCDTPIFDFRVFFQELVEFRARQRRGSPRYTIYLGFGQDLSAGRPKEKSLVLVKLEPWLCRVHLEGTQREGVSSLDSSSLSLCLSSANSLYDDIECFLMELEQPA

SEQ ID NO: 551 - protein, 474 aa, Homo sapiens; identical to SEQ ID NO: 550

SEQ ID NO: 552 - protein, 516 aa, Homo sapiens
MPVPERPAAGPDSPRPGTRRAAPRVLFGEWLLGEISSGCYEGLQWLDEARTCFRVPWKHFARKDLSEADARIFKAWAVARGRWPPSSRGGGPPPEAETAERAGWKTNFRCALRSTRRFVMLRDNSGDPADPHKVYALSRELCWREGPGTDQTEAEAPAAVPPPQGGPPGPFLAHTHAGLQAPGPLPAPAGDKGDLLLQAVQQSCLADHLLTASWGADPVPTKAPGEGQEGLPLTGACAGGPGLPAGELYGWAVETTPSPGPQPAALTTGEAAAPESPHQAEPYLSPSPSACTAVQEPSPGALDVTIMYKGRTVLQKVVGHPSCTFLYGPPDPAVRATDPQQVAFPSPAELPDQKQLRYTEELLRHVAPGLHLELRGPQLWARRMGKCKVYWEVGGPPGSASPSTPACLLPRNCDTPIFDFRVFFQELVEFRARQRRGSPRYTIYLGFGQDLSAGRPKEKSLVLVKLEPWLCRVHLEGTQREGVSSLDSSSLSLCLSSANSLYDDIECFLMELEQPA

SEQ ID NO: 553 - protein, 210 aa, Homo sapiens
MYKGRTVLQKVVGHPSCTFLYGPPDPAVRATDPQQVAFPSPAELPDQKQLRYTEELLRHVAPGLHLELRGPQLWARRMGKCKVYWEVGGPPGSASPSTPACLLPRNCDTPIFDFRVFFQELVEFRARQRRGSPRYTIYLGFGQDLSAGRPKEKSLVLVKLEPWLCRVHLEGTQREGVSSLDSSSLSLCLSSANSLYDDIECFLMELEQPA

SEQ ID NO: 554 - protein, 210 aa, Homo sapiens; identical to SEQ ID NO: 553

SEQ ID NO: 555 - protein, 474 aa, Homo sapiens; identical to SEQ ID NO: 550

SEQ ID NO: 556 - protein, 503 aa, Homo sapiens; identical to SEQ ID NO: 549

SEQ ID NO: 557 - protein, 474 aa, Homo sapiens; identical to SEQ ID NO: 550

SEQ ID NO: 558 - protein, 164 aa, Homo sapiens
MALAPERAAPRVLFGEWLLGEISSGCYEGLQWLDEARTCFRVPWKHFARKDLSEADARIFKAWAVARGRWPPSSRGGGPPPEAETAERAGWKTNFRCALRSTRRFVMLRDNSGDPADPHKVYALSRELCWREGPGTDQTEAEAPAAVPPPQAQGSLLGSCTGGQ

SEQ ID NO: 559 - protein, 210 aa, Homo sapiens; identical to SEQ ID NO: 553

SEQ ID NO: 560 - protein, 1348 aa, Homo sapiens [sequence omitted]

SEQ ID NO: 561 - protein, 642 aa, Homo sapiens [sequence omitted]

SEQ ID NO: 562 - protein, 2355 aa, Homo sapiens [sequence omitted]

SEQ ID NO: 563 - protein, 1315 aa, Homo sapiens
MWTPPESAVTGYRVDVIPVNLPGEHGQRLPISRNTFAEVTGLSPGVTYYFKVFAVSHGRESKPLTAQQTTKLDAPTNLQFVNETDSTVLVRWTPPRAQITGYRLTVGLTRRGQPRQYNVGPSVSKYPLRNLQPASEYTVSLVAIKGNQESPKATGVFTTLQPGSSIPPYNTEVTETTIVITWTPAPRIGFKLGVRPSQGGEAPREVTSDSGSIVVSGLTPGVEYVYTIQVLRDGQERDAPIVNKVVTPLSPPTNLHLEANPDTGVLTVSWERSTTPDITGYRITTTPTNGQQGNSLEEVVHADQSSCTFDNLSPGLEYNVSVYTVKDDKESVPISDTIIPAVPPPTDLRFTNIGPDTMRVTWAPPPSIDLTNFLVRYSPVKNEEDVAELSISPSDNAVVLTNLLPGTEYVVSVSSVYEQHESTPLRGRQKTGLDSPTGIDFSDITANSFTVHWIAPRATITGYRIRHHPEHFSGRPREDRVPHSRNSITLTNLTPGTEYVVSIVALNGREESPLLIGQQSTVSDVPRDLEVVAATPTSLLISWDAPAVTVRYYRITYGETGGNSPVQEFTVPGSKSTATISGLKPGVDYTITVYAVTGRGDSPASSKPISINYRTEIDKPSQMQVTDVQDNSISVKWLPSSSPVTGYRVTTTPKNGPGPTKTKTAGPDQTEMTIEGLQPTVEYVVSVYAQNPSGESQPLVQTAVTTIPAPTDLKFTQVTPTSLSAQWTPPNVQLTGYRVRVTPKEKTGPMKEINLAPDSSSVVVSGLMVATKYEVSVYALKDTLTSRPAQGVVTTLENVSPPRRARVTDATETTITISWRTKTETITGFQVDAVPANGQTPIQRTIKPDVRSYTITGLQPGTDYKIYLYTLNDNARSSPVVIDASTAIDAPSNLRFLATTPNSLLVSWQPPRARITGYIIKYEKPGSPPREVVPRPRPGVTEATITGLEPGTEYTIYVIALKNNQKSEPLIGRKKTVQKTPFVTHPGYDTGNGIQLPGTSGQQPSVGQQMIFEEHGFRRTTPPTTATPIRHRPRPYPPNVGQEALSQTTISWAPFQDTSEYIISCHPVGTDEEPLQFRVPGTSTSATLTGLTRGATYNIIVEALKDQQRHKVREEVVTVGNSVNEGLNQPTDDSCFDPYTVSHYAVGDEWERMSESGFKLLCQCLGFGSGHFRCDSSRWCHDNGVNYKIGEKWDRQGENGQMMSCTCLGNGKGEFKCDPHEATCYDDGKTYHVGEQWQKEYLGAICSCTCFGGQRGWRCDNCRRPGGEPSPEGTTGQSYNQYSQRYHQRTNTNVNCPIECFMPLDVQADREDSRE

SEQ ID NO: 564 - protein, 1341 aa, Homo sapiens
MWTPPESAVTGYRVDVIPVNLPGEHGQRLPISRNTFAEVTGLSPGVTYYFKVFAVSHGRESKPLTAQQTTKLDAPTNLQFVNETDSTVLVRWTPPRAQITGYRLTVGLTRRGQPRQYNVGPSVSKYPLRNLQPASEYTVSLVAIKGNQESPKATGVFTTLQPGSSIPPYNTEVTETTIVITWTPAPRIGFKLGVRPSQGGEAPREVTSDSGSIVVSGLTPGVEYVYTIQVLRDGQERDAPIVNKVVTPLSPPTNLHLEANPDTGVLTVSWERSTTPDITGYRITTTPTNGQQGNSLEEVVHADQSSCTFDNLSPGLEYNVSVYTVKDDKESVPISDTIIPAVPPPTDLRFTNIGPDTMRVTWAPPPSIDLTNFLVRYSPVKNEEDVAELSISPSDNAVVLTNLLPGTEYVVSVSSVYEQHESTPLRGRQKTGLDSPTGIDFSDITANSFTVHWIAPRATITGYRIRHHPEHFSGRPREDRVPHSRNSITLTNLTPGTEYVVSIVALNGREESPLLIGQQSTVSDVPRDLEVVAATPTSLLISWDAPAVTVRYYRITYGETGGNSPVQEFTVPGSKSTATISGLKPGVDYTITVYAVTGRGDSPASSKPISINYRTEIDKPSQMQVTDVQDNSISVKWLPSSSPVTGYRVTTTPKNGPGPTKTKTAGPDQTEMTIEGLQPTVEYVVSVYAQNPSGESQPLVQTAVTNIDRPKGLAFTDVDVDSIKIAWESPQGQVSRYRVTYSSPEDGIHELFPAPDGEEDTAELQGLRPGSEYTVSVVALHDDMESQPLIGTQSTAIPAPTDLKFTQVTPTSLSAQWTPPNVQLTGYRVRVTPKEKTGPMKEINLAPDSSSVVVSGLMVATKYEVSVYALKDTLTSRPAQGVVTTLENVSPPRRARVTDATETTITISWRTKTETITGFQVDAVPANGQTPIQRTIKPDVRSYTITGLQPGTDYKIYLYTLNDNARSSPVVIDASTAIDAPSNLRFLATTPNSLLVSWQPPRARITGYIIKYEKPGSPPREVVPRPRPGVTEATITGLEPGTEYTIYVIALKNNQKSEPLIGRKKTGQEALSQTTISWAPFQDTSEYIISCHPVGTDEEPLQFRVPGTSTSATLTGLTRGATYNIIVEALKDQQRHKVREEVVTVGNSVNEGLNQPTDDSCFDPYTVSHYAVGDEWERMSESGFKLLCQCLGFGSGHFRCDSSRWCHDNGVNYKIGEKWDRQGENGQMMSCTCLGNGKGEFKCDPHEATCYDDGKTYHVGEQWQKEYLGAICSCTCFGGQRGWRCDNCRRPGGEPSPEGTTGQSYNQYSQRYHQRTNTNVNCPIECFMPLDVQADREDSRE

SEQ ID NO: 565 - protein, 984 aa, Homo sapiens [sequence omitted]

SEQ ID NO: 566 - protein, 2386 aa, Homo sapiens [sequence omitted]

SEQ ID NO: 567 - protein, 657 aa, Homo sapiens [sequence omitted]

SEQ ID NO: 568 - protein, 847 aa, Homo sapiens
MRVTWAPPPSIDLTNFLVRYSPVKNEEDVAELSISPSDNAVVLTNLLPGTEYVVSVSSVYEQHESTPLRGRQKTGLDSPTGIDFSDITANSFTVHWIAPRATITGYRIRHHPEHFSGRPREDRVPHSRNSITLTNLTPGTEYVVSIVALNGREESPLLIGQQSTVSDVPRDLEVVAATPTSLLISWDAPAVTVRYYRITYGETGGNSPVQEFTVPGSKSTATISGLKPGVDYTITVYAVTGRGDSPASSKPISINYRTEIDKPSQMQVTDVQDNSISVKWLPSSSPVTGYRVTTTPKNGPGPTKTKTAGPDQTEMTIEGLQPTVEYVVSVYAQNPSGESQPLVQTAVTNIDRPKGLAFTDVDVDSIKIAWESPQGQVSRYRVTYSSPEDGIHELFPAPDGEEDTAELQGLRPGSEYTVSVVALHDDMESQPLIGTQSTAIPAPTDLKFTQVTPTSLSAQWTPPNVQLTGYRVRVTPKEKTGPMKEINLAPDSSSVVVSGLMVATKYEVSVYALKDTLTSRPAQGVVTTLENVSPPRRARVTDATETTITISWRTKTETITGFQVDAVPANGQTPIQRTIKPDVRSYTITGLQPGTDYKIYLYTLNDNARSSPVVIDASTAIDAPSNLRFLATTPNSLLVSWQPPRARITGYIIKYEKPGSPPREVVPRPRPGVTEATITGLEPGTEYTIYVIALKNNQKSEPLIGRKKTGWCHDNGVNYKIGEKWDRQGENGQMMSCTCLGNGKGEFKCDPHEATCYDDGKTYHVGEQWQKEYLGAICSCTCFGGQRGWRCDNCRRPGGEPSPEGTTGQSYNQYSQRYHQRTNTNVNCPIECFMPLDVQADREDSRE

SEQ ID NO: 569 - protein, 1286 aa, Homo sapiens
MWTPPESAVTGYRVDVIPVNLPGEHGQRLPISRNTFAEVTGLSPGVTYYFKVFAVSHGRESKPLTAQQTTKLDAPTNLQFVNETDSTVLVRWTPPRAQITGYRLTVGLTRRGQPRQYNVGPSVSKYPLRNLQPASEYTVSLVAIKGNQESPKATGVFTTLQPGSSIPPYNTEVTETTIVITWTPAPRIGFKLGVRPSQGGEAPREVTSDSGSIVVSGLTPGVEYVYTIQVLRDGQERDAPIVNKVVTPLSPPTNLHLEANPDTGVLTVSWERSTTPDITGYRITTTPTNGQQGNSLEEVVHADQSSCTFDNLSPGLEYNVSVYTVKDDKESVPISDTIIPAVPPPTDLRFTNIGPDTMRVTWAPPPSIDLTNFLVRYSPVKNEEDVAELSISPSDNAVVLTNLLPGTEYVVSVSSVYEQHESTPLRGRQKTGLDSPTGIDFSDITANSFTVHWIAPRATITGYRIRHHPEHFSGRPREDRVPHSRNSITLTNLTPGTEYVVSIVALNGREESPLLIGQQSTVSDVPRDLEVVAATPTSLLISWDAPAVTVRYYRITYGETGGNSPVQEFTVPGSKSTATISGLKPGVDYTITVYAVTGRGDSPASSKPISINYRTEIDKPSQMQVTDVQDNSISVKWLPSSSPVTGYRVTTTPKNGPGPTKTKTAGPDQTEMTIEGLQPTVEYVVSVYAQNPSGESQPLVQTAVTNIDRPKGLAFTDVDVDSIKIAWESPQGQVSRYRVTYSSPEDGIHELFPAPDGEEDTAELQGLRPGSEYTVSVVALHDDMESQPLIGTQSTAIPAPTDLKFTQVTPTSLSAQWTPPNVQLTGYRVRVTPKEKTGPMKEINLAPDSSSVVVSGLMVATKYEVSVYALKDTLTSRPAQGVVTTLENVSPPRRARVTDATETTITISWRTKTETITGFQVDAVPANGQTPIQRTIKPDVRSYTITGLQPGTDYKIYLYTLNDNARSSPVVIDASTAIDAPSNLRFLATTPNSLLVSWQPPRARITGYIIKYEKPGSPPREVVPRPRPGVTEATITGLEPGTEYTIYVIALKNNQKSEPLIGRKKTGQEALSQTTISWAPFQDTSEYIISCHPVGTDEEPLQFRVPGTSTSATLTGLTRGATYNIIVEALKDQQRHKVREEVVTVGNSGWCHDNGVNYKIGEKWDRQGENGQMMSCTCLGNGKGEFKCDPHEATCYDDGKTYHVGEQWQKEYLGAICSCTCFGGQRGWRCDNCRRPGGEPSPEGTTGQSYNQYSQRYHQRTNTNVNCPIECFMPLDVQADREDSRE

SEQ ID NO: 570 - protein, 2296 aa, Homo sapiens [sequence omitted]

SEQ ID NO: 571 - protein, 693 aa, Homo sapiens [sequence omitted]

SEQ ID NO: 572 - protein, 1259 aa, Homo sapiens
MWTPPESAVTGYRVDVIPVNLPGEHGQRLPISRNTFAEVTGLSPGVTYYFKVFAVSHGRESKPLTAQQTTKLDAPTNLQFVNETDSTVLVRWTPPRAQITGYRLTVGLTRRGQPRQYNVGPSVSKYPLRNLQPASEYTVSLVAIKGNQESPKATGVFTTLQPGSSIPPYNTEVTETTIVITWTPAPRIGFKLGVRPSQGGEAPREVTSDSGSIVVSGLTPGVEYVYTIQVLRDGQERDAPIVNKVVTPLSPPTNLHLEANPDTGVLTVSWERSTTPDITGYRITTTPTNGQQGNSLEEVVHADQSSCTFDNLSPGLEYNVSVYTVKDDKESVPISDTIIPAVPPPTDLRFTNIGPDTMRVTWAPPPSIDLTNFLVRYSPVKNEEDVAELSISPSDNAVVLTNLLPGTEYVVSVSSVYEQHESTPLRGRQKTGLDSPTGIDFSDITANSFTVHWIAPRATITGYRIRHHPEHFSGRPREDRVPHSRNSITLTNLTPGTEYVVSIVALNGREESPLLIGQQSTVSDVPRDLEVVAATPTSLLISWDAPAVTVRYYRITYGETGGNSPVQEFTVPGSKSTATISGLKPGVDYTITVYAVTGRGDSPASSKPISINYRTEIDKPSQMQVTDVQDNSISVKWLPSSSPVTGYRVTTTPKNGPGPTKTKTAGPDQTEMTIEGLQPTVEYVVSVYAQNPSGESQPLVQTAVTNIDRPKGLAFTDVDVDSIKIAWESPQGQVSRYRVTYSSPEDGIHELFPAPDGEEDTAELQGLRPGSEYTVSVVALHDDMESQPLIGTQSTAIPAPTDLKFTQVTPTSLSAQWTPPNVQLTGYRVRVTPKEKTGPMKEINLAPDSSSVVVSGLMVATKYEVSVYALKDTLTSRPAQGVVTTLENVSPPRRARVTDATETTITISWRTKTETITGFQVDAVPANGQTPIQRTIKPDVRSYTITGLQPGTDYKIYLYTLNDNARSSPVVIDASTAIDAPSNLRFLATTPNSLLVSWQPPRARITGYIIKYEKPGSPPREVVPRPRPGVTEATITGLEPGTEYTIYVIALKNNQKSEPLIGRKKTVNEGLNQPTDDSCFDPYTVSHYAVGDEWERMSESGFKLLCQCLGFGSGHFRCDSSRWCHDNGVNYKIGEKWDRQGENGQMMSCTCLGNGKGEFKCDPHEATCYDDGKTYHVGEQWQKEYLGAICSCTCFGGQRGWRCDNCRRPGGEPSPEGTTGQSYNQYSQRYHQRTNTNVNCPIECFMPLDVQADREDSRE

SEQ ID NO: 573 - protein, 2355 aa, Homo sapiens [sequence omitted]

SEQ ID NO: 574 - protein, 325 aa, Homo sapiens
MLSMLRTMTRLCFLLFFSVATSGCSAAAASSLEMLSREFETCAFSFSSLPRSCKEIKERCHSAGDGLYFLRTKNGVVYQTFCDMTSGGGGWTLVASVHENDMRGKCTVGDRWSSQQGNKADYPEGDGNWANYNTFGSAEAATSDDYKNPGYYDIQAKDLGIWHVPNKSPMQHWRNSALLRYRTNTGFLQRLGHNLFGIYQKYPVKYRSGKCWNDNGPAIPVVYDFGDAKKTASYYSPYGQREFVAGFVQFRVFNNERAANALCAGIKVTGCNTEHHCIGGGGFFPQGKPRQCGDFSAFDWDGYGTHVKSSCSREITEAAVLLFYR

SEQ ID NO: 575 - protein, 1954 aa, Homo sapiens [sequence omitted]

SEQ ID NO: 576 - protein, 1938 aa, Homo sapiens
MAQKGQLSDDEKFLFVDKNFINSPVAQADWAAKRLVWVPSEKQGFEAASIKEEKGDEVVVELVENGKKVTVGKDDIQKMNPPKFSKVEDMAELTCLNEASVLHNLRERYFSGLIYTYSGLFCVVVNPYKHLPIYSEKIVDMYKGKKRHEMPPHIYAIADTAYRSMLQDREDQSILCTGESGAGKTENTKKVIQYLAVVASSHKGKKDTSITGELEKQLLQANPILEAFGNAKTVKNDNSSRFGKFIRINFDVTGYIVGANIETYLLEKSRAIRQARDERTFHIFYYMIAGAKEKMRSDLLLEGFNNYTFLSNGFVPIPAAQDDEMFQETVEAMAIMGFSEEEQLSILKVVSSVLQLGNIVFKKERNTDQASMPDNTAAQKVCHLMGINVTDFTRSILTPRIKVGRDVVQKAQTKEQADFAVEALAKATYERLFRWILTRVNKALDKTHRQGASFLGILDIAGFEIFEVNSFEQLCINYTNEKLQQLFNHTMFILEQEEYQREGIEWNFIDFGLDLQPCIELIERPNNPPGVLALLDEECWFPKATDKSFVEKLCTEQGSHPKFQKPKQLKDKTEFSIIHYAGKVDYNASAWLTKNMDPLNDNVTSLLNASSDKFVADLWKDVDRIVGLDQMAKMTESSLPSASKTKKGMFRTVGQLYKEQLGKLMTTLRNTTPNFVRCIIPNHEKRSGKLDAFLVLEQLRCNGVLEGIRICRQGFPNRIVFQEFRQRYEILAANAIPKGFMDGKQACILMIKALELDPNLYRIGQSKIFFRTGVLAHLEEERDLKITDVIMAFQAMCRGYLARKAFAKRQQQLTAMKVIQRNCAAYLKLRNWQWWRLFTKVKPLLQVTRQEEEMQAKEDELQKTKERQQKAENELKELEQKHSQLTEEKNLLQEQLQAETELYAEAEEMRVRLAAKKQELEEILHEMEARLEEEEDRGQQLQAERKKMAQQMLDLEEQLEEEEAARQKLQLEKVTAEAKIKKLEDEILVMDDQNNKLSKERKLLEERISDLTTNLAEEEEKAKNLTKLKNKHESMISELEVRLKKEEKSRQELEKLKRKLEGDASDFHEQIADLQAQIAELKMQLAKKEEELQAALARLDDEIAQKNNALKKIRELEGHISDLQEDLDSERAARNKAEKQKRDLGEELEALKTELEDTLDSTATQQELRAKREQEVTVLKKALDEETRSHEAQVQEMRQKHAQAVEELTEQLEQFKRAKANLDKNKQTLEKENADLAGELRVLGQAKQEVEHKKKKLEAQVQELQSKCSDGERARAELNDKVHKLQNEVESVTGMLNEAEGKAIKLAKDVASLSSQLQDTQELLQEETRQKLNVSTKLRQLEEERNSLQDQLDEEMEAKQNLERHISTLNIQLSDSKKKLQDFASTVEALEEGKKRFQKEIENLTQQYEEKAAAYDKLEKTKNRLQQELDDLVVDLDNQRQLVSNLEKKQRKFDQLLAEEKNISSKYADERDRAEAEAREKETKALSLARALEEALEAKEELERTNKMLKAEMEDLVSSKDDVGKNVHELEKSKRALETQMEEMKTQLEELEDELQATEDAKLRLEVNMQALKGQFERDLQARDEQNEEKRRQLQRQLHEYETELEDERKQRALAAAAKKKLEGDLKDLELQADSAIKGREEAIKQLRKLQAQMKDFQRELEDARASRDEIFATAKENEKKAKSLEADLMQLQEDLAAAERARKQADLEKEELAEELASSLSGRNALQDEKRRLEARIAQLEEELEEEQGNMEAMSDRVRKATQQAEQLSNELATERSTAQKNESARQQLERQNKELRSKLHEMEGAVKSKFKSTIAALEAKIAQLEEQVEQEAREKQAATKSLKQKDKKLKEILLQVEDERKMAEQYKEQAEKGNARVKQLKRQLEEAEEESQRINANRRKLQRELDEATESNEAMGREVNALKSKLRGPPPQETSQ

SEQ ID NO: 577 - protein, 1938 aa, Homo sapiens; identical to SEQ ID NO: 576

SEQ ID NO: 578 - protein, 1652 aa, Homo sapiens [sequence omitted]

SEQ ID NO: 579 - protein, 1972 aa, Homo sapiens
MAQKGQLSDDEKFLFVDKNFINSPVAQADWAAKRLVWVPSEKQGFEAASIKEEKGDEVVVELVENGKKVTVGKDDIQKMNPPKFSKVEDMAELTCLNEASVLHNLRERYFSGLIYTYSGLFCVVVNPYKHLPIYSEKIVDMYKGKKRHEMPPHIYAIADTAYRSMLQDREDQSILCTGESGAGKTENTKKVIQYLAVVASSHKGKKDTSITGELEKQLLQANPILEAFGNAKTVKNDNSSRFGKFIRINFDVTGYIVGANIETYLLEKSRAIRQARDERTFHIFYYMIAGAKEKMRSDLLLEGFNNYTFLSNGFVPIPAAQDDEMFQETVEAMAIMGFSEEEQLSILKVVSSVLQLGNIVFKKERNTDQASMPDNTAAQKVCHLMGINVTDFTRSILTPRIKVGRDVVQKAQTKEQADFAVEALAKATYERLFRWILTRVNKALDKTHRQGASFLGILDIAGFEIFEVNSFEQLCINYTNEKLQQLFNHTMFILEQEEYQREGIEWNFIDFGLDLQPCIELIERPNNPPGVLALLDEECWFPKATDKSFVEKLCTEQGSHPKFQKPKQLKDKTEFSIIHYAGKVDYNASAWLTKNMDPLNDNVTSLLNASSDKFVADLWKDVDRIVGLDQMAKMTESSLPSASKTKKGMFRTVGQLYKEQLGKLMTTLRNTTPNFVRCIIPNHEKRSGKLDAFLVLEQLRCNGVLEGIRICRQGFPNRIVFQEFRQRYEILAANAIPKGFMDGKQACILMIKALELDPNLYRIGQSKIFFRTGVLAHLEEERDLKITDVIMAFQAMCRGYLARKAFAKRQQQLTAMKVIQRNCAAYLKLRNWQWWRLFTKVKPLLQVTRQEEEMQAKEDELQKTKERQQKAENELKELEQKHSQLTEEKNLLQEQLQAETELYAEAEEMRVRLAAKKQELEEILHEMEARLEEEEDRGQQLQAERKKMAQQMLDLEEQLEEEEAARQKLQLEKVTAEAKIKKLEDEILVMDDQNNKLSKERKLLEERISDLTTNLAEEEEKAKNLTKLKNKHESMISELEVRLKKEEKSRQELEKLKRKLEGDASDFHEQIADLQAQIAELKMQLAKKEEELQAALARLDDEIAQKNNALKKIRELEGHISDLQEDLDSERAARNKAEKQKRDLGEELEALKTELEDTLDSTATQQELRAKREQEVTVLKKALDEETRSHEAQVQEMRQKHAQAVEELTEQLEQFKRAKANLDKNKQTLEKENADLAGELRVLGQAKQEVEHKKKKLEAQVQELQSKCSDGERARAELNDKVHKLQNEVESVTGMLNEAEGKAIKLAKDVASLSSQLQDTQELLQEETRQKLNVSTKLRQLEEERNSLQDQLDEEMEAKQNLERHISTLNIQLSDSKKKLQDFASTVEALEEGKKRFQKEIENLTQQYEEKAAAYDKLEKTKNRLQQELDDLVVDLDNQRQLVSNLEKKQRKFDQLLAEEKNISSKYADERDRAEAEAREKETKALSLARALEEALEAKEELERTNKMLKAEMEDLVSSKDDVGKNVHELEKSKRALETQMEEMKTQLEELEDELQATEDAKLRLEVNMQALKGQFERDLQARDEQNEEKRRQLQRQLHEYETELEDERKQRALAAAAKKKLEGDLKDLELQADSAIKGREEAIKQLRKLQAQMKDFQRELEDARASRDEIFATAKENEKKAKSLEADLMQLQEDLAAAERARKQADLEKEELAEELASSLSGRNALQDEKRRLEARIAQLEEELEEEQGNMEAMSDRVRKATQQAEQLSNELATERSTAQKNESARQQLERQNKELRSKLHEMEGAVKSKFKSTIAALEAKIAQLEEQVEQEAREKQAATKSLKQKDKKLKEILLQVEDERKMAEQYKEQAEKGNARVKQLKRQLEEAEEESQRINANRRKLQRELDEATESNEAMGREVNALKSKLRRGNETSFVPSRRSGGRRVIENADGSEEETDTRDADFNGTKASE

SEQ ID NO: 580 - protein, 1266 aa, Homo sapiens
MAQKGQLSDDEKFLFVDKNFINSPVAQADWAAKRLVWVPSEKQGFEAASIKEEKGDEVVVELVENGKKVTVGKDDIQKMNPPKFSKVEDMAELTCLNEASVLHNLRERYFSGLIYTYSGLFCVVVNPYKHLPIYSEKIVDMYKGKKRHEMPPHIYAIADTAYRSMLQDREDQSILCTGESGAGKTENTKKVIQYLAVVASSHKGKKDTSITGELEKQLLQANPILEAFGNAKTVKNDNSSRFGKFIRINFDVTGYIVGANIETYLLEKSRAIRQARDERTFHIFYYMIAGAKEKMRSDLLLEGFNNYTFLSNGFVPIPAAQDDEMFQETVEAMAIMGFSEEEQLSILKVVSSVLQLGNIVFKKERNTDQASMPDNTAAQKVCHLMGINVTDFTRSILTPRIKVGRDVVQKAQTKEQADFAVEALAKATYERLFRWILTRVNKALDKTHRQGASFLGILDIAGFEIFEVNSFEQLCINYTNEKLQQLFNHTMFILEQEEYQREGIEWNFIDFGLDLQPCIELIERPNNPPGVLALLDEECWFPKATDKSFVEKLCTEQGSHPKFQKPKQLKDKTEFSIIHYAGKVDYNASAWLTKNMDPLNDNVTSLLNASSDKFVADLWKDVDRIVGLDQMAKMTESSLPSASKTKKGMFRTVGQLYKEQLGKLMTTLRNTTPNFVRCIIPNHEKRSGKLDAFLVLEQLRCNGVLEGIRICRQGFPNRIVFQEFRQRYEILAANAIPKGFMDGKQACILMIKALELDPNLYRIGQSKIFFRTGVLAHLEEERDLKITDVIMAFQAMCRGYLARKAFAKRQQQLTAMKVIQRNCAAYLKLRNWQWWRLFTKVKPLLQVTRQEEEMQAKEDELQKTKERQQKAENELKELEQKHSQLTEEKNLLQEQLQAETELYAEAEEMRVRLAAKKQELEEILHEMEARLEEEEDRGQQLQAERKKMAQQMLDLEEQLEEEEAARQKLQLEKVTAEAKIKKLEDEILVMDDQNNKLSKERKLLEERISDLTTNLAEEEEKAKNLTKLKNKHESMISELEVRLKKEEKSRQELEKLKRKLEGDASDFHEQIADLQAQIAELKMQLAKKEEELQAALARLDDEIAQKNNALKKIRELEGHISDLQEDLDSERAARNKAEKQKRDLGEELEALKTELEDTLDSTATQQELRAKREQEVTVLKKALDEETRSHEAQVQEMRQKHAQAVEELTEQLEQFKRAKANLDKNKQTLEKENADLAGELRVLGQAKQEVEHKKKKLEAQVQTLSF

SEQ ID NO: 581 - protein, 1972 aa, Homo sapiens; identical to SEQ ID NO: 579

SEQ ID NO: 582 - protein, 238 aa, Homo sapiens
MSDPEGETLRSTFPSYMAEGERLYLCGEFSKAAQSFSNALYLQDGDKNCLVARSKCFLKMGDLERSLKDAEASLQSDPAFCKGILQKAETLYTMGDFEFALVFYHRGYKLRPDREFRVGIQKAQEAINNSVGSPSSIKLENKGDLSFLSKQAENIKAQQKPQPMKHLLHPTKGEPKWKASLKSEKTVRQLLGELYVDKEYLEKLLLDEGFGHFVGTGPWGKGNLGGCFMHELKAEPVI

SEQ ID NO: 583 - protein, 672 aa, Homo sapiens
MSDPEGETLRSTFPSYMAEGERLYLCGEFSKAAQSFSNALYLQDGDKNCLVARSKCFLKMGDLERSLKDAEASLQSDPAFCKGILQKAETLYTMGDFEFALVFYHRGYKLRPDREFRVGIQKAQEAINNSVGSPSSIKLENKGDLSFLSKQAENIKAQQKPQPMKHLLHPTKGEPKWKASLKSEKTVRQLLGELYVDKEYLEKLLLDEDLIKGTMKGGLTVEDLIMTGINYLDTHSNFWRQQKPIYARERDRKLMQEKWLRDHKRRPSQTAHYILKSLEDIDMLLTSGSAEGSLQKAEKVLKKVLEWNKEEVPNKDELVGNLYSCIGNAQIELGQMEAALQSHRKDLEIAKEYDLPDAKSRALDNIGRVFARVGKFQQAIDTWEEKIPLAKTTLEKTWLFHEIGRCYLELDQAWQAQNYGEKSQQCAEEEGDIEWQLNASVLVAQAQVKLRDFESAVNNFEKALERAKLVHNNEAQQAIISALDDANKGIIRELRKTNYVENLKEKSEGEASLYEDRIITREKDMRRVRDEPEKVVKQWDHSEDEKETDEDDEAFGEALQSPASGKQSVEAGKARSDLGAVAKGLSGELGTRSGETGRKLLEAGRRESREIYRRPSGELEQRLSGEFSRQEPEELKKLSEVGRREPEELGKTQFGEIGETKKTGNEMEKEYE

SEQ ID NO: 584 - protein, 374 aa, Homo sapiens
MDDLCEANGTFAISLFKILGEEDNSRNVFFSPMSISSALAMVFMGAKGSTAAQMSQALCLYKDGDIHRGFQSLLSEVNRTGTQYLLRTANRLFGEKTCDFLPDFKEYCQKFYQAELEELSFAEDTEECRKHINDWVAEKTEGKISEVLDAGTVDPLTKLVLVNAIYFKGKWNEQFDRKYTRGMLFKTNEEKKTVQMMFKEAKFKMGYADEVHTQVLELPYVEEELSMVILLPDDNTDLAVVEKALTYEKFKAWTNSEKLTKSKVQVFLPRLKLEESYDLEPFLRRLGMIDAFDEAKADFSGMSTEKNVPLSKVAHKCFVEVNEEGTEAAAATAVVRNSRCSRMEPRFCADHPFLFFIRHHKTNCILFCGRFSSP

SEQ ID NO: 585 - protein, 139 aa, Homo sapiens
MSISSALAMVFMGAKGNTAAQMSQALCFSKIGGEDGDIHRGFQSLLVAINRTDTEYVLRTANGLFGEKSYDFLTGFTDSCGKFYQATIKQLDFVNDTEKSTTRVNSWVADKTKGENILLFYFDNILNSFIVSSLQNCQI

SEQ ID NO: 586 - protein, 374 aa, Homo sapiens; identical to SEQ ID NO: 584

SEQ ID NO: 587 - protein, 2910 aa, Homo sapiens [sequence omitted]

SEQ ID NO: 588 - protein, 2912 aa, Homo sapiens [sequence omitted]

SEQ ID NO: 589 - protein, 2614 aa, Homo sapiens [sequence omitted]

SEQ ID NO: 590 - protein, 1506 aa, Homo sapiens [sequence omitted]

SEQ ID NO: 591 - protein, 2912 aa, Homo sapiens [sequence omitted]

SEQ ID NO: 592 - protein, 825 aa, Homo sapiens [sequence omitted]

SEQ ID NO: 593 - protein, 339 aa, Homo sapiens
MWQLWASLCCLLVLANARSRPSFHPLSDELVNYVNKRNTTWQAGHNFYNVDMSYLKRLCGTFLGGPKPPQRVMFTEDLKLPASFDAREQWPQCPTIKEIRDQGSCGSCWAFGAVEAISDRICIHTNAHVSVEVSAEDLLTCCGSMCGDGCNGGYPAEAWNFWTRKGLVSGGLYESHVGCRPYSIPPCEHHVNGSRPPCTGEGDTPKCSKICEPGYSPTYKQDKHYGYNSYSVSNSEKDIMAEIYKNGPVEGAFSVYSDFLLYKSGVYQHVTGEMMGGHAIRILGWGVENGTPYWLVANSWNTDWGDNGFFKILRGQDHCGIESEVVAGIPRTDQYWEKI

SEQ ID NO: 594 - protein, 339 aa, Homo sapiens; identical to SEQ ID NO: 593

SEQ ID NO: 595 - protein, 339 aa, Homo sapiens; identical to SEQ ID NO: 593

SEQ ID NO: 596 - protein, 71 aa, Homo sapiens
MWQLWASLCCLLVLANARSRPSFHPLSDELVNYVNKRNTTWQAGHNFYNVDMSYLKRLCGTFLGGPKPPQR

SEQ ID NO: 597 - protein, 339 aa, Homo sapiens; identical to SEQ ID NO: 593

SEQ ID NO: 598 - protein, 339 aa, Homo sapiens; identical to SEQ ID NO: 593

SEQ ID NO: 599 - protein, 339 aa, Homo sapiens; identical to SEQ ID NO: 593

SEQ ID NO: 600 - protein, 339 aa, Homo sapiens; identical to SEQ ID NO: 593

SEQ ID NO: 601 - protein, 105 aa, Homo sapiens
MKQLWQHGLAPQPLPMLCCHSPSFLCCLVGQGMGKADTFADLELASYVSNKLSGSKKGLLFPCQPHLSASLTNPLLGQMSPGPVQENADALATAISVINKALCLW

SEQ ID NO: 602 - protein, 738 aa, Homo sapiens
MQPRWAQGATMWLGVLLTLLLCSSLEGQENSFTINSVDMKSLPDWTVQNGKNLTLQCFADVSTTSHVKPQHQMLFYKDDVLFYNISSMKSTESYFIPEVRIYDSGTYKCTVIVNNKEKTTAEYQVLVEGVPSPRVTLDKKEAIQGGIVRVNCSVPEEKAPIHFTIEKLELNEKMVKLKREKNSRDQNFVILEFPVEEQDRVLSFRCQARIISGIHMQTSESTKSELVTVTESFSTPKFHISPTGMIMEGAQLHIKCTIQVTHLAQEFPEIIIQKDKAIVAHNRHGNKAVYSVMAMVEHSGNYTCKVESSRISKVSSIVVNITELFSKPELESSFTHLDQGERLNLSCSIPGAPPANFTIQKEDTIVSQTQDFTKIASKSDSGTYICTAGIDKVVKKSNTVQIVVCEMLSQPRISYDAQFEVIKGQTIEVRCESISGTLPISYQLLKTSKVLENSTKNSNDPAVFKDNPTEDVEYQCVADNCHSHAKMLSEVLRVKVIAPVDEVQISILSSKVVESGEDIVLQCAVNEGSGPITYKFYREKEGKPFYQMTSNATQAFWTKQKANKEQEGEYYCTAFNRANHASSVPRSKILTVRVILAPWKKGLIAVVIIGVIIALLIIAAKCYFLRKAKAKQMPVEMSRPAVPLLNSNNEKMSDPNMEANSHYGHNDDVGNHAMKPINDNKEPLNSDVQYTEVQVSSAESHKDLGKKDTETVYSEVRKAVPDAVESRYSRTEGSLDGT

SEQ ID NO: 603 - protein, 738 aa, Homo sapiens; identical to SEQ ID NO: 602

SEQ ID NO: 604 - protein, 1054 aa, Homo sapiens
  VARIANT (1)...(1054): Xaa = Any Amino Acid
MKGARWRRVPWVSLSCLCLCLLPHVVPGTTEDTLITGSKTPAPVTSTGSTTATLEGQSTAASSRTSNQDISASSQNHQTKSTETTSKAQTDTLTQMMTSTLFSSPSVHNVMETVTQETAPPDEMTTSFPSSVTNTLMMTSKTITMTTSTDSTLGNTEETSTAGTESSTPVTSAVSITAGQEGQSRTTSWRTSIQDTSASSQNHWTRSTQTTRESQTSTLTHRTTSTPSFSPSVHNVTGTVSQKTSPSGETATSSLCSVTNTSMMTSEKITVTTSTGSTLGNPGETSSVPVTGSLMPVTSAALVTVDPEGQSPATFSRTSTQDTTAFSKNHQTQSVETTRVSQINTLNTLTPVTTSTVLSSPSGFNPSGTVSQETFPSGETTISSPSSVSNTFLVTSKVFRMPISRDSTLGNTEETSLSVSGTISAITSKVSTIWWSDTLSTALSPSSLPPKISTAFHTQQSEGAETTGRPHERSSFSPGVSQEIFTLHETTTWPSSFSSKGHTTWSQTELPSTSTGAATRLVTGNPSTGAAGTIPRVPSKVSAIGEPGEPTTYSSHSTTLPKTTGAGAQTQWTQETGTTGEALLSSPSYSVTQMIKTATSPSSSPMLDRHTSQQITTAPSTNHSTIHSTSTSPQESPAVSQRGHTQAPQTTQESQTTRSVSPMTDTKTVTTPGSSFTASGHSPSEIVPQDAPTISAATTFAPAPTGDGHTTQAPTTALQAAPSSHDATLGPSGGTSLSKTGALTLANSVVSTPGGPEGQWTSASASTSPDTAAAMTHTHQAESTEASGQTQTSEPASSGSRTTSAGTATPSSSGASGTTPSGSEGISTSGETTRFSSNPSRDSHTTQSTTELLSASASHGAIPVSTGMASSIVPGTFHPTLSEASTAGRPTGQSSPTSPSASPQETAAISRMAQTQRTRTSRGSDTISLASQATDTFSTVPPTPPSITSSGLTSPQTQTHTLSPSGSGKTFTTALISNATPLPVTYASSASTGDTTPLPVTDTSSVSTGHATPLPVTSFSSVSTGDTTPLPVTDASSASTGHATPLPVTDTSSX

SEQ ID NO: 605 - protein, 52 aa, Homo sapiens
MQSSERWDIQLDEGVLGEVKQRNLYGSHIVESVVQLLADGFVLQFLSVQLVF

SEQ ID NO: 606 - protein, 465 aa, Homo sapiens [sequence omitted]

SEQ ID NO: 607 - protein, 1096 aa, Homo sapiens [sequence omitted]

SEQ ID NO: 608 - protein, 1307 aa, Homo sapiens [sequence omitted]

SEQ ID NO: 609 - protein, 1206 aa, Homo sapiens
MYGHQFCPENLKKLILSETTIFDVLPTFFYHANKVVCMASLEVYVRRGYIAYELNSLQHRQLPDGTCVVEFQFMLPSSHPNRMTVPISITNPDLLRHSTELFMDSGFSPLCQRMGAMVAFRRFEDFTRNFDEVISCFANVPKDTPLFSEARTSLYSEDDCKSLREEPIHILNVSIQCADHLEDEALVPILRTFVQSKKNILVDYGLRRITFLIAQEKEFPKFFTFRARDEFAEDRIYRHLEPALAFQLELNRMRNFDLTAVPCANHKMHLYLGAAKVKEGVEVTDHRFFIRAIIRHSDLITKEASFEYLQNEGERLLLEAMDELEVAFNNTSVRTDCNHIFLNFVPTVIMDPFKIEESVRYMVMRYGSRLWKLRVLQAEVKINIRQTTTGSAVPIRLFITNESGYYLDISLYKEVTDSRSGNIMFHSFGNKQGPQHGMLINTPYVTKDLLQAKRFQAQTLGTTYIYDFPEMFRQALFKLWGSPDKYPKDILTYTELVLDSQGQLVEMNRLPGGNEVGMVAFKMRFKTQEYPEGRDVIVIGNDITFRIGSFGPGEDLLYLRASEMARAEGIPKIYVAANSGARIGMAEEIKHMFHVAWVDPEDPHKGFKYLYLTPQDYTRISSLNSVHCKHIEEGGESRYMITDIIGKDDGLGVENLRGSGMIAGESSLAYEEIVTISLVTCRAIGIGAYLVRLGQRVIQVENSHIILTGASALNKVLGREVYTSNNQLGGVQIMHYNGVSHITVPDDFEGVYTILEWLSYMPKDNHSPVPIITPTDPIDREIEFLPSRAPYDPRWMLAGRPHPTLKGTWQSGFFDHGSFKEIMAPWAQTVVTGRARLGGIPVGVIAVETRTVEVAVPADPANLDSEAKIIQQAGQVWFPDSAYKTAQAIKDFNREKLPLMIFANWRGFSGGMKDMYDQVLKFGAYIVDGLRQYKQPILIYIPPYAELRGGSWVVIDATINPLCIEMYADKESRGGVLEPEGTVEIKFRKKDLIKSMRRIDPAYKKLMEQLGEPDLSDKDRKDLEGRLKAREDLLLPIYHQVAVQFADFHDTPGRMLEKGVISDILEWKTARTFLYWRLRRLLLEDQVKQEILQASGELSHVHIQSMLRRWFVETEGAVKAYLWDNNQVVVQWLEQHWQAGDGPRSTIRENITYLKHDSVLKTIRGLVEENPEVAVDCVIYLSQHISPAERAQVVHLLSTMDSPAST

SEQ ID NO: 610 - protein, 627 aa, Homo sapiens
MARGSVSDEEMMELREAFAKVDTDGNGYISFNELNDLFKAACLPLPGYRVREITENLMATGDLDQDGRISFDEFIKIFHGLKSTDVAKTFRKAINKKEGICAIGGTSEQSSVGTQHSYSEEEKYAFVNWINKALENDPDCRHVIPMNPNTNDLFNAVGDGIVLCKMINLSVPDTIDERTINKKKLTPFTIQENLNLALNSASAIGCHVVNIGAEDLKEGKPYLVLGLLWQVIKIGLFADIELSRNEALIALLREGESLEDLMKLSPEELLLRWANYHLENAGCNKIGNFSTDIKDSKAYYHLLEQVAPKGDEEGVPAVVIDMSGLREKDDIQRAECMLQQAERLGCRQFVTATDVVRGNPKLNLAFIANLFNRYPALHKPENQDIDWGALEGETREERTFRNWMNSLGVNPRVNHLYSDLSDALVIFQLYEKIKVPVDWNRVNKPPYPKLGGNMKKLENCNYAVELGKNQAKFSLVGIGGQDLNEGNRTLTLALIWQLMRRYTLNILEEIGGGQKVNDDIIVNWVNETLREAKKSSSISSFKDPKISTSLPVLDLIDAIQPGSINYDLLKTENLNDDEKLNNAKYAISMARKIGARVYALPEDLVEVNPKMVMTVFACLMGKGMKRV

SEQ ID NO: 611 - protein, 627 aa, Homo sapiens; identical to SEQ ID NO: 610

SEQ ID NO: 612 - protein, 627 aa, Homo sapiens; identical to SEQ ID NO: 610

SEQ ID NO: 613 - protein, 359 aa, Homo sapiens [sequence omitted]

SEQ ID NO: 614 - protein, 388 aa, Homo sapiens
MLTFTSECGCTTFGVFDIVFATNSTQVIKMILNSSTEDGIKRIQDDCPKAGRHNYIFVMIPTLYSIIFVVGIFGNSLVVIVIYFYMKLKTVASVFLLNLALADLCFLLTLPLWAVYTAMEYRWPFGNYLCKIASASVSFNLYASVFLLTCLSIDRYLAIVHPMKSRLRRTMLVAKVTCIIIWLLAGLASLPAIIHRNVFFIENTNITVCAFHYESQNSTLPIGLGLTKNILGFLFPFLIILTSYTLIWKALKKAYEIQKNKPRNDDIFKIIMAIVLFFFFSWIPHQIFTFLDVLIQLGIIRDCRIADIVDTAMPITICIAYFNNCLNPLFYGFLGKKFKRYFLQLLKYIPPKAKSHSNLSTKMSTLSYRPSDNVSSSTKKPAPCFEVE

SEQ ID NO: 615 - protein, 394 aa, Homo sapiens
MKKMNHKSTDSPKAPQLRGGVFDIVFATNSTQVIKMILNSSTEDGIKRIQDDCPKAGRHNYIFVMIPTLYSIIFVVGIFGNSLVVIVIYFYMKLKTVASVFLLNLALADLCFLLTLPLWAVYTAMEYRWPFGNYLCKIASASVSFNLYASVFLLTCLSIDRYLAIVHPMKSRLRRTMLVAKVTCIIIWLLAGLASLPAIIHRNVFFIENTNITVCAFHYESQNSTLPIGLGLTKNILGFLFPFLIILTSYTLIWKALKKAYEIQKNKPRNDDIFKIIMAIVLFFFFSWIPHQIFTFLDVLIQLGIIRDCRIADIVDTAMPITICIAYFNNCLNPLFYGFLGKKFKRYFLQLLKYIPPKAKSHSNLSTKMSTLSYRPSDNVSSSTKKPAPCFEVE

SEQ ID NO: 616 - protein, 394 aa, Homo sapiens; identical to SEQ ID NO: 615

SEQ ID NO: 617 - protein, 359 aa, Homo sapiens [sequence omitted]

SEQ ID NO: 618 - protein, 432 aa, Homo sapiens
MKRMVSWSFHKLKTMKHLLLLLLCVFLVKSQGVNDNEEGFFSARGHRPLDKKREEALLQQERPIRNSVDELNNNVEAVSQTSSSSFQYMYLLKDLWQKRQKQVKDNENVVNEYSSELEKHQLYIDETVNSNIPTNLRVLRSILENLRSKIQKLESDVSAQMEYCRTPCTVSCNIPVVSGKECEEIIRKGGETSEMYLIQPDSSVKPYRVYCDMNTENGGWTVIQNRQDGSVDFGRKWDPYKQGFGNVATNTDGKNYCGLPGEYWLGNDKISQLTRMGPTELLIEMEDWKGDKVKAHYGGFTVQNEANKYQISVNKYRGTAGNALMDGASQLMGENRTMTIHNGMFFSTYDRDNDGWLTSDPRKQCSKEDGGGWWYNRCHAANPNGRYYWGGQYTWDMAKHGTDDGVVWMNWKGSWYSMRKMSMKIRPFFPQQ

SEQ ID NO: 619 - protein, 344 aa, Homo sapiens
MYLLKDLWQKRQKQVKDNENVVNEYSSELEKHQLYIDETVNSNIPTNLRVLRSILENLRSKIQKLESDVSAQMEYCRTPCTVSCNIPVVSGKECEEIIRKGGETSEMYLIQPDSSVKPYRVYCDMNTENGGWTVIQNRQDGSVDFGRKWDPYKQGFGNVATNTDGKNYCGLPGEYWLGNDKISQLTRMGPTELLIEMEDWKGDKVKAHYGGFTVQNEANKYQISVNKYRGTAGNALMDGASQLMGENRTMTIHNGMFFSTYDRDNDGWLTSDPRKQCSKEDGGGWWYNRCHAANPNGRYYWGGQYTWDMAKHGTDDGVVWMNWKGSWYSMRKMSMKIRPFFPQQ

SEQ ID NO: 620 - protein, 391 aa, Homo sapiens
MKHLLLLLLCVFLVKSQGVNDNEEGFFSARGHRPLDKKREEAPSLRPAPPPISGGGYRARPAKAAATQKKVERKAPDAGGCLHAETVNSNIPTNLRVLRSILENLRSKIQKLESDVSAQMEYCRTPCTVSCNIPVVSGKECEEIIRKGGETSEMYLIQPDSSVKPYRVYCDMNTENGGWTVIQNRQDGSVDFGRKWDPYKQGFGNVATNTDGKNYCGLPGEYWLGNDKISQLTRMGPTELLIEMEDWKGDKVKAHYGGFTVQNEANKYQISVNKYRGTAGNALMDGASQLMGENRTMTIHNGMFFSTYDRDNDGWLTSDPRKQCSKEDGGGWWYNRCHAANPNGRYYWGGQYTWDMAKHGTDDGVVWMNWKGSWYSMRKMSMKIRPFFPQQ

SEQ ID NO: 621 - protein, 457 aa, Homo sapiens
MKHLLLLLLCVFLVKSQGVNDNEEGFFSARGHRPLDKKREEAPSLRPAPPPISGGGYRARPAKAAATQKKLCPTGCQLQEALLQQERPIRNSVDELNNNVEAVSQTSSSSFQYMYLLKDLWQKRQKQVKDNENVVNEYSSELEKHQLYIDETVNSNIPTNLRVLRSILENLRSKIQKLESDVSAQMEYCRTPCTVSCNIPVVSGKECEEIIRKGGETSEMYLIQPDSSVKPYRVYCDMNTENGGWTVIQNRQDGSVDFGRKWDPYKQGFGNVATNTDGKNYCGLPGEYWLGNDKISQLTRMGPTELLIEMEDWKGDKVKAHYGGFTVQNEANKYQISVNKYRGTAGNALMDGASQLMGENRTMTIHNGMFFSTYDRDNDGWLTSDPRKQCSKEDGGGWWYNRCHAANPNGRYYWGGQYTWDMAKHGTDDGVVWMNWKGSWYSMRKMSMKIRPFFPQQ

SEQ ID NO: 622 - protein, 247 aa, Homo sapiens [sequence omitted]

SEQ ID NO: 623 - protein, 491 aa, Homo sapiens
MKRMVSWSFHKLKTMKHLLLLLLCVFLVKSQGVNDNEEGFFSARGHRPLDKKREEAPSLRPAPPPISGGGYRARPAKAAATQKKVERKAPDAGGCLHADPDLGVLCPTGCQLQEALLQQERPIRNSVDELNNNVEAVSQTSSSSFQYMYLLKDLWQKRQKQVKDNENVVNEYSSELEKHQLYIDETVNSNIPTNLRVLRSILENLRSKIQKLESDVSAQMEYCRTPCTVSCNIPVVSGKECEEIIRKGGETSEMYLIQPDSSVKPYRVYCDMNTENGGWTVIQNRQDGSVDFGRKWDPYKQGFGNVATNTDGKNYCGLPGEYWLGNDKISQLTRMGPTELLIEMEDWKGDKVKAHYGGFTVQNEANKYQISVNKYRGTAGNALMDGASQLMGENRTMTIHNGMFFSTYDRDNDGWLTSDPRKQCSKEDGGGWWYNRCHAANPNGRYYWGGQYTWDMAKHGTDDGVVWMNWKGSWYSMRKMSMKIRPFFPQQ

SEQ ID NO: 624 - protein, 344 aa, Homo sapiens; identical to SEQ ID NO: 619

SEQ ID NO: 625 - protein, 512 aa, Homo sapiens [sequence omitted]

SEQ ID NO: 626 - protein, 445 aa, Homo sapiens [sequence omitted]

SEQ ID NO: 627 - protein, 257 aa, Homo sapiens [sequence omitted]

SEQ ID NO: 628 - protein, 406 aa, Homo sapiens
MQLFLLLCLVLLSPQGASLHRHHPREMKKRVEDLHVGATVAPSSRRDFTFDLYRALASAAPSQSIFFSPVSISMSLAMLSLGAGSSTKMQILEGLGLNLQKSSEKELHRGFQQLLQELNQPRDGFQLSLGNALFTDLVVDLQDTFVSAMKTLYLADTFPTNFRDSAGAMKQINDYVAKQTKGKIVDLLKNLDSNAVVIMVNYIFFKAKWETSFNHKGTQEQDFYVTSETVVRVPMMSREDQYHYLLDRNLSCRVVGVPYQGNATALFILPSEGKMQQVENGLSEKTLRKWLKMFKKRQLELYLPKFSIEGSYQLEKVLPSLGISNVFTSHADLSGISNHSNIQVSEMVHKAVVEVDESGTRAAAATGTIFTFRSARLNSQRLVFNRPFLMFIVDNNILFLGKVNRP

SEQ ID NO: 629 - protein, 406 aa, Homo sapiens; identical to SEQ ID NO: 628

SEQ ID NO: 630 - protein, 406 aa, Homo sapiens; identical to SEQ ID NO: 628

SEQ ID NO: 631 - protein, 406 aa, Homo sapiens; identical to SEQ ID NO: 628

SEQ ID NO: 632 - protein, 406 aa, Homo sapiens; identical to SEQ ID NO: 628

SEQ ID NO: 633 - protein, 324 aa, Homo sapiens
MEGPLSVFGDRSTGETIRSQNGMPKRIVNAKIACLDFSLQKTKMKLGVQVVITDPEKLDQIRQRESDITKERIQKILATGANVILTTGGIDDMCLKYFVEAGAMAVRRVLKRDLKRIAKASGATILSTLANLEGEETFEAAMLGQAEEVVQERICDDELILIKNCVVKRVLESKSVVPGGGAVEAALSIYLENYATSMGSREQLAIAEFARSLLVIPNTLAVNAAQDSTDLVAKLRAFHNEAQVNPERKNLKWIGLDLSNGKPRDNKQAGVFEPTIVKVKSLKFATEAAITILRIDDLIKLHPESKDDKHGSYEDAVHSGALND

SEQ ID NO: 634 - protein, 556 aa, Homo sapiens
MEGPLSVFGDRSTGETIRSQNVMAAASIANIVKSSLGPVGLDKMLVDDIGDVTITNDGATILKLLEVEHPAAKVLCELADLQDKEVGDGTTSVVIIAAELLKNADELVKQKIHPTSVISGYRLACKEAVRYINENLIVNTDELGRDCLINAAKTSMSSKIIGINGDFFANMVVDAVLAIKYTDIRGQPRYPVNSVNILKAHGRSQMESMLISGYALNCVVGSQGMPKRIVNAKIACLDFSLQKTKMKLGVQVVITDPEKLDQIRQRESDITKERIQKILATGANVILTTGGIDDMCLKYFVEAGAMAVRRVLKRDLKRIAKASGATILSTLANLEGEETFEAAMLGQAEEVVQERICDDELILIKNTKARTSASIILRGANDFMCDEMERSLHDALCVVKRVLESKSVVPGGGAVEAALSIYLENYATSMGSREQLAIAEFARSLLVIPNTLAVNAAQDSTDLVAKLRAFHNEAQVNPERKNLKWIGLDLSNGKPRDNKQAGVFEPTIVKVKSLKFATEAAITILRIDDLIKLHPESKDDKHGSYEDAVHSGALND

SEQ ID NO: 635 - protein, 556 aa, Homo sapiens; identical to SEQ ID NO: 634

SEQ ID NO: 636 - protein, 97 aa, Homo sapiens
MMVRAAETMTTGSEPAFILLLLPPSALRCLQARQSSSSQPTGLPRAGPELRTGIPRARISSASPARGGSQHSSDGSFCSRRLREVLCVSPGASHSLA

SEQ ID NO: 637 - protein, 184 aa, Homo sapiens [sequence omitted]

SEQ ID NO: 638 - protein, 184 aa, Homo sapiens [sequence omitted]

SEQ ID NO: 639 - protein, 184 aa, Homo sapiens [sequence omitted]

SEQ ID NO: 640 - protein, 884 aa, Homo sapiens
MLGRRAPICPSRLCSRQKQWGKNRPELSDAGIRDQSWRGLGCALRFRTNKAFKLPNLWFDSTRAASLSHPGAHPLSSVAATEGGGACGAQTQLELLRGGLGLSQRGKGGGKEVGFLPANRRARPRCRSMPLRPGSLVPEGAGFPKMAADVSVTHRPPLSPKSGAEVEAGDAAERRAPEEELPPLDPEEIRKRLEHTERQFRNRRKILIRGLPGDVTNQEVHDLLSDYELKYCFVDKYKGTAFVTLLNGEQAEAAINAFHQSRLRERELSVQLQPTDALLCVANLPPSLTQQQFEELVRPFGSLERCFLVYSERTGQSKGYGFAEYMKKDSAARAKSDLLGKPLGPRTLYVHWTDAGQLTPALLHSRCLCVDRLPPGFNDVDALCRALSAVHSPTFCQLACGQDGQLKGFAVLEYETAEMAEEAQQQADGLSLGGSHLRVSFCAPGPPGRSMLAALIAAQATALNRGKGLLPEPNILQLLNNLGPSASLQLLLNPLLHGSAGGKQGLLGAPPAMPLLNGPALSTALLQLALQTQGQKKPGILGDSPLGALQPGAQPANPLLGELPAGGGLPPELPPRRGKPPPLLPSVLGPAGGDREALGLGPPAAQLTPPPAPVGLRGSGLRGLQKDSGPLPTPPGVSLLGEPPKDYRIPLNPYLNLHSLLPASNLAGKEARGWGGAGRSRRPAEGPPTNPPAPGGGSSSSKAFQLKSRLLSPLSSARLPPEPGLSDSYSFDYPSDMGPRRLFSHPREPALGPHGPSRHKMSPPPSGFGERSSGGSGGGPLSHFYSGSPTSYFTSGLQAGLKQSHLSKAIGSSPLGSGEGLLGLSPGPNGHSHLLKTPLGGQKRSFAHLLPSPEPSPEGSYVGQHSQGLGGHYADSYLKRKRIF

SEQ ID NO: 641 - protein, 194 aa, Homo sapiens
MEAEPIPDSSMPAKLLAPPCLNLERLGGSPSQEKPRTPGCCRISERCRRPRKQLNPCRGTERVDPGFEGVTLKFQIKPDSSLQIIPTYSLPCSSRSQESPADAVGGPAAHPGGTEAHSAGSEALEPRRCASCRTQRTPLWRDAEDGTPLCNACGIRYKKYGTRCSSCWLVPRKNVQPKRLCGRCGVSLDPIQEG

SEQ ID NO: 642 - protein, 524 aa, Homo sapiens
MATMVPSVLWPRACWTLLVCCLLTPGVQGQEFLLRVEPQNPVLSAGGSLFVNCSTDCPSSEKIALETSLSKELVASGMGWAAFNLSNVTGNSRILCSVYCNGSQITGSSNITVYRLPERVELAPLPPWQPVGQNFTLRCQVEDGSPRTSLTVVLLRWEEELSRQPAVEEPAEVTATVLASRDDHGAPFSCRTELDMQPQGLGLFVNTSAPRQLRTFVLPVTPPRLVAPRFLEVETSWPVDCTLDGLFPASEAQVYLALGDQMLNATVMNHGDTLTATATATARADQEGAREIVCNVTLGGERREARENLTVFSFLGPIVNLSEPTAHEGSTVTVSCMAGARVQVTLDGVPAAAPGQPAQLQLNATESDDGRSFFCSATLEVDGEFLHRNSSVQLRVLYGPKIDRATCPQHLKWKDKTRHVLQCQARGNPYPELRCLKEGSSREVPVGIPFFVNVTHNAGSSHFVPVFVAVLLTLGVVTIVLALMYVFREHQRSGSYHVREESTYLPLTSMQPTEAMGEEPSRAE

SEQ ID NO: 643 - protein, 547 aa, Homo sapiens
MATMVPSVLWPRACWTLLVCCLLTPGVQGQEFLLRVEPQNPVLSAGGSLFVNCSTDCPSSEKIALETSLSKELVASGMGWAAFNLSNVTGNSRILCSVYCNGSQITGSSNITVYRLPERVELAPLPPWQPVGQNFTLRCQVEDGSPRTSLTVVLLRWEEELSRQPAVEEPAEVTATVLASRDDHGAPFSCRTELDMQPQGLGLFVNTSAPRQLRTFVLPVTPPRLVAPRFLEVETSWPVDCTLDGLFPASEAQVYLALGDQMLNATVMNHGDTLTATATATARADQEGAREIVCNVTLGGERREARENLTVFSFLGPIVNLSEPTAHEGSTVTVSCMAGARVQVTLDGVPAAAPGQPAQLQLNATESDDGRSFFCSATLEVDGEFLHRNSSVQLRVLYGPKIDRATCPQHLKWKDKTRHVLQCQARGNPYPELRCLKEGSSREVPVGIPFFVNVTHNGTYQCQASSSRGKYTLVVVMDIEAGSSHFVPVFVAVLLTLGVVTIVLALMYVFREHQRSGSYHVREESTYLPLTSMQPTEAMGEEPSRAE

SEQ ID NO: 644 - protein, 186 aa, Homo sapiens
MHVMAASMARGGVSARVLLQAARGTWWNRPGGTSGSGEGVALGTTRKFQATGSRPAGEEDAGGPERPGDVVNVVFVDRSGQRIPVSGRVGDNVLHLAQRHGVDLEGACEASLACSTCHVYVSEDHLDLLPPPEEREDDMLDMAPLLQENSRLGCQIVLTPELEGAEFTLPKITRNFYVDGHVPKPH

SEQ ID NO: 645 - protein, 547 aa, Homo sapiens; identical to SEQ ID NO: 643

SEQ ID NO: 646 - protein, 547 aa, Homo sapiens; identical to SEQ ID NO: 643

SEQ ID NO: 647 - protein, 92 aa, Homo sapiens
QGGGRIKSIILRQTSALRELLPPKKAGTWADCVSPPCGERDRCEGWADRHTACSSPASPPQHRAKSFKKDLGHCLFLREERPACAPRLTGPV

SEQ ID NO: 648 - protein, 739 aa, Homo sapiens
MATLPAEPSAGPAAGGEAVAAAAATEEEEEEARQLLQTLQAAEGEAAAAAGAGAGAAAAGAEGPGSPGVPGSPPEAASEPPTGLRFSPEQVACVCEALLQAGHAGRLSRFLGALPPAERLRGSDPVLRARALVAFQRGEYAELYRLLESRPFPAAHHAFLQDLYLRARYHEAERARGRALGAVDKYRLRKKFPLPKTIWDGEETVYCFKERSRAALKACYRGNRYPTPDEKRRLATLTGLSLTQVSNWFKNRRQRDRTGAGGGAPCKSESDGNPTTEDESSRSPEDLERGAAPVSAEAAAQGSIFLAGTGPPAPCPASSSILVNGSFLAASGSPAVLLNGGPVIINGLALGEASSLGPLLLTGGGGAPPPQPSPQGASETKTSLVLDPQTGEVRLEEAQSEAPETKGAQVAAPGPALGEEVLGPLAQVVPGPPTAATFPLPPGPVPAVAAPQVVPLSPPPGYPTGLSPTSPLLNLPQVVPTSQVVTLPQAVGPLQLLAAGPGSPVKVAAAAGPANVHLINSGVGVTALQLPSATAPGNFLLANPVSGSPIVTGVAVQQGKIILTATFPTSMLVSQVLPPAPGLALPLKPETAISVPEGGLPVAPSPALPEAHALGTLSAQQPPPAAATTSSTSLPFSPDSPGLLPNFPAPPPEGLMLSPAAVPVWSAGLELSAGTEGLLEAEKGLGTQAPHTVLRLPDPDPEGLLLGATAGGEVDEGLEAEAKVLTQLQSVPVEEPLEL

SEQ ID NO: 649 - protein, 247 aa, Homo sapiens
MDCGFHAREWISPAFCQWFVREAVRTYGREIQVTELLDKLDFYVLPVLNIDGYIYTWTKSRFWRKTRSTHTGSSCIGTDPNRNFDAGWCEIGASRNPCDETYCGPAAESEKETKALADFIRNKLSSIKAYLTIHSYSQMMIYPYSYAYKLGENNAELNALAKATVKELASLHGTKYTYGPGATTIYPAAGGSDDWAYDQGIRYSFTFELRDTGRYGFLLPESQIRATCEETFLAIKYVASYVLEHLY

SEQ ID NO: 650 - protein, 417 aa, Homo sapiens
MLALLVLVTVALASAHHGGEHFEGEKVFRVNVEDENHINIIRELASTTQIDFWKPDSVTQIKPHSTVDFRVKAEDTVTVENVLKQNELQYKVLISNLRNVVEAQFDSRVRATGHSYEKYNKWETIEAWTQQVATENPALISRSVIGTTFEGRAIYLLKVGKAGQNKPAIFMDCGFHAREWISPAFCQWFVREAVRTYGREIQVTELLDKLDFYVLPVLNIDGYIYTWTKSRFWRKTRSTHTGSSCIGTDPNRNFDAGWCEIGASRNPCDETYCGPAAESEKETKALADFIRNKLSSIKAYLTIHSYSQMMIYPYSYAYKLGENNAELNALAKATVKELASLHGTKYTYGPGATTIYPAAGGSDDWAYDQGIRYSFTFELRDTGRYGFLLPESQIRATCEETFLAIKYVASYVLEHLY

SEQ ID NO: 651 - protein, 868 aa, Homo sapiens [sequence omitted]

SEQ ID NO: 652 - protein, 448 aa, Homo sapiens
MKIHYSRQTALESTSYIQLPEAELRMERMLPLLALGLLAAGFCPAVLCHPNSPLDEENLTQENQDRGTHVDLGLASANVDFAFSLYKQLVLKAPDKNVIFSPLSISTALAFLSLGAHNTTLTEILKGLKFNLTETSEAEIHQSFQHLLRTLNQSSDELQLSMGNAMFVKEQLSLLDRFTEDAKRLYGSEAFATDFQDSAAAKKLINDYVKNGTRGKITDLIKDLDSQTMMVLVNYIFFKAKWEMPFDPQDTHQSRFYLSKKKWVMVPMMSLHHLTIPYFRDEELSCTVVELKYTGNASALFILPDQDKMEEVEAMLLPETLKRWRDSLEFREIGELYLPKFSISRDYNLNDILLQLGIEEAFTSKADLSGITGARNLAVSQVVHKAVLDVFEEGTEASAATAVKITLLSALVETRTIVRFNRPFLMIIVPTDTQNIFFMSKVTNPKQA

SEQ ID NO: 653 - protein, 1244 aa, Homo sapiens
MESHSRAGKSRKSAKFRSISRSLMLCNAKTSDDGSSPDEKYPDPFEISLAQGKEGIFHSSVQLADTSEAGPSSVPDLALASEAAQLQAAGNDRGKTCRRIFFMKESSTASSREKPGKLEAQSSNFLFPKACHQRARSNSTSVNPYCTREIDFPMTKKSAAPTDRQPYSLCSNRKSLSQQLDCPAGKAAGTSRPTRSLSTAQLVQPSGGLQASVISNIVLMKGQAKGLGFSIVGGKDSIYGPIGIYVKTIFAGGAAAADGRLQEGDEILELNGESMAGLTHQDALQKFKQAKKGLLTLTVRTRLTAPPSLCSHLSPPLCRSLSSSTCITKDSSSFALESPSAPISTAKPNYRIMVEVSLQKEAGVGLGIGLCSVPYFQCISGIFVHTLSPGSVAHLDGRLRCGDEIVEISDSPVHCLTLNEVYTILSHCDPGPVPIIVSRHPDPQVSEQQLKEAVAQAVENTKFGKERHQWSLEGVKRLESSWHGRPTLEKEREKNSAPPHRRAQKVMIRSSSDSSYMSGSPGGSPGSGSAEKPSSDVDISTHSPSLPLAREPVVLSIASSRLPQESPPLPESRDSHPPLRLKKSFEILEARELLPLLLPQEDTAGRSPSASAGCPGPGIGPQTKSSTEGEPGWRRASPVTQTSPIKHPLLKRQARMDYSFDTTAEDPWVRISDCIKNLFSPIMSENHGHMPLQPNASLNEEEGTQGHPDGTPPKLDTANGTPKVYKSADSSTVKKGPPVAPKPAWFRQSLKGLRNRASDPRGLPDPALSTQPAPASREHLGSHIRASSSSSSIRQRISSFETFGSSQLPDKGAQRLSLQPSSGEAAKPLGKHEEGRFSGLLGRGAAPTLVPQQPEQVLSSGSPAASEARDPGVSESPPPGRQPNQKTLPPGPDPLLRLLSTQAEESQGPVLKMPSQRARSFPLTRSQSCETKLLDEKTSKLYSISSQVSSAVMKSLLCLPSSISCAQTPCIPKEGASPTSSSNEDSAANGSAETSALDTGFSLNLSELREYTEGLTEAKEDDDGDHSSLQSGQSVISLLSSEELKKLIEEVKVLDEATLKQLDGIHVTILHKEEGAGLGFSLAGGADLENKVITVHRVFPNGLASQEGTIQKGNEVLSINGKSLKGTTHHDALAILRQAREPRQAVIVTRKLTPEAMPDLNSSTDSAASASAASDVSVESTAEATVCTVTLEKMSAGLGFSLEGGKGSLHGDKPLTINRIFKGGHRGLRARGKIPVNIVAQKSH

SEQ ID NO: 654 - protein, 1291 aa, Homo sapiens
MSLQKRVFPRRQNGTHEVAAKPCPVATRQPRARDQERKKGSFTSSLRMESHSRAGKSRKSAKFRSISRSLMLCNAKTSDDGSSPDEKYPDPFEISLAQGKEGIFHSSVQLADTSEAGPSSVPDLALASEAAQLQAAGNDRGKTCRRIFFMKESSTASSREKPGKLEAQSSNFLFPKACHQRARSNSTSVNPYCTREIDFPMTKKSAAPTDRQPYSLCSNRKSLSQQLDCPAGKAAGTSRPTRSLSTAQLVQPSGGLQASVISNIVLMKGQAKGLGFSIVGGKDSIYGPIGIYVKTIFAGGAAAADGRLQEGDEILELNGESMAGLTHQDALQKFKQAKKGLLTLTVRTRLTAPPSLCSHLSPPLCRSLSSSTCITKDSSSFALESPSAPISTAKPNYRIMVEVSLQKEAGVGLGIGLCSVPYFQCISGIFVHTLSPGSVAHLDGRLRCGDEIVEISDSPVHCLTLNEVYTILSHCDPGPVPIIVSRHPDPQVSEQQLKEAVAQAVENTKFGKERHQWSLEGVKRLESSWHGRPTLEKEREKNSAPPHRRAQKVMIRSSSDSSYMSGSPGGSPGSGSAEKPSSDVDISTHSPSLPLAREPVVLSIASSRLPQESPPLPESRDSHPPLRLKKSFEILEARELLPLLLPQEDTAGRSPSASAGCPGPGIGPQTKSSTEGEPGWRRASPVTQTSPIKHPLLKRQARMDYSFDTTAEDPWVRISDCIKNLFSPIMSENHGHMPLQPNASLNEEEGTQGHPDGTPPKLDTANGTPKVYKSADSSTVKKGPPVAPKPAWFRQSLKGLRNRASDPRGLPDPALSTQPAPASREHLGSHIRASSSSSSIRQRISSFETFGSSQLPDKGAQRLSLQPSSGEAAKPLGKHEEGRFSGLLGRGAAPTLVPQQPEQVLSSGSPAASEARDPGVSESPPPGRQPNQKTLPPGPDPLLRLLSTQAEESQGPVLKMPSQRARSFPLTRSQSCETKLLDEKTSKLYSISSQVSSAVMKSLLCLPSSISCAQTPCIPKEGASPTSSSNEDSAANGSAETSALDTGFSLNLSELREYTEGLTEAKEDDDGDHSSLQSGQSVISLLSSEELKKLIEEVKVLDEATLKQLDGIHVTILHKEEGAGLGFSLAGGADLENKVITVHRVFPNGLASQEGTIQKGNEVLSINGKSLKGTTHHDALAILRQAREPRQAVIVTRKLTPEAMPDLNSSTDSAASASAASDVSVESTAEATVCTVTLEKMSAGLGFSLEGGKGSLHGDKPLTINRIFKGGHRGLRARGKIPVNIVAQKSH

SEQ ID NO: 655 - protein, 501 aa, Homo sapiens
MSLQKRVFPRRQNGTHEVAAKPCPVATRQPRARDQERKKGSFTSSLRMESHSRAGKSRKSAKFRSISRSLMLCNAKTSDDGSSPDEKYPDPFEISLAQGKEGIFHSSVQLADTSEAGPSSVPDLALASEAAQLQAAGNDRGKTCRRIFFMKESSTASSREKPGKLEAQSSNFLFPKACHQRARSNSTSVNPYCTREIDFPMTKKSAAPTDRQPYSLCSNRKSLSQQLDCPAGKAAGTSRPTRSLSTAQLVQPSGGLQASVISNIVLMKGQAKGLGFSIVGGKDSIYGPIGIYVKTIFAGGAAAADGRLQEGDEILELNGESMAGLTHQDALQKFKQAKKGLLTLTVRTRLTAPPSLCSHLSPPLCRSLSSSTCITKDSSSFALESPSAPISTAKPNYRIMVEVSLQKEAGVGLGIGLCSVPYFQCISGIFVHTLSPGSVAHLDGRLRCGDEIVEISDSPVHCLTLNEVYTILSHCDPGPVPIIVSRHPDPQKEEMEAQEVK

SEQ ID NO: 656 - protein, 131 aa, Homo sapiens
LVDMKTGQSPKSSEMTTLARQLTRLRIRQGKTVHEDALIFLYNALLNDMSSLSILAKRKYNFKLKLSSDSVKLNSKETVTLGFIPLRQEAGQWGIDMSRSSVINLQFMLFLGDVPIMQEASPRLARATCLL

SEQ ID NO: 657 - protein, 66 aa, Homo sapiens
INPMSHSLALGLFLDKAPSLLESIGLQHDTCAGFFKLYQLYLNKAVEIFKGPDLSWNGEKLNVTKM

SEQ ID NO: 658 - protein, 196 aa, Homo sapiens [sequence omitted]

SEQ ID NO: 659 - protein, 466 aa, Homo sapiens
MELRKLYGPLCGYYLGRRMFIVISEPDMIKQVLVENFSNFTNRMASGLEFKSVADSVLFLRDKRWEEVRGALMSAFSPEKLNEMVPLISQACDLLLAHLKRYAESGDAFDIQRCYCNYTTDVVASVAFGTPVDSWQAPEDPFVKHCKRFFEFCIPRPILVLLLSFPSIMVPLARILPNKNRDELNGFFNKLIRNVIALRDQQAAEERRRDFLQMVLDARHSASPMGVQDFDIVRDVFSSTGCKPNPSRQHQPSPMARPLTVDEIVGQAFIFLIAGYEIITNTLSFATYLLATNPDCQEKLLREVDVFKEKHMAPEFCSLEEGLPYLDMVIAETLRMYPPAFRFTREAAQDCEVLGQRIPAGAVLEMAVGALHHDPEHWPSPETFNPERFTAEARQQHRPFTYLPFGAGPRSCLGVRLGLLEVKLTLLHVLHKFRFQACPETQVPLQLESKSALGPKNGVYIKIVSR

SEQ ID NO: 660 - protein, 357 aa, Homo sapiens
MAPRRVRSFLRGLPALLLLLLFLGPWPAASHGGKYSREKNQPKPSPKRESGEEFRMEKLNQLWEKAQRLHLPPVRLAELHADLKIQERDELAWKKLKLDGLDEDGEKEARLIRNLNVILAKYGLDGKKDARQVTSNSLSGTQEDGLDDPRLEKLWHKAKTSGKFSGEELDKLWREFLHHKEKVHEYNVLLETLSRTEEIHENVISPSDLSDIKGSVLHSRHTELKEKLRSINQGLDRLRRVSHQGYSTEAEFEEPRVIDLWDLAQSANLTDKELEAFREELKHFEAKIEKHNHYQKQLEIAHEKLRHAESVGDGERVSRSREKHALLEGRTKELGYTVKKHLQDLSGRISRARHNEL

SEQ ID NO: 661 - protein, 357 aa, Homo sapiens; identical to SEQ ID NO: 660

SEQ ID NO: 662 - protein, 466 aa, Homo sapiens
MTTSPILQLLLRLSLCGLLLQRAETGSKGQTAGELYQRWERYRRECQETLAAAEPPSGLACNGSFDMYVCWDYAAPNATARASCPWYLPWHHHVAAGFVLRQCGSDGQWGLWRDHTQCENPEKNEAFLDQRLILERLQVMYTVGYSLSLATLLLALLILSLFRRLHCTRNYIHINLFTSFMLRAAAILSRDRLLPRPGPYLGDQALALWNQALAACRTAQIVTQYCVGANYTWLLVEGVYLHSLLVLVGGSEEGHFRYYLLLGWGAPALFVIPWVIVRYLYENTQCWERNEVKAIWWIIRTPILMTILINFLIFIRILGILLSKLRTRQMRCRDYRLRLARSTLTLVPLLGVHEVVFAPVTEEQARGALRFAKLGFEIFLSSFQGFLVSVLYCFINKEVQSEIRRGWHHCRLRRSLGEEQRQLPERAFRALPSGSGPGEVPTSRGLSSGTLPGPGNEASRELESYC

SEQ ID NO: 663 - protein, 419 aa, Homo sapiens
MTTSPILQLLLRLSLCGLLLQRAETGSKGQTAGELYQRWERYRRECQETLAAAEPPSGLACNGSFDMYVCWDYAAPNATARASCPWYLPWHHHVAAGFVLRQCGSDGQWGLWRDHTQCENPEKNEAFLDQRLILERLQVMYTVGYSLSLATLLLALLILSLFRRLHCTRNYIHINLFTSFMLRAAAILSRDRLLPRPGPYLGDQALALWNQALAACRTAQIVTQYCVGANYTWLLVEGVYLHSLLVLVGGSEEGHFRYYLLLGWGAPALFVIPWVIVRYLYENTQCWERNEVKAIWWIIRTPILMTILINFLIFIRILGILLSKLRTRQMRCRDYRLRLARSTLTLVPLLGVHEVVFAPVTEEQARGALRFAKLGFEIFLSSFQGFLVSVLYCFINKEVGRDPAAAPALWRQRGVRRRL

SEQ ID NO: 664 - protein, 510 aa, Homo sapiens
MPLSLGAEMWGPEAWLLLLLLLASFTGRCPAGELETSDVVTVVLGQDAKLPCFYRGDSGEQVGQVAWARVDAGEGAQELALLHSKYGLHVSPAYEGRVEQPPPPRNPLDGSVLLRNAVQADEGEYECRVSTFPAGSFQARLRLRVLVPPLPSLNPGPALEEGQGLTLAASCTAEGSPAPSVTWDTEVKGTTSSRSFKHSRSAAVTSEFHLVPSRSMNGQPLTCVVSHPGLLQDQRITHILHVSFLAEASVRGLEDQNLWHIGREGAMLKCLSEGQPPPSYNWTRLDGPLPSGVRVDGDTLGFPPLTTEHSGIYVCHVSNEFSSRDSQVTVDVLDPQEDSGKQVDLVSASVVVVGVIAALLFCLLVVVVVLMSRYHRRKAQQMTQKYEEELTLTRENSIRRLHSHHTDPRSQPEESVGLRAEGHPDSLKDNSSCSVMSEEPEGRSYSTLTTVREIETQTELLSPGSGRAEEEEDQDEGIKQAMNHFVQENGTLRAKPTGNGIYINGRGHLV

SEQ ID NO: 665 - protein, 485 aa, Homo sapiens
MPLSLGAEMWGPEAWLLLLLLLASFTGRCPAGELETSDVVTVVLGQDAKLPCFYRGDSGEQVGQVAWARVDAGEGAQELALLHSKYGLHVSPAYEGRVEQPPPPRNPLDGSVLLRNAVQADEGEYECRVSTFPAGSFQARLRLRVLVPPLPSLNPGPALEEGQGLTLAASCTAEGSPAPSVTWDTEVKGTTSSRSFKHSRSAAVTSEFHLVPSRSMNGQPLTCVVSHPGLLQDQRITHILHVSFLAEASVRGLEDQNLWHIGREGAMLKCLSEGQPPPSYNWTRLDGPLPSGVRVDGDTLGFPPLTTEHSGIYVCHVSNEFSSRDSQVTVDVLDPQEDSGKQVDLVSASVVVVGVIAALLFCLLVVVVVLMSRYHRRKAQQMTQKYEEELTLTRENSIRRLHSHHTDPRSQSEEPEGRSYSTLTTVREIETQTELLSPGSGRAEEEEDQDEGIKQAMNHFVQENGTLRAKPTGNGIYINGRGHLV

SEQ ID NO: 666 - protein, 732 aa, Homo sapiens [sequence omitted]

SEQ ID NO: 667 - protein, 619 aa, Homo sapiens [sequence omitted]

SEQ ID NO: 668 - protein, 717 aa, Homo sapiens
MAVAVRTLQEQLEKAKESLKNVDENIRKLTGRDPNDVRPIQARLLALSGPGGGRGRGSLLLRRGFSDSGGGPPAKQRDLEGAVSRLGGERRTRRESRQESDPEDDDVKKPALQSSVVATSKERTRRDLIQDQNMDEKGKQRNRRIFGLLMGTLQKFKQESTVATERQKRRQEIEQKLEVQAEEERKQVENERRELFEERRAKQTELRLLEQKVELAQLQEEWNEHNAKIIKYIRTKTKPHLFYIPGRMCPATQKLIEESQRKMNALFEGRRIEFAEQINKMEARPRRQSMKEKEHQVVRNEEQKAEQEEGKVAQREEELEETGNQHNDVEIEEAGEEEEKEIAIVHSDAEKEQEEEEQKQEMEVKMEEETEVRESEKQQDSQPEEVMDVLEMVENVKHVIADQEVMETNRVESVEPSENEASKELEPEMEFEIEPDKECKSLSPGKENVSALDMEKESEEKEEKESEPQPEPVAQPQPQSQPQLQLQSQSQPVLQSQPPSQPEDLSLAVLQPTPQVTQEQGHLLPERKDFPVESVKLTEVPVEPVLTVHPESKSKTKTRSRSRGRARNKTSKSRSRSSSSSSSSSSSTSSSSGSSSSSGSSSSRSSSSSSSSTSGSSSRDSSSSTSSSSESRSRSRGRGHNRDRKHRRSVDRKRRDTSGLERSHKSSKGGSSRDTKGSKDKNSRSDRKRSISESSRSGKRSSRSERDRKSDRKDKRR

SEQ ID NO: 669 - protein, 2480 aa, Homo sapiens [sequence omitted]

SEQ ID NO: 670 - protein, 3116 aa, Homo sapiens
MPGAAGVLLLLLLSGGLGGVQAQRPQQQRQSQAHQQRGLFPAVLNLASNALITTNATCGEKGPEMYCKLVEHVPGQPVRNPQCRICNQNSSNPNQRHPITNAIDGKNTWWQSPSIKNGIEYHYVTITLDLQQVFQIAYVIVKAANSPRPGNWILERSLDDVEYKPWQYHAVTDTECLTLYNIYPRTGPPSYAKDDEVICTSFYSKIHPLENGEIHISLINGRPSADDPSPELLEFTSARYIRLRFQRIRTLNADLMMFAHKDPREIDPIVTRRYYYSVKDISVGGMCICYGHARACPLDPATNKSRCECEHNTCGDSCDQCCPGFHQKPWRAGTFLTKTECEACNCHGKAEECYYDENVARRNLSLNIRGKYIGGGVCINCTQNTAGINCETCTDGFFRPKGVSPNYPRPCQPCHCDPIGSLNEVCVKDEKHARRGLAPGSCHCKTGFGGVSCDRCARGYTGYPDCKACNCSGLGSKNEDPCFGPCICKENVEGGDCSRCKSGFFNLQEDNWKGCDECFCSGVSNRCQSSYWTYGKIQDMSGWYLTDLPGRIRVAPQQDDLDSPQQISISNAEARQALPHSYYWSAPAPYLGNKLPAVGGQLTFTISYDLEEEEEDTERVLQLMIILEGNDLSISTAQDEVYLHPSEEHTNVLLLKEESFTIHGTHFPVRRKEFMTVLANLKRVLLQITYSFGMDAIFRLSSVNLESAVSYPTDGSIAAAVEVCQCPPGYTGSSCESCWPRHRRVNGTIFGGICEPCQCFGHAESCDDVTGECLNCKDHTGGPYCDKCLPGFYGEPTKGTSEDCQPCACPLNIPSNNFSPTCHLDRSLGLICDGCPVGYTGPRCERCAEGYFGQPSVPGGSCQPCQCNDNLDFSIPGSCDSLSGSCLICKPGTTGRYCELCADGYFGDAVDAKNCQPCRCNAGGSFSEVCHSQTGQCECRANVQGQRCDKCKAGTFGLQSARGCVPCNCNSFGSKSFDCEESGQCWCQPGVTGKKCDRCAHGYFNFQEGGCTACECSHLGNNCDPKTGRCICPPNTIGEKCSKCAPNTWGHSITTGCKACNCSTVGSLDFQCNVNTGQCNCHPKFSGAKCTECSRGHWNYPRCNLCDCFLPGTDATTCDSETKKCSCSDQTGQCTCKVNVEGIHCDRCRPGKFGLDAKNPLGCSSCYCFGTTTQCSEAKGLIRTWVTLKAEQTILPLVDEALQHTTTKGIVFQHPEIVAHMDLMREDLHLEPFYWKLPEQFEGKKLMAYGGKLKYAIYFEAREETGFSTYNPQVIIRGGTPTHARIIVRHMAAPLIGQLTRHEIEMTEKEWKYYGDDPRVHRTVTREDFLDILYDIHYILIKATYGNFMRQSRISEISMEVAEQGRGTTMTPPADLIEKCDCPLGYSGLSCEACLPGFYRLRSQPGGRTPGPTLGTCVPCQCNGHSSLCDPETSICQNCQHHTAGDFCERCALGYYGIVKGLPNDCQQCACPLISSSNNFSPSCVAEGLDDYRCTACPRGYEGQYCERCAPGYTGSPGNPGGSCQECECDPYGSLPVPCDPVTGFCTCRPGATGRKCDGCKHWHAREGWECVFCGDECTGLLLGDLARLEQMVMSINLTGPLPAPYKMLYGLENMTQELKHLLSPQRAPERLIQLAEGNLNTLVTEMNELLTRATKVTADGEQTGQDAERTNTRAKSLGEFIKELARDAEAVNEKAIKLNETLGTRDEAFERNLEGLQKEIDQMIKELRRKNLETQKEIAEDELVAAEALLKKVKKLFGESRGENEEMEKDLREKLADYKNKVDDAWDLLREATDKIREANRLFAVNQKNMTALEKKKEAVESGKRQIENTLKEGNDILDEANRLADEINSIIDYVEDIQTKLPPMSEELNDKIDDLSQEIKDRKLAEKVSQAESHAAQLNDSSAVLDGILDEAKNISFNATAAFKAYSNIKDYIDEAEKVAKEAKDLAHEATKLATGPRGLLKEDAKGCLQKSFRILNEAKKLANDVKENEDHLNGLKTRIENADARNGDLLRTLNDTLGKLSAIPNDTAAKLQAVKDKARQANDTAKDVLAQITELHQNLDGLKKNYNKLADSVAKTNAVVKDPSKNIADADATVKNLEQEADRLIDKLKPIKELEDNLKKNISEIKELINQARKQANSIKVSVSSGGDCIRTYKPEIKKGSYNNIVVNVKTAVADNLLFYLGSAKFIDFLAIEMRKGKVSFLWDVGSGVGRVEYPDLTIDDSYWYRIVASRTGRNGTISVRALDGPKASIVPSTHHSTSPPGYTILDVDANAMLFVGGLTGKLKKADAVRVITFTGCMGETYFDNKPIGLWNFREKEGDCKGCTVSPQVEDSEGTIQFDGEGYALVSRPIRWYPNISTVMFKFRTFSSSALLMYLATRDLRDFMSVELTDGHIKVSYDLGSGMASVVSNQNHNDGKWKSFTLSRIQKQANISIVDIDTNQEENIATSSSGNNFGLDLKADDKIYFGGLPTLRNLRPEVNLKKYSGCLKDIEISRTPYNILSSPDYVGVTKGCSLENVYTVSFPKPGFVELSPVPIDVGTEINLSFSTKNESGIILLGSGGTPAPPRRKRRQTGQAYYAILLNRGRLEVHLSTGARTMRKIVIRPEPNLFHDGREHSVHVERTRGIFTVQVDENRRYMQNLTVEQPIEVKKLFVGGAPPEFQPSPLRNIPPFEGCIWNLVINSVPMDFARPVSFKNADIGRCAHQKLREDEDGAAPAEIVIQPEPVPTPAFPTPTPVLTHGPCAAESEPALLIGSKQFGLSRNSHIAIAFDDTKVKNRLTIELEVRTEAESGLLFYMARINHADFATVQLRNGLPYFSYDLGSGDTHTMIPTKINDGQWHKIKIMRSKQEGILYVDGASNRTISPKKADILDVVGMLYVGGLPINYTTRRIGPVTYSIDGCVRNLHMAEAPADLEQPTSSFHVGTCFANAQRGTYFDGTGFAKAVGGFKVGLDLLVEFEFRTTTTTGVLLGISSQKMDGMGIEMIDEKLMFHVDNGAGRFTAVYDAGVPGHLCDGQWHKVTANKIKHRIELTVDGNQVEAQSPNPASTSADTNDPVFVGGFPDDLKQFGLTTSIPFRGCIRSLKLTKGTGKPLEVNFAKALELRGVQPVSCPAN

SEQ ID NO: 671 - protein, 2107 aa, Homo sapiens [sequence omitted]

SEQ ID NO: 672 - protein, 1089 aa, Homo sapiens
MGTSHPAFLVLGCLLTGLSLILCQLSLPSILPNENEKVVQLNSSFSLRCFGESEVSWQYPMSEEESSDVEIRNEENNSGLFVTVLEVSSASAAHTGLYTCYYNHTQTEENELEGRHIYIYVPDPDVAFVPLGMTDYLVIVEDDDSAIIPCRTTDPETPVTLHNSEGVVPASYDSRQGFNGTFTVGPYICEATVKGKKFQTIPFNVYALKATSELDLEMEALKTVYKSGETIVVTCAVFNNEVVDLQWTYPGEVKGKGITMLEEIKVPSIKLVYTLTVPEATVKDSGDYECAARQATREVKEMKKVTISVHEKGFIEIKPTFSQLEAVNLHEVKHFVVEVRAYPPPRISWLKNNLTLIENLTEITTDVEKIQEIRYRSKLKLIRAKEEDSGHYTIVAQNEDAVKSYTFELLTQVPSSILDLVDDHHGSTGGQTVRCTAEGTPLPDIEWMICKDIKKCNNETSWTILANNVSNIITEIHSRDRSTVEGRVTFAKVEETIAVRCLAKNLLGAENRELKLVAPTLRSELTVAAAVLVLLVIVIISLIVLVVIWKQKPRYEIRWRVIESISPDGHEYIYVDPMQLPYDSRWEFPRDGLVLGRVLGSGAFGKVVEGTAYGLSRSQPVMKVAVKMLKPTARSSEKQALMSELKIMTHLGPHLNIVNLLGACTKSGPIYIITEYCFYGDLVNYLHKNRDSFLSHHPEKPKKELDIFGLNPADESTRSYVILSFENNGDYMDMKQADTTQYVPMLERKEVSKYSDIQRSLYDRPASYKKKSMLDSEVKNLLSDDNSEGLTLLDLLSFTYQVARGMEFLASKNCVHRDLAARNVLLAQGKIVKICDFGLARDIMHDSNYVSKGSTFLPVKWMAPESIFDNLYTTLSDVWSYGILLWEIFSLGGTPYPGMMVDSTFYNKIKSGYRMAKPDHATSEVYEIMVKCWNSEPEKRPSFYHLSEIVENLLPGQYKKSYEKIHLDFLKSDHPAVARMRVDSDNAYIGVTYKNEEDKLKDWEGGLDEQRLSADSGYIIPLPDIDPVPEEEDLGKRNRHSSQTSEESAIETGSSSSTFIKREDETIEDIDMMDDIGIDSSDLVEDSFL

SEQ ID NO: 673 - protein, 218 aa, Homo sapiens
MGTSHPAFLVLGCLLTGLSLILCQLSLPSILPNENEKVVQLNSSFSLRCFGESEVSWQYPMSEEESSDVEIRNEENNSGLFVTVLEVSSASAAHTGLYTCYYNHTQTEENELEGRHIYIYVPDPDVAFVPLGMTDYLVIVEDDDSAIIPCRTTDPETPVTLHNSEGVVPASYDSRQGFNGTFTVGPYICEATVKGKKFQTIPFNVYALKGTCIISFLL

SEQ ID NO: 674 - protein, 56 aa, Homo sapiens
MVTRFLGPRYRELVKNWVPTAYTWGAVGAVGLVWATDWRLILDWVPYINGKFKKDN

SEQ ID NO: 675 - protein, 56 aa, Homo sapiens; identical to SEQ ID NO: 674

SEQ ID NO: 676 - protein, 557 aa, Homo sapiens
MIVVFGLEYIVRVWSAGCCCRYRGWQGRFRFARKPFCVIDFIVFVASVAVIAAGTQGNIFATSALRSMRFLQILRMVRMDRRGGTWKLLGSVVYAHSKELITAWYIGFLVLIFASFLVYLAEKDANSDFSSYADSLWWGTITLTTIGYGDKTPHTWLGRVLAAGFALLGISFFALPAGILGSGFALKVQEQHRQKHFEKRRMPAANLIQAAWRLYSTDMSRAYLTATWYYYDSILPSFRELALLFEHVQRARNGGLRPLEVRRAPVPDGAPSRYPPVATCHRPGSTSFCPGESSRMGIKDRIRMGSSQRRTGPSKQHLAPPTMPTSPSSEQVGEATSPTKVQKSWSFNDRTRFRASLRLKPRTSAEDAPSEEVAEEKSYQCELTVDDIMPAVKTVIRSIRILKFLVAKRKFKETLRPYDVKDVIEQYSAGHLDMLGRIKSLQTRVDQIVGRGPGDRKAREKGDKGPSDAEVVDEISMMGRVVKVEKQVQSIEHKLDLLLGFYSRCLRSGTSASLGAVQVPLFDPDITSDYHSPVDHEDISVSAQTLSISRSVSTNMD

SEQ ID NO: 677 - protein, 105 aa, Homo sapiens
MPGRTEGSSSGRPAASGPPSALPTPSRPYVAHLAGAQPREWERALGPWALTQLPAMQESHPSTHSETAVERARRMGLPYDQGDMGRSPPSFHDRGSAINSVLGYA

SEQ ID NO: 678 - protein, 419 aa, Homo sapiens
MKNYKAIGKIGEGTFSEVMKMQSLRDGNYYACKQMKQRFESIEQVNNLREIQALRRLNPHPNILMLHEVVFDRKSGSLALICELMDMNIYELIRGRRYPLSEKKIMHYMYQLCKSLDHIHRNGIFHRDVKPENILIKQDVLKLGDFGSCRSVYSKQPYTEYISTRWYRAPECLLTDGFYTYKMDLWSAGCVFYEIASLQPLFPGVNELDQISKIHDVIGTPAQKILTKFKQSRAMNFDFPFKKGSGIPLLTTNLSPQCLSLLHAMVAYDPDERIAAHQALQHPYFQEQRKTEKRALGSHRKAGFPEHPVAPEPLSNSCQISKEGRKQKQSLKQEEDRPKRRGPAYVMELPKLKLSGVVRLSSYSSPTLQSVLGSGTNGRVPVLRPLKCIPASKKTDPQKDLKPAPQQCRLPTIVRKGGR

SEQ ID NO: 679 - protein, 147 aa, Homo sapiens
MDLWSAGCVFYEIASLQPLFPGVNELDQISKIHDVIGTPAQKILTKFKQSRAMNFDFPFKKGSGIPLLTTNLSPQCLSLLHAMVAYDPDERIAAHQALQHPYFQEQRTQNGSEDEASAVLLPIQTRSSLNPLLSTCMLPGRSVTLLV

SEQ ID NO: 680 - protein, 185 aa, Homo sapiens
MNFDFPFKKGSGIPLLTTNLSPQCLSLLHAMVAYDPDERIAAHQALQHPYFQEQRKTEKRALGSHRKAGFPEHPVAPEPLSNSCQISKEGRKQKQSLKQEEDRPKRRGPAYVMELPKLKLSGVVRLSSYSSPTLQSVLGSGTNGRVPVLRPLKCIPASKKTDPQKDLKPAPQQCRLPTIVRKGGR

SEQ ID NO: 681 - protein, 297 aa, Homo sapiens
MKNYKAIGKIGEGTFSEVMKMQSLRDGNYYACKQMKQRFESDRKSGSLALICELMDMNIYELIRGRRYPLSEKKIMHYMYQLCKSLDHIHRNGIFHRDVKPENILIKDVLKLGDFGSCRSVYSKQPYTEYISTRWYRAPECLLTDGFYTYKMDLWSAGCVFYEIASLQPLFPGVNELDQISKIHDVIGTPAQKILTKFKQWPMIPMRESPPTRPCSTPTSKNRETVPKARGGPSQETRTGLCHGTAQTKAFGSGQTVVLLQPHAAVRAWIWNKWKSAGAETLEVHPCEQEDRSAEGP

SEQ ID NO: 682 - protein, 331 aa, Homo sapiens [sequence omitted]

SEQ ID NO: 683 - protein, 824 aa, Homo sapiens
MRQSLLFLTSVVPFVLAPRPPDDPGFGPHQRLEKLDSLLSDYDILSLSNIQQHSVRKRDLQTSTHVETLLTFSALKRHFKLYLTSSTERFSQNFKVVVVDGKNESEYTVKWQDFFTGHVVGEPDSRVLAHIRDDDVIIRINTDGAEYNIEPLWRFVNDTKDKRMLVYKSEDIKNVSRLQSPKVCGYLKVDNEELLPKGLVDREPPEELVHRVKRRADPDPMKNTCKLLVVADHRFYRYMGRGEESTTTNYLIELIDRVDDIYRNTSWDNAGFKGYGIQIEQIRILKSPQEVKPGEKHYNMAKSYPNEEKDAWDVKMLLEQFSFDIAEEASKVCLAHLFTYQDFDMGTLGLAYVGSPRANSHGGVCPKAYYSPVGKKNIYLNSGLTSTKNYGKTILTKEADLVTTHELGHNFGAEHDPDGLAECAPNEDQGGKYVMYPIAVSGDHENNKMFSNCSKQSIYKTIESKAQECFQERSNKVCGNSRVDEGEECDPGIMYLNNDTCCNSDCTLKEGVQCSDRNSPCCKNCQFETAQKKCQEAINATCKGVSYCTGNSSECPPPGNAEDDTVCLDLGKCKDGKCIPFCEREQQLESCACNETDNSCKVCCRDLSGRCVPYVDAEQKNLFLRKGKPCTVGFCDMNGKCEKRVQDVIERFWDFIDQLSINTFGKFLADNIVGSVLVFSLIFWIPFSILVHCVDKKLDKQYESLSLFHPSNVEMLSSMDSASVRIIKPFPAPQTPGRLQPAPVIPSAPAAPKLDHQRMDTIQEDPSTDSHMDEDGFEKDPFPNSSTAAKSFEDLTDHPVTRSEKAASFKLQRQNRVDSKETEC

SEQ ID NO: 684 - protein, 807 aa, Homo sapiens
MRQSLLFLTSVVPFVLAPRPPDDPGFGPHQRLEKLDSLLSDYDILSLSNIQQHSVRKRDLQTSTHVETLLTFSALKRHFKLYLTSSTERFSQNFKVVVVDGKNESEYTVKWQDFFTGHVVGEPDSRVLAHIRDDDVIIRINTDGAEYNIEPLWRFVNDTKDKRMLVYKSEDIKNVSRLQSPKVCGYLKVDNEELLPKGLVDREPPEELVHRVKRRADPDPMKNTCKLLVVADHRFYRYMGRGEESTTTNYLIELIDRVDDIYRNTSWDNAGFKGYGIQIEQIRILKSPQEVKPGEKHYNMAKSYPNEEKDAWDVKMLLEQFSFDIAEEASKVCLAHLFTYQDFDMGTLGLAYVGSPRANSHGGVCPKAYYSPVGKKNIYLNSGLTSTKNYGKTILTKEADLVTTHELGHNFGAEHDPDGLAECAPNEDQGGKYVMYPIAVSGDHENNKMFSNCSKQSIYKTIESKAQECFQERSNKVCGNSRVDEGEECDPGIMYLNNDTCCNSDCTLKEGVQCSDRNSPCCKNCQFETAQKKCQEAINATCKGVSYCTGNSSECPPPGNAEDDTVCLDLGKCKDGKCIPFCEREQQLESCACNETDNSCKVCCRDLSGRCVPYVDAEQKNLFLRKGKPCTVGFCDMNGKCEKRVQDVIERFWDFIDQLSINTFGKFLADNIVGSVLVFSLIFWIPFSILVHCVNVEMLSSMDSASVRIIKPFPAPQTPGRLQPAPVIPSAPAAPKLDHQRMDTIQEDPSTDSHMDEDGFEKDPFPNSSTAAKSFEDLTDHPVTRSEKAASFKLQRQNRVDSKETEC

SEQ ID NO: 685 - protein, 819 aa, Homo sapiens
MRQSLLFLTSVVPFVLAPRPPDDPGFGPHQRLEKLDSLLSDYDILSLSNIQQHSVRKRDLQTSTHVETLLTFSALKRHFKLYLTSSTERFSQNFKVVVVDGKNESEYTVKWQDFFTGHVVGEPDSRVLAHIRDDDVIIRINTDGAEYNIEPLWRFVNDTKDKRMLVYKSEDIKNVSRLQSPKVCGYLKVDNEELLPKGLVDREPPEELVHRVKRRADPDPMKNTCKLLVVADHRFYRYMGRGEESTTTNYLIELIDRVDDIYRNTSWDNAGFKGYGIQIEQSPQEVKPGEKHYNMAKSYPNEEKDAWDVKMLLEQFSFDIAEEASKVCLAHLFTYQDFDMGTLGLAYVGSPRANSHGGVCPKAYYSPVGKKNIYLNSGLTSTKNYGKTILTKEADLVTTHELGHNFGAEHDPDGLAECAPNEDQGGKYVMYPIAVSGDHENNKMFSNCSKQSIYKTIESKAQECFQERSNKVCGNSRVDEGEECDPGIMYLNNDTCCNSDCTLKEGVQCSDRNSPCCKNCQFETAQKKCQEAINATCKGVSYCTGNSSECPPPGNAEDDTVCLDLGKCKDGKCIPFCEREQQLESCACNETDNSCKVCCRDLSGRCVPYVDAEQKNLFLRKGKPCTVGFCDMNGKCEKRVQDVIERFWDFIDQLSINTFGKFLADNIVGSVLVFSLIFWIPFSILVHCVDKKLDKQYESLSLFHPSNVEMLSSMDSASVRIIKPFPAPQTPGRLQPAPVIPSAPAAPKLDHQRMDTIQEDPSTDSHMDEDGFEKDPFPNSSTAAKSFEDLTDHPVTRSEKAASFKLQRQNRVDSKETEC

SEQ ID NO: 686 - protein, 824 aa, Homo sapiens; identical to SEQ ID NO: 683

SEQ ID NO: 687 - protein, 807 aa, Homo sapiens; identical to SEQ ID NO: 684

SEQ ID NO: 688 - protein, 680 aa, Homo sapiens [sequence omitted]

SEQ ID NO: 689 - protein, 635 aa, Homo sapiens
MPSWALFMVTSCLLLAPQNLAQVSSQDVSLLASDSEPLKCFSRTFEDLTCFWDEEEAAPSGTYQLLYAYPREKPRACPLSSQSMPHFGTRYVCQFPDQEEVRLFFPLHLWVKNVFLNQTRTQRVLFVDSVGLPAPPSIIKAMGGSQPGELQISWEEPAPEISDFLRYELRYGPRDPKNSTGPTVIQLIATETCCPALQRPHSASALDQSPCAQPTMPWQDGPKQTSPSREASALTAEGGSCLISGLQPGNSYWLQLRSEPDGISLGGSWGSWSLPVTVDLPGDAVALGLQCFTLDLKNVTCQWQQQDHASSQGFFYHSRARCCPRDRYPIWENCEEEEKTNPGLQTPQFSRCHFKSRNDSIIHILVEVTTAPGTVHSYLGSPFWIHQAVRLPTPNLHWREISSGHLELEWQHPSSWAAQETCYQLRYTGEGHQDWKVLEPPLGARGGTLELRPRSRYRLQLRARLNGPTYQGPWSSWSDPTRVETATETAWISLVTALHLVLGLSAVLGLLLLRWQFPAHYRRLRHALWPSLPDLHRVLGQYLRDTAALSPPKATVSDTCEEVEPSLLEILPKSSERTPLPLCSSQAQMDYRRLQPSCLGTMPLSVCPPMAESGSCCTTHIANHSYLPLSYWQQP

SEQ ID NO: 690 - protein, 549 aa, Homo sapiens
MPSWALFMVTSCLLLAPQNLAQVSSQDVSLLASDSEPLKCFSRTFEDLTCFWDEEEAAPSGTYQLLYAYPREKPRACPLSSQSMPHFGTRYVCQFPDQEEVRLFFPLHLWVKNVFLNQTRTQRVLFVDSVGLPAPPSIIKAMGGSQPGELQISWEEPAPEISDFLRYELRYGPRDPKNSTGPTVIQLIATETCCPALQRPHSASALDQSPCAQPTMPWQDGPKQTSPSREASALTAEGGSCLISGLQPGNSYWLQLRSEPDGISLGGSWGSWSLPVTVDLPGDAVALGLQCFTLDLKNVTCQWQQQDHASSQGFFYHSRARCCPRDRYPIWENCEEEEKTNPGLQTPQFSRCHFKSRNDSIIHILVEVTTAPGTVHSYLGSPFWIHQAVRLPTPNLHWREISSGHLELEWQHPSSWAAQETCYQLRYTGEGHQDWKVLEPPLGARGGTLELRPRSRYRLQLRARLNGPTYQGPWSSWSDPTRVETATETAWISLVTALHLVLGLSAVLGLLLLRWQFPAHYRYRPRQAGDWRWTRWSRRPVNRHSWFAL

SEQ ID NO: 691 - protein, 1178 aa, Homo sapiens [sequence omitted]

SEQ ID NO: 692 - protein, 858 aa, Homo sapiens [sequence omitted]

SEQ ID NO: 693 - protein, 137 aa, Homo sapiens [sequence omitted]

SEQ ID NO: 694 - protein, 858 aa, Homo sapiens [sequence omitted]

SEQ ID NO: 695 - protein, 773 aa, Homo sapiens [sequence omitted]

SEQ ID NO: 696 - protein, 553 aa, Homo sapiens
MSTETELQVAVKTSAKKDSRKKGQDRSEATLIKRFKGEGVRYKAKLIGIDEVSAARGDKLCQDSMMKLKGVVAGARSKGEHKQKIFLTISFGGIKIFDEKTGALQHHHAVHEISYIAKDITDHRAFGYVCGKEGNHRFVAIKTAQAAEPVILDLRDLFQLIYELKQREELEKKAQKDKQCEQAVYQTILEEDVEDPVYQYIVFEAGHEPIRDPETEENIYQVPTSQKKEGVYDVPKSQPAVTQLELFGDMSTPPDITSPPTPATPGDAFIPSSSQTLPASADVFSSVPFGTAAVPSGYVAMGAVLPSFWGQQPLVQQQMVMGAQPPVAQVMPGAQPIAWGQPGLFPATQQPWPTVAGQFPPAAFMPTQTVMPLPAAMFQGPLTPLATVPGTSDSTRSSPQTDKPRQKMGKETFKDFQMAQPPPVPSRKPDQPSLTCTSEAFSSYFNKVGVAQDTDDCDDFDISQLNLTPVTSTTPSTNSPPTPAPRQSSPSKSSASHASDPTTDDIFEEGFESPSKSEEQEAPDGSQASSNSDPFGEPSGEPSGDNISPQAGS

SEQ ID NO: 697 - protein, 553 aa, Homo sapiens; identical to SEQ ID NO: 696

SEQ ID NO: 698 - protein, 555 aa, Homo sapiens
MSTETELQVAVKTSAKKDSRKKGQDRSEATLIKRFKGEGVRYKAKLIGIDEVSAARGDKLCQDSMMKLKGVVAGARSKGEHKQKIFLTISFGGIKIFDEKTGALQHHHAVHEISYIAKDITDHRAFGYVCGKEGNHRFVAIKTAQAAEPVILDLRDLFQLIYELKQREELEKKAQKDKQCEQAVYQTILEEDVEDPVYQYIVFEAGHEPIRDPETEENIYQVPTSQKKEGVYDVPKSQPVSAVTQLELFGDMSTPPDITSPPTPATPGDAFIPSSSQTLPASADVFSSVPFGTAAVPSGYVAMGAVLPSFWGQQPLVQQQMVMGAQPPVAQVMPGAQPIAWGQPGLFPATQQPWPTVAGQFPPAAFMPTQTVMPLPAAMFQGPLTPLATVPGTSDSTRSSPQTDKPRQKMGKETFKDFQMAQPPPVPSRKPDQPSLTCTSEAFSSYFNKVGVAQDTDDCDDFDISQLNLTPVTSTTPSTNSPPTPAPRQSSPSKSSASHASDPTTDDIFEEGFESPSKSEEQEAPDGSQASSNSDPFGEPSGEPSGDNISPQAGS

SEQ ID NO: 699 - protein, 811 aa, Homo sapiens [sequence omitted]

SEQ ID NO: 700 - protein, 401 aa, Homo sapiens [sequence omitted]

SEQ ID NO: 701 - protein, 551 aa, Homo sapiens [sequence omitted]

SEQ ID NO: 702 - protein, 736 aa, Homo sapiens [sequence omitted]

SEQ ID NO: 703 - protein, 791 aa, Homo sapiens [sequence omitted]

SEQ ID NO: 704 - protein, 1365 aa, Homo sapiens [sequence omitted]

SEQ ID NO: 705 - protein, 1366 aa, Homo sapiens [sequence omitted]

SEQ ID NO: 706 - protein, 1411 aa, Homo sapiens
MASISEPVTFREFCPLYYLLNAIPTKIQKGFRSIVVYLTALDTNGDYIAVGSSIGMLYLYCRHLNQMRKYNFEGKTESITVVKLLSCFDDLVAAGTASGRVAVFQLVSSLPGRNKQLRRFDVTGIHKNSITALAWSPNGMKLFSGDDKGKIVYSSLDLDQGLCNSQLVLEEPSSIVQLDYSQKVLLVSTLQRSLLFYTEEKSVRQIGTQPRKSTGKFGACFIPGLCKQSDLTLYASRPGLRLWKADVHGTVQATFILKDAFAGGVKPFELHPRLESPNSGSCSLPERHLGLVSCFFQEGWVLSWNEYSIYLLDTVNQATIAGLEGSGDIVSVSCTENEIFFLKGDRNIIRISSRPEGLTSTVRDGLEMSGCSERVHVQQAEKLPGATVSETRLRGSSMASSVASEPRSRSSSLNSTDSGSGLLPPGLQATPELGKGSQPLSQRFNAISSEDFDQELVVKPIKVKRKKKKKKTEGGSRSTCHSSLESTPCSEFPGDSPQSLNTDLLSMTSSVLGSSVDQLSAESPDQESSFNGEVNGVPQENTDPETFNVLEVSGSMPDSLAEEDDIRTEMPHCHHAHGRELLNGAREDVGGSDVTGLGDEPCPADDGPNSTQLPFQEQDSSPGAHDGEDIQPIGPQSTFCEVPLLNSLTVPSSLSWAPSAEQWLPGTRADEGSPVEPSQEQDILTSMEASGHLSTNLWHAVTDDDTGQKEIPISERVLGSVGGQLTPVSALAASTHKPWLEQPPRDQTLTSSDEEDIYAHGLPSSSSETSVTELGPSCSQQDLSRLGAEDAGLLKPDQFAESWMGYSGPGYGILSLVVSEKYIWCLDYKGGLFCSALPGAGLRWQKFEDAVQQVAVSPSGALLWKIEQKSNRAFACGKVTIKGKRHWYEALPQAVFVALSDDTAWIIRTSGDLYLQTGLSVDRPCARAVKVDCPYPLSQITARNNVVWALTEQRALLYREGVSSFCPEGEQWKCDIVSERQALEPVCITLGDQQTLWALDIHGNLWFRTGIISKKPQGDDDHWWQVSITDYVVFDQCSLFQTIIHATHSVATAAQAPVEKVADKLRMAFWSQQLQCQPSLLGVNNSGVWISSGKNEFHVAKGSLIGTYWNHVVPRGTASATKWAFVLASAAPTKEGSFLWLCQSSKDLCSVSAQSAQSRPSTVQLPPEAEMRAYAACQDALWALDSLGQVFIRTLSKSCPTGMHWTRLDLSQLGAVKLTSLACGNQHIWACDSRGGVYFRVGTQPLNPSLMLPAWIMIEPPVQPAGVSLVSVHSSPNDQMLWVLDSRWNVHVRTGITEEMPVGTAWEHVPGLQACQLALSTRTVWARCPNGDLARRYGVTDKNPAGDYWKKIPGSVSCFTVTASDELWAVGPPGYLLQRLTKTFSHSHGTQKSSQAAMPHPEDLEDEWEVI

SEQ ID NO: 707 - protein, 1234 aa, Homo sapiens
MASISEPVTFREFCPLYYLLNAIPTKIQKGFRSIVVYLTALDTNGDYIAVGSSIGMLYLYCRHLNQMRKYNFEGKTESITVVKLLSCFDDLVAAGTASGRVAVFQLVSSLPGRNKQLRRFDVTGIHKNSITALAWSPNGMKLFSGDDKGKIVYSSLDLDQGLCNSQLVLEEPSSIVQLDYSQKVLLVSTLQRSLLFYTEEKSVRQIGTQPRKSTGKFGACFIPGLCKQSDLTLYASRPGLRLWKADVHGTVQATFILKDAFAGGVKPFELHPRLESPNSGSCSLPERHLGLVSCFFQEGWVLSWNEYSIYLLDTVNQATIAGLEGSGDIVSVSCTENEIFFLKGDRNIIRISSRPEGLTSTVRDGLEMSGCSERVHVQQAEKLPGATVSETRLRGSSMASSVASEPRSRSSSLNSTDSGSGLLPPGLQATPELGKGSQPLSQRFNAISSEDFDQELVVKPIKVKRKKKKKKTEGGSRSTCHSSLESTPCSEFPGDSPQSLNTDLLSMTSSVLGSSVDQLSAESPDQESSFNGEVNGVPQENTDPETFNVLEVSGSMPDSLAEEDDIRTEMPHCHHAHGRELLNGAREDVGGSDVTGLGDEPCPADDGPNSTQLPFQEQDSSPGAHDGEDIQPIGPQSTFCEVPLLNSLTVPSSLSWAPSAEQWLPGTRADEGSPVEPSQEQDILTSMEASGHLSTNLWHAVTDDDTGQKEIPISERVLGSVGGQLTPVSALAASTHKPWLEQPPRDQTLTSSDEEDIYAHGLPSSSSETSVTELGPSCSQQDLSRLGAEDAGLLKPDQFAESWMGYSGPGYGILSLVVSEKYIWCLDYKGGLFCSALPGAGLRWQKFEDAVQQVAVSPSGALLWKIEQKSNRAFACGKVTIKGKRHWYEALPQAVFVALSDDTAWIIRTSGDLYLQTGLSVDRPCARAVKVDCPYPLSQITARNNVVWALTEQRALLYREGVSSFCPEGEQWKCDIVSERQALEPVCITLGDQQTLWALDIHGNLWFRTGIISKKPQGDDDHWWQVSITDYVVFDQCSLFQTIIHATHSVATAAQAPVEKVADKLRMAFWSQQLQCQPSLLGVNNSGVWISSGKNEFHVAKGSLIGTYWNHVVPRGTASATKWAFVLASAAPTKEGSFLWLCQSSKDLCSVSAQSAQSRPSTVQLPPEAEMRAYAACQDALWALDSLGQVFIRTLSKSCPTGMHWTRLDLSQLARRGQLGQRPFQPQRPDAVGA

SEQ ID NO: 708 - protein, 203 aa, Homo sapiens
MAKAYDHLFKLLLIGDSGVGKTCLIIRFAEDNFNNTYISTIGIDFKIRTVDIEGKKIKLQVWDTAGQERFKTITTAYYRGAMGIILAYDITDEKSFENIQNWMKSIMENASAGVEHLLLGNKCDMEAKRKVQKEQADKLAREHGIRFFETSAKSSMNVDEAFSSLARDILLKSGGRRSGNGNKPPSTDLKTCDIKNTNKCSLS

SEQ ID NO: 709 - protein, 203 aa, Homo sapiens; identical to SEQ ID NO: 708

SEQ ID NO: 710 - protein, 215 aa, Homo sapiens
MTSRSTARPNGQPQASKICQFKLVLLGESAVGKSSLVLRFVKGQFHEYQESTIGAAFLTQSVCLDDTTVKFEIWDTAGQERYHSLAPMYYRGAQAAIVVYDITNQETFARAKTWVKELQRQASPSIVIALAGNKADLANKRMVEYEEAQAYADDNSLLFMETSAKTAMNVNDLFLAIAKKLPKSEPQNLGGAAGRSRGVDLHEQSQQNKSQCCSN

SEQ ID NO: 711 - protein, 215 aa, Homo sapiens; identical to SEQ ID NO: 710

SEQ ID NO: 712 - protein, 174 aa, Homo sapiens
MTSRSTARPNGQPQASKICQFKLVLLGESAVGKSSLVLRFVKGQFHEYQESTIGAAFLTQSVCLDDTTVKFEIWDTAGQERYHSLAPMYYRGAQAAIVVYDITNQEAQAYADDNSLLFMETSAKTAMNVNDLFLAIAKKLPKSEPQNLGGAAGRSRGVDLHEQSQQNKSQCCSN

SEQ ID NO: 713 - protein, 215 aa, Homo sapiens; identical to SEQ ID NO: 710

SEQ ID NO: 714 - protein, 670 aa, Homo sapiens
MGETEKRIETHRIRCLSKLKMFLLAITCAFVSKTLSGSYMNSMLTQIERQFNIPTSLVGFINGSFEIGNLLLIIFVSYFGTKLHRPIMIGIGCVVMGLGCFLKSLPHFLMNQYEYESTVSVSGNLSSNSFLCMENGTQILRPTQDPSECTKEVKSLMWVYVLVGNIVRGMGETPILPLGISYIEDFAKFENSPLYIGLVETGAIIGPLIGLLLASFCANVYVDTGFVNTDDLIITPTDTRWVGAWWFGFLICAGVNVLTAIPFFFLPNTLPKEGLETNADIIKNENEDKQKEEVKKEKYGITKDFLPFMKSLSCNPIYMLFILVSVIQFNAFVNMISFMPKYLEQQYGISSSDAIFLMGIYNLPPICIGYIIGGLIMKKFKITVKQAAHIGCWLSLLEYLLYFLSFLMTCENSSVVGINTSYEGIPQDLYVENDIFADCNVDCNCPSKIWDPVCGNNGLSYLSACLAGCETSIGTGINMVFQNCSCIQTSGNSSAVLGLCDKGPDCSLMLQYFLILSAMSSFIYSLAAIPGYMVLLRCMKSEEKSLGVGLHTFCTRVFAGIPAPIYFGALMDSTCLHWGTLKCGESGACRIYDSTTFRYIYLGLPAALRGSSFVPALIILILLRKCHLPGENASSGTELIETKVKGKENECKDIYQKSTVLKDDELKTKL

SEQ ID NO: 715 - protein, 670 aa, Homo sapiens; identical to SEQ ID NO: 714

SEQ ID NO: 716 - protein, 579 aa, Homo sapiens
MFLTKNCKQEQERVESAKMFLLAITCAFVSKTLSGSYMNSMLTQIERQFNIPTSLVGFINGSFEIGNLLLIIFVSYFGTKLHRPIMIGIGCVVMGLGCFLKSLPHFLMNQYEYESTVSVSGNLSSNSFLCMENGTQILRPTQDPSECTKEVKSLMWVYVLVGNIVRGMGETPILPLGISYIEDFAKFENSPLYIGLVETGAIIGPLIGLLLASFCANVYVDTGFVNTDDLIITPTDTRWVGAWWFGFLICAGVNVLTAIPFFFLPNTLPKEGLETNADIIKNENEDKQKEEVKKEKYGITKDFLPFMKSLSCNPIYMLFILVSVIQFNAFVNMISFMPKYLEQQYGISSSDAIFLMGIYNLPPICIGYIIGGLIMKKFKITVKQAAHIGCWLSLLEYLLYFLSFLMTCENSSVVGINTSYEGIPQDLYVENDIFADCNVDCNCPSKIWDPVCGNNGLSYLSACLAGCETSIGTGINMVFQNCSCIQTSGNSSAVLGLCDKGPDCSLMLQYFLILSAMSSFIYSLAAIPGYMVLLRCMKSEEKSLGVGLHTFCTRVFGKNSYFFPHPIRTILLLLFFITL

SEQ ID NO: 717 - protein, 670 aa, Homo sapiens; identical to SEQ ID NO: 714

SEQ ID NO: 718 - protein, 476 aa, Homo sapiens
MVLGECRQMSSSSQIGNDSFQLQVTEDVNSSIKTFFCPNDTYNDMATLFFNPQESAILQLFHQDGTFSPVTLALFFVLYFLLACWTYGISVPSGLFVPSLLCGAAFGRLVANVLKSYIGLGHIYSGTFALIGAAAFLGGVVRMTISLTVILIESTNEITYGLPIMVTLMVAKWTGDFFNKGIYDIHVGLRGVPLLEWETEVEMDKLRASDIMEPNLTYVYPHTRIQSLVSILRTTVHHAFPVVTENRGNEKEFMKGNQLISNNIKFKKSSILTRAGEQRKRSQSMKSYPSSELRNMCDEHIASEEPAEKEDLLQQMLERRYTPYPNLYPDQSPSEDWTMEERFRPLTFHGLILRSQLVTLLVRGVCYSESQSSASQPRLSYAEMAEDYPRYPDIHDLDLTLLNPRMIVDVTPYMNPSPFTVSPNTHVSQVFNLFRTMGLRHLPVVNAVGEIVGIITRHNLTYEFLQARLRQHYQTI

SEQ ID NO: 719 - protein, 353 aa, Homo sapiens
MAGCRGSLCCCCRWCCCCGERETRTPEELTILGETQEEEDEILPRKDYESLDYDRCINDPYLEVLETMDNKKGRRYEAVKWMVVFAIGVCTGLVGLFVDFFVRLFTQLKFGVVQTSVEECSQKGCLALSLLELLGFNLTFVFLASLLVLIEPVAAGSGIPEVKCYLNGVKVPGIVRLRTLLCKVLGVLFSVAGGLFVGKEGPMIHSGSVVGAGLPQFQSISLRKIQFNFPYFRSDRDKRDFVSAGAAAGVAAAFGAPIGGTLFSLEEGSSFWNQGLTWKVLFCSMSATFTLNFFRSGIQFGSWGSFQLPGLLNFGEFKSLREPPCVSGNHRGGVCGLDGVRRMPTDVLFESNR

SEQ ID NO: 720 - protein, 869 aa, Homo sapiens
MAGCRGSLCCCCRWCCCCGERETRTPEELTILGETQEEEDEILPRKDYESLDYDRCINDPYLEVLETMDNKKGRRYEAVKWMVVFAIGVCTGLVGLFVDFFVRLFTQLKFGVVQTSVEECSQKGCLALSLLELLGFNLTFVFLASLLVLIEPVAAGSGIPEVKCYLNGVKVPGIVRLRTLLCKVLGVLFSVAGGLFVGKEGPMIHSGSVVGAGLPQFQSISLRKIQFNFPYFRSDRDKRDFVSAGAAAGVAAAFGAPIGGTLFSLEEGSSFWNQGLTWKVLFCSMSATFTLNFFRSGIQFGSWGSFQLPGLLNFGEFKCSDSDKKCHLWTAMDLGFFVVMGVIGGLLGATFNCLNKRLAKYRMRNVHPKPKLVRVLESLLVSLVTTVVVFVASMVLGECRQMSSSSQIGNDSFQLQVTEDVNSSIKTFFCPNDTYNDMATLFFNPQESAILQLFHQDGTFSPVTLALFFVLYFLLACWTYGISVPSGLFVPSLLCGAAFGRLVANVLKSYIGLGHIYSGTFALIGAAAFLGGVVRMTISLTVILIESTNEITYGLPIMVTLMVAKWTGDFFNKGIYDIHVGLRGVPLLEWETEVEMDKLRASDIMEPNLTYVYPHTRIQSLVSILRTTVHHAFPVVTENRGNEKEFMKGNQLISNNIKFKKSSILTRAGEQRKRSQSMKSYPSSELRNMCDEHIASEEPAEKEDLLQQMLERRYTPYPNLYPDQSPSEDWTMEERFRPLTFHGLILRSQLVTLLVRGVCYSESQSSASQPRLSYAEMAEDYPRYPDIHDLDLTLLNPRMIVDVTPYMNPSPFTVSPNTHVSQVFNLFRTMGLRHLPVVNAVGEIVGIITRHNLTYEFLQARLRQHYQTI

SEQ ID NO: 721 - protein, 585 aa, Homo sapiens
MSATFTLNFFRSGIQFGSWGSFQLPGLLNFGEFKCSDSDKKCHLWTAMDLGFFVVMGVIGGLLGATFNCLNKRLAKYRMRNVHPKPKLVRVLESLLVSLVTTVVVFVASMVLGECRQMSSSSQIGNDSFQLQVTEDVNSSIKTFFCPNDTYNDMATLFFNPQESAILQLFHQDGTFSPVTLALFFVLYFLLACWTYGISVPSGLFVPSLLCGAAFGRLVANVLKSYIGLGHIYSGTFALIGAAAFLGGVVRMTISLTVILIESTNEITYGLPIMVTLMVAKWTGDFFNKGIYDIHVGLRGVPLLEWETEVEMDKLRASDIMEPNLTYVYPHTRIQSLVSILRTTVHHAFPVVTENRGNEKEFMKGNQLISNNIKFKKSSILTRAGEQRKRSQSMKSYPSSELRNMCDEHIASEEPAEKEDLLQQMLERRYTPYPNLYPDQSPSEDWTMEERFRPLTFHGLILRSQLVTLLVRGVCYSESQSSASQPRLSYAEMAEDYPRYPDIHDLDLTLLNPRMIVDVTPYMNPSPFTVSPNTHVSQVFNLFRTMGLRHLPVVNAVGEIVGIITRHNLTYEFLQARLRQHYQTI

SEQ ID NO: 722 - protein, 320 aa, Homo sapiens
MAGCRGSLCCCCRWCCCCGERETRTPEELTILGETQEEEDEILPRKDYESLDYDRCINDPYLEVLETMDNKKGRRYEAVKWMVVFAIGVCTGLVGLFVDFFVRLFTQLKFGVVQTSVEECSQKGCLALSLLELLGFNLTFVFLASLLVLIEPVAAGSGIPEVKCYLNGVKVPGIVRLRTLLCKVLGVLFSVAGGLFVGKEGPMIHSGSVVGAGLPQFQSISLRKIQFNFPYFRSDRYGKRQERLCISRSGCWSCCSFRGANRGYLVQSRGGFVLLEPRAHVESALLFHVCHLHPQLLPFWDSVWKLGFLPAPWIAELWRV

SEQ ID NO: 723 - protein, 308 aa, Homo sapiens
MAGCRGSLCCCCRWCCCCGERETRTPEELTILGETQEEEDEILPRKDYESLDYDRCINDPYLEVLETMDNKKGRRYEAVKWMVVFAIGVCTGLVGLFVDFFVRLFTQLKFGVVQTSVEECSQKGCLALSLLELLGFNLTFVFLASLLVLIEPVAAGSGIPEVKCYLNGVKVPGIVRLRTLLCKVLGVLFSVAGGLFVGKEGPMIHSGSVVGAGLPQFQSISLRKIQFNFPYFRSDRSGCWSCCSFRGANRGYLVQSRGGFVLLEPRAHVESALLFHVCHLHPQLLPFWDSVWKLGFLPAPWIAELWRV

SEQ ID NO: 724 - protein, 872 aa, Homo sapiens [sequence omitted]

SEQ ID NO: 725 - protein, 153 aa, Homo sapiens [sequence omitted]

SEQ ID NO: 726 - protein, 563 aa, Homo sapiens
MLLPAPALRRALLSRPWTGAGLRWKHTSSLKVANEPVLAFTQGSPERDALQKALKDLKGRMEAIPCVVGDEEVWTSDVQYQVSPFNHGHKVAKFCYADKSLLNKAIEAALAARKEWDLKPIADRAQIFLKAADMLSGPRRAEILAKTMVGQGKTVIQAEIDAAAELIDFFRFNAKYAVELEGQQPISVPPSTNSTVYRGLEGFVAAISPFNFTAIGGNLAGAPALMGNVVLWKPSDTAMLASYAVYRILREAGLPPNIIQFVPADGPLFGDTVTSSEHLCGINFTGSVPTFKHLWKQVAQNLDRFHTFPRLAGECGGKNFHFVHRSADVESVVSGTLRSAFEYGGQKCSACSRLYVPHSLWPQIKGRLLEEHSRIKVGDPAEDFGTFFSAVIDAKSFARIKKWLEHARSSPSLTILAGGKCDDSVGYFVEPCIVESKDPQEPIMKEEIFGPVLSVYVYPDDKYKETLQLVDSTTSYGLTGAVFSQDKDVVQEATKVLRNAAGNFYINDKSTGSIVGQQPFGGARASGTNDKPGGPHYILRWTSPQVIKETHKPLGDWSYAYMQ

SEQ ID NO: 727 - protein, 563 aa, Homo sapiens; identical to SEQ ID NO: 726

SEQ ID NO: 728 - protein, 563 aa, Homo sapiens; identical to SEQ ID NO: 726

SEQ ID NO: 729 - protein, 713 aa, Homo sapiens
MSTRTPLPTVNERDTENHTSHGDGRQEVTSRTSRSGARCRNSIASCADEQPHIGNYRLLKTIGKGNFAKVKLARHILTGREVAIKIIDKTQLNPTSLQKLFREVRIMKILNHPNIVKLFEVIETEKTLYLIMEYASGGEVFDYLVAHGRMKEKEARSKFRQIVSAVQYCHQKRIVHRDLKAENLLLDADMNIKIADFGFSNEFTVGGKLDTFCGSPPYAAPELFQGKKYDGPEVDVWSLGVILYTLVSGSLPFDGQNLKELRERVLRGKYRIPFYMSTDCENLLKRFLVLNPIKRGTLEQIMKDRWINAGHEEDELKPFVEPELDISDQKRIDIMVGMGYSQEEIQESLSKMKYDEITATYLLLGRKSSEVRPSSDLNNSTGQSPHHKVQRSVSSSQKQRRYSDHAGPAIPSVVAYPKRSQTSTADSDLKEDGISSRKSSGSAVGGKGIAPASPMLGNASNPNKADIPERKKSSTVPSSNTASGGMTRRNTYVCSERTTADRHSVIQNGKENSTIPDQRTPVASTHSISSAATPDRIRFPRGTASRSTFHGQPRERRTATYNGPPASPSLSHEATPLSQTRSRGSTNLFSKLTSKLTRSRNVSAEQKDENKEAKPRSLRFTWSMKTTSSMDPGDMMREIRKVLDANNCDYEQRERFLLFCVHGDGHAENLVQWEMEVCKLPRLSLNGVRFKRISGTSIAFKNIASKIANELKL

SEQ ID NO: 730 - protein, 753 aa, Homo sapiens
MSTRTPLPTVNERDTENHTSHGDGRQEVTSRTSRSGARCRNSIASCADEQPHIGNYRLLKTIGKGNFAKVKLARHILTGREVAIKIIDKTQLNPTSLQKLFREVRIMKILNHPNIVKLFEVIETEKTLYLIMEYASGGEVFDYLVAHGRMKEKEARSKFRQIVSAVQYCHQKRIVHRDLKAENLLLDADMNIKIADFGFSNEFTVGGKLDTFCGSPPYAAPELFQGKKYDGPEVDVWSLGVILYTLVSGSLPFDGQNLKELRERVLRGKYRIPFYMSTDCENLLKRFLVLNPIKRGTLEQIMKDRWINAGHEEDELKPFVEPELDISDQKRIDIMVGMGYSQEEIQESLSKMKYDEITATYLLLGRKSSELDASDSSSSSNLSLAKVRPSSDLNNSTGQSPHHKVQRSVSSSQKQRRYSDHAGPAIPSVVAYPKRSQTSTADSDLKEDGISSRKSSGSAVGGKGIAPASPMLGNASNPNKADIPERKKSSTVPSSNTASGGMTRRNTYVCSERTTADRHSVIQNGKENSTIPDQRTPVASTHSISSAATPDRIRFPRGTASRSTFHGQPRERRTATYNGPPASPSLSHEATPLSQTRSRGSTNLFSKLTSKLTRRNMSFRFIKRLPTEYERNGRYEGSSRNVSAEQKDENKEAKPRSLRFTWSMKTTSSMDPGDMMREIRKVLDANNCDYEQRERFLLFCVHGDGHAENLVQWEMEVCKLPRLSLNGVRFKRISGTSIAFKNIASKIANELKL

SEQ ID NO: 731 - protein, 752 aa, Homo sapiens
MSTRTPLPTVNERDTENHTSHGDGRQEVTSRTSRSGARCRNSIASCADEQPHIGNYRLLKTIGKGNFAKVKLARHILTGREVAIKIIDKTQLNPTSLQKLFREVRIMKILNHPNIVKLFEVIETEKTLYLIMEYASGGEVFDYLVAHGRMKEKEARSKFRQGCQAGQTIKVQVSFDLLSLMFTFIVSAVQYCHQKRIVHRDLKAENLLLDADMNIKIADFGFSNEFTVGGKLDTFCGSPPYAAPELFQGKKYDGPEVDVWSLGVILYTLVSGSLPFDGQNLKELRERVLRGKYRIPFYMSTDCENLLKRFLVLNPIKRGTLEQIMKDRWINAGHEEDELKPFVEPELDISDQKRIDIMVGMGYSQEEIQESLSKMKYDEITATYLLLGRKSSELDASDSSSSSNLSLAKVRPSSDLNNSTGQSPHHKVQRSVSSSQKQRRYSDHAGPAIPSVVAYPKRSQTSTADSDLKEDGISSRKSSGSAVGGKGIAPASPMLGNASNPNKADIPERKKSSTVPSSNTASGGMTRRNTYVCSERTTADRHSVIQNGKENSTIPDQRTPVASTHSISSAATPDRIRFPRGTASRSTFHGQPRERRTATYNGPPASPSLSHEATPLSQTRSRGSTNLFSKLTSKLTRSRNVSAEQKDENKEAKPRSLRFTWSMKTTSSMDPGDMMREIRKVLDANNCDYEQRERFLLFCVHGDGHAENLVQWEMEVCKLPRLSLNGVRFKRISGTSIAFKNIASKIANELKL

SEQ ID NO: 732 - protein, 744 aa, Homo sapiens
MSTRTPLPTVNERDTENHTSHGDGRQEVTSRTSRSGARCRNSIASCADEQPHIGNYRLLKTIGKGNFAKVKLARHILTGREVAIKIIDKTQLNPTSLQKLFREVRIMKILNHPNIVKLFEVIETEKTLYLIMEYASGGEVFDYLVAHGRMKEKEARSKFRQIVSAVQYCHQKRIVHRDLKAENLLLDADMNIKIADFGFSNEFTVGGKLDTFCGSPPYAAPELFQGKKYDGPEVDVWSLGVILYTLVSGSLPFDGQNLKELRERVLRGKYRIPFYMSTDCENLLKRFLVLNPIKRGTLEQIMKDRWINAGHEEDELKPFVEPELDISDQKRIDIMVGMGYSQEEIQESLSKMKYDEITATYLLLGRKSSELDASDSSSSSNLSLAKVRPSSDLNNSTGQSPHHKVQRSVSSSQKQRRYSDHAGPAIPSVVAYPKRSQTSTADSDLKEDGISSRKSSGSAVGGKGIAPASPMLGNASNPNKADIPERKKSSTVPSSNTASGGMTRRNTYVCSERTTADRHSVIQNGKENSTIPDQRTPVASTHSISSAATPDRIRFPRGTASRSTFHGQPRERRTATYNGPPASPSLSHEATPLSQTRSRGSTNLFSKLTSKLTRRLPTEYERNGRYEGSSRNVSAEQKDENKEAKPRSLRFTWSMKTTSSMDPGDMMREIRKVLDANNCDYEQRERFLLFCVHGDGHAENLVQWEMEVCKLPRLSLNGVRFKRISGTSIAFKNIASKIANELKL

SEQ ID NO: 733 - protein, 737 aa, Homo sapiens
MSTRTPLPTVNERDTENHTSHGDGRQEVTSRTSRSGARCRNSIASCADEQPHIGNYRLLKTIGKGNFAKVKLARHILTGREVAIKIIDKTQLNPTSLQKLFREVRIMKILNHPNIVKLFEVIETEKTLYLIMEYASGGEVFDYLVAHGRMKEKEARSKFRQIVSAVQYCHQKRIVHRDLKAENLLLDADMNIKIADFGFSNEFTVGGKLDTFCGSPPYAAPELFQGKKYDGPEVDVWSLGVILYTLVSGSLPFDGQNLKELRERVLRGKYRIPFYMSTDCENLLKRFLVLNPIKRGTLEQIMKDRWINAGHEEDELKPFVEPELDISDQKRIDIMVGMGYSQEEIQESLSKMKYDEITATYLLLGRKSSEVRPSSDLNNSTGQSPHHKVQRSVSSSQKQRRYSDHAGPAIPSVVAYPKRSQTSTADSDLKEDGISSRKSSGSAVGGKGIAPASPMLGNASNPNKADIPERKKSSTVPSSNTASGGMTRRNTYVCSERTTADRHSVIQNGKENSTIPDQRTPVASTHSISSAATPDRIRFPRGTASRSTFHGQPRERRTATYNGPPASPSLSHEATPLSQTRSRGSTNLFSKLTSKLTRRNMSFRFIKRLPTEYERNGRYEGSSRNVSAEQKDENKEAKPRSLRFTWSMKTTSSMDPGDMMREIRKVLDANNCDYEQRERFLLFCVHGDGHAENLVQWEMEVCKLPRLSLNGVRFKRISGTSIAFKNIASKIANELKL

SEQ ID NO: 734 - protein, 729 aa, Homo sapiens
MSTRTPLPTVNERDTENHTSHGDGRQEVTSRTSRSGARCRNSIASCADEQPHIGNYRLLKTIGKGNFAKVKLARHILTGREVAIKIIDKTQLNPTSLQKLFREVRIMKILNHPNIVKLFEVIETEKTLYLIMEYASGGEVFDYLVAHGRMKEKEARSKFRQIVSAVQYCHQKRIVHRDLKAENLLLDADMNIKIADFGFSNEFTVGGKLDTFCGSPPYAAPELFQGKKYDGPEVDVWSLGVILYTLVSGSLPFDGQNLKELRERVLRGKYRIPFYMSTDCENLLKRFLVLNPIKRGTLEQIMKDRWINAGHEEDELKPFVEPELDISDQKRIDIMVGMGYSQEEIQESLSKMKYDEITATYLLLGRKSSELDASDSSSSSNLSLAKVRPSSDLNNSTGQSPHHKVQRSVSSSQKQRRYSDHAGPAIPSVVAYPKRSQTSTADSDLKEDGISSRKSSGSAVGGKGIAPASPMLGNASNPNKADIPERKKSSTVPSSNTASGGMTRRNTYVCSERTTADRHSVIQNGKENSTIPDQRTPVASTHSISSAATPDRIRFPRGTASRSTFHGQPRERRTATYNGPPASPSLSHEATPLSQTRSRGSTNLFSKLTSKLTRSRNVSAEQKDENKEAKPRSLRFTWSMKTTSSMDPGDMMREIRKVLDANNCDYEQRERFLLFCVHGDGHAENLVQWEMEVCKLPRLSLNGVRFKRISGTSIAFKNIASKIANELKL

SEQ ID NO: 735 - protein, 328 aa, Homo sapiens
MGFWILAILTILMYSTAAKFSKQSWGLENEALIVRCPRQGKPSYTVDWYYSQTNKSIPTQERNRVFASGQLLKFLPAAVADSGIYTCIVRSPTFNRTGYANVTIYKKQSDCNVPDYLMYSTVSGSEKNSKIYCPTIDLYNWTAPLEWFKNCQALQGSRYRAHKSFLVIDNVMTEDAGDYTCKFIHNENGANYSVTATRSFTVKDEQGFSLFPVIGAPAQNEIKEVEIGKNANLTCSACFGKGTQFLAAVLWQLNGTKITDFGEPRIQQEEGQNQSFSNGLACLDMVLRIADVKEEDLLLQYDCLALNLHGLRRHTVRLSRKNPSKECF

SEQ ID NO: 736 - protein, 259 aa, Homo sapiens
MGFWILAILTILMYSTAAKFSKQSWGLENEALIVRCPRQGKPSYTVDWYYSQTNKSIPTQERNRVFASGQLLKFLPAAVADSGIYTCIVRSPTFNRTGYANVTIYKKQSDCNVPDYLMYSTVSGSEKNSKIYCPTIDLYNWTAPLEWFKNCQALQGSRYRAHKSFLVIDNVMTEDAGDYTCKFIHNENGANYSVTATRSFTVKVWCQSFCKLKKSLIFSNTHWIQSLMRGFVMVYYGVHKCCRVVFNLCLQYFQHHQWP

SEQ ID NO: 737 - protein, 556 aa, Homo sapiens
MGFWILAILTILMYSTAAKFSKQSWGLENEALIVRCPRQGKPSYTVDWYYSQTNKSIPTQERNRVFASGQLLKFLPAAVADSGIYTCIVRSPTFNRTGYANVTIYKKQSDCNVPDYLMYSTVSGSEKNSKIYCPTIDLYNWTAPLEWFKNCQALQGSRYRAHKSFLVIDNVMTEDAGDYTCKFIHNENGANYSVTATRSFTVKDEQGFSLFPVIGAPAQNEIKEVEIGKNANLTCSACFGKGTQFLAAVLWQLNGTKITDFGEPRIQQEEGQNQSFSNGLACLDMVLRIADVKEEDLLLQYDCLALNLHGLRRHTVRLSRKNPIDHHSIYCIIAVCSVFLMLINVLVIILKMFWIEATLLWRDIAKPYKTRNDGKLYDAYVVYPRNYKSSTDGASRVEHFVHQILPDVLENKCGYTLCIYGRDMLPGEDVVTAVETNIRKSRRHIFILTPQITHNKEFAYEQEVALHCALIQNDAKVILIEMEALSELDMLQAEALQDSLQHLMKVQGTIKWREDHIANKRSLNSKFWKHVRYQMPVPSKIPRKASSLTPLAAQKQ

SEQ ID NO: 738 - protein, 556 aa, Homo sapiens; identical to SEQ ID NO: 737

SEQ ID NO: 739 - protein, 328 aa, Homo sapiens; identical to SEQ ID NO: 735

SEQ ID NO: 740 - protein, 356 aa, Homo sapiens [sequence omitted]

SEQ ID NO: 741 - protein, 505 aa, Homo sapiens
MGETLGDSPIDPESDSFTDTLSANISQEMTMVDTEMPFWPTNFGISSVDLSVMEDHSHSFDIKPFTTVDFSSISTPHYEDIPFTRTDPVVADYKYDLKLQEYQSAIKVEPASPPYYSEKTQLYNKPHEEPSNSLMAIECRVCGDKASGFHYGVHACEGCKGFFRRTIRLKLIYDRCDLNCRIHKKSRNKCQYCRFQKCLAVGMSHNAIRFGRMPQAEKEKLLAEISSDIDQLNPESADLRALAKHLYDSYIKSFPLTKAKARAILTGKTTDKSPFVIYDMNSLMMGEDKIKFKHITPLQEQSKEVAIRIFQGCQFRSVEAVQEITEYAKSIPGFVNLDLNDQVTLLKYGVHEIIYTMLASLMNKDGVLISEGQGFMTREFLKSLRKPFGDFMEPKFEFAVKFNALELDDSDLAIFIAVIILSGDRPGLLNVKPIEDIQDNLLQALELQLKLNHPESSQLFAKLLQKMTDLRQIVTEHVQLLQVIKKTETDMSLHPLLQEIYKDLY

SEQ ID NO: 742 - protein, 424 aa, Homo sapiens
  VARIANT (1)...(424): Xaa = Any Amino Acid
MGETLGDSPIDPESDSFTDTLSANISQEMTMVDTEMPFWPTNFGISSVDLSVMEDHSHSFDIKPFTTVDFSSISTPHYEDIPFTRTDPVVADYKYDLKLQEYQSAIKVEPASPPYYSEKTQLYNKPHEEPSNSLMAIECRVCGDKASGFHYGVHACEGCKGFFRRTIRLKLIYDRCDLNCRIHKKSRNKCQYCRFQKCLAVGMSHNAIRFGRMPQAEKEKLLAEISSDIDQLNPESADLRALAKHLYDSYIKSFPLTKAKARAILTGKTTDKSPFVIYDMNSLMMGEDKIKFKHITPLQEQSKEVAIRIFQGCQFRSVEAVQEITEYAKSIPGFVNLDLNDQVTLLKYGVHEIIYTMLASLMNKDGVLISEGQGFMTREFLKSLRKPFGDFMEPKFEFAVKFNALELDDSDLAIFIAVIILSGX

SEQ ID NO: 743 - protein, 477 aa, Homo sapiens
MTMVDTEMPFWPTNFGISSVDLSVMEDHSHSFDIKPFTTVDFSSISTPHYEDIPFTRTDPVVADYKYDLKLQEYQSAIKVEPASPPYYSEKTQLYNKPHEEPSNSLMAIECRVCGDKASGFHYGVHACEGCKGFFRRTIRLKLIYDRCDLNCRIHKKSRNKCQYCRFQKCLAVGMSHNAIRFGRMPQAEKEKLLAEISSDIDQLNPESADLRALAKHLYDSYIKSFPLTKAKARAILTGKTTDKSPFVIYDMNSLMMGEDKIKFKHITPLQEQSKEVAIRIFQGCQFRSVEAVQEITEYAKSIPGFVNLDLNDQVTLLKYGVHEIIYTMLASLMNKDGVLISEGQGFMTREFLKSLRKPFGDFMEPKFEFAVKFNALELDDSDLAIFIAVIILSGDRPGLLNVKPIEDIQDNLLQALELQLKLNHPESSQLFAKLLQKMTDLRQIVTEHVQLLQVIKKTETDMSLHPLLQEIYKDLY

SEQ ID NO: 744 - protein, 297 aa, Homo sapiens [sequence omitted]

SEQ ID NO: 745 - protein, 470 aa, Homo sapiens [sequence omitted]

SEQ ID NO: 746 - protein, 446 aa, Homo sapiens [sequence omitted]

SEQ ID NO: 747 - protein, 967 aa, Homo sapiens
MAKGFYISKSLGILGILLGVAAVCTIIALSVVYSQEKNKNANSSPVASTTPSASATTNPASATTLDQSKAWNRYRLPNTLKPDSYRVTLRPYLTPNDRGLYVFKGSSTVRFTCKEATDVIIIHSKKLNYTLSQGHRVVLRGVGGSQPPDIDKTELVEPTEYLVVHLKGSLVKDSQYEMDSEFEGELADDLAGFYRSEYMEGNVRKVVATTQMQAADARKSFPCFDEPAMKAEFNITLIHPKDLTALSNMLPKGPSTPLPEDPNWNVTEFHTTPKMSTYLLAFIVSEFDYVEKQASNGVLIRIWARPSAIAAGHGDYALNVTGPILNFFAGHYDTPYPLPKSDQIGLPDFNAGAMENWGLVTYRENSLLFDPLSSSSSNKERVVTVIAHELAHQWFGNLVTIEWWNDLWLNEGFASYVEYLGADYAEPTWNLKDLMVLNDVYRVMAVDALASSHPLSTPASEINTPAQISELFDAISYSKGASVLRMLSSFLSEDVFKQGLASYLHTFAYQNTIYLNLWDHLQEAVNNRSIQLPTTVRDIMNRWTLQMGFPVITVDTSTGTLSQEHFLLDPDSNVTRPSEFNYVWIVPITSIRDGRQQQDYWLIDVRAQNDLFSTSGNEWVLLNLNVTGYYRVNYDEENWRKIQTQLQRDHSAIPVINRAQIINDAFNLASAHKVPVTLALNNTLFLIEERQYMPWEAALSSLSYFKLMFDRSEVYGPMKNYLKKQVTPLFIHFRNNTNNWREIPENLMDQYSEVNAISTACSNGVPECEEMVSGLFKQWMENPNNNPIHPNLRSTVYCNAIAQGGEEEWDFAWEQFRNATLVNEADKLRAALACSKELWILNRYLSYTLNPDLIRKQDATSTIISITNNVIGQGLVWDFVQSNWKKLFNDYGGGSFSFSNLIQAVTRRFSTEYELQQLEQFKKDNEETGFGSGTRALEQALEKTKANIKWVKENKEVVLQWFTENSK

SEQ ID NO: 748 - protein, 967 aa, Homo sapiens; identical to SEQ ID NO: 747

SEQ ID NO: 749 - protein, 967 aa, Homo sapiens; identical to SEQ ID NO: 747

SEQ ID NO: 750 - protein, 248 aa, Homo sapiens
MSLFPSLPLLLLSMVAASYSETVTCEDAQKTCPAVIACSSPGINGFPGKDGRDGTKGEKGEPGQGLRGLQGPPGKLGPPGNPGPSGSPGPKGQKGDPGKSPDGDSSLAASERKALQTEMARIKKWLTFSLGKQVGNKFFLTNGEIMTFEKVKALCVKFQASVATPRNAAENGAIQNLIKEEAFLGITDEKTEGQFVDLTGNRLTYTNWNEGEPNNAGSDEDCVLLLKNGQWNDVPCSTSHLAVCEFPI

SEQ ID NO: 751 - protein, 248 aa, Homo sapiens; identical to SEQ ID NO: 750

SEQ ID NO: 752 - protein, 106 aa, Homo sapiens
MKLISPRDFVDLVLVKRYEDGTISSNATHVEHPLCPPKPGFVRGFNHPCGCFCEPLPGEPTKTNLVTFFHTDLSGYLPQNVVDSFFPRSMTRFYANLQKAVKQFHE

SEQ ID NO: 753 - protein, 213 aa, Homo sapiens
MDPALAAQMSEAVAEKMLQYRRDTAGWKICREGNGVSVSWRPSVEFPGNLYRGEGIVYGTLEEVWDCVKPAVGGLRVKWDENVTGFEIIQSITDTLCVSRTSTPSAAMKLISPRDFVDLVLVKRYEDGTISSNATHVEHPLCPPKPGFVRGFNHPCGCFCEPLPGEPTKTNLVTFFHTDLSGYLPQNVVDSFFPRSMTRFYANLQKAVKQFHE

SEQ ID NO: 754 - protein, 142 aa, Homo sapiens
MGAPTLPPAWQPFLKDHRISTFKNWPFLEGCACTPERMAEAGFIHCPTENEPDLAQCFFCFKELEGWEPDDDPIEEHKKHSSGCAFLSVKKQFEELTLGEFLKLDRERAKNKIAKETNNKKKEFEETAKKVRRAIEQLAAMD

SEQ ID NO: 755 - protein, 137 aa, Homo sapiens
MGAPTLPPAWQPFLKDHRISTFKNWPFLEGCACTPERMAEAGFIHCPTENEPDLAQCFFCFKELEGWEPDDDPMQRKPTIRRKNLRKLRRKCAVPSSSWLPWIEASGRSCLVPEWLHHFQGLFPGATSLPVGPLAMS

SEQ ID NO: 756 - protein, 165 aa, Homo sapiens
MGAPTLPPAWQPFLKDHRISTFKNWPFLEGCACTPERMAEAGFIHCPTENEPDLAQCFFCFKELEGWEPDDDPIGPGTVAYACNTSTLGGRGGRITREEHKKHSSGCAFLSVKKQFEELTLGEFLKLDRERAKNKIAKETNNKKKEFEETAKKVRRAIEQLAAMD

SEQ ID NO: 757 - protein, 120 aa, Homo sapiens
MGAPTLPPAWQPFLKDHRISTFKNWPFLEGCACTPERMAEAGFIHCPTENEPDLAQCFFCFKELEGWEPDDDPIEEHKKHSSGCAFLSVKKQFEELTLGEFLKLDRERAKNKIERALLAE

SEQ ID NO: 758 - protein, 137 aa, Homo sapiens; identical to SEQ ID NO: 755

SEQ ID NO: 759 - protein, 165 aa, Homo sapiens; identical to SEQ ID NO: 756

SEQ ID NO: 760 - protein, 142 aa, Homo sapiens; identical to SEQ ID NO: 754

SEQ ID NO: 761 - protein, 481 aa, Homo sapiens
MGNVNRQGQHCRDFIMVSQALRLLCLLLGLQGCLAAGGVAKASGGETRDMPWKPGPHRVFVTQEEAHGVLHRRRRANAFLEELRPGSLERECKEEQCSFEEAREIFKDAERTKLFWISYSDGDQCASSPCQNGGSCKDQLQSYICFCLPAFEGRNCETHKDDQLICVNENGGCEQYCSDHTGTKRSCRCHEGYSLLADGVSCTPTVEYPCGKIPILEKRNASKPQGRIVGGKVCPKGECPWQVLLLVNGAQLCGGTLINTIWVVSAAHCFDKIKNWRNLIAVLGEHDLSEHDGDEQSRRVAQVIIPSTYVPGTTNHDIALLRLHQPVVLTDHVVPLCLPERTFSERTLAFVRFSLVSGWGQLLDRGATALELMVLNVPRLMTQDCLQQSRKVGDSPNITEYMFCAGYSDGSKDSCKGDSGGPHATHYRGTWYLTGIVSWGQGCATVGHFGVYTRVSQYIEWLQKLMRSEPRPGVLLRAPFP

SEQ ID NO: 762 - protein, 481 aa, Homo sapiens; identical to SEQ ID NO: 761

SEQ ID NO: 763 - protein, 459 aa, Homo sapiens
MGNVNRQGQHCRDFIMVSQALRLLCLLLGLQGCLAAVFVTQEEAHGVLHRRRRANAFLEELRPGSLERECKEEQCSFEEAREIFKDAERTKLFWISYSDGDQCASSPCQNGGSCKDQLQSYICFCLPAFEGRNCETHKDDQLICVNENGGCEQYCSDHTGTKRSCRCHEGYSLLADGVSCTPTVEYPCGKIPILEKRNASKPQGRIVGGKVCPKGECPWQVLLLVNGAQLCGGTLINTIWVVSAAHCFDKIKNWRNLIAVLGEHDLSEHDGDEQSRRVAQVIIPSTYVPGTTNHDIALLRLHQPVVLTDHVVPLCLPERTFSERTLAFVRFSLVSGWGQLLDRGATALELMVLNVPRLMTQDCLQQSRKVGDSPNITEYMFCAGYSDGSKDSCKGDSGGPHATHYRGTWYLTGIVSWGQGCATVGHFGVYTRVSQYIEWLQKLMRSEPRPGVLLRAPFP

SEQ ID NO: 764 - protein, 459 aa, Homo sapiens; identical to SEQ ID NO: 763

SEQ ID NO: 765 - protein, 348 aa, Homo sapiens
MNDPNSCVDNATVCSGASCVVPESNFNNILSVVLSTVLTILLALVMFSMGCNVEIKKFLGHIKRPWGICVGFLCQFGIMPLTGFILSVAFDILPLQAVVVLIIGCCPGGTASNILAYWVDGDMDLSVSMTTCSTLLALGMMPLCLLIYTKMWVDSGSIVIPYDNIGTSLVALVVPVSIGMFVNHKWPQKAKIILKIGSIAGAILIVLIAVVGGILYQSAWIIAPKLWIIGTIFPVAGYSLGFLLARIAGLPWYRCRTVAFETGMQNTQLCSTIVQLSFTPEELNVVFTFPLIYSIFQLAFAAIFLGFYVAYKKCHGKNKAEIPESKENGTEPESSFYKANGGFQPDEK

SEQ ID NO: 766 - protein, 1356 aa, Homo sapiens
MQSKVLLAVALWLCVETRAASVGLPSVSLDLPRLSIQKDILTIKANTTLQITCRGQRDLDWLWPNNQSGSEQRVEVTECSDGLFCKTLTIPKVIGNDTGAYKCFYRETDLASVIYVYVQDYRSPFIASVSDQHGVVYITENKNKTVVIPCLGSISNLNVSLCARYPEKRFVPDGNRISWDSKKGFTIPSYMISYAGMVFCEAKINDESYQSIMYIVVVVGYRIYDVVLSPSHGIELSVGEKLVLNCTARTELNVGIDFNWEYPSSKHQHKKLVNRDLKTQSGSEMKKFLSTLTIDGVTRSDQGLYTCAASSGLMTKKNSTFVRVHEKPFVAFGSGMESLVEATVGERVRIPAKYLGYPPPEIKWYKNGIPLESNHTIKAGHVLTIMEVSERDTGNYTVILTNPISKEKQSHVVSLVVYVPPQIGEKSLISPVDSYQYGTTQTLTCTVYAIPPPHHIHWYWQLEEECANEPSQAVSVTNPYPCEEWRSVEDFQGGNKIEVNKNQFALIEGKNKTVSTLVIQAANVSALYKCEAVNKVGRGERVISFHVTRGPEITLQPDMQPTEQESVSLWCTADRSTFENLTWYKLGPQPLPIHVGELPTPVCKNLDTLWKLNATMFSNSTNDILIMELKNASLQDQGDYVCLAQDRKTKKRHCVVRQLTVLERVAPTITGNLENQTTSIGESIEVSCTASGNPPPQIMWFKDNETLVEDSGIVLKDGNRNLTIRRVRKEDEGLYTCQACSVLGCAKVEAFFIIEGAQEKTNLEIIILVGTAVIAMFFWLLLVIILRTVKRANGGELKTGYLSIVMDPDELPLDEHCERLPYDASKWEFPRDRLKLGKPLGRGAFGQVIEADAFGIDKTATCRTVAVKMLKEGATHSEHRALMSELKILIHIGHHLNVVNLLGACTKPGGPLMVIVEFCKFGNLSTYLRSKRNEFVPYKTKGARFRQGKDYVGAIPVDLKRRLDSITSSQSSASSGFVEEKSLSDVEEEEAPEDLYKDFLTLEHLICYSFQVAKGMEFLASRKCIHRDLAARNILLSEKNVVKICDFGLARDIYKDPDYVRKGDARLPLKWMAPETIFDRVYTIQSDVWSFGVLLWEIFSLGASPYPGVKIDEEFCRRLKEGTRMRAPDYTTPEMYQTMLDCWHGEPSQRPTFSELVEHLGNLLQANAQQDGKDYIVLPISETLSMEEDSGLSLPTSPVSCMEEEEVCDPKFHYDNTAGISQYLQNSKRKSRPVSVKTFEDIPLEEPEVKVIPDDNQTDSGMVLASEELKTLEDRTKLSPSFGGMVPSKSRESVASEGSNQTSGYQSGYHSDDTDTTVYSSEEAELLKLIEIGVQTGSTAQILQPDSGTTLSSPPV

SEQ ID NO: 767 - protein, 1306 aa, Homo sapiens [sequence omitted]

SEQ ID NO: 768 - protein, 1356 aa, Homo sapiens; identical to SEQ ID NO: 766

SEQ ID NO: 769 - protein, 647 aa, Homo sapiens
MGEIEGTYRVLQTAGMRLGAQTPVGVSTLEPGQTLLPRMQEKHLHLRVKLLDNTMEIFDIEPKCDGQVLLTQVWKRLNLVECDYFGMEFQNTQSYWIWLEPMKPIIRQIRRPKNVVLRLAVKFFPPDPGQLQEEYTRYLFALQLKRDLLEERLTCADTTAALLTSHLLQSEIGDYDETLDREHLKVNEYLPGQQHCLEKILEFHQKHVGQTPAESDFQVLEIARKLEMYGIRFHMASDREGTKIQLAVSHMGVLVFQGTTKINTFNWSKVRKLSFKRKRFLIKLHPEVHGPYQDTLEFLLGSRDECKNFWKICVEYHTFFRLLDQPKPKAKAVFFSRGSSFRYSGRTQKQLVDYFKDSGMKRIPYERRHSKTHTSVRALTADLPKQSISFPEGLRTPASPSSANAFYSLSPSTLVPSGLPEFKDSSSSLTDPQVSYVKSPAAERRSGAVAGGPDTPSAQPLGPPALQPGPGLSTKSPQPSPSSRKSPLSLSPAFQVPLGPAEQGSSPLLSPVLSDAGGAGMDCEEPRHKRVPADEAYFIVKEILATERTYLKDLEVITVWFRSAVVKEDAMPATLMTLLFSNIDPIYEFHRGFLREVEQRLALWEGPSKAHTKGSHQRIGDILLRNMRQLKVFQLHEGHVAGVTKME

SEQ ID NO: 770 - protein, 1054 aa, Homo sapiens
MGEIEGTYRVLQTAGMRLGAQTPVGVSTLEPGQTLLPRMQEKHLHLRVKLLDNTMEIFDIEPKCDGQVLLTQVWKRLNLVECDYFGMEFQNTQSYWIWLEPMKPIIRQIRRPKNVVLRLAVKFFPPDPGQLQEEYTRYLFALQLKRDLLEERLTCADTTAALLTSHLLQSEIGDYDETLDREHLKVNEYLPGQQHCLEKILEFHQKHVGQTPAESDFQVLEIARKLEMYGIRFHMASDREGTKIQLAVSHMGVLVFQGTTKINTFNWSKVRKLSFKRKRFLIKLHPEVHGPYQDTLEFLLGSRDECKNFWKICVEYHTFFRLLDQPKPKAKAVFFSRGSSFRYSGRTQKQLVDYFKDSGMKRIPYERRHSKTHTSVRALTADLPKQSISFPEGLRTPASPSSANAFYSLSPSTLVPSGLPEFKDSSSSLTDPQVSYVKSPAAERRSGAVAGGPDTPSAQPLGPPALQPGPGLSTKSPQPSPSSRKSPLSLSPAFQVPLGPAEQGSSPLLSPVLSDAGGAGMDCEEPRHKRVPADEAYFIVKEILATERTYLKDLEVITVWFRSAVVKEDAMPATLMTLLFSNIDPIYEFHRGFLREVEQRLALWEGPSKAHTKGSHQRIGDILLRNMRQLKEFTSYFQRHDEVLTELEKATKRCKKLEAVYKEFELQKVCYLPLNTFLLKPIQRLLHYRLLLRRLCGHYSPGHHDYADCHDALKAITEVTTTLQHILIRLENLQKLTELQRDLVGIENLIAPGREFIREGCLHKLTKKGLQQRMFFLFSDMLLYTSKGVAGTSHFRIRGLLPLQGMLVEESDNEWSVPHCFTIYAAQKTIVVAASTRLEKEKWMLDLNSAIQAAKSGGDTAPALPGRTVCTRPPRSPNEVSLEQESEDDARGVRSSLEGHGQHRANTTMHVCWYRNTSVSRADHSAAVENQLSGYLLRKFKNSHGWQKLWVVFTNFCLFFYKTHQDDYPLASLPLLGYSVSIPREADGIHKDYVFKLQFKSHVYFFRAESKYTFERWMEVIQGASSSAGRAPSIVQDGPQPSSGLEGMVRGKEE

SEQ ID NO: 771 - protein, 794 aa, Homo sapiens
MELRPWLLWVVAATGTLVLLAADAQGQKVFTNTWAVRIPGGPAVANSVARKHGFLNLGQIFGDYYHFWHRGVTKRSLSPHRPRHSRLQREPQVQWLEQQVAKRRTKRDVYQEPTDPKFPQQWYLSGVTQRDLNVKAAWAQGYTGHGIVVSILDDGIEKNHPDLAGNYDPGASFDVNDQDPDPQPRYTQMNDNRHGTRCAGEVAAVANNGVCGVGVAYNARIGGVRMLDGEVTDAVEARSLGLNPNHIHIYSASWGPEDDGKTVDGPARLAEEAFFRGVSQGRGGLGSIFVWASGNGGREHDSCNCDGYTNSIYTLSISSATQFGNVPWYSEACSSTLATTYSSGNQNEKQIVTTDLRQKCTESHTGTSASAPLAAGIIALTLEANKNLTWRDMQHLVVQTSKPAHLNANDWATNGVGRKVSHSYGYGLLDAGAMVALAQNWTTVAPQRKCIIDILTEPKDIGKRLEVRKTVTACLGEPNHITRLEHAQARLTLSYNRRGDLAIHLVSPMGTRSTLLAARPHDYSADGFNDWAFMTTHSWDEDPSGEWVLEIENTSEANNYGTLTKFTLVLYGTAPEGLPVPPESSGCKTLTSSQACVVCEEGFSLHQKSCVQHCPPGFAPQVLDTHYSTENDVETIRASVCAPCHASCATCQGPALTDCLSCPSHASLDPVEQTCSRQSQSSRESPPQQQPPRLPPEVEAGQRLRAGLLPSHLPEVVAGLSCAFIVLVFVTVFLVLQLRSGFSFRGVKVYTMDRGLISYKGLPPEAWQEECPSDSEEDEGRGERTAFIKDQSAL

SEQ ID NO: 772 - protein, 794 aa, Homo sapiens; identical to SEQ ID NO: 771

SEQ ID NO: 773 - protein, 435 aa, Homo sapiens
MSSPGTESAGKSLQYRVDHLLSAVENELQAGSEKGDPTERELRVGLEESELWLRFKELTNEMIVTKNGRRMFPVLKVNVSGLDPNAMYSFLLDFVAADNHRWKYVNGEWVPGGKPEPQAPSCVYIHPDSPNFGAHWMKAPVSFSKVKLTNKLNGGGQIMLNSLHKYEPRIHIVRVGGPQRMITSHCFPETQFIAVTAYQNEEITALKIKYNPFAKAFLDAKERSDHKEMMEEPGDSQQPGYSQWGWLLPGTSTLCPPANPHPQFGGALSLPSTHSCDRYPTLRSHRSSPYPSPYAHRNNSPTYSDNSPACLSMLQSHDNWSSLGMPAHPSMLPVSHNASPPTSSSQYPSLWSVSNGAVTPGSQAAAVSNGLGAQFFRGSPAHYTPLTHPVSAPSSSGSPLYEGAAAATDIVDSQYDAAAQGRLIASWTPVSPPSM

SEQ ID NO: 774 - protein, 579 aa, Homo sapiens
MPTTERETEFAVLEEQRVELSVSLVNQKFKAELADSQSPYYQELAGKSQLQMQKIFKKLPGFKKIHVLGFRPKKEKDGSSSTEMQLTAIFKRHSAEAKSPASDLLSFDSNKIESEEVYHGTMEEDKQPEIYLTATDLKRLISKALEEEQSLDVGTIQFTDEIAGSLPAFGPDTQSELPTSFAVITEDATLSPELPPVEPQLETVDGAEHGLPDTSWSPPAMASTSLSEAPPFFMASSIFSLTDQGTTDTMATDQTMLVPGLTIPTSDYSAISQLALGISHPPASSDDSRSSAGGEDMVRHLDEMDLSDTPAPSEVPELSEYVSVPDHFLEDTTPVSALQYITTSSMTIAPKGRELVVFFSLRVANMAFSNDLFNKSSLEYRALEQQFTQLLVPYLRSNLTGFKQLEILNFRNGSVIVNSKMKFAKSVPYNLTKAVHGVLEDFRSAAAQQLHLEIDSYSLNIEPADQADPCKFLACGEFAQCVKNERTEEAECRCKPGYDSQGSLDGLEPGLCGPGTKECEVLQGKGAPCRLPDHSENQAYKTSVKKFQNQQNNKVISKRNSELLTVEYEEFNHQDWEGN

SEQ ID NO: 775 - protein, 797 aa, Homo sapiens
MYLETRRAIFVFWIFLQVQGTKDISINIYHSETKDIDNPPRNETTESTEKMYKMSTMRRIFDLAKHRTKRSAFFPTGVKVCPQESMKQILDSLQAYYRLRVCQEAVWEAYRIFLDRIPDTGEYQDWVSICQQETFCLFDIGKNFSNSQEHLDLLQQRIKQRSFPDRKDEISAEKTLGEPGETIVISTDVANVSLGPFPLTPDDTLLNEILDNTLNDTKMPTTERETEFAVLEEQRVELSVSLVNQKFKAELADSQSPYYQELAGKSQLQMQKIFKKLPGFKKIHVLGFRPKKEKDGSSSTEMQLTAIFKRHSAEAKSPASDLLSFDSNKIESEEVYHGTMEEDKQPEIYLTATDLKRLISKALEEEQSLDVGTIQFTDEIAGSLPAFGPDTQSELPTSFAVITEDATLSPELPPVEPQLETVDGAEHGLPDTSWSPPAMASTSLSEAPPFFMASSIFSLTDQGTTDTMATDQTMLVPGLTIPTSDYSAISQLALGISHPPASSDDSRSSAGGEDMVRHLDEMDLSDTPAPSEVPELSEYVSVPDHFLEDTTPVSALQYITTSSMTIAPKGRELVVFFSLRVANMAFSNDLFNKSSLEYRALEQQFTQLLVPYLRSNLTGFKQLEILNFRNGSVIVNSKMKFAKSVPYNLTKAVHGVLEDFRSAAAQQLHLEIDSYSLNIEPADQADPCKFLACGEFAQCVKNERTEEAECRCKPGYDSQGSLDGLEPGLCGPGTKECEVLQGKGAPCRLPDHSENQAYKTSVKKFQNQQNNKVISKRNSELLTVEYEEFNHQDWEGN

SEQ ID NO: 776 - protein, 579 aa, Homo sapiens; identical to SEQ ID NO: 774

SEQ ID NO: 777 - protein, 1712 aa, Homo sapiens
MGRDQRAVAGPALRRWLLLGTVTVGFLAQSVLAGVKKFDVPCGGRDCSGGCQCYPEKGGRGQPGPVGPQGYNGPPGLQGFPGLQGRKGDKGERGAPGVTGPKGDVGARGVSGFPGADGIPGHPGQGGPRGRPGYDGCNGTQGDSGPQGPPGSEGFTGPPGPQGPKGQKGEPYALPKEERDRYRGEPGEPGLVGFQGPPGRPGHVGQMGPVGAPGRPGPPGPPGPKGQQGNRGLGFYGVKGEKGDVGQPGPNGIPSDTLHPIIAPTGVTFHPDQYKGEKGSEGEPGIRGISLKGEEGIMGFPGLRGYPGLSGEKGSPGQKGSRGLDGYQGPDGPRGPKGEAGDPGPPGLPAYSPHPSLAKGARGDPGFPGAQGEPGSQGEPGDPGLPGPPGLSIGDGDQRRGLPGEMGPKGFIGDPGIPALYGGPPGPDGKRGPPGPPGLPGPPGPDGFLFGLKGAKGRAGFPGLPGSPGARGPKGWKGDAGECRCTEGDEAIKGLPGLPGPKGFAGINGEPGRKGDRGDPGQHGLPGFPGLKGVPGNIGAPGPKGAKGDSRTITTKGERGQPGVPGVPGMKGDDGSPGRDGLDGFPGLPGPPGDGIKGPPGDPGYPGIPGTKGTPGEMGPPGLGLPGLKGQRGFPGDAGLPGPPGFLGPPGPAGTPGQIDCDTDVKRAVGGDRQEAIQPGCIGGPKGLPGLPGPPGPTGAKGLRGIPGFAGADGGPGPRGLPGDAGREGFPGPPGFIGPRGSKGAVGLPGPDGSPGPIGLPGPDGPPGERGLPGEVLGAQPGPRGDAGVPGQPGLKGLPGDRGPPGFRGSQGMPGMPGLKGQPGLPGPSGQPGLYGPPGLHGFPGAPGQEGPLGLPGIPGREGLPGDRGDPGDTGAPGPVGMKGLSGDRGDAGFTGEQGHPGSPGFKGIDGMPGTPGLKGDRGSPGMDGFQGMPGLKGRPGFPGSKGEAGFFGIPGLKGLAGEPGFKGSRGDPGPPGPPPVILPGMKDIKGEKGDEGPMGLKGYLGAKGIQGMPGIPGLSGIPGLPGRPGHIKGVKGDIGVPGIPGLPGFPGVAGPPGITGFPGFIGSRGDKGAPGRAGLYGEIGATGDFGDIGDTINLPGRPGLKGERGTTGIPGLKGFFGEKGTEGDIGFPGITGVTGVQGPPGLKGQTGFPGLTGPPGSQGELGRIGLPGGKGDDGWPGAPGLPGFPGLRGIRGLHGLPGTKGFPGSPGSDIHGDPGFPGPPGERGDPGEANTLPGPVGVPGQKGDQGAPGERGPPGSPGLQGFPGITPPSNISGAPGDKGAPGIFGLKGYRGPPGPPGSAALPGSKGDTGNPGAPGTPGTKGWAGDSGPQGRPGVFGLPGEKGPRGEQGFMGNTGPTGAVGDRGPKGPKGDPGFPGAPGTVGAPGIAGIPQKIAVQPGTVGPQGRRGPPGAPGEMGPQGPPGEPGFRGAPGKAGPQGRGGVSAVPGFRGDEGPIGHQGPIGQEGAPGRPGSPGLPGMPGRSVSIGYLLVKHSQTDQEPMCPVGMNKLWSGYSLLYFEGQEKAHNQDLGLAGSCLARFSTMPFLYCNPGDVCYYASRNDKSYWLSTTAPLPMMPVAEDEIKPYISRCSVCEAPAIAIAVHSQDVSIPHCPAGWRSLWIGYSFLMHTAAGDEGGGQSLVSPGSCLEDFRATPFIECNGGRGTCHYYANKYSFWLTTIPEQSFQGSPSADTLKAGLIRTHISRCQVCMKNL

SEQ ID NO: 778 - protein, 1196 aa, Homo sapiens [sequence omitted]

SEQ ID NO: 779 - protein, 245 aa, Homo sapiens
MAGSSSLEAVRRKIRSLQEQADAAEERAGTLQRELDHERKLRETAEADVASLNRRIQLVEEELDRAQERLATALQKLEEAEKAADESERGMKVIESRAQKDEEKMEIQEIQLKEAKHIAEDADRKYEEVARKLVIIESDLERAEERAELSEGKCAELEEELKTVTNNLKSLEAQAEKYSQKEDRYEEEIKVLSDKLKEAETRAEFAERSVTKLEKSIDDLEDQLYQQLEQNRRLTNELKLALNED

SEQ ID NO: 780 - protein, 284 aa, Homo sapiens
MDAIKKKMQMLKLDKENALDRAEQAEADKKAAEDRSKQLEDELVSLQKKLKGTEDELDKYSEALKDAQEKLELAEKKATDAEADVASLNRRIQLVEEELDRAQERLATALQKLEEAEKAADESERGMKVIESRAQKDEEKMEIQEIQLKEAKHIAEDADRKYEEVARKLVIIESDLERAEERAELSEGQVRQLEEQLRIMDQTLKALMAAEDKYSQKEDRYEEEIKVLSDKLKEAETRAEFAERSVTKLEKSIDDLEEKVAHAKEENLSMHQMLDQTLLELNNM

SEQ ID NO: 781 - protein, 284 aa, Homo sapiens; identical to SEQ ID NO: 780

SEQ ID NO: 782 - protein, 96 aa, Homo sapiens
MDAIKKKMQMLKLDKENALDRAEQAEADKKAAEDRSKQVCASPALRPRPERRDSSLAPPAGSPPRGLGEPPPYPHHHPGRPGRASGKKEGKRKSQA

SEQ ID NO: 783 - protein, 284 aa, Homo sapiens
MDAIKKKMQMLKLDKENALDRAEQAEADKKAAEDRSKQLEEDIAAKEKLLRVSEDERDRVLEELHKAEDSLLAAEEAAAKAEADVASLNRRIQLVEEELDRAQERLATALQKLEEAEKAADESERGMKVIESRAQKDEEKMEIQEIQLKEAKHIAEDADRKYEEVARKLVIIESDLERAEERAELSEGKCAELEEELKTVTNNLKSLEAQAEKYSQKEDRYEEEIKVLSDKLKEAETRAEFAERSVTKLEKSIDDLEEKVAHAKEENLSMHQMLDQTLLELNNM

SEQ ID NO: 784 - protein, 284 aa, Homo sapiens
MDAIKKKMQMLKLDKENALDRAEQAEADKKAAEDRSKQLEDELVSLQKKLKGTEDELDKYSEALKDAQEKLELAEKKATDAEADVASLNRRIQLVEEELDRAQERLATALQKLEEAEKAADESERGMKVIESRAQKDEEKMEIQEIQLKEAKHIAEDADRKYEEVARKLVIIESDLERAEERAELSEGKCAELEEELKTVTNNLKSLEAQAEKYSQKEDRYEEEIKVLSDKLKEAETRAEFAERSVTKLEKSIDDLEDELYAQKLKYKAISEELDHALNDMTSM

SEQ ID NO: 785 - protein, 284 aa, Homo sapiens
MDAIKKKMQMLKLDKENALDRAEQAEADKKAAEDRSKQLEEDIAAKEKLLRVSEDERDRVLEELHKAEDSLLAAEEAAAKAEADVASLNRRIQLVEEELDRAQERLATALQKLEEAEKAADESERGMKVIESRAQKDEEKMEIQEIQLKEAKHIAEDADRKYEEVARKLVIIESDLERAEERAELSEGQVRQLEEQLRIMDQTLKALMAAEDKYSQKEDRYEEEIKVLSDKLKEAETRAEFAERSVTKLEKSIDDLEEKVAHAKEENLSMHQMLDQTLLELNNM

SEQ ID NO: 786 - protein, 248 aa, Homo sapiens
MAGSSSLEAVRRKIRSLQEQADAAEERAGTLQRELDHERKLRETAEADVASLNRRIQLVEEELDRAQERLATALQKLEEAEKAADESERGMKVIESRAQKDEEKMEIQEIQLKEAKHIAEDADRKYEEVARKLVIIESDLERAEERAELSEGKCAELEEELKTVTNNLKSLEAQAEKYSQKEDRYEEEIKVLSDKLKEAETRAEFAERSVTKLEKSIDDLEEKVAHAKEENLSMHQMLDQTLLELNNM

SEQ ID NO: 787 - protein, 248 aa, Homo sapiens
MAGSSSLEAVRRKIRSLQEQADAAEERAGTLQRELDHERKLRETAEADVASLNRRIQLVEEELDRAQERLATALQKLEEAEKAADESERGMKVIESRAQKDEEKMEIQEIQLKEAKHIAEDADRKYEEVARKLVIIESDLERAEERAELSEGQVRQLEEQLRIMDQTLKALMAAEDKYSQKEDRYEEEIKVLSDKLKEAETRAEFAERSVTKLEKSIDDLEEKVAHAKEENLSMHQMLDQTLLELNNM

SEQ ID NO: 788 - protein, 248 aa, Homo sapiens
MAGSSSLEAVRRKIRSLQEQADAAEERAGTLQRELDHERKLRETAEADVASLNRRIQLVEEELDRAQERLATALQKLEEAEKAADESERGMKVIESRAQKDEEKMEIQEIQLKEAKHIAEDADRKYEEVARKLVIIESDLERAEERAELSEGKCAELEEELKTVTNNLKSLEAQAEKYSQKEDRYEEEIKVLSDKLKEAETRAEFAERSVTKLEKSIDDLEDELYAQKLKYKAISEELDHALNDMTSM

SEQ ID NO: 789 - protein, 281 aa, Homo sapiens
MDAIKKKMQMLKLDKENALDRAEQAEADKKAAEDRSKQLEDELVSLQKKLKGTEDELDKYSEALKDAQEKLELAEKKATDAEADVASLNRRIQLVEEELDRAQERLATALQKLEEAEKAADESERGMKVIESRAQKDEEKMEIQEIQLKEAKHIAEDADRKYEEVARKLVIIESDLERAEERAELSEGKCAELEEELKTVTNNLKSLEAQAEKYSQKEDRYEEEIKVLSDKLKEAETRAEFAERSVTKLEKSIDDLEDQLYQQLEQNRRLTNELKLALNED

SEQ ID NO: 790 - protein, 284 aa, Homo sapiens
MDAIKKKMQMLKLDKENALDRAEQAEADKKAAEDRSKQLEDELVSLQKKLKGTEDELDKYSEALKDAQEKLELAEKKATDAEADVASLNRRIQLVEEELDRAQERLATALQKLEEAEKAADESERGMKVIESRAQKDEEKMEIQEIQLKEAKHIAEDADRKYEEVARKLVIIESDLERAEERAELSEGKCAELEEELKTVTNNLKSLEAQAEKYSQKEDRYEEEIKVLSDKLKEAETRAEFAERSVTKLEKSIDDLEEKVAHAKEENLSMHQMLDQTLLELNNM

SEQ ID NO: 791 - protein, 287 aa, Homo sapiens
MDAIKKKMQMLKLDKENALDRAEQAEADKKAAEDRSKQLEDELVSLQKKLKGTEDELDKYSEALKDAQEKLELAEKKATDAEADVASLNRRIQLVEEELDRAQERLATALQKLEEAEKAADESERGMKVIESRAQKDEEKMEIQEIQLKEAKHIAEDADRKYEEVARKLVIIESDLERAEERAELSEGKCAELEEELKTVTNNLKSLEAQAEKYSQKEDRYEEEIKVLSDKLKEAETRAEFAERSVTKLEKSIDDLEDKFLCFTSPKTPSSSWMSHLSELCICLFSS

SEQ ID NO: 792 - protein, 284 aa, Homo sapiens
MDAIKKKMQMLKLDKENALDRAEQAEADKKAAEDRSKQLEDELVSLQKKLKGTEDELDKYSEALKDAQEKLELAEKKATDAEADVASLNRRIQLVEEELDRAQERLATALQKLEEAEKAADESERGMKVIESRAQKDEEKMEIQEIQLKEAKHIAEDADRKYEEVARKLVIIESDLERAEERAELSEGQVRQLEEQLRIMDQTLKALMAAEDKYSQKEDRYEEEIKVLSDKLKEAETRAEFAERSVTKLEKSIDDLEDELYAQKLKYKAISEELDHALNDMTSM

SEQ ID NO: 793 - protein, 415 aa, Homo sapiens
MEDLCVANTLFALNLFKHLAKASPTQNLFLSPWSISSTMAMVYMGSRGSTEDQMAKVLQFNEVGANAVTPMTPENFTSCGFMQQIQKGSYPDAILQAQAADKIHSSFRSLSSAINASTGNYLLESVNKLFGEKSASFREEYIRLCQKYYSSEPQAVDFLECAEEARKKINSWVKTQTKGKIPNLLPEGSVDGDTRMVLVNAVYFKGKWKTPFEKKLNGLYPFRVNSAQRTPVQMMYLREKLNIGYIEDLKAQILELPYAGDVSMFLLLPDEIADVSTGLELLESEITYDKLNKWTSKDKMAEDEVEVYIPQFKLEEHYELRSILRSMGMEDAFNKGRANFSGMSERNDLFLSEVFHQAMVDVNEEGTEAAAGTGGVMTGRTGHGGPQFVADHPFLFLIMHKITNCILFFGRFSSP

SEQ ID NO: 794 - protein, 382 aa, Homo sapiens
MEDLCVANTLFALNLFKHLAKASPTQNLFLSPWSISSTMAMVYMGSRGSTEDQMAKNSFFLFKAQAADKIHSSFRSLSSAINASTGNYLLESVNKLFGEKSASFREEYIRLCQKYYSSEPQAVDFLECAEEARKKINSWVKTQTKGKIPNLLPEGSVDGDTRMVLVNAVYFKGKWKTPFEKKLNGLYPFRVNSAQRTPVQMMYLREKLNIGYIEDLKAQILELPYAGDVSMFLLLPDEIADVSTGLELLESEITYDKLNKWTSKDKMAEDEVEVYIPQFKLEEHYELRSILRSMGMEDAFNKGRANFSGMSERNDLFLSEVFHQAMVDVNEEGTEAAAGTGGVMTGRTGHGGPQFVADHPFLFLIMHKITNCILFFGRFSSP

SEQ ID NO: 795 - protein, 397 aa, Homo sapiens
MNAGSDPVVIVSAARTIIGSFNGALAAVPVQDLGSTVIKEVLKRATVAPEDVSEVIFGHVLAAGCGQNPVRQASVGAGIPYSVPAWSCQMICGSGLKAVCLAVQSIGIGDSSIVVAGGMENMSKAPHLAYLRTGVKIGEMPLTDSILCDGLTDAFHNCHMGITAENVAKKWQVSREDQDKVAVLSQNRTENAQKAGHFDKEIVPVLVSTRKGLIEVKTDEFPRHGSNIEAMSKLKPYFLTDGTGTVTPANASGINDGAAAVVLMKKSEADKRGLTPLARIVSWSQVGVEPSIMGIGPIPAIKQAVTKAGWSLEDVDIFEINEAFAAVSAAIVKELGLNPEKVNIEGGAIALGHPLGASGCRILVTLLHTLERMGRSRGVAALCIGGGMGIAMCVQRE

SEQ ID NO: 796 - protein, 397 aa, Homo sapiens; identical to SEQ ID NO: 795

SEQ ID NO: 797 - protein, 397 aa, Homo sapiens; identical to SEQ ID NO: 795

SEQ ID NO: 798 - protein, 560 aa, Homo sapiens
MVLGPEQKMSDDSVSGDHGESASLGNINPAYSNPSLSQSPGDSEEYFATYFNEKISIPEEEYSCFSFRKLWAFTGPGFLMSIAYLDPGNIESDLQSGAVAGFKLLWILLLATLVGLLLQRLAARLGVVTGLHLAEVCHRQYPKVPRVILWLMVELAIIGSDMQEVIGSAIAINLLSVGRIPLWGGVLITIADTFVFLFLDKYGLRKLEAFFGFLITIMALTFGYEASVKPSQSQVLKGMFVPSCSGCRTPQIEQAVGIVGAVIMPHNMYLHSALVKSRQVNRNNKQEVREANKYFFIESCIALFVSFIINVFVVSVFAEAFFGKTNEQVVEVCTNTSSPHAGLFPKDNSTLAVDIYKGGVVLGCYFGPAALYIWAVGILAAGQSSTMTGTYSGQFVMEGFLNLKWSRFARVVLTRSIAIIPTLLVAVFQDVEHLTGMNDFLNVLQSLQLPFALIPILTFTSLRPVMSDFANGLGWRIAGGILVLIICSINMYFVVVYVRDLGHVALYVVAAVVSVAYLGFVFYLGWQCLIALGMSFLDCGHTVSISKGLLTEEATRGYVK

SEQ ID NO: 799 - protein, 561 aa, Homo sapiens
MVLGPEQKMSDDSVSGDHGESASLGNINPAYSNPSLSQSPGDSEEYFATYFNEKISIPEEEYSCFSFRKLWAFTGPGFLMSIAYLDPGNIESDLQSGAVAGFKLLWILLLATLVGLLLQRLAARLGVVTGLHLAEVCHRQYPKVPRVILWLMVELAIIGSDMQEVIGSAIAINLLSVGRIPLWGGVLITIADTFVFLFLDKYGLRKLEAFFGFLITIMALTFGYEYVTVKPSQSQVLKGMFVPSCSGCRTPQIEQAVGIVGAVIMPHNMYLHSALVKSRQVNRNNKQEVREANKYFFIESCIALFVSFIINVFVVSVFAEAFFGKTNEQVVEVCTNTSSPHAGLFPKDNSTLAVDIYKGGVVLGCYFGPAALYIWAVGILAAGQSSTMTGTYSGQFVMEGFLNLKWSRFARVVLTRSIAIIPTLLVAVFQDVEHLTGMNDFLNVLQSLQLPFALIPILTFTSLRPVMSDFANGLGWRIAGGILVLIICSINMYFVVVYVRDLGHVALYVVAAVVSVAYLGFVFYLGWQCLIALGMSFLDCGHTVSISKGLLTEEATRGYVK

SEQ ID NO: 800 - protein, 547 aa, Homo sapiens [sequence omitted]

SEQ ID NO: 801 - protein, 567 aa, Homo sapiens
MVLGPEQKMSDDSVSGDHGESASLGNINPAYSNPSLSQSPGDSEEYFATYFNEKISIPEEEYSCFSFRKLWAFTGPGFLMSIAYLDPGNIESDLQSGAVAGFKLLWILLLATLVGLLLQRLAARLGVVTGLHLAEVCHRQYPKVPRVILWLMVELAIIGSDMQEVIGSAIAINLLSVGRIPLWGGVLITIADTFVFLFLDKYGLRKLEAFFGFLITIMALTFGYEASVKPSQSQVLKGMFVPSCSGCRTPQIEQAVGIVGAVIMPHNMYLHSALVKSRQVNRNNKQEVREANKYFFIESCIALFVSFIINVFVVSVFAEAFFGKTNEQVVEVCTNTSSPHAGLFPKDNSTLAVDIYKGGVVLGCYFGPAALYIWAVGILAAGQSSTMTGTYSGQFVMEGFLNLKWSRFARVVLTRSIAIIPTLLVAVFQDVEHLTGMNDFLNVLQSLQLPFALIPILTFTSLRPVMSDFANGLGWRIAGGILVLIICSINMYFVVVYVRDLGHVALYVVAAVVSVAYLGFVFYLGWQCLIALGMSFLDCGHTCHLGLTAQPELYLLNTMDADSLVSR

SEQ ID NO: 802 - protein, 413 aa, Homo sapiens [sequence omitted]

SEQ ID NO: 803 - protein, 308 aa, Homo sapiens
MPGQELRTVNGSQMLLVLLVLSWLPHGGALSLAEASRASFPGPSELHSEDSRFRELRKRYEDLLTRLRANQSWEDSNTDLVPAPAVRILTPEVRLGSGGHLHLRISRAALPEGLPEASRLHRALFRLSPTASRSWDVTRPLRRQLSLARPQAPALHLRLSPPPSQSDQLLAESSSARPQLELHLRPQAARGRRRARARNGDHCPLGPGRCCRLHTVRASLEDLGWADWVLSPREVQVTMCIGACPSQFRAANMHAQIKTSLHRLKPDTVPAPCCVPASYNPMVLIQKTDTGVSLQTYDDLLAKDCHCI

SEQ ID NO: 804 - protein, 308 aa, Homo sapiens; identical to SEQ ID NO: 803

SEQ ID NO: 805 - protein, 385 aa, Homo sapiens
MGCRRTREGPSKAMIFPWKCQSTQRDLWNIFKLWGWTMLCCDFLAHHGTDCWTYHYSEKPMNWQRARRFCRDNYTDLVAIQNKAEIEYLEKTLPFSRSYYWIGIRKIGGIWTWVGTNKSLTEEAENWGDGEPNNKKNKEDCVEIYIKRNKDAGKWNDDACHKLKAALCYTASCQPWSCSGHGECVEIINNYTCNCDVGYYGPQCQFVIQCEPLEAPELGTMDCTHPLGNFSFSSQCAFSCSEGTNLTGIEETTCGPFGNWSSPEPTCQVIQCEPLSAPDLGIMNCSHPLASFSFTSACTFICSEGTELIGKKKTICESSGIWSNPSPICQKLDKSFSMIKEGDYNPLFIPVAVMVTAFSGLAFIIWLARRLKKGKKSKRSMNDPY

SEQ ID NO: 806 - protein, 375 aa, Homo sapiens
MGCRRTREGPSKAMIFPWKCQSTQRDLWNIFKLWGWTMLCCDFLAHHGTDCWTYHYSEKPMNWQRARRFCRDNYTDLVAIQNKAEIEYLEKTLPFSRSYYWIGIRKIGGIWTWVGTNKSLTEEAENWGDGEPNNKKNKEDCVEIYIKRNKDAGKWNDDACHKLKAALCYTASCQPWSCSGHGECVEIINNYTCNCDVGYYGPQCQFVIQCEPLEAPELGTMDCTHPLGNFSFSSQCAFSCSEGTNLTGIEETTCGPFGNWSSPEPTCQVIQCEPLSAPDLGIMNCSHPLASFSFTSACTFICSEGTELIGKKKTICESSGIWSNPSPICQKLDKSFSMIKEGDYNPLFIPVAVMVTAFSGLAFIIWLARRLKKGM

SEQ ID NO: 807 - protein, 320 aa, Homo sapiens [sequence omitted]

SEQ ID NO: 808 - protein, 373 aa, Homo sapiens
MGCRRTREGPSKAMIFPWKCQSTQRDLWNIFKLWGWTMLCCDFLAHHGTDCWTYHYSEKPMNWQRARRFCRDNYTDLVAIQNKAEIEYLEKTLPFSRSYYWIGIRKIGGIWTWVGTNKSLTEEAENWGDGEPNNKKNKEDCVEIYIKRNKDAGKWNDDACHKLKAALCYTASCQPWSCSGHGECVEIINNYTCNCDVGYYGPQCQFVIQCEPLEAPELGTMDCTHPLGNFSFSSQCAFSCSEGTNLTGIEETTCGPFGNWSSPEPTCQVIQCEPLSAPDLGIMNCSHPLASFSFTSACTFICSEGTELIGKKKTICESSGIWSNPSPICQKLDKSFSMIKEGDYNPLFIPVAVMVTAFSGFNSVLYLMTDTSK

SEQ ID NO: 809 - protein, 385 aa, Homo sapiens; identical to SEQ ID NO: 805

SEQ ID NO: 810 - protein, 1278 aa, Homo sapiens
MTARGLALGLLLLLLCPAQVFSQSCVWYGECGIAYGDKRYNCEYSGPPKPLPKDGYDLVQELCPGFFFGNVSLCCDVRQLQTLKDNLQLPLQFLSRCPSCFYNLLNLFCELTCSPRQSQFLNVTATEDYVDPVTNQTKTNVKELQYYVGQSFANAMYNACRDVEAPSSNDKALGLLCGKDADACNATNWIEYMFNKDNGQAPFTITPVFSDFPVHGMEPMNNATKGCDESVDEVTAPCSCQDCSIVCGPKPQPPPPPAPWTILGLDAMYVIMWITYMAFLLVFFGAFFAVWCYRKRYFVSEYTPIDSNIAFSVNASDKGEASCCDPVSAAFEGCLRRLFTRWGSFCVRNPGCVIFFSLVFITACSSGLVFVRVTTNPVDLWSAPSSQARLEKEYFDQHFGPFFRTEQLIIRAPLTDKHIYQPYPSGADVPFGPPLDIQILHQVLDLQIAIENITASYDNETVTLQDICLAPLSPYNTNCTILSVLNYFQNSHSVLDHKKGDDFFVYADYHTHFLYCVRAPASLNDTSLLHDPCLGTFGGPVFPWLVLGGYDDQNYNNATALVITFPVNNYYNDTEKLQRAQAWEKEFINFVKNYKNPNLTISFTAERSIEDELNRESDSDVFTVVISYAIMFLYISLALGHIKSCRRLLVDSKVSLGIAGILIVLSSVACSLGVFSYIGLPLTLIVIEVIPFLVLAVGVDNIFILVQAYQRDERLQGETLDQQLGRVLGEVAPSMFLSSFSETVAFFLGALSVMPAVHTFSLFAGLAVFIDFLLQITCFVSLLGLDIKRQEKNRLDIFCCVRGAEDGTSVQASESCLFRFFKNSYSPLLLKDWMRPIVIAIFVGVLSFSIAVLNKVDIGLDQSLSMPDDSYMVDYFKSISQYLHAGPPVYFVLEEGHDYTSSKGQNMVCGGMGCNNDSLVQQIFNAAQLDNYTRIGFAPSSWIDDYFDWVKPQSSCCRVDNITDQFCNASVVDPACVRCRPLTPEGKQRPQGGDFMRFLPMFLSDNPNPKCGKGGHAAYSSAVNILLGHGTRVGATYFMTYHTVLQTSADFIDALKKARLIASNVTETMGINGSAYRVFPYSVFYVFYEQYLTIIDDTIFNLGVSLGAIFLVTMVLLGCELWSAVIMCATIAMVLVNMFGVMWLWGISLNAVSLVNLVMSCGISVEFCSHITRAFTVSMKGSRVERAEEALAHMGSSVFSGITLTKFGGIVVLAFAKSQIFQIFYFRMYLAMVLLGATHGLIFLPVLLSYIGPSVNKAKSCATEERYKGTERERLLNF

SEQ ID NO: 811 - protein, 586 aa, Homo sapiens
MLARVTRKMLRHAKCFQRLAIFGSVRALHKDNRTATPQNFSNYESMKQDFKLGIPEYFNFAKDVLDQWTDKEKAGKKPSNPAFWWINRNGEEMRWSFEELGSLSRKFANILSEACSLQRGDRVILILPRVPEWWLANVACLRTGTVLIPGTTQLTQKDILYRLQSSKANCIITNDVLAPAVDAVASKCENLHSKLIVSENSREGWGNLKELMKHASDSHTCVKTKHNEIMAIFFTSGTSGYPKMTAHTHSSFGLGLSVNGRFWLDLTPSDVMWNTSDTGWAKSAWSSVFSPWIQGACVFTHHLPRFEPTSILQTLSKYPITVFCSAPTVYRMLVQNDITSYKFKSLKHCVSAGEPITPDVTEKWRNKTGLDIYEGYGQTETVLICGNFKGMKIKPGSMGKPSPAFDVKIVDVNGNVLPPGQEGDIGIQVLPNRPFGLFTHYVDNPSKTASTLRGNFYITGDRGYMDKDGYFWFVARADDVILSSGYRIGPFEVENALNEHPSVAESAVVSSPDPIRGEVVKAFVVLNPDYKSHDQEQLIKEIQEHVKKTTAPYKYPRKVEFIQELPKTISGKTKRNELRKKEWKTI

SEQ ID NO: 812 - protein, 438 aa, Homo sapiens
MLARVTRKMLRHAKCFQRLAIFGSVRALHKDNRTATPQNFSNYESMKQDFKLGIPEYFNFAKDVLDQWTDKEKAGKKPSNPAFWWINRNGEEMRWSFEELGSLSRKFANILSEACSLQRGDRVILILPRVPEWWLANVACLRTGTVLIPGTTQLTQKDILYRLQSSKANCIITNDVLAPAVDAVASKCENLHSKLIVSENSREGWGNLKELMKHASDSHTCVKTKHNEIMAIFFTSGTSGYPKMTAHTHSSFGLGLSVNGRFWLDLTPSDVMWNTSDTGWAKSAWSSVFSPWIQGACVFTHHLPRFEPTSILQTLSKYPITVFCSAPTVYRMLVQNDITSYKFKSLKHCVSAGEPITPDVTEKWRNKTGLDIYEGYGQTETVLICGNFKGMKIKPGSMGKPSPAFDVKVCTSPSRRMFNNPICTLPTYRLPPYKLSLL

SEQ ID NO: 813 - protein, 894 aa, Homo sapiens [sequence omitted]

SEQ ID NO: 814 - protein, 500 aa, Homo sapiens
MAWAALLGLLAALLLLLLLSRRRTRRPGEPPLDLGSIPWLGYALDFGKDAASFLTRMKEKHGDIFTILVGGRYVTVLLDPHSYDAVVWEPRTRLDFHAYAIFLMERIFDVQLPHYSPSDEKARMKLTLLHRELQALTEAMYTNLHAVLLGDATEAGSGWHEMGLLDFSYSFLLRAGYLTLYGIEALPRTHESQAQDRVHSADVFHTFRQLDRLLPKLARGSLSVGDKDHMCSVKSRLWKLLSPARLARRAHRSKWLESYLLHLEEMGVSEEMQARALVLQLWATQGNMGPAAFWLLLFLLKNPEALAAVRGELESILWQAEQPVSQTTTLPQKVLDSTPVLDSVLSESLRLTAAPFITREVVVDLAMPMADGREFNLRRGDRLLLFPFLSPQRDPEIYTDPEVFKYNRFLNPDGSEKKDFYKDGKRLKNYNMPWGAGHNHCLGRSYAVNSIKQFVFLVLVHLDLELINADVEIPEFDLSRYGFGLMQPEHDVPVRYRIRP

SEQ ID NO: 815 - protein, 742 aa, Homo sapiens
MKDDFAEEEEVQSFGYKRFGIQEGTQCTKCKNNWALKFSIILLYILCALLTITVAILGYKVVEKMDNVTGGMETSRQTYDDKLTAVESDLKKLGDQTGKKAISTNSELSTFRSDILDLRQQLREITEKTSKNKDTLEKLQASGDALVDRQSQLKETLENNSFLITTVNKTLQAYNGYVTNLQQDTSVLQGNLQNQMYSHNVVIMNLNNLNLTQVQQRNLITNLQRSVDDTSQAIQRIKNDFQNLQQVFLQAKKDTDWLKEKVQSLQTLAANNSALAKANNDTLEDMNSQLNSFTGQMENITTISQANEQNLKDLQDLHKDAENRTAIKFNQLEERFQLFETDIVNIISNISYTAHHLRTLTSNLNEVRTTCTDTLTKHTDDLTSLNNTLANIRLDSVSLRMQQDLMRSRLDTEVANLSVIMEEMKLVDSKHGQLIKNFTILQGPPGPRGPRGDRGSQGPPGPTGNKGQKGEKGEPGPPGPAGERGPIGPAGPPGERGGKGSKGSQGPKGSRGSPGKPGPQGSSGDPGPPGPPGKEGLPGPQGPPGFQGLQGTVGEPGVPGPRGLPGLPGVPGMPGPKGPPGPPGPSGAVVPLALQNEPTPAPEDNGCPPHWKNFTDKCYYFSVEKEIFEDAKLFCEDKSSHLVFINTREEQQWIKKQMVGRESHWIGLTDSERENEWKWLDGTSPDYKNWKAGQPDNWGHGHGPGEDCAGLIYAGQWNDFQCEDVNNFICEKDRETVLSSAL

SEQ ID NO: 816 - protein, 558 aa, Homo sapiens
MDNVTGGMETSRQTYDDKLTAVESDLKKLGDQTGKKAISTNSELSTFRSDILDLRQQLREITEKTSKNKDTLEKLQASGDALVDRQSQLKETLENNSFLITTVNKTLQAYNGYVTNLQQDTSVLQGNLQNQMYSHNVVIMNLNNLNLTQVQQRNLITNLQRSVDDTSQAIQRIKNDFQNLQQVFLQAKKDTDWLKEKVQSLQTLAANNSALAKANNDTLEDMNSQLNSFTGQMENITTISQANEQNLKDLQDLHKDAENRTAIKFNQLEERFQLFETDIVNIISNISYTAHHLRTLTSNLNEVRTTCTDTLTKHTDDLTSLNNTLANIRLDSVSLRMQQDLMRSRLDTEVANLSVIMEEMKLVDSKHGQLIKNFTILQGPPGPRGPRGDRGSQGPPGPTGNKGQKGEKGEPGPPGPAGERGPIGPAGPPGERGGKGSKGSQGPKGSRGSPGKPGPQGSSGDPGPPGPPGKEGLPGPQGPPGFQGLQGTVGEPGVPGPRGLPGLPGVPGMPGPKGPPGPPGPSGAVVPLALQNEPTPAPEDNGKSKPSLQPGGQGSACA

SEQ ID NO: 817 - protein, 622 aa, Homo sapiens
MKDDFAEEEEVQSFGYKRFGIQEGTQCTKCKNNWALKFSIILLYILCALLTITVAILGYKVVEKMDNVTGGMETSRQTYDDKLTAVESDLKKLGDQTGKKAISTNSELSTFRSDILDLRQQLREITEKTSKNKDTLEKLQASGDALVDRQSQLKETLENNSFLITTVNKTLQAYNGYVTNLQQDTSVLQGNLQNQMYSHNVVIMNLNNLNLTQVQQRNLITNLQRSVDDTSQAIQRIKNDFQNLQQVFLQAKKDTDWLKEKVQSLQTLAANNSALAKANNDTLEDMNSQLNSFTGQMENITTISQANEQNLKDLQDLHKDAENRTAIKFNQLEERFQLFETDIVNIISNISYTAHHLRTLTSNLNEVRTTCTDTLTKHTDDLTSLNNTLANIRLDSVSLRMQQDLMRSRLDTEVANLSVIMEEMKLVDSKHGQLIKNFTILQGPPGPRGPRGDRGSQGPPGPTGNKGQKGEKGEPGPPGPAGERGPIGPAGPPGERGGKGSKGSQGPKGSRGSPGKPGPQGSSGDPGPPGPPGKEGLPGPQGPPGFQGLQGTVGEPGVPGPRGLPGLPGVPGMPGPKGPPGPPGPSGAVVPLALQNEPTPAPEDNGKSKPSLQPGGQGSACA

SEQ ID NO: 818 - protein, 94 aa, Homo sapiens
  VARIANT (1)...(94): Xaa = Any Amino Acid
MKDDFAEEEEVQSFGYKRFGIQEGTQCTKCKNNWALKFSIILLYILCALLTITVAILGYKVVEKMDNVTGGMETSRQTYDDKLTAVESDLKKLX

SEQ ID NO: 819 - protein, 678 aa, Homo sapiens
MDNVTGGMETSRQTYDDKLTAVESDLKKLGDQTGKKAISTNSELSTFRSDILDLRQQLREITEKTSKNKDTLEKLQASGDALVDRQSQLKETLENNSFLITTVNKTLQAYNGYVTNLQQDTSVLQGNLQNQMYSHNVVIMNLNNLNLTQVQQRNLITNLQRSVDDTSQAIQRIKNDFQNLQQVFLQAKKDTDWLKEKVQSLQTLAANNSALAKANNDTLEDMNSQLNSFTGQMENITTISQANEQNLKDLQDLHKDAENRTAIKFNQLEERFQLFETDIVNIISNISYTAHHLRTLTSNLNEVRTTCTDTLTKHTDDLTSLNNTLANIRLDSVSLRMQQDLMRSRLDTEVANLSVIMEEMKLVDSKHGQLIKNFTILQGPPGPRGPRGDRGSQGPPGPTGNKGQKGEKGEPGPPGPAGERGPIGPAGPPGERGGKGSKGSQGPKGSRGSPGKPGPQGSSGDPGPPGPPGKEGLPGPQGPPGFQGLQGTVGEPGVPGPRGLPGLPGVPGMPGPKGPPGPPGPSGAVVPLALQNEPTPAPEDNGCPPHWKNFTDKCYYFSVEKEIFEDAKLFCEDKSSHLVFINTREEQQWIKKQMVGRESHWIGLTDSERENEWKWLDGTSPDYKNWKAGQPDNWGHGHGPGEDCAGLIYAGQWNDFQCEDVNNFICEKDRETVLSSAL

SEQ ID NO: 820 - protein, 481 aa, Homo sapiens
MGALARALPSILLALLLTSTPEALGANPGLVARITDKGLQYAAQEGLLALQSELLRITLPDFTGDLRIPHVGRGRYEFHSLNIHSCELLHSALRPVPGQGLSLSISDSSIRVQGRWKVRKSFFKLQGSFDVSVKGISISVNLLLGSESSGRPTVTASSCSSDIADVEVDMSGDLGWLLNLFHNQIESKFQKVLESRICEMIQKSVSSDLQPYLQTLPVTTEIDSFADIDYSLVEAPRATAQMLEVMFKGEIFHRNHRSPVTLLAAVMSLPEEHNKMVYFAISDYVFNTASLVYHEEGYLNFSITDDMIPPDSNIRLTTKSFRPFVPRLARLYPNMNLELQGSVPSAPLLNFSPGNLSVDPYMEIDAFVLLPSSSKEPVFRLSVATNVSATLTFNTSKITGFLKPGKVKVELKESKVGLFNAELLEALLNYYILNTFYPKFNDKLAEGFPLPLLKRVQLYDLGLQIHKDFLFLGANVQYMRV

SEQ ID NO: 821 - protein, 467 aa, Homo sapiens
MILLPLRLARLRHPLRHHWSISGGVDSSPQGDTSPSEGTNLNAPNSLGVSALCAICGDRATGKHYGASSCDGCKGFFRRSVRKNHMYSCRFSRQCVVDKDKRNQCRYCRLKKCFRAGMKKEAVQNERDRISTRRSSYEDSSLPSINALLQAEVLSRQITSPVSGINGDIRAKKIASIADVCESMKEQLLVLVEWAKYIPAFCELPLDDQVALLRAHAGEHLLLGATKRSMVFKDVLLLGNDYIVPRHCPELAEMSRVSIRILDELVLPFQELQIDDNEYAYLKAIIFFDPDAKGLSDPGKIKRLRSQVQVSLEDYINDRQYDSRGRFGELLLLLPTLQSITWQMIEQIQFIKLFGMAKIDNLLQEMLLGGSPSDAPHAHHPLHPHLMQEHMGTNVIVANTMPTHLSNGQMCEWPRPRGQAATPETPQPSPPGGSGSEPYKLLPGAVATIVKPLSAIPQPTITKQEVI

SEQ ID NO: 822 - protein, 452 aa, Homo sapiens
MVSVNAPLGAPVESSYDTSPSEGTNLNAPNSLGVSALCAICGDRATGKHYGASSCDGCKGFFRRSVRKNHMYSCRFSRQCVVDKDKRNQCRYCRLKKCFRAGMKKEAVQNERDRISTRRSSYEDSSLPSINALLQAEVLSRQITSPVSGINGDIRAKKIASIADVCESMKEQLLVLVEWAKYIPAFCELPLDDQVALLRAHAGEHLLLGATKRSMVFKDVLLLGNDYIVPRHCPELAEMSRVSIRILDELVLPFQELQIDDNEYAYLKAIIFFDPDAKGLSDPGKIKRLRSQVQVSLEDYINDRQYDSRGRFGELLLLLPTLQSITWQMIEQIQFIKLFGMAKIDNLLQEMLLGGSPSDAPHAHHPLHPHLMQEHMGTNVIVANTMPTHLSNGQMCEWPRPRGQAATPETPQPSPPGGSGSEPYKLLPGAVATIVKPLSAIPQPTITKQEVI

SEQ ID NO: 823 - protein, 132 aa, Homo sapiens
MVSVNAPLGAPVESSYGKWGWGKTGQGGTAVSFGRPWDTSPCVSYGPKAPPGAPLEGQEAPRRQCDRFPKLSSRGMACLVREVLGGAEKPWGRGLAHFVCPEAFLGMHLRGLSKTPQRVGLGSTVLFRCGAN

SEQ ID NO: 824 - protein, 417 aa, Homo sapiens
MRLSKTLVDMDMADYSAALDPAYTTLEFENVQVLTMGNDTSPSEGTNLNAPNSLGVSALCAICGDRATGKHYGASSCDGCKGFFRRSVRKNHMYSCRFSRQCVVDKDKRNQCRYCRLKKCFRAGMKKEAVQNERDRISTRRSSYEDSSLPSINALLQAEVLSRQITSPVSGINGDIRAKKIASIADVCESMKEQLLVLVEWAKYIPAFCELPLDDQVALLRAHAGEHLLLGATKRSMVFKDVLLLGNDYIVPRHCPELAEMSRVSIRILDELVLPFQELQIDDNEYAYLKAIIFFDPDAKGLSDPGKIKRLRSQVQVSLEDYINDRQYDSRGRFGELLLLLPTLQSITWQMIEQIQFIKLFGMAKIDNLLQEMLLGGPCQAQEGRGWSGDSPGDRPHTVSSPLSSLASPLCRFGQVA

SEQ ID NO: 825 - protein, 474 aa, Homo sapiens
MRLSKTLVDMDMADYSAALDPAYTTLEFENVQVLTMGNDTSPSEGTNLNAPNSLGVSALCAICGDRATGKHYGASSCDGCKGFFRRSVRKNHMYSCRFSRQCVVDKDKRNQCRYCRLKKCFRAGMKKEAVQNERDRISTRRSSYEDSSLPSINALLQAEVLSRQITSPVSGINGDIRAKKIASIADVCESMKEQLLVLVEWAKYIPAFCELPLDDQVALLRAHAGEHLLLGATKRSMVFKDVLLLGNDYIVPRHCPELAEMSRVSIRILDELVLPFQELQIDDNEYAYLKAIIFFDPDAKGLSDPGKIKRLRSQVQVSLEDYINDRQYDSRGRFGELLLLLPTLQSITWQMIEQIQFIKLFGMAKIDNLLQEMLLGGSPSDAPHAHHPLHPHLMQEHMGTNVIVANTMPTHLSNGQMCEWPRPRGQAATPETPQPSPPGGSGSEPYKLLPGAVATIVKPLSAIPQPTITKQEVI

SEQ ID NO: 826 - protein, 691 aa, Homo sapiens
MATKRLARQLGLIRRKSIAPANGNLGRSKSKQLFDYLIVIDFESTCWNDGKHHHSQEIIEFPAVLLNTSTGQIDSEFQAYVQPQEHPILSEFCMELTGIKQAQVDEGVPLKICLSQFCKWIHKIQQQKNIIFATGISEPSASEVKLCAFVTWSDWDLGVCLEYECKRKQLLKPVFLNSWIDLRATYKLFYRRKPKGLSGALQEVGIEFSGREHSGLDDSRNTALLAWKMIRDGCVMKITRSLNKVPTKKNFSILARNLNTIQVEEMSACNISIQGPSIYNKEPKNIINPHEKVQMKSICANSPIKAQQDQLQVKNNIKASLHNVKSSLPLFNTKSSTSVGQLQSPTLNSPIYMQKQGKNEHLAFNTKSKASTVGSELVLVSTTVPTVHHVSDLEMSSTLDCLPVLADWEDVVLLPASQPEENVDCTVPISDSDLEISFNSGERLMVLKELEMSSHENFGDIEETPQKSETSKSIVYKSPHTTIYNVKEAKDPGSDISAFKLPEHKSSTFNRVNANMSHPLVLGKHPLLSGGTKRNPCSPQAFPPAKKQPFTIHEEKPTSSDCSPVRSSSWRRLPSILTSTVNLQEPWKSGKMTPPLCKCGRRSKRLVVSNNGPNHGKVFYCCPIGKYQENRKCCGYFKWEQTLQKERANSMVPSHSTGGLTFSSPETSHICDRNLSISTKNSLRLRPSMRN

SEQ ID NO: 827 - protein, 301 aa, Homo sapiens [sequence omitted]

SEQ ID NO: 828 - protein, 213 aa, Homo sapiens
MCIVGRLPWVKLPIYILVQLLSAFCASGATYVLYHDALQNYTGGNLTVTGPKETASIFATYPAPYLSLNNGFLDQVLGTGMLIVGLLAILDRRNKGVPAGLEPVVVGMLILALGLSMGANCGIPLNPARDLGPRLFTYVAGWGPEVFSAGNGWWWVPVVAPLVGATVGTATYQLLVALHHPEGPEPAQDLVSAQHKASELETPASAQMLECKL

SEQ ID NO: 829 - protein, 264 aa, Homo sapiens [sequence omitted]

SEQ ID NO: 830 - protein, 634 aa, Homo sapiens
MVELLDLYQLEDEAYSSLAEATTELYQYLLQPFRDMRELAMLRRQQIKISMENDYLGPRRIESLQKEDADWQRKAHMAVLSIQDLTVKYFEITAKAQKAVYDRMRADQKKFGKASWAAAAERMEKLQYAVSKETLQMMRAKEICLEQRKHALKEEMQSLRGGTEAIARLDQLEADYYDLQLQLYEVQFEILKCEELLLTAQLESIKRLISEKRDEVVYYDTYESMEAMLEKEEMAASAYLQREELQKLQQKARQLEARRGRVSAKKSYLRNKKEICIAKHNEKIQQRTRIEDEYRTHHTVQLKREKLHDEEERKSAWVSQERQRTLDRLRTFKQRYPGQVILKSTRLRLAHARRKGAASPVLQEDHCDSLPSVLQVEEKTEEVGEGRVKRGPSQTTEPQSLVQLEDTSLTQLEATSLPLSGVTSELPPTISLPLLNNNLEPCSVTINPLPSPLPPTPPPPPPPPPPPPPPPLPVAKDSGPETLEKDLPRKEGNEKRIPKSASAPSAHLFDSSQLVSARKKLRKTAEGLQRRRVSSPMDEVLASLKRGSFHLKKVEQRTLPPFPDEDDSNNILAQIRKGVKLKKVQKDVLRESFTLLPDTDPLTRSIHEALRRIKEASPESEDEEEALPCTDWEN

SEQ ID NO: 831 - protein, 731 aa, Homo sapiens
MRNFAEKVFASEVKDEGGRQEISPFDVDEICPISHHEMQAHIFHLETLSTSTEARRKKRFQGRKTVNLSIPLSETSSTKLSHIDEYISSSPTYQTVPDFQRVQITGDYASGVTVEDFEIVCKGLYRALCIREKYMQKSFQRFPKTPSKYLRNIDGEAWVANESFYPVFTPPVKKGEDPFRTDNLPENLGYHLKMKDGVVYVYPNEAAVSKDEPKPLPYPNLDTFLDDMNFLLALIAQGPVKTYTHRRLKFLSSKFQVHQMLNEMDELKELKNNPHRDFYNCRKVDTHIHAAACMNQKHLLRFIKKSYQIDADRVVYSTKEKNLTLKELFAKLKMHPYDLTVDSLDVHAGRQTFQRFDKFNDKYNPVGASELRDLYLKTDNYINGEYFATIIKEVGADLVEAKYQHAEPRLSIYGRSPDEWSKLSSWFVCNRIHCPNMTWMIQVPRIYDVFRSKNFLPHFGKMLENIFMPVFEATINPQADPELSVFLKHITGFDSVDDESKHSGHMFSSKSPKPQEWTLEKNPSYTYYAYYMYANIMVLNSLRKERGMNTFLFRPHCGEAGALTHLMTAFMIADDISHGLNLKKSPVLQYLFFLAQIPIAMSPLSNNSLFLEYAKNPFLDFLQKGLMISLSTDDPMQFHFTKEPLMEEYAIAAQVFKLSTCDMCEVARNSVLQCGISHEEKVKFLGDNYLEEGPAGNDIRRTNVAQIRMAYRYETWCYELNLIAEGLKSTE

SEQ ID NO: 832 - protein, 770 aa, Homo sapiens
MRGVWPPPVSALLSALGMSTYKRATLDEEDLVDSLSEGDAYPNGLQVNFHSPRSGQRCWAARTQVEKRLVVLVVLLAAGLVACLAALGIQYQTRSPSVCLSEACVSVTSSILSSMDPTVDPCHDFFSYACGGWIKANPVPDGHSRWGTFSNLWEHNQAIIKHLLENSTASVSEAERKAQVYYRACMNETRIEELRAKPLMELIERLGGWNITGPWAKDNFQDTLQVVTAHYRTSPFFSVYVSADSKNSNSNVIQVDQSGLGLPSRDYYLNKTENEKVLTGYLNYMVQLGKLLGGGDEEAIRPQMQQILDFETALANITIPQEKRRDEELIYHKVTAAELQTLAPAINWLPFLNTIFYPVEINESEPIVVYDKEYLEQISTLINTTDRCLLNNYMIWNLVRKTSSFLDQRFQDADEKFMEVMYGTKKTCLPRWKFCVSDTENNLGFALGPMFVKATFAEDSKSIATEIILEIKKAFEESLSTLKWMDEETRKSAKEKADAIYNMIGYPNFIMDPKELDKVFNDYTAVPDLYFENAMRFFNFSWRVTADQLRKAPNRDQWSMTPPMVNAYYSPTKNEIVFPAGILQAPFYTRSSPKALNFGGIGVVVGHELTHAFDDQGREYDKDGNLRPWWKNSSVEAFKRQTECMVEQYSNYSVNGEPVNGRHTLGENIADNGGLKAAYRAYQNWVKKNGAEHSLPTLGLTNNQLFFLGFAQVWCSVRTPESSHEGLITDPHSPSRFRVIGSLSNSKEFSEHFRCPPGSPMNPPHKCEVW

SEQ ID NO: 833 - protein, 735 aa, Homo sapiens
MEALRESVLHLALQMSTYKRATLDEEDLVDSLSEGDAYPNGLQVNFHSPRSGQRCWAARTQVEKRLVVLVVLLAAGLVACLAALGIQYQTRSPSVCLSEACVSVTSSILSSMDPTVDPCHDFFSYACGGWIKANPVPDGHSRWGTFSNLWEHNQAIIKHLLENSTASVSEAERKAQVYYRACMNETRIEELRAKPLMELIERLGGWNITGPWAKDNFQDTLQVVTAHYRTSPFFSVYVSADSKNSNSNVIQVDQSGLGLPSRDYYLNKTENEKVLTGYLNYMVQLGKLLGGGDEEAIRPQMQQILDFETALANITIPQEKRRDEELIYHKVTAAELQTLAPAINWLPFLNTIFYPVEINESEPIVVYDKEYLEQISTLINTTDRCLLNNYMIWNLVRKTSSFLDQRFQDADEKFMEVMYGTKKTCLPRWKFCVSDTENNLGFALGPMFVKATFAEDSKSIATEIILEIKKAFEESLSTLKWMDEETRKSAKEKADAIYNMIGYPNFIMDPKELDKVFNDYTAVPDLYFENAMRFFNFSWRVTADQLRKAPNRDQWSMTPPMVNAYYSPTKNEIVFPAGILQAPFYTRSSPKALNFGGIGVVVGHELTHAFDDQGREYDKDGNLRPWWKNSSVEAFKRQTECMVEQYSNYSVNGEPVNGRHTLGENIADNGGLKAAYRVWCSVRTPESSHEGLITDPHSPSRFRVIGSLSNSKEFSEHFRCPPGSPMNPPHKCEVW

SEQ ID NO: 834 - protein, 758 aa, Homo sapiens
MPLQGLGLQRNPFLQGKRGPGLTSSPPLLPPSLQVNFHSPRSGQRCWAARTQVEKRLVVLVVLLAAGLVACLAALGIQYQTRSPSVCLSEACVSVTSSILSSMDPTVDPCHDFFSYACGGWIKANPVPDGHSRWGTFSNLWEHNQAIIKHLLENSTASVSEAERKAQVYYRACMNETRIEELRAKPLMELIERLGGWNITGPWAKDNFQDTLQVVTAHYRTSPFFSVYVSADSKNSNSNVIQVDQSGLGLPSRDYYLNKTENEKVLTGYLNYMVQLGKLLGGGDEEAIRPQMQQILDFETALANITIPQEKRRDEELIYHKVTAAELQTLAPAINWLPFLNTIFYPVEINESEPIVVYDKEYLEQISTLINTTDRCLLNNYMIWNLVRKTSSFLDQRFQDADEKFMEVMYGTKKTCLPRWKFCVSDTENNLGFALGPMFVKATFAEDSKSIATEIILEIKKAFEESLSTLKWMDEETRKSAKEKADAIYNMIGYPNFIMDPKELDKVFNDYTAVPDLYFENAMRFFNFSWRVTADQLRKAPNRDQWSMTPPMVNAYYSPTKNEIVFPAGILQAPFYTRSSPKALNFGGIGVVVGHELTHAFDDQGREYDKDGNLRPWWKNSSVEAFKRQTECMVEQYSNYSVNGEPVNGRHTLGENIADNGGLKAAYRAYQNWVKKNGAEHSLPTLGLTNNQLFFLGFAQVWCSVRTPESSHEGLITDPHSPSRFRVIGSLSNSKEFSEHFRCPPGSPMNPPHKCEVW

SEQ ID NO: 835 - protein, 767 aa, Homo sapiens
MEALRESVLHLALQMSTYKRATLDEEDLVDSLSEGDAYPNGLQVNFHSPRSGQRCWAARTQVEKRLVVLVVLLAAGLVACLAALGIQYQTRSPSVCLSEACVSVTSSILSSMDPTVDPCHDFFSYACGGWIKANPVPDGHSRWGTFSNLWEHNQAIIKHLLENSTASVSEAERKAQVYYRACMNETRIEELRAKPLMELIERLGGWNITGPWAKDNFQDTLQVVTAHYRTSPFFSVYVSADSKNSNSNVIQVDQSGLGLPSRDYYLNKTENEKVLTGYLNYMVQLGKLLGGGDEEAIRPQMQQILDFETALANITIPQEKRRDEELIYHKVTAAELQTLAPAINWLPFLNTIFYPVEINESEPIVVYDKEYLEQISTLINTTDRCLLNNYMIWNLVRKTSSFLDQRFQDADEKFMEVMYGTKKTCLPRWKFCVSDTENNLGFALGPMFVKATFAEDSKSIATEIILEIKKAFEESLSTLKWMDEETRKSAKEKADAIYNMIGYPNFIMDPKELDKVFNDYTAVPDLYFENAMRFFNFSWRVTADQLRKAPNRDQWSMTPPMVNAYYSPTKNEIVFPAGILQAPFYTRSSPKALNFGGIGVVVGHELTHAFDDQGREYDKDGNLRPWWKNSSVEAFKRQTECMVEQYSNYSVNGEPVNGRHTLGENIADNGGLKAAYRAYQNWVKKNGAEHSLPTLGLTNNQLFFLGFAQVWCSVRTPESSHEGLITDPHSPSRFRVIGSLSNSKEFSEHFRCPPGSPMNPPHKCEVW

SEQ ID NO: 836 - protein, 767 aa, Homo sapiens; identical to SEQ ID NO: 835

SEQ ID NO: 837 - protein, 770 aa, Homo sapiens; identical to SEQ ID NO: 832

SEQ ID NO: 838 - protein, 770 aa, Homo sapiens; identical to SEQ ID NO: 832

SEQ ID NO: 839 - protein, 758 aa, Homo sapiens; identical to SEQ ID NO: 834

SEQ ID NO: 840 - protein, 770 aa, Homo sapiens; identical to SEQ ID NO: 832

SEQ ID NO: 841 - protein, 770 aa, Homo sapiens; identical to SEQ ID NO: 832

SEQ ID NO: 842 - protein, 754 aa, Homo sapiens
MMSTYKRATLDEEDLVDSLSEGDAYPNGLQVNFHSPRSGQRCWAARTQVEKRLVVLVVLLAAGLVACLAALGIQYQTRSPSVCLSEACVSVTSSILSSMDPTVDPCHDFFSYACGGWIKANPVPDGHSRWGTFSNLWEHNQAIIKHLLENSTASVSEAERKAQVYYRACMNETRIEELRAKPLMELIERLGGWNITGPWAKDNFQDTLQVVTAHYRTSPFFSVYVSADSKNSNSNVIQVDQSGLGLPSRDYYLNKTENEKVLTGYLNYMVQLGKLLGGGDEEAIRPQMQQILDFETALANITIPQEKRRDEELIYHKVTAAELQTLAPAINWLPFLNTIFYPVEINESEPIVVYDKEYLEQISTLINTTDRCLLNNYMIWNLVRKTSSFLDQRFQDADEKFMEVMYGTKKTCLPRWKFCVSDTENNLGFALGPMFVKATFAEDSKSIATEIILEIKKAFEESLSTLKWMDEETRKSAKEKADAIYNMIGYPNFIMDPKELDKVFNDYTAVPDLYFENAMRFFNFSWRVTADQLRKAPNRDQWSMTPPMVNAYYSPTKNEIVFPAGILQAPFYTRSSPKALNFGGIGVVVGHELTHAFDDQGREYDKDGNLRPWWKNSSVEAFKRQTECMVEQYSNYSVNGEPVNGRHTLGENIADNGGLKAAYRAYQNWVKKNGAEHSLPTLGLTNNQLFFLGFAQVWCSVRTPESSHEGLITDPHSPSRFRVIGSLSNSKEFSEHFRCPPGSPMNPPHKCEVW

SEQ ID NO: 843 - protein, 268 aa, Homo sapiens
MQDYAWTPKEAPWRLPTCAAQPPWPQGGQIEFRDFGLRYRPELPLAVQGVSFKIHAGEKVGIVGRTGAGKSSLASGLLRLQEAAEGGIWIDGVPIAHVGLHTLRSRISIIPQDPILFPGSLRMNLDLLQEHSDEAIWAALETVQLKALVASLPGQLQYKCADRGEDLSVGQKQLLCLARALLRKTQILILDEATAAVDPGTELQMQAMLGSWFAQCTVLLIAHRLRSVMDCARVLVMDKGQVAESGSPAQLLAQKGLFYRLAQESGLV

SEQ ID NO: 844 - protein, 1023 aa, Homo sapiens [sequence omitted]

SEQ ID NO: 845 - protein, 410 aa, Homo sapiens [sequence omitted]

SEQ ID NO: 846 - protein, 335 aa, Homo sapiens
MEDSGKTFSSEEEEANYWKDLAMTYKQRAENTQEELREFQEGSREYEAELETQLQQIETRNRDLLSENNRLRMELETIKEKFEVQHSEGYRQISALEDDLAQTKAIKDQLQKYIRELEQANDDLERAKRATIMSLEDFEQRLNQAIERNAFLESELDEKENLLESVQRLKDEARDLRQELAVQQKQEKPRTPMPSSVEAERTDTAVQATGSVPSTPIAHRGPSSSLNTPGSFRRGLDDSTGGTPLTPAARISALNIVGDLLRKVGALESKLASCRNLVYDQSPNRTGGPASGRSSKNRDGGERRPSSTSVPLGDKGLDTSCRWLSKSTTRSSSSC

SEQ ID NO: 847 - protein, 345 aa, Homo sapiens
MEDSGKTFSSEEEEANYWKDLAMTYKQRAENTQEELREFQEGSREYEAELETQLQQIETRNRDLLSENNRLRMELETIKEKFEVQHSEGYRQISALEDDLAQTKAIKDQLQKYIRELEQANDDLERAKRATIMSLEDFEQRLNQAIERNAFLESELDEKENLLESVQRLKDEARDLRQELAVQQKQEKPRTPMPSSVEAERTDTAVQATGSVPSTPIAHRGPSSSLNTPGSFRRGLDDSTGGTPLTPAARISALNIVGDLLRKVGVGHELPLVVQINNQVVQLLLKPVLGLFQFIISGRLLLVLLGEVLDLLLEPLLPLFQSFHGAGKVLQLLLRVGELQGQRPG

SEQ ID NO: 848 - protein, 313 aa, Homo sapiens
MTYKQRAENTQEELREFQEGSREYEAELETQLQQIETRNRDLLSENNRLRMELETIKEKFEVQHSEGYRQISALEDDLAQTKAIKDQLQKYIRELEQANDDLERAKRATIMSLEDFEQRLNQAIERNAFLESELDEKENLLESVQRLKDEARDLRQELAVQQKQEKPRTPMPSSVEAERTDTAVQATGSVPSTPIAHRGPSSSLNTPGSFRRGLDDSTGGTPLTPAARISALNIVGDLLRKVGALESKLASCRNLVYDQSPNRTGGPASGRSSKNRDGGERRPSSTSVPLGDKGLDTSCRWLSKSTTRSSSSC

SEQ ID NO: 849 - protein, 1036 aa, Homo sapiens [sequence omitted]

SEQ ID NO: 850 - protein, 1036 aa, Homo sapiens [sequence omitted]

SEQ ID NO: 851 - protein, 221 aa, Homo sapiens
MGCWGQLLVWFGAAGAILCSSPGSQETFLRSSPLPLASPSPRDPKVSAPPSILEPASPLNSPGTEGSWLFSTCGASGRHGPTQTQCDGAYAGTSVVVTVGAAGQLRGVQLWRVPGPGQYLISAYGAAGGKGAKNHLSRAHGVFVSAIFSLGLGESLYILVGQQGEDACPGVSAASGDGAAPAPGARAAWGPGERAFLGAGSPAQRGEAPGPRRFPPPLPAG

SEQ ID NO: 852 - protein, 485 aa, Homo sapiens
MGCWGQLLVWFGAAGAILCSSPGSQETFLRSSPLPLASPSPRDPKVSAPPSILEPASPLNSPGTEGSWLFSTCGASGRHGPTQTQCDGAYAGTSVVVTVGAAGQLRGVQLWRVPGPGQYLISAYGAAGGKGAKNHLSRAHGVFVSAIFSLGLGESLYILVGQQGEDACPGGSPESQLVCLGESRAVEEHAAMDGSEGVPGPPGREPSPSGSAPGQLEGASWNTPLAPQVRAGELEPLLVAAGGGGRAYLRPRDRGRTQASPEKLENRSEAPGSGGRGGAAGGGGGWTSRAPSPQAGRSLQEGAEGGQGCSEAWATLGWAAAGGFGGGGGACTAGGGGGGYRGGDASETDNLWADGEDGVSFIHPSSELFLQPLAVTENHGEVEIRRHLNCSHCPLRDCQWQAELQLAECLCPEGMELAVDNVTCMDLHKPPGPLVLMVAVVATSTLSLLMVCGVLILGTKRLAGTVDSRLLLSSELGWVSAGSRG

SEQ ID NO: 853 - protein, 293 aa, Homo sapiens
MRLPSPELELSKLRTSAIRTAPNPYYCQVGLGPAQSWPLPPGVTEVSPANVTLLRALGHGAFGEVYEGLVIGLPGDSSPLQVAIKTLPELCSPQDELDFLMEALIISKFRHQNIVRCVGLSLRATPRLILLELMSGGDMKSFLRHSRPHLGQPSPLVMRDLLQLAQDIAQGCHYLEENHFIHRDIAARNCLLSCAGPSRVAKIGDFGMARDIYRASYYRRGDRALLPVKWMPPEAFLEGIFTSKTDSWSFGVLLWEIFSLGYMPYPGRTNQEVLDFVVGGGRMDPPRGCPGPV

SEQ ID NO: 854 - protein, 475 aa, Homo sapiens
MELAVDNVTCMDLHKPPGPLVLMVAVVATSTLSLLMVCGVLILGTKRLAGTVDSRLLLSMKQKKWQGLQEMRLPSPELELSKLRTSAIRTAPNPYYCQVGLGPAQSWPLPPGVTEVSPANVTLLRALGHGAFGEVYEGLVIGLPGDSSPLQVAIKTLPELCSPQDELDFLMEALIISKFRHQNIVRCVGLSLRATPRLILLELMSGGDMKSFLRHSRPHLGQPSPLVMRDLLQLAQDIAQGCHYLEENHFIHRDIAARNCLLSCAGPSRVAKIGDFGMARDIYRASYYRRGDRALLPVKWMPPEAFLEGIFTSKTDSWSFGVLLWEIFSLGYMPYPGRTNQEVLDFVVGGGRMDPPRGCPGPVYRIMTQCWQHEPELRPSFASILERLQYCTQDPDVLNSLLPMELGPTPEEEGTSGLGNRSLECLRPPQPQELSPEKLKSWGGSPLGPWLSSGLKPLKSRGLQPQNLWNPTYRS

SEQ ID NO: 855 - protein, 475 aa, Homo sapiens; identical to SEQ ID NO: 854

SEQ ID NO: 856 - protein, 864 aa, Homo sapiens
MGCWGQLLVWFGAAGAILCSSPGSQETFLRSSPLPLASPSPRDPKVSAPPSILEPASPLNSPGTEGSWLFSTCGASGRHGPTQTQCDGAYAGTSVVVTVGAAGQLRGVQLWRVPGPGQYLISAYGAAGGKGAKNHLSRAHGVFVSAIFSLGLGESLYILVGQQGEDACPGGSPESQLVCLGESRAVEEHAAMDGSEGVPGSRRWAGGGGGGGGATYVFRVRAGELEPLLVAAGGGGRAYLRPRDRGRTQASPEKLENRSEAPGSGGRGGAAGGGGGWTSRAPSPQAGRSLQEGAEGGQGCSEAWATLGWAAAGGFGGGGGACTAGGGGGGYRGGDASETDNLWADGEDGVSFIHPSSELFLQPLAVTENHGEVEIRRHLNCSHCPLRDCQWQAELQLAECLCPEGMELAVDNVTCMDLHKPPGPLVLMVAVVATSTLSLLMVCGVLILVKQKKWQGLQEMRLPSPELELSKLRTSAIRTAPNPYYCQVGLGPAQSWPLPPGVTEVSPANVTLLRALGHGAFGEVYEGLVIGLPGDSSPLQVAIKTLPELCSPQDELDFLMEALIISKFRHQNIVRCVGLSLRATPRLILLELMSGGDMKSFLRHSRPHLGQPSPLVMRDLLQLAQDIAQGCHYLEENHFIHRDIAARNCLLSCAGPSRVAKIGDFGMARDIYRASYYRRGDRALLPVKWMPPEAFLEGIFTSKTDSWSFGVLLWEIFSLGYMPYPGRTNQEVLDFVVGGGRMDPPRGCPGPVYRIMTQCWQHEPELRPSFASILERLQYCTQDPDVLNSLLPMELGPTPEEEGTSGLGNRSLECLRPPQPQELSPEKLKSWGGSPLGPWLSSGLKPLKSRGLQPQNLWNPTYRS

SEQ ID NO: 857 - protein, 803 aa, Homo sapiens
MGCWGQLLVWFGAAGAILCSSPGSQETFLRSSPLPLASPSPRDPKVSAPPSILEPASPLNSPGTEGSWLFSTCGASGRHGPTQTQCDGAYAGTSVVVTVGAAGQLRGVQLWRVPGPGQYLISAYGAAGGKGAKNHLSRAHGVFVSAIFSLGLGESLYILVGQQGEDACPGGSPESQLVCLGESRAVEEHAAMDGSEGVPGSRRWAGGGGGGGGATYVFRVRAGELEPLLVAAGGGGRAYLRPRDRGRTQASPEKLENRSEAPGSGGRGGAAGGDASETDNLWADGEDGVSFIHPSSELFLQPLAVTENHGEVEIRRHLNCSHCPLRDCQWQAELQLAECLCPEGMELAVDNVTCMDLHKPPGPLVLMVAVVATSTLSLLMVCGVLILVKQKKWQGLQEMRLPSPELELSKLRTSAIRTAPNPYYCQVGLGPAQSWPLPPGVTEVSPANVTLLRALGHGAFGEVYEGLVIGLPGDSSPLQVAIKTLPELCSPQDELDFLMEALIISKFRHQNIVRCVGLSLRATPRLILLELMSGGDMKSFLRHSRPHLGQPSPLVMRDLLQLAQDIAQGCHYLEENHFIHRDIAARNCLLSCAGPSRVAKIGDFGMARDIYRASYYRRGDRALLPVKWMPPEAFLEGIFTSKTDSWSFGVLLWEIFSLGYMPYPGRTNQEVLDFVVGGGRMDPPRGCPGPVYRIMTQCWQHEPELRPSFASILERLQYCTQDPDVLNSLLPMELGPTPEEEGTSGLGNRSLECLRPPQPQELSPEKLKSWGGSPLGPWLSSGLKPLKSRGLQPQNLWNPTYRS

SEQ ID NO: 858 - protein, 224 aa, Homo sapiens
MEKLLCFLVLTSLSHAFGQTDMSRKAFVFPKESDTSYVSLKAPLTKPLKAFTVCLHFYTELSSTRGYSIFSYATKRQDNEILIFWSKDIGYSFTVGGSEILFEVPEVTVAPVHICTSWESASGIVEFWVDGKPRVRKSLKKGYTVGAEASIILGQEQDSFGGNFEGSQSLVGDIGNVNMWDFVLSPDEINTIYLGGPFSPNVLNWRALKYEVQGEVFTKPQLWP

SEQ ID NO: 859 - protein, 224 aa, Homo sapiens; identical to SEQ ID NO: 858

SEQ ID NO: 860 - protein, 91 aa, Homo sapiens
MEKLLCFLVLTSLSHAFGQTDMSRKAFVFPKESDTSYVSLKAPLTKPLKAFTVCLHFYTELSSTRGPNVLNWRALKYEVQGEVFTKPQLWP

SEQ ID NO: 861 - protein, 684 aa, Homo sapiens
MEENLISMREDHSFHVRYRMEASCLELALEGERLCKSGDCRAGVSFFEAAVQVGTEDLKTLSAIYSQLGNAYFYLHDYAKALEYHHHDLTLARTIGDQLGEAKASGNLGNTLKVLGNFDEAIVCCQRHLDISRELNDKVGEARALYNLGNVYHAKGKSFGCPGPQDVGEFPEEVRDALQAAVDFYEENLSLVTALGDRAAQGRAFGNLGNTHYLLGNFRDAVIAHEQRLLIAKEFGDKAAERRAYSNLGNAYIFLGEFETASEYYKKTLLLARQLKDRAVEAQSCYSLGNTYTLLQDYEKAIDYHLKHLAIAQELNDRIGEGRACWSLGNAYTALGNHDQAMHFAEKHLEISREVGDKSGELTARLNLSDLQMVLGLSYSTNNSIMSENTEIDSSLNGVRPKLGRRHSMENMELMKLTPEKVQNWNSEILAKQKPLIAKPSAKLLFVNRLKGKKYKTNSSTKVLQDASNSIDHRIPNSQRKISADTIGDEGFFDLLSRFQSNRMDDQRCCLQEKNCHTASTTTSSTPPKMMLKTSSVPVVSPNTDEFLDLLASSQSRRLDDQRASFSNLPGLRLTQNSQSVLSHLMTNDNKEADEDFFDILVKCQGSRLDDQRCAPPPATTKGPTVPDEDFFSLILRSQGKRMDEQRVLLQRDQNRDTDFGLKDFLQNNALLEFKNSGKKSADH

SEQ ID NO: 862 - protein, 684 aa, Homo sapiens; identical to SEQ ID NO: 861

SEQ ID NO: 863 - protein, 684 aa, Homo sapiens; identical to SEQ ID NO: 861

SEQ ID NO: 864 - protein, 684 aa, Homo sapiens; identical to SEQ ID NO: 861

SEQ ID NO: 865 - protein, 684 aa, Homo sapiens; identical to SEQ ID NO: 861

SEQ ID NO: 866 - protein, 551 aa, Homo sapiens
MLCSLLLCECLLLVAGYAHDDDWIDPTDMLNYDAASGTMRKSQAKYGISGEKDVSPDLSCADEISECYHKLDSLTYKIDECEKKKREDYESQSNPVFRRYLNKILIEAGKLGLPDENKGDMHYDAEIILKRETLLEIQKFLNGEDWKPGALDDALSDILINFKFHDFETWKWRFEDSFGVDPYNVLMVLLCLLCIVVLVATELWTYVRWYTQLRRVLIISFLFSLGWNWMYLYKLAFAQHQAEVAKMEPLNNVCAKKMDWTGSIWEWFRSSWTYKDDPCQKYYELLLVNPIWLVPPTKALAVTFTTFVTEPLKHIGKGTGEFIKALMKEIPALLHLPVLIIMALAILSFCYGAGKSVHVLRHIGGPESEPPQALRPRDRRRQEEIDYRPDGGAGDADFHYRGQMGPTEQGPYAKTYEGRREILRERDVDLRFQTGNKSPEVLRAFDVPDAEAREHPTVVPSHKSPVLDTKPKETGGILGEGTPKESSTESSQSAKPVSGQDTSGNTEGSPAAEKAQLKSEAAGSPDQGSTYSPARGVAGPRGQDPVSSPCG

SEQ ID NO: 867 - protein, 551 aa, Homo sapiens; identical to SEQ ID NO: 866

SEQ ID NO: 868 - protein, 501 aa, Homo sapiens
MLCSLLLCECLLLVAGYAHDDDWIDPTDMLNYDAASGTMRKSQAKYGISGEKDVSPDLSCADEISECYHKLDSLTYKIDECEKKKREDYESQSNPVFRRYLNKILIEAGKLGLFHDFETWKWRFEDSFGVDPYNVLMVLLCLLCIVVLVATELWTYVRWYTQLRRVLIISFLFSLGWNWMYLYKLAFAQHQAEVAKMEPLNNVCAKKMDWTGSIWEWFRSSWTYKDDPCQKYYELLLVNPIWLVPPTKALAVTFTTFVTEPLKHIGKGTGEFIKALMKEIPALLHLPVLIIMALAILSFCYGAGKSVHVLRHIGGPESEPPQALRPRDRRRQEEIDYRPDGGAGDADFHYRGQMGPTEQGPYAKTYEGRREILRERDVDLRFQTGNKSPEVLRAFDVPDAEAREHPTVVPSHKSPVLDTKPKETGGILGEGTPKESSTESSQSAKPVSGQDTSGNTEGSPAAEKAQLKSEAAGSPDQGSTYSPARGVAGPRGQDPVSSPCG

SEQ ID NO: 869 - protein, 551 aa, Homo sapiens; identical to SEQ ID NO: 866

SEQ ID NO: 870 - protein, 501 aa, Homo sapiens; identical to SEQ ID NO: 868

SEQ ID NO: 871 - protein, 580 aa, Homo sapiens
MSDRSGPTAKGKDGKKYSSLNLFDTYKGKSLEIQKPAVAPRHGLQSLGKVAIARRMPPPANLPSLKAENKGNDPNVSLVPKDGTGWASKQEQSDPKSSDASTAQPPESQPLPASQTPASNQPKRPPAAPENTPLVPSGVKSWAQASVTHGAHGDGGRASSLLSRFSREEFPTLQAAGDQDKAAKERESAEQSSGPGPSLRPQNSTTWRDGGGRGPDELEGPDSKLHHGHDPRGGLQPSGPPQFPPYRGMMPPFMYPPYLPFPPPYGPQGPYRYPTPDGPSRFPRVAGPRGSGPPMRLVEPVGRPSILKEDNLKEFDQLDQENDDGWAGAHEEVDYTEKLKFSDEEDGRDSDEEGAEGHRDSQSASGEERPPEADGKKGNSPNSEPPTPKTAWAETSRPPETEPGPPAPKPPLPPPHRGPAGNWGPPGDYPDRGGPPCKPPAPEDEDEAWRQRRKQSSSEISLAVERARRRREEEERRMQEERRAACAEKLKRLDEKFGAPDKRLKAEPAAPPAAPSTPAPPPAVPKELPAPPAPPPASASQSAGITGVSHCTWPCCNPVFFSRDRVSPCWPGWSRTPDLR

SEQ ID NO: 872 - protein, 1823 aa, Homo sapiens
MMMVGQGPMKRLTTLKSSSSAMRKMGETLMRRELRATGIPNQLLVRNGPLKQMAKRATPPTANRPLLRRPGQKPLGLQRQSRDLLPQSLPYPHLTGDRGGPPCKPPAPEDEDEAWRQRRKQSSSEISLAVERARRRREEEERRMQEERRAACAEKLKRLDEKFGAPDKRLKAEPAAPPAAPSTPAPPPAVPKELPAPPAPPPASAPTPEKEPEEPAQAPPAQSTPTPGVAAAPTLVSGGGSTSSTSSGSFEASPVEPQLPSKEGPEPPEEVPPPTTPPVPKVEPKGDGIGPTRQPPSQGLGYPKYQKSLPPRFQRQQQEQLLKQQQQHQWQQHQQGSAPPTPVPPSPPQPVTLGAVPAPQAPPPPPKALYPGALGRPPPMPPMNFDPRWMMIPPYVDPRLLQGRPPLDFYPPGVHPSGLVPRERSDSGGSSSEPFDRHAPAMLRERGTPPVDPKLAWVGDVFTATPAEPRPLTSPLRQAADEDDKGMRSETPPVPPPPPYLASYPGFPENGAPGPPISRFPLEEPGPRPLPWPPGSDEVAKIQTPPPKKEPPKEETAQLTGPEAGRKPARGVGSGGQGPPPPRRESRTETRWGPRPGSSRRGIPPEEPGAPPRRAGPIKKPPPPTKVEELPPKPLEQGDETPKPPKPDPLKITKGKLGGPKETPPNGNLSPAPRLRRDYSYERVGPTSCRGRGRGEYFARGRGFRGTYGGRGRGARSREFRSYREFRGDDGRGGGTGGPNHPPAPRGRTASETRSEGSEYEEIPKRRRQRGSETGSETHESDLAPSDKEAPTPKEGTLTQVPLAPPPPGAPPSPAPARFTARGGRVFTPRGVPSRRGRGGGRPPPQVCPGWSPPAKSLAPKKPPTGPLPPSKEPLKEKLIPGPLSPVARGGSNGGSNVGMEDGERPRRRRHGRAQQQDKPPRFRRLKQERENAARGSEGKPSLTLPASAPGPEEALTTVTVAPAPRRAAAKSPDLSNQNSDQANEEWETASESSDFTSERRGDKEAPPPVLLTPKAVGTPGGGGGGAVPGISAMSRGDLSQRAKDLSKRSFSSQRPGMERQNRRPGPGGKAGSSGSSSGGGGGGPGGRTGPGRGDKRSWPSPKNRSRPPEERPPGLPLPPPPPSSSAVFRLDQVIHSNPAGIQQALAQLSSRQGSVTAPGGHPRHKPGPPQAPQGPSPRPPTRYEPQRVNSGLSSDPHFEEPGPMVRGVGGTPRDSAGVSPFPPKRRERPPRKPELLQEESLPPPHSSGFLGSKPEGPGPQAESRDTGTEALTPHIWNRLHTATSRKSYRPSSMEPWMEPLSPFEDVAGTEMSQSDSGVDLSGDSQVSSGPCSQRSSPDGGLKGAAEGPPKRPGGSSPLNAVPCEGPPGSEPPRRPPPAPHDGDRKELPREQPLPPGPIGTERSQRTDRGTEPGPIRPSHRPGPPVQFGTSDKDSDLRLVVGDSLKAEKELTASVTEAIPVSRDWELLPSAAASAEPQSKNLDSGHCVPEPSSSGQRLYPEVFYGSAGPSSSQISGGAMDSQLHPNSGGFRPGTPSLHPYRSQPLYLPPGPAPPSALLSGVALKGQFLDFSTMQATELGKLPAGGVLYPPPSFLYSPAFCPSPLPDTSLLQVRQDLPSPSDFYSTPLQPGGQSGFLPSGAPAQQMLLPMVDSQLPVVNFGSLPPAPPPAPPPLSLLPVGPALQPPSLAVRPPPAPATRVLPSPARPFPASLGRAELHPVELKPFQDYQKLSSNLGGPGSSRTPPTGRSFSGLNSRLKATPSTYSGVFRTQRVDLYQQASPPDALRWIPKPWERTGPPPREGPSRRAEEPGSRGDKEPGLPPPR

SEQ ID NO: 873 - protein, 2108 aa, Homo sapiens [sequence omitted]

SEQ ID NO: 874 - protein, 2102 aa, Homo sapiens [sequence omitted]

SEQ ID NO: 875 - protein, 2157 aa, Homo sapiens
MSDRSGPTAKGKDGKKYSSLNLFDTYKGKSLEIQKPAVAPRHGLQSLGKVAIARRMPPPANLPSLKAENKGNDPNVSLVPKDGTGWASKQEQSDPKSSDASTAQPPESQPLPASQTPASNQPKRPPAAPENTPLVPSGVKSWAQASVTHGAHGDGGRASSLLSRFSREEFPTLQAAGDQDKAAKERESAEQSSGPGPSLRPQNSTTWRDGGGRGPDELEGPDSKLHHGHDPRGGLQPSGPPQFPPYRGMMPPFMYPPYLPFPPPYGPQGPYRYPTPDGPSRFPRVAGPRGSGPPMRLVEPVGRPSILKEDNLKEFDQLDQENDDGWAGAHEEVDYTEKLKFSDEEDGRDSDEEGAEGHRDSQSASGEERPPEADGKKGNSPNSEPPTPKTAWAETSRPPETEPGPPAPKPPLPPPHRGPAGNWGPPGDYPDRGGPPCKPPAPEDEDEAWRQRRKQSSSEISLAVERARRRREEEERRMQEERRAACAEKLKRLDEKFGAPDKRLKAEPAAPPAAPSTPAPPPAVPKELPAPPAPPPASAPTPEKEPEEPAQAPPAQSTPTPGVAAAPTLVSGGGSTSSTSSGSFEASPVEPQLPSKEGPEPPEEVPPPTTPPVPKVEPKGDGIGPTRQPPSQGLGYPKYQKSLPPRFQRQQQEQLLKQQQQHQWQQHQQGSAPPTPVPPSPPQPVTLGAVPAPQAPPPPPKALYPGALGRPPPMPPMNFDPRWMMIPPYVDPRLLQGRPPLDFYPPGVHPSGLVPRERSDSGGSSSEPFDRHAPAMLRERGTPPVDPKLAWVGDVFTATPAEPRPLTSPLRQAADEDDKGMRSETPPVPPPPPYLASYPGFPENGAPGPPISRFPLEEPGPRPLPWPPGSDEVAKIQTPPPKKEPPKEETAQLTGPEAGRKPARGVGSGGQGPPPPRRESRTETRWGPRPGSSRRGIPPEEPGAPPRRAGPIKKPPPPTKVEELPPKPLEQGDETPKPPKPDPLKITKGKLGGPKETPPNGNLSPAPRLRRDYSYERVGPTSCRGRGRGEYFARGRGFRGTYGGRGRGARSREFRSYREFRGDDGRGGGTGGPNHPPAPRGRTASETRSEGSEYEEIPKRRRQRGSETGSETHESDLAPSDKEAPTPKEGTLTQVPLAPPPPGAPPSPAPARFTARGGRVFTPRGVPSRRGRGGGRPPPQVCPGWSPPAKSLAPKKPPTGPLPPSKEPLKEKLIPGPLSPVARGGSNGGSNVGMEDGERPRRRRHGRAQQQDKPPRFRRLKQERENAARGSEGKPSLTLPASAPGPEEALTTVTVAPAPRRAAAKSPDLSNQNSDQANEEWETASESSDFTSERRGDKEAPPPVLLTPKAVGTPGGGGGGAVPGISAMSRGDLSQRAKDLSKRSFSSQRPGMERQNRRPGPGGKAGSSGSSSGGGGGGPGGRTGPGRGDKRSWPSPKNRSRPPEERPPGLPLPPPPPSSSAVFRLDQVIHSNPAGIQQALAQLSSRQGSVTAPGGHPRHKPGPPQAPQGPSPRPPTRYEPQRVNSGLSSDPHFEEPGPMVRGVGGTPRDSAGVSPFPPKRRERPPRKPELLQEESLPPPHSSGFLGSKPEGPGPQAESRDTGTEALTPHIWNRLHTATSRKSYRPSSMEPWMEPLSPFEDVAGTEMSQSDSGVDLSGDSQVSSGPCSQRSSPDGGLKGAAEGPPKRPGGSSPLNAVPCEGPPGSEPPRRPPPAPHDGDRKELPREQPLPPGPIGTERSQRTDRGTEPGPIRPSHRPGPPVQFGTSDKDSDLRLVVGDSLKAEKELTASVTEAIPVSRDWELLPSAAASAEPQSKNLDSGHCVPEPSSSGQRLYPEVFYGSAGPSSSQISGGAMDSQLHPNSGGFRPGTPSLHPYRSQPLYLPPGPAPPSALLSGVALKGQFLDFSTMQATELGKLPAGGVLYPPPSFLYSPAFCPSPLPDTSLLQVRQDLPSPSDFYSTPLQPGGQSGFLPSGAPAQQMLLPMVDSQLPVVNFGSLPPAPPPAPPPLSLLPVGPALQPPSLAVRPPPAPATRVLPSPARPFPASLGRAELHPVELKPFQDYQKLSSNLGGPGSSRTPPTGRSFSGLNSRLKATPSTYSGVFRTQRVDLYQQASPPDALRWIPKPWERTGPPPREGPSRRAEEPGSRGDKEPGLPPPR

SEQ ID NO: 876 - protein, 514 aa, Homo sapiens
MNQSIPVAPTPPRRVRLKPWLVAQVNSCQYPGLQWVNGEKKLFCIPWRHATRHGPSQDGDNTIFKAWAKETGKYTEGVDEADPAKWKANLRCALNKSRDFRLIYDGPRDMPPQPYKIYEVCSNGPAPTDSQPPEDYSFGAGEEEEEEEELQRMLPSLSLTDAVQSGPHMTPYSLLKEDVKWPPTLQPPTLRPPTLQPPTLQPPVVLGPPAPDPSPLAPPPGNPAGFRELLSEVLEPGPLPASLPPAGEQLLPDLLISPHMLPLTDLEIKFQYRGRPPRALTISNPHGCRLFYSQLEATQEQVELFGPISLEQVRFPSPEDIPSDKQRFYTNQLLDVLDRGLILQLQGQDLYAIRLCQCKVFWSGPCASAHDSCPNPIQREVKTKLFSLEHFLNELILFQKGQTNTPPPFEIFFCFGEEWPDRKPREKKLITVQVVPVAARLLLEMFSGELSWSADSIRLQISNPDLKDRMVEQFKELHHIWQSQQRLQPVAQAPPGAGLGVGQGPWPMHPAGMQ

SEQ ID NO: 877 - protein, 498 aa, Homo sapiens
MNQSIPVAPTPPRRVRLKPWLVAQVNSCQYPGLQWVNGEKKLFCIPWRHATRHGPSQDGDNTIFKAWAKETGKYTEGVDEADPAKWKANLRCALNKSRDFRLIYDGPRDMPPQPYKIYEVCSNGPAPTDSQPPEDYSFGAGEEEEEEEELQRMLPSLSLTEDVKWPPTLQPPTLRPPTLQPPTLQPPVVLGPPAPDPSPLAPPPGNPAGFRELLSEVLEPGPLPASLPPAGEQLLPDLLISPHMLPLTDLEIKFQYRGRPPRALTISNPHGCRLFYSQLEATQEQVELFGPISLEQVRFPSPEDIPSDKQRFYTNQLLDVLDRGLILQLQGQDLYAIRLCQCKVFWSGPCASAHDSCPNPIQREVKTKLFSLEHFLNELILFQKGQTNTPPPFEIFFCFGEEWPDRKPREKKLITVQVVPVAARLLLEMFSGELSWSADSIRLQISNPDLKDRMVEQFKELHHIWQSQQRLQPVAQAPPGAGLGVGQGPWPMHPAGMQ

SEQ ID NO: 878 - protein, 514 aa, Homo sapiens; identical to SEQ ID NO: 876

SEQ ID NO: 879 - protein, 498 aa, Homo sapiens; identical to SEQ ID NO: 877

SEQ ID NO: 880 - protein, 255 aa, Homo sapiens
MLPLTDLEIKFQYRGRPPRALTISNPHGCRLFYSQLEATQEQVELFGPISLEQVRFPSPEDIPSDKQRFYTNQLLDVLDRGLILQLQGQDLYAIRLCQCKVFWSGPCASAHDSCPNPIQREVKTKLFSLEHFLNELILFQKGQTNTPPPFEIFFCFGEEWPDRKPREKKLITVQVVPVAARLLLEMFSGELSWSADSIRLQISNPDLKDRMVEQFKELHHIWQSQQRLQPVAQAPPGAGLGVGQGPWPMHPAGMQ

SEQ ID NO: 881 - protein, 255 aa, Homo sapiens; identical to SEQ ID NO: 880

SEQ ID NO: 882 - protein, 1181 aa, Homo sapiens
MGPERTGAAPLPLLLVLALSQGILNCCLAYNVGLPEAKIFSGPSSEQFGYAVQQFINPKGNWLLVGSPWSGFPENRMGDVYKCPVDLSTATCEKLNLQTSTSIPNVTEMKTNMSLGLILTRNMGTGGFLTCGPLWAQQCGNQYYTTGVCSDISPDFQLSASFSPATQPCPSLIDVVVVCDESNSIYPWDAVKNFLEKFVQGLDIGPTKTQVGLIQYANNPRVVFNLNTYKTKEEMIVATSQTSQYGGDLTNTFGAIQYARKYAYSAASGGRRSATKVMVVVTDGESHDGSMLKAVIDQCNHDNILRFGIAVLGYLNRNALDTKNLIKEIKAIASIPTERYFFNVSDEAALLEKAGTLGEQIFSIEGTVQGGDNFQMEMSQVGFSADYSSQNDILMLGAVGAFGWSGTIVQKTSHGHLIFPKQAFDQILQDRNHSSYLGYSVAAISTGESTHFVAGAPRANYTGQIVLYSVNENGNITVIQAHRGDQIGSYFGSVLCSVDVDKDTITDVLLVGAPMYMSDLKKEEGRVYLFTIKEGILGQHQFLEGPEGIENTRFGSAIAALSDINMDGFNDVIVGSPLENQNSGAVYIYNGHQGTIRTKYSQKILGSDGAFRSHLQYFGRSLDGYGDLNGDSITDVSIGAFGQVVQLWSQSIADVAIEASFTPEKITLVNKNAQIILKLCFSAKFRPTKQNNQVAIVYNITLDADGFSSRVTSRGLFKENNERCLQKNMVVNQAQSCPEHIIYIQEPSDVVNSLDLRVDISLENPGTSPALEAYSETAKVFSIPFHKDCGEDGLCISDLVLDVRQIPAAQEQPFIVSNQNKRLTFSVTLKNKRESAYNTGIVVDFSENLFFASFSLPVDGTEVTCQVAASQKSVACDVGYPALKREQQVTFTINFDFNLQNLQNQASLSFQALSESQEENKADNLVNLKIPLLYDAEIHLTRSTNINFYEISSDGNVPSIVHSFEDVGPKFIFSLKVTTGSVPVSMATVIIHIPQYTKEKNPLMYLTGVQTDKAGDISCNADINPLKIGQTSSSVSFKSENFRHTKELNCRTASCSNVTCWLKDVHMKGEYFVNVTTRIWNGTFASSTFQTVQLTAAAEINTYNPEIYVIEDNTVTIPLMIMKPDEKAEVPTGVIIGSIIAGILLLLALVAILWKLGFFKRKYEKMTKNPDEIDETTELSS

SEQ ID NO: 883 - protein, 1179 aa, Homo sapiens
MGPERTGAAPLPLLLVLALSQGILNCCLAYNVGLPEAKIFSGPSSEQFGYAVQQFINPKGNWLLVGSPWSGFPENRMGDVYKCPVDLSTATCEKLNLQTSTSIPNVTEMKTNMSLGLILTRNMGTGGFLTCGPLWAQQCGNQYYTTGVCSDISPDFQLSASFSPATQPCPSLIDVVVVCDESNSIYPWDAVKNFLEKFVQGLDIGPTKTQVGLIQYANNPRVVFNLNTYKTKEEMIVATSQTSQYGGDLTNTFGAIQYARKYAYSAASGGRRSATKVMVVVTDGESHDGSMLKAVIDQCNHDNILRFGIAVLGYLNRNALDTKNLIKEIKAIASIPTERYFFNVSDEAALLEKAGTLGEQIFSIEGTVQGGDNFQMEMSQVGFSADYSSQNDILMLGAVGAFGWSGTIVQKTSHGHLIFPKQAFDQILQDRNHSSYLGYSVAAISTGESTHFVAGAPRANYTGQIVLYSVNENGNITVIQAHRGDQIGSYFGSVLCSVDVDKDTITDVLLVGAPMYMSDLKKEEGRVYLFTIKEGILGQHQFLEGPEGIENTRFGSAIAALSDINMDGFNDVIVGSPLENQNSGAVYIYNGHQGTIRTKYSQKILGSDGAFRSHLQYFGRSLDGYGDLNGDSITDVSIGAFGQVVQLWSQSIADVAIEASFTPEKITLVNKNAQIILKLCFSAKFRPTKQNNQVAIVYNITLDADGFSSRVTSRGLFKENNERCLQKNMVVNQAQSCPEHIIYIQEPSDVVNSLDLRVDISLENPGTSPALEAYSETAKVFSIPFHKDCGEDGLCISDLVLDVRQIPAAQEQPFIVSNQNKRLTFSVTLKNKRESAYNTGIVVDFSENLFFASFSLPVDGTEVTCQVAASQKSVACDVGYPALKREQQVTFTINFDFNLQNLQNQASLSFQALSESQEENKADNLVNLKIPLLYDAEIHLTRSTNINFYEISSDGNVPSIVHSFEDVGPKFIFSLKVGSVPVSMATVIIHIPQYTKEKNPLMYLTGVQTDKAGDISCNADINPLKIGQTSSSVSFKSENFRHTKELNCRTASCSNVTCWLKDVHMKGEYFVNVTTRIWNGTFASSTFQTVQLTAAAEINTYNPEIYVIEDNTVTIPLMIMKPDEKAEVPTGVIIGSIIAGILLLLALVAILWKLGFFKRKYEKMTKNPDEIDETTELSS

SEQ ID NO: 884 - protein, 1231 aa, Homo sapiens
MRLLAKIICLMLWAICVAEDCNELPPRRNTEILTGSWSDQTYPEGTQAIYKCRPGYRSLGNVIMVCRKGEWVALNPLRKCQKRPCGHPGDTPFGTFTLTGGNVFEYGVKAVYTCNEGYQLLGEINYRECDTDGWTNDIPICEVVKCLPVTAPENGKIVSSAMEPDREYHFGQAVRFVCNSGYKIEGDEEMHCSDDGFWSKEKPKCVEISCKSPDVINGSPISQKIIYKENERFQYKCNMGYEYSERGDAVCTESGWRPLPSCEEKSCDNPYIPNGDYSPLRIKHRTGDEITYQCRNGFYPATRGNTAKCTSTGWIPAPRCTLKPCDYPDIKHGGLYHENMRRPYFPVAVGKYYSYYCDEHFETPSGSYWDHIHCTQDGWSPAVPCLRKCYFPYLENGYNQNHGRKFVQGKSIDVACHPGYALPKAQTTVTCMENGWSPTPRCIRVKTCSKSSIDIENGFISESQYTYALKEKAKYQCKLGYVTADGETSGSITCGKDGWSAQPTCIKSCDIPVFMNARTKNDFTWFKLNDTLDYECHDGYESNTGSTTGSIVCGYNGWSDLPICYERECELPKIDVHLVPDRKKDQYKVGEVLKFSCKPGFTIVGPNSVQCYHFGLSPDLPICKEQVQSCGPPPELLNGNVKEKTKEEYGHSEVVEYYCNPRFLMKGPNKIQCVDGEWTTLPVCIVEESTCGDIPELEHGWAQLSSPPYYYGDSVEFNCSESFTMIGHRSITCIHGVWTQLPQCVAIDKLKKCKSSNLIILEEHLKNKKEFDHNSNIRYRCRGKEGWIHTVCINGRWDPEVNCSMAQIQLCPPPPQIPNSHNMTTTLNYRDGEKVSVLCQENYLIQEGEEITCKDGRWQSIPLCVEKIPCSQPPQIEHGTINSSRSSQESYAHGTKLSYTCEGGFRISEENETTCYMGKWSSPPQCEGLPCKSPPEISHGVVAHMSDSYQYGEEVTYKCFEGFGIDGPAIAKCLGEKWSHPPSCIKTDCLSLPSFENAIPMGEKKDVYKAGEQVTYTCATYYKMDGASNVTCINSRWTGRPTCRDTSCVNPPTVQNAYIVSRQMSKYPSGERVRYQCRSPYEMFGDEEVMCLNGNWTEPPQCKDSTGKCGPPPPIDNGDITSFPLSVYAPASSVEYQCQNLYQLEGNKRITCRNGQWSEPPKCLHPCVISREIMENYNIALRWTAKQKLYSRTGESVEFVCKRGYRLSSRSHTLRTTCWDGKLEYPTCAKR

SEQ ID NO: 885 - protein, 1168 aa, Homo sapiens
MVCRKGEWVALNPLRKCQKRPCGHPGDTPFGTFTLTGGNVFEYGVKAVYTCNEGYQLLGEINYRECDTDGWTNDIPICEVVKCLPVTAPENGKIVSSAMEPDREYHFGQAVRFVCNSGYKIEGDEEMHCSDDGFWSKEKPKCVEISCKSPDVINGSPISQKIIYKENERFQYKCNMGYEYSERGDAVCTESGWRPLPSCEEKSCDNPYIPNGDYSPLRIKHRTGDEITYQCRNGFYPATRGNTAKCTSTGWIPAPRCTLKPCDYPDIKHGGLYHENMRRPYFPVAVGKYYSYYCDEHFETPSGSYWDHIHCTQDGWSPAVPCLRKCYFPYLENGYNQNHGRKFVQGKSIDVACHPGYALPKAQTTVTCMENGWSPTPRCIRVKTCSKSSIDIENGFISESQYTYALKEKAKYQCKLGYVTADGETSGSITCGKDGWSAQPTCIKSCDIPVFMNARTKNDFTWFKLNDTLDYECHDGYESNTGSTTGSIVCGYNGWSDLPICYERECELPKIDVHLVPDRKKDQYKVGEVLKFSCKPGFTIVGPNSVQCYHFGLSPDLPICKEQVQSCGPPPELLNGNVKEKTKEEYGHSEVVEYYCNPRFLMKGPNKIQCVDGEWTTLPVCIVEESTCGDIPELEHGWAQLSSPPYYYGDSVEFNCSESFTMIGHRSITCIHGVWTQLPQCVAIDKLKKCKSSNLIILEEHLKNKKEFDHNSNIRYRCRGKEGWIHTVCINGRWDPEVNCSMAQIQLCPPPPQIPNSHNMTTTLNYRDGEKVSVLCQENYLIQEGEEITCKDGRWQSIPLCVEKIPCSQPPQIEHGTINSSRSSQESYAHGTKLSYTCEGGFRISEENETTCYMGKWSSPPQCEGLPCKSPPEISHGVVAHMSDSYQYGEEVTYKCFEGFGIDGPAIAKCLGEKWSHPPSCIKTDCLSLPSFENAIPMGEKKDVYKAGEQVTYTCATYYKMDGASNVTCINSRWTGRPTCRDTSCVNPPTVQNAYIVSRQMSKYPSGERVRYQCRSPYEMFGDEEVMCLNGNWTEPPQCKDSTGKCGPPPPIDNGDITSFPLSVYAPASSVEYQCQNLYQLEGNKRITCRNGQWSEPPKCLHPCVISREIMENYNIALRWTAKQKLYSRTGESVEFVCKRGYRLSSRSHTLRTTCWDGKLEYPTCAKR

SEQ ID NO: 886 - protein, 1231 aa, Homo sapiens; identical to SEQ ID NO: 884

SEQ ID NO: 887 - protein, 1172 aa, Homo sapiens
MRLLAKIICLMLWAICVAEDCNELPPRRNTEILTGSWSDQTYPEGTQAIYKCRPGYRSLGNVIMVCRKGEWVALNPLRKCQKRPCGHPGDTPFGTFTLTGGNVFEYGVKAVYTCNEGYQLLGEINYRECDTDGWTNDIPICEVVKCLPVTAPENGKIVSSAMEPDREYHFGQAVRFVCNSGYKIEGDEEMHCSDDGFWSKEKPKCVEISCKSPDVINGSPISQKIIYKENERFQYKCNMGYEYSERGDAVCTESGWRPLPSCEEKSCDNPYIPNGDYSPLRIKHRTGDEITYQCRNGFYPATRGNTAKCTSTGWIPAPRCTLKPCDYPDIKHGGLYHENMRRPYFPVAVGKYYSYYCDEHFETPSGSYWDHIHCTQDGWSPAVPCLRKCYFPYLENGYNQNHGRKFVQGKSIDVACHPGYALPKAQTTVTCMENGWSPTPRCIRVKTCSKSSIDIENGFISESQYTYALKEKAKYQCKLGYVTADGETSGSITCGKDGWSAQPTCIKSCDIPVFMNARTKNDFTWFKLNDTLDYECHDGYESNTGSTTGSIVCGYNGWSDLPICYERECELPKIDVHLVPDRKKDQYKVGEVLKFSCKPGFTIVGPNSVQCYHFGLSPDLPICKEQVQSCGPPPELLNGNVKEKTKEEYGHSEVVEYYCNPRFLMKGPNKIQCVDGEWTTLPVCIVEESTCGDIPELEHGWAQLSSPPYYYGDSVEFNCSESFTMIGHRSITCIHGVWTQLPQCVVAQIQLCPPPPQIPNSHNMTTTLNYRDGEKVSVLCQENYLIQEGEEITCKDGRWQSIPLCVEKIPCSQPPQIEHGTINSSRSSQESYAHGTKLSYTCEGGFRISEENETTCYMGKWSSPPQCEGLPCKSPPEISHGVVAHMSDSYQYGEEVTYKCFEGFGIDGPAIAKCLGEKWSHPPSCIKTDCLSLPSFENAIPMGEKKDVYKAGEQVTYTCATYYKMDGASNVTCINSRWTGRPTCRDTSCVNPPTVQNAYIVSRQMSKYPSGERVRYQCRSPYEMFGDEEVMCLNGNWTEPPQCKDSTGKCGPPPPIDNGDITSFPLSVYAPASSVEYQCQNLYQLEGNKRITCRNGQWSEPPKCLHPCVISREIMENYNIALRWTAKQKLYSRTGESVEFVCKRGYRLSSRSHTLRTTCWDGKLEYPTCAKR

SEQ ID NO: 888 - protein, 1172 aa, Homo sapiens; identical to SEQ ID NO: 887

SEQ ID NO: 889 - protein, 480 aa, Homo sapiens
MAASVVCRAATAGAQVLLRARRSPALLRTPALRSTATFAQALQFVPETQVSLLDNGLRVASEQSSQPTCTVGVWIDVGSRFETEKNNGAGYFLEHLAFKGTKNRPGSALEKEVESMGAHLNAYSTREHTAYYIKALSKDLPKAVELLGDIVQNCSLEDSQIEKERDVILREMQENDASMRDVVFNYLHATAFQGTPLAQAVEGPSENVRKLSRADLTEYLSTHYKAPRMVLAAAGGVEHQQLLDLAQKHLGGIPWTYAEDAVPTLTPCRFTGSEIRHRDDALPFAHVAIAVEGPGWASPDNVALQVANAIIGHYDCTYGGGVHLSSPLASGAVANKLCQSFQTFSICYAETGLLGAHFVCDRMKIDDMMFVLQGQWMRLCTSATESEVARGKNILRNALVSHLDGTTPVCEDIGRSLLTYGRRIPLAEWESRIAEVDASVVREICSKYIYDQCPAVAGYGPIEQLPDYNRIRSGMFWLRF

SEQ ID NO: 890 - protein, 331 aa, Homo sapiens
MDSEKKRFTEEATKYFRERVSPVHLQILLTNNEAWKRFVTAAELPRDEADALYEALKKLRTYAAIEDEYVQQKDEQFREWFLKEFPQVKRKIQESIEKLRALANGIEEVHRGCTISNVVSSSTGAASGIMSLAGLVLAPFTAGTSLALTAAGVGLGAASAVTGITTSIVEHSYTSSAEAEASRLTATSIDRLKVFKEVMRDITPNLLSLLNNYYEATQTIGSEIRAIRQARARARLPVTTWRISAGSGGQAERTIAGTTRAVSRGARILSATTSGIFLALDVVNLVYESKHLHEGAKSASAEELRRQAQELEENLMELTQIYQRLNPCHTH

SEQ ID NO: 891 - protein, 331 aa, Homo sapiens; identical to SEQ ID NO: 890

SEQ ID NO: 892 - protein, 402 aa, Homo sapiens [sequence omitted]

SEQ ID NO: 893 - protein, 331 aa, Homo sapiens; identical to SEQ ID NO: 890

SEQ ID NO: 894 - protein, 337 aa, Homo sapiens
MAAPEPLRPRLCRLVRGEQGYGFHLHGEKGRRGQFIRRVEPGSPAEAAALRAGDRLVEVNGVNVEGETHHQVVQRIKAVEGQTRLLVVDQETDEELRRRQLTCTEEMAQRGLPPAHDPWEPKPDWAHTGSHSSEAGKKDVSGPLRELRPRLCHLRKGPQGYGFNLHSDKSRPGQYIRSVDPGSPAARSGLRAQDRLIEVNGQNVEGLRHAEVVASIKAREDEARLLVVDPETDEHFKRLRVTPTEEHVEGPLPSPVTNGTSPAQLNGGSACSSRSDLPGSDKDTEDGSAWKQDPFQESGLHLSPTAAEAKEKARAMRVNKRAPQMDWNRKREIFSNF

SEQ ID NO: 895 - protein, 337 aa, Homo sapiens; identical to SEQ ID NO: 894

SEQ ID NO: 896 - protein, 326 aa, Homo sapiens
MAAPEPLRPRLCRLVRGEQGYGFHLHGEKGRRGQFIRRVEPGSPAEAAALRAGDRLVEVNGVNVEGETHHQVVQRIKAVEGQTRLLVVDQETDEELRRRQLTCTEEMAQRGLPPAHDPWEPKPDWAHTGSHSSEAGKKDVSGPLRELRPRLCHLRKGPQGYGFNLHSDKSRPGQYIRSVDPGSPAARSGLRAQDRLIEVNGQNVEGLRHAEVVASIKAREDEARLLVVDPETDEHFKRLRVTPTEEHVEGPLPSPVTNGTSPAQLNGGSACSSRSDLPGSDKDTEESGLHLSPTAAEAKEKARAMRVNKRAPQMDWNRKREIFSNF

SEQ ID NO: 897 - protein, 205 aa, Homo sapiens
MTPPERLFLPRVCGTTLHLLLLGLLLVLLPGAQGLPGVGLTPSAAQTARQHPKMHLAHSTLKPAAHLIGDPSKQNSLLWRANTDRAFLQDGFSLSNNSLLVPTSGIYFVYSQVVFSGKAYSPKATSSPLYLAHEVQLFSSQYPFHVPLLSSQKMVYPGLQEPWLHSMYHGAAFQLTQGDQLSTHTDGIPHLVLSPSTVFFGAFAL

SEQ ID NO: 898 - protein, 205 aa, Homo sapiens; identical to SEQ ID NO: 897

SEQ ID NO: 899 - protein, 1798 aa, Homo sapiens
MELTSRERGRGQPLPWELRLGLLLSVLAATLAQAPAPDVPGCSRGSCYPATGDLLVGRADRLTASSTCGLNGPQPYCIVSHLQDEKKCFLCDSRRPFSARDNPHSHRIQNVVTSFAPQRRAAWWQSENGIPAVTIQLDLEAEFHFTHLIMTFKTFRPAAMLVERSADFGRTWHVYRYFSYDCGADFPGVPLAPPRHWDDVVCESRYSEIEPSTEGEVIYRVLDPAIPIPDPYSSRIQNLLKITNLRVNLTRLHTLGDNLLDPRREIREKYYYALYELVVRGNCFCYGHASECAPAPGAPAHAEGMVHGACICKHNTRGLNCEQCQDFYRDLPWRPAEDGHSHACRKCECHGHTHSCHFDMAVYLASGNVSGGVCDGCQHNTAGRHCELCRPFFYRDPTKDLRDPAVCRSCDCDPMGSQDGGRCDSHDDPALGLVSGQCRCKEHVVGTRCQQCRDGFFGLSISDRLGCRRCQCNARGTVPGSTPCDPNSGSCYCKRLVTGRGCDRCLPGHWGLSHDLLGCRPCDCDVGGALDPQCDEGTGQCHCRQHMVGRRCEQVQPGYFRPFLDHLIWEAEDTRGQVLDVVERLVTPGETPSWTGSGFVRLQEGQTLEFLVASVPKAMDYDLLLRLEPQVPEQWAELELIVQRPGPVPAHSLCGHLVPKDDRIQGTLQPHARYLIFPNPVCLEPGISYKLHLKLVRTGGSAQPETPYSGPGLLIDSLVLLPRVLVLEMFSGGDAAALERQATFERYQCHEEGLVPSKTSPSEACAPLLISLSTLIYNGALPCQCNPQGSLSSECNPHGGQCLCKPGVVGRRCDLCAPGYYGFGPTGCQACQCSHEGALSSLCEKTSGQCLCRTGAFGLRCDRCQRGQWGFPSCRPCVCNGHADECNTHTGACLGCRDHTGGEHCERCIAGFHGDPRLPYGGQCRPCPCPEGPGSQRHFATSCHQDEYSQQIVCHCRAGYTGLRCEACAPGHFGDPSRPGGRCQLCECSGNIDPMDPDACDPHTGQCLRCLHHTEGPHCAHCKPGFHGQAARQSCHRCTCNLLGTNPQQCPSPDQCHCDPSSGQCPCLPNVQGPSCDRCAPNFWNLTSGHGCQPCACHPSRARGPTCNEFTGQCHCRAGFGGRTCSECQELHWGDPGLQCHACDCDSRGIDTPQCHRFTGHCSCRPGVSGVRCDQCARGFSGIFPACHPCHACFGDWDRVVQDLAARTQRLEQRAQELQQTGVLGAFESSFWHMQEKLGIVQGIVGARNTSAASTAQLVEATEELRREIGEATEHLTQLEADLTDVQDENFNANHALSGLERDRLALNLTLRQLDQHLDLLKHSNFLGAYDSIRHAHSQSAEAERRANTSALAVPSPVSNSASARHRTEALMDAQKEDFNSKHMANQRALGKLSAHTHTLSLTDINELVCGAPGDAPCATSPCGGAGCRDEDGQPRCGGLSCNGAAATADLALGRARHTQAELQRALAEGGSILSRVAETRRQASEAQQRAQAALDKANASRGQVEQANQELQELIQSVKDFLNQEGADPDSIEMVATRVLELSIPASAEQIQHLAGAIAERVRSLADVDAILARTVGDVRRAEQLLQDARRARSWAEDEKQKAETVQAALEEAQRAQGIAQGAIRGAVADTRDTEQTLYQVQERMAGAERALSSAGERARQLDALLEALKLKRAGNSLAASTAEETAGSAQGRAQEAEQLLRGPLGDQYQTVKALAERKAQGVLAAQARAEQLRDEARDLLQAAQDKLQRLQELEGTYEENERALESKAAQLDGLEARMRSVLQAINLQVQIYNTCQ

SEQ ID NO: 900 - protein, 1798 aa, Homo sapiens; identical to SEQ ID NO: 899

SEQ ID NO: 901 - DNA, 201 bp, Homo sapiens
ttatgggccaagcccagcttaatggctcatgacctggaaataaaatttaggaccaatacctcctccagatcagattcttctcttaatttcatagattgtgttttttttttaaatagacctctcaatttctggaaaactgccttttatctgcccagaattctaagctggtgccccactgaattttgtgtacctgtgactaaa

SEQ ID NO: 902 - DNA, 201 bp, Homo sapiens
gtacataaatttgacctgctcatctatacacggttacccagaacctaagaagatgagtgttttgctaagaaccaagaattcaactatcgagtatgatggtrttatgcagaaatctcaagataatgtcacagaactgtacgacgtttccatcagcttgtctgtttcattccctgatgttacgagcaatatgaccatcttctg

SEQ ID NO: 903 - DNA, 201 bp, Homo sapiens
cctgagtgagctagtagtattttggcaggaccaggaaaacttggttctgaatgaggtatacttaggcaaagagaaatttgacagtgttcattccaagtatrtgggccgcacaagttttgattcggacagttggaccctgagacttcacaatcttcagatcaaggacaagggcttgtatcaatgtatcatccatcacaaaaa

SEQ ID NO: 904 - DNA, 184 bp, Homo sapiens
aggagccttaggaggtacggggagctcgcaaatactccttttggtttattcttaccaccttgcttctgtgttccttgggaatgmtgctgtgcttatgcatctggtctctttttggagctacagtggacaggcatttgtgacagcactatgggactgagtaacattctctttgtgatggccttcc

SEQ ID NO: 905 - DNA, 201 bp, Homo sapiens
ggaagagagtgaacagaccaagaaaagagaaaaaatccatatacctgaaagatctgatgaagcccagcgtgtttttaaaagttcgaagacatcttcatgcracaaaagtgatacatgtttttaattaaagagtaaagcccatacaagtattcattttttctaccctttcctttgtaagttcctgggcaacctttttgattt

SEQ ID NO: 906 - DNA, 201 bp, Homo sapiens
tcgcaactcttataaatgtggaaccaacacaatggagagggaagagagtgaacagaccaagaaaagagaaaaaatccatatacctgaaagatctgatgaarcccagcgtgtttttaaaagttcgaagacatcttcatgcgacaaaagtgatacatgtttttaattaaagagtaaagcccatacaagtattcattttttcta

SEQ ID NO: 907 - DNA, 201 bp, Homo sapiens
ggaattaggaagaccaagacacagatcacccggggcttacttagcctacagatgtcctacgggaacgtgggctggcccagcatagggctagcaaatttgasttggatgattgtttttgctcaaggcaaccagaggaaacttgcatacagagacagatatactgggagaaatgactttgaaaacctggctctaaggtgggat

SEQ ID NO: 908 - DNA, 201 bp, Homo sapiens
cttaatttcatagattgtgttttttttttaaatagacctctcaatttctggaaaactgccttttatctgcccagaattctaagctggtgccccactgaatyttgtgtacctgtgactaaacaactacctcctcagtctgggtgggacttatgtatttatgaccttatagtgttaatatcttgaaacatagagatctatgta

SEQ ID NO: 909 - DNA, 201 bp, Homo sapiens; identical to SEQ ID NO: 901

SEQ ID NO: 910 - DNA, 201 bp, Homo sapiens; identical to SEQ ID NO: 902

SEQ ID NO: 911 - DNA, 201 bp, Homo sapiens; identical to SEQ ID NO: 903

SEQ ID NO: 912 - DNA, 201 bp, Homo sapiens; identical to SEQ ID NO: 906

SEQ ID NO: 913 - DNA, 201 bp, Homo sapiens; identical to SEQ ID NO: 905

SEQ ID NO: 914 - DNA, 201 bp, Homo sapiens; identical to SEQ ID NO: 907

SEQ ID NO: 915 - DNA, 201 bp, Homo sapiens; identical to SEQ ID NO: 908

SEQ ID NO: 916 - DNA, 201 bp, Homo sapiens
ggcaaaaggcggtgcattggcgaagaactttctaagatgcagctttttctcttcatctccatcctggctcaccagtgcgatttcagggccaacccaaatgrgcctgcgaaaatgaatttcagttatggtctaaccattaaacccaagtcatttaaagtcaatgtcactctcagagagtccatggagctccttgatagtgct

SEQ ID NO: 917 - DNA, 201 bp, Homo sapiens
ctgctactcctgtcggtgctggccactgtgcatgtgggccagcggctgctgaggcaacggaggcggcagctccggtccgcgcccccgggcccgtttgcgtrgccactgatcggaaacgcggcggcggtgggccaggcggctcacctctcgttcgctcgcctggcgcggcgctacggcgacgttttccagatccgcctgggc

SEQ ID NO: 918 - DNA, 201 bp, Homo sapiens
gctgcagtggctgctcctcctcttcaccaggtatcctgatgtgcagactcgagtgcaggcagaattggatcaggtcgtggggagggaccgtctgccttgtrtgggtgaccagcccaacctgccctatgtcctggccttcctttatgaagccatgcgcttctccagctttgtgcctgtcactattcctcatgccaccactgc

SEQ ID NO: 919 - DNA, 201 bp, Homo sapiens
gcctgcgggttcctgttgacgtcttgccctaggcaaaggtcccagttccttctcggagccggctgtcccgcgccactggaaaccgcacctccccgcagcaygggcaccagcctcagcccgaacgacccttggccgctaaacccgctgtccatccagcagaccacgctcctgctactcctgtcggtgctggccactgtgcat

SEQ ID NO: 920 - DNA, 201 bp, Homo sapiens
tcttcacgcgccagccgcgcagccgccaagtcctcgagggccacgtgctgagcgaggcgcgcgagctggtggcgctgctggtgcgcggcagcgcggacggmgccttcctcgacccgaggccgctgaccgtcgtggccgtggccaacgtcatgagtgccgtgtgtttcggctgccgctacagccacgacgaccccgagttcc

SEQ ID NO: 921 - DNA, 201 bp, Homo sapiens
tggcgcgcggctggatttggagaacgtaccggccactatcactgacatcttcggcgccagccaggacaccctgtccaccgcgctgcagtggctgctcctcytcttcaccaggtatcctgatgtgcagactcgagtgcaggcagaattggatcaggtcgtggggagggaccgtctgccttgtatgggtgaccagcccaacct

SEQ ID NO: 922 - DNA, 201 bp, Homo sapiens
ctgtccaccgcgctgcagtggctgctcctcctcttcaccaggtatcctgatgtgcagactcgagtgcaggcagaattggatcaggtcgtggggagggaccrtctgccttgtatgggtgaccagcccaacctgccctatgtcctggccttcctttatgaagccatgcgcttctccagctttgtgcctgtcactattcctcat

SEQ ID NO: 923 - DNA, 201 bp, Homo sapiens
gctgaccgtcgtggccgtggccaacgtcatgagtgccgtgtgtttcggctgccgctacagccacgacgaccccgagttccgtgagctgctcagccacaacraagagttcgggcgcacggtgggcgcgggcagcctggtggacgtgatgccctggctgcagtacttccccaacccggtgcgcaccgttttccgcgaattcga

SEQ ID NO: 924 - DNA, 201 bp, Homo sapiens
agcgcggacggcgccttcctcgacccgaggccgctgaccgtcgtggccgtggccaacgtcatgagtgccgtgtgtttcggctgccgctacagccacgacgwccccgagttccgtgagctgctcagccacaacgaagagttcgggcgcacggtgggcgcgggcagcctggtggacgtgatgccctggctgcagtacttcccc

SEQ ID NO: 925 - DNA, 201 bp, Homo sapiens
tcggctgccgctacagccacgacgaccccgagttccgtgagctgctcagccacaacgaagagttcgggcgcacggtgggcgcgggcagcctggtggacgtsatgccctggctgcagtacttccccaacccggtgcgcaccgttttccgcgaattcgagcagctcaaccgcaacttcagcaacttcatcctggacaagttct

SEQ ID NO: 926 - DNA, 201 bp, Homo sapiens
tcggtgctggccactgtgcatgtgggccagcggctgctgaggcaacggaggcggcagctccggtccgcgcccccgggcccgtttgcgtggccactgatcgraaacgcggcggcggtgggccaggcggctcacctctcgttcgctcgcctggcgcggcgctacggcgacgttttccagatccgcctgggcagctgccccata

SEQ ID NO: 927 - DNA, 201 bp, Homo sapiens
cagtgaagtggcctaacccggagaactttgatccagctcgattcttggacaaggatggcctcatcaacaaggacctgaccagcagagtgatgattttttcwgtgggcaaaaggcggtgcattggcgaagaactttctaagatgcagctttttctcttcatctccatcctggctcaccagtgcgatttcagggccaacccaa

SEQ ID NO: 928 - DNA, 201 bp, Homo sapiens
ttgggctaccacattcccaaggacactgtggtttttgtcaaccagtggtctgtgaatcatgacccagtgaagtggcctaacccggagaactttgatccagstcgattcttggacaaggatggcctcatcaacaaggacctgaccagcagagtgatgattttttcagtgggcaaaaggcggtgcattggcgaagaactttct

SEQ ID NO: 929 - DNA, 201 bp, Homo sapiens
gtggctgctcctcctcttcaccaggtatcctgatgtgcagactcgagtgcaggcagaattggatcaggtcgtggggagggaccgtctgccttgtatgggtraccagcccaacctgccctatgtcctggccttcctttatgaagccatgcgcttctccagctttgtgcctgtcactattcctcatgccaccactgccaacac

SEQ ID NO: 930 - DNA, 201 bp, Homo sapiens
gcagtacttccccaacccggtgcgcaccgttttccgcgaattcgagcagctcaaccgcaacttcagcaacttcatcctggacaagttcttgaggcactgckaaagccttcggcccggggccgccccccgcgacatgatggacgcctttatcctctctgcggaaaagaaggcggccggggactcgcacggtggtggcgcgcg

SEQ ID NO: 931 - DNA, 201 bp, Homo sapiens
caggcagaattggatcaggtcgtggggagggaccgtctgccttgtatgggtgaccagcccaacctgccctatgtcctggccttcctttatgaagccatgcrcttctccagctttgtgcctgtcactattcctcatgccaccactgccaacacctctgtcttgggctaccacattcccaaggacactgtggtttttgtcaac

SEQ ID NO: 932 - DNA, 201 bp, Homo sapiens
gactcgagtgcaggcagaattggatcaggtcgtggggagggaccgtctgccttgtatgggtgaccagcccaacctgccctatgtcctggccttcctttatraagccatgcgcttctccagctttgtgcctgtcactattcctcatgccaccactgccaacacctctgtcttgggctaccacattcccaaggacactgtggt

SEQ ID NO: 933 - DNA, 201 bp, Homo sapiens
aggacactgtggtttttgtcaaccagtggtctgtgaatcatgacccagtgaagtggcctaacccggagaactttgatccagctcgattcttggacaaggahggcctcatcaacaaggacctgaccagcagagtgatgattttttcagtgggcaaaaggcggtgcattggcgaagaactttctaagatgcagctttttctct

SEQ ID NO: 934 - DNA, 201 bp, Homo sapiens
actgccaacacctctgtcttgggctaccacattcccaaggacactgtggtttttgtcaaccagtggtctgtgaatcatgacccagtgaagtggcctaaccyggagaactttgatccagctcgattcttggacaaggatggcctcatcaacaaggacctgaccagcagagtgatgattttttcagtgggcaaaaggcggtgc

SEQ ID NO: 935 - DNA, 201 bp, Homo sapiens
tattcctcatgccaccactgccaacacctctgtcttgggctaccacattcccaaggacactgtggtttttgtcaaccagtggtctgtgaatcatgacccastgaagtggcctaacccggagaactttgatccagctcgattcttggacaaggatggcctcatcaacaaggacctgaccagcagagtgatgattttttcagt

SEQ ID NO: 936 - DNA, 201 bp, Homo sapiens
ttcaccaggtatcctgatgtgcagactcgagtgcaggcagaattggatcaggtcgtggggagggaccgtctgccttgtatgggtgaccagcccaacctgcyctatgtcctggccttcctttatgaagccatgcgcttctccagctttgtgcctgtcactattcctcatgccaccactgccaacacctctgtcttgggctac

SEQ ID NO: 937 - DNA, 201 bp, Homo sapiens
cggagccggctgtcccgcgccactggaaaccgcacctccccgcagcatgggcaccagcctcagcccgaacgacccttggccgctaaacccgctgtccatcyagcagaccacgctcctgctactcctgtcggtgctggccactgtgcatgtgggccagcggctgctgaggcaacggaggcggcagctccggtccgcgccccc

SEQ ID NO: 938 - DNA, 201 bp, Homo sapiens
ccgcgcagccgccaagtcctcgagggccacgtgctgagcgaggcgcgcgagctggtggcgctgctggtgcgcggcagcgcggacggcgccttcctcgaccygaggccgctgaccgtcgtggccgtggccaacgtcatgagtgccgtgtgtttcggctgccgctacagccacgacgaccccgagttccgtgagctgctcagc

SEQ ID NO: 939 - DNA, 201 bp, Homo sapiens
gtgcgcggcagcgcggacggcgccttcctcgacccgaggccgctgaccgtcgtggccgtggccaacgtcatgagtgccgtgtgtttcggctgccgctacakccacgacgaccccgagttccgtgagctgctcagccacaacgaagagttcgggcgcacggtgggcgcgggcagcctggtggacgtgatgccctggctgcag

SEQ ID NO: 940 - DNA, 201 bp, Homo sapiens
gtcttgggctaccacattcccaaggacactgtggtttttgtcaaccagtggtctgtgaatcatgacccagtgaagtggcctaacccggagaactttgatcsagctcgattcttggacaaggatggcctcatcaacaaggacctgaccagcagagtgatgattttttcagtgggcaaaaggcggtgcattggcgaagaactt

SEQ ID NO: 941 - DNA, 201 bp, Homo sapiens
atctcaacgctgtgaggaaacctcgactttgccaggtccccaagggcagcggggctcggcgagcgaggcacccttctccgtccccatcccaatccaagcgytcctggcactgacgacgccaagagactcgagtgggagttaaagcttccagtgagggcagcaggtgtccaggccgggcctgcgggttcctgttgacgtctt

SEQ ID NO: 942 - DNA, 201 bp, Homo sapiens
tgctactcctgtcggtgctggccactgtgcatgtgggccagcggctgctgaggcaacggaggcggcagctccggtccgcgcccccgggcccgtttgcgtgsccactgatcggaaacgcggcggcggtgggccaggcggctcacctctcgttcgctcgcctggcgcggcgctacggcgacgttttccagatccgcctgggca

SEQ ID NO: 943 - DNA, 201 bp, Homo sapiens
ccaggacaccctgtccaccgcgctgcagtggctgctcctcctcttcaccaggtatcctgatgtgcagactcgagtgcaggcagaattggatcaggtcgtgkggagggaccgtctgccttgtatgggtgaccagcccaacctgccctatgtcctggccttcctttatgaagccatgcgcttctccagctttgtgcctgtcac

SEQ ID NO: 944 - DNA, 201 bp, Homo sapiens
taacccggagaactttgatccagctcgattcttggacaaggatggcctcatcaacaaggacctgaccagcagagtgatgattttttcagtgggcaaaaggyggtgcattggcgaagaactttctaagatgcagctttttctcttcatctccatcctggctcaccagtgcgatttcagggccaacccaaatgagcctgcgaa

SEQ ID NO: 945 - DNA, 201 bp, Homo sapiens
cagccgcgcagccgccaagtcctcgagggccacgtgctgagcgaggcgcgcgagctggtggcgctgctggtgcgcggcagcgcggacggcgccttcctcgwcccgaggccgctgaccgtcgtggccgtggccaacgtcatgagtgccgtgtgtttcggctgccgctacagccacgacgaccccgagttccgtgagctgctc

SEQ ID NO: 946 - DNA, 201 bp, Homo sapiens
agtcctcgagggccacgtgctgagcgaggcgcgcgagctggtggcgctgctggtgcgcggcagcgcggacggcgccttcctcgacccgaggccgctgaccrtcgtggccgtggccaacgtcatgagtgccgtgtgtttcggctgccgctacagccacgacgaccccgagttccgtgagctgctcagccacaacgaagagtt

SEQ ID NO: 947 - DNA, 201 bp, Homo sapiens
aggcggcagctccggtccgcgcccccgggcccgtttgcgtggccactgatcggaaacgcggcggcggtgggccaggcggctcacctctcgttcgctcgccyggcgcggcgctacggcgacgttttccagatccgcctgggcagctgccccatagtggtgctgaatggcgagcgcgccatccaccaggccctggtgcagcag

SEQ ID NO: 948 - DNA, 201 bp, Homo sapiens
tgcagtacttccccaacccggtgcgcaccgttttccgcgaattcgagcagctcaaccgcaacttcagcaacttcatcctggacaagttcttgaggcactgmgaaagccttcggcccggggccgccccccgcgacatgatggacgcctttatcctctctgcggaaaagaaggcggccggggactcgcacggtggtggcgcgc

SEQ ID NO: 949 - DNA, 201 bp, Homo sapiens
ggccgccccccgcgacatgatggacgcctttatcctctctgcggaaaagaaggcggccggggactcgcacggtggtggcgcgcggctggatttggagaacktaccggccactatcactgacatcttcggcgccagccaggacaccctgtccaccgcgctgcagtggctgctcctcctcttcaccaggtatcctgatgtgca

SEQ ID NO: 950 - DNA, 201 bp, Homo sapiens
caaaggtcccagttccttctcggagccggctgtcccgcgccactggaaaccgcacctccccgcagcatgggcaccagcctcagcccgaacgacccttggcygctaaacccgctgtccatccagcagaccacgctcctgctactcctgtcggtgctggccactgtgcatgtgggccagcggctgctgaggcaacggaggcgg

SEQ ID NO: 951 - DNA, 201 bp, Homo sapiens
gtttttgtcaaccagtggtctgtgaatcatgacccagtgaagtggcctaacccggagaactttgatccagctcgattcttggacaaggatggcctcatcarcaaggacctgaccagcagagtgatgattttttcagtgggcaaaaggcggtgcattggcgaagaactttctaagatgcagctttttctcttcatctccatc

SEQ ID NO: 952 - DNA, 201 bp, Homo sapiens
ccggtccgcgcccccgggcccgtttgcgtggccactgatcggaaacgcggcggcggtgggccaggcggctcacctctcgttcgctcgcctggcgcggcgcwacggcgacgttttccagatccgcctgggcagctgccccatagtggtgctgaatggcgagcgcgccatccaccaggccctggtgcagcagggctcggcctt

SEQ ID NO: 953 - DNA, 201 bp, Homo sapiens
ccagatccgcctgggcagctgccccatagtggtgctgaatggcgagcgcgccatccaccaggccctggtgcagcagggctcggccttcgccgaccggccgkccttcgcctccttccgtgtggtgtccggcggccgcagcatggctttcggccactactcggagcactggaaggtgcagcggcgcgcagcccacagcatgat

SEQ ID NO: 954 - DNA, 201 bp, Homo sapiens
ggccactatcactgacatcttcggcgccagccaggacaccctgtccaccgcgctgcagtggctgctcctcctcttcaccaggtatcctgatgtgcagactygagtgcaggcagaattggatcaggtcgtggggagggaccgtctgccttgtatgggtgaccagcccaacctgccctatgtcctggccttcctttatgaagc

SEQ ID NO: 955 - DNA, 201 bp, Homo sapiens
cagccaggacaccctgtccaccgcgctgcagtggctgctcctcctcttcaccaggtatcctgatgtgcagactcgagtgcaggcagaattggatcaggtcrtggggagggaccgtctgccttgtatgggtgaccagcccaacctgccctatgtcctggccttcctttatgaagccatgcgcttctccagctttgtgcctgt

SEQ ID NO: 956 - DNA, 201 bp, Homo sapiens
cccgctgtccatccagcagaccacgctcctgctactcctgtcggtgctggccactgtgcatgtgggccagcggctgctgaggcaacggaggcggcagctcsggtccgcgcccccgggcccgtttgcgtggccactgatcggaaacgcggcggcggtgggccaggcggctcacctctcgttcgctcgcctggcgcggcgcta

SEQ ID NO: 957 - DNA, 201 bp, Homo sapiens
gcaggcagaattggatcaggtcgtggggagggaccgtctgccttgtatgggtgaccagcccaacctgccctatgtcctggccttcctttatgaagccatgmgcttctccagctttgtgcctgtcactattcctcatgccaccactgccaacacctctgtcttgggctaccacattcccaaggacactgtggtttttgtcaa

SEQ ID NO: 958 - DNA, 201 bp, Homo sapiens
ggctaccacattcccaaggacactgtggtttttgtcaaccagtggtctgtgaatcatgacccagtgaagtggcctaacccggagaactttgatccagctcrattcttggacaaggatggcctcatcaacaaggacctgaccagcagagtgatgattttttcagtgggcaaaaggcggtgcattggcgaagaactttctaag

SEQ ID NO: 959 - DNA, 201 bp, Homo sapiens; identical to SEQ ID NO: 916

SEQ ID NO: 960 - DNA, 201 bp, Homo sapiens; identical to SEQ ID NO: 917

SEQ ID NO: 961 - DNA, 201 bp, Homo sapiens
gccttctggtatacttccttacttttaaggataaatcataaagtcagttgctcaaaaagaaatcaatagttgaattagtgagtatagtggggttccatgakttatcatgaattttaaagtatgcattattaaattgtaaaactccaaggtgatgttgtacctcttttgcttgccaaagtacagaatttgaattatcagcaa

SEQ ID NO: 962 - DNA, 201 bp, Homo sapiens; identical to SEQ ID NO: 918

SEQ ID NO: 963 - DNA, 201 bp, Homo sapiens
tatcatgaattttaaagtatgcattattaaattgtaaaactccaaggtgatgttgtacctcttttgcttgccaaagtacagaatttgaattatcagcaaaraaaaaaaaaaaagccagccaagctttaaattatgtgaccataatgtactgatttcagtaagtctcataggttaaaaaaaaaagtcaccaaatagtgtgaa

SEQ ID NO: 964 - DNA, 201 bp, Homo sapiens
  misc_feature (1)...(201): n = A,T,C or G, or insertion/deletion polymorphism (see Tables 1-2)
aaaaagtcaccaaatagtgtgaaatatattacttaactgtccgtaagcagtatattagtattatcttgttcaggaaaaggttgaataatatatgccttgtntaatattgaaaattgaaaagtacaactaacgcaaccaagtgtgctaaaaatgagcttgattaaatcaaccacctatttttgacatggaaatgaagcaggg

SEQ ID NO: 965 - DNA, 201 bp, Homo sapiens
gcgtttaaggtgagcataaatcaactgtccatcaggtgaggtgtgctccatacccagcggttcttcatgagtagtgggctatgcaggagcttctgggagatttttttgagtcaaagacttaaagggcccaatgaattattatatacatactgcatcttggttatttctgaaggtagcattctttggagttaaaatgcacat

SEQ ID NO: 966 - DNA, 201 bp, Homo sapiens; identical to SEQ ID NO: 919

SEQ ID NO: 967 - DNA, 201 bp, Homo sapiens; identical to SEQ ID NO: 920

SEQ ID NO: 968 - DNA, 201 bp, Homo sapiens; identical to SEQ ID NO: 921

SEQ ID NO: 969 - DNA, 201 bp, Homo sapiens; identical to SEQ ID NO: 922

SEQ ID NO: 970 - DNA, 201 bp, Homo sapiens; identical to SEQ ID NO: 923

SEQ ID NO: 971 - DNA, 201 bp, Homo sapiens; identical to SEQ ID NO: 924

SEQ ID NO: 972 - DNA, 201 bp, Homo sapiens; identical to SEQ ID NO: 925

SEQ ID NO: 973 - DNA, 201 bp, Homo sapiens; identical to SEQ ID NO: 926

SEQ ID NO: 974 - DNA, 201 bp, Homo sapiens; identical to SEQ ID NO: 927

SEQ ID NO: 975 - DNA, 201 bp, Homo sapiens; identical to SEQ ID NO: 929

SEQ ID NO: 976 - DNA, 201 bp, Homo sapiens; identical to SEQ ID NO: 928

SEQ ID NO: 977 - DNA, 201 bp, Homo sapiens; identical to SEQ ID NO: 930

SEQ ID NO: 978 - DNA, 201 bp, Homo sapiens; identical to SEQ ID NO: 931

SEQ ID NO: 979 - DNA, 201 bp, Homo sapiens
gtttttacgtatgtaggcccagtcgtcatcagatgcttgcggcaaaaggaaagctgtgtttatatggaagaaagtaaggtgcttggagtttacctggcttwtttaatatgcttataacctagttaaagaaaggaaaagaaaacaaaaaacgaatgaaaataactgaatttggaggctggagtaatcagattactgctttaa

SEQ ID NO: 980 - DNA, 201 bp, Homo sapiens; identical to SEQ ID NO: 932

SEQ ID NO: 981 - DNA, 201 bp, Homo sapiens; identical to SEQ ID NO: 933

SEQ ID NO: 982 - DNA, 201 bp, Homo sapiens; identical to SEQ ID NO: 934

SEQ ID NO: 983 - DNA, 201 bp, Homo sapiens; identical to SEQ ID NO: 935

SEQ ID NO: 984 - DNA, 201 bp, Homo sapiens; identical to SEQ ID NO: 936

SEQ ID NO: 985 - DNA, 201 bp, Homo sapiens
gaaattttagaaatattcacatcttcggagatgaggagtaaaattcagtttttttccagttcctcttttgtgctgcttctcaattagcgtttaaggtgagsataaatcaactgtccatcaggtgaggtgtgctccatacccagcggttcttcatgagtagtgggctatgcaggagcttctgggagatttttttgagtcaaa

SEQ ID NO: 986 - DNA, 145 bp, Homo sapiens
tagacaaagtacattctggggaaacaacatttatatgtagcctttactgtttgatataccaaattaaaaaaaaattgtatctcattacttatactgggacmccattaccaaaataataaaaatcactttcataatcttgttatga

SEQ ID NO: 987 - DNA, 201 bp, Homo sapiens; identical to SEQ ID NO: 937

SEQ ID NO: 988 - DNA, 201 bp, Homo sapiens; identical to SEQ ID NO: 938

SEQ ID NO: 989 - DNA, 201 bp, Homo sapiens; identical to SEQ ID NO: 939

SEQ ID NO: 990 - DNA, 201 bp, Homo sapiens; identical to SEQ ID NO: 940

SEQ ID NO: 991 - DNA, 201 bp, Homo sapiens; identical to SEQ ID NO: 941

SEQ ID NO: 992 - DNA, 201 bp, Homo sapiens; identical to SEQ ID NO: 942

SEQ ID NO: 993 - DNA, 201 bp, Homo sapiens; identical to SEQ ID NO: 943

SEQ ID NO: 994 - DNA, 201 bp, Homo sapiens; identical to SEQ ID NO: 944

SEQ ID NO: 995 - DNA, 201 bp, Homo sapiens; identical to SEQ ID NO: 945

SEQ ID NO: 996 - DNA, 201 bp, Homo sapiens; identical to SEQ ID NO: 946

SEQ ID NO: 997 - DNA, 201 bp, Homo sapiens; identical to SEQ ID NO: 947

SEQ ID NO: 998 - DNA, 201 bp, Homo sapiens; identical to SEQ ID NO: 948

SEQ ID NO: 999 - DNA, 201 bp, Homo sapiens
attattatatacatactgcatcttggttatttctgaaggtagcattctttggagttaaaatgcacatatagacacatacacccaaacacttacaccaaacwactgaatgaagaagtattttggtaaccaggccatttttggtgggaatccaagattggtctcccatatgcagaaatagacaaaaagtatattaaacaaagt

SEQ ID NO: 1000 - DNA, 201 bp, Homo sapiens; identical to SEQ ID NO: 949

SEQ ID NO: 1001 - DNA, 201 bp, Homo sapiens; identical to SEQ ID NO: 950

SEQ ID NO: 1002 - DNA, 201 bp, Homo sapiens; identical to SEQ ID NO: 951

SEQ ID NO: 1003 - DNA, 201 bp, Homo sapiens; identical to SEQ ID NO: 952

SEQ ID NO: 1004 - DNA, 201 bp, Homo sapiens; identical to SEQ ID NO: 953

SEQ ID NO: 1005 - DNA, 201 bp, Homo sapiens; identical to SEQ ID NO: 954

SEQ ID NO: 1006 - DNA, 201 bp, Homo sapiens; identical to SEQ ID NO: 955

SEQ ID NO: 1007 - DNA, 201 bp, Homo sapiens; identical to SEQ ID NO: 956

SEQ ID NO: 1008 - DNA, 201 bp, Homo sapiens; identical to SEQ ID NO: 957

SEQ ID NO: 1009 - DNA, 201 bp, Homo sapiens; identical to SEQ ID NO: 958

SEQ ID NO: 1010 - DNA, 201 bp, Homo sapiens
atactgcatcttggttatttctgaaggtagcattctttggagttaaaatgcacatatagacacatacacccaaacacttacaccaaactactgaatgaagmagtattttggtaaccaggccatttttggtgggaatccaagattggtctcccatatgcagaaatagacaaaaagtatattaaacaaagtttcagagtatat

SEQ ID NO: 1011 - DNA, 201 bp, Homo sapiens
acctatcctggttttactcttatcatttccatccataatggtcccactggcccggattttgcccaataagaaccgagacgaactgaatggcttttttaacraactcattaggaatgtgattgccttgcgggaccagcaagctgccgaagagaggcggagagacttcctccaaatggtcctggatgcccgacattctgcaag

SEQ ID NO: 1012 - DNA, 201 bp, Homo sapiens
ggttttactcttatcatttccatccataatggtcccactggcccggattttgcccaataagaaccgagacgaactgaatggcttttttaacaaactcattrggaatgtgattgccttgcgggaccagcaagctgccgaagagaggcggagagacttcctccaaatggtcctggatgcccgacattctgcaagtcccatggg

SEQ ID NO: 1013 - DNA, 201 bp, Homo sapiens
cctggatgcccgacattctgcaagtcccatgggcgtgcaagactttgacatcgtcagagacgttttctcctctactgggtgcaagccgaacccttcccggmaacaccagcccagccctatggccaggcctttgactgtggatgagattgtgggccaggccttcatcttcctcatcgctggctatgaaatcatcaccaacac

SEQ ID NO: 1014 - DNA, 201 bp, Homo sapiens
gttctgcagcctcgaggaaggcctgccctatctggacatggtgattgcagagacgctgaggatgtacccgccagctttcagattcacacgggaggcagctsaggactgcgaggtgctggggcagcgcatccccgcaggcgctgtgctagagatggccgtgggtgccctgcaccatgaccctgagcactggccaagcccgga

SEQ ID NO: 1015 - DNA, 201 bp, Homo sapiens
aggcgctgtgctagagatggccgtgggtgccctgcaccatgaccctgagcactggccaagcccggagaccttcaaccctgaaaggttcacggctgaggccmggcagcagcaccggcccttcacgtacctgcccttcggggccggcccacggagctgcctcggggtgcgtctagggctgcttgaggtcaagttgacactgct

SEQ ID NO: 1016 - DNA, 201 bp, Homo sapiens
gacatcgtcagagacgttttctcctctactgggtgcaagccgaacccttcccggcaacaccagcccagccctatggccaggcctttgactgtggatgagaytgtgggccaggccttcatcttcctcatcgctggctatgaaatcatcaccaacacactttcttttgccacctacctactggccaccaaccctgactgccaa

SEQ ID NO: 1017 - DNA, 201 bp, Homo sapiens
gccctatctggacatggtgattgcagagacgctgaggatgtacccgccagctttcagattcacacgggaggcagctcaggactgcgaggtgctggggcagygcatccccgcaggcgctgtgctagagatggccgtgggtgccctgcaccatgaccctgagcactggccaagcccggagaccttcaaccctgaaaggttcac

SEQ ID NO: 1018 - DNA, 201 bp, Homo sapiens
gggagggcacccccaaattcaaagaaaaccctaagtgtggatgttcagaattttggaaaaatgtcactgaagtgattgaaagagtgcctggcatgcaaggrtaagaggttctttacataacatttcctaaatgcttaataaacgtttgttgcacttggttttgacattgccaatggggtttgaaccagtgctctctctaaa

SEQ ID NO: 1019 - DNA, 201 bp, Homo sapiens
gacccaggtaccgctgcagctagaatccaaatctgccctaggtccaaaaaatggtgtctatatcaagatcgtatcccgctgacacagaaggctgccgggtsgggggagggcacccccaaattcaaagaaaaccctaagtgtggatgttcagaattttggaaaaatgtcactgaagtgattgaaagagtgcctggcatgcaa

SEQ ID NO: 1020 - DNA, 201 bp, Homo sapiens
tgtttattgttatttctgagccagacatgatcaagcaggtgttggttgagaacttcagtaactttaccaacagaatggcgtcgggtttggagttcaagtcrgtagccgacagcgttctgtttttacgtgacaaaagatgggaagaggtcagaggtgccctgatgtctgctttcagtcctgaaaagctgaacgagatggttc

SEQ ID NO: 1021 - DNA, 201 bp, Homo sapiens
ttctcctggctcatttaaaacgctatgcggaatctggggacgcatttgacatccagaggtgctactgcaattacaccacagatgtggttgccagcgtcgcstttggcaccccggtggactcctggcaggcccctgaggatccctttgtgaaacactgcaagcgtttcttcgaattctgcatccccagacctatcctggttt

SEQ ID NO: 1022 - DNA, 201 bp, Homo sapiens
cagcctcctgtctcatctggaagaccaccactctggggtctcagaggaatgatggaagccttggggtttctaaaattggaagtgaatggccccatggtgayggtggccctgtcagtggctctcttggccctcctgaaatggtactccacatcagcattctcaagactggagaagttaggcctcagacatcccaagccttct

SEQ ID NO: 1023 - DNA, 165 bp, Homo sapiens
ttcagaattttggaaaaatgtcactgaagtgattgaaagagtgcctggcatgcaaggataagaggttctttacataacatttcctaaatgcttaataaacrtttgttgcacttggttttgacattgccaatggggtttgaaccagtgctctctctaaatgaagaa

SEQ ID NO: 1024 - DNA, 201 bp, Homo sapiens
cacctacctactggccaccaaccctgactgccaagagaagcttctgagagaggtagacgtttttaaggagaaacacatggcccctgagttctgcagcctcraggaaggcctgccctatctggacatggtgattgcagagacgctgaggatgtacccgccagctttcagattcacacgggaggcagctcaggactgcgaggt

SEQ ID NO: 1025 - DNA, 201 bp, Homo sapiens
ctcctgaaatggtactccacatcagcattctcaagactggagaagttaggcctcagacatcccaagccttctcctttcattggaaacttgacatttttccrccagggtttttgggaaagccaaatggagctcagaaagctgtatggacctctgtgtgggtactatcttggtcgtcggatgtttattgttatttctgagcca

SEQ ID NO: 1026 - DNA, 201 bp, Homo sapiens
ggccaggcctttgactgtggatgagattgtgggccaggccttcatcttcctcatcgctggctatgaaatcatcaccaacacactttcttttgccacctacstactggccaccaaccctgactgccaagagaagcttctgagagaggtagacgtttttaaggagaaacacatggcccctgagttctgcagcctcgaggaagg

SEQ ID NO: 1027 - DNA, 201 bp, Homo sapiens
ggacatggtgattgcagagacgctgaggatgtacccgccagctttcagattcacacgggaggcagctcaggactgcgaggtgctggggcagcgcatccccrcaggcgctgtgctagagatggccgtgggtgccctgcaccatgaccctgagcactggccaagcccggagaccttcaaccctgaaaggttcacggctgaggc

SEQ ID NO: 1028 - DNA, 201 bp, Homo sapiens
tacgtgacaaaagatgggaagaggtcagaggtgccctgatgtctgctttcagtcctgaaaagctgaacgagatggttcccctcatcagccaagcctgcgamcttctcctggctcatttaaaacgctatgcggaatctggggacgcatttgacatccagaggtgctactgcaattacaccacagatgtggttgccagcgtcg

SEQ ID NO: 1029 - DNA, 201 bp, Homo sapiens
ctactggccaccaaccctgactgccaagagaagcttctgagagaggtagacgtttttaaggagaaacacatggcccctgagttctgcagcctcgaggaagkcctgccctatctggacatggtgattgcagagacgctgaggatgtacccgccagctttcagattcacacgggaggcagctcaggactgcgaggtgctgggg

SEQ ID NO: 1030 - DNA, 201 bp, Homo sapiens
ggtgattgcagagacgctgaggatgtacccgccagctttcagattcacacgggaggcagctcaggactgcgaggtgctggggcagcgcatccccgcaggcrctgtgctagagatggccgtgggtgccctgcaccatgaccctgagcactggccaagcccggagaccttcaaccctgaaaggttcacggctgaggcccggca

SEQ ID NO: 1031 - DNA, 201 bp, Homo sapiens
tgagagaggtagacgtttttaaggagaaacacatggcccctgagttctgcagcctcgaggaaggcctgccctatctggacatggtgattgcagagacgctraggatgtacccgccagctttcagattcacacgggaggcagctcaggactgcgaggtgctggggcagcgcatccccgcaggcgctgtgctagagatggccg

SEQ ID NO: 1032 - DNA, 201 bp, Homo sapiens
tgaggatgtacccgccagctttcagattcacacgggaggcagctcaggactgcgaggtgctggggcagcgcatccccgcaggcgctgtgctagagatggcygtgggtgccctgcaccatgaccctgagcactggccaagcccggagaccttcaaccctgaaaggttcacggctgaggcccggcagcagcaccggcccttca

SEQ ID NO: 1033 - DNA, 201 bp, Homo sapiens
tgacaaaagatgggaagaggtcagaggtgccctgatgtctgctttcagtcctgaaaagctgaacgagatggttcccctcatcagccaagcctgcgaccttmtcctggctcatttaaaacgctatgcggaatctggggacgcatttgacatccagaggtgctactgcaattacaccacagatgtggttgccagcgtcgcctt

SEQ ID NO: 1034 - DNA, 201 bp, Homo sapiens
gactgcgaggtgctggggcagcgcatccccgcaggcgctgtgctagagatggccgtgggtgccctgcaccatgaccctgagcactggccaagcccggagamcttcaaccctgaaaggttcacggctgaggcccggcagcagcaccggcccttcacgtacctgcccttcggggccggcccacggagctgcctcggggtgcgt

SEQ ID NO: 1035 - DNA, 201 bp, Homo sapiens; identical to SEQ ID NO: 1011

SEQ ID NO: 1036 - DNA, 201 bp, Homo sapiens; identical to SEQ ID NO: 1012

SEQ ID NO: 1037 - DNA, 201 bp, Homo sapiens; identical to SEQ ID NO: 1013

SEQ ID NO: 1038 - DNA, 201 bp, Homo sapiens; identical to SEQ ID NO: 1014

SEQ ID NO: 1039 - DNA, 201 bp, Homo sapiens; identical to SEQ ID NO: 1016

SEQ ID NO: 1040 - DNA, 201 bp, Homo sapiens
gccctatctggacatggtgattgcagagacgctgaggatgtacccgccagctttcagattcacacgggaggcagctcaggactgcgaggtgctggggcagygcatccccgcaggcgctgtgctagagatggccgtgggtgccctgcaccatgaccctgagcactggccaagcccggagaccttcaaccctgaaaggtaccg

SEQ ID NO: 1041 - DNA, 201 bp, Homo sapiens; identical to SEQ ID NO: 1018

SEQ ID NO: 1042 - DNA, 201 bp, Homo sapiens
ctgaaaggtaccgctgcagctagaatccaaatctgccctaggtccaaaaaatggtgtctatatcaagatcgtatcccgctgacacagaaggctgccgggtsgggggagggcacccccaaattcaaagaaaaccctaagtgtggatgttcagaattttggaaaaatgtcactgaagtgattgaaagagtgcctggcatgcaa

SEQ ID NO: 1043 - DNA, 201 bp, Homo sapiens; identical to SEQ ID NO: 1020

SEQ ID NO: 1044 - DNA, 201 bp, Homo sapiens; identical to SEQ ID NO: 1021

SEQ ID NO: 1045 - DNA, 201 bp, Homo sapiens; identical to SEQ ID NO: 1022

SEQ ID NO: 1046 - DNA, 165 bp, Homo sapiens; identical to SEQ ID NO: 1023

SEQ ID NO: 1047 - DNA, 201 bp, Homo sapiens; identical to SEQ ID NO: 1024

SEQ ID NO: 1048 - DNA, 201 bp, Homo sapiens; identical to SEQ ID NO: 1025

SEQ ID NO: 1049 - DNA, 201 bp, Homo sapiens; identical to SEQ ID NO: 1026

SEQ ID NO: 1050 - DNA, 201 bp, Homo sapiens
ggacatggtgattgcagagacgctgaggatgtacccgccagctttcagattcacacgggaggcagctcaggactgcgaggtgctggggcagcgcatccccrcaggcgctgtgctagagatggccgtgggtgccctgcaccatgaccctgagcactggccaagcccggagaccttcaaccctgaaaggtaccgctgcagcta

SEQ ID NO: 1051 - DNA, 201 bp, Homo sapiens; identical to SEQ ID NO: 1028

SEQ ID NO: 1052 - DNA, 201 bp, Homo sapiens; identical to SEQ ID NO: 1029

SEQ ID NO: 1053 - DNA, 201 bp, Homo sapiens
ggtgattgcagagacgctgaggatgtacccgccagctttcagattcacacgggaggcagctcaggactgcgaggtgctggggcagcgcatccccgcaggcrctgtgctagagatggccgtgggtgccctgcaccatgaccctgagcactggccaagcccggagaccttcaaccctgaaaggtaccgctgcagctagaatcc

SEQ ID NO: 1054 - DNA, 201 bp, Homo sapiens; identical to SEQ ID NO: 1031

SEQ ID NO: 1055 - DNA, 201 bp, Homo sapiens
tgaggatgtacccgccagctttcagattcacacgggaggcagctcaggactgcgaggtgctggggcagcgcatccccgcaggcgctgtgctagagatggcygtgggtgccctgcaccatgaccctgagcactggccaagcccggagaccttcaaccctgaaaggtaccgctgcagctagaatccaaatctgccctaggtcc

SEQ ID NO: 1056 - DNA, 201 bp, Homo sapiens; identical to SEQ ID NO: 1033

SEQ ID NO: 1057 - DNA, 201 bp, Homo sapiens
gactgcgaggtgctggggcagcgcatccccgcaggcgctgtgctagagatggccgtgggtgccctgcaccatgaccctgagcactggccaagcccggagamcttcaaccctgaaaggtaccgctgcagctagaatccaaatctgccctaggtccaaaaaatggtgtctatatcaagatcgtatcccgctgacacagaaggc

SEQ ID NO: 1058 - DNA, 201 bp, Homo sapiens
ctgtccgccagacctgctgctgcttcaatgtccgcatcgcaaccaccgccctggccatctaccatgtgatcatgagcgtcttgttgttcatcgagcactcrgtagaggtggcccatggcaaggcgtcctgcaagctctcccagatgggctacctcaggatcgctgacctgatctccagcttcctgctcatcaccatgctct

SEQ ID NO: 1059 - DNA, 201 bp, Homo sapiens
ggactatctcctgtgcctgctcaccctgctgggctcctacattgagctgcccgcctacctcaagttggcctcccggagccgtgctagctcctccaagttcyccctgatgacgctgcagctgctggacttctgcctgagcatcctgaccctctgcagctcctacatggaagtgcccacctatctcaacttcaagtccatgaa

SEQ ID NO: 1060 - DNA, 201 bp, Homo sapiens
actctggcgaatgtaggacctctgagtggctgtataattgttaattcaaatgaaattcatttaaacagttgacaaactgtcattcaacaattagctccagkaaataacagttatttcatcataaaacagtcccttcaaacacacaattgttctgctgaagagttgtcatcaacaatccaatgctcacctattcagttgctc

SEQ ID NO: 1061 - DNA, 201 bp, Homo sapiens
aaaacagtcccttcaaacacacaattgttctgctgaagagttgtcatcaacaatccaatgctcacctattcagttgctctgtggtcagtgtggctgcatarcagtggattccatgaaaggagtcattttagtgatgagctgccagtccattcccaggccaggctgtcgctggccatccattcagtcgattcagtcataggc

SEQ ID NO: 1062 - DNA, 201 bp, Homo sapiens
gattccatgaaaggagtcattttagtgatgagctgccagtccattcccaggccaggctgtcgctggccatccattcagtcgattcagtcataggcgaatckgttctgcccgaggcttgtggtcaagttagttcagtcaaagcaggcaacccccttgtgggcactgaccctgccactggggtcatggcggttgtggcagctg

SEQ ID NO: 1063 - DNA, 201 bp, Homo sapiens
ctgtctttgccatcgaagaccccagaggggggcccagcaccacccccatactcagaggtgtgaccctcgccaggccccagccccagtgctgggaggggtgragctgcctcataatctgcttttttgctttggtggcccctgtggcctgggtgggccctcccgcccctccctggcaggacaatctgcttgtgtctccctcgc

SEQ ID NO: 1064 - DNA, 201 bp, Homo sapiens
atcgccttcatcactgtccttatcttcaaggtctacatgttcaagtgcgtgtggcggtgctacagattgatcaagtgcatgaactcggtggaggagaagaraaactccaagatgctccagaaggtggtcctgccgtcctacgaggaagccctgtctttgccatcgaagaccccagaggggggcccagcaccacccccatac

SEQ ID NO: 1065 - DNA, 201 bp, Homo sapiens
cttcatcatcagcctgagcctactgatcggcgtagtcaagaaccgggagaagtacctgctgcccttcctgtccctgcaaatcatggactatctcctgtgcmtgctcaccctgctgggctcctacattgagctgcccgcctacctcaagttggcctcccggagccgtgctagctcctccaagttccccctgatgacgctgca

SEQ ID NO: 1066 - DNA, 201 bp, Homo sapiens
tcccttcaaacacacaattgttctgctgaagagttgtcatcaacaatccaatgctcacctattcagttgctctgtggtcagtgtggctgcatagcagtggmttccatgaaaggagtcattttagtgatgagctgccagtccattcccaggccaggctgtcgctggccatccattcagtcgattcagtcataggcgaatctg

SEQ ID NO: 1067 - DNA, 186 bp, Homo sapiens
cttccctgtgtgtcggggtcctccagggagctgacccagaggtggaggccacggaggcagggtctctggggactgtcggggggtacagagggagaaggctytgcaagagctccctggcaatacccccttgtgtaattgctttgtgtgcgacagggaggaagtttcaataaagcagcaacaagcttc

SEQ ID NO: 1068 - DNA, 193 bp, Homo sapiens
gtgcctgcttccctgtgtgtcggggtcctccagggagctgacccagaggtggaggccacggaggcagggtctctggggactgtcggggggtacagagggaraaggctctgcaagagctccctggcaatacccccttgtgtaattgctttgtgtgcgacagggaggaagtttcaataaagcagcaacaagcttc

SEQ ID NO: 1069 - DNA, 199 bp, Homo sapiens
cctcctgtgcctgcttccctgtgtgtcggggtcctccagggagctgacccagaggtggaggccacggaggcagggtctctggggactgtcggggggtacaragggagaaggctctgcaagagctccctggcaatacccccttgtgtaattgctttgtgtgcgacagggaggaagtttcaataaagcagcaacaagcttc

SEQ ID NO: 1070 - DNA, 201 bp, Homo sapiens; identical to SEQ ID NO: 1059

SEQ ID NO: 1071 - DNA, 201 bp, Homo sapiens; identical to SEQ ID NO: 1060

SEQ ID NO: 1072 - DNA, 201 bp, Homo sapiens; identical to SEQ ID NO: 1061

SEQ ID NO: 1073 - DNA, 201 bp, Homo sapiens
gattccatgaaaggagtcattttagtgatgagctgccagtccattcccaggccaggctgtcgctggccatccattcagtcgattcagtcataggcgaatckgttctgcccgaggcttgtggtcaagcaaaaattcagccctgaaatcaggcacatctgttcgttggactaaacccacaggttagttcagtcaaagcaggca

SEQ ID NO: 1074 - DNA, 201 bp, Homo sapiens; identical to SEQ ID NO: 1058

SEQ ID NO: 1075 - DNA, 201 bp, Homo sapiens; identical to SEQ ID NO: 1063

SEQ ID NO: 1076 - DNA, 201 bp, Homo sapiens
ggggaggtttggccccaacagccctcctgtgcctgcttccctgtgtgtcggggtcctccagggagctgacccagaggtggaggccacggaggcagggtctytggggactgtcggggggtacagagggagaaggctctgcaagagctccctggcaatacccccttgtgtaattgctttgtgtgcgacagggaggaagtttca

SEQ ID NO: 1077 - DNA, 201 bp, Homo sapiens
gcggttgtggcagctggggaggtttggccccaacagccctcctgtgcctgcttccctgtgtgtcggggtcctccagggagctgacccagaggtggaggccmcggaggcagggtctctggggactgtcggggggtacagagggagaaggctctgcaagagctccctggcaatacccccttgtgtaattgctttgtgtgcgac

SEQ ID NO: 1078 - DNA, 201 bp, Homo sapiens; identical to SEQ ID NO: 1064

SEQ ID NO: 1079 - DNA, 201 bp, Homo sapiens
actggggtcatggcggttgtggcagctggggaggtttggccccaacagccctcctgtgcctgcttccctgtgtgtcggggtcctccagggagctgacccaraggtggaggccacggaggcagggtctctggggactgtcggggggtacagagggagaaggctctgcaagagctccctggcaatacccccttgtgtaattgc

SEQ ID NO: 1080 - DNA, 166 bp, Homo sapiens
ctccagggagctgacccagaggtggaggccacggaggcagggtctctggggactgtcggggggtacagagggagaaggctctgcaagagctccctggcaawacccccttgtgtaattgctttgtgtgcgacagggaggaagtttcaataaagcagcaacaagcttc

SEQ ID NO: 1081 - DNA, 201 bp, Homo sapiens; identical to SEQ ID NO: 1065

SEQ ID NO: 1082 - DNA, 201 bp, Homo sapiens; identical to SEQ ID NO: 1066

SEQ ID NO: 1083 - DNA, 180 bp, Homo sapiens
tgtgtgtcggggtcctccagggagctgacccagaggtggaggccacggaggcagggtctctggggactgtcggggggtacagagggagaaggctctgcaaragctccctggcaatacccccttgtgtaattgctttgtgtgcgacagggaggaagtttcaataaagcagcaacaagcttc

SEQ ID NO: 1084 - DNA, 201 bp, Homo sapiens
aaaagcacattgccaaacgcttctgcaaatgctgttctattttccagcaagaggctcccgagcgagcaagctcagtttacacccgatccactggggagcargaaatatctgtgggcttgtgacacggactcaagtgggctggtgacccagtcagagttgtgcacatggcttagttttcatacacagcctgggctgggggtg

SEQ ID NO: 1085 - DNA, 201 bp, Homo sapiens
aactacctcttagtcttcttccaaaagcacattgccaaacgcttctgcaaatgctgttctattttccagcaagaggctcccgagcgagcaagctcagtttwcacccgatccactggggagcaggaaatatctgtgggcttgtgacacggactcaagtgggctggtgacccagtcagagttgtgcacatggcttagttttca

SEQ ID NO: 1086 - DNA, 201 bp, Homo sapiens
ggcagcatttagcacatactacacattcaataagcatcaaactcttagttactcattcagggatagcactgagcaaagcattgagcaaaggggtcccatakaggtgagggaagcctgaaaaactaagatgctgcctgcccagtgcacacaagtgtaggtatcattttctgcatttaaccgtcaataggcaaaggggggaag

SEQ ID NO: 1087 - DNA, 201 bp, Homo sapiens
tccatgctgtgtttgctttaaaagccaggacggtcacctttggggtggtgacaagtgtgatcacttgggtggtggctgtgtttgcgtctctcccaggaatmatctttaccagatctcaaaaagaaggtcttcattacacctgcagctctcattttccatacagtcagtatcaattctggaagaatttccagacattaaaga

SEQ ID NO: 1088 - DNA, 201 bp, Homo sapiens
aattgcagtagctctaacaggttggaccaagctatgcaggtgacagagactcttgggatgacgcactgctgcatcaaccccatcatctatgcctttgtcgkggagaagttcagaaactacctcttagtcttcttccaaaagcacattgccaaacgcttctgcaaatgctgttctattttccagcaagaggctcccgagcga

SEQ ID NO: 1089 - DNA, 201 bp, Homo sapiens
tctttggttttgtgggcaacatgctggtcatcctcatcctgataaactgcaaaaggctgaagagcatgactgacatctacctgctcaacctggccatctcygacctgtttttccttcttactgtccccttctgggctcactatgctgccgcccagtgggactttggaaatacaatgtgtcaactcttgacagggctctatt

SEQ ID NO: 1090 - DNA, 201 bp, Homo sapiens
aaaatcaatgtgaagcaaatcgcagcccgcctcctgcctccgctctactcactggtgttcatctttggttttgtgggcaacatgctggtcatcctcatccwgataaactgcaaaaggctgaagagcatgactgacatctacctgctcaacctggccatctctgacctgtttttccttcttactgtccccttctgggctcac

SEQ ID NO: 1091 - DNA, 201 bp, Homo sapiens
tggaagaatttccagacattaaagatagtcatcttggggctggtcctgccgctgcttgtcatggtcatctgctactcgggaatcctaaaaactctgcttcrgtgtcgaaatgagaagaagaggcacagggctgtgaggcttatcttcaccatcatgattgtttattttctcttctgggctccctacaacattgtccttctc

SEQ ID NO: 1092 - DNA, 201 bp, Homo sapiens
ccccgggtggaacaagatggattatcaagtgtcaagtccaatctatgacatcaattattatacatcggagccctgccaaaaaatcaatgtgaagcaaatckcagcccgcctcctgcctccgctctactcactggtgttcatctttggttttgtgggcaacatgctggtcatcctcatcctgataaactgcaaaaggctgaa

SEQ ID NO: 1093 - DNA, 201 bp, Homo sapiens
aaatcgcagcccgcctcctgcctccgctctactcactggtgttcatctttggttttgtgggcaacatgctggtcatcctcatcctgataaactgcaaaagkctgaagagcatgactgacatctacctgctcaacctggccatctctgacctgtttttccttcttactgtccccttctgggctcactatgctgccgcccagt

SEQ ID NO: 1094 - DNA, 201 bp, Homo sapiens
aagaatcctgccacctatgtatctggcatagtattctgtgtagtgggatgagcagagaacaaaaacaaaataatccagtgagaaaagcccgtaaataaacyttcagaccagagatctattctctagcttattttaagctcaacttaaaaagaagaactgttctctgattcttttcgccttcaatacacttaatgatttaac

SEQ ID NO: 1095 - DNA, 201 bp, Homo sapiens
cacgaggtatgaggtctaggaacatacttcagctcacacatgagatctaggtgaggattgattacctagtagtcatttcatgggttgttgggaggattctmtgaggcaaccacaggcagcatttagcacatactacacattcaataagcatcaaactcttagttactcattcagggatagcactgagcaaagcattgagca

SEQ ID NO: 1096 - DNA, 201 bp, Homo sapiens
ttgtcggggagaagttcagaaactacctcttagtcttcttccaaaagcacattgccaaacgcttctgcaaatgctgttctattttccagcaagaggctccygagcgagcaagctcagtttacacccgatccactggggagcaggaaatatctgtgggcttgtgacacggactcaagtgggctggtgacccagtcagagttg

SEQ ID NO: 1097 - DNA, 201 bp, Homo sapiens
acctgctcaacctggccatctctgacctgtttttccttcttactgtccccttctgggctcactatgctgccgcccagtgggactttggaaatacaatgtgwcaactcttgacagggctctattttataggcttcttctctggaatcttcttcatcatcctcctgacaatcgataggtacctggctgtcgtccatgctgtgt

SEQ ID NO: 1098 - DNA, 143 bp, Homo sapiens
cttcagatagattatatctggagtgaagaatcctgccacctaygtatctggcatagtattctgtgtagtgggatgagcagagaacaaaaacaaaataatccagtgagaaaagcccgtaaataaaccttcagaccagagatcta

SEQ ID NO: 1099 - DNA, 201 bp, Homo sapiens
gagcagagaacaaaaacaaaataatccagtgagaaaagcccgtaaataaaccttcagaccagagatctattctctagcttattttaagctcaacttaaaargaagaactgttctctgattcttttcgccttcaatacacttaatgatttaactccaccctccttcaaaagaaacagcatttcctacttttatactgtctat

SEQ ID NO: 1100 - DNA, 201 bp, Homo sapiens
tggcatagtattctgtgtagtgggatgagcagagaacaaaaacaaaataatccagtgagaaaagcccgtaaataaaccttcagaccagagatctattctcyagcttattttaagctcaacttaaaaagaagaactgttctctgattcttttcgccttcaatacacttaatgatttaactccaccctccttcaaaagaaaca

SEQ ID NO: 1101 - DNA, 201 bp, Homo sapiens
gagaagttcagaaactacctcttagtcttcttccaaaagcacattgccaaacgcttctgcaaatgctgttctattttccagcaagaggctcccgagcgagyaagctcagtttacacccgatccactggggagcaggaaatatctgtgggcttgtgacacggactcaagtgggctggtgacccagtcagagttgtgcacatg

SEQ ID NO: 1102 - DNA, 129 bp, Homo sapiens
cttcagatagattatatctggagtgaagratcctgccacctatgtatctggcatagtattctgtgtagtgggatgagcagagaacaaaaacaaaataatccagtgagaaaagcccgtaaataaaccttc

SEQ ID NO: 1103 - DNA, 201 bp, Homo sapiens
agagatctattctctagcttattttaagctcaacttaaaaagaagaactgttctctgattcttttcgccttcaatacacttaatgatttaactccaccctmcttcaaaagaaacagcatttcctacttttatactgtctatatgattgatttgcacagctcatctggccagaagagctgagacatccgttcccctacaaga

SEQ ID NO: 1104 - DNA, 201 bp, Homo sapiens
aacagaaaaaatcgtctctccctccctttgaaatgaatataccccttagtgtttgggtatattcatttcaaagggagagagagaggtttttttctgttctktctcatatgattgtgcacatacttgagactgttttgaatttgggggatggctaaaaccatcatagtacaggtaaggtgagggaatagtaagtggtgagaa

SEQ ID NO: 1105 - DNA, 201 bp, Homo sapiens
ctatgtatctggcatagtattctgtgtagtgggatgagcagagaacaaaaacaaaataatccagtgagaaaagcccgtaaataaaccttcagaccagagayctattctctagcttattttaagctcaacttaaaaagaagaactgttctctgattcttttcgccttcaatacacttaatgatttaactccaccctccttca

SEQ ID NO: 1106 - DNA, 201 bp, Homo sapiens
tgaggatgggaaggagggaggtattcgtaaggatgggaaggagggaggtattcgtgcagcatatgaggatgcagagtcagcagaactggggtggatttggkttggaagtgagggtcagagaggagtcagagagaatccctagtcttcaagcagattggagaaacccttgaaaagacatcaagcacagaaggaggaggagga

SEQ ID NO: 1107 - DNA, 201 bp, Homo sapiens
aaatacaatgtgtcaactcttgacagggctctattttataggcttcttctctggaatcttcttcatcatcctcctgacaatcgataggtacctggctgtcktccatgctgtgtttgctttaaaagccaggacggtcacctttggggtggtgacaagtgtgatcacttgggtggtggctgtgtttgcgtctctcccaggaat

SEQ ID NO: 1108 - DNA, 201 bp, Homo sapiens
atgggcaagcttggctgtagaaggagacagagctggttgggaagacatggggaggaaggacaaggctagatcatgaagaaccttgacggcattgctccgtytaagtcatgagctgagcagggagatcctggttggtgttgcagaaggtttactctgtggccaaaggagggtcaggaaggatgagcatttagggcaaggaga

SEQ ID NO: 1109 - DNA, 201 bp, Homo sapiens
tgagggaagcctgaaaaactaagatgctgcctgcccagtgcacacaagtgtaggtatcattttctgcatttaaccgtcaataggcaaaggggggaagggamatattcatttggaaataagctgccttgagccttaaaacccacaaaagtacaatttaccagcctccgtatttcagactgaatgggggtggggggggcgcct

SEQ ID NO: 1110 - DNA, 201 bp, Homo sapiens; identical to SEQ ID NO: 1097

SEQ ID NO: 1111 - DNA, 201 bp, Homo sapiens; identical to SEQ ID NO: 1107

SEQ ID NO: 1112 - DNA, 201 bp, Homo sapiens
tccatgctgtgtttgctttaaaagccaggacggtcacctttggggtggtgacaagtgtgatcacttgggtggtggctgtgtttgcgtctctcccaggaatmatctttaccagatctcaaaaagaaggtcttcattacacctgcagctctcattttccatacaacattaaagatagtcatcttggggctggtcctgccgctg

SEQ ID NO: 1113 - DNA, 201 bp, Homo sapiens; identical to SEQ ID NO: 1089

SEQ ID NO: 1114 - DNA, 110 bp, Homo sapiens
ctcattttccatacaacattaaagatagtcatcttggggctggtcctgccgctgcttgtcatggtcatctgctactcgggaatcctaaaaactctgcttcrgtgtcgaaa

SEQ ID NO: 1115 - DNA, 201 bp, Homo sapiens; identical to SEQ ID NO: 1090

SEQ ID NO: 1116 - DNA, 185 bp, Homo sapiens
atggattatcaagtgtcaagtccaatctatgacatcaattattatacatcggagccctgccaaaaaatcaatgtgaagcaaatckcagcccgcctcctgcctccgctctactcactggtgttcatctttggttttgtgggcaacatgctggtcatcctcatcctgataaactgcaaaaggctgaa

SEQ ID NO: 1117 - DNA, 201 bp, Homo sapiens; identical to SEQ ID NO: 1093

SEQ ID NO: 1118 - DNA, 201 bp, Homo sapiens
gtgatcagcgatgccagaragaatatccygagattctytggccatggtgcggargactcgctggctgatcaggctgccaatgaatggggcaggagtggcaragaccccaatracttccgacctgctggcctgcctgagaaatactgagcttcctcttcactctgctctcaggagatctggctgtgaggccctcagggcagg

SEQ ID NO: 1119 - DNA, 201 bp, Homo sapiens
catgtggagagcctactctgacatgagagaagccaattacatcggctcagacaaatacttccatgctcgggggaactatgatgctgccaaaaggggacctsggggtgcctgggctgcagaagtgatcagcgatgccagagagaatatccagagattctttggccatggtgcggaggactcgctggctgatcaggctgccaa

SEQ ID NO: 1120 - DNA, 201 bp, Homo sapiens
gatggggctcgggacatgtggagagcctactctgacatgagagaagccaattacatcggctcagacaaatacttccatgctcgggggaactatgatgctgycaaaaggggacctgggggtgcctgggctgcagaagtgatcagcgatgccagagagaatatccagagattctttggccatggtgcggaggactcgctggct

SEQ ID NO: 1121 - DNA, 201 bp, Homo sapiens
tgccagagagaatatccagagattctttggccatggtgcggaggactcgctggctgatcaggctgccaatgaatggggcaggagtggcaaagaccccaatracttccgacctgctggcctgcctgagaaatactgagcttcctcttcactctgctctcaggagatctggctgtgaggccctcagggcagggatacaaagcg

SEQ ID NO: 1122 - DNA, 201 bp, Homo sapiens
gacaaatacttccatgctcgggggaactatgatgctgccaaaaggggacctgggggtgcctgggctgcagaagtgatcagcgatgccagagagaatatccygagattctttggccatggtgcggaggactcgctggctgatcaggctgccaatgaatggggcaggagtggcaaagaccccaatcacttccgacctgctggc

SEQ ID NO: 1123 - DNA, 201 bp, Homo sapiens
catcggctcagacaaatacttccatgctcgggggaactatgatgctgccaaaaggggacctgggggtgcctgggctgcagaagtgatcagcgatgccagaragaatatccagagattctttggccatggtgcggaggactcgctggctgatcaggctgccaatgaatggggcaggagtggcaaagaccccaatcacttccg

SEQ ID NO: 1124 - DNA, 101 bp, Homo sapiens
rtccccagggaccacatccagcttttcttccctcccaagaaaccagcagggaaggctcagtataaatagcagccaccgctccctggcaggcagggacccgc

SEQ ID NO: 1125 - DNA, 201 bp, Homo sapiens
actatgatgctgccaaaaggggacctgggggtgcctgggctgcagaagtgatcagcgatgccagagagaatatccagagattctttggccatggtgcggargactcgctggctgatcaggctgccaatgaatggggcaggagtggcaaagaccccaatcacttccgacctgctggcctgcctgagaaatactgagcttcct

SEQ ID NO: 1126 - DNA, 201 bp, Homo sapiens
ggcttttgatggggctcgggacatgtggagagcctactctgacatgagagaagccaattacatcggctcagacaaatacttccatgctcgggggaactatyatgctgccaaaaggggacctgggggtgcctgggctgcagaagtgatcagcgatgccagagagaatatccagagattctttggccatggtgcggaggactc

SEQ ID NO: 1127 - DNA, 201 bp, Homo sapiens
ttccatgctcgggggaactatgatgctgccaaaaggggacctgggggtgcctgggctgcagaagtgatcagcgatgccagagagaatatccagagattctytggccatggtgcggaggactcgctggctgatcaggctgccaatgaatggggcaggagtggcaaagaccccaatcacttccgacctgctggcctgcctgag

SEQ ID NO: 1128 - DNA, 201 bp, Homo sapiens
tcgggacatgtggagagcctactctgacatgagagaagccaattacatcggctcagacaaatacttccatgctcgggggaactatgatgctgccaaaaggygacctgggggtgcctgggctgcagaagtgatcagcgatgccagagagaatatccagagattctttggccatggtgcggaggactcgctggctgatcaggc

SEQ ID NO: 1129 - DNA, 201 bp, Homo sapiens
gtgarcagcgatgccagagagaatatccagagattctttggccatggtgcggaggactcgctggctgatcaggctgccaatgaatggggcaggagtggcaragaccccaatcacttccgacctgctggcctgcctgagaaatactgagcttcctcttcactctgctctcaggagatctggctgtgaggccctcagggcagg

SEQ ID NO: 1130 - DNA, 201 bp, Homo sapiens
tgagtgtcagcagccgaagcttcttttcgttccttggcgaggcttttgatggggctcgggacatgtggagagcctactctgacatgagagaagccaattasatcggctcagacaaatacttccatgctcgggggaactatgatgctgccaaaaggggacctgggggtgcctgggctgcagaagtgatcagcgatgccagag

SEQ ID NO: 1131 - DNA, 201 bp, Homo sapiens
ctgctccttggtcctgagtgtcagcagccgaagcttcttttcgttccttggcgaggcttttgatggggctcgggacatgtggagagcctactctgacatgygagaagccaattacatcggctcagacaaatacttccatgctcgggggaactatgatgctgccaaaaggggacctgggggtgcctgggctgcagaagtgat

SEQ ID NO: 1132 - DNA, 201 bp, Homo sapiens
agagaagccaattacatcggctcagacaaatacttccatgctcgggggaactatgatgctgccaaaaggggacctgggggtgcctgggctgcagaagtgarcagcgatgccagagagaatatccagagattctttggccatggtgcggaggactcgctggctgatcaggctgccaatgaatggggcaggagtggcaaagac

SEQ ID NO: 1133 - DNA, 201 bp, Homo sapiens
tggggctcgggacatgtggagagcctactctgacatgagagaagccaattacatcggctcagacaaatacttccatgctcgggggaactatgatgctgccyaaaggggacctgggggtgcctgggctgcagaagtgatcagcgatgccagagagaatatccagagattctttggccatggtgcggaggactcgctggctga

SEQ ID NO: 1134 - DNA, 201 bp, Homo sapiens
aggcttttgatggggctcgggacatgtggagagcctactctgacatgagagaagccaattacatcggctcagacaaatacttccatgctcgggggaactargatgctgccaaaaggggacctgggggtgcctgggctgcagaagtgatcagcgatgccagagagaatatccagagattctttggccatggtgcggaggact

SEQ ID NO: 1135 - DNA, 101 bp, Homo sapiens; identical to SEQ ID NO: 1124

SEQ ID NO: 1136 - DNA, 201 bp, Homo sapiens
tggttttctgctccttggtcctgagtgtcagcagccgaagcttcttttcgttccttggcgaggcttttgatggggctcgggacatgtggagagcctactcygacatgagagaagccaattacatcggctcagacaaatacttccatgctcgggggaactatgatgctgccaaaaggggacctgggggtgcctgggctgcag

SEQ ID NO: 1137 - DNA, 201 bp, Homo sapiens
ggacatgtggagagcctactctgacatgagagaagccaattacatcggctcagacaaatacttccatgctcgggggaactatgatgctgccaaaaggggayctgggggtgcctgggctgcagaagtgatcagcgatgccagagagaatatccagagattctttggccatggtgcggaggactcgctggctgatcaggctgc

SEQ ID NO: 1138 - DNA, 201 bp, Homo sapiens
tggtcctgagtgtcagcagccgaagcttcttttcgttccttggcgaggcttttgatggggctcgggacatgtggagagcctactctgacatgagagaagcyaattacatcggctcagacaaatacttccatgctcgggggaactatgatgctgccaaaaggggacctgggggtgcctgggctgcagaagtgatcagcgatg

SEQ ID NO: 1139 - DNA, 201 bp, Homo sapiens
gcttctcacgggcctggttttctgctccttggtcctgagtgtcagcagccgaagcttcttttcgttccttggcgaggcttttgatggttatgaatctcagscacaccttggcatcacctgaaatacccatgccttcaactccccagcagagtctgcagaaactggcctggggtgtggcctgggcactgggactttcagttt

SEQ ID NO: 1140 - DNA, 201 bp, Homo sapiens
atcagcaccatgaagcttctcacgggcctggttttctgctccttggtcctgagtgtcagcagccgaagcttcttttcgttccttggcgaggcttttgatgyttatgaatctcaggcacaccttggcatcacctgaaatacccatgccttcaactccccagcagagtctgcagaaactggcctggggtgtggcctgggcact

SEQ ID NO: 1141 - DNA, 201 bp, Homo sapiens
  misc_feature (1)...(201): n = A,T,C or G, or insertion/deletion polymorphism (see Tables 1-2)
cttcaactccccagcagagtctgcagaaactggcctggggtgtggcctgggcactgggactttcagtttctctctgggtgattagaaagtgcagccaaggntcacgcctgtaattccagcactttgggaggccaaggtggatgaatcacttgaggtcatgagttccggagcagcctggccaacatggtgaaaccccgtctc

SEQ ID NO: 1142 - DNA, 201 bp, Homo sapiens
  misc_feature (1)...(201): n = A,T,C or G, or insertion/deletion polymorphism (see Tables 1-2)
cgaagcttcttttcgttccttggcgaggcttttgatggttatgaatctcaggcacaccttggcatcacctgaaatacccatgccttcaactccccagcagngtctgcagaaactggcctggggtgtggcctgggcactgggactttcagtttctctctgggtgattagaaagtgcagccaaggctcacgcctgtaattcca

SEQ ID NO: 1143 - DNA, 201 bp, Homo sapiens
tgtcagcagccgaagcttcttttcgttccttggcgaggcttttgatggttatgaatctcaggcacaccttggcatcacctgaaatacccatgccttcaacrccccagcagagtctgcagaaactggcctggggtgtggcctgggcactgggactttcagtttctctctgggtgattagaaagtgcagccaaggctcacgcc

SEQ ID NO: 1144 - DNA, 201 bp, Homo sapiens
aggcttttgatggttatgaatctcaggcacaccttggcatcacctgaaatacccatgccttcaactccccagcagagtctgcagaaactggcctggggtgrggcctgggcactgggactttcagtttctctctgggtgattagaaagtgcagccaaggctcacgcctgtaattccagcactttgggaggccaaggtggatg

SEQ ID NO: 1145 - DNA, 201 bp, Homo sapiens
agcacagatcagcaccatgaagcttctcacgggcctggttttctgctccttggtcctgagtgtcagcagccgaagcttcttttcgttccttggcgaggctyttgatggttatgaatctcaggcacaccttggcatcacctgaaatacccatgccttcaactccccagcagagtctgcagaaactggcctggggtgtggcct

SEQ ID NO: 1146 - DNA, 201 bp, Homo sapiens
  misc_feature (1)...(201): n = A,T,C or G, or insertion/deletion polymorphism (see Tables 1-2)
ttttcgttccttggcgaggcttttgatggttatgaatctcaggcacaccttggcatcacctgaaatacccatgccttcaactccccagcagagtctgcagnaactggcctggggtgtggcctgggcactgggactttcagtttctctctgggtgattagaaagtgcagccaaggctcacgcctgtaattccagcactttgg

SEQ ID NO: 1147 - DNA, 201 bp, Homo sapiens
catgaagcttctcacgggcctggttttctgctccttggtcctgagtgtcagcagccgaagcttcttttcgttccttggcgaggcttttgatggttatgaarctcaggcacaccttggcatcacctgaaatacccatgccttcaactccccagcagagtctgcagaaactggcctggggtgtggcctgggcactgggacttt

SEQ ID NO: 1148 - DNA, 201 bp, Homo sapiens
cactaaggtcccgctgccttgatggattatacacttgacctcagtgtgacaacagtgaccgactactactaccctgatatcttctcaagcccctgtgatgsggaacttattcagacaaatggcaagttgctccttgctgtcttttattgcctcctgtttgtattcagtcttctgggaaacagcctggtcatcctggtcctt

SEQ ID NO: 1149 - DNA, 201 bp, Homo sapiens
aatcaaacagagacttctagacaaaaaccattgttgatgaggcagatgcctctagaagagacgtttaaaagccatcaaacacaatgcctcatcttccctgraggacccacttcctgatccctcaactgtgtctgatgtttcttctcatgtaagaaataaaaaataaaaataaaaaaaaatatattggtatgtaactacagg

SEQ ID NO: 1150 - DNA, 201 bp, Homo sapiens
cttctagacaaaaaccattgttgatgaggcagatgcctctagaagagacgtttaaaagccatcaaacacaatgcctcatcttccctggaggacccacttcytgatccctcaactgtgtctgatgtttcttctcatgtaagaaataaaaaataaaaataaaaaaaaatatattggtatgtaactacaggaaaaaaataaaaa

SEQ ID NO: 1151 - DNA, 201 bp, Homo sapiens
aacacaatgcctcatcttccctggaggacccacttcctgatccctcaactgtgtctgatgtttcttctcatgtaagaaataaaaaataaaaataaaaaaawatatattggtatgtaactacaggaaaaaaataaaaaatatatagtggacagtaacctttcaatcaaaactcagtatcataagtagagactgaaaacttgc

SEQ ID NO: 1152 - DNA, 201 bp, Homo sapiens
tcaaacacaatgcctcatcttccctggaggacccacttcctgatccctcaactgtgtctgatgtttcttctcatgtaagaaataaaaaataaaaataaaawaaaatatattggtatgtaactacaggaaaaaaataaaaaatatatagtggacagtaacctttcaatcaaaactcagtatcataagtagagactgaaaact

SEQ ID NO: 1153 - DNA, 201 bp, Homo sapiens
atagtgacaatgaagatgatgctattaatactgcataaaaagtgcctgtagatgacatggtgaaaatatttgacaggcttatggaaggactacagcagcaygcattcataacagaacaagaaattatgtcagcttataaaatcaaacagagacttctagacaaaaaccattgttgatgaggcagatgcctctagaagagac

SEQ ID NO: 1154 - DNA, 201 bp, Homo sapiens
ctgggtagaaaatacagcattttcacagaaaaggacgagatcttgtctgatgtggcatctagactttggtttacatacaggaaaaactttccagccattgraggttgtcgggacatttcactctccagtaaatgtggcccttggcgttactgagtcctaagaggggggacaggccccacctcggacacaggctggggctgc

SEQ ID NO: 1155 - DNA, 201 bp, Homo sapiens
acctggtggcatttccagaacctcagccccgattccagcacccaccaccgcctgaccctgtgtaacctgctgtcccgggtcccagagtgcactctgccccrctgctctgctgcctgtcctgggaaagtagctttgccccactaggaaatgtaaacaggagggcttggggagcgtgggcacttttctcatgagcagctactg

SEQ ID NO: 1156 - DNA, 201 bp, Homo sapiens
gggaagcagggaaggctggtgcgatctccattccttgggctccgcgtccgagttcatggtgcgccgctgtgctgggagctgcagtgggaatgtgtgggacmccttgaccaaaggggagctttgtctcgtgtgttttgaaaaaggcttaatgaagagaatgttgttcattcttagtagtatagtttgcaattcttaatggca

SEQ ID NO: 1157 - DNA, 201 bp, Homo sapiens
tctgctgcctgtcctgggaaagtagctttgccccactaggaaatgtaaacaggagggcttggggagcgtgggcacttttctcatgagcagctactgcggcrttggcaggactcgctgctgctgctgctgcttgtgtaggtcggggagccggagatccccgaggacgcgcgccggacagtcggcactgaccggcccacctgg

SEQ ID NO: 1158 - DNA, 201 bp, Homo sapiens
tggagcctgccctcagagtgtccctttccagtgctgtggcattctgtggcagcttccccaggtgtggtgacggggggggcggggcctccacctgtgacagycaggcttgagggtggacggcgtgcctctcccaggagccttccccatgtccttgccttgctgagaattgccctcccatgccgctgaggtgttaggtggttt

SEQ ID NO: 1159 - DNA, 201 bp, Homo sapiens
gaggaacgaaggcgaggttcctccttgctttggggagaaaagtattcaggaagtgggtgtgtgggaaacctgaagatggcgtgcacaggacacagcgtggkcggcctgggcagaagggcggctggctgtcctggagctgctgctggagcctgccctcagagtgtccctttccagtgctgtggcattctgtggcagcttccc

SEQ ID NO: 1160 - DNA, 201 bp, Homo sapiens
acatgaatttctggggcgctccctgagtcagagtctcagaagacctgtgcaggctggcgtgagaggagcggcagccacactgcggccccacgcccaaggaytgggctgctctcgaggggggcgcgcccaccgctgtgtcctctctgcccagcctggcttaccaagggctacctcagtgggagatgaggttggaggaacgaa

SEQ ID NO: 1161 - DNA, 201 bp, Homo sapiens
gcatcgcggagcttgacccgtccatcgctgtggggtttttctgtaagactgaagatgacttcaatgattggtgccagcaagtcaaaaagctgtctctgctyggaggtgccctgcccatgtttgagctggtggagcagcagccttcacatctggcctgccccgacgtcctgaacctgtccctaggtgagagctgccaagtcc

SEQ ID NO: 1162 - DNA, 201 bp, Homo sapiens
cccgggaggccttactgcttggtgtcagactgcccagctcagagtgcccgtcagggcctgtgcatccgcacgcggagccgtctgttaggagcttccagagygttctctcgacactgccagccccgtgttagcacctgggcctcagtcccacttgctcccaggcgccggttctgtggttggtttggaattaaagtcctgttt

SEQ ID NO: 1163 - DNA, 201 bp, Homo sapiens
caggctggggctgcatgctgcggtgtggacagatgatctttgcccaagccctggtgtgccggcacctaggccgagattggaggtggacacaaaggaagagrcagccagacagctacttcagcgtcctcaacgcattcatcgacaggaaggacagttactactccattcaccagatagcgcaaatgggagttggcgaaggca

SEQ ID NO: 1164 - DNA, 201 bp, Homo sapiens
gcacctgggcctcagtcccacttgctcccaggcgccggttctgtggttggtttggaattaaagtcctgtttgaagttgtcagacacagacatgaatttctkgggcgctccctgagtcagagtctcagaagacctgtgcaggctggcgtgagaggagcggcagccacactgcggccccacgcccaaggactgggctgctctc

SEQ ID NO: 1165 - DNA, 201 bp, Homo sapiens
tttgaagttgtcagacacagacatgaatttctggggcgctccctgagtcagagtctcagaagacctgtgcaggctggcgtgagaggagcggcagccacacygcggccccacgcccaaggactgggctgctctcgaggggggcgcgcccaccgctgtgtcctctctgcccagcctggcttaccaagggctacctcagtggga

SEQ ID NO: 1166 - DNA, 201 bp, Homo sapiens
agggcggctggctgtcctggagctgctgctggagcctgccctcagagtgtccctttccagtgctgtggcattctgtggcagcttccccaggtgtggtgacggggggggcggggcctccacctgtgacagtcaggcttgagggtggacggcgtgcctctcccaggagccttccccatgtccttgccttgctgagaattgccc

SEQ ID NO: 1167 - DNA, 201 bp, Homo sapiens
acaggagggcttggggagcgtgggcacttttctcatgagcagctactgcggcgttggcaggactcgctgctgctgctgctgcttgtgtaggtcggggagcyggagatccccgaggacgcgcgccggacagtcggcactgaccggcccacctggtagcagaggacacccccagccccccaagcattgaagacatagtgtatt

SEQ ID NO: 1168 - DNA, 201 bp, Homo sapiens
gccgcatgagcatcgcggagcttgacccgtccatcgctgtggggtttttctgtaagactgaagatgacttcaatgattggtgccagcaagtcaaaaagctrtctctgcttggaggtgccctgcccatgtttgagctggtggagcagcagccttcacatctggcctgccccgacgtcctgaacctgtccctaggtgagagct

SEQ ID NO: 1169 - DNA, 201 bp, Homo sapiens
tttttctgtaagactgaagatgacttcaatgattggtgccagcaagtcaaaaagctgtctctgcttggaggtgccctgcccatgtttgagctggtggagcwgcagccttcacatctggcctgccccgacgtcctgaacctgtccctaggtgagagctgccaagtccaggtggggtccctcggagattcttctgatgtagag

SEQ ID NO: 1170 - DNA, 201 bp, Homo sapiens
gagagcttccactgccagcacccgccgtgccgcatgagcatcgcggagcttgacccgtccatcgctgtggggtttttctgtaagactgaagatgacttcartgattggtgccagcaagtcaaaaagctgtctctgcttggaggtgccctgcccatgtttgagctggtggagcagcagccttcacatctggcctgccccgac

SEQ ID NO: 1171 - DNA, 201 bp, Homo sapiens
gaagcttgctgtcttcgatacgtggagctccttggcggtccacattgcaatggacaacactgttgtgatggaggaaatcagaaggttgtgcaggaccagcrttccctgtgcaggcgccactgcgtttcctgcagattccgaccggcactgcaacggattccctgccggagctgaggtcaccaacaggccgtcgccatggag

SEQ ID NO: 1172 - DNA, 201 bp, Homo sapiens
acaacactgttgtgatggaggaaatcagaaggttgtgcaggaccagcgttccctgtgcaggcgccactgcgtttcctgcagattccgaccggcactgcaayggattccctgccggagctgaggtcaccaacaggccgtcgccatggagacccctggtacttctcattcccctgcgcctggggctcacggacatcaacgagg

SEQ ID NO: 1173 - DNA, 201 bp, Homo sapiens
cattgaagacatagtgtatttcctcgtatcctttctcccttgggtgtagttggggtggggaagcagggaaggctggtgcgatctccattccttgggctccrcgtccgagttcatggtgcgccgctgtgctgggagctgcagtgggaatgtgtgggacaccttgaccaaaggggagctttgtctcgtgtgttttgaaaaagg

SEQ ID NO: 1174 - DNA, 201 bp, Homo sapiens
caggagggcttggggagcgtgggcacttttctcatgagcagctactgcggcgttggcaggactcgctgctgctgctgctgcttgtgtaggtcggggagccrgagatccccgaggacgcgcgccggacagtcggcactgaccggcccacctggtagcagaggacacccccagccccccaagcattgaagacatagtgtattt

SEQ ID NO: 1175 - DNA, 201 bp, Homo sapiens
tgtagttggggtggggaagcagggaaggctggtgcgatctccattccttgggctccgcgtccgagttcatggtgcgccgctgtgctgggagctgcagtggkaatgtgtgggacaccttgaccaaaggggagctttgtctcgtgtgttttgaaaaaggcttaatgaagagaatgttgttcattcttagtagtatagtttgca

SEQ ID NO: 1176 - DNA, 201 bp, Homo sapiens
cgattccagcacccaccaccgcctgaccctgtgtaacctgctgtcccgggtcccagagtgcactctgccccactgctctgctgcctgtcctgggaaagtakctttgccccactaggaaatgtaaacaggagggcttggggagcgtgggcacttttctcatgagcagctactgcggcgttggcaggactcgctgctgctgct

SEQ ID NO: 1177 - DNA, 201 bp, Homo sapiens; identical to SEQ ID NO: 1155

SEQ ID NO: 1178 - DNA, 201 bp, Homo sapiens; identical to SEQ ID NO: 1156

SEQ ID NO: 1179 - DNA, 201 bp, Homo sapiens; identical to SEQ ID NO: 1157

SEQ ID NO: 1180 - DNA, 201 bp, Homo sapiens; identical to SEQ ID NO: 1158

SEQ ID NO: 1181 - DNA, 201 bp, Homo sapiens; identical to SEQ ID NO: 1159

SEQ ID NO: 1182 - DNA, 201 bp, Homo sapiens; identical to SEQ ID NO: 1160

SEQ ID NO: 1183 - DNA, 201 bp, Homo sapiens
gcatcgcggagcttgacccgtccatcgctgtggggtttttctgtaagactgaagatgacttcaatgattggtgccagcaagtcaaaaagctgtctctgctyggaggtgccctgcccatgtttgagctggtggagcagcagccttcacatctggcctgccccgacgtcctgaacctgtccctagattcttctgatgtagagc

SEQ ID NO: 1184 - DNA, 201 bp, Homo sapiens; identical to SEQ ID NO: 1162

SEQ ID NO: 1185 - DNA, 201 bp, Homo sapiens; identical to SEQ ID NO: 1163

SEQ ID NO: 1186 - DNA, 201 bp, Homo sapiens; identical to SEQ ID NO: 1164

SEQ ID NO: 1187 - DNA, 201 bp, Homo sapiens; identical to SEQ ID NO: 1165

SEQ ID NO: 1188 - DNA, 201 bp, Homo sapiens; identical to SEQ ID NO: 1166

SEQ ID NO: 1189 - DNA, 201 bp, Homo sapiens; identical to SEQ ID NO: 1167

SEQ ID NO: 1190 - DNA, 201 bp, Homo sapiens
gccgcatgagcatcgcggagcttgacccgtccatcgctgtggggtttttctgtaagactgaagatgacttcaatgattggtgccagcaagtcaaaaagctrtctctgcttggaggtgccctgcccatgtttgagctggtggagcagcagccttcacatctggcctgccccgacgtcctgaacctgtccctagattcttctg

SEQ ID NO: 1191 - DNA, 201 bp, Homo sapiens
tttttctgtaagactgaagatgacttcaatgattggtgccagcaagtcaaaaagctgtctctgcttggaggtgccctgcccatgtttgagctggtggagcwgcagccttcacatctggcctgccccgacgtcctgaacctgtccctagattcttctgatgtagagcgactggaaagattcttcgactcagaagatgaagac

SEQ ID NO: 1192 - DNA, 201 bp, Homo sapiens; identical to SEQ ID NO: 1170

SEQ ID NO: 1193 - DNA, 201 bp, Homo sapiens; identical to SEQ ID NO: 1171

SEQ ID NO: 1194 - DNA, 201 bp, Homo sapiens; identical to SEQ ID NO: 1172

SEQ ID NO: 1195 - DNA, 201 bp, Homo sapiens; identical to SEQ ID NO: 1173

SEQ ID NO: 1196 - DNA, 201 bp, Homo sapiens; identical to SEQ ID NO: 1174

SEQ ID NO: 1197 - DNA, 201 bp, Homo sapiens; identical to SEQ ID NO: 1175

SEQ ID NO: 1198 - DNA, 201 bp, Homo sapiens; identical to SEQ ID NO: 1176

SEQ ID NO: 1199 - DNA, 201 bp, Homo sapiens; identical to SEQ ID NO: 1155

SEQ ID NO: 1200 - DNA, 201 bp, Homo sapiens; identical to SEQ ID NO: 1156

SEQ ID NO: 1201 - DNA, 201 bp, Homo sapiens; identical to SEQ ID NO: 1157

SEQ ID NO: 1202 - DNA, 201 bp, Homo sapiens; identical to SEQ ID NO: 1158

SEQ ID NO: 1203 - DNA, 201 bp, Homo sapiens; identical to SEQ ID NO: 1159

SEQ ID NO: 1204 - DNA, 201 bp, Homo sapiens; identical to SEQ ID NO: 1160

SEQ ID NO: 1205 - DNA, 201 bp, Homo sapiens; identical to SEQ ID NO: 1183

SEQ ID NO: 1206 - DNA, 201 bp, Homo sapiens; identical to SEQ ID NO: 1162

SEQ ID NO: 1207 - DNA, 201 bp, Homo sapiens; identical to SEQ ID NO: 1163

SEQ ID NO: 1208 - DNA, 201 bp, Homo sapiens; identical to SEQ ID NO: 1164

SEQ ID NO: 1209 - DNA, 201 bp, Homo sapiens; identical to SEQ ID NO: 1165

SEQ ID NO: 1210 - DNA, 201 bp, Homo sapiens; identical to SEQ ID NO: 1166

SEQ ID NO: 1211 - DNA, 201 bp, Homo sapiens; identical to SEQ ID NO: 1167

SEQ ID NO: 1212 - DNA, 201 bp, Homo sapiens; identical to SEQ ID NO: 1190

SEQ ID NO: 1213 - DNA, 201 bp, Homo sapiens; identical to SEQ ID NO: 1191

SEQ ID NO: 1214 - DNA, 201 bp, Homo sapiens; identical to SEQ ID NO: 1170

SEQ ID NO: 1215 - DNA, 201 bp, Homo sapiens; identical to SEQ ID NO: 1171

SEQ ID NO: 1216 - DNA, 201 bp, Homo sapiens; identical to SEQ ID NO: 1172

SEQ ID NO: 1217 - DNA, 201 bp, Homo sapiens; identical to SEQ ID NO: 1173

SEQ ID NO: 1218 - DNA, 201 bp, Homo sapiens; identical to SEQ ID NO: 1174

SEQ ID NO: 1219 - DNA, 201 bp, Homo sapiens; identical to SEQ ID NO: 1175

SEQ ID NO: 1220 - DNA, 201 bp, Homo sapiens; identical to SEQ ID NO: 1176

SEQ ID NO: 1221 - DNA, 201 bp, Homo sapiens; identical to SEQ ID NO: 1161

SEQ ID NO: 1222 - DNA, 186 bp, Homo sapiens
cccgggaggccttactgcttggtgtcagactgcccagctcagagtgcccgtcagggcctgtgcatccgcacgcggagccgtctgttaggagcttccagagygttctctcgacactgccagccccgtgttagcacctgggcctcagtcccacttgctcccaggcgccggttctgtggttggtttgga

SEQ ID NO: 1223 - DNA, 201 bp, Homo sapiens; identical to SEQ ID NO: 1163

SEQ ID NO: 1224 - DNA, 201 bp, Homo sapiens
cttcacatctggcctgccccgacgtcctgaacctgtccctaggtgagagctgccaagtccaggtggggtccctcggaggtacgatctgtgcccttgcttcyccagtcctggcccccttggttttgaccattaaggtgtgtgtgagcctgagccgtgagcacttggcagtggttcgcctgtgagaccaggtatggagtggag

SEQ ID NO: 1225 - DNA, 201 bp, Homo sapiens; identical to SEQ ID NO: 1168

SEQ ID NO: 1226 - DNA, 201 bp, Homo sapiens
tttttctgtaagactgaagatgacttcaatgattggtgccagcaagtcaaaaagctgtctctgcttggaggtgccctgcccatgtttgagctggtggagcwgcagccttcacatctggcctgccccgacgtcctgaacctgtccctaggtgagagctgccaagtccaggtggggtccctcggaggtacgatctgtgccctt

SEQ ID NO: 1227 - DNA, 201 bp, Homo sapiens
ttcgcctgtgagaccaggtatggagtggagcgtcccctcctccaagcttgcgcccagcagcccaggacccacctcgtcttccccaccagcgctgcctgccsgggcgctgtggagctgggcgtgctaccatggagtcctcaggggtctggagcagacagaacatgcaggctctgtggtgacgcagtcctgggtgggggactg

SEQ ID NO: 1228 - DNA, 201 bp, Homo sapiens; identical to SEQ ID NO: 1170

SEQ ID NO: 1229 - DNA, 201 bp, Homo sapiens; identical to SEQ ID NO: 1171

SEQ ID NO: 1230 - DNA, 201 bp, Homo sapiens; identical to SEQ ID NO: 1172

SEQ ID NO: 1231 - DNA, 201 bp, Homo sapiens
ggtctgcacaacccccggacctgttcacacccgcatggggacagctgtctgtgggctgcagagcaggcactgctcagtctgccccacgccaagggcccttractcacacccaggtggcccacccaagatgcctgatgcgctatgtcctgttccttctagattcttctgatgtagagcgactggaaagattcttcgactcag

SEQ ID NO: 1232 - DNA, 201 bp, Homo sapiens
cccctcggaccatggccagcgtgccgcaggagccggcctgggctcgtgcagtgaagtgagtggccgtgagcgcgtcctcctcatctctgtctccctgtggraaactctacaaacaaggcaatggcaatggaaccactcctgatgaccacgagggtcagacgcgggacagaggcccctcaggcctgagattgtgccggccgc

SEQ ID NO: 1233 - DNA, 201 bp, Homo sapiens
catgggtggcgtagacccctcggaccatggccagcgtgccgcaggagccggcctgggctcgtgcagtgaagtgagtggccgtgagcgcgtcctcctcatcyctgtctccctgtgggaaactctacaaacaaggcaatggcaatggaaccactcctgatgaccacgagggtcagacgcgggacagaggcccctcaggcctga

SEQ ID NO: 1234 - DNA, 201 bp, Homo sapiens; identical to SEQ ID NO: 1171

SEQ ID NO: 1235 - DNA, 201 bp, Homo sapiens; identical to SEQ ID NO: 1172

SEQ ID NO: 1236 - DNA, 102 bp, Homo sapiens
cgtggcggccacctgagcacacaggcatttggtgctgaatgctgtttgggaatgacgaggaaaactttcggatttttgcgttttttttttcagcatgttgsg

SEQ ID NO: 1237 - DNA, 201 bp, Homo sapiens; identical to SEQ ID NO: 1163

SEQ ID NO: 1238 - DNA, 201 bp, Homo sapiens
ctaacacctcagctctgatcctggagggcctgggattcaacctcacagaaacccctgaagccgacatccaccagggcttccggagcctcctccacaccctkgccctgcccagccccaaactcgaactaaaagtaggaaactccctgttcctagacaagcgactaaagcctcggcagcactatttggacagcatcaaggagc

SEQ ID NO: 1239 - DNA, 201 bp, Homo sapiens
gggaaggttgtagacataatccaaggccttgaccttctgacggccatggttctggtgaaccacattttctttaaagccaagtgggaaaagccctttcaccytgaatatacaagaaagaacttcccattcctggtgggcgagcaggtcactgtgcatgtccccatgatgcaccagaaagagcagttcgcttttggggtggat

SEQ ID NO: 1240 - DNA, 201 bp, Homo sapiens
ccaccagggcttccggagcctcctccacacccttgccctgcccagccccaaactcgaactaaaagtaggaaactccctgttcctagacaagcgactaaagyctcggcagcactatttggacagcatcaaggagctttatggagcttttgctttttctgccaacttcacagattctgttacaactgggaggcagattaatga

SEQ ID NO: 1241 - DNA, 201 bp, Homo sapiens
ctgcagatggattacaagggagatgccgtggccttctttgtcctccctagcaagggcaagatgaggcaactggaacaggccttgtcagccagaacactgakaaagtggagccactcactccagaaaaggtggatagaggtgttcatccccagattttccatttctgcctcctacaatctggaaaccatcctcccgaagatg

SEQ ID NO: 1242 - DNA, 201 bp, Homo sapiens
acttcactgtctccttcaataggaccttcctgatgatgattacaaataaagccacagacgttcccagaattgacctgacaaatattgaccaggttgctgtsatcttcaaacaccattttcctgtgggtagaggtgatgcagtgctgaagacctgggcccctgctcagtgcctttgctctagaatgggtccagcttggcttt

SEQ ID NO: 1243 - DNA, 201 bp, Homo sapiens
aggagctgcagctgcaggcaaatttcttgggcaatgtcaagaggctgtatgaagcagaagtcttttctacagatttctccaacccctccattgcccaggcraggatcaacagccatgtgaaaaagaagacccaagggaaggttgtagacataatccaaggccttgaccttctgacggccatggttctggtgaaccacattt

SEQ ID NO: 1244 - DNA, 201 bp, Homo sapiens
ccgcccttcctccacaaagagcacccctgcctcacaggtgtattccctcaacaccgactttgccttccgcctataccgcaggctggttttggagaccccgrgtcagaacatcttcttctcccctgtgagtgtctccacttccctggccatgctctcccttggggcccactcagtcaccaagacccagattctccagggcct

SEQ ID NO: 1245 - DNA, 201 bp, Homo sapiens
tgaaccacattttctttaaagccaagtgggaaaagccctttcaccctgaatatacaagaaagaacttcccattcctggtgggcgagcaggtcactgtgcawgtccccatgatgcaccagaaagagcagttcgcttttggggtggatacagagctgaactgctttgtgctgcagatggattacaagggagatgccgtggcct

SEQ ID NO: 1246 - DNA, 133 bp, Homo sapiens
atggaggccagtaccatcgatgactcaggacayttactagccaactccccgacttcagacatattttgttccaaaatggcatcttacctttatggagtactctttgctgttggcctctgtgctccaatctact

SEQ ID NO: 1247 - DNA, 201 bp, Homo sapiens
tccccgacttcagacatattttgttccaaaatggcatcttacctttatggagtactctttgctgttggcctctgtgctccaatctactgtgtgtccccggycaatgcccccagtgcatacccccgcccttcctccacaaagagcacccctgcctcacaggtgtattccctcaacaccgactttgccttccgcctataccgc

SEQ ID NO: 1248 - DNA, 201 bp, Homo sapiens
tttctaaagcaacccacaaggctgtgctggatgtcagtgaagagggcactgaggccacagcagctaccaccaccaagttcatagtccgatcgaaggatggyccctcttacttcactgtctccttcaataggaccttcctgatgatgattacaaataaagccacagacgttcccagaattgacctgacaaatattgaccagg

SEQ ID NO: 1249 - DNA, 127 bp, Homo sapiens
atggaggccagtaccatcgatgactcrggacatttactagccaactccccgacttcagacatattttgttccaaaatggcatcttacctttatggagtactctttgctgttggcctctgtgctccaa

SEQ ID NO: 1250 - DNA, 201 bp, Homo sapiens
tcactccagaaaaggtggatagaggtgttcatccccagattttccatttctgcctcctacaatctggaaaccatcctcccgaagatgggcatccaaaatgyctttgacaaaaatgctgatttttctggaattgcaaagagagactccctgcaggtttctaaagcaacccacaaggctgtgctggatgtcagtgaagagggc

SEQ ID NO: 1251 - DNA, 201 bp, Homo sapiens
ggttttggagaccccgagtcagaacatcttcttctcccctgtgagtgtctccacttccctggccatgctctcccttggggcccactcagtcaccaagaccsagattctccagggcctgggcttcaacctcacacacacaccagagtctgccatccaccagggcttccagcacctggttcactcactgactgttcccagcaa

SEQ ID NO: 1252 - DNA, 201 bp, Homo sapiens
cccaggcgaggatcaacagccatgtgaaaaagaagacccaagggaaggttgtagacataatccaaggccttgaccttctgacggccatggttctggtgaaycacattttctttaaagccaagtgggaaaagccctttcaccctgaatatacaagaaagaacttcccattcctggtgggcgagcaggtcactgtgcatgtcc

SEQ ID NO: 1253 - DNA, 201 bp, Homo sapiens
aaaagaagacccaagggaaggttgtagacataatccaaggccttgaccttctgacggccatggttctggtgaaccacattttctttaaagccaagtgggaraagccctttcaccctgaatatacaagaaagaacttcccattcctggtgggcgagcaggtcactgtgcatgtccccatgatgcaccagaaagagcagttcg

SEQ ID NO: 1254 - DNA, 201 bp, Homo sapiens
tatggagtactctttgctgttggcctctgtgctccaatctactgtgtgtccccggccaatgcccccagtgcatacccccgcccttcctccacaaagagcayccctgcctcacaggtgtattccctcaacaccgactttgccttccgcctataccgcaggctggttttggagaccccgagtcagaacatcttcttctcccct

SEQ ID NO: 1255 - DNA, 201 bp, Homo sapiens
aagacccagattctccagggcctgggcttcaacctcacacacacaccagagtctgccatccaccagggcttccagcacctggttcactcactgactgttcycagcaaagacctgaccttgaagatgggaagtgccctcttcgtcaagaaggagctgcagctgcaggcaaatttcttgggcaatgtcaagaggctgtatgaa

SEQ ID NO: 1256 - DNA, 201 bp, Homo sapiens
accagagtctgccatccaccagggcttccagcacctggttcactcactgactgttcccagcaaagacctgaccttgaagatgggaagtgccctcttcgtcmagaaggagctgcagctgcaggcaaatttcttgggcaatgtcaagaggctgtatgaagcagaagtcttttctacagatttctccaacccctccattgccca

SEQ ID NO: 1257 - DNA, 201 bp, Homo sapiens
ccggagttcagccaggacacgttcatggttcttgccaattacatcttcttcaaagccaagtggaagcaccctttcagtcgctaccagacccagaagcaggmaagtttctttgtggatgagaggacttctctccaggtccccatgatgcaccaaaaggaaatgcacagattcctctatgaccaggatttggcttgcaccgtc

SEQ ID NO: 1258 - DNA, 201 bp, Homo sapiens
gggatgattatccagcagctgtttgacagtagcagtatctacaaccctgaagtgcttgacatcacataggaaactgcattctcacctcctggagggtgtcygcaatgttgccagtgtttgcctgcagattggttacccaactgttgcatcagtacctcattctaccatcaatgggtacaagcaagtcctggctttgtctgt

SEQ ID NO: 1259 - DNA, 201 bp, Homo sapiens
cagcagctgtttgacagtagcagtatctacaaccctgaagtgcttgacatcacataggaaactgcattctcacctcctggagggtgtccgcaatgttgccrgtgtttgcctgcagattggttacccaactgttgcatcagtacctcattctaccatcaatgggtacaagcaagtcctggctttgtctgtggaaactgattg

SEQ ID NO: 1260 - DNA, 175 bp, Homo sapiens
ctttgtggctgctgcccctggggccactgccaccactgctgctcctgctgcagctccagccaaggctgaagccaagaagagttggaggagttggatgagamtatgggatttggcctatttgactaatcaccaaaaggcaaccaactcagccagctttatttgcaaaacaaagaaa

SEQ ID NO: 1261 - DNA, 201 bp, Homo sapiens
aatcattatctgaaatgtttcattgtagaagcagcaatgtgggctccaagtagatgcagcagatccacatgtccctctgagggaaagccatggtgccaatrggcaagaacaccatgatgtgcaaggccatccaagggcacctggaaaacaacccagctctggaaaaactgttgcctcatatccagggaaatgtgggctttg

SEQ ID NO: 1262 - DNA, 163 bp, Homo sapiens
ctgcccagggaatacagggcaacctggaagtccaactacttccttcagatcatccaatttttyaatcattatctgaaatgtttcattgtagaagcagcaatgtgggctccaagtagatgcagcagatccacatgtccctctgagggaaagccatggtgccaat

SEQ ID NO: 1263 - DNA, 201 bp, Homo sapiens
catgtccctctgagggaaagccatggtgccaatgggcaagaacaccatgatgtgcaaggccatccaagggcacctggaaaacaacccagctctggaaaaaytgttgcctcatatccagggaaatgtgggctttgcgttcaccaaggaagacctcactaagttcagggacatgctgctgaatagtaaggtgccagctgccac

SEQ ID NO: 1264 - DNA, 201 bp, Homo sapiens
aagtcactgtcccaggccagaacaccggtctggagcctaagaagacctcctttttccaggctttaagcatcaccactgaaatcctgagtgatgtgcagctratcaagactggtgacaaagtgggagccagtgaagccacactgctgaacatgctgaatgaacatctctcccttctcctttgggatgattatccagcagctg

SEQ ID NO: 1265 - DNA, 201 bp, Homo sapiens
caggagggagaaaccatcatgctgaggtgccacagctggaaggacaagcctctggtcaaggtcacattcttccagaatggaaaatcccagaaattctcccrtttggatcccaccttctccatcccacaagcaaaccacagtcacagtggtgattaccactgcacaggaaacataggctacacgctgttctcatccaagcct

SEQ ID NO: 1266 - DNA, 201 bp, Homo sapiens
gtggtgattaccactgcacaggaaacataggctacacgctgttctcatccaagcctgtgaccatcactgtccaagtgcccagcatgggcagctcttcaccratggggatcattgtggctgtggtcattgcgactgctgtagcagccattgttgctgctgtagtggccttgatctactgcaggaaaaagcggatttcagctc

SEQ ID NO: 1267 - DNA, 201 bp, Homo sapiens
tctgcagacagtcaagctgcagctcccccaaaggctgtgctgaaacttgagcccccgtggatcaacgtgctccaggaggactctgtgactctgacatgccrgggggctcgcagccctgagagcgactccattcagtggttccacaatgggaatctcattcccacccacacgcagcccagctacaggttcaaggccaacaac

SEQ ID NO: 1268 - DNA, 201 bp, Homo sapiens
ttctgcagacagtcaagctgcagctcccccaaaggctgtgctgaaacttgagcccccgtggatcaacgtgctccaggaggactctgtgactctgacatgcyagggggctcgcagccctgagagcgactccattcagtggttccacaatgggaatctcattcccacccacacgcagcccagctacaggttcaaggccaacaa

SEQ ID NO: 1269 - DNA, 201 bp, Homo sapiens; identical to SEQ ID NO: 1265

SEQ ID NO: 1270 - DNA, 201 bp, Homo sapiens; identical to SEQ ID NO: 1266

SEQ ID NO: 1271 - DNA, 201 bp, Homo sapiens
gcttctgcagacagtcaagctgctcccccaaaggctgtgctgaaacttgagcccccgtggatcaacgtgctccaggaggactctgtgactctgacatgccrgggggctcgcagccctgagagcgactccattcagtggttccacaatgggaatctcattcccacccacacgcagcccagctacaggttcaaggccaacaac

SEQ ID NO: 1272 - DNA, 201 bp, Homo sapiens
ggcttctgcagacagtcaagctgctcccccaaaggctgtgctgaaacttgagcccccgtggatcaacgtgctccaggaggactctgtgactctgacatgcyagggggctcgcagccctgagagcgactccattcagtggttccacaatgggaatctcattcccacccacacgcagcccagctacaggttcaaggccaacaa

SEQ ID NO: 1273 - DNA, 201 bp, Homo sapiens
cacctccaagcccctttcttcagcaaccagagcagcagcgccttctgtgagcaggtcttcatcaagcccgaggttttcctgtctctgggcatcgtcagtckgctggaaaacatcctggttatcctggccgtggtcaggaacggcaacctgcactccccgatgtacttctttctctgcagcctggcggtggccgacatgctg

SEQ ID NO: 1274 - DNA, 201 bp, Homo sapiens
tcagccaacactgcctaatggctcggagcacctccaagcccctttcttcagcaaccagagcagcagcgccttctgtgagcaggtcttcatcaagcccgagrttttcctgtctctgggcatcgtcagtctgctggaaaacatcctggttatcctggccgtggtcaggaacggcaacctgcactccccgatgtacttctttct

SEQ ID NO: 1275 - DNA, 201 bp, Homo sapiens
atccagcacatggacaacatcttcgactccatgatctgcatctccctggtggcctccatctgcaacctcctggccatcgccgtcgacaggtacgtcaccawcttttacgcgctccgctaccacagcatcatgaccgtgaggaaggccctcaccttgatcgtggccatctgggtctgctgcggcgtctgtggcgtggtgttc

SEQ ID NO: 1276 - DNA, 117 bp, Homo sapiens
atgagcatccaaaagamgtatctggagggagattttgtctttcctgtgagcagcagcagcttcctacggaccctgctggagccccagctcggatcagcccttctgacagcaatgaat

SEQ ID NO: 1277 - DNA, 201 bp, Homo sapiens
aatggtcattgtgtgcctcatcaccatgttcttcgccatgatgctcctcatgggcaccctctacgtgcacatgttcctctttgcgcggctgcacgtcaagmgcatagcagcactgccacctgccgacggggtggccccacagcaacactcatgcatgaagggggcagtcaccatcaccattctcctgggcgtgttcatctt

SEQ ID NO: 1278 - DNA, 201 bp, Homo sapiens
gttcatcgtctactcggagagcaaaatggtcattgtgtgcctcatcaccatgttcttcgccatgatgctcctcatgggcaccctctacgtgcacatgttcytctttgcgcggctgcacgtcaagcgcatagcagcactgccacctgccgacggggtggccccacagcaacactcatgcatgaagggggcagtcaccatcac

SEQ ID NO: 1279 - DNA, 201 bp, Homo sapiens
gcagatcagcttgaagaactatgacccccagaaggacaagcgcttctcgggcaccgtcaggcttaagtccactccctgtcccaagtgtgggtcctgggggracagcagcactgtggcgagaccaaggccacggatatccccccaagtggacactgaggtgccaaaaaaactcaagaataagaatctggtcaagaagctggc

SEQ ID NO: 1280 - DNA, 201 bp, Homo sapiens
aggcggtgcaggaagtcctgcacgggaaccagtgaaagtgccccaagttcctgaagatggtggagttgcagatcagcttgaagaactatgacccccagaargacaagcgcttctcgggcaccgtcaggcttaagtccactccctgtcccaagtgtgggtcctgggggaacagcagcactgtggcgagaccaaggccacgga

SEQ ID NO: 1281 - DNA, 162 bp, Homo sapiens
tgaagatgacagacgatgagcttgtgcataacattcacctggctgttaacttcttggtgtcactgctcgagaaaaaactggcagaatgtccgggccttatytatcaagagcaccacgggcaagccccagcgcctatattaaggcatatttgaaaagattcta

SEQ ID NO: 1282 - DNA, 201 bp, Homo sapiens
cactgtggcgagaccaaggccacggatatccccccaagtggacactgaggtgccaaaaaaactcaagaataagaatctggtcaagaagctggccaagaagsatgatgcatttttgccttcagagtctctgataaagcaaatcccacgaatcctcggcataggcctaacaaaggcagtaaagttcccttccctgctcacaca

SEQ ID NO: 1283 - DNA, 201 bp, Homo sapiens
tcatatgaacatgttatgtttggctgtggctgttggccacgtgaagatgacagacgatgagcttgtgcataacattcacctggctgttaacttcttggtgmcactgctcgagaaaaaactggcagaatgtccgggccttatatatcaagagcaccacgggcaagccccagcgcctatattaaggcatatttgaaaagattc

SEQ ID NO: 1284 - DNA, 201 bp, Homo sapiens
gcagaggacttctatgactgcagggtggagcactggggcttggaccagccgctcctcaagcactgggaggcccaagagccaatccagatgcctgagacaayggagactgtgctctgtgccctgggcctggtgctgggcctagtcggcatcatcgtgggcaccgtcctcatcataaagtctctgcgttctggccatgacccc

SEQ ID NO: 1285 - DNA, 201 bp, Homo sapiens
tgactgaattgctgacccttcaagctctgtccttatccattacctcaaagcagtcattccttagtaaagtttccaacaaatagaaattaatgacactttgrtagcactaatatggagattatcctttcattgagccttttatcctctgttctcctttgaagaacccctcactgtcaccttcccgagaataccctaagacca

SEQ ID NO: 1286 - DNA, 201 bp, Homo sapiens
tgaacagaagaggacttaggagagatctgaactccagctgccctacaaactccatctcagcttttcttctcacttcatgtgaaaactactccagtggctgrctgaattgctgacccttcaagctctgtccttatccattacctcaaagcagtcattccttagtaaagtttccaacaaatagaaattaatgacactttggta

SEQ ID NO: 1287 - DNA, 201 bp, Homo sapiens
gaccctgtgaaatactgtaaaggtgacaaaatatctgaacagaagaggacttaggagagatctgaactccagctgccctacaaactccatctcagcttttrttctcacttcatgtgaaaactactccagtggctgactgaattgctgacccttcaagctctgtccttatccattacctcaaagcagtcattccttagtaaa

SEQ ID NO: 1288 - DNA, 201 bp, Homo sapiens
gccttttcctttgaggctcagggcgggctggctaacattgctatattgaacaacaacttgaataccttgatccagcgttccaaccacactcaggccaccaycgatccccctgaggtgaccgtgtttcccaaggagcctgtggagctgggccagcccaacaccctcatctgccacattgacaagttcttcccaccagtgctc

SEQ ID NO: 1289 - DNA, 201 bp, Homo sapiens
catctggaggagtttggccaagccttttcctttgaggctcagggcgggctggctaacattgctatattgaacaacaacttgaataccttgatccagcgttycaaccacactcaggccaccaacgatccccctgaggtgaccgtgtttcccaaggagcctgtggagctgggccagcccaacaccctcatctgccacattgac

SEQ ID NO: 1290 - DNA, 201 bp, Homo sapiens
ggcatctggaggagtttggccaagccttttcctttgaggctcagggcgggctggctaacattgctatattgaacaacaacttgaataccttgatccagcgytccaaccacactcaggccaccaacgatccccctgaggtgaccgtgtttcccaaggagcctgtggagctgggccagcccaacaccctcatctgccacattg

SEQ ID NO: 1291 - DNA, 201 bp, Homo sapiens
acaagttccattacctgacctttgtgccctcagcagaggacttctatgactgcagggtggagcactggggcttggaccagccgctcctcaagcactgggaygcccaagagccaatccagatgcctgagacaacggagactgtgctctgtgccctgggcctggtgctgggcctagtcggcatcatcgtgggcaccgtcctca

SEQ ID NO: 1292 - DNA, 201 bp, Homo sapiens
tgactgcagggtggagcactggggcttggaccagccgctcctcaagcactgggaggcccaagagccaatccagatgcctgagacaacggagactgtgctcwgtgccctgggcctggtgctgggcctagtcggcatcatcgtgggcaccgtcctcatcataaagtctctgcgttctggccatgacccccgggcccaggggac

SEQ ID NO: 1293 - DNA, 201 bp, Homo sapiens
aggacttctatgactgcagggtggagcactggggcttggaccagccgctcctcaagcactgggaggcccaagagccaatccagatgcctgagacaacggaractgtgctctgtgccctgggcctggtgctgggcctagtcggcatcatcgtgggcaccgtcctcatcataaagtctctgcgttctggccatgacccccggg

SEQ ID NO: 1294 - DNA, 94 bp, Homo sapiens
gccttttatcctctgttctcctttgaagaacccctcactgtcaccttcccgagaataccctaagaccaataaatacttcagtatttcagagcgy

SEQ ID NO: 1295 - DNA, 93 bp, Homo sapiens
ccttttatcctctgttctcctttgaagaacccctcactgtcaccttcccgagaataccctaagaccaataaatacttcagtatttcagagcgr

SEQ ID NO: 1296 - DNA, 12 bp, Homo sapiens
atttcagagcgr

SEQ ID NO: 1297 - DNA, 201 bp, Homo sapiens
actccatctcagcttttcttctcacttcatgtgaaaactactccagtggctgactgaattgctgacccttcaagctctgtccttatccattacctcaaagyagtcattccttagtaaagtttccaacaaatagaaattaatgacactttggtagcactaatatggagattatcctttcattgagccttttatcctctgttc

SEQ ID NO: 1298 - DNA, 201 bp, Homo sapiens
atcgtgggcaccgtcctcatcataaagtctctgcgttctggccatgacccccgggcccaggggaccctgtgaaatactgtaaaggtgacaaaatatctgamcagaagaggacttaggagagatctgaactccagctgccctacaaactccatctcagcttttcttctcacttcatgtgaaaactactccagtggctgactg

SEQ ID NO: 1299 - DNA, 201 bp, Homo sapiens
ttgagagccctctccttggctttcctgctgagtctccgaggagctggggccatcaaggcggaccatgtgtcaacttatgccgcgtttgtacagacgcatawaccaacaggggagtttatgtttgaatttgatgaagatgagatgttctatgtggatctggacaagaaggagaccgtctggcatctggaggagtttggccaa

SEQ ID NO: 1300 - DNA, 201 bp, Homo sapiens
tgctgggcctagtcggcatcatcgtgggcaccgtcctcatcataaagtctctgcgttctggccatgacccccgggcccaggggaccctgtgaaatactgtyaaggtgacaaaatatctgaacagaagaggacttaggagagatctgaactccagctgccctacaaactccatctcagcttttcttctcacttcatgtgaaa

SEQ ID NO: 1301 - DNA, 201 bp, Homo sapiens
cctgaggtgaccgtgtttcccaaggagcctgtggagctgggccagcccaacaccctcatctgccacattgacaagttcttcccaccagtgctcaacgtcasgtggctgtgcaacggggagctggtcactgagggtgtcgctgagagcctcttcctgcccagaacagattacagcttccacaagttccattacctgaccttt

SEQ ID NO: 1302 - DNA, 201 bp, Homo sapiens
ggggaccctgtgaaatactgtaaaggtgacaaaatatctgaacagaagaggacttaggagagatctgaactccagctgccctacaaactccatctcagctyttcttctcacttcatgtgaaaactactccagtggctgactgaattgctgacccttcaagctctgtccttatccattacctcaaagcagtcattccttagt

SEQ ID NO: 1303 - DNA, 201 bp, Homo sapiens
tcatcataaagtctctgcgttctggccatgacccccgggcccaggggaccctgtgaaatactgtaaaggtgacaaaatatctgaacagaagaggacttagkagagatctgaactccagctgccctacaaactccatctcagcttttcttctcacttcatgtgaaaactactccagtggctgactgaattgctgacccttca

SEQ ID NO: 1304 - DNA, 201 bp, Homo sapiens
caccgtcctcatcataaagtctctgcgttctggccatgacccccgggcccaggggaccctgtgaaatactgtaaaggtgacaaaatatctgaacagaagargacttaggagagatctgaactccagctgccctacaaactccatctcagcttttcttctcacttcatgtgaaaactactccagtggctgactgaattgctg

SEQ ID NO: 1305 - DNA, 201 bp, Homo sapiens
tctccaggaagcgctgtgtcccattaaacgcgtagcattcctgccgtccctggaaaaggtgaatcccagccatgctgattcctctccacccatttccagtyctagaggcccacagtttcagtctcatctgcctccactcggcctcagttcctcatcactgttcctgtgctcacagtcatcaattatagaccccacaacatg

SEQ ID NO: 1306 - DNA, 201 bp, Homo sapiens
  misc_feature (1)...(201): n = A,T,C or G, or insertion/deletion polymorphism (see Tables 1-2)
tatgtttgaatttgatgaagatgagatgttctatgtggatctggacaagaaggagaccgtctggcatctggaggagtttggccaagccttttcctttgagnctcagggcgggctggctaacattgctatattgaacaacaacttgaataccttgatccagcgttccaaccacactcaggccaccaacgatccccctgaggt

SEQ ID NO: 1307 - DNA, 201 bp, Homo sapiens
agacagaatgttccatatcagagctgtgatcttgagagccctctccttggctttcctgctgagtctccgaggagctggggccatcaaggcggaccatgtgycaacttatgccgcgtttgtacagacgcatagaccaacaggggagtttatgtttgaatttgatgaagatgagatgttctatgtggatctggacaagaagga

SEQ ID NO: 1308 - DNA, 201 bp, Homo sapiens
cgccctgaagacagaatgttccatatcagagctgtgatcttgagagccctctccttggctttcctgctgagtctccgaggagctggggccatcaaggcggyccatgtgtcaacttatgccgcgtttgtacagacgcatagaccaacaggggagtttatgtttgaatttgatgaagatgagatgttctatgtggatctggac

SEQ ID NO: 1309 - DNA, 201 bp, Homo sapiens
agtcatcaattatagaccccacaacatgcgccctgaagacagaatgttccatatcagagctgtgatcttgagagccctctccttggctttcctgctgagtytccgaggagctggggccatcaaggcggaccatgtgtcaacttatgccgcgtttgtacagacgcatagaccaacaggggagtttatgtttgaatttgatga

SEQ ID NO: 1310 - DNA, 201 bp, Homo sapiens
gatccccctgaggtgaccgtgtttcccaaggagcctgtggagctgggccagcccaacaccctcatctgccacattgacaagttcttcccaccagtgctcarcgtcacgtggctgtgcaacggggagctggtcactgagggtgtcgctgagagcctcttcctgcccagaacagattacagcttccacaagttccattacctg

SEQ ID NO: 1311 - DNA, 201 bp, Homo sapiens
cggcatcatcgtgggcaccgtcctcatcataaagtctctgcgttctggccatgacccccgggcccaggggaccctgtgaaatactgtaaaggtgacaaaasatctgaacagaagaggacttaggagagatctgaactccagctgccctacaaactccatctcagcttttcttctcacttcatgtgaaaactactccagtgg

SEQ ID NO: 1312 - DNA, 201 bp, Homo sapiens
aaagtctctgcgttctggccatgacccccgggcccaggggaccctgtgaaatactgtaaaggtgacaaaatatctgaacagaagaggacttaggagagatrtgaactccagctgccctacaaactccatctcagcttttcttctcacttcatgtgaaaactactccagtggctgactgaattgctgacccttcaagctctg

SEQ ID NO: 1313 - DNA, 201 bp, Homo sapiens
gcgttctggccatgacccccgggcccaggggaccctgtgaaatactgtaaaggtgacaaaatatctgaacagaagaggacttaggagagatctgaactcchgctgccctacaaactccatctcagcttttcttctcacttcatgtgaaaactactccagtggctgactgaattgctgacccttcaagctctgtccttatcc

SEQ ID NO: 1314 - DNA, 201 bp, Homo sapiens
tcaattatagaccccacaacatgcgccctgaagacagaatgttccatatcagagctgtgatcttgagagccctctccttggctttcctgctgagtctccgmggagctggggccatcaaggcggaccatgtgtcaacttatgccgcgtttgtacagacgcatagaccaacaggggagtttatgtttgaatttgatgaagatg

SEQ ID NO: 1315 - DNA, 201 bp, Homo sapiens
ttcttcccaccagtgctcaacgtcacgtggctgtgcaacggggagctggtcactgagggtgtcgctgagagcctcttcctgcccagaacagattacagctsccacaagttccattacctgacctttgtgccctcagcagaggacttctatgactgcagggtggagcactggggcttggaccagccgctcctcaagcactgg

SEQ ID NO: 1316 - DNA, 201 bp, Homo sapiens
tggatctggacaagaaggagaccgtctggcatctggaggagtttggccaagccttttcctttgaggctcagggcgggctggctaacattgctatattgaayaacaacttgaataccttgatccagcgttccaaccacactcaggccaccaacgatccccctgaggtgaccgtgtttcccaaggagcctgtggagctgggcc

SEQ ID NO: 1317 - DNA, 201 bp, Homo sapiens
agttcttcccaccagtgctcaacgtcacgtggctgtgcaacggggagctggtcactgagggtgtcgctgagagcctcttcctgcccagaacagattacagmttccacaagttccattacctgacctttgtgccctcagcagaggacttctatgactgcagggtggagcactggggcttggaccagccgctcctcaagcact

SEQ ID NO: 1318 - DNA, 201 bp, Homo sapiens
caagttcttcccaccagtgctcaacgtcacgtggctgtgcaacggggagctggtcactgagggtgtcgctgagagcctcttcctgcccagaacagattacwgcttccacaagttccattacctgacctttgtgccctcagcagaggacttctatgactgcagggtggagcactggggcttggaccagccgctcctcaagca

SEQ ID NO: 1319 - DNA, 201 bp, Homo sapiens
  misc_feature (1)...(201): n = A,T,C or G, or insertion/deletion polymorphism (see Tables 1-2)
attgacaagttcttcccaccagtgctcaacgtcacgtggctgtgcaacggggagctggtcactgagggtgtcgctgagagcctcttcctgcccagaacagnttacagcttccacaagttccattacctgacctttgtgccctcagcagaggacttctatgactgcagggtggagcactggggcttggaccagccgctcctc

SEQ ID NO: 1320 - DNA, 201 bp, Homo sapiens
gtagatgtatctctccaggaagcgctgtgtcccattaaacgcgtagcattcctgccgtccctggaaaaggtgaatcccagccatgctgattcctctccacwcatttccagtgctagaggcccacagtttcagtctcatctgcctccactcggcctcagttcctcatcactgttcctgtgctcacagtcatcaattatagac

SEQ ID NO: 1321 - DNA, 201 bp, Homo sapiens
ggaagcgctgtgtcccattaaacgcgtagcattcctgccgtccctggaaaaggtgaatcccagccatgctgattcctctccacccatttccagtgctagasgcccacagtttcagtctcatctgcctccactcggcctcagttcctcatcactgttcctgtgctcacagtcatcaattatagaccccacaacatgcgccct

SEQ ID NO: 1322 - DNA, 201 bp, Homo sapiens
gtttgtacagacgcatagaccaacaggggagtttatgtttgaatttgatgaagatgagatgttctatgtggatctggacaagaaggagaccgtctggcatstggaggagtttggccaagccttttcctttgaggctcagggcgggctggctaacattgctatattgaacaacaacttgaataccttgatccagcgttccaa

SEQ ID NO: 1323 - DNA, 201 bp, Homo sapiens
ggccatgacccccgggcccaggggaccctgtgaaatactgtaaaggtgacaaaatatctgaacagaagaggacttaggagagatctgaactccagctgccmtacaaactccatctcagcttttcttctcacttcatgtgaaaactactccagtggctgactgaattgctgacccttcaagctctgtccttatccattacct

SEQ ID NO: 1324 - DNA, 201 bp, Homo sapiens
gttccaaccacactcaggccaccaacgatccccctgaggtgaccgtgtttcccaaggagcctgtggagctgggccagcccaacaccctcatctgccacatygacaagttcttcccaccagtgctcaacgtcacgtggctgtgcaacggggagctggtcactgagggtgtcgctgagagcctcttcctgcccagaacagatt

SEQ ID NO: 1325 - DNA, 201 bp, Homo sapiens
agccttttcctttgaggctcagggcgggctggctaacattgctatattgaacaacaacttgaataccttgatccagcgttccaaccacactcaggccaccyacgatccccctgaggtgaccgtgtttcccaaggagcctgtggagctgggccagcccaacaccctcatctgccacattgacaagttcttcccaccagtgct

SEQ ID NO: 1326 - DNA, 201 bp, Homo sapiens
ggccgccccagctccgtcaccgcccggaactcccccacgtcgctgtcgaagcgcgcgaactcctcccggttgtagatgtatctctccaggaagcgctgtgkcccattaaacgcgtagcattcctgccgtccctggaaaaggtgaatcccagccatgctgattcctctccacccatttccagtgctagaggcccacagtttc

SEQ ID NO: 1327 - DNA, 201 bp, Homo sapiens
cgctgtcgaagcgcgcgaactcctcccggttgtagatgtatctctccaggaagcgctgtgtcccattaaacgcgtagcattcctgccgtccctggaaaagytgaatcccagccatgctgattcctctccacccatttccagtgctagaggcccacagtttcagtctcatctgcctccactcggcctcagttcctcatcact

SEQ ID NO: 1328 - DNA, 201 bp, Homo sapiens
aggccgccccagctccgtcaccgcccggaactcccccacgtcgctgtcgaagcgcgcgaactcctcccggttgtagatgtatctctccaggaagcgctgtwtcccattaaacgcgtagcattcctgccgtccctggaaaaggtgaatcccagccatgctgattcctctccacccatttccagtgctagaggcccacagttt

SEQ ID NO: 1329 - DNA, 201 bp, Homo sapiens
cacgtcgctgtcgaagcgcgcgaactcctcccggttgtagatgtatctctccaggaagcgctgtgtcccattaaacgcgtagcattcctgccgtccctggraaaggtgaatcccagccatgctgattcctctccacccatttccagtgctagaggcccacagtttcagtctcatctgcctccactcggcctcagttcctca

SEQ ID NO: 1330 - DNA, 196 bp, Homo sapiens
tccaggatgtccttctggctgttccagtactccgcagcaggccgccccagctccgtcaccgcccggaactcccccacgtcgctgtcgaagcgcgcraactcctcccggttgtagatgtatctctccaggaagcgctgtgtcccattaaacgcgtagcattcctgccgtccctggaaaaggtgaatcccagccatgc

SEQ ID NO: 1331 - DNA, 68 bp, Homo sapiens
agaacccctcactgtcaccttcccgagaataccctaagaccaataaatacttcagtatttcagagcgy

SEQ ID NO: 1332 - DNA, 103 bp, Homo sapiens
tcraggatgtccttctggctgttccagtactccgcagcaggccgccccagctccgtcaccgcccggaactcccccacgtcgctgtcgaagcgcgcgaactcct

SEQ ID NO: 1333 - DNA, 201 bp, Homo sapiens
tatattgaacaacaacttgaataccttgatccagcgttccaaccacactcaggccaccaacgatccccctgaggtgaccgtgtttcccaaggagcctgtgkagctgggccagcccaacaccctcatctgccacattgacaagttcttcccaccagtgctcaacgtcacgtggctgtgcaacggggagctggtcactgaggg

SEQ ID NO: 1334 - DNA, 98 bp, Homo sapiens
ttgagccttttatcctctgttctcctttgaagaacccctcactgtcaccttcccgagaataccctaagaccaataaatacttcagtatttcagagcgr

SEQ ID NO: 1335 - DNA, 101 bp, Homo sapiens
sccaggatgtccttctggctgttccagtactccgcagcaggccgccccagctccgtcaccgcccggaactcccccacgtcgctgtcgaagcgcgcgaactc

SEQ ID NO: 1336 - DNA, 201 bp, Homo sapiens
ccccacgtcgctgtcgaagcgcgcgaactcctcccggttgtagatgtatctctccaggaagcgctgtgtcccattaaacgcgtagcattcctgccgtcccyggaaaaggtgaatcccagccatgctgattcctctccacccatttccagtgctagaggcccacagtttcagtctcatctgcctccactcggcctcagttcc

SEQ ID NO: 1337 - DNA, 201 bp, Homo sapiens
aactcccccacgtcgctgtcgaagcgcgcgaactcctcccggttgtagatgtatctctccaggaagcgctgtgtcccattaaacgcgtagcattcctgccytccctggaaaaggtgaatcccagccatgctgattcctctccacccatttccagtgctagaggcccacagtttcagtctcatctgcctccactcggcctca

SEQ ID NO: 1338 - DNA, 201 bp, Homo sapiens
ccgtcaccgcccggaactcccccacgtcgctgtcgaagcgcgcgaactcctcccggttgtagatgtatctctccaggaagcgctgtgtcccattaaacgcytagcattcctgccgtccctggaaaaggtgaatcccagccatgctgattcctctccacccatttccagtgctagaggcccacagtttcagtctcatctgcc

SEQ ID NO: 1339 - DNA, 201 bp, Homo sapiens
  misc_feature (1)...(201): n = A,T,C or G, or insertion/deletion polymorphism (see Tables 1-2)
cattgacaagttcttcccaccagtgctcaacgtcacgtggctgtgcaacggggagctggtcactgagggtgtcgctgagagcctcttcctgcccagaacanattacagcttccacaagttccattacctgacctttgtgccctcagcagaggacttctatgactgcagggtggagcactggggcttggaccagccgctcct

SEQ ID NO: 1340 - DNA, 141 bp, Homo sapiens
attaatgacactttggtagcactaatatggagattatcctttcattgagccttttatcctctgttctcctttgaagaacccctcactgtcaccttcccgaraataccctaagaccaataaatacttcagtatttcagagcg

SEQ ID NO: 1341 - DNA, 201 bp, Homo sapiens
cggggagctggtcactgagggtgtcgctgagagcctcttcctgcccagaacagattacagcttccacaagttccattacctgacctttgtgccctcagcasaggacttctatgactgcagggtggagcactggggcttggaccagccgctcctcaagcactgggaggcccaagagccaatccagatgcctgagacaacgga

SEQ ID NO: 1342 - DNA, 201 bp, Homo sapiens
cgatccccctgaggtgaccgtgtttcccaaggagcctgtggagctgggccagcccaacaccctcatctgccacattgacaagttcttcccaccagtgctcwacgtcacgtggctgtgcaacggggagctggtcactgagggtgtcgctgagagcctcttcctgcccagaacagattacagcttccacaagttccattacct

SEQ ID NO: 1343 - DNA, 201 bp, Homo sapiens
caacgatccccctgaggtgaccgtgtttcccaaggagcctgtggagctgggccagcccaacaccctcatctgccacattgacaagttcttcccaccagtgrtcaacgtcacgtggctgtgcaacggggagctggtcactgagggtgtcgctgagagcctcttcctgcccagaacagattacagcttccacaagttccatta

SEQ ID NO: 1344 - DNA, 201 bp, Homo sapiens
tgctatattgaacaacaacttgaataccttgatccagcgttccaaccacactcaggccaccaacgatccccctgaggtgaccgtgtttcccaaggagcctktggagctgggccagcccaacaccctcatctgccacattgacaagttcttcccaccagtgctcaacgtcacgtggctgtgcaacggggagctggtcactga

SEQ ID NO: 1345 - DNA, 201 bp, Homo sapiens
acattgctatattgaacaacaacttgaataccttgatccagcgttccaaccacactcaggccaccaacgatccccctgaggtgaccgtgtttcccaaggascctgtggagctgggccagcccaacaccctcatctgccacattgacaagttcttcccaccagtgctcaacgtcacgtggctgtgcaacggggagctggtca

SEQ ID NO: 1346 - DNA, 201 bp, Homo sapiens
ttccacaagttccattacctgacctttgtgccctcagcagaggacttctatgactgcagggtggagcactggggcttggaccagccgctcctcaagcactrggaggcccaagagccaatccagatgcctgagacaacggagactgtgctctgtgccctgggcctggtgctgggcctagtcggcatcatcgtgggcaccgtc

SEQ ID NO: 1347 - DNA, 201 bp, Homo sapiens
gaggctcagggcgggctggctaacattgctatattgaacaacaacttgaataccttgatccagcgttccaaccacactcaggccaccaacgatccccctgkggtgaccgtgtttcccaaggagcctgtggagctgggccagcccaacaccctcatctgccacattgacaagttcttcccaccagtgctcaacgtcacgtgg

SEQ ID NO: 1348 - DNA, 119 bp, Homo sapiens
taatatggagattatcctttcattgagccttttatcctctgttctcctttgaagaacccctcactgtcaccttcccgagaataccctaagaccaataaatycttcagtatttcagagcg

SEQ ID NO: 1349 - DNA, 113 bp, Homo sapiens
ggagattatcctttcattgagccttttatcctctgttctcctttgaagaacccctcactgtcaccttcccgagaataccctaagaccaataaatacttcartatttcagagcg

SEQ ID NO: 1350 - DNA, 101 bp, Homo sapiens
ttcattgagccttttatcctctgttctcctttgaagaacccctcactgtcaccttcccgagaataccctaagaccaataaatacttcagtatttcagagcy

SEQ ID NO: 1351 - DNA, 201 bp, Homo sapiens
ccaacaggggagtttatgtttgaatttgatgaagatgagatgttctatgtggatctggacaagaaggagaccgtctggcatctggaggagtttggccaagycttttcctttgaggctcagggcgggctggctaacattgctatattgaacaacaacttgaataccttgatccagcgttccaaccacactcaggccaccaac

SEQ ID NO: 1352 - DNA, 201 bp, Homo sapiens
gccatgacccccgggcccaggggaccctgtgaaatactgtaaaggtgacaaaatatctgaacagaagaggacttaggagagatctgaactccagctgcccwacaaactccatctcagcttttcttctcacttcatgtgaaaactactccagtggctgactgaattgctgacccttcaagctctgtccttatccattacctc

SEQ ID NO: 1353 - DNA, 201 bp, Homo sapiens
tttgatgaagatgagatgttctatgtggatctggacaagaaggagaccgtctggcatctggaggagtttggccaagccttttcctttgaggctcagggcgygctggctaacattgctatattgaacaacaacttgaataccttgatccagcgttccaaccacactcaggccaccaacgatccccctgaggtgaccgtgttt

SEQ ID NO: 1354 - DNA, 201 bp, Homo sapiens
aacagaagaggacttaggagagatctgaactccagctgccctacaaactccatctcagcttttcttctcacttcatgtgaaaactactccagtggctgacrgaattgctgacccttcaagctctgtccttatccattacctcaaagcagtcattccttagtaaagtttccaacaaatagaaattaatgacactttggtagc

SEQ ID NO: 1355 - DNA, 201 bp, Homo sapiens
ctggacaagaaggagaccgtctggcatctggaggagtttggccaagccttttcctttgaggctcagggcgggctggctaacattgctatattgaacaacaycttgaataccttgatccagcgttccaaccacactcaggccaccaacgatccccctgaggtgaccgtgtttcccaaggagcctgtggagctgggccagccc

SEQ ID NO: 1356 - DNA, 201 bp, Homo sapiens
gtgctgggcctagtcggcatcatcgtgggcaccgtcctcatcataaagtctctgcgttctggccatgacccccgggcccaggggaccctgtgaaatactgraaaggtgacaaaatatctgaacagaagaggacttaggagagatctgaactccagctgccctacaaactccatctcagcttttcttctcacttcatgtgaa

SEQ ID NO: 1357 - DNA, 201 bp, Homo sapiens
agctccgtcaccgcccggaactcccccacgtcgctgtcgaagcgcgcgaactcctcccggttgtagatgtatctctccaggaagcgctgtgtcccattaarcgcgtagcattcctgccgtccctggaaaaggtgaatcccagccatgctgattcctctccacccatttccagtgctagaggcccacagtttcagtctcatc

SEQ ID NO: 1358 - DNA, 201 bp, Homo sapiens
cgccccagctccgtcaccgcccggaactcccccacgtcgctgtcgaagcgcgcgaactcctcccggttgtagatgtatctctccaggaagcgctgtgtccmattaaacgcgtagcattcctgccgtccctggaaaaggtgaatcccagccatgctgattcctctccacccatttccagtgctagaggcccacagtttcagt

SEQ ID NO: 1359 - DNA, 201 bp, Homo sapiens
gaattgctgacccttcaagctctgtccttatccattacctcaaagcagtcattccttagtaaagtttccaacaaatagaaattaatgacactttggtagcyctaatatggagattatcctttcattgagccttttatcctctgttctcctttgaagaacccctcactgtcaccttcccgagaataccctaagaccaataaa

SEQ ID NO: 1360 - DNA, 201 bp, Homo sapiens
cagcttccacaagttccattacctgacctttgtgccctcagcagaggacttctatgactgcagggtggagcactggggcttggaccagccgctcctcaagyactgggaggcccaagagccaatccagatgcctgagacaacggagactgtgctctgtgccctgggcctggtgctgggcctagtcggcatcatcgtgggcac

SEQ ID NO: 1361 - DNA, 201 bp, Homo sapiens
aggagtttggccaagccttttcctttgaggctcagggcgggctggctaacattgctatattgaacaacaacttgaataccttgatccagcgttccaaccakactcaggccaccaacgatccccctgaggtgaccgtgtttcccaaggagcctgtggagctgggccagcccaacaccctcatctgccacattgacaagttct

SEQ ID NO: 1362 - DNA, 201 bp, Homo sapiens
cagcaggccgccccagctccgtcaccgcccggaactcccccacgtcgctgtcgaagcgcgcgaactcctcccggttgtagatgtatctctccaggaagcgytgtgtcccattaaacgcgtagcattcctgccgtccctggaaaagcaccttccagcgtcctctttacccagcaacagagaatgtcagctctatgatttctc

SEQ ID NO: 1363 - DNA, 201 bp, Homo sapiens
acatgcgccctgaagacagaatgttccatatcagagctgtgatcttgagagccctctccttggctttcctgctgagtctccgaggagctggggccatcaargcggaccatgtgtcaacttatgccgcgtttgtacagacgcatagaccaacaggggagtttatgtttgaatttgatgaagatgagatgttctatgtggatc

SEQ ID NO: 1364 - DNA, 201 bp, Homo sapiens
gtgctagaggcccacagtttcagtctcatctgcctccactcggcctcagttcctcatcactgttcctgtgctcacagtcatcaattatagaccccacaacrtgcgccctgaagacagaatgttccatatcagagctgtgatcttgagagccctctccttggctttcctgctgagtctccgaggagctggggccatcaaggc

SEQ ID NO: 1365 - DNA, 201 bp, Homo sapiens
tcccagccatgctgattcctctccacccatttccagtgctagaggcccacagtttcagtctcatctgcctccactcggcctcagttcctcatcactgttcrtgtgctcacagtcatcaattatagaccccacaacatgcgccctgaagacagaatgttccatatcagagctgtgatcttgagagccctctccttggctttc

SEQ ID NO: 1366 - DNA, 201 bp, Homo sapiens
cgctcctcaagcactgggaggcccaagagccaatccagatgcctgagacaacggagactgtgctctgtgccctgggcctggtgctgggcctagtcggcathatcgtgggcaccgtcctcatcataaagtctctgcgttctggccatgacccccgggcccaggggaccctgtgaaatactgtaaaggtgacaaaatatctga

SEQ ID NO: 1367 - DNA, 201 bp, Homo sapiens
tgccctgggcctggtgctgggcctagtcggcatcatcgtgggcaccgtcctcatcataaagtctctgcgttctggccatgacccccgggcccaggggaccytgtgaaatactgtaaaggtgacaaaatatctgaacagaagaggacttaggagagatctgaactccagctgccctacaaactccatctcagcttttcttct

SEQ ID NO: 1368 - DNA, 201 bp, Homo sapiens
caggatgtccttctggctgttccagtactccgcagcaggccgccccagctccgtcaccgcccggaactcccccacgtcgctgtcgaagcgcgcgaactccycccggttgtagatgtatctctccaggaagcgctgtgtcccattaaacgcgtagcattcctgccgtccctggaaaagcaccttccagcgtcctctttaccc

SEQ ID NO: 1369 - DNA, 201 bp, Homo sapiens
agctccgtcaccgcccggaactcccccacgtcgctgtcgaagcgcgcgaactcctcccggttgtagatgtatctctccaggaagcgctgtgtcccattaawcgcgtagcattcctgccgtccctggaaaagcaccttccagcgtcctctttacccagcaacagagaatgtcagctctatgatttctctgataggtgaatcc

SEQ ID NO: 1370 - DNA, 201 bp, Homo sapiens
aggccgccccagctccgtcaccgcccggaactcccccacgtcgctgtcgaagcgcgcgaactcctcccggttgtagatgtatctctccaggaagcgctgtrtcccattaaacgcgtagcattcctgccgtccctggaaaagcaccttccagcgtcctctttacccagcaacagagaatgtcagctctatgatttctctgat

SEQ ID NO: 1371 - DNA, 201 bp, Homo sapiens
acagacgcatagaccaacaggggagtttatgtttgaatttgatgaagatgagatgttctatgtggatctggacaagaaggagaccgtctggcatctggagyagtttggccaagccttttcctttgaggctcagggcgggctggctaacattgctatattgaacaacaacttgaataccttgatccagcgttccaaccacac

SEQ ID NO: 1372 - DNA, 201 bp, Homo sapiens
ctatgatttctctgataggtgaatcccagccatgctgattcctctccacccatttccagtgctagaggcccacagtttcagtctcatctgcctccactcgmcctcagttcctcatcactgttcctgtgctcacagtcatcaattatagaccccacaacatgcgccctgaagacagaatgttccatatcagagctgtgatct

SEQ ID NO: 1373 - DNA, 201 bp, Homo sapiens
cagacgcatagaccaacaggggagtttatgtttgaatttgatgaagatgagatgttctatgtggatctggacaagaaggagaccgtctggcatctggaggrgtttggccaagccttttcctttgaggctcagggcgggctggctaacattgctatattgaacaacaacttgaataccttgatccagcgttccaaccacact

SEQ ID NO: 1374 - DNA, 201 bp, Homo sapiens
accgtctggcatctggaggagtttggccaagccttttcctttgaggctcagggcgggctggctaacattgctatattgaacaacaacttgaataccttgarccagcgttccaaccacactcaggccaccaacgatccccctgaggtgaccgtgtttcccaaggagcctgtggagctgggccagcccaacaccctcatctgc

SEQ ID NO: 1375 - DNA, 201 bp, Homo sapiens
gttcctcatcactgttcctgtgctcacagtcatcaattatagaccccacaacatgcgccctgaagacagaatgttccatatcagagctgtgatcttgagayccctctccttggctttcctgctgagtctccgaggagctggggccatcaaggcggaccatgtgtcaacttatgccgcgtttgtacagacgcatagaccaac

SEQ ID NO: 1376 - DNA, 201 bp, Homo sapiens
tccagcgtcctctttacccagcaacagagaatgtcagctctatgatttctctgataggtgaatcccagccatgctgattcctctccacccatttccagtgmtagaggcccacagtttcagtctcatctgcctccactcggcctcagttcctcatcactgttcctgtgctcacagtcatcaattatagaccccacaacatgc

SEQ ID NO: 1377 - DNA, 201 bp, Homo sapiens
ttatgtttgaatttgatgaagatgagatgttctatgtggatctggacaagaaggagaccgtctggcatctggaggagtttggccaagccttttcctttgaygctcagggcgggctggctaacattgctatattgaacaacaacttgaataccttgatccagcgttccaaccacactcaggccaccaacgatccccctgagg

SEQ ID NO: 1378 - DNA, 201 bp, Homo sapiens
ccgtccctggaaaagcaccttccagcgtcctctttacccagcaacagagaatgtcagctctatgatttctctgataggtgaatcccagccatgctgattcytctccacccatttccagtgctagaggcccacagtttcagtctcatctgcctccactcggcctcagttcctcatcactgttcctgtgctcacagtcatcaa

SEQ ID NO: 1379 - DNA, 201 bp, Homo sapiens
cctcagcagaggacttctatgactgcagggtggagcactggggcttggaccagccgctcctcaagcactgggaggcccaagagccaatccagatgcctgayacaacggagactgtgctctgtgccctgggcctggtgctgggcctagtcggcatcatcgtgggcaccgtcctcatcataaagtctctgcgttctggccatg

SEQ ID NO: 1380 - DNA, 201 bp, Homo sapiens
ttgtacagacgcatagaccaacaggggagtttatgtttgaatttgatgaagatgagatgttctatgtggatctggacaagaaggagaccgtctggcatctrgaggagtttggccaagccttttcctttgaggctcagggcgggctggctaacattgctatattgaacaacaacttgaataccttgatccagcgttccaacc

SEQ ID NO: 1381 - DNA, 201 bp, Homo sapiens
gaccagccgctcctcaagcactgggaggcccaagagccaatccagatgcctgagacaacggagactgtgctctgtgccctgggcctggtgctgggcctagrcggcatcatcgtgggcaccgtcctcatcataaagtctctgcgttctggccatgacccccgggcccaggggaccctgtgaaatactgtaaaggtgacaaaa

SEQ ID NO: 1382 - DNA, 201 bp, Homo sapiens
tcatcataaagtctctgcgttctggccatgacccccgggcccaggggaccctgtgaaatactgtaaaggtgacaaaatatctgaacagaagaggacttagragagatctgaactccagctgccctacaaactccatctcagcttttcttctcacttcatgtgaaaactactccagtggctgactgaattgctgacccttca

SEQ ID NO: 1383 - DNA, 201 bp, Homo sapiens
acagcttccacaagttccattacctgacctttgtgccctcagcagaggacttctatgactgcagggtggagcactggggcttggaccagccgctcctcaarcactgggaggcccaagagccaatccagatgcctgagacaacggagactgtgctctgtgccctgggcctggtgctgggcctagtcggcatcatcgtgggca

SEQ ID NO: 1384 - DNA, 201 bp, Homo sapiens
tctggccatgacccccgggcccaggggaccctgtgaaatactgtaaaggtgacaaaatatctgaacagaagaggacttaggagagatctgaactccagctyccctacaaactccatctcagcttttcttctcacttcatgtgaaaactactccagtggctgactgaattgctgacccttcaagctctgtccttatccatta

SEQ ID NO: 1385 - DNA, 201 bp, Homo sapiens
gacccccgggcccaggggaccctgtgaaatactgtaaaggtgacaaaatatctgaacagaagaggacttaggagagatctgaactccagctgccctacaayctccatctcagcttttcttctcacttcatgtgaaaactactccagtggctgactgaattgctgacccttcaagctctgtccttatccattacctcaaagc

SEQ ID NO: 1386 - DNA, 201 bp, Homo sapiens
gaatcccagccatgctgattcctctccacccatttccagtgctagaggcccacagtttcagtctcatctgcctccactcggcctcagttcctcatcactgytcctgtgctcacagtcatcaattatagaccccacaacatgcgccctgaagacagaatgttccatatcagagctgtgatcttgagagccctctccttggct

SEQ ID NO: 1387 - DNA, 201 bp, Homo sapiens
gactgtgctctgtgccctgggcctggtgctgggcctagtcggcatcatcgtgggcaccgtcctcatcataaagtctctgcgttctggccatgacccccggrcccaggggaccctgtgaaatactgtaaaggtgacaaaatatctgaacagaagaggacttaggagagatctgaactccagctgccctacaaactccatctc

SEQ ID NO: 1388 - DNA, 201 bp, Homo sapiens
cccagcaacagagaatgtcagctctatgatttctctgataggtgaatcccagccatgctgattcctctccacccatttccagtgctagaggcccacagttkcagtctcatctgcctccactcggcctcagttcctcatcactgttcctgtgctcacagtcatcaattatagaccccacaacatgcgccctgaagacagaat

SEQ ID NO: 1389 - DNA, 201 bp, Homo sapiens
tctgtgccctgggcctggtgctgggcctagtcggcatcatcgtgggcaccgtcctcatcataaagtctctgcgttctggccatgacccccgggcccagggraccctgtgaaatactgtaaaggtgacaaaatatctgaacagaagaggacttaggagagatctgaactccagctgccctacaaactccatctcagcttttc

SEQ ID NO: 1390 - DNA, 201 bp, Homo sapiens
cctctttacccagcaacagagaatgtcagctctatgatttctctgataggtgaatcccagccatgctgattcctctccacccatttccagtgctagaggcrcacagtttcagtctcatctgcctccactcggcctcagttcctcatcactgttcctgtgctcacagtcatcaattatagaccccacaacatgcgccctgaa

SEQ ID NO: 1391 - DNA, 201 bp, Homo sapiens
agctggggccatcaaggcggaccatgtgtcaacttatgccgcgtttgtacagacgcatagaccaacaggggagtttatgtttgaatttgatgaagatgagrtgttctatgtggatctggacaagaaggagaccgtctggcatctggaggagtttggccaagccttttcctttgaggctcagggcgggctggctaacattgc

SEQ ID NO: 1392 - DNA, 138 bp, Homo sapiens
tccaggatgtccttctggctgttccagtactccgcagsaggccgccccagctccgtcaccgcccggaactcccccacgtcgctgtcgaagcgcgcgaactcctcccggttgtagatgtatctctccaggaagcgctgt

SEQ ID NO: 1393 - DNA, 199 bp, Homo sapiens
tccaggatgtccttctggctgttccagtactccgcagcaggccgccccagctccgtcaccgcccggaactcccccacgtcgctgtcgaagcgcgcgaartcctcccggttgtagatgtatctctccaggaagcgctgtgtcccattaaacgcgtagcattcctgccgtccctggaaaagcaccttccagcgtcctcttt

SEQ ID NO: 1394 - DNA, 201 bp, Homo sapiens
catgtgtcaacttatgccgcgtttgtacagacgcatagaccaacaggggagtttatgtttgaatttgatgaagatgagatgttctatgtggatctggacaygaaggagaccgtctggcatctggaggagtttggccaagccttttcctttgaggctcagggcgggctggctaacattgctatattgaacaacaacttgaat

SEQ ID NO: 1395 - DNA, 201 bp, Homo sapiens
tcaacttatgccgcgtttgtacagacgcatagaccaacaggggagtttatgtttgaatttgatgaagatgagatgttctatgtggatctggacaagaaggrgaccgtctggcatctggaggagtttggccaagccttttcctttgaggctcagggcgggctggctaacattgctatattgaacaacaacttgaataccttg

SEQ ID NO: 1396 - DNA, 201 bp, Homo sapiens
gcgtttgtacagacgcatagaccaacaggggagtttatgtttgaatttgatgaagatgagatgttctatgtggatctggacaagaaggagaccgtctggcytctggaggagtttggccaagccttttcctttgaggctcagggcgggctggctaacattgctatattgaacaacaacttgaataccttgatccagcgttcc

SEQ ID NO: 1397 - DNA, 201 bp, Homo sapiens
taaaggtgacaaaatatctgaacagaagaggacttaggagagatctgaactccagctgccctacaaactccatctcagcttttcttctcacttcatgtgaraactactccagtggctgactgaattgctgacccttcaagctctgtccttatccattacctcaaagcagtcattccttagtaaagtttccaacaaatagaa

SEQ ID NO: 1398 - DNA, 201 bp, Homo sapiens
tatgatttctctgataggtgaatcccagccatgctgattcctctccacccatttccagtgctagaggcccacagtttcagtctcatctgcctccactcggwctcagttcctcatcactgttcctgtgctcacagtcatcaattatagaccccacaacatgcgccctgaagacagaatgttccatatcagagctgtgatctt

SEQ ID NO: 1399 - DNA, 201 bp, Homo sapiens
gctagaggcccacagtttcagtctcatctgcctccactcggcctcagttcctcatcactgttcctgtgctcacagtcatcaattatagaccccacaacatrcgccctgaagacagaatgttccatatcagagctgtgatcttgagagccctctccttggctttcctgctgagtctccgaggagctggggccatcaaggcgg

SEQ ID NO: 1400 - DNA, 201 bp, Homo sapiens
acagagaatgtcagctctatgatttctctgataggtgaatcccagccatgctgattcctctccacccatttccagtgctagaggcccacagtttcagtctratctgcctccactcggcctcagttcctcatcactgttcctgtgctcacagtcatcaattatagaccccacaacatgcgccctgaagacagaatgttccat

SEQ ID NO: 1401 - DNA, 201 bp, Homo sapiens
agcaccttccagcgtcctctttacccagcaacagagaatgtcagctctatgatttctctgataggtgaatcccagccatgctgattcctctccacccattsccagtgctagaggcccacagtttcagtctcatctgcctccactcggcctcagttcctcatcactgttcctgtgctcacagtcatcaattatagaccccac

SEQ ID NO: 1402 - DNA, 201 bp, Homo sapiens
gccgtccctggaaaagcaccttccagcgtcctctttacccagcaacagagaatgtcagctctatgatttctctgataggtgaatcccagccatgctgattrctctccacccatttccagtgctagaggcccacagtttcagtctcatctgcctccactcggcctcagttcctcatcactgttcctgtgctcacagtcatca

SEQ ID NO: 1403 - DNA, 201 bp, Homo sapiens
gtcagctctatgatttctctgataggtgaatcccagccatgctgattcctctccacccatttccagtgctagaggcccacagtttcagtctcatctgccthcactcggcctcagttcctcatcactgttcctgtgctcacagtcatcaattatagaccccacaacatgcgccctgaagacagaatgttccatatcagagct

SEQ ID NO: 1404 - DNA, 201 bp, Homo sapiens
gtgtttcccaaggagcctgtggagctgggccagcccaacaccctcatctgccacattgacaagttcttcccaccagtgctcaacgtcacgtggctgtgcascggggagctggtcactgagggtgtcgctgagagcctcttcctgcccagaacagattacagcttccacaagttccattacctgacctttgtgccctcagca

SEQ ID NO: 1405 - DNA, 201 bp, Homo sapiens; identical to SEQ ID NO: 1308

SEQ ID NO: 1406 - DNA, 195 bp, Homo sapiens
tccaggatgtccttctggctgttccagtactccgcagcaggccgccccagctccgtcaccgcccggaactcccccacgtcgctgtcgaagcgcgygaactcctcccggttgtagatgtatctctccaggaagcgctgtgtcccattaaacgcgtagcattcctgccgtccctggaaaagcaccttccagcgtcct

SEQ ID NO: 1407 - DNA, 201 bp, Homo sapiens
cgtgggcaccgtcctcatcataaagtctctgcgttctggccatgacccccgggcccaggggaccctgtgaaatactgtaaaggtgacaaaatatctgaackgaagaggacttaggagagatctgaactccagctgccctacaaactccatctcagcttttcttctcacttcatgtgaaaactactccagtggctgactgaa

SEQ ID NO: 1408 - DNA, 201 bp, Homo sapiens
tgggcaccgtcctcatcataaagtctctgcgttctggccatgacccccgggcccaggggaccctgtgaaatactgtaaaggtgacaaaatatctgaacagyagaggacttaggagagatctgaactccagctgccctacaaactccatctcagcttttcttctcacttcatgtgaaaactactccagtggctgactgaatt

SEQ ID NO: 1409 - DNA, 201 bp, Homo sapiens
ggcaccgtcctcatcataaagtctctgcgttctggccatgacccccgggcccaggggaccctgtgaaatactgtaaaggtgacaaaatatctgaacagaayaggacttaggagagatctgaactccagctgccctacaaactccatctcagcttttcttctcacttcatgtgaaaactactccagtggctgactgaattgc

SEQ ID NO: 1410 - DNA, 201 bp, Homo sapiens
cctcatcataaagtctctgcgttctggccatgacccccgggcccaggggaccctgtgaaatactgtaaaggtgacaaaatatctgaacagaagaggacttrggagagatctgaactccagctgccctacaaactccatctcagcttttcttctcacttcatgtgaaaactactccagtggctgactgaattgctgaccctt

SEQ ID NO: 1411 - DNA, 201 bp, Homo sapiens
agagcctcttcctgcccagaacagattacagcttccacaagttccattacctgacctttgtgccctcagcagaggacttctatgactgcagggtggagcaytggggcttggaccagccgctcctcaagcactgggaggcccaagagccaatccagatgcctgagacaacggagactgtgctctgtgccctgggcctggtgc

SEQ ID NO: 1412 - DNA, 201 bp, Homo sapiens
gcttccacaagttccattacctgacctttgtgccctcagcagaggacttctatgactgcagggtggagcactggggcttggaccagccgctcctcaagcawtgggaggcccaagagccaatccagatgcctgagacaacggagactgtgctctgtgccctgggcctggtgctgggcctagtcggcatcatcgtgggcaccg

SEQ ID NO: 1413 - DNA, 201 bp, Homo sapiens
tgtcgctgagagcctcttcctgcccagaacagattacagcttccacaagttccattacctgacctttgtgccctcagcagaggacttctatgactgcaggytggagcactggggcttggaccagccgctcctcaagcactgggaggcccaagagccaatccagatgcctgagacaacggagactgtgctctgtgccctggg

SEQ ID NO: 1414 - DNA, 201 bp, Homo sapiens
agatctgaactccagctgccctacaaactccatctcagcttttcttctcacttcatgtgaaaactactccagtggctgactgaattgctgacccttcaagrtctgtccttatccattacctcaaagcagtcattccttagtaaagtttccaacaaatagaaattaatgacactttggtagcactaatatggagattatcct

SEQ ID NO: 1415 - DNA, 201 bp, Homo sapiens
ataaagtctctgcgttctggccatgacccccgggcccaggggaccctgtgaaatactgtaaaggtgacaaaatatctgaacagaagaggacttaggagagrtctgaactccagctgccctacaaactccatctcagcttttcttctcacttcatgtgaaaactactccagtggctgactgaattgctgacccttcaagctc

SEQ ID NO: 1416 - DNA, 201 bp, Homo sapiens
gcctagtcggcatcatcgtgggcaccgtcctcatcataaagtctctgcgttctggccatgacccccgggcccaggggaccctgtgaaatactgtaaaggtracaaaatatctgaacagaagaggacttaggagagatctgaactccagctgccctacaaactccatctcagcttttcttctcacttcatgtgaaaactact

SEQ ID NO: 1417 - DNA, 201 bp, Homo sapiens
tatattgaacaacaacttgaataccttgatccagcgttccaaccacactcaggccaccaacgatccccctgaggtgaccgtgtttcccaaggagcctgtgyagctgggccagcccaacaccctcatctgccacattgacaagttcttcccaccagtgctcaacgtcacgtggctgtgcaacggggagctggtcactgaggg

SEQ ID NO: 1418 - DNA, 201 bp, Homo sapiens
gggcgggctggctaacattgctatattgaacaacaacttgaataccttgatccagcgttccaaccacactcaggccaccaacgatccccctgaggtgaccytgtttcccaaggagcctgtggagctgggccagcccaacaccctcatctgccacattgacaagttcttcccaccagtgctcaacgtcacgtggctgtgcaa

SEQ ID NO: 1419 - DNA, 201 bp, Homo sapiens
cagggcgggctggctaacattgctatattgaacaacaacttgaataccttgatccagcgttccaaccacactcaggccaccaacgatccccctgaggtgaycgtgtttcccaaggagcctgtggagctgggccagcccaacaccctcatctgccacattgacaagttcttcccaccagtgctcaacgtcacgtggctgtgc

SEQ ID NO: 1420 - DNA, 201 bp, Homo sapiens
tcttcctgcccagaacagattacagcttccacaagttccattacctgacctttgtgccctcagcagaggacttctatgactgcagggtggagcactggggwttggaccagccgctcctcaagcactgggaggcccaagagccaatccagatgcctgagacaacggagactgtgctctgtgccctgggcctggtgctgggcc

SEQ ID NO: 1421 - DNA, 201 bp, Homo sapiens
gctgagagcctcttcctgcccagaacagattacagcttccacaagttccattacctgacctttgtgccctcagcagaggacttctatgactgcagggtggrgcactggggcttggaccagccgctcctcaagcactgggaggcccaagagccaatccagatgcctgagacaacggagactgtgctctgtgccctgggcctg

SEQ ID NO: 1422 - DNA, 169 bp, Homo sapiens
tccttagtaaagtttccaacaaatagaaattaatgacactttggtagcactaatatggagattatcctttcattgagccttttatcctctgttctcctttyaagaacccctcactgtcaccttcccgagaataccctaagaccaataaatacttcagtatttcagagcg

SEQ ID NO: 1423 - DNA, 168 bp, Homo sapiens
ccttagtaaagtttccaacaaatagaaattaatgacactttggtagcactaatatggagattatcctttcattgagccttttatcctctgttctcctttgragaacccctcactgtcaccttcccgagaataccctaagaccaataaatacttcagtatttcagagcg

SEQ ID NO: 1424 - DNA, 88 bp, Homo sapiens
tatcctctgttctcctttgaagaacccctcactgtcaccttcccgagaataccctaagaccaataaatacttcagtatttcagagcgr

SEQ ID NO: 1425 - DNA, 201 bp, Homo sapiens
tgaaatactgtaaaggtgacaaaatatctgaacagaagaggacttaggagagatctgaactccagctgccctacaaactccatctcagcttttcttctcayttcatgtgaaaactactccagtggctgactgaattgctgacccttcaagctctgtccttatccattacctcaaagcagtcattccttagtaaagtttcca

SEQ ID NO: 1426 - DNA, 201 bp, Homo sapiens
agagccaatccagatgcctgagacaacggagactgtgctctgtgccctgggcctggtgctgggcctagtcggcatcatcgtgggcaccgtcctcatcatamagtctctgcgttctggccatgacccccgggcccaggggaccctgtgaaatactgtaaaggtgacaaaatatctgaacagaagaggacttaggagagatct

SEQ ID NO: 1427 - DNA, 201 bp, Homo sapiens
agctggggccatcaaggcggaccatgtgtcaacttatgccgcgtttgtacagacgcatagaccaacaggggagtttatgtttgaatttgatgaagatgagwtgttctatgtggatctggacaagaaggagaccgtctggcatctggaggagtttggccaagccttttcctttgaggctcagggcgggctggctaacattgc

SEQ ID NO: 1428 - DNA, 201 bp, Homo sapiens
ctcaagcactgggaggcccaagagccaatccagatgcctgagacaacggagactgtgctctgtgccctgggcctggtgctgggcctagtcggcatcatcgygggcaccgtcctcatcataaagtctctgcgttctggccatgacccccgggcccaggggaccctgtgaaatactgtaaaggtgacaaaatatctgaacaga

SEQ ID NO: 1429 - DNA, 201 bp, Homo sapiens
ccagcccaacaccctcatctgccacattgacaagttcttcccaccagtgctcaacgtcacgtggctgtgcaacggggagctggtcactgagggtgtcgctsagagcctcttcctgcccagaacagattacagcttccacaagttccattacctgacctttgtgccctcagcagaggacttctatgactgcagggtggagca

SEQ ID NO: 1430 - DNA, 201 bp, Homo sapiens
tgggcctagtcggcatcatcgtgggcaccgtcctcatcataaagtctctgcgttctggccatgacccccgggcccaggggaccctgtgaaatactgtaaaygtgacaaaatatctgaacagaagaggacttaggagagatctgaactccagctgccctacaaactccatctcagcttttcttctcacttcatgtgaaaact

SEQ ID NO: 1431 - DNA, 201 bp, Homo sapiens
cctgagacaacggagactgtgctctgtgccctgggcctggtgctgggcctagtcggcatcatcgtgggcaccgtcctcatcataaagtctctgcgttctgkccatgacccccgggcccaggggaccctgtgaaatactgtaaaggtgacaaaatatctgaacagaagaggacttaggagagatctgaactccagctgccct

SEQ ID NO: 1432 - DNA, 201 bp, Homo sapiens
tccagatgcctgagacaacggagactgtgctctgtgccctgggcctggtgctgggcctagtcggcatcatcgtgggcaccgtcctcatcataaagtctctrcgttctggccatgacccccgggcccaggggaccctgtgaaatactgtaaaggtgacaaaatatctgaacagaagaggacttaggagagatctgaactcca

SEQ ID NO: 1433 - DNA, 201 bp, Homo sapiens
tctccaggaagcgctgtgtcccattaaacgcgtagcattcctgccgtccctggaaaagtgctagaggcccacagtttcagtctcatctgcctccactcggyctcagttcctcatcactgttcctgtgctcacagtcatcaattatagaccccacaacatgcgccctgaagacagaatgttccatatcagagctgtgatctt

SEQ ID NO: 1434 - DNA, 201 bp, Homo sapiens
  misc_feature (1)...(201): n = A,T,C or G, or insertion/deletion polymorphism (see Tables 1-2)
tggacaagaaggagaccgtctggcatctggaggagtttggccaagccttttcctttgaggctcagggcgggctggctaacattgctatattgaacaacaanttgaataccttgatccagcgttccaaccacactcaggccaccaacgatccccctgaggtgaccgtgtttcccaaggagcctgtggagctgggccagccca

SEQ ID NO: 1435 - DNA, 201 bp, Homo sapiens
tctccttggctttcctgctgagtctccgaggagctggggccatcaaggcggaccatgtgtcaacttatgccgcgtttgtacagacgcatagaccaacaggygagtttatgtttgaatttgatgaagatgagatgttctatgtggatctggacaagaaggagaccgtctggcatctggaggagtttggccaagccttttcct

SEQ ID NO: 1436 - DNA, 201 bp, Homo sapiens
gagagccctctccttggctttcctgctgagtctccgaggagctggggccatcaaggcggaccatgtgtcaacttatgccgcgtttgtacagacgcatagaycaacaggggagtttatgtttgaatttgatgaagatgagatgttctatgtggatctggacaagaaggagaccgtctggcatctggaggagtttggccaagc

SEQ ID NO: 1437 - DNA, 201 bp, Homo sapiens
gaatgttccatatcagagctgtgatcttgagagccctctccttggctttcctgctgagtctccgaggagctggggccatcaaggcggaccatgtgtcaacytatgccgcgtttgtacagacgcatagaccaacaggggagtttatgtttgaatttgatgaagatgagatgttctatgtggatctggacaagaaggagaccg

SEQ ID NO: 1438 - DNA, 201 bp, Homo sapiens
gctgggccagcccaacaccctcatctgccacattgacaagttcttcccaccagtgctcaacgtcacgtggctgtgcaacggggagctggtcactgagggtrtcgctgagagcctcttcctgcccagaacagattacagcttccacaagttccattacctgacctttgtgccctcagcagaggacttctatgactgcagggt

SEQ ID NO: 1439 - DNA, 201 bp, Homo sapiens
aggcccaagagccaatccagatgcctgagacaacggagactgtgctctgtgccctgggcctggtgctgggcctagtcggcatcatcgtgggcaccgtcctsatcataaagtctctgcgttctggccatgacccccgggcccaggggaccctgtgaaatactgtaaaggtgacaaaatatctgaacagaagaggacttagga

SEQ ID NO: 1440 - DNA, 201 bp, Homo sapiens
caacggagactgtgctctgtgccctgggcctggtgctgggcctagtcggcatcatcgtgggcaccgtcctcatcataaagtctctgcgttctggccatgarccccgggcccaggggaccctgtgaaatactgtaaaggtgacaaaatatctgaacagaagaggacttaggagagatctgaactccagctgccctacaaact

SEQ ID NO: 1441 - DNA, 201 bp, Homo sapiens
ctgtgctctgtgccctgggcctggtgctgggcctagtcggcatcatcgtgggcaccgtcctcatcataaagtctctgcgttctggccatgacccccgggchcaggggaccctgtgaaatactgtaaaggtgacaaaatatctgaacagaagaggacttaggagagatctgaactccagctgccctacaaactccatctcag

SEQ ID NO: 1442 - DNA, 72 bp, Homo sapiens
ttgaagaacccctcactgtcaccttcccgagaataccctaagaccaataaatacttcagtatttcagagcgk

SEQ ID NO: 1443 - DNA, 201 bp, Homo sapiens
ttccatatcagagctgtgatcttgagagccctctccttggctttcctgctgagtctccgaggagctggggccatcaaggcggaccatgtgtcaacttatgmcgcgtttgtacagacgcatagaccaacaggggagtttatgtttgaatttgatgaagatgagatgttctatgtggatctggacaagaaggagaccgtctgg

SEQ ID NO: 1444 - DNA, 201 bp, Homo sapiens
tttggccaagccttttcctttgaggctcagggcgggctggctaacattgctatattgaacaacaacttgaataccttgatccagcgttccaaccacactcyggccaccaacgatccccctgaggtgaccgtgtttcccaaggagcctgtggagctgggccagcccaacaccctcatctgccacattgacaagttcttccca

SEQ ID NO: 1445 - DNA, 201 bp, Homo sapiens
ggagctggtcactgagggtgtcgctgagagcctcttcctgcccagaacagattacagcttccacaagttccattacctgacctttgtgccctcagcagagsacttctatgactgcagggtggagcactggggcttggaccagccgctcctcaagcactgggaggcccaagagccaatccagatgcctgagacaacggagac

SEQ ID NO: 1446 - DNA, 201 bp, Homo sapiens
ggggagctggtcactgagggtgtcgctgagagcctcttcctgcccagaacagattacagcttccacaagttccattacctgacctttgtgccctcagcagmggacttctatgactgcagggtggagcactggggcttggaccagccgctcctcaagcactgggaggcccaagagccaatccagatgcctgagacaacggag

SEQ ID NO: 1447 - DNA, 201 bp, Homo sapiens
acggggagctggtcactgagggtgtcgctgagagcctcttcctgcccagaacagattacagcttccacaagttccattacctgacctttgtgccctcagcwgaggacttctatgactgcagggtggagcactggggcttggaccagccgctcctcaagcactgggaggcccaagagccaatccagatgcctgagacaacgg

SEQ ID NO: 1448 - DNA, 201 bp, Homo sapiens
  misc_feature (1)...(201): n = A,T,C or G, or insertion/deletion polymorphism (see Tables 1-2)
gtgcaacggggagctggtcactgagggtgtcgctgagagcctcttcctgcccagaacagattacagcttccacaagttccattacctgacctttgtgcccncagcagaggacttctatgactgcagggtggagcactggggcttggaccagccgctcctcaagcactgggaggcccaagagccaatccagatgcctgagac

SEQ ID NO: 1449 - DNA, 201 bp, Homo sapiens
gtagatgtatctctccaggaagcgctgtgtcccattaaacgcgtagcattcctgccgtccctggaaaagtgctagaggcccacagtttcagtctcatctgwctccactcggcctcagttcctcatcactgttcctgtgctcacagtcatcaattatagaccccacaacatgcgccctgaagacagaatgttccatatcaga

SEQ ID NO: 1450 - DNA, 201 bp, Homo sapiens
ggaagcgctgtgtcccattaaacgcgtagcattcctgccgtccctggaaaagtgctagaggcccacagtttcagtctcatctgcctccactcggcctcagstcctcatcactgttcctgtgctcacagtcatcaattatagaccccacaacatgcgccctgaagacagaatgttccatatcagagctgtgatcttgagagc

SEQ ID NO: 1451 - DNA, 201 bp, Homo sapiens
aatttgatgaagatgagatgttctatgtggatctggacaagaaggagaccgtctggcatctggaggagtttggccaagccttttcctttgaggctcagggsgggctggctaacattgctatattgaacaacaacttgaataccttgatccagcgttccaaccacactcaggccaccaacgatccccctgaggtgaccgtgt

SEQ ID NO: 1452 - DNA, 201 bp, Homo sapiens
ctgtgccctgggcctggtgctgggcctagtcggcatcatcgtgggcaccgtcctcatcataaagtctctgcgttctggccatgacccccgggcccaggggmccctgtgaaatactgtaaaggtgacaaaatatctgaacagaagaggacttaggagagatctgaactccagctgccctacaaactccatctcagcttttct

SEQ ID NO: 1453 - DNA, 201 bp, Homo sapiens
accgtgtttcccaaggagcctgtggagctgggccagcccaacaccctcatctgccacattgacaagttcttcccaccagtgctcaacgtcacgtggctgtycaacggggagctggtcactgagggtgtcgctgagagcctcttcctgcccagaacagattacagcttccacaagttccattacctgacctttgtgccctca

SEQ ID NO: 1454 - DNA, 201 bp, Homo sapiens
ctatattgaacaacaacttgaataccttgatccagcgttccaaccacactcaggccaccaacgatccccctgaggtgaccgtgtttcccaaggagcctgtygagctgggccagcccaacaccctcatctgccacattgacaagttcttcccaccagtgctcaacgtcacgtggctgtgcaacggggagctggtcactgagg

SEQ ID NO: 1455 - DNA, 201 bp, Homo sapiens
ggccgccccagctccgtcaccgcccggaactcccccacgtcgctgtcgaagcgcgcgaactcctcccggttgtagatgtatctctccaggaagcgctgtgkcccattaaacgcgtagcattcctgccgtccctggaaaagtgctagaggcccacagtttcagtctcatctgcctccactcggcctcagttcctcatcactg

SEQ ID NO: 1456 - DNA, 201 bp, Homo sapiens
cgctgtcgaagcgcgcgaactcctcccggttgtagatgtatctctccaggaagcgctgtgtcccattaaacgcgtagcattcctgccgtccctggaaaagygctagaggcccacagtttcagtctcatctgcctccactcggcctcagttcctcatcactgttcctgtgctcacagtcatcaattatagaccccacaacat

SEQ ID NO: 1457 - DNA, 201 bp, Homo sapiens
aggccgccccagctccgtcaccgcccggaactcccccacgtcgctgtcgaagcgcgcgaactcctcccggttgtagatgtatctctccaggaagcgctgtwtcccattaaacgcgtagcattcctgccgtccctggaaaagtgctagaggcccacagtttcagtctcatctgcctccactcggcctcagttcctcatcact

SEQ ID NO: 1458 - DNA, 201 bp, Homo sapiens
cacgtcgctgtcgaagcgcgcgaactcctcccggttgtagatgtatctctccaggaagcgctgtgtcccattaaacgcgtagcattcctgccgtccctggraaagtgctagaggcccacagtttcagtctcatctgcctccactcggcctcagttcctcatcactgttcctgtgctcacagtcatcaattatagaccccac

SEQ ID NO: 1459 - DNA, 196 bp, Homo sapiens
tccaggatgtccttctggctgttccagtactccgcagcaggccgccccagctccgtcaccgcccggaactcccccacgtcgctgtcgaagcgcgcraactcctcccggttgtagatgtatctctccaggaagcgctgtgtcccattaaacgcgtagcattcctgccgtccctggaaaagtgctagaggcccacagt

SEQ ID NO: 1460 - DNA, 143 bp, Homo sapiens
aaattaatgacactttggtagcactaatatggagattatcctttcattgagccttttatcctctgttctcctttgaagaacccctcactgtcaccttcccyagaataccctaagaccaataaatacttcagtatttcagagcg

SEQ ID NO: 1461 - DNA, 103 bp, Homo sapiens; identical to SEQ ID NO: 1332

SEQ ID NO: 1462 - DNA, 201 bp, Homo sapiens
accacactcaggccaccaacgatccccctgaggtgaccgtgtttcccaaggagcctgtggagctgggccagcccaacaccctcatctgccacattgacaakttcttcccaccagtgctcaacgtcacgtggctgtgcaacggggagctggtcactgagggtgtcgctgagagcctcttcctgcccagaacagattacagct

SEQ ID NO: 1463 - DNA, 173 bp, Homo sapiens
tcattccttagtaaagtttccaacaaatagaaattaatgacactttggtagcactaatatggagattatcctttcattgagccttttatcctctgttctcrtttgaagaacccctcactgtcaccttcccgagaataccctaagaccaataaatacttcagtatttcagagcg

SEQ ID NO: 1464 - DNA, 101 bp, Homo sapiens; identical to SEQ ID NO: 1335

SEQ ID NO: 1465 - DNA, 201 bp, Homo sapiens
ccccacgtcgctgtcgaagcgcgcgaactcctcccggttgtagatgtatctctccaggaagcgctgtgtcccattaaacgcgtagcattcctgccgtcccyggaaaagtgctagaggcccacagtttcagtctcatctgcctccactcggcctcagttcctcatcactgttcctgtgctcacagtcatcaattatagaccc

SEQ ID NO: 1466 - DNA, 201 bp, Homo sapiens
aactcccccacgtcgctgtcgaagcgcgcgaactcctcccggttgtagatgtatctctccaggaagcgctgtgtcccattaaacgcgtagcattcctgccytccctggaaaagtgctagaggcccacagtttcagtctcatctgcctccactcggcctcagttcctcatcactgttcctgtgctcacagtcatcaattata

SEQ ID NO: 1467 - DNA, 201 bp, Homo sapiens
ccgtcaccgcccggaactcccccacgtcgctgtcgaagcgcgcgaactcctcccggttgtagatgtatctctccaggaagcgctgtgtcccattaaacgcytagcattcctgccgtccctggaaaagtgctagaggcccacagtttcagtctcatctgcctccactcggcctcagttcctcatcactgttcctgtgctcac

SEQ ID NO: 1468 - DNA, 201 bp, Homo sapiens
tgctgacccttcaagctctgtccttatccattacctcaaagcagtcattccttagtaaagtttccaacaaatagaaattaatgacactttggtagcactartatggagattatcctttcattgagccttttatcctctgttctcctttgaagaacccctcactgtcaccttcccgagaataccctaagaccaataaatact

SEQ ID NO: 1469 - DNA, 201 bp, Homo sapiens
  misc_feature (1)...(201): n = A,T,C or G, or insertion/deletion polymorphism (see Tables 1-2)
tgtgcaacggggagctggtcactgagggtgtcgctgagagcctcttcctgcccagaacagattacagcttccacaagttccattacctgacctttgtgccntcagcagaggacttctatgactgcagggtggagcactggggcttggaccagccgctcctcaagcactgggaggcccaagagccaatccagatgcctgaga

SEQ ID NO: 1470 - DNA, 201 bp, Homo sapiens
agctgggccagcccaacaccctcatctgccacattgacaagttcttcccaccagtgctcaacgtcacgtggctgtgcaacggggagctggtcactgagggwgtcgctgagagcctcttcctgcccagaacagattacagcttccacaagttccattacctgacctttgtgccctcagcagaggacttctatgactgcaggg

SEQ ID NO: 1471 - DNA, 201 bp, Homo sapiens
tggagctgggccagcccaacaccctcatctgccacattgacaagttcttcccaccagtgctcaacgtcacgtggctgtgcaacggggagctggtcactgarggtgtcgctgagagcctcttcctgcccagaacagattacagcttccacaagttccattacctgacctttgtgccctcagcagaggacttctatgactgca

SEQ ID NO: 1472 - DNA, 201 bp, Homo sapiens
ccaaccacactcaggccaccaacgatccccctgaggtgaccgtgtttcccaaggagcctgtggagctgggccagcccaacaccctcatctgccacattgakaagttcttcccaccagtgctcaacgtcacgtggctgtgcaacggggagctggtcactgagggtgtcgctgagagcctcttcctgcccagaacagattaca

SEQ ID NO: 1473 - DNA, 201 bp, Homo sapiens
cgttccaaccacactcaggccaccaacgatccccctgaggtgaccgtgtttcccaaggagcctgtggagctgggccagcccaacaccctcatctgccacastgacaagttcttcccaccagtgctcaacgtcacgtggctgtgcaacggggagctggtcactgagggtgtcgctgagagcctcttcctgcccagaacagat

SEQ ID NO: 1474 - DNA, 201 bp, Homo sapiens
caacttgaataccttgatccagcgttccaaccacactcaggccaccaacgatccccctgaggtgaccgtgtttcccaaggagcctgtggagctgggccagkccaacaccctcatctgccacattgacaagttcttcccaccagtgctcaacgtcacgtggctgtgcaacggggagctggtcactgagggtgtcgctgagag

SEQ ID NO: 1475 - DNA, 195 bp, Homo sapiens
cttatccattacctcaaagcagtcattccttagtaaagtttccaacaaatagaaattaatgacactttggtagcactaatatggagattatcctttcattyagccttttatcctctgttctcctttgaagaacccctcactgtcaccttcccgagaataccctaagaccaataaatacttcagtatttcagagcg

SEQ ID NO: 1476 - DNA, 189 bp, Homo sapiens
cattacctcaaagcagtcattccttagtaaagtttccaacaaatagaaattaatgacactttggtagcactaatatggagattatcctttcattgagcctrttatcctctgttctcctttgaagaacccctcactgtcaccttcccgagaataccctaagaccaataaatacttcagtatttcagagcg

SEQ ID NO: 1477 - DNA, 177 bp, Homo sapiens
gcagtcattccttagtaaagtttccaacaaatagaaattaatgacactttggtagcactaatatggagattatcctttcattgagccttttatcctctgtyctcctttgaagaacccctcactgtcaccttcccgagaataccctaagaccaataaatacttcagtatttcagagcg

SEQ ID NO: 1478 - DNA, 201 bp, Homo sapiens
gttctatgtggatctggacaagaaggagaccgtctggcatctggaggagtttggccaagccttttcctttgaggctcagggcgggctggctaacattgctytattgaacaacaacttgaataccttgatccagcgttccaaccacactcaggccaccaacgatccccctgaggtgaccgtgtttcccaaggagcctgtgga

SEQ ID NO: 1479 - DNA, 201 bp, Homo sapiens
tgtgccctgggcctggtgctgggcctagtcggcatcatcgtgggcaccgtcctcatcataaagtctctgcgttctggccatgacccccgggcccaggggawcctgtgaaatactgtaaaggtgacaaaatatctgaacagaagaggacttaggagagatctgaactccagctgccctacaaactccatctcagcttttctt

SEQ ID NO: 1480 - DNA, 201 bp, Homo sapiens
ggagaccgtctggcatctggaggagtttggccaagccttttcctttgaggctcagggcgggctggctaacattgctatattgaacaacaacttgaataccytgatccagcgttccaaccacactcaggccaccaacgatccccctgaggtgaccgtgtttcccaaggagcctgtggagctgggccagcccaacaccctcat

SEQ ID NO: 1481 - DNA, 201 bp, Homo sapiens; identical to SEQ ID NO: 1312

SEQ ID NO: 1482 - DNA, 201 bp, Homo sapiens
ccaagccttttcctttgaggctcagggcgggctggctaacattgctatattgaacaacaacttgaataccttgatccagcgttccaaccacactcaggccyccaacgatccccctgaggtgaccgtgtttcccaaggagcctgtggagctgggccagcccaacaccctcatctgccacattgacaagttcttcccaccagt

SEQ ID NO: 1483 - DNA, 201 bp, Homo sapiens
cctcaagcactgggaggcccaagagccaatccagatgcctgagacaacggagactgtgctctgtgccctgggcctggtgctgggcctagtcggcatcatcrtgggcaccgtcctcatcataaagtctctgcgttctggccatgacccccgggcccaggggaccctgtgaaatactgtaaaggtgacaaaatatctgaacag

SEQ ID NO: 1484 - DNA, 201 bp, Homo sapiens
agctccgtcaccgcccggaactcccccacgtcgctgtcgaagcgcgcgaactcctcccggttgtagatgtatctctccaggaagcgctgtgtcccattaarcgcgtagcattcctgccgtccctggaaaagtgctagaggcccacagtttcagtctcatctgcctccactcggcctcagttcctcatcactgttcctgtgc

SEQ ID NO: 1485 - DNA, 201 bp, Homo sapiens
cgccccagctccgtcaccgcccggaactcccccacgtcgctgtcgaagcgcgcgaactcctcccggttgtagatgtatctctccaggaagcgctgtgtccmattaaacgcgtagcattcctgccgtccctggaaaagtgctagaggcccacagtttcagtctcatctgcctccactcggcctcagttcctcatcactgttc

SEQ ID NO: 1486 - DNA, 201 bp, Homo sapiens
tgaactccagctgccctacaaactccatctcagcttttcttctcacttcatgtgaaaactactccagtggctgactgaattgctgacccttcaagctctgyccttatccattacctcaaagcagtcattccttagtaaagtttccaacaaatagaaattaatgacactttggtagcactaatatggagattatcctttcat

SEQ ID NO: 1487 - DNA, 201 bp, Homo sapiens
tttaaagtatatttctcttttggtgaaaggccaatggagacattgtgaatttaagtgaacatttgcctcaagatgttaactataaacacactgcatacaattttcttctgaataacaaatgaatgcttattgctgcatgatgtaagcaaaagtcattatttttcctattcatttgaaataagttatggcttaaaatgcttt

SEQ ID NO: 1488 - DNA, 201 bp, Homo sapiens
ggatgaagatgacgctgatctctcaaaatataatcttgatgccagtgaagaagaagatagtaataaaaagaaatctaatagacgaagtcgctcaaagtctsgatcttcacattcacgatcttcatcacgctcatcctccccctcaagttcaaggtctaggtccaggtcccgttcaagaagttcttccagttcgcagtcaag

SEQ ID NO: 1489 - DNA, 201 bp, Homo sapiens
gaagatcagagtgtaatatgtgtaatactccaaagtatgctaaattagaagaaagaacaggatatggtggtggttttaatgaaagagaaaatgttgaatayatagaaagagaagaatctgatggtgaatatgatgagtttggacgtaaaaagaaaaaatacagagggaaagcagttggtcctgcatctatattaaaggaag

SEQ ID NO: 1490 - DNA, 201 bp, Homo sapiens
gatctcgttccagttccagagaacgttcgagatctcgtgggtcgaaatcaagatccagctccaggtcccacaggggctcttcttccccacgaaaaagatcytattcaagttcatcatcttctcctgagaggaacagaaagagaagtcgttctagatcttcttcatctggtgatcgcaaaaaaagacgaacaagatcacggt

SEQ ID NO: 1491 - DNA, 201 bp, Homo sapiens
gggatattgatttcttgttttttttccgtaacattgtctgctgcaatttaaataaaaattacgacattttaagatatttcatagacaaaccaaacaaaaawatatgtttttactttaaagtgaatgtttttctcttcagctgatctaaaaatgaaagcaagatatcttatgtagaaatattttgataatatttttacagtg

SEQ ID NO: 1492 - DNA, 201 bp, Homo sapiens
cagcctttttatgctgttaacagatgtcagagtgattctcaccaaaaaaagttaaactatgttgtaagcagccaactgtaaatgtctattttgaaattccytatgctaagggtgccttagaatcattgtgtctcttttatccagctttacttttttgctccacatttaatgcaaaagaatcttgtgatgtctacaaggaga

SEQ ID NO: 1493 - DNA, 201 bp, Homo sapiens
acgacattttaagatatttcatagacaaaccaaacaaaaatatatgtttttactttaaagtgaatgtttttctcttcagctgatctaaaaatgaaagcaaratatcttatgtagaaatattttgataatatttttacagtgagctttcccatgtttttatgtcttaagtttctttgctgcgtttatgtaggttgcacaaga

SEQ ID NO: 1494 - DNA, 201 bp, Homo sapiens; identical to SEQ ID NO: 1488

SEQ ID NO: 1495 - DNA, 201 bp, Homo sapiens; identical to SEQ ID NO: 1489

SEQ ID NO: 1496 - DNA, 201 bp, Homo sapiens; identical to SEQ ID NO: 1490

SEQ ID NO: 1497 - DNA, 201 bp, Homo sapiens; identical to SEQ ID NO: 1491

SEQ ID NO: 1498 - DNA, 201 bp, Homo sapiens; identical to SEQ ID NO: 1493

SEQ ID NO: 1499 - DNA, 201 bp, Homo sapiens; identical to SEQ ID NO: 1487

SEQ ID NO: 1500 - DNA, 201 bp, Homo sapiens; identical to SEQ ID NO: 1488

SEQ ID NO: 1501 - DNA, 201 bp, Homo sapiens; identical to SEQ ID NO: 1489

SEQ ID NO: 1502 - DNA, 201 bp, Homo sapiens; identical to SEQ ID NO: 1490

SEQ ID NO: 1503 - DNA, 201 bp, Homo sapiens; identical to SEQ ID NO: 1491

SEQ ID NO: 1504 - DNA, 201 bp, Homo sapiens; identical to SEQ ID NO: 1492

SEQ ID NO: 1505 - DNA, 201 bp, Homo sapiens; identical to SEQ ID NO: 1493

SEQ ID NO: 1506 - DNA, 201 bp, Homo sapiens; identical to SEQ ID NO: 1487

SEQ ID NO: 1507 - DNA, 201 bp, Homo sapiens; identical to SEQ ID NO: 1488

SEQ ID NO: 1508 - DNA, 201 bp, Homo sapiens; identical to SEQ ID NO: 1489

SEQ ID NO: 1509 - DNA, 201 bp, Homo sapiens; identical to SEQ ID NO: 1490

SEQ ID NO: 1510 - DNA, 201 bp, Homo sapiens; identical to SEQ ID NO: 1491

SEQ ID NO: 1511 - DNA, 201 bp, Homo sapiens; identical to SEQ ID NO: 1492

SEQ ID NO: 1512 - DNA, 201 bp, Homo sapiens; identical to SEQ ID NO: 1493

SEQ ID NO: 1513 - DNA, 201 bp, Homo sapiens
gtggcctttgctggagaatgaggaaggccatgttgttgtttcatgtagagtaaatatttcttgagacacacctggagagaatgagctcctctcatgaggcygtcctgtggtctctgcaccttcactctgctgggtgtggaaagctgtggatatttttggaggtagagaactgggggagagtgctgttgacagagtgtctga

SEQ ID NO: 1514 - DNA, 201 bp, Homo sapiens
tatggtgggtgcgtcctgaggaacaatttctgagggcgagtgcccactggctgtgaaggaagaacctggggtggtgactgtcttggtgtcagtcatggggkagacggacctcgtggtttgtgattcttgtgtggtctgcggggcttgagtgtgacccctttgggaaacagctggtgattcctgaggagaggtgcttgtgga

SEQ ID NO: 1515 - DNA, 201 bp, Homo sapiens
cctggtgttgacactacagagttggccagagtaagggcacctgttttggaaagtgacgtgcctcctgagggccccagggtggcatcatggctgctgggtgytgcctgcagtgctgtggtcggggcctgggttgtgtgaccatccccggtgggagctggggcaaaggttgttgctgcacttatggtgggtgcgtcctgagga

SEQ ID NO: 1516 - DNA, 201 bp, Homo sapiens
aggaagaggggtggcgttgctgatgagggccgtggtgaaggttttaccagaccctgaaggtgacagagtgtgggtctgggtttgtggagatgtaagcccastggatgtgatcgatggaggtgtgggtgggactgttgagaaggtgtcggttgcctgggacgccaggctgatagtgtcagaccctctgctggttcttgtcct

SEQ ID NO: 1517 - DNA, 201 bp, Homo sapiens
gatgaagctgatatgtcctgattagaggtccttgaagaagctgcagttgattgtccctctagtgtcgctgttgttgagcctgttgaggtgactggggcagsagttttacttccagttattaatgtgtcctctgtggttcctggaaccacatgcggaaggaggcagagacacaggcagctcagggacacccaggggaccctc

SEQ ID NO: 1518 - DNA, 201 bp, Homo sapiens
gacacacctggagagaatgagctcctctcatgaggccgtcctgtggtctctgcaccttcactctgctgggtgtggaaagctgtggatatttttggaggtaragaactgggggagagtgctgttgacagagtgtctgaccaccatatggttgaaactttggaagtgattgcagaaatggttccacttacagatagtgatgtc

SEQ ID NO: 1519 - DNA, 201 bp, Homo sapiens
tgaccaccatatggttgaaactttggaagtgattgcagaaatggttccacttacagatagtgatgtctcctctgtgtttccaagagtagagtctctggagrttggcattctgaacacctttgatgttaccaggaatgtattgctgacactggaaggggatgagatggttgtttcaccagaagggaatgtctcctgagaaac

SEQ ID NO: 1520 - DNA, 201 bp, Homo sapiens
gagtgtgacccctttgggaaacagctggtgattcctgaggagaggtgcttgtggaatgtattgttgaatgatttgttgatggtgccgttgtaatttgttgkgatgtgtgtctatccagcataggtgaagaagatggggatgtggccgtttttatcatctgagtcacactgtagcttgggctgctgagaagagcctctccag

SEQ ID NO: 1521 - DNA, 201 bp, Homo sapiens
tgtctcctctgtgtttccaagagtagagtctctggagattggcattctgaacacctttgatgttaccaggaatgtattgctgacactggaaggggatgagrtggttgtttcaccagaagggaatgtctcctgagaaactgttccacttgggttgaatccacttggtgaggataaaacagttgatgttgtaaccggtgtgag

SEQ ID NO: 1522 - DNA, 201 bp, Homo sapiens
tagggtgctggtttgagattccctggtggtctgcgtgctccgagtccagtggttctgagaagaagctgatgtgtcttggatagaggtcctccaggaagttkttcgtgattgtccttcctgtccagctgttattgagactgctgaggtcactggggtagaactttcagttcctgctgttgatgtctcttctgtgtttccaag

SEQ ID NO: 1523 - DNA, 201 bp, Homo sapiens
gtggtctccacgctctgagtctggtggttcttagaaaaagctgttgtgtcctgagtagaagtccttgagaaagttgctggtgattgtccttctggatcaamtgttactaaggctgctgaggtgactggcataagacttccagtaacaggtactgatgatgtctcccctgggtttccaagagtggagcctgtggaggttgtc

SEQ ID NO: 1524 - DNA, 201 bp, Homo sapiens
gtaaccggtgtgagggtgttgagggtgttgatttgagatactctggtggtctccacgctctgagtctggtggttcttagaaaaagctgttgtgtcctgagkagaagtccttgagaaagttgctggtgattgtccttctggatcaactgttactaaggctgctgaggtgactggcataagacttccagtaacaggtactgat

SEQ ID NO: 1525 - DNA, 201 bp, Homo sapiens
gtttttgggagagttgtgctgtgggaggagtatgtggtgggctctcctggttcccctattgctgagaccttagaggggacccttggaatagtgccagctgyccctgtagatggatttcctgtgacaagcctagtggcagcacctgttgatgttgagggcagttctgtttgtgaccaagttgtgtggcctttgctggagaat

SEQ ID NO: 1526 - DNA, 201 bp, Homo sapiens
tcagtgatatgtccatctttgatcttcctcagcaaatacgctcagcagagaagtctcattcctgtgatgagtgtggaaaaagcttctgttacatctcagcrcttcatattcatcagagagtccacctgggagagaaactctttaagtgtgacgtgtgtggtaaggaattcagtcagagtttacatctgcaaactcatcaga

SEQ ID NO: 1527 - DNA, 201 bp, Homo sapiens
tcaggaacctgctgtcagtggggcatcaaccattccaccgagatactttccactttctaagggaggaaaagttttggatgatggatatagcaacccaaagrgaagggaattcaggaggcaagatccaacctgagatgaagacttttccagaagcaggaccacatgaagggtggtcctgccagcagatctgggaagaaattg

SEQ ID NO: 1528 - DNA, 201 bp, Homo sapiens
ccttgcccagaggaagctgtatcgagatgtgatgctggagaacttcaggaacctgctgtcagtggggcatcaaccattccaccgagatactttccactttmtaagggaggaaaagttttggatgatggatatagcaacccaaagggaagggaattcaggaggcaagatccaacctgagatgaagacttttccagaagcagg

SEQ ID NO: 1529 - DNA, 201 bp, Homo sapiens
gaaccccctttgcttgaggctcgcaaccacccgatgatcgatgatcgtctcaggggaaaagaagccttggcgaagagcagaggtttagaggcacaattctsctttccctggaactgtgtcattcaggactctgcaaattccctaaagtaggaggaaaaatgaccatgtccaaggaggcagtgaccttcaaggatgtggcag

SEQ ID NO: 1530 - DNA, 201 bp, Homo sapiens
ggaagaaattgcaagtgatttaaccaggcctcaagactctaccataaagagctctcagttctttgaacagggtgatgcccactcccaggttgaggaaggamtatctataatgcacacaggacagaaaccttccaattgtgggaagtgtaaacaatccttcagtgatatgtccatctttgatcttcctcagcaaatacgctc

SEQ ID NO: 1531 - DNA, 201 bp, Homo sapiens
tgagatatgtagtgtgagcttccgtcttaggtcaagtcttaataggcattgtgtggtccacacaggaaagaaaccaaacagcactggggaatatggaaaargcttcattcgtaggctggatttgtgtaagcatcagacgatccacacaggagagaaaccatataattgtaaagaatgtgggaagagcttcagacggtcctc

SEQ ID NO: 1532 - DNA, 201 bp, Homo sapiens
atcttttgatccatcagcgagtccacactggagaaaagccatacaaatgtgacaagtgtgggaagagctacattactaagtcaggtcttgacttgcaccayagagcccacacaggagagagaccttataactgtgatgactgtgggaagagctttagacaggcctcaagtattttgaatcataagagactccattgccgaa

SEQ ID NO: 1533 - DNA, 201 bp, Homo sapiens
atgtagtgtgagcttccgtcttaggtcaagtcttaataggcattgtgtggtccacacaggaaagaaaccaaacagcactggggaatatggaaaaggcttcrttcgtaggctggatttgtgtaagcatcagacgatccacacaggagagaaaccatataattgtaaagaatgtgggaagagcttcagacggtcctcctatct

SEQ ID NO: 1534 - DNA, 201 bp, Homo sapiens; identical to SEQ ID NO: 1526

SEQ ID NO: 1535 - DNA, 201 bp, Homo sapiens; identical to SEQ ID NO: 1527

SEQ ID NO: 1536 - DNA, 201 bp, Homo sapiens; identical to SEQ ID NO: 1528

SEQ ID NO: 1537 - DNA, 201 bp, Homo sapiens; identical to SEQ ID NO: 1529

SEQ ID NO: 1538 - DNA, 201 bp, Homo sapiens; identical to SEQ ID NO: 1530

SEQ ID NO: 1539 - DNA, 201 bp, Homo sapiens; identical to SEQ ID NO: 1531

SEQ ID NO: 1540 - DNA, 201 bp, Homo sapiens; identical to SEQ ID NO: 1532

SEQ ID NO: 1541 - DNA, 201 bp, Homo sapiens; identical to SEQ ID NO: 1533

SEQ ID NO: 1542 - DNA, 201 bp, Homo sapiens; identical to SEQ ID NO: 1526

SEQ ID NO: 1543 - DNA, 201 bp, Homo sapiens; identical to SEQ ID NO: 1527

SEQ ID NO: 1544 - DNA, 201 bp, Homo sapiens; identical to SEQ ID NO: 1528

SEQ ID NO: 1545 - DNA, 201 bp, Homo sapiens; identical to SEQ ID NO: 1529

SEQ ID NO: 1546 - DNA, 201 bp, Homo sapiens; identical to SEQ ID NO: 1530

SEQ ID NO: 1547 - DNA, 160 bp, Homo sapiens
gaacatgtcaaaattgatgaccactagaatgtcagccacatgtgtctttgtatttttgctgcatccttacattgcttgagtctggaagattgaggctgcastgacctatggtagtgctactgcactccagccagggcaacagagtgagaccctgtctcca

SEQ ID NO: 1548 - DNA, 201 bp, Homo sapiens; identical to SEQ ID NO: 1532

SEQ ID NO: 1549 - DNA, 201 bp, Homo sapiens
actctcattttgaatggcaataaactggagacactttctttagtaagttgctttgctaacaacacacccttggaacacttggatctgagtcaaaatctatyacaacataaaaatgatgaaaattgctcatggccagaaactgtggtcaatatgaatctgtcatacaataaattgtctgattctgtcttcaggtgcttgccc

SEQ ID NO: 1550 - DNA, 201 bp, Homo sapiens
gaaactgtggtcaatatgaatctgtcatacaataaattgtctgattctgtcttcaggtgcttgcccaaaagtattcaaatacttgacctaaataataaccyaatccaaactgtacctaaagagactattcatctgatggccttacgagaactaaatattgcatttaattttctaactgatctccctggatgcagtcatttc

SEQ ID NO: 1551 - DNA, 201 bp, Homo sapiens
ggcccaaggataggcgtaaatgtgggcttttctgggcaaaccttcgagctgctattaatgttaatgtattagccaccagagaaatgtatgaactgcagacyttcacagagttaaatgaagagtctcgaggttctacaatctctctgatgagaacagattgtctataaaatcccacagtccttgggaagttggggaccacat

SEQ ID NO: 1552 - DNA, 201 bp, Homo sapiens
ctctaagaaaggttcccgcagacttgaccccagccacaacgacactggatttatcctataacctcctttttcaactccagagttcagattttcattctgtrtccaaactgagagttttgattctatgccataacagaattcaacagctggatctcaaaacctttgaattcaacaaggagttaagatatttagatttgtcta

SEQ ID NO: 1553 - DNA, 201 bp, Homo sapiens
tgatcatataattcttatcttactggaacccattccattctattgcattcccaccaggtatcataaactgaaagctctcctggaaaaaaaagcatacttgraatggcccaaggataggcgtaaatgtgggcttttctgggcaaaccttcgagctgctattaatgttaatgtattagccaccagagaaatgtatgaactgca

SEQ ID NO: 1554 - DNA, 201 bp, Homo sapiens
tgtaacttggtatttactggcaggtctcaggtatttagatctttcttttaatgactttgacaccatgcctatctgtgaggaagctggcaacatgtcacacktggaaatcctaggtttgagtggggcaaaaatacaaaaatcagatttccagaaaattgctcatctgcatctaaatactgtcttcttaggattcagaactct

SEQ ID NO: 1555 - DNA, 48 bp, Homo sapiens
atcgagccactgcactccagcctggtgacagagcgagactccatctcm

SEQ ID NO: 1556 - DNA, 201 bp, Homo sapiens
ttgaccctggcaaaagcattagtgaaaatattgtaagcttcattgagaaaagctataagtccatctttgttttgtctcccaactttgtccagaatgagtgytgccattatgaattctactttgcccaccacaatctcttccatgaaaattctgatcatataattcttatcttactggaacccattccattctattgcattc

SEQ ID NO: 1557 - DNA, 201 bp, Homo sapiens
aagttgatttactctgggacgaccttttccttatcttacaatttgtttggcatacatcagtggaacactttcagatccgaaatgtgacttttggtggtaargcttatcttgaccacaattcatttgactactcaaatactgtaatgagaactataaaattggagcatgtacatttcagagtgttttacattcaacaggata

SEQ ID NO: 1558 - DNA, 201 bp, Homo sapiens
ggataaaatctatttgcttttgaccaaaatggacatagaaaacctgacaatatcaaatgcacaaatgccacacatgcttttcccgaattatcctacgaaamtccaatatttaaattttgccaataatatcttaacagacgagttgtttaaaagaactatccaactgcctcacttgaaaactctcattttgaatggcaataa

SEQ ID NO: 1559 - DNA, 90 bp, Homo sapiens
gaatcgcttgaacccgggaggtggcagttgcagtgagctgagatcgagccactgcactccagcctggtgacagagcgagactccatctcr

SEQ ID NO: 1560 - DNA, 201 bp, Homo sapiens
gctctcctggaaaaaaaagcatacttggaatggcccaaggataggcgtaaatgtgggcttttctgggcaaaccttcgagctgctattaatgttaatgtatragccaccagagaaatgtatgaactgcagacattcacagagttaaatgaagagtctcgaggttctacaatctctctgatgagaacagattgtctataaaat

SEQ ID NO: 1561 - DNA, 201 bp, Homo sapiens
ttgactactcaaatactgtaatgagaactataaaattggagcatgtacatttcagagtgttttacattcaacaggataaaatctatttgcttttgaccaakatggacatagaaaacctgacaatatcaaatgcacaaatgccacacatgcttttcccgaattatcctacgaaattccaatatttaaattttgccaataata

SEQ ID NO: 1562 - DNA, 201 bp, Homo sapiens
aaacacaacaaaactgcacattgttttaccaatggacacaaatttctgggttcttttgcgtgatggaatcaagacttcaaaaatattagaaatgacaaatmtagatggcaaaagccaatttgtaagttatgaaatgcaacgaaatcttagtttagaaaatgctaagacatcggttctattgcttaataaagttgatttact

SEQ ID NO: 1563 - DNA, 201 bp, Homo sapiens
atacaatgagactcatcagaaacatttacatattttgtagtattgttatgacagcagagggtgatgctccagagctgccagaagaaagggaactgatgacraactgctccaacatgtctctaagaaaggttcccgcagacttgaccccagccacaacgacactggatttatcctataacctcctttttcaactccagagtt

SEQ ID NO: 1564 - DNA, 201 bp, Homo sapiens
ggttctattgcttaataaagttgatttactctgggacgaccttttccttatcttacaatttgtttggcatacatcagtggaacactttcagatccgaaatrtgacttttggtggtaaggcttatcttgaccacaattcatttgactactcaaatactgtaatgagaactataaaattggagcatgtacatttcagagtgtt

SEQ ID NO: 1565 - DNA, 201 bp, Homo sapiens
tttcagatccgaaatgtgacttttggtggtaaggcttatcttgaccacaattcatttgactactcaaatactgtaatgagaactataaaattggagcatgyacatttcagagtgttttacattcaacaggataaaatctatttgcttttgaccaaaatggacatagaaaacctgacaatatcaaatgcacaaatgccacac

SEQ ID NO: 1566 - DNA, 201 bp, Homo sapiens
taaaatctatttgcttttgaccaaaatggacatagaaaacctgacaatatcaaatgcacaaatgccacacatgcttttcccgaattatcctacgaaattcyaatatttaaattttgccaataatatcttaacagacgagttgtttaaaagaactatccaactgcctcacttgaaaactctcattttgaatggcaataaact

SEQ ID NO: 1567 - DNA, 201 bp, Homo sapiens
gaaaacctgacaatatcaaatgcacaaatgccacacatgcttttcccgaattatcctacgaaattccaatatttaaattttgccaataatatcttaacagrcgagttgtttaaaagaactatccaactgcctcacttgaaaactctcattttgaatggcaataaactggagacactttctttagtaagttgctttgctaac

SEQ ID NO: 1568 - DNA, 201 bp, Homo sapiens
gtttttcaacattaatactattatttggcagtaatccagattgcttttgccaccaacctgaagacatatagaggcagaaggacaggaataattctatttgmttcctgttttgaaacttccatctgtaaggctatcaaaaggagatgtgagagagggtattgagtctggcctgacaatgcagttcttaaaccaaaggtccat

SEQ ID NO: 1569 - DNA, 201 bp, Homo sapiens
aacaacacacccttggaacacttggatctgagtcaaaatctattacaacataaaaatgatgaaaattgctcatggccagaaactgtggtcaatatgaatcygtcatacaataaattgtctgattctgtcttcaggtgcttgcccaaaagtattcaaatacttgacctaaataataaccaaatccaaactgtacctaaagag

SEQ ID NO: 1570 - DNA, 201 bp, Homo sapiens
tgcttgcccaaaagtattcaaatacttgacctaaataataaccaaatccaaactgtacctaaagagactattcatctgatggccttacgagaactaaataytgcatttaattttctaactgatctccctggatgcagtcatttcagtagactttcagttctgaacattgaaatgaacttcattctcagcccatctctggat

SEQ ID NO: 1571 - DNA, 201 bp, Homo sapiens
atgttaatgtattagccaccagagaaatgtatgaactgcagacattcacagagttaaatgaagagtctcgaggttctacaatctctctgatgagaacagaytgtctataaaatcccacagtccttgggaagttggggaccacatacactgttgggatgtacattgatacaacctttatgatggcaatttgacaatatttat

SEQ ID NO: 1572 - DNA, 201 bp, Homo sapiens
ataacctcctttttcaactccagagttcagattttcattctgtctccaaactgagagttttgattctatgccataacagaattcaacagctggatctcaaracctttgaattcaacaaggagttaagatatttagatttgtctaataacagactgaagagtgtaacttggtatttactggcaggtctcaggtatttagatc

SEQ ID NO: 1573 - DNA, 201 bp, Homo sapiens
gtatcataaactgaaagctctcctggaaaaaaaagcatacttggaatggcccaaggataggcgtaaatgtgggcttttctgggcaaaccttcgagctgctrttaatgttaatgtattagccaccagagaaatgtatgaactgcagacattcacagagttaaatgaagagtctcgaggttctacaatctctctgatgagaac

SEQ ID NO: 1574 - DNA, 201 bp, Homo sapiens
tgacaccatgcctatctgtgaggaagctggcaacatgtcacacctggaaatcctaggtttgagtggggcaaaaatacaaaaatcagatttccagaaaattkctcatctgcatctaaatactgtcttcttaggattcagaactcttcctcattatgaagaaggtagcctgcccatcttaaacacaacaaaactgcacattgt

SEQ ID NO: 1575 - DNA, 201 bp, Homo sapiens
agtccatctttgttttgtctcccaactttgtccagaatgagtggtgccattatgaattctactttgcccaccacaatctcttccatgaaaattctgatcayataattcttatcttactggaacccattccattctattgcattcccaccaggtatcataaactgaaagctctcctggaaaaaaaagcatacttggaatggc

SEQ ID NO: 1576 - DNA, 201 bp, Homo sapiens
cagtggaacactttcagatccgaaatgtgacttttggtggtaaggcttatcttgaccacaattcatttgactactcaaatactgtaatgagaactataaarttggagcatgtacatttcagagtgttttacattcaacaggataaaatctatttgcttttgaccaaaatggacatagaaaacctgacaatatcaaatgcac

SEQ ID NO: 1577 - DNA, 201 bp, Homo sapiens
tgcacaaatgccacacatgcttttcccgaattatcctacgaaattccaatatttaaattttgccaataatatcttaacagacgagttgtttaaaagaactmtccaactgcctcacttgaaaactctcattttgaatggcaataaactggagacactttctttagtaagttgctttgctaacaacacacccttggaacactt

SEQ ID NO: 1578 - DNA, 33 bp, Homo sapiens
tccagcctggtgacagagcgagactccatctcr

SEQ ID NO: 1579 - DNA, 201 bp, Homo sapiens
cttttctgggcaaaccttcgagctgctattaatgttaatgtattagccaccagagaaatgtatgaactgcagacattcacagagttaaatgaagagtctcraggttctacaatctctctgatgagaacagattgtctataaaatcccacagtccttgggaagttggggaccacatacactgttgggatgtacattgataca

SEQ ID NO: 1580 - DNA, 201 bp, Homo sapiens
tgttttacattcaacaggataaaatctatttgcttttgaccaaaatggacatagaaaacctgacaatatcaaatgcacaaatgccacacatgcttttccckaattatcctacgaaattccaatatttaaattttgccaataatatcttaacagacgagttgtttaaaagaactatccaactgcctcacttgaaaactctca

SEQ ID NO: 1581 - DNA, 201 bp, Homo sapiens
gcgtgatggaatcaagacttcaaaaatattagaaatgacaaatatagatggcaaaagccaatttgtaagttatgaaatgcaacgaaatcttagtttagaamatgctaagacatcggttctattgcttaataaagttgatttactctgggacgaccttttccttatcttacaatttgtttggcatacatcagtggaacactt

SEQ ID NO: 1582 - DNA, 201 bp, Homo sapiens
agggtgatgctccagagctgccagaagaaagggaactgatgaccaactgctccaacatgtctctaagaaaggttcccgcagacttgaccccagccacaacracactggatttatcctataacctcctttttcaactccagagttcagattttcattctgtctccaaactgagagttttgattctatgccataacagaattc

SEQ ID NO: 1583 - DNA, 201 bp, Homo sapiens
atttgtttggcatacatcagtggaacactttcagatccgaaatgtgacttttggtggtaaggcttatcttgaccacaattcatttgactactcaaatactrtaatgagaactataaaattggagcatgtacatttcagagtgttttacattcaacaggataaaatctatttgcttttgaccaaaatggacatagaaaacct

SEQ ID NO: 1584 - DNA, 201 bp, Homo sapiens
gactactcaaatactgtaatgagaactataaaattggagcatgtacatttcagagtgttttacattcaacaggataaaatctatttgcttttgaccaaaayggacatagaaaacctgacaatatcaaatgcacaaatgccacacatgcttttcccgaattatcctacgaaattccaatatttaaattttgccaataatatc

SEQ ID NO: 1585 - DNA, 201 bp, Homo sapiens
acaaatgccacacatgcttttcccgaattatcctacgaaattccaatatttaaattttgccaataatatcttaacagacgagttgtttaaaagaactatcyaactgcctcacttgaaaactctcattttgaatggcaataaactggagacactttctttagtaagttgctttgctaacaacacacccttggaacacttgga

SEQ ID NO: 1586 - DNA, 201 bp, Homo sapiens
acgaaattccaatatttaaattttgccaataatatcttaacagacgagttgtttaaaagaactatccaactgcctcacttgaaaactctcattttgaatgrcaataaactggagacactttctttagtaagttgctttgctaacaacacacccttggaacacttggatctgagtcaaaatctattacaacataaaaatgat

SEQ ID NO: 1587 - DNA, 201 bp, Homo sapiens
tgtctgtgcccaccacatcatccctacgggctctgtggtcatcccctctccctgctgcatgttctttgtttccaagagaattcctgagaaccgagtggtcrgctaccagctgtccagcaggagcacatgcctcaaggcaggagtgatcttcaccaccaagaagggccagcagttctgtggcgaccccaagcaggagtgggt

SEQ ID NO: 1588 - DNA, 185 bp, Homo sapiens
atggcaggcctgatgaccatagtaaccagccttctgttccttggtgtctgtgcccaccacatcatccctacgggctctgtggtcmtcccctctccctgctgcatgttctttgtttccaagagaattcctgagaaccgagtggtcagctaccagctgtccagcaggagcacatgcctcaaggcagg

SEQ ID NO: 1589 - DNA, 192 bp, Homo sapiens
atggcaggcctgatgaccatagtaaccagccttctgttccttggtgtctgtgcccaccacatcatccctacgggctctgtggtcatcccctytccctgctgcatgttctttgtttccaagagaattcctgagaaccgagtggtcagctaccagctgtccagcaggagcacatgcctcaaggcaggagtgatc

SEQ ID NO: 1590 - DNA, 201 bp, Homo sapiens
ccgaactggacatggctcgagggaagaatcggggcacgtcctgcggaaagacctgccgggaagaccgcgatgatgagtggatgggggtgagcctggcccgrcagcccaaggctgatggccgtgtgttggcctgtgctcatcgctggaagaacatctactatgaagccgaccacatcctaccccatggcttctgctacatca

SEQ ID NO: 1591 - DNA, 201 bp, Homo sapiens
gttctccgctggaaaaagggacaaaagattgcccaaaagaatcagactgtttttgaaaggaattgccgttcagaggactgtgccgcagacctgcagcttcrgggtaaactgctgctctccagtatggatgagaaaaccctgtatctagctttgggggctgtgaagaacatctccctaaacatctctatctccaacctcgga

SEQ ID NO: 1592 - DNA, 201 bp, Homo sapiens
cgaactggacatggctcgagggaagaatcggggcacgtcctgcggaaagacctgccgggaagaccgcgatgatgagtggatgggggtgagcctggcccgamagcccaaggctgatggccgtgtgttggcctgtgctcatcgctggaagaacatctactatgaagccgaccacatcctaccccatggcttctgctacatcat

SEQ ID NO: 1593 - DNA, 201 bp, Homo sapiens
tactttgtgctgctgggagagaccatgggtcaggtcacagagaagctgcagctgacttacatggaggagacgtgtcgtcactatgtggcccatgtgaagcrgagggtgcaggacgtcatcagcccgatcgtgtttgaagcagcctacagcctcagtgagcatgtgactggagaggaggagagggaactgccgcctctgaca

SEQ ID NO: 1594 - DNA, 201 bp, Homo sapiens
cctggacgatctggacaatgatgggttcccagatgtggccattggtgcacccaaggaggatgacttcgcaggggcggtctatatctatcatggtgatgccrgtgggatagtccctcagtactcaatgaaactgtctgggcagaagataaatccagtgctccggatgtttggtcagtccatatcgggaggcattgatatgga

SEQ ID NO: 1595 - DNA, 201 bp, Homo sapiens
ccttcagcgcccgctcagcccgccgtccgcgccccggtggcgggcccgacgcccgcattccgcccgcgggccccgcggcccgcgcgctcggcgccctgctygccgggcagaggggaaggcggcggccggctggggatgggcggcccggctgcgccgaggggcgccgggaggctccgcgcgctgctgctggcgctggtggtc

SEQ ID NO: 1596 - DNA, 201 bp, Homo sapiens
tgggcgcaccaaaggcagattccaaatacagcccttcagtgaagtctcctggggctgtgtttaagtgccgtgttcacaccaaccctgaccggagatgcacmgaactggacatggctcgagggaagaatcggggcacgtcctgcggaaagacctgccgggaagaccgcgatgatgagtggatgggggtgagcctggcccgac

SEQ ID NO: 1597 - DNA, 201 bp, Homo sapiens
gtgctcatcgctggaagaacatctactatgaagccgaccacatcctaccccatggcttctgctacatcatcccctccaacctccaggccaaaggcaggacrctgatcccttgctatgaagagtataagaagaagtacggagaggaacacggctcctgccaggctgggatagcgggcttcttcaccgaggagctggtggtga

SEQ ID NO: 1598 - DNA, 201 bp, Homo sapiens
aaaaggagaagggccagatgcccagggtctactttgtgctgctgggagagaccatgggtcaggtcacagagaagctgcagctgacttacatggaggagacrtgtcgtcactatgtggcccatgtgaagcggagggtgcaggacgtcatcagcccgatcgtgtttgaagcagcctacagcctcagtgagcatgtgactggag

SEQ ID NO: 1599 - DNA, 201 bp, Homo sapiens
cccatggcttctgctacatcatcccctccaacctccaggccaaaggcaggacgctgatcccttgctatgaagagtataagaagaagtacggagaggaacayggctcctgccaggctgggatagcgggcttcttcaccgaggagctggtggtgatgggtgctccagggtcattttattgggctggaaccatcaaagtgctga

SEQ ID NO: 1600 - DNA, 201 bp, Homo sapiens
tgatgctgttctcttcttcattctatcaagcccaggtgccagcctgaggcagccacttcggccaggtcacacgaccggggccagcaccacttcctttaaaratgaactctgaactttggagagtgagctacagagccgagcaatatttatggatgcaacacgcatggtcaaccctcaggggaaaactgttacctaaagtat

SEQ ID NO: 1601 - DNA, 201 bp, Homo sapiens
aggccaaaggcaggacgctgatcccttgctatgaagagtataagaagaagtacggagaggaacacggctcctgccaggctgggatagcgggcttcttcacygaggagctggtggtgatgggtgctccagggtcattttattgggctggaaccatcaaagtgctgaaccttacggacaacacctatttaaaactgaacgacg

SEQ ID NO: 1602 - DNA, 201 bp, Homo sapiens
cccctgtgctcgccttcagcgcccgctcagcccgccgtccgcgccccggtggcgggcccgacgcccgcattccgcccgcgggccccgcggcccgcgcgctsggcgccctgctcgccgggcagaggggaaggcggcggccggctggggatgggcggcccggctgcgccgaggggcgccgggaggctccgcgcgctgctgctg

SEQ ID NO: 1603 - DNA, 201 bp, Homo sapiens
tttgtatcttccatatttggaagaaaaaaatcttctccagatttttcggaggccccactgatgctgttctcttcttcattctatcaagcccaggtgccagyctgaggcagccacttcggccaggtcacacgaccggggccagcaccacttcctttaaagatgaactctgaactttggagagtgagctacagagccgagcaa

SEQ ID NO: 1604 - DNA, 201 bp, Homo sapiens
ctccctaaacatctctatctccaacctcggagatgatgcctatgatgccaacgtgtccttcaatgtttcccgggagctcttcttcatcaacatgtggcagmaggaggagatgggcatctcctgtgagctgctggaatcggacttcctcaaatgcagcgtgggatttcctttcatgaggtcaaagtcaaagtatgaattcag

SEQ ID NO: 1605 - DNA, 201 bp, Homo sapiens
gccagatgcccagggtctactttgtgctgctgggagagaccatgggtcaggtcacagagaagctgcagctgacttacatggaggagacgtgtcgtcactaygtggcccatgtgaagcggagggtgcaggacgtcatcagcccgatcgtgtttgaagcagcctacagcctcagtgagcatgtgactggagaggaggagaggg

SEQ ID NO: 1606 - DNA, 201 bp, Homo sapiens
tggggatgggcggcccggctgcgccgaggggcgccgggaggctccgcgcgctgctgctggcgctggtggtcgcggggatccccgcgggcgcctacaacctygacccgcagcgccccgtgcacttccagggccccgctgactcgttcttcggctacgcagttctggagcatttccacgacaacacgcgctgggtccttgtgg

SEQ ID NO: 1607 - DNA, 201 bp, Homo sapiens
tttgggggctgtgaagaacatctccctaaacatctctatctccaacctcggagatgatgcctatgatgccaacgtgtccttcaatgtttcccgggagctcytcttcatcaacatgtggcagaaggaggagatgggcatctcctgtgagctgctggaatcggacttcctcaaatgcagcgtgggatttcctttcatgaggtc

SEQ ID NO: 1608 - DNA, 201 bp, Homo sapiens
cctgtatctagctttgggggctgtgaagaacatctccctaaacatctctatctccaacctcggagatgatgcctatgatgccaacgtgtccttcaatgttycccgggagctcttcttcatcaacatgtggcagaaggaggagatgggcatctcctgtgagctgctggaatcggacttcctcaaatgcagcgtgggatttcc

SEQ ID NO: 1609 - DNA, 201 bp, Homo sapiens
tccatcaacatcacagcgcctcagtgtcacgacggacagcagcctgtgaactgcctgaacgtcaccacctgcttcagcttccatggcaaacacgttccagragagattggcctgaattatgttctgatggctgacgtggccaaaaaggagaagggccagatgcccagggtctactttgtgctgctgggagagaccatgggt

SEQ ID NO: 1610 - DNA, 201 bp, Homo sapiens; identical to SEQ ID NO: 1590

SEQ ID NO: 1611 - DNA, 201 bp, Homo sapiens; identical to SEQ ID NO: 1591

SEQ ID NO: 1612 - DNA, 201 bp, Homo sapiens; identical to SEQ ID NO: 1592

SEQ ID NO: 1613 - DNA, 201 bp, Homo sapiens; identical to SEQ ID NO: 1593

SEQ ID NO: 1614 - DNA, 201 bp, Homo sapiens; identical to SEQ ID NO: 1594

SEQ ID NO: 1615 - DNA, 136 bp, Homo sapiens
gcgggccccgcggcccgcgcgctcggcgccctgctygccgggcagaggggaaggcggcggccggctggggatgggcggcccggctgcgccgaggggcgccgggaggctccgcgcgctgctgctggcgctggtggtc

SEQ ID NO: 1616 - DNA, 201 bp, Homo sapiens; identical to SEQ ID NO: 1596

SEQ ID NO: 1617 - DNA, 201 bp, Homo sapiens; identical to SEQ ID NO: 1597

SEQ ID NO: 1618 - DNA, 201 bp, Homo sapiens; identical to SEQ ID NO: 1598

SEQ ID NO: 1619 - DNA, 201 bp, Homo sapiens; identical to SEQ ID NO: 1599

SEQ ID NO: 1620 - DNA, 201 bp, Homo sapiens; identical to SEQ ID NO: 1600

SEQ ID NO: 1621 - DNA, 201 bp, Homo sapiens; identical to SEQ ID NO: 1601

SEQ ID NO: 1622 - DNA, 124 bp, Homo sapiens
gcgggccccgcggcccgcgcgctsggcgccctgctcgccgggcagaggggaaggcggcggccggctggggatgggcggcccggctgcgccgaggggcgccgggaggctccgcgcgctgctgctg

SEQ ID NO: 1623 - DNA, 201 bp, Homo sapiens; identical to SEQ ID NO: 1603

SEQ ID NO: 1624 - DNA, 201 bp, Homo sapiens; identical to SEQ ID NO: 1604

SEQ ID NO: 1625 - DNA, 201 bp, Homo sapiens; identical to SEQ ID NO: 1605

SEQ ID NO: 1626 - DNA, 201 bp, Homo sapiens; identical to SEQ ID NO: 1606

SEQ ID NO: 1627 - DNA, 201 bp, Homo sapiens; identical to SEQ ID NO: 1607

SEQ ID NO: 1628 - DNA, 201 bp, Homo sapiens; identical to SEQ ID NO: 1608

SEQ ID NO: 1629 - DNA, 201 bp, Homo sapiens; identical to SEQ ID NO: 1609

SEQ ID NO: 1630 - DNA, 201 bp, Homo sapiens
cagcccagaggaaattgatgtgaaagaggagggaatgagattattcggaggaagggaatgggggagacagcctgagtaaaaggcttggaagttggaattarcagtggggagcagaagcactcatagctcttttaggcagaagaatccaggcccgagctggcagaagagacttagagatgctaatggaatttaaactgaaaa

SEQ ID NO: 1631 - DNA, 201 bp, Homo sapiens
gtaatgtgggtaccctttctgaagctgtcagggctgtgactagcacccttatcacccctcactgccttgtgggaatagtagagggtttttttcctccagascccctggcctttcagttcttaactatttccctccaggccagaaagttttctttgaggaaggagaggagagggtggcaatgatgcctttgatctggaattg

SEQ ID NO: 1632 - DNA, 201 bp, Homo sapiens
ccccagcaccctcagcaggcagcaacgcagggtctacgcccgaggcccccacttcctcaccagccacgccagccacatcttctccaacaggggcttccagygcccagcagcaactcatgcagcagatgatccagcttttggctggaagtggaaactcacaggtgcagacgccagaagtgagatttcagcagcagctggagc

SEQ ID NO: 1633 - DNA, 201 bp, Homo sapiens
gcattgctgcagatccagcagggactacagaccttgcagaccgaggcccctgggctggtacccagccttggctcctttgggatgtcccggaccccagcacmctcagcaggcagcaacgcagggtctacgcccgaggcccccacttcctcaccagccacgccagccacatcttctccaacaggggcttccagcgcccagcag

SEQ ID NO: 1634 - DNA, 201 bp, Homo sapiens; identical to SEQ ID NO: 1630

SEQ ID NO: 1635 - DNA, 201 bp, Homo sapiens
atccccgagccatgcaggcattgctgcagatccagcagggactacagaccttgcagaccgaggcccctgggctggtacccagccttggctcctttgggatrtcccggaccccagcaccctcagcaggcagcaacgcagggtctacgcccgaggcccccacttcctcaccagccacgccagccacatcttctccaacagggg

SEQ ID NO: 1636 - DNA, 201 bp, Homo sapiens; identical to SEQ ID NO: 1631

SEQ ID NO: 1637 - DNA, 201 bp, Homo sapiens; identical to SEQ ID NO: 1632

SEQ ID NO: 1638 - DNA, 201 bp, Homo sapiens; identical to SEQ ID NO: 1633

SEQ ID NO: 1639 - DNA, 201 bp, Homo sapiens; identical to SEQ ID NO: 1630

SEQ ID NO: 1640 - DNA, 201 bp, Homo sapiens; identical to SEQ ID NO: 1635

SEQ ID NO: 1641 - DNA, 201 bp, Homo sapiens; identical to SEQ ID NO: 1631

SEQ ID NO: 1642 - DNA, 201 bp, Homo sapiens; identical to SEQ ID NO: 1632

SEQ ID NO: 1643 - DNA, 201 bp, Homo sapiens; identical to SEQ ID NO: 1633

SEQ ID NO: 1644 - DNA, 201 bp, Homo sapiens; identical to SEQ ID NO: 1630

SEQ ID NO: 1645 - DNA, 201 bp, Homo sapiens; identical to SEQ ID NO: 1635

SEQ ID NO: 1646 - DNA, 146 bp, Homo sapiens
ggaaaagaacgggagtgaaaggacagcagcagcgctggaaggacayttaaccccttcggggagaaaggaatcaacgtgtccgcttggcagtccacgattcaataattatactacatcctcatatttgtcaggcacgcctttggtta

SEQ ID NO: 1647 - DNA, 201 bp, Homo sapiens; identical to SEQ ID NO: 1631

SEQ ID NO: 1648 - DNA, 201 bp, Homo sapiens
agtggtaaaacactttcctggaatcagtatccgtgttgatgctgctttccagtacaaaggattcttctttttcagccgtggatcaaagcaatttgaatacracattaagacaaagaatattacccgaatcatgagaactaatacttggtttcaatgcaaagaaccaaagaactcctcatttggttttgatatcaacaagga

SEQ ID NO: 1649 - DNA, 191 bp, Homo sapiens
ggaatgaagcgccttctgcttctgtttttgttctttataacattttcttctgcatttcccttagtccggatgatggaaaatgaagaaaatrtgcaactggctcaggcatatctcaaccagttctactctcttgaaatagaagggaatcatcttgttcaaagcaagaataggagtctcatagatgacaaaat

SEQ ID NO: 1650 - DNA, 201 bp, Homo sapiens
cgtggatcaaagcaatttgaatacgacattaagacaaagaatattacccgaatcatgagaactaatacttggtttcaatgcaaagaaccaaagaactcctsatttggttttgatatcaacaaggaaaaagcacattcaggaggcataaagatattgtatcataagagtttaagcttgtttatttttggtattgttcatttg

SEQ ID NO: 1651 - DNA, 201 bp, Homo sapiens
atttgaatacgacattaagacaaagaatattacccgaatcatgagaactaatacttggtttcaatgcaaagaaccaaagaactcctcatttggttttgatrtcaacaaggaaaaagcacattcaggaggcataaagatattgtatcataagagtttaagcttgtttatttttggtattgttcatttgctgaaaaacacttc

SEQ ID NO: 1652 - DNA, 174 bp, Homo sapiens
ggaatgaagcgccttctgcttctgtttttgttctttataacattttcttctgcatttcccttagtccggatgayggaaaatgaagaaaatgtgcaactggctcaggcatatctcaaccagttctactctcttgaaatagaagggaatcatcttgttcaaagcaagaataggagt

SEQ ID NO: 1653 - DNA, 167 bp, Homo sapiens
ggaatgaagcgccttctgcttctgtttttgttctttataacattttcttctgcatttcccttagtcyggatgatggaaaatgaagaaaatgtgcaactggctcaggcatatctcaaccagttctactctcttgaaatagaagggaatcatcttgttcaaagcaagaa

SEQ ID NO: 1654 - DNA, 201 bp, Homo sapiens
gcaggcacctatggaggatctattatgatatcacggatgttgagtttgaattaattgcttcattctggccatctctgccagctgatctgcaagctgcataygagaaccccagagataagattctggtttttaaagatgaaaacttctggatgatcagaggatatgctgtcttgccagattatcccaaatccatccatacat

SEQ ID NO: 1655 - DNA, 201 bp, Homo sapiens
aaggaacccactataccccatgcctgtgaccctgacttgacttttgacgctatcacaactttccgcagagaagtaatgttctttaaaggcaggcacctatkgaggatctattatgatatcacggatgttgagtttgaattaattgcttcattctggccatctctgccagctgatctgcaagctgcatacgagaaccccaga

SEQ ID NO: 1656 - DNA, 201 bp, Homo sapiens
gaaatagaagggaatcatcttgttcaaagcaagaataggagtctcatagatgacaaaattcgggaaatgcaagcattttttggattgacagtgactggaaractggactcaaacacccttgagatcatgaagacacccaggtgtggggtgcctgatgtgggccagtatggctacaccctccctgggtggagaaaatacaac

SEQ ID NO: 1657 - DNA, 201 bp, Homo sapiens
tagatgcagccgtctgtgataagaccacaagaaaaacctacttctttgtgggcatttggtgctggaggtttgatgaaatgacccaaaccatggacaaaggrttcccgcagagagtggtaaaacactttcctggaatcagtatccgtgttgatgctgctttccagtacaaaggattcttctttttcagccgtggatcaaagc

SEQ ID NO: 1658 - DNA, 201 bp, Homo sapiens
aattcaccaagatttcaaaggggattgcagacatcatgattgcctttaggactcgagtccatggtcggtgtcctcgctattttgatggtcccttgggagtkcttggccatgcctttcctcctggtccgggtctgggtggtgacactcattttgatgaggatgaaaactggaccaaggatggagcaggattcaacttgtttc

SEQ ID NO: 1659 - DNA, 201 bp, Homo sapiens
tacaacctcacctacagaataataaactatactccggatatggcacgagctgctgtggatgaggctatccaagaaggtttagaagtgtggagcaaagtcaytccactaaaattcaccaagatttcaaaggggattgcagacatcatgattgcctttaggactcgagtccatggtcggtgtcctcgctattttgatggtccc

SEQ ID NO: 1660 - DNA, 201 bp, Homo sapiens
ttgatgttcccaaattatgtctccctggatcccagaaaatacccactttctcaggatgatatcaatggaatccagtccatctatggaggtctgcctaaggwacctgctaagccaaaggaacccactataccccatgcctgtgaccctgacttgacttttgacgctatcacaactttccgcagagaagtaatgttctttaaa

SEQ ID NO: 1661 - DNA, 136 bp, Homo sapiens
agctccaccctgggagggactgtggcccaggtactrcccgggtgctactttatgggcagcagctcagttgagttagagtctggaagacctcagaagacctcctgtcctatgaggccctccccatggctttagagac

SEQ ID NO: 1662 - DNA, 201 bp, Homo sapiens
ctggtgatgagaccagactccagctggaggcagttaacatcactgacctgagcgagaacagaaagcaggacaagcgcttcgccttcatccgctcagacagyggccccaccaccagttttgagtctgccgcctgccccggttggttcctctgcacagcgatggaagctgaccagcccgtcagcctcaccaatatgcctgacg

SEQ ID NO: 1663 - DNA, 192 bp, Homo sapiens
agctccaccctgggagggactgtggcccaggtactgcccgggtgctactttatgggcagcagctcagttgagttagagtctggaagacctcrgaagacctcctgtcctatgaggccctccccatggctttagagacgatctgccgaccctctgggagaaaatccagcaagatgcaagccttcagaatctggg

SEQ ID NO: 1664 - DNA, 201 bp, Homo sapiens
gcttcgccttcatccgctcagacagtggccccaccaccagttttgagtctgccgcctgccccggttggttcctctgcacagcgatggaagctgaccagccygtcagcctcaccaatatgcctgacgaaggcgtcatggtcaccaaattctacttccaggaggacgagtagtactgcccaggcctgcctgttcccattcttg

SEQ ID NO: 1665 - DNA, 201 bp, Homo sapiens
tgggagggactgtggcccaggtactgcccgggtgctactttatgggcagcagctcagttgagttagagtctggaagacctcagaagacctcctgtcctatsaggccctccccatggctttagagacgatctgccgaccctctgggagaaaatccagcaagatgcaagccttcagaatctgggatgttaaccagaagacctt

SEQ ID NO: 1666 - DNA, 201 bp, Homo sapiens
tctgccgaccctctgggagaaaatccagcaagatgcaagccttcagaatctgggatgttaaccagaagaccttctatctgaggaacaaccaactagttgcyggatacttgcaaggaccaaatgtcaatttagaagaaaagatagatgtggtacccattgagcctcatgctctgttcttgggaatccatggagggaagatgt

SEQ ID NO: 1667 - DNA, 201 bp, Homo sapiens
acaagcgcttcgccttcatccgctcagacagtggccccaccaccagttttgagtctgccgcctgccccggttggttcctctgcacagcgatggaagctgaycagcccgtcagcctcaccaatatgcctgacgaaggcgtcatggtcaccaaattctacttccaggaggacgagtagtactgcccaggcctgcctgttccca

SEQ ID NO: 1668 - DNA, 201 bp, Homo sapiens
aaggactgcagggactgccagtccccctgccccagggctcccggctatgggggcactgaggaccagccattgaggggtggaccctcagaaggcgtcacaasaacctggtcacaggactctgcctcctcttcaactgaccagcctccatgctgcctccagaatggtctttctaatgtgtgaatcagagcacagcagcccctg

SEQ ID NO: 1669 - DNA, 201 bp, Homo sapiens
ccctgccccagggctcccggctatgggggcactgaggaccagccattgaggggtggaccctcagaaggcgtcacaagaacctggtcacaggactctgcctyctcttcaactgaccagcctccatgctgcctccagaatggtctttctaatgtgtgaatcagagcacagcagcccctgcacaaagcccttccatgtcgcctc

SEQ ID NO: 1670 - DNA, 201 bp, Homo sapiens
cccgggtgctactttatgggcagcagctcagttgagttagagtctggaagacctcagaagacctcctgtcctatgaggccctccccatggctttagagacratctgccgaccctctgggagaaaatccagcaagatgcaagccttcagaatctgggatgttaaccagaagaccttctatctgaggaacaaccaactagttg

SEQ ID NO: 1671 - DNA, 201 bp, Homo sapiens
tcctctgctgaaggaataaattgctccttgacattgtagagcttctggcacttggagacttgtatgaaagatggctgtgcctctgcctgtctcccccaccrggctgggagctctgcagagcaggaaacatgactcgtatatgtctcaggtccctgcagggccaagcacctagcctcgctcttggcaggtactcagcgaatg

SEQ ID NO: 1672 - DNA, 201 bp, Homo sapiens
aaacacaagataactgcataagtaatgactttcagtgcagattcatagctaacccataaactgctggggcaaaaatcatcttggaaggctctgaacctcaraaaggattcacaagacgatctgccgaccctctgggagaaaatccagcaagatgcaagccttcagaatctgggatgttaaccagaagaccttctatctgag

SEQ ID NO: 1673 - DNA, 140 bp, Homo sapiens
gggcagctccaccctgggagggactgtggcccaggtactrcccgggtgctactttatgggcagcagctcagttgagttagagtctggaagacctcagaagacctcctgtcctatgaggccctccccatggctttagctga

SEQ ID NO: 1674 - DNA, 201 bp, Homo sapiens; identical to SEQ ID NO: 1662

SEQ ID NO: 1675 - DNA, 196 bp, Homo sapiens
gggcagctccaccctgggagggactgtggcccaggtactgcccgggtgctactttatgggcagcagctcagttgagttagagtctggaagacctcrgaagacctcctgtcctatgaggccctccccatggctttagctgacttgtatgaagaaggaggtggaggaggaggagaaggtgaagacaatgctgactcaa

SEQ ID NO: 1676 - DNA, 201 bp, Homo sapiens; identical to SEQ ID NO: 1664

SEQ ID NO: 1677 - DNA, 201 bp, Homo sapiens
tgggagggactgtggcccaggtactgcccgggtgctactttatgggcagcagctcagttgagttagagtctggaagacctcagaagacctcctgtcctatsaggccctccccatggctttagctgacttgtatgaagaaggaggtggaggaggaggagaaggtgaagacaatgctgactcaaaggggggattataaaacta

SEQ ID NO: 1678 - DNA, 201 bp, Homo sapiens; identical to SEQ ID NO: 1666

SEQ ID NO: 1679 - DNA, 201 bp, Homo sapiens; identical to SEQ ID NO: 1667

SEQ ID NO: 1680 - DNA, 201 bp, Homo sapiens; identical to SEQ ID NO: 1668

SEQ ID NO: 1681 - DNA, 201 bp, Homo sapiens; identical to SEQ ID NO: 1669

SEQ ID NO: 1682 - DNA, 201 bp, Homo sapiens
ataagtaatgactttcagtgcagattcatagctaacccataaactgctggggcaaaaatcatcttggaaggctctgaacctcagaaaggattcacaagacratctgccgaccctctgggagaaaatccagcaagatgcaagccttcagaatctgggatgttaaccagaagaccttctatctgaggaacaaccaactagttg

SEQ ID NO: 1683 - DNA, 201 bp, Homo sapiens; identical to SEQ ID NO: 1671

SEQ ID NO: 1684 - DNA, 201 bp, Homo sapiens; identical to SEQ ID NO: 1672

SEQ ID NO: 1685 - DNA, 140 bp, Homo sapiens
gggcagctccaccctgggagggactgtggcccaggtactrcccgggtgctactttatgggcagcagctcagttgagttagagtctggaagacctcagaagacctcctgtcctatgaggccctccccatggctttaggggg

SEQ ID NO: 1686 - DNA, 201 bp, Homo sapiens; identical to SEQ ID NO: 1662

SEQ ID NO: 1687 - DNA, 196 bp, Homo sapiens
gggcagctccaccctgggagggactgtggcccaggtactgcccgggtgctactttatgggcagcagctcagttgagttagagtctggaagacctcrgaagacctcctgtcctatgaggccctccccatggctttagggggattataaaactaatcatcaaagccaagaaggcaagagcaagcatgtaccgctgaaa

SEQ ID NO: 1688 - DNA, 201 bp, Homo sapiens; identical to SEQ ID NO: 1664

SEQ ID NO: 1689 - DNA, 201 bp, Homo sapiens
tgggagggactgtggcccaggtactgcccgggtgctactttatgggcagcagctcagttgagttagagtctggaagacctcagaagacctcctgtcctatsaggccctccccatggctttagggggattataaaactaatcatcaaagccaagaaggcaagagcaagcatgtaccgctgaaaacacaagataactgcataa

SEQ ID NO: 1690 - DNA, 201 bp, Homo sapiens; identical to SEQ ID NO: 1666

SEQ ID NO: 1691 - DNA, 201 bp, Homo sapiens; identical to SEQ ID NO: 1667

SEQ ID NO: 1692 - DNA, 201 bp, Homo sapiens; identical to SEQ ID NO: 1668

SEQ ID NO: 1693 - DNA, 201 bp, Homo sapiens; identical to SEQ ID NO: 1669

SEQ ID NO: 1694 - DNA, 201 bp, Homo sapiens; identical to SEQ ID NO: 1682

SEQ ID NO: 1695 - DNA, 201 bp, Homo sapiens; identical to SEQ ID NO: 1671

SEQ ID NO: 1696 - DNA, 201 bp, Homo sapiens; identical to SEQ ID NO: 1662

SEQ ID NO: 1697 - DNA, 201 bp, Homo sapiens; identical to SEQ ID NO: 1664

SEQ ID NO: 1698 - DNA, 201 bp, Homo sapiens; identical to SEQ ID NO: 1666

SEQ ID NO: 1699 - DNA, 201 bp, Homo sapiens; identical to SEQ ID NO: 1667

SEQ ID NO: 1700 - DNA, 201 bp, Homo sapiens; identical to SEQ ID NO: 1669

SEQ ID NO: 1701 - DNA, 201 bp, Homo sapiens; identical to SEQ ID NO: 1668

SEQ ID NO: 1702 - DNA, 169 bp, Homo sapiens
gctgacttgtatgaagaaggaggtggaggaggaggagaaggtgaagacaatgctgactcaaaggagacratctgccgaccctctgggagaaaatccagcaagatgcaagccttcagaatctgggatgttaaccagaagaccttctatctgaggaacaaccaactagttg

SEQ ID NO: 1703 - DNA, 201 bp, Homo sapiens; identical to SEQ ID NO: 1671

SEQ ID NO: 1704 - DNA, 201 bp, Homo sapiens; identical to SEQ ID NO: 1662

SEQ ID NO: 1705 - DNA, 201 bp, Homo sapiens; identical to SEQ ID NO: 1664

SEQ ID NO: 1706 - DNA, 135 bp, Homo sapiens
tgcgaggagggtatttccgcttctcgcagtggggyagggtggcagacgcctagcttgggtgagtgactatttctttataaaccacaactctgggcccgcaatggcagtccactgccttgctgcagtcacagaatg

SEQ ID NO: 1707 - DNA, 201 bp, Homo sapiens; identical to SEQ ID NO: 1666

SEQ ID NO: 1708 - DNA, 201 bp, Homo sapiens; identical to SEQ ID NO: 1667

SEQ ID NO: 1709 - DNA, 201 bp, Homo sapiens; identical to SEQ ID NO: 1669

SEQ ID NO: 1710 - DNA, 201 bp, Homo sapiens; identical to SEQ ID NO: 1668

SEQ ID NO: 1711 - DNA, 125 bp, Homo sapiens
tgcgaggagggtatttccgcttctygcagtggggcagggtggcagacgcctagcttgggtgagtgactatttctttataaaccacaactctgggcccgcaatggcagtccactgccttgctgcag

SEQ ID NO: 1712 - DNA, 201 bp, Homo sapiens
atggcagtccactgccttgctgcagtcacagaatggaaatctgcagaggcctccgcagtcacctaatcactctcctcctcttcctgttccattcagagacratctgccgaccctctgggagaaaatccagcaagatgcaagccttcagaatctgggatgttaaccagaagaccttctatctgaggaacaaccaactagttg

SEQ ID NO: 1713 - DNA, 201 bp, Homo sapiens; identical to SEQ ID NO: 1671

SEQ ID NO: 1714 - DNA, 201 bp, Homo sapiens
attcccattctacgccccacaggccatctctaaggtccagccttcctcctatgcccctcaagccactccggacagctggcctccctcctatggggtatgcrtggaaggttctggcaaagactcccccactgggacactttctagtcctaaacaccttaggcctaaaggtcagcttcagaaagagccaccagctggaagctg

SEQ ID NO: 1715 - DNA, 201 bp, Homo sapiens
ccaaatgcaccttggagggaagcagagagaatatgagttcttcggcctgacccctgacacagagttccttggcaccatcatgatttgcgttcccacctggkccaaggagagtgccccctacatgtgccgagtgaagacactgccagaccggacatggacctactccttctccggagccttcctgttctccatgggcttcct

SEQ ID NO: 1716 - DNA, 201 bp, Homo sapiens
ccctggctgctcacgcccctgaggacccctcggatctgctccagcacgtgaaattccagtccagcaactttgaaaacatcctgacgtgggacagcgggccrgagggcaccccagacacggtctacagcatcgagtataagacgtacggagagagggactgggtggcaaagaagggctgtcagcggatcacccggaagtcct

SEQ ID NO: 1717 - DNA, 201 bp, Homo sapiens
aggagcacgtcctgatccctgtctttgacctcagcggccccagcagtctggcccagcctgtccagtactcccagatcagggtgtctggacccagggagccygcaggagctccacagcggcatagcctgtccgagatcacctacttagggcagccagacatctccatcctccagccctccaacgtgccacctccccagatcc

SEQ ID NO: 1718 - DNA, 201 bp, Homo sapiens
tggaagacatcttccatgacctgttctaccacttagagctccaggtcaaccgcacctaccaaatgcaccttggagggaagcagagagaatatgagttcttyggcctgacccctgacacagagttccttggcaccatcatgatttgcgttcccacctgggccaaggagagtgccccctacatgtgccgagtgaagacactgc

SEQ ID NO: 1719 - DNA, 201 bp, Homo sapiens
caaccgcacctaccaaatgcaccttggagggaagcagagagaatatgagttcttcggcctgacccctgacacagagttccttggcaccatcatgatttgcrttcccacctgggccaaggagagtgccccctacatgtgccgagtgaagacactgccagaccggacatggacctactccttctccggagccttcctgttctc

SEQ ID NO: 1720 - DNA, 201 bp, Homo sapiens
caccgctgtcagtgcgggaggccggtcagccaccaagatgactgacaggttcagctctctgcagcacactaccctcaagccacctgatgtgacctgtatcyccaaagtgagatcgattcagatgattgttcatcctacccccacgccaatccgtgcaggcgatggccaccggctaaccctggaagacatcttccatgacct

SEQ ID NO: 1721 - DNA, 201 bp, Homo sapiens
tgcccatgccacacactctgcgatctggcctcagacgggtgcccttgagagaagcagagggagtggcatgcagggcccctgccatgggtgcgctcctcacyggaacaaagcagcatgataaggactgcagcgggggagctctggggagcagcttgtgtagacaagcgcgtgctcgctgagccctgcaaggcagaaatgaca

SEQ ID NO: 1722 - DNA, 201 bp, Homo sapiens
acttagggcagccagacatctccatcctccagccctccaacgtgccacctccccagatcctctccccactgtcctatgccccaaacgctgcccctgaggtygggcccccatcctatgcacctcaggtgacccccgaagctcaattcccattctacgccccacaggccatctctaaggtccagccttcctcctatgcccctc

SEQ ID NO: 1723 - DNA, 201 bp, Homo sapiens
ggaggaagggacaccacagtacctaaagggccagctccccctcctctcctcagtccagatcgagggccaccccatgtccctccctttgcaacctccttccsgtccatgttccccctcggaccaaggtccaagtccctggggcctgctggagtcccttgtgtgtcccaaggatgaagccaagagcccagcccctgagacctc

SEQ ID NO: 1724 - DNA, 201 bp, Homo sapiens
ttcggcctgacccctgacacagagttccttggcaccatcatgatttgcgttcccacctgggccaaggagagtgccccctacatgtgccgagtgaagacacygccagaccggacatggacctactccttctccggagccttcctgttctccatgggcttcctcgtcgcagtactctgctacctgagctacagatatgtcacc

SEQ ID NO: 1725 - DNA, 201 bp, Homo sapiens
ggttcagctctctgcagcacactaccctcaagccacctgatgtgacctgtatctccaaagtgagatcgattcagatgattgttcatcctacccccacgccmatccgtgcaggcgatggccaccggctaaccctggaagacatcttccatgacctgttctaccacttagagctccaggtcaaccgcacctaccaaatgcacc

SEQ ID NO: 1726 - DNA, 201 bp, Homo sapiens
ctgtgcagtgggagtcctgaggggaatgggaaaggcttggtgcttcctccctgtccctacccagtgtcacatccttggctgtcaatcccatgcctgcccaygccacacactctgcgatctggcctcagacgggtgcccttgagagaagcagagggagtggcatgcagggcccctgccatgggtgcgctcctcaccggaaca

SEQ ID NO: 1727 - DNA, 201 bp, Homo sapiens
catgccacacactctgcgatctggcctcagacgggtgcccttgagagaagcagagggagtggcatgcagggcccctgccatgggtgcgctcctcaccggarcaaagcagcatgataaggactgcagcgggggagctctggggagcagcttgtgtagacaagcgcgtgctcgctgagccctgcaaggcagaaatgacagtgc

SEQ ID NO: 1728 - DNA, 201 bp, Homo sapiens
tgaggagcggttcaacaagcagagcgcatcactacaagcacaaatctccactgatgctggggcagccacttctgccaagaatgagataacagaactaaaaygtaccctgcaagccctggaaattgagcttcagtcccaactggccatgaaaagctccctggagggaaccctggctgacacagaagctggctacgtggctca

SEQ ID NO: 1729 - DNA, 175 bp, Homo sapiens
actcttcgtcatcacctctcctattcgcctggacaagctcatgtttgcaggagcaccatgtcttgctcgtctcgygcctcctcctccagggctggaggcagcagctcagccagggtgtctgctggtggaagcagcttcagcagtggaagcagatgtggtctggggggcagctcgg

SEQ ID NO: 1730 - DNA, 201 bp, Homo sapiens
gaggtgaaagttaaataaggaacttccagatcaacaaaagtgtctttcaaagaaaaaaaaatcaagaaggacacaagcgaagaaatggcatcaatctaggyatctttctggataatttcaggaaaagcttcagtccagaaatggatgactagccaacttttctgcatcttcttatttcctcattagaatgctcttgaaata

SEQ ID NO: 1731 - DNA, 201 bp, Homo sapiens
atgagaacgagctgtgtctccggcagagcgtggaggctgacatcaatggcctgcggaaagtcctggatgacctgactatgacccgctctgacctggagatkcagattgagagtttcaccgaggagctagcctacctgaggaagaaccacgaggaggaaatgaagaatatgcaaggaagctctggaggggaggtgaccgtag

SEQ ID NO: 1732 - DNA, 201 bp, Homo sapiens
aaaatcaaggagtggtatgacaaatatgggcctgggtctggagacggtggatcgggaagagattatagcaaatactattcaataattgaagatctcagaarccagatcattgctgccactgttgaaaatgctgggatcattttgcacattgacaatgccagattggctgctgatgacttcagactgaagtatgagaacgag

SEQ ID NO: 1733 - DNA, 201 bp, Homo sapiens
ggggcagctttggagggggctttggtagctgctcagtagggggtggttttgggggagcttcaggctctgggacaggatttggtgggggttctagctttggyggggtctctggatttggcaggggttctggattctgtgggagttctagattcagcagtggtgctactggaggcttctacagctatggtggtggtatgggag

SEQ ID NO: 1734 - DNA, 201 bp, Homo sapiens
aaaaatcaagaaggacacaagcgaagaaatggcatcaatctaggcatctttctggataatttcaggaaaagcttcagtccagaaatggatgactagccaayttttctgcatcttcttatttcctcattagaatgctcttgaaatagctgaattaacaactttgctttaattgtttctatgcttcaataaatttacttttgc

SEQ ID NO: 1735 - DNA, 201 bp, Homo sapiens
cctggagggaaccctggctgacacagaagctggctacgtggctcagctgtcagaaattcaaacgcagatcagtgccctggaggaggagatctgccagatcyggggtgagactaaatgccagaacgcagagtacgagcaattgctggacatcaagacacgcctggaggtggagatcgagacctaccgccgcctgctcgatgg

SEQ ID NO: 1736 - DNA, 201 bp, Homo sapiens
aaaagctccctggagggaaccctggctgacacagaagctggctacgtggctcagctgtcagaaattcaaacgcagatcagtgccctggaggaggagatctrccagatctggggtgagactaaatgccagaacgcagagtacgagcaattgctggacatcaagacacgcctggaggtggagatcgagacctaccgccgcctg

SEQ ID NO: 1737 - DNA, 201 bp, Homo sapiens
aaaagtgtctttcaaagaaaaaaaaatcaagaaggacacaagcgaagaaatggcatcaatctaggcatctttctggataatttcaggaaaagcttcagtcyagaaatggatgactagccaacttttctgcatcttcttatttcctcattagaatgctcttgaaatagctgaattaacaactttgctttaattgtttctatg

SEQ ID NO: 1738 - DNA, 201 bp, Homo sapiens
ctacgtggctcagctgtcagaaattcaaacgcagatcagtgccctggaggaggagatctgccagatctggggtgagactaaatgccagaacgcagagtacragcaattgctggacatcaagacacgcctggaggtggagatcgagacctaccgccgcctgctcgatggagagggaggtggttctagttttgcagaatttgg

SEQ ID NO: 1739 - DNA, 201 bp, Homo sapiens
ctgtaaacatgggatccagggatctggtatctggtgactcaagatctggaagctgttctggtcaaggacgagattcaagcaagactagagtgactaagacyatcgtagaggagttggtggatggcaaggttgtctcgtctcaagtcagcagtatttctgaggtgaaagttaaataaggaacttccagatcaacaaaagtgt

SEQ ID NO: 1740 - DNA, 201 bp, Homo sapiens
ggtgaagataactgtgacttgcatgatgtgcattgagtcagactccatggggtctctggttcattctcctgtctgcctattgagcctgccgatgtcacttrggagacagggacttgatatttccttcaggttaatgactgtggttctttgtgtcccctccagatttctctacctcagtccctttttttgtggtctctttat

SEQ ID NO: 1741 - DNA, 201 bp, Homo sapiens
acccagaagccaactatggaggaaatcacagctgctgcagtaaagtctggggcccatagtttcatctctggactccctcagggctatgacacagaggtagrcgaggctgggagccagctgtcagggggtcagcgacaggcagtggcgttggcccgagcattgatccggaaaccgtgtgtacttatcctggatgatgccacc

SEQ ID NO: 1742 - DNA, 201 bp, Homo sapiens
tgtgcattgagtcagactccatggggtctctggttcattctcctgtctgcctattgagcctgccgatgtcacttaggagacagggacttgatatttccttyaggttaatgactgtggttctttgtgtcccctccagatttctctacctcagtccctttttttgtggtctctttatagatttcaggtatgctgctgaaagtg

SEQ ID NO: 1743 - DNA, 201 bp, Homo sapiens
gctgcagtaaagtctggggcccatagtttcatctctggactccctcagggctatgacacagaggtagacgaggctgggagccagctgtcagggggtcagcracaggcagtggcgttggcccgagcattgatccggaaaccgtgtgtacttatcctggatgatgccaccagtgccctggatgcaaacagccagttacaggtg

SEQ ID NO: 1744 - DNA, 201 bp, Homo sapiens
gactccatggggtctctggttcattctcctgtctgcctattgagcctgccgatgtcacttaggagacagggacttgatatttccttcaggttaatgactgyggttctttgtgtcccctccagatttctctacctcagtccctttttttgtggtctctttatagatttcaggtatgctgctgaaagtgggaatcctctacat

SEQ ID NO: 1745 - DNA, 201 bp, Homo sapiens
gctcctgcagatgctccagaatgaaagccttctcagacctgcgcactccatctccctcccttttcttctctctgtggtggagaaccacagctgcagagtakgcagctgcctccaggatgagttacttgaaatttgccttgagtgtgttacctcctttccaagctcctcgtgataatgcagacttcctggagtacaaacaca

SEQ ID NO: 1746 - DNA, 201 bp, Homo sapiens
ttctctctgtggtggagaaccacagctgcagagtaggcagctgcctccaggatgagttacttgaaatttgccttgagtgtgttacctcctttccaagctcytcgtgataatgcagacttcctggagtacaaacacaggatttgtaattccttactgtaacggagtttagagccagggctgatgctttggtgtggccagcac

SEQ ID NO: 1747 - DNA, 201 bp, Homo sapiens
gagttacttgaaatttgccttgagtgtgttacctcctttccaagctcctcgtgataatgcagacttcctggagtacaaacacaggatttgtaattccttastgtaacggagtttagagccagggctgatgctttggtgtggccagcactctgaaactgagaaatgttcagaatgtacggaaagatgatcagctattttcaa

SEQ ID NO: 1748 - DNA, 201 bp, Homo sapiens
agactccatggggtctctggttcattctcctgtctgcctattgagcctgccgatgtcacttaggagacagggacttgatatttccttcaggttaatgactrtggttctttgtgtcccctccagatttctctacctcagtccctttttttgtggtctctttatagatttcaggtatgctgctgaaagtgggaatcctctaca

SEQ ID NO: 1749 - DNA, 201 bp, Homo sapiens
gggaatcctctacattggtgggcagctggtgaccagtggggctgtaagcagtgggaaccttgtcacatttgttctctaccagatgcagttcacccaggctktggaggtactgctctccatctaccccagagtacagaaggctgtgggctcctcagagaaaatatttgagtacctggaccgcacccctcgctgcccacccag

SEQ ID NO: 1750 - DNA, 201 bp, Homo sapiens
cacccctcgctgcccacccagtggtctgttgactcccttacacttggagggccttgtccagttccaagatgtctcctttgcctacccaaaccgcccagatrtcttagtgctacaggggctgacattcaccctacgccctggcgaggtgacggcgctggtgggacccaatgggtctgggaagagcacagtggctgccctgct

SEQ ID NO: 1751 - DNA, 201 bp, Homo sapiens
tccctcagggctatgacacagaggtagacgaggctgggagccagctgtcagggggtcagcgacaggcagtggcgttggcccgagcattgatccggaaaccrtgtgtacttatcctggatgatgccaccagtgccctggatgcaaacagccagttacaggtggagcagctcctgtacgaaagccctgagcggtactcccgct

SEQ ID NO: 1752 - DNA, 201 bp, Homo sapiens
ggaaaccgtgtgtacttatcctggatgatgccaccagtgccctggatgcaaacagccagttacaggtggagcagctcctgtacgaaagccctgagcggtaytcccgctcagtgcttctcatcacccagcacctcagcctggtggagcaggctgaccacatcctctttctggaaggaggcgctatccgggaggggggaaccc

SEQ ID NO: 1753 - DNA, 201 bp, Homo sapiens
ttgctaccaaaatagtctgggcaggccacttttggaagtaggcgttatctagtgagcaggcggccgctttcgatttcgctttcccctaaatggctgagctkctcgccagcgcaggatcagcctgttcctgggactttccgagagccccgccctcgttccctcccccagccgccagtaggggaggactcggcggtacccgga

SEQ ID NO: 1754 - DNA, 201 bp, Homo sapiens
ccggcggtcagggcggctctggaaaccctgtgcgtcggcttctaggctgcctgggctcggagacgcgccgcctctcgctgttcctggtcctggtggtcctstcctctcttggggagatggccattccattctttacgggccgcctcactgactggattctacaagatggctcagccgataccttcactcgaaacttaactc

SEQ ID NO: 1755 - DNA, 201 bp, Homo sapiens
cgggacttgccttgttccgagagctgatctcatggggagcccccgggtccgcggatagcaccaggctactgcactggggaagtcaccctaccgccttcgtygtcagttatgcagcggcactgcccgcagcagccctgtggcacaaactcgggagcctctgggtgcccggcggtcagggcggctctggaaaccctgtgcgtc

SEQ ID NO: 1756 - DNA, 201 bp, Homo sapiens; identical to SEQ ID NO: 1746

SEQ ID NO: 1757 - DNA, 201 bp, Homo sapiens; identical to SEQ ID NO: 1751

SEQ ID NO: 1758 - DNA, 201 bp, Homo sapiens
agagccacaggtatttggaagaagtcttcaactgctgcagtaaagtctggggcccatagtttcatctctggactccctcagggctatgacacagaggtagrcgaggctgggagccagctgtcagggggtcagcgacaggcagtggcgttggcccgagcattgatccggaaaccgtgtgtacttatcctggatgatgccacc

SEQ ID NO: 1759 - DNA, 201 bp, Homo sapiens; identical to SEQ ID NO: 1743

SEQ ID NO: 1760 - DNA, 201 bp, Homo sapiens
ctggattctacaagatggctcagccgataccttcactcgaaacttaactctcatgtccattctcaccatagccagtgcagtgctggagttcgtgggtgacrggatctataacaacaccatgggccacgtgcacagccacttgcagggagaggtgtttggggctgtcctgcgccaggagacggagtttttccaacagaacca

SEQ ID NO: 1761 - DNA, 201 bp, Homo sapiens
ccgataccttcactcgaaacttaactctcatgtccattctcaccatagccagtgcagtgctggagttcgtgggtgacgggatctataacaacaccatgggycacgtgcacagccacttgcagggagaggtgtttggggctgtcctgcgccaggagacggagtttttccaacagaaccagacaggtaacatcatgtctcggg

SEQ ID NO: 1762 - DNA, 201 bp, Homo sapiens; identical to SEQ ID NO: 1747

SEQ ID NO: 1763 - DNA, 201 bp, Homo sapiens
cctcactgactggattctacaagatggctcagccgataccttcactcgaaacttaactctcatgtccattctcaccatagccagtgcagtgctggagttcktgggtgacgggatctataacaacaccatgggccacgtgcacagccacttgcagggagaggtgtttggggctgtcctgcgccaggagacggagtttttcca

SEQ ID NO: 1764 - DNA, 201 bp, Homo sapiens; identical to SEQ ID NO: 1752

SEQ ID NO: 1765 - DNA, 201 bp, Homo sapiens
gagtgagaatctgagcttatttctgtggtacctggtgcgaggcctatgtctcttggggatcatgctctggggatcagtgtccctcaccatggtcaccctgrtcaccctgcctctgcttttccttctgcccaagaaggtgggaaaatggtaccagttgctggaagtgcaggtgcgggaatctctggcaaagtccagccaggt

SEQ ID NO: 1766 - DNA, 201 bp, Homo sapiens
cagggcaacggttggctccaagagcgaaaacgcaggtgcccagggctggctggctgctttgaagccattagctgcggcactgggcttggccctgccgggasttgccttgttccgagagctgatctcatggggagcccccgggtccgcggatagcaccaggctactgcactggggaagtcaccctaccgccttcgttgtcag

SEQ ID NO: 1767 - DNA, 201 bp, Homo sapiens
atgggccacgtgcacagccacttgcagggagaggtgtttggggctgtcctgcgccaggagacggagtttttccaacagaaccagacaggtaacatcatgtytcgggtaacagaggacacgtccaccctgagtgattctctgagtgagaatctgagcttatttctgtggtacctggtgcgaggcctatgtctcttggggatc

SEQ ID NO: 1768 - DNA, 201 bp, Homo sapiens
ctgcttttccttctgcccaagaaggtgggaaaatggtaccagttgctggaagtgcaggtgcgggaatctctggcaaagtccagccaggtggccattgaggytctgtcggccatgcctacagttcgaagctttgccaacgaggagggcgaagcccagaagtttagggaaaagctgcaagaaataaagacactcaaccagaag

SEQ ID NO: 1769 - DNA, 201 bp, Homo sapiens
gggcgcggagagtcccaggcccggccgggaccgggacggcgtccgagtgccaatggctagctctaggtgtcccgctccccgcgggtgccgctgcctccccsgagcttctctcgcatggctggggacagtactgctacttctcgccgactgggtgctgctccggaccgcgctgccccgcatattctccctgctggtgcccac

SEQ ID NO: 1770 - DNA, 201 bp, Homo sapiens; identical to SEQ ID NO: 1745

SEQ ID NO: 1771 - DNA, 201 bp, Homo sapiens
ccctcgttccctcccccagccgccagtaggggaggactcggcggtacccggagcttcaggccccaccggggcgcggagagtcccaggcccggccgggaccrggacggcgtccgagtgccaatggctagctctaggtgtcccgctccccgcgggtgccgctgcctccccggagcttctctcgcatggctggggacagtactg

SEQ ID NO: 1772 - DNA, 201 bp, Homo sapiens
ttccgagagccccgccctcgttccctcccccagccgccagtaggggaggactcggcggtacccggagcttcaggccccaccggggcgcggagagtcccagrcccggccgggaccgggacggcgtccgagtgccaatggctagctctaggtgtcccgctccccgcgggtgccgctgcctccccggagcttctctcgcatggc

SEQ ID NO: 1773 - DNA, 201 bp, Homo sapiens; identical to SEQ ID NO: 1750

SEQ ID NO: 1774 - DNA, 201 bp, Homo sapiens; identical to SEQ ID NO: 1749

SEQ ID NO: 1775 - DNA, 201 bp, Homo sapiens; identical to SEQ ID NO: 1753

SEQ ID NO: 1776 - DNA, 201 bp, Homo sapiens; identical to SEQ ID NO: 1754

SEQ ID NO: 1777 - DNA, 201 bp, Homo sapiens; identical to SEQ ID NO: 1755

SEQ ID NO: 1778 - DNA, 201 bp, Homo sapiens; identical to SEQ ID NO: 1746

SEQ ID NO: 1779 - DNA, 201 bp, Homo sapiens; identical to SEQ ID NO: 1751

SEQ ID NO: 1780 - DNA, 201 bp, Homo sapiens; identical to SEQ ID NO: 1741

SEQ ID NO: 1781 - DNA, 201 bp, Homo sapiens; identical to SEQ ID NO: 1743

SEQ ID NO: 1782 - DNA, 201 bp, Homo sapiens; identical to SEQ ID NO: 1760

SEQ ID NO: 1783 - DNA, 201 bp, Homo sapiens
ccgataccttcactcgaaacttaactctcatgtccattctcaccatagccagtgcagtgctggagttcgtgggtgacgggatctataacaacaccatgggycacgtgcacagccacttgcagggagaggtgtttggggctgtcctgcgccaggagacggagtttttccaacagaaccagacagttgctggaagtgcaggtg

SEQ ID NO: 1784 - DNA, 201 bp, Homo sapiens; identical to SEQ ID NO: 1747

SEQ ID NO: 1785 - DNA, 201 bp, Homo sapiens; identical to SEQ ID NO: 1763

SEQ ID NO: 1786 - DNA, 201 bp, Homo sapiens; identical to SEQ ID NO: 1752

SEQ ID NO: 1787 - DNA, 201 bp, Homo sapiens; identical to SEQ ID NO: 1766

SEQ ID NO: 1788 - DNA, 201 bp, Homo sapiens
tcctgcgccaggagacggagtttttccaacagaaccagacagttgctggaagtgcaggtgcgggaatctctggcaaagtccagccaggtggccattgaggytctgtcggccatgcctacagttcgaagctttgccaacgaggagggcgaagcccagaagtttagggaaaagctgcaagaaataaagacactcaaccagaag

SEQ ID NO: 1789 - DNA, 201 bp, Homo sapiens; identical to SEQ ID NO: 1745

SEQ ID NO: 1790 - DNA, 201 bp, Homo sapiens; identical to SEQ ID NO: 1769

SEQ ID NO: 1791 - DNA, 201 bp, Homo sapiens; identical to SEQ ID NO: 1772

SEQ ID NO: 1792 - DNA, 201 bp, Homo sapiens; identical to SEQ ID NO: 1771

SEQ ID NO: 1793 - DNA, 201 bp, Homo sapiens; identical to SEQ ID NO: 1750

SEQ ID NO: 1794 - DNA, 201 bp, Homo sapiens; identical to SEQ ID NO: 1749

SEQ ID NO: 1795 - DNA, 201 bp, Homo sapiens; identical to SEQ ID NO: 1753

SEQ ID NO: 1796 - DNA, 201 bp, Homo sapiens; identical to SEQ ID NO: 1754

SEQ ID NO: 1797 - DNA, 201 bp, Homo sapiens; identical to SEQ ID NO: 1755

SEQ ID NO: 1798 - DNA, 201 bp, Homo sapiens; identical to SEQ ID NO: 1746

SEQ ID NO: 1799 - DNA, 201 bp, Homo sapiens; identical to SEQ ID NO: 1751

SEQ ID NO: 1800 - DNA, 201 bp, Homo sapiens; identical to SEQ ID NO: 1741

SEQ ID NO: 1801 - DNA, 201 bp, Homo sapiens; identical to SEQ ID NO: 1743

SEQ ID NO: 1802 - DNA, 201 bp, Homo sapiens; identical to SEQ ID NO: 1760

SEQ ID NO: 1803 - DNA, 201 bp, Homo sapiens; identical to SEQ ID NO: 1761

SEQ ID NO: 1804 - DNA, 201 bp, Homo sapiens; identical to SEQ ID NO: 1747

SEQ ID NO: 1805 - DNA, 201 bp, Homo sapiens; identical to SEQ ID NO: 1763

SEQ ID NO: 1806 - DNA, 201 bp, Homo sapiens; identical to SEQ ID NO: 1752

SEQ ID NO: 1807 - DNA, 201 bp, Homo sapiens; identical to SEQ ID NO: 1765

SEQ ID NO: 1808 - DNA, 201 bp, Homo sapiens; identical to SEQ ID NO: 1766

SEQ ID NO: 1809 - DNA, 201 bp, Homo sapiens; identical to SEQ ID NO: 1767

SEQ ID NO: 1810 - DNA, 201 bp, Homo sapiens; identical to SEQ ID NO: 1768

SEQ ID NO: 1811 - DNA, 201 bp, Homo sapiens
gggcgcggagagtcccaggcccggccgggaccgggacggcgtccgagtgccaatggctagctctaggtgtcccgctccccgcgggtgccgctgcctccccsgagcttctctcgcatggctggggacagtactgctacttctcgccgactgggtgctgctccggaccgcgctgccccgcatattctccctgctggggtcctc

SEQ ID NO: 1812 - DNA, 201 bp, Homo sapiens; identical to SEQ ID NO: 1745

SEQ ID NO: 1813 - DNA, 201 bp, Homo sapiens; identical to SEQ ID NO: 1772

SEQ ID NO: 1814 - DNA, 201 bp, Homo sapiens; identical to SEQ ID NO: 1750

SEQ ID NO: 1815 - DNA, 201 bp, Homo sapiens; identical to SEQ ID NO: 1749

SEQ ID NO: 1816 - DNA, 201 bp, Homo sapiens; identical to SEQ ID NO: 1771

SEQ ID NO: 1817 - DNA, 201 bp, Homo sapiens; identical to SEQ ID NO: 1753

SEQ ID NO: 1818 - DNA, 201 bp, Homo sapiens; identical to SEQ ID NO: 1754

SEQ ID NO: 1819 - DNA, 201 bp, Homo sapiens; identical to SEQ ID NO: 1755

SEQ ID NO: 1820 - DNA, 201 bp, Homo sapiens; identical to SEQ ID NO: 1746

SEQ ID NO: 1821 - DNA, 201 bp, Homo sapiens; identical to SEQ ID NO: 1751

SEQ ID NO: 1822 - DNA, 201 bp, Homo sapiens; identical to SEQ ID NO: 1741

SEQ ID NO: 1823 - DNA, 201 bp, Homo sapiens; identical to SEQ ID NO: 1743

SEQ ID NO: 1824 - DNA, 201 bp, Homo sapiens; identical to SEQ ID NO: 1760

SEQ ID NO: 1825 - DNA, 201 bp, Homo sapiens; identical to SEQ ID NO: 1761

SEQ ID NO: 1826 - DNA, 201 bp, Homo sapiens; identical to SEQ ID NO: 1747

SEQ ID NO: 1827 - DNA, 201 bp, Homo sapiens; identical to SEQ ID NO: 1763

SEQ ID NO: 1828 - DNA, 201 bp, Homo sapiens; identical to SEQ ID NO: 1752

SEQ ID NO: 1829 - DNA, 201 bp, Homo sapiens; identical to SEQ ID NO: 1765

SEQ ID NO: 1830 - DNA, 201 bp, Homo sapiens; identical to SEQ ID NO: 1766

SEQ ID NO: 1831 - DNA, 201 bp, Homo sapiens; identical to SEQ ID NO: 1767

SEQ ID NO: 1832 - DNA, 201 bp, Homo sapiens; identical to SEQ ID NO: 1768

SEQ ID NO: 1833 - DNA, 201 bp, Homo sapiens; identical to SEQ ID NO: 1769

SEQ ID NO: 1834 - DNA, 201 bp, Homo sapiens; identical to SEQ ID NO: 1745

SEQ ID NO: 1835 - DNA, 201 bp, Homo sapiens; identical to SEQ ID NO: 1749

SEQ ID NO: 1836 - DNA, 201 bp, Homo sapiens; identical to SEQ ID NO: 1750

SEQ ID NO: 1837 - DNA, 201 bp, Homo sapiens; identical to SEQ ID NO: 1772

SEQ ID NO: 1838 - DNA, 201 bp, Homo sapiens; identical to SEQ ID NO: 1771

SEQ ID NO: 1839 - DNA, 201 bp, Homo sapiens; identical to SEQ ID NO: 1753

SEQ ID NO: 1840 - DNA, 201 bp, Homo sapiens; identical to SEQ ID NO: 1754

SEQ ID NO: 1841 - DNA, 201 bp, Homo sapiens; identical to SEQ ID NO: 1755

SEQ ID NO: 1842 - DNA, 201 bp, Homo sapiens; identical to SEQ ID NO: 1746

SEQ ID NO: 1843 - DNA, 201 bp, Homo sapiens; identical to SEQ ID NO: 1751

SEQ ID NO: 1844 - DNA, 201 bp, Homo sapiens; identical to SEQ ID NO: 1741

SEQ ID NO: 1845 - DNA, 201 bp, Homo sapiens; identical to SEQ ID NO: 1743

SEQ ID NO: 1846 - DNA, 201 bp, Homo sapiens; identical to SEQ ID NO: 1760

SEQ ID NO: 1847 - DNA, 201 bp, Homo sapiens; identical to SEQ ID NO: 1761

SEQ ID NO: 1848 - DNA, 201 bp, Homo sapiens; identical to SEQ ID NO: 1747

SEQ ID NO: 1849 - DNA, 201 bp, Homo sapiens; identical to SEQ ID NO: 1763

SEQ ID NO: 1850 - DNA, 201 bp, Homo sapiens; identical to SEQ ID NO: 1752

SEQ ID NO: 1851 - DNA, 201 bp, Homo sapiens; identical to SEQ ID NO: 1765

SEQ ID NO: 1852 - DNA, 201 bp, Homo sapiens; identical to SEQ ID NO: 1766

SEQ ID NO: 1853 - DNA, 201 bp, Homo sapiens; identical to SEQ ID NO: 1767

SEQ ID NO: 1854 - DNA, 201 bp, Homo sapiens; identical to SEQ ID NO: 1768

SEQ ID NO: 1855 - DNA, 201 bp, Homo sapiens; identical to SEQ ID NO: 1769

SEQ ID NO: 1856 - DNA, 201 bp, Homo sapiens; identical to SEQ ID NO: 1745

SEQ ID NO: 1857 - DNA, 201 bp, Homo sapiens; identical to SEQ ID NO: 1749

SEQ ID NO: 1858 - DNA, 201 bp, Homo sapiens; identical to SEQ ID NO: 1772

SEQ ID NO: 1859 - DNA, 201 bp, Homo sapiens; identical to SEQ ID NO: 1771

SEQ ID NO: 1860 - DNA, 201 bp, Homo sapiens
ccaacctgatccgtaatggagactggaccttccagatcctggtgatgctggaaatgaccccccagcagggagatgtctacacctgccaagtggagcacacmagcctggatagtcctgtcaccgtggagtggaaggcacagtctgattctgcccggagtaagacattgacgggagctgggggcttcgtgctggggctcatca

SEQ ID NO: 1861 - DNA, 144 bp, Homo sapiens
caggagctccctttagcgagtccttcttttcctgactgcagctyttttcattttgccatccttttccagctccatgatggttctgcaggtttctgcggccccccggacagtggctctgacggcgttactgatggtgctgctcac

SEQ ID NO: 1862 - DNA, 201 bp, Homo sapiens
agttcgcgcgcttcgacagcgacgtgggggagttccgggcggtgacggagctggggcggcctgctgcggagtactggaacagccagaaggacatcctggargagaagcgggcagtgccggacaggatgtgcagacacaactacgagctgggcgggcccatgaccctgcagcgccgagtccagcctagggtgaatgtttccc

SEQ ID NO: 1863 - DNA, 201 bp, Homo sapiens
tgccggacaggatgtgcagacacaactacgagctgggcgggcccatgaccctgcagcgccgagtccagcctagggtgaatgtttccccctccaagaagggycccttgcagcaccacaacctgcttgtctgccacgtgacggatttctacccaggcagcattcaagtccgatggttcctgaatggacaggaggaaacagctg

SEQ ID NO: 1864 - DNA, 201 bp, Homo sapiens
tggttctgcaggtttctgcggccccccggacagtggctctgacggcgttactgatggtgctgctcacatctgtggtccagggcagggccactccagagaastaccttttccagggacggcaggaatgctacgcgtttaatgggacacagcgcttcctggagagatacatctacaaccgggaggagttcgcgcgcttcgaca

SEQ ID NO: 1865 - DNA, 201 bp, Homo sapiens
gttctgcaggtttctgcggccccccggacagtggctctgacggcgttactgatggtgctgctcacatctgtggtccagggcagggccactccagagaattkccttttccagggacggcaggaatgctacgcgtttaatgggacacagcgcttcctggagagatacatctacaaccgggaggagttcgcgcgcttcgacagc

SEQ ID NO: 1866 - DNA, 201 bp, Homo sapiens
acgtgggggagttccgggcggtgacggagctggggcggcctgctgcggagtactggaacagccagaaggacatcctggaggagaagcgggcagtgccggaraggatgtgcagacacaactacgagctgggcgggcccatgaccctgcagcgccgagtccagcctagggtgaatgtttccccctccaagaaggggcccttgc

SEQ ID NO: 1867 - DNA, 201 bp, Homo sapiens
tctgcaggtttctgcggccccccggacagtggctctgacggcgttactgatggtgctgctcacatctgtggtccagggcagggccactccagagaattacwttttccagggacggcaggaatgctacgcgtttaatgggacacagcgcttcctggagagatacatctacaaccgggaggagttcgcgcgcttcgacagcga

SEQ ID NO: 1868 - DNA, 201 bp, Homo sapiens
gtgggggagttccgggcggtgacggagctggggcggcctgctgcggagtactggaacagccagaaggacatcctggaggagaagcgggcagtgccggacargatgtgcagacacaactacgagctgggcgggcccatgaccctgcagcgccgagtccagcctagggtgaatgtttccccctccaagaaggggcccttgcag

SEQ ID NO: 1869 - DNA, 201 bp, Homo sapiens
  misc_feature (1)...(201): n = A,T,C or G, or insertion/deletion polymorphism (see Tables 1-2)
aggtttctgcggccccccggacagtggctctgacggcgttactgatggtgctgctcacatctgtggtccagggcagggccactccagagaattaccttttncagggacggcaggaatgctacgcgtttaatgggacacagcgcttcctggagagatacatctacaaccgggaggagttcgcgcgcttcgacagcgacgtgg

SEQ ID NO: 1870 - DNA, 157 bp, Homo sapiens
attcaatggtgagcagactgcaaatctgcctgataggacccatattcccacagcactaattcaacatataccttactgagagcatgttttatcattaccaktaagaagttaaatgaacatcagaatttaaaatcataaatataatctaatacacttt

SEQ ID NO: 1871 - DNA, 201 bp, Homo sapiens
tggggctcatcatctgtggagtgggcatcttcatgcacaggaggagcaagaaagttcaacgaggatctgcataaacagggttcctgagctcactgaaaagwctattgtgccttaggaaaagcatttgctgtgtttcgttagcatctggctccaggacagaccttcaacttccaaattggatactgctgccaagaagttgct

SEQ ID NO: 1872 - DNA, 201 bp, Homo sapiens
agctgggggcttcgtgctggggctcatcatctgtggagtgggcatcttcatgcacaggaggagcaagaaagttcaacgaggatctgcataaacagggttcstgagctcactgaaaagactattgtgccttaggaaaagcatttgctgtgtttcgttagcatctggctccaggacagaccttcaacttccaaattggatact

SEQ ID NO: 1873 - DNA, 201 bp, Homo sapiens
cctagggtgaatgtttccccctccaagaaggggcccttgcagcaccacaacctgcttgtctgccacgtgacggatttctacccaggcagcattcaagtccsatggttcctgaatggacaggaggaaacagctggggtcgtgtccaccaacctgatccgtaatggagactggaccttccagatcctggtgatgctggaaatg

SEQ ID NO: 1874 - DNA, 201 bp, Homo sapiens
ggagctggggcggcctgctgcggagtactggaacagccagaaggacatcctggaggagaagcgggcagtgccggacaggatgtgcagacacaactacgagdtgggcgggcccatgaccctgcagcgccgagtccagcctagggtgaatgtttccccctccaagaaggggcccttgcagcaccacaacctgcttgtctgcca

SEQ ID NO: 1875 - DNA, 201 bp, Homo sapiens
ttccagggacggcaggaatgctacgcgtttaatgggacacagcgcttcctggagagatacatctacaaccgggaggagttcgcgcgcttcgacagcgacgrgggggagttccgggcggtgacggagctggggcggcctgctgcggagtactggaacagccagaaggacatcctggaggagaagcgggcagtgccggacagg

SEQ ID NO: 1876 - DNA, 201 bp, Homo sapiens
gttcgcgcgcttcgacagcgacgtgggggagttccgggcggtgacggagctggggcggcctgctgcggagtactggaacagccagaaggacatcctggagragaagcgggcagtgccggacaggatgtgcagacacaactacgagctgggcgggcccatgaccctgcagcgccgagtccagcctagggtgaatgtttcccc

SEQ ID NO: 1877 - DNA, 201 bp, Homo sapiens
gctggggcggcctgctgcggagtactggaacagccagaaggacatcctggaggagaagcgggcagtgccggacaggatgtgcagacacaactacgagctgrgcgggcccatgaccctgcagcgccgagtccagcctagggtgaatgtttccccctccaagaaggggcccttgcagcaccacaacctgcttgtctgccacgt

SEQ ID NO: 1878 - DNA, 201 bp, Homo sapiens
taaacagggttcctgagctcactgaaaagactattgtgccttaggaaaagcatttgctgtgtttcgttagcatctggctccaggacagaccttcaacttckaaattggatactgctgccaagaagttgctctgaagtcagtttctatcattctgctctttgattcaaagcactgtttctctcactgggcctccaaccatgt

SEQ ID NO: 1879 - DNA, 201 bp, Homo sapiens
aggcagcattcaagtccgatggttcctgaatggacaggaggaaacagctggggtcgtgtccaccaacctgatccgtaatggagactggaccttccagatcwtggtgatgctggaaatgaccccccagcagggagatgtctacacctgccaagtggagcacaccagcctggatagtcctgtcaccgtggagtggaaggcaca

SEQ ID NO: 1880 - DNA, 201 bp, Homo sapiens
catgcacaggaggagcaagaaagttcaacgaggatctgcataaacagggttcctgagctcactgaaaagactattgtgccttaggaaaagcatttgctgtytttcgttagcatctggctccaggacagaccttcaacttccaaattggatactgctgccaagaagttgctctgaagtcagtttctatcattctgctctttg

SEQ ID NO: 1881 - DNA, 201 bp, Homo sapiens
aaacagggttcctgagctcactgaaaagactattgtgccttaggaaaagcatttgctgtgtttcgttagcatctggctccaggacagaccttcaacttccwaattggatactgctgccaagaagttgctctgaagtcagtttctatcattctgctctttgattcaaagcactgtttctctcactgggcctccaaccatgtt

SEQ ID NO: 1882 - DNA, 201 bp, Homo sapiens
acaggaggagcaagaaagttcaacgaggatctgcataaacagggttcctgagctcactgaaaagactattgtgccttaggaaaagcatttgctgtgtttcrttagcatctggctccaggacagaccttcaacttccaaattggatactgctgccaagaagttgctctgaagtcagtttctatcattctgctctttgattca

SEQ ID NO: 1883 - DNA, 201 bp, Homo sapiens
gaaaagcatttgctgtgtttcgttagcatctggctccaggacagaccttcaacttccaaattggatactgctgccaagaagttgctctgaagtcagtttcratcattctgctctttgattcaaagcactgtttctctcactgggcctccaaccatgttcccttcttcttagcaccacaaataatcaaaacccaacatgact

SEQ ID NO: 1884 - DNA, 201 bp, Homo sapiens
gacacagcgcttcctggagagatacatctacaaccgggaggagttcgcgcgcttcgacagcgacgtgggggagttccgggcggtgacggagctggggcggmctgctgcggagtactggaacagccagaaggacatcctggaggagaagcgggcagtgccggacaggatgtgcagacacaactacgagctgggcgggcccat

SEQ ID NO: 1885 - DNA, 201 bp, Homo sapiens
tccagggcagggccactccagagaattaccttttccagggacggcaggaatgctacgcgtttaatgggacacagcgcttcctggagagatacatctacaascgggaggagttcgcgcgcttcgacagcgacgtgggggagttccgggcggtgacggagctggggcggcctgctgcggagtactggaacagccagaaggaca

SEQ ID NO: 1886 - DNA, 201 bp, Homo sapiens
cagtttctatcattctgctctttgattcaaagcactgtttctctcactgggcctccaaccatgttcccttcttcttagcaccacaaataatcaaaacccarcatgactgtttgttttcctttaaaaatatgcaccaaatcatctctcatcacttttctctgagggttttagtagacagtaggagttaataaagaagttcat

SEQ ID NO: 1887 - DNA, 201 bp, Homo sapiens
gtttctatcattctgctctttgattcaaagcactgtttctctcactgggcctccaaccatgttcccttcttcttagcaccacaaataatcaaaacccaacstgactgtttgttttcctttaaaaatatgcaccaaatcatctctcatcacttttctctgagggttttagtagacagtaggagttaataaagaagttcattt

SEQ ID NO: 1888 - DNA, 201 bp, Homo sapiens
tcattctgctctttgattcaaagcactgtttctctcactgggcctccaaccatgttcccttcttcttagcaccacaaataatcaaaacccaacatgactgyttgttttcctttaaaaatatgcaccaaatcatctctcatcacttttctctgagggttttagtagacagtaggagttaataaagaagttcattttggttta

SEQ ID NO: 1889 - DNA, 201 bp, Homo sapiens
ggaggagcaagaaagttcaacgaggatctgcataaacagggttcctgagctcactgaaaagactattgtgccttaggaaaagcatttgctgtgtttcgttygcatctggctccaggacagaccttcaacttccaaattggatactgctgccaagaagttgctctgaagtcagtttctatcattctgctctttgattcaaag

SEQ ID NO: 1890 - DNA, 201 bp, Homo sapiens
aagcactgtttctctcactgggcctccaaccatgttcccttcttcttagcaccacaaataatcaaaacccaacatgactgtttgttttcctttaaaaataygcaccaaatcatctctcatcacttttctctgagggttttagtagacagtaggagttaataaagaagttcattttggtttaaacataggaaagaagagaac

SEQ ID NO: 1891 - DNA, 201 bp, Homo sapiens
agcaagaaagttcaacgaggatctgcataaacagggttcctgagctcactgaaaagactattgtgccttaggaaaagcatttgctgtgtttcgttagcatytggctccaggacagaccttcaacttccaaattggatactgctgccaagaagttgctctgaagtcagtttctatcattctgctctttgattcaaagcactg

SEQ ID NO: 1892 - DNA, 201 bp, Homo sapiens
gtttctctcactgggcctccaaccatgttcccttcttcttagcaccacaaataatcaaaacccaacatgactgtttgttttcctttaaaaatatgcaccaratcatctctcatcacttttctctgagggttttagtagacagtaggagttaataaagaagttcattttggtttaaacataggaaagaagagaaccatgaaa

SEQ ID NO: 1893 - DNA, 201 bp, Homo sapiens
acgaggatctgcataaacagggttcctgagctcactgaaaagactattgtgccttaggaaaagcatttgctgtgtttcgttagcatctggctccaggacayaccttcaacttccaaattggatactgctgccaagaagttgctctgaagtcagtttctatcattctgctctttgattcaaagcactgtttctctcactggg

SEQ ID NO: 1894 - DNA, 201 bp, Homo sapiens
actgggcctccaaccatgttcccttcttcttagcaccacaaataatcaaaacccaacatgactgtttgttttcctttaaaaatatgcaccaaatcatctcycatcacttttctctgagggttttagtagacagtaggagttaataaagaagttcattttggtttaaacataggaaagaagagaaccatgaaaatggggata

SEQ ID NO: 1895 - DNA, 201 bp, Homo sapiens
  misc_feature (1)...(201): n = A,T,C or G, or insertion/deletion polymorphism (see Tables 1-2)
ggtttctgcggccccccggacagtggctctgacggcgttactgatggtgctgctcacatctgtggtccagggcagggccactccagagaattaccttttcnagggacggcaggaatgctacgcgtttaatgggacacagcgcttcctggagagatacatctacaaccgggaggagttcgcgcgcttcgacagcgacgtggg

SEQ ID NO: 1896 - DNA, 201 bp, Homo sapiens
cagggccactccagagaattaccttttccagggacggcaggaatgctacgcgtttaatgggacacagcgcttcctggagagatacatctacaaccgggagwagttcgcgcgcttcgacagcgacgtgggggagttccgggcggtgacggagctggggcggcctgctgcggagtactggaacagccagaaggacatcctgga

SEQ ID NO: 1897 - DNA, 201 bp, Homo sapiens
ggccactccagagaattaccttttccagggacggcaggaatgctacgcgtttaatgggacacagcgcttcctggagagatacatctacaaccgggaggagytcgcgcgcttcgacagcgacgtgggggagttccgggcggtgacggagctggggcggcctgctgcggagtactggaacagccagaaggacatcctggagga

SEQ ID NO: 1898 - DNA, 201 bp, Homo sapiens
gggcttcgtgctggggctcatcatctgtggagtgggcatcttcatgcacaggaggagcaagaaagttcaacgaggatctgcataaacagggttcctgagcycactgaaaagactattgtgccttaggaaaagcatttgctgtgtttcgttagcatctggctccaggacagaccttcaacttccaaattggatactgctgcc

SEQ ID NO: 1899 - DNA, 201 bp, Homo sapiens
acagcgcttcctggagagatacatctacaaccgggaggagttcgcgcgcttcgacagcgacgtgggggagttccgggcggtgacggagctggggcggcctmctgcggagtactggaacagccagaaggacatcctggaggagaagcgggcagtgccggacaggatgtgcagacacaactacgagctgggcgggcccatgac

SEQ ID NO: 1900 - DNA, 201 bp, Homo sapiens
ggcgggcccatgaccctgcagcgccgagtccagcctagggtgaatgtttccccctccaagaaggggcccttgcagcaccacaacctgcttgtctgccacgrgacggatttctacccaggcagcattcaagtccgatggttcctgaatggacaggaggaaacagctggggtcgtgtccaccaacctgatccgtaatggagac

SEQ ID NO: 1901 - DNA, 201 bp, Homo sapiens
ggacaggaggaaacagctggggtcgtgtccaccaacctgatccgtaatggagactggaccttccagatcctggtgatgctggaaatgaccccccagcaggyagatgtctacacctgccaagtggagcacaccagcctggatagtcctgtcaccgtggagtggaaggcacagtctgattctgcccggagtaagacattgacg

SEQ ID NO: 1902 - DNA, 201 bp, Homo sapiens
cgcttcctggagagatacatctacaaccgggaggagttcgcgcgcttcgacagcgacgtgggggagttccgggcggtgacggagctggggcggcctgctgsggagtactggaacagccagaaggacatcctggaggagaagcgggcagtgccggacaggatgtgcagacacaactacgagctgggcgggcccatgaccctg

SEQ ID NO: 1903 - DNA, 201 bp, Homo sapiens
ggaaacagctggggtcgtgtccaccaacctgatccgtaatggagactggaccttccagatcctggtgatgctggaaatgaccccccagcagggagatgtcyacacctgccaagtggagcacaccagcctggatagtcctgtcaccgtggagtggaaggcacagtctgattctgcccggagtaagacattgacgggagctgg

SEQ ID NO: 1904 - DNA, 201 bp, Homo sapiens
acaaccgggaggagttcgcgcgcttcgacagcgacgtgggggagttccgggcggtgacggagctggggcggcctgctgcggagtactggaacagccagaamgacatcctggaggagaagcgggcagtgccggacaggatgtgcagacacaactacgagctgggcgggcccatgaccctgcagcgccgagtccagcctaggg

SEQ ID NO: 1905 - DNA, 201 bp, Homo sapiens
ctgatccgtaatggagactggaccttccagatcctggtgatgctggaaatgaccccccagcagggagatgtctacacctgccaagtggagcacaccagccyggatagtcctgtcaccgtggagtggaaggcacagtctgattctgcccggagtaagacattgacgggagctgggggcttcgtgctggggctcatcatctgt

SEQ ID NO: 1906 - DNA, 201 bp, Homo sapiens
ccagaaggacatcctggaggagaagcgggcagtgccggacaggatgtgcagacacaactacgagctgggcgggcccatgaccctgcagcgccgagtccagrctagggtgaatgtttccccctccaagaaggggcccttgcagcaccacaacctgcttgtctgccacgtgacggatttctacccaggcagcattcaagtccg

SEQ ID NO: 1907 - DNA, 201 bp, Homo sapiens
cctgcagcgccgagtccagcctagggtgaatgtttccccctccaagaaggggcccttgcagcaccacaacctgcttgtctgccacgtgacggatttctacrcaggcagcattcaagtccgatggttcctgaatggacaggaggaaacagctggggtcgtgtccaccaacctgatccgtaatggagactggaccttccagat

SEQ ID NO: 1908 - DNA, 201 bp, Homo sapiens
gggcggcctgctgcggagtactggaacagccagaaggacatcctggaggagaagcgggcagtgccggacaggatgtgcagacacaactacgagctgggcgsgcccatgaccctgcagcgccgagtccagcctagggtgaatgtttccccctccaagaaggggcccttgcagcaccacaacctgcttgtctgccacgtgacg

SEQ ID NO: 1909 - DNA, 201 bp, Homo sapiens
ctacgagctgggcgggcccatgaccctgcagcgccgagtccagcctagggtgaatgtttccccctccaagaaggggcccttgcagcaccacaacctgcttrtctgccacgtgacggatttctacccaggcagcattcaagtccgatggttcctgaatggacaggaggaaacagctggggtcgtgtccaccaacctgatccg

SEQ ID NO: 1910 - DNA, 201 bp, Homo sapiens
gcagggccactccagagaattaccttttccagggacggcaggaatgctacgcgtttaatgggacacagcgcttcctggagagatacatctacaaccgggaygagttcgcgcgcttcgacagcgacgtgggggagttccgggcggtgacggagctggggcggcctgctgcggagtactggaacagccagaaggacatcctgg

SEQ ID NO: 1911 - DNA, 201 bp, Homo sapiens
ggcagtgccggacaggatgtgcagacacaactacgagctgggcgggcccatgaccctgcagcgccgagtccagcctagggtgaatgtttccccctccaagraggggcccttgcagcaccacaacctgcttgtctgccacgtgacggatttctacccaggcagcattcaagtccgatggttcctgaatggacaggaggaaac

SEQ ID NO: 1912 - DNA, 201 bp, Homo sapiens
tggggcggcctgctgcggagtactggaacagccagaaggacatcctggaggagaagcgggcagtgccggacaggatgtgcagacacaactacgagctgggsgggcccatgaccctgcagcgccgagtccagcctagggtgaatgtttccccctccaagaaggggcccttgcagcaccacaacctgcttgtctgccacgtga

SEQ ID NO: 1913 - DNA, 201 bp, Homo sapiens
ggatctgcataaacagggttcctgagctcactgaaaagactattgtgccttaggaaaagcatttgctgtgtttcgttagcatctggctccaggacagaccrtcaacttccaaattggatactgctgccaagaagttgctctgaagtcagtttctatcattctgctctttgattcaaagcactgtttctctcactgggcctc

SEQ ID NO: 1914 - DNA, 201 bp, Homo sapiens
ggcggcctgctgcggagtactggaacagccagaaggacatcctggaggagaagcgggcagtgccggacaggatgtgcagacacaactacgagctgggcggrcccatgaccctgcagcgccgagtccagcctagggtgaatgtttccccctccaagaaggggcccttgcagcaccacaacctgcttgtctgccacgtgacgg

SEQ ID NO: 1915 - DNA, 201 bp, Homo sapiens
gcataaacagggttcctgagctcactgaaaagactattgtgccttaggaaaagcatttgctgtgtttcgttagcatctggctccaggacagaccttcaacmtccaaattggatactgctgccaagaagttgctctgaagtcagtttctatcattctgctctttgattcaaagcactgtttctctcactgggcctccaacca

SEQ ID NO: 1916 - DNA, 201 bp, Homo sapiens
gacatcctggaggagaagcgggcagtgccggacaggatgtgcagacacaactacgagctgggcgggcccatgaccctgcagcgccgagtccagcctagggygaatgtttccccctccaagaaggggcccttgcagcaccacaacctgcttgtctgccacgtgacggatttctacccaggcagcattcaagtccgatggttc

SEQ ID NO: 1917 - DNA, 168 bp, Homo sapiens
caggagctccctttagcgagtccttcttttcctgactgcagctcttttcattttgccatccttttccwgctccatgatggttctgcaggtttctgcggccccccggacagtggctctgacggcgttactgatggtgctgctcacatctgtggtccagggcagggccac

SEQ ID NO: 1918 - DNA, 201 bp, Homo sapiens
cggatttctacccaggcagcattcaagtccgatggttcctgaatggacaggaggaaacagctggggtcgtgtccaccaacctgatccgtaatggagactgmaccttccagatcctggtgatgctggaaatgaccccccagcagggagatgtctacacctgccaagtggagcacaccagcctggatagtcctgtcaccgtgg

SEQ ID NO: 1919 - DNA, 201 bp, Homo sapiens
tccagggacggcaggaatgctacgcgtttaatgggacacagcgcttcctggagagatacatctacaaccgggaggagttcgcgcgcttcgacagcgacgtrggggagttccgggcggtgacggagctggggcggcctgctgcggagtactggaacagccagaaggacatcctggaggagaagcgggcagtgccggacagga

SEQ ID NO: 1920 - DNA, 201 bp, Homo sapiens
cggtgacggagctggggcggcctgctgcggagtactggaacagccagaaggacatcctggaggagaagcgggcagtgccggacaggatgtgcagacacaaytacgagctgggcgggcccatgaccctgcagcgccgagtccagcctagggtgaatgtttccccctccaagaaggggcccttgcagcaccacaacctgcttg

SEQ ID NO: 1921 - DNA, 201 bp, Homo sapiens
ggagctccctttagcgagtccttcttttcctgactgcagctcttttcattttgccatccttttccagctccatgatggttctgcaggtttctgcggccccscggacagtggctctgacggcgttactgatggtgctgctcacatctgtggtccagggcagggccactccagagaattaccttttccagggacggcaggaat

SEQ ID NO: 1922 - DNA, 201 bp, Homo sapiens
agctccctttagcgagtccttcttttcctgactgcagctcttttcattttgccatccttttccagctccatgatggttctgcaggtttctgcggcccccckgacagtggctctgacggcgttactgatggtgctgctcacatctgtggtccagggcagggccactccagagaattaccttttccagggacggcaggaatgc

SEQ ID NO: 1923 - DNA, 201 bp, Homo sapiens
acgcgtttaatgggacacagcgcttcctggagagatacatctacaaccgggaggagttcgcgcgcttcgacagcgacgtgggggagttccgggcggtgacrgagctggggcggcctgctgcggagtactggaacagccagaaggacatcctggaggagaagcgggcagtgccggacaggatgtgcagacacaactacgagc

SEQ ID NO: 1924 - DNA, 201 bp, Homo sapiens
ctccctttagcgagtccttcttttcctgactgcagctcttttcattttgccatccttttccagctccatgatggttctgcaggtttctgcggccccccggwcagtggctctgacggcgttactgatggtgctgctcacatctgtggtccagggcagggccactccagagaattaccttttccagggacggcaggaatgcta

SEQ ID NO: 1925 - DNA, 201 bp, Homo sapiens
  misc_feature (1)...(201): n = A,T,C or G, or insertion/deletion polymorphism (see Tables 1-2)
tttagcgagtccttcttttcctgactgcagctcttttcattttgccatccttttccagctccatgatggttctgcaggtttctgcggccccccggacagtngctctgacggcgttactgatggtgctgctcacatctgtggtccagggcagggccactccagagaattaccttttccagggacggcaggaatgctacgcgt

SEQ ID NO: 1926 - DNA, 201 bp, Homo sapiens
gcgtttaatgggacacagcgcttcctggagagatacatctacaaccgggaggagttcgcgcgcttcgacagcgacgtgggggagttccgggcggtgacggrgctggggcggcctgctgcggagtactggaacagccagaaggacatcctggaggagaagcgggcagtgccggacaggatgtgcagacacaactacgagctg

SEQ ID NO: 1927 - DNA, 201 bp, Homo sapiens
taaagaagttcattttggtttaaacataggaaagaagagaaccatgaaaatggggatatgttaactattgtataatggggcctgttacacatgacactctkctgaattgactgtatttcagtgagctgcccccaaatcaagtttagtgccctcatccatttatgtctcagaccactattcttaactattcaatggtgagca

SEQ ID NO: 1928 - DNA, 201 bp, Homo sapiens
ctgtcaccgtggagtggaaggcacagtctgattctgcccggagtaagacattgacgggagctgggggcttcgtgctggggctcatcatctgtggagtgggwatcttcatgcacaggaggagcaagaaagaggcacagtctgattctgcccggagtaagacattgacgggagctgggggcttcgtgctggggctcatcatct

SEQ ID NO: 1929 - DNA, 201 bp, Homo sapiens
caccagcctggatagtcctgtcaccgtggagtggaaggcacagtctgattctgcccggagtaagacattgacgggagctgggggcttcgtgctggggctcstcatctgtggagtgggcatcttcatgcacaggaggagcaagaaagaggcacagtctgattctgcccggagtaagacattgacgggagctgggggcttcgt

SEQ ID NO: 1930 - DNA, 201 bp, Homo sapiens
cgggcagtgccggacaggatgtgcagacacaactacgagctgggcgggcccatgaccctgcagcgccgagtccagcctagggtgaatgtttccccctccasgaaggggcccttgcagcaccacaacctgcttgtctgccacgtgacggatttctacccaggcagcattcaagtccgatggttcctgaatggacaggaggaa

SEQ ID NO: 1931 - DNA, 201 bp, Homo sapiens
cctggagagatacatctacaaccgggaggagttcgcgcgcttcgacagcgacgtgggggagttccgggcggtgacggagctggggcggcctgctgcggagdactggaacagccagaaggacatcctggaggagaagcgggcagtgccggacaggatgtgcagacacaactacgagctgggcgggcccatgaccctgcagcg

SEQ ID NO: 1932 - DNA, 201 bp, Homo sapiens
gtggctctgacggcgttactgatggtgctgctcacatctgtggtccagggcagggccactccagagaattaccttttccagggacggcaggaatgctacgrgtttaatgggacacagcgcttcctggagagatacatctacaaccgggaggagttcgcgcgcttcgacagcgacgtgggggagttccgggcggtgacggag

SEQ ID NO: 1933 - DNA, 201 bp, Homo sapiens
ccagggacggcaggaatgctacgcgtttaatgggacacagcgcttcctggagagatacatctacaaccgggaggagttcgcgcgcttcgacagcgacgtgrgggagttccgggcggtgacggagctggggcggcctgctgcggagtactggaacagccagaaggacatcctggaggagaagcgggcagtgccggacaggat

SEQ ID NO: 1934 - DNA, 201 bp, Homo sapiens
ggagagatacatctacaaccgggaggagttcgcgcgcttcgacagcgacgtgggggagttccgggcggtgacggagctggggcggcctgctgcggagtacrggaacagccagaaggacatcctggaggagaagcgggcagtgccggacaggatgtgcagacacaactacgagctgggcgggcccatgaccctgcagcgccg

SEQ ID NO: 1935 - DNA, 201 bp, Homo sapiens
gtgctggggctcatcatctgtggagtgggcatcttcatgcacaggaggagcaagaaagaggcacagtctgattctgcccggagtaagacattgacgggagktgggggcttcgtgctggggctcatcatctgtggagtgggcatcttcatgcacaggaggagcaagaaagttcaacgaggatctgcataaacagggttcctg

SEQ ID NO: 1936 - DNA, 201 bp, Homo sapiens
gaatgtttccccctccaagaaggggcccttgcagcaccacaacctgcttgtctgccacgtgacggatttctacccaggcagcattcaagtccgatggttcwtgaatggacaggaggaaacagctggggtcgtgtccaccaacctgatccgtaatggagactggaccttccagatcctggtgatgctggaaatgacccccca

SEQ ID NO: 1937 - DNA, 201 bp, Homo sapiens
ttctgcccggagtaagacattgacgggagctgggggcttcgtgctggggctcatcatctgtggagtgggcatcttcatgcacaggaggagcaagaaagagycacagtctgattctgcccggagtaagacattgacgggagctgggggcttcgtgctggggctcatcatctgtggagtgggcatcttcatgcacaggaggag

SEQ ID NO: 1938 - DNA, 201 bp, Homo sapiens
tgctggggctcatcatctgtggagtgggcatcttcatgcacaggaggagcaagaaagaggcacagtctgattctgcccggagtaagacattgacgggagcwgggggcttcgtgctggggctcatcatctgtggagtgggcatcttcatgcacaggaggagcaagaaagttcaacgaggatctgcataaacagggttcctga

SEQ ID NO: 1939 - DNA, 201 bp, Homo sapiens
cccggagtaagacattgacgggagctgggggcttcgtgctggggctcatcatctgtggagtgggcatcttcatgcacaggaggagcaagaaagaggcacartctgattctgcccggagtaagacattgacgggagctgggggcttcgtgctggggctcatcatctgtggagtgggcatcttcatgcacaggaggagcaaga

SEQ ID NO: 1940 - DNA, 201 bp, Homo sapiens
gaggagcaagaaagaggcacagtctgattctgcccggagtaagacattgacgggagctgggggcttcgtgctggggctcatcatctgtggagtgggcatcrtcatgcacaggaggagcaagaaagttcaacgaggatctgcataaacagggttcctgagctcactgaaaagactattgtgccttaggaaaagcatttgctg

SEQ ID NO: 1941 - DNA, 201 bp, Homo sapiens
atctgtggtccagggcagggccactccagagaattaccttttccagggacggcaggaatgctacgcgtttaatgggacacagcgcttcctggagagatacmtctacaaccgggaggagttcgcgcgcttcgacagcgacgtgggggagttccgggcggtgacggagctggggcggcctgctgcggagtactggaacagcca

SEQ ID NO: 1942 - DNA, 201 bp, Homo sapiens; identical to SEQ ID NO: 1864

SEQ ID NO: 1943 - DNA, 201 bp, Homo sapiens
gggcatcttcatgcacaggaggagcaagaaagttcaacgaggatctgcataaacagggttcctgagctcactgaaaagactattgtgccttaggaaaagcrtttgctgtgtttcgttagcatctggctccaggacagaccttcaacttccaaattggatactgctgccaagaagttgctctgaagtcagtttctatcattc

SEQ ID NO: 1944 - DNA, 201 bp, Homo sapiens
gcatcttcatgcacaggaggagcaagaaagttcaacgaggatctgcataaacagggttcctgagctcactgaaaagactattgtgccttaggaaaagcatstgctgtgtttcgttagcatctggctccaggacagaccttcaacttccaaattggatactgctgccaagaagttgctctgaagtcagtttctatcattctg

SEQ ID NO: 1945 - DNA, 201 bp, Homo sapiens; identical to SEQ ID NO: 1880

SEQ ID NO: 1946 - DNA, 201 bp, Homo sapiens
ggagtaagacattgacgggagctgggggcttcgtgctggggctcatcatctgtggagtgggcatcttcatgcacaggaggagcaagaaagaggcacagtcygattctgcccggagtaagacattgacgggagctgggggcttcgtgctggggctcatcatctgtggagtgggcatcttcatgcacaggaggagcaagaaag

SEQ ID NO: 1947 - DNA, 201 bp, Homo sapiens
aagttcaacgaggatctgcataaacagggttcctgagctcactgaaaagactattgtgccttaggaaaagcatttgctgtgtttcgttagcatctggctcyaggacagaccttcaacttccaaattggatactgctgccaagaagttgctctgaagtcagtttctatcattctgctctttgattcaaagcactgtttctct

SEQ ID NO: 1948 - DNA, 201 bp, Homo sapiens
aagacattgacgggagctgggggcttcgtgctggggctcatcatctgtggagtgggcatcttcatgcacaggaggagcaagaaagaggcacagtctgattytgcccggagtaagacattgacgggagctgggggcttcgtgctggggctcatcatctgtggagtgggcatcttcatgcacaggaggagcaagaaagttcaa

SEQ ID NO: 1949 - DNA, 201 bp, Homo sapiens
acgaggatctgcataaacagggttcctgagctcactgaaaagactattgtgccttaggaaaagcatttgctgtgtttcgttagcatctggctccaggacaraccttcaacttccaaattggatactgctgccaagaagttgctctgaagtcagtttctatcattctgctctttgattcaaagcactgtttctctcactggg

SEQ ID NO: 1950 - DNA, 201 bp, Homo sapiens
agctgggggcttcgtgctggggctcatcatctgtggagtgggcatcttcatgcacaggaggagcaagaaagaggcacagtctgattctgcccggagtaagycattgacgggagctgggggcttcgtgctggggctcatcatctgtggagtgggcatcttcatgcacaggaggagcaagaaagttcaacgaggatctgcata

SEQ ID NO: 1951 - DNA, 201 bp, Homo sapiens
tgcataaacagggttcctgagctcactgaaaagactattgtgccttaggaaaagcatttgctgtgtttcgttagcatctggctccaggacagaccttcaayttccaaattggatactgctgccaagaagttgctctgaagtcagtttctatcattctgctctttgattcaaagcactgtttctctcactgggcctccaacc

SEQ ID NO: 1952 - DNA, 201 bp, Homo sapiens
  misc_feature (1)...(201): n = A,T,C or G, or insertion/deletion polymorphism (see Tables 1-2)
ttagcgagtccttcttttcctgactgcagctcttttcattttgccatccttttccagctccatgatggttctgcaggtttctgcggccccccggacagtgnctctgacggcgttactgatggtgctgctcacatctgtggtccagggcagggccactccagagaattaccttttccagggacggcaggaatgctacgcgtt

SEQ ID NO: 1953 - DNA, 201 bp, Homo sapiens
gcaggtttctgcggccccccggacagtggctctgacggcgttactgatggtgctgctcacatctgtggtccagggcagggccactccagagaattaccttwtccagggacggcaggaatgctacgcgtttaatgggacacagcgcttcctggagagatacatctacaaccgggaggagttcgcgcgcttcgacagcgacgt

SEQ ID NO: 1954 - DNA, 201 bp, Homo sapiens
ggtttctgcggccccccggacagtggctctgacggcgttactgatggtgctgctcacatctgtggtccagggcagggccactccagagaattaccttttcyagggacggcaggaatgctacgcgtttaatgggacacagcgcttcctggagagatacatctacaaccgggaggagttcgcgcgcttcgacagcgacgtggg

SEQ ID NO: 1955 - DNA, 201 bp, Homo sapiens
cctggatagtcctgtcaccgtggagtggaaggcacagtctgattctgcccggagtaagacattgacgggagctgggggcttcgtgctggggctcatcatcygtggagtgggcatcttcatgcacaggaggagcaagaaagaggcacagtctgattctgcccggagtaagacattgacgggagctgggggcttcgtgctggg

SEQ ID NO: 1956 - DNA, 201 bp, Homo sapiens
tgtggtccagggcagggccactccagagaattaccttttccagggacggcaggaatgctacgcgtttaatgggacacagcgcttcctggagagatacatcmacaaccgggaggagttcgcgcgcttcgacagcgacgtgggggagttccgggcggtgacggagctggggcggcctgctgcggagtactggaacagccagaa

SEQ ID NO: 1957 - DNA, 201 bp, Homo sapiens
tggaacagccagaaggacatcctggaggagaagcgggcagtgccggacaggatgtgcagacacaactacgagctgggcgggcccatgaccctgcagcgccragtccagcctagggtgaatgtttccccctccaagaaggggcccttgcagcaccacaacctgcttgtctgccacgtgacggatttctacccaggcagcatt

SEQ ID NO: 1958 - DNA, 201 bp, Homo sapiens
cagcaccacaacctgcttgtctgccacgtgacggatttctacccaggcagcattcaagtccgatggttcctgaatggacaggaggaaacagctggggtcgygtccaccaacctgatccgtaatggagactggaccttccagatcctggtgatgctggaaatgaccccccagcagggagatgtctacacctgccaagtggag

SEQ ID NO: 1959 - DNA, 201 bp, Homo sapiens
gtccagggcagggccactccagagaattaccttttccagggacggcaggaatgctacgcgtttaatgggacacagcgcttcctggagagatacatctacasccgggaggagttcgcgcgcttcgacagcgacgtgggggagttccgggcggtgacggagctggggcggcctgctgcggagtactggaacagccagaaggac

SEQ ID NO: 1960 - DNA, 201 bp, Homo sapiens
caacctgcttgtctgccacgtgacggatttctacccaggcagcattcaagtccgatggttcctgaatggacaggaggaaacagctggggtcgtgtccaccyacctgatccgtaatggagactggaccttccagatcctggtgatgctggaaatgaccccccagcagggagatgtctacacctgccaagtggagcacaccag

SEQ ID NO: 1961 - DNA, 201 bp, Homo sapiens
agaattaccttttccagggacggcaggaatgctacgcgtttaatgggacacagcgcttcctggagagatacatctacaaccgggaggagttcgcgcgcttmgacagcgacgtgggggagttccgggcggtgacggagctggggcggcctgctgcggagtactggaacagccagaaggacatcctggaggagaagcgggcag

SEQ ID NO: 1962 - DNA, 201 bp, Homo sapiens
ttctacccaggcagcattcaagtccgatggttcctgaatggacaggaggaaacagctggggtcgtgtccaccaacctgatccgtaatggagactggacctyccagatcctggtgatgctggaaatgaccccccagcagggagatgtctacacctgccaagtggagcacaccagcctggatagtcctgtcaccgtggagtgg

SEQ ID NO: 1963 - DNA, 201 bp, Homo sapiens
gcgcttcgacagcgacgtgggggagttccgggcggtgacggagctggggcggcctgctgcggagtactggaacagccagaaggacatcctggaggagaagrgggcagtgccggacaggatgtgcagacacaactacgagctgggcgggcccatgaccctgcagcgccgagtccagcctagggtgaatgtttccccctccaa

SEQ ID NO: 1964 - DNA, 201 bp, Homo sapiens
ggacatcctggaggagaagcgggcagtgccggacaggatgtgcagacacaactacgagctgggcgggcccatgaccctgcagcgccgagtccagcctaggrtgaatgtttccccctccaagaaggggcccttgcagcaccacaacctgcttgtctgccacgtgacggatttctacccaggcagcattcaagtccgatggtt

SEQ ID NO: 1965 - DNA, 201 bp, Homo sapiens
agatacatctacaaccgggaggagttcgcgcgcttcgacagcgacgtgggggagttccgggcggtgacggagctggggcggcctgctgcggagtactggascagccagaaggacatcctggaggagaagcgggcagtgccggacaggatgtgcagacacaactacgagctgggcgggcccatgaccctgcagcgccgagtc

SEQ ID NO: 1966 - DNA, 201 bp, Homo sapiens
tgcggagtactggaacagccagaaggacatcctggaggagaagcgggcagtgccggacaggatgtgcagacacaactacgagctgggcgggcccatgaccrtgcagcgccgagtccagcctagggtgaatgtttccccctccaagaaggggcccttgcagcaccacaacctgcttgtctgccacgtgacggatttctaccc

SEQ ID NO: 1967 - DNA, 201 bp, Homo sapiens
tgcaggtttctgcggccccccggacagtggctctgacggcgttactgatggtgctgctcacatctgtggtccagggcagggccactccagagaattacctyttccagggacggcaggaatgctacgcgtttaatgggacacagcgcttcctggagagatacatctacaaccgggaggagttcgcgcgcttcgacagcgacg

SEQ ID NO: 1968 - DNA, 201 bp, Homo sapiens
ccgggcggtgacggagctggggcggcctgctgcggagtactggaacagccagaaggacatcctggaggagaagcgggcagtgccggacaggatgtgcagaracaactacgagctgggcgggcccatgaccctgcagcgccgagtccagcctagggtgaatgtttccccctccaagaaggggcccttgcagcaccacaacct

SEQ ID NO: 1969 - DNA, 201 bp, Homo sapiens
agagatacatctacaaccgggaggagttcgcgcgcttcgacagcgacgtgggggagttccgggcggtgacggagctggggcggcctgctgcggagtactgsaacagccagaaggacatcctggaggagaagcgggcagtgccggacaggatgtgcagacacaactacgagctgggcgggcccatgaccctgcagcgccgag

SEQ ID NO: 1970 - DNA, 201 bp, Homo sapiens
gggggcttcgtgctggggctcatcatctgtggagtgggcatcttcatgcacaggaggagcaagaaagaggcacagtctgattctgcccggagtaagacatrgacgggagctgggggcttcgtgctggggctcatcatctgtggagtgggcatcttcatgcacaggaggagcaagaaagttcaacgaggatctgcataaaca

SEQ ID NO: 1971 - DNA, 201 bp, Homo sapiens
gatacatctacaaccgggaggagttcgcgcgcttcgacagcgacgtgggggagttccgggcggtgacggagctggggcggcctgctgcggagtactggaaragccagaaggacatcctggaggagaagcgggcagtgccggacaggatgtgcagacacaactacgagctgggcgggcccatgaccctgcagcgccgagtcc

SEQ ID NO: 1972 - DNA, 201 bp, Homo sapiens
ttcgtgctggggctcatcatctgtggagtgggcatcttcatgcacaggaggagcaagaaagaggcacagtctgattctgcccggagtaagacattgacggmagctgggggcttcgtgctggggctcatcatctgtggagtgggcatcttcatgcacaggaggagcaagaaagttcaacgaggatctgcataaacagggttc

SEQ ID NO: 1973 - DNA, 201 bp, Homo sapiens
gacagcgacgtgggggagttccgggcggtgacggagctggggcggcctgctgcggagtactggaacagccagaaggacatcctggaggagaagcgggcagygccggacaggatgtgcagacacaactacgagctgggcgggcccatgaccctgcagcgccgagtccagcctagggtgaatgtttccccctccaagaagggg

SEQ ID NO: 1974 - DNA, 201 bp, Homo sapiens; identical to SEQ ID NO: 1895
  misc_feature (1)...(201): n = A,T,C or G, or insertion/deletion polymorphism (see Tables 1-2)

SEQ ID NO: 1975 - DNA, 144 bp, Homo sapiens; identical to SEQ ID NO: 1861

SEQ ID NO: 1976 - DNA, 201 bp, Homo sapiens; identical to SEQ ID NO: 1896

SEQ ID NO: 1977 - DNA, 201 bp, Homo sapiens; identical to SEQ ID NO: 1862

SEQ ID NO: 1978 - DNA, 201 bp, Homo sapiens; identical to SEQ ID NO: 1897

SEQ ID NO: 1979 - DNA, 201 bp, Homo sapiens; identical to SEQ ID NO: 1864

SEQ ID NO: 1980 - DNA, 201 bp, Homo sapiens
gcaccacaacctgcttgtctgccacgtgacggatttctacccaggcagcattcaagtccgatggttcctgaatggacaggaggaaacagctggggtcgtgyccaccaacctgatccgtaatggagactggaccttccagatcctggtgatgctggaaatgaccccccagcagggagatgtctacacctgccaagtggagca

SEQ ID NO: 1981 - DNA, 201 bp, Homo sapiens; identical to SEQ ID NO: 1865

SEQ ID NO: 1982 - DNA, 201 bp, Homo sapiens; identical to SEQ ID NO: 1899

SEQ ID NO: 1983 - DNA, 201 bp, Homo sapiens; identical to SEQ ID NO: 1866

SEQ ID NO: 1984 - DNA, 201 bp, Homo sapiens; identical to SEQ ID NO: 1867

SEQ ID NO: 1985 - DNA, 201 bp, Homo sapiens; identical to SEQ ID NO: 1868

SEQ ID NO: 1986 - DNA, 201 bp, Homo sapiens; identical to SEQ ID NO: 1869
  misc_feature (1)...(201): n = A,T,C or G, or insertion/deletion polymorphism (see Tables 1-2)

SEQ ID NO: 1987 - DNA, 201 bp, Homo sapiens; identical to SEQ ID NO: 1902

SEQ ID NO: 1988 - DNA, 201 bp, Homo sapiens; identical to SEQ ID NO: 1904

SEQ ID NO: 1989 - DNA, 201 bp, Homo sapiens
tgcttgtctgccacgtgacggatttctacccaggcagcattcaagtccgatggttcctgaatggacaggaggaaacagctggggtcgtgtccaccaacctwatccgtaatggagactggaccttccagatcctggtgatgctggaaatgaccccccagcagggagatgtctacacctgccaagtggagcacaccagcctgg

SEQ ID NO: 1990 - DNA, 201 bp, Homo sapiens
cttgcagcaccacaacctgcttgtctgccacgtgacggatttctacccaggcagcattcaagtccgatggttcctgaatggacaggaggaaacagctgggstcgtgtccaccaacctgatccgtaatggagactggaccttccagatcctggtgatgctggaaatgaccccccagcagggagatgtctacacctgccaagt

SEQ ID NO: 1991 - DNA, 201 bp, Homo sapiens; identical to SEQ ID NO: 1908

SEQ ID NO: 1992 - DNA, 201 bp, Homo sapiens; identical to SEQ ID NO: 1910

SEQ ID NO: 1993 - DNA, 201 bp, Homo sapiens; identical to SEQ ID NO: 1874

SEQ ID NO: 1994 - DNA, 201 bp, Homo sapiens; identical to SEQ ID NO: 1875

SEQ ID NO: 1995 - DNA, 201 bp, Homo sapiens; identical to SEQ ID NO: 1876

SEQ ID NO: 1996 - DNA, 201 bp, Homo sapiens; identical to SEQ ID NO: 1877

SEQ ID NO: 1997 - DNA, 201 bp, Homo sapiens
gacggatttctacccaggcagcattcaagtccgatggttcctgaatggacaggaggaaacagctggggtcgtgtccaccaacctgatccgtaatggagackggaccttccagatcctggtgatgctggaaatgaccccccagcagggagatgtctacacctgccaagtggagcacaccagcctggatagtcctgtcaccgt

SEQ ID NO: 1998 - DNA, 201 bp, Homo sapiens
acggatttctacccaggcagcattcaagtccgatggttcctgaatggacaggaggaaacagctggggtcgtgtccaccaacctgatccgtaatggagactwgaccttccagatcctggtgatgctggaaatgaccccccagcagggagatgtctacacctgccaagtggagcacaccagcctggatagtcctgtcaccgtg

SEQ ID NO: 1999 - DNA, 201 bp, Homo sapiens; identical to SEQ ID NO: 1912

SEQ ID NO: 2000 - DNA, 201 bp, Homo sapiens
atggacaggaggaaacagctggggtcgtgtccaccaacctgatccgtaatggagactggaccttccagatcctggtgatgctggaaatgaccccccagcarggagatgtctacacctgccaagtggagcacaccagcctggatagtcctgtcaccgtggagtggaaggcacagtctgattctgcccggagtaagacattga

SEQ ID NO: 2001 - DNA, 201 bp, Homo sapiens; identical to SEQ ID NO: 1884

SEQ ID NO: 2002 - DNA, 201 bp, Homo sapiens; identical to SEQ ID NO: 1885

SEQ ID NO: 2003 - DNA, 201 bp, Homo sapiens
cccagcagggagatgtctacacctgccaagtggagcacaccagcctggatagtcctgtcaccgtggagtggaaggcacagtctgattctgcccggagtaaracattgacgggagctgggggcttcgtgctggggctcatcatctgtggagtgggcatcttcatgcacaggaggagcaagaaagaggcacagtctgattctg

SEQ ID NO: 2004 - DNA, 201 bp, Homo sapiens; identical to SEQ ID NO: 1914

SEQ ID NO: 2005 - DNA, 201 bp, Homo sapiens; identical to SEQ ID NO: 1860

SEQ ID NO: 2006 - DNA, 144 bp, Homo sapiens; identical to SEQ ID NO: 1861

SEQ ID NO: 2007 - DNA, 201 bp, Homo sapiens
agttcgcgcgcttcgacagcgacgtgggggagttccgggcggtgacggagctggggcggcctgctgcggagtactggaacagccagaaggacatcctggargagaagcgggcagtgccggacaggatgtgcagacacaactacgagctgggcgggcccatgaccctgcagcgccgaggctggagtgctgtggcaccatcat

SEQ ID NO: 2008 - DNA, 201 bp, Homo sapiens; identical to SEQ ID NO: 1864

SEQ ID NO: 2009 - DNA, 201 bp, Homo sapiens
aggaggaacttgaaaaaggacgggatttctactactcaagcatgtaggagctcaggatattcttccagcctagggtgaatgtttccccctccaagaagggycccttgcagcaccacaacctgcttgtctgccacgtgacggatttctacccaggcagcattcaagtccgatggttcctgaatggacaggaggaaacagctg

SEQ ID NO: 2010 - DNA, 201 bp, Homo sapiens; identical to SEQ ID NO: 1865

SEQ ID NO: 2011 - DNA, 201 bp, Homo sapiens
acgtgggggagttccgggcggtgacggagctggggcggcctgctgcggagtactggaacagccagaaggacatcctggaggagaagcgggcagtgccggaraggatgtgcagacacaactacgagctgggcgggcccatgaccctgcagcgccgaggctggagtgctgtggcaccatcatggctcactgcagcctcaacct

SEQ ID NO: 2012 - DNA, 201 bp, Homo sapiens; identical to SEQ ID NO: 1867

SEQ ID NO: 2013 - DNA, 201 bp, Homo sapiens
gtgggggagttccgggcggtgacggagctggggcggcctgctgcggagtactggaacagccagaaggacatcctggaggagaagcgggcagtgccggacargatgtgcagacacaactacgagctgggcgggcccatgaccctgcagcgccgaggctggagtgctgtggcaccatcatggctcactgcagcctcaacctcc

SEQ ID NO: 2014 - DNA, 201 bp, Homo sapiens; identical to SEQ ID NO: 1869
  misc_feature (1)...(201): n = A,T,C or G, or insertion/deletion polymorphism (see Tables 1-2)

SEQ ID NO: 2015 - DNA, 201 bp, Homo sapiens; identical to SEQ ID NO: 1871

SEQ ID NO: 2016 - DNA, 201 bp, Homo sapiens; identical to SEQ ID NO: 1872

SEQ ID NO: 2017 - DNA, 201 bp, Homo sapiens; identical to SEQ ID NO: 1873

SEQ ID NO: 2018 - DNA, 201 bp, Homo sapiens
ggagctggggcggcctgctgcggagtactggaacagccagaaggacatcctggaggagaagcgggcagtgccggacaggatgtgcagacacaactacgagdtgggcgggcccatgaccctgcagcgccgaggctggagtgctgtggcaccatcatggctcactgcagcctcaacctcctgggctcaagtgatcctcctgcc

SEQ ID NO: 2019 - DNA, 201 bp, Homo sapiens; identical to SEQ ID NO: 1875

SEQ ID NO: 2020 - DNA, 201 bp, Homo sapiens
gttcgcgcgcttcgacagcgacgtgggggagttccgggcggtgacggagctggggcggcctgctgcggagtactggaacagccagaaggacatcctggagragaagcgggcagtgccggacaggatgtgcagacacaactacgagctgggcgggcccatgaccctgcagcgccgaggctggagtgctgtggcaccatcatg

SEQ ID NO: 2021 - DNA, 201 bp, Homo sapiens
gctggggcggcctgctgcggagtactggaacagccagaaggacatcctggaggagaagcgggcagtgccggacaggatgtgcagacacaactacgagctgrgcgggcccatgaccctgcagcgccgaggctggagtgctgtggcaccatcatggctcactgcagcctcaacctcctgggctcaagtgatcctcctgcctca

SEQ ID NO: 2022 - DNA, 201 bp, Homo sapiens; identical to SEQ ID NO: 1878

SEQ ID NO: 2023 - DNA, 201 bp, Homo sapiens; identical to SEQ ID NO: 1880

SEQ ID NO: 2024 - DNA, 201 bp, Homo sapiens; identical to SEQ ID NO: 1881

SEQ ID NO: 2025 - DNA, 201 bp, Homo sapiens; identical to SEQ ID NO: 1879

SEQ ID NO: 2026 - DNA, 201 bp, Homo sapiens; identical to SEQ ID NO: 1882

SEQ ID NO: 2027 - DNA, 201 bp, Homo sapiens; identical to SEQ ID NO: 1883

SEQ ID NO: 2028 - DNA, 201 bp, Homo sapiens; identical to SEQ ID NO: 1884

SEQ ID NO: 2029 - DNA, 201 bp, Homo sapiens; identical to SEQ ID NO: 1885

SEQ ID NO: 2030 - DNA, 201 bp, Homo sapiens; identical to SEQ ID NO: 1886

SEQ ID NO: 2031 - DNA, 201 bp, Homo sapiens; identical to SEQ ID NO: 1889

SEQ ID NO: 2032 - DNA, 201 bp, Homo sapiens; identical to SEQ ID NO: 1891

SEQ ID NO: 2033 - DNA, 201 bp, Homo sapiens; identical to SEQ ID NO: 1893

SEQ ID NO: 2034 - DNA, 201 bp, Homo sapiens; identical to SEQ ID NO: 1895
  misc_feature (1)...(201): n = A,T,C or G, or insertion/deletion polymorphism (see Tables 1-2)

SEQ ID NO: 2035 - DNA, 201 bp, Homo sapiens; identical to SEQ ID NO: 1896

SEQ ID NO: 2036 - DNA, 201 bp, Homo sapiens; identical to SEQ ID NO: 1898

SEQ ID NO: 2037 - DNA, 201 bp, Homo sapiens; identical to SEQ ID NO: 1897

SEQ ID NO: 2038 - DNA, 201 bp, Homo sapiens
tcaagcatgtaggagctcaggatattcttccagcctagggtgaatgtttccccctccaagaaggggcccttgcagcaccacaacctgcttgtctgccacgrgacggatttctacccaggcagcattcaagtccgatggttcctgaatggacaggaggaaacagctggggtcgtgtccaccaacctgatccgtaatggagac

SEQ ID NO: 2039 - DNA, 201 bp, Homo sapiens; identical to SEQ ID NO: 1899

SEQ ID NO: 2040 - DNA, 201 bp, Homo sapiens; identical to SEQ ID NO: 1901

SEQ ID NO: 2041 - DNA, 201 bp, Homo sapiens; identical to SEQ ID NO: 1902

SEQ ID NO: 2042 - DNA, 201 bp, Homo sapiens
acaaccgggaggagttcgcgcgcttcgacagcgacgtgggggagttccgggcggtgacggagctggggcggcctgctgcggagtactggaacagccagaamgacatcctggaggagaagcgggcagtgccggacaggatgtgcagacacaactacgagctgggcgggcccatgaccctgcagcgccgaggctggagtgctg

SEQ ID NO: 2043 - DNA, 201 bp, Homo sapiens; identical to SEQ ID NO: 1903

SEQ ID NO: 2044 - DNA, 201 bp, Homo sapiens; identical to SEQ ID NO: 1905

SEQ ID NO: 2045 - DNA, 201 bp, Homo sapiens
agaccttcatgggacctgaagacgcagcacagaggaggaacttgaaaaaggacgggatttctactactcaagcatgtaggagctcaggatattcttccagrctagggtgaatgtttccccctccaagaaggggcccttgcagcaccacaacctgcttgtctgccacgtgacggatttctacccaggcagcattcaagtccg

SEQ ID NO: 2046 - DNA, 201 bp, Homo sapiens
gggcggcctgctgcggagtactggaacagccagaaggacatcctggaggagaagcgggcagtgccggacaggatgtgcagacacaactacgagctgggcgsgcccatgaccctgcagcgccgaggctggagtgctgtggcaccatcatggctcactgcagcctcaacctcctgggctcaagtgatcctcctgcctcagcct

SEQ ID NO: 2047 - DNA, 201 bp, Homo sapiens
gctcaggatattcttccagcctagggtgaatgtttccccctccaagaaggggcccttgcagcaccacaacctgcttgtctgccacgtgacggatttctacrcaggcagcattcaagtccgatggttcctgaatggacaggaggaaacagctggggtcgtgtccaccaacctgatccgtaatggagactggaccttccagat

SEQ ID NO: 2048 - DNA, 201 bp, Homo sapiens; identical to SEQ ID NO: 1910

SEQ ID NO: 2049 - DNA, 201 bp, Homo sapiens
tttctactactcaagcatgtaggagctcaggatattcttccagcctagggtgaatgtttccccctccaagaaggggcccttgcagcaccacaacctgcttrtctgccacgtgacggatttctacccaggcagcattcaagtccgatggttcctgaatggacaggaggaaacagctggggtcgtgtccaccaacctgatccg

SEQ ID NO: 2050 - DNA, 201 bp, Homo sapiens
cacagaggaggaacttgaaaaaggacgggatttctactactcaagcatgtaggagctcaggatattcttccagcctagggtgaatgtttccccctccaagraggggcccttgcagcaccacaacctgcttgtctgccacgtgacggatttctacccaggcagcattcaagtccgatggttcctgaatggacaggaggaaac

SEQ ID NO: 2051 - DNA, 201 bp, Homo sapiens
tggggcggcctgctgcggagtactggaacagccagaaggacatcctggaggagaagcgggcagtgccggacaggatgtgcagacacaactacgagctgggsgggcccatgaccctgcagcgccgaggctggagtgctgtggcaccatcatggctcactgcagcctcaacctcctgggctcaagtgatcctcctgcctcagc

SEQ ID NO: 2052 - DNA, 201 bp, Homo sapiens; identical to SEQ ID NO: 1913

SEQ ID NO: 2053 - DNA, 201 bp, Homo sapiens; identical to SEQ ID NO: 1915

SEQ ID NO: 2054 - DNA, 201 bp, Homo sapiens
ggcggcctgctgcggagtactggaacagccagaaggacatcctggaggagaagcgggcagtgccggacaggatgtgcagacacaactacgagctgggcggrcccatgaccctgcagcgccgaggctggagtgctgtggcaccatcatggctcactgcagcctcaacctcctgggctcaagtgatcctcctgcctcagcctc

SEQ ID NO: 2055 - DNA, 201 bp, Homo sapiens
catgggacctgaagacgcagcacagaggaggaacttgaaaaaggacgggatttctactactcaagcatgtaggagctcaggatattcttccagcctagggygaatgtttccccctccaagaaggggcccttgcagcaccacaacctgcttgtctgccacgtgacggatttctacccaggcagcattcaagtccgatggttc

SEQ ID NO: 2056 - DNA, 134 bp, Homo sapiens
taggcgcgtgccgcgagaacagagtggacggagmgtaggagagaccgaaaaggctgggggtgggagtagcggatttgaagcacttgttggcctacagaggtgtggcaagcagagcacctcagaactcaggcgta

SEQ ID NO: 2057 - DNA, 201 bp, Homo sapiens
acctcgatctccttctccctcattttctctcatccctacctattgtgggtttccgcatgggccggaccgtggtcgtgctgggcggaggcatcagcggcttsgccgccagttaccacctgagccgggccccctgcccccctaaggtggtcctagtggagagcagtgagcgtctgggaggctggattcgctccgttcgaggcc

SEQ ID NO: 2058 - DNA, 201 bp, Homo sapiens
gtggtgaatctgcagtaccaaggagcccatctgcctgtccagggatttggacatttggtgccatcttcagaagatccaggagtcctgggaatcgtgtatgmctcagttgctttccctgagcaggacgggagcccccctggcctcagagtgactgtgatgctgggaggttcctggttacagacactggaggctagtggctgt

SEQ ID NO: 2059 - DNA, 201 bp, Homo sapiens
aaggacatcagacccccagctaaaacattcctttcatcctttccttccagagtcagctaggcaattcctgactgctcacaggttgcccctgactctggctrgagcctcctatgagggagttgctgttaatgactgtatagagagtgggcgccaggcagcagtcagtgtcctgggcacagaacctaacagctgatccccaac

SEQ ID NO: 2060 - DNA, 201 bp, Homo sapiens
tctctaagggacagcagtctggaggctgaccacgttattagtgccattccagcttcagtgctcagtgagctgctccctgctgaggctgcccctctggctcrtgccctgagtgccatcactgcagtgtctgtagctgtggtgaatctgcagtaccaaggagcccatctgcctgtccagggatttggacatttggtgccatct

SEQ ID NO: 2061 - DNA, 201 bp, Homo sapiens
ttatctgcacccagcagagcgccggcggggtacggtcttaggacctcgatctccttctccctcattttctctcatccctacctattgtgggtttccgcatsggccggaccgtggtcgtgctgggcggaggcatcagcggcttggccgccagttaccacctgagccgggccccctgcccccctaaggtggtcctagtggaga

SEQ ID NO: 2062 - DNA, 201 bp, Homo sapiens
cttatctgcacccagcagagcgccggcggggtacggtcttaggacctcgatctccttctccctcattttctctcatccctacctattgtgggtttccgcaygggccggaccgtggtcgtgctgggcggaggcatcagcggcttggccgccagttaccacctgagccgggccccctgcccccctaaggtggtcctagtggag

SEQ ID NO: 2063 - DNA, 201 bp, Homo sapiens
tgctgggaggttcctggttacagacactggaggctagtggctgtgtcttatctcaggagctgtttcaacagcgggcccaggaagcagctgctacacaattmggactgaaggagatgccgagccactgcttggtccatctacacaagaactgcattccccagtatacactaggtcactggcaaaaactaggtaagttgggaa

SEQ ID NO: 2064 - DNA, 201 bp, Homo sapiens
cggtcttaggacctcgatctccttctccctcattttctctcatccctacctattgtgggtttccgcatgggccggaccgtggtcgtgctgggcggaggcaycagcggcttggccgccagttaccacctgagccgggccccctgcccccctaaggtggtcctagtggagagcagtgagcgtctgggaggctggattcgctcc

SEQ ID NO: 2065 - DNA, 201 bp, Homo sapiens
ggtggcgtctctagccatggacagtctctgccgtggagtgtttgcaggcaacagccgtgagctcagcatcaggtcctgctttcccagtctcttccaagctkagcaaacccatcgttccatattactgggcctgctgctgggggcagggcggaccccacagccagactcagcactcattcgccaggccttggctgagcgctg

SEQ ID NO: 2066 - DNA, 201 bp, Homo sapiens
ggaggctggattcgctccgttcgaggccctaatggtgctatctttgagcttggacctcggggaattaggccagcgggagccctaggggcccggaccttgcycctggtttctgagcttggcttggattcagaagtgctgcctgtccggggagaccacccagctgcccagaacaggttcctctacgtgggcggtgccctgcat

SEQ ID NO: 2067 - DNA, 201 bp, Homo sapiens
ctacgtgggcggtgccctgcatgccctacccactggcctcagggggctactccgcccttcaccccccttctccaaacctctgttttgggctgggctgaggkagctgaccaagccccggggcaaagagcctgatgagactgtgcacagttttgcccagcgccgccttggacctgaggtggcgtctctagccatggacagtct

SEQ ID NO: 2068 - DNA, 201 bp, Homo sapiens
ctcctggtttctgagcttggcttggattcagaagtgctgcctgtccggggagaccacccagctgcccagaacaggttcctctacgtgggcggtgccctgcmtgccctacccactggcctcagggggctactccgcccttcaccccccttctccaaacctctgttttgggctgggctgagggagctgaccaagccccggggc

SEQ ID NO: 2069 - DNA, 201 bp, Homo sapiens
ttcaccccccttctccaaacctctgttttgggctgggctgagggagctgaccaagccccggggcaaagagcctgatgagactgtgcacagttttgcccagygccgccttggacctgaggtggcgtctctagccatggacagtctctgccgtggagtgtttgcaggcaacagccgtgagctcagcatcaggtcctgctttcc

SEQ ID NO: 2070 - DNA, 201 bp, Homo sapiens
cccttctccaaacctctgttttgggctgggctgagggagctgaccaagccccggggcaaagagcctgatgagactgtgcacagttttgcccagcgccgccytggacctgaggtggcgtctctagccatggacagtctctgccgtggagtgtttgcaggcaacagccgtgagctcagcatcaggtcctgctttcccagtctc

SEQ ID NO: 2071 - DNA, 201 bp, Homo sapiens
acctctgttttgggctgggctgagggagctgaccaagccccggggcaaagagcctgatgagactgtgcacagttttgcccagcgccgccttggacctgagrtggcgtctctagccatggacagtctctgccgtggagtgtttgcaggcaacagccgtgagctcagcatcaggtcctgctttcccagtctcttccaagctga

SEQ ID NO: 2072 - DNA, 201 bp, Homo sapiens
ctgcatgccctacccactggcctcagggggctactccgcccttcaccccccttctccaaacctctgttttgggctgggctgagggagctgaccaagccccsgggcaaagagcctgatgagactgtgcacagttttgcccagcgccgccttggacctgaggtggcgtctctagccatggacagtctctgccgtggagtgttt

SEQ ID NO: 2073 - DNA, 201 bp, Homo sapiens
gctgtggtgaatctgcagtaccaaggagcccatctgcctgtccagggatttggacatttggtgccatcttcagaagatccaggagtcctgggaatcgtgtrtgactcagttgctttccctgagcaggacgggagcccccctggcctcagagtgactgtgatgctgggaggttcctggttacagacactggaggctagtggc

SEQ ID NO: 2074 - DNA, 201 bp, Homo sapiens
actggcctcagggggctactccgcccttcaccccccttctccaaacctctgttttgggctgggctgagggagctgaccaagccccggggcaaagagcctgwtgagactgtgcacagttttgcccagcgccgccttggacctgaggtggcgtctctagccatggacagtctctgccgtggagtgtttgcaggcaacagccgt

SEQ ID NO: 2075 - DNA, 201 bp, Homo sapiens
ggtgaatctgcagtaccaaggagcccatctgcctgtccagggatttggacatttggtgccatcttcagaagatccaggagtcctgggaatcgtgtatgacycagttgctttccctgagcaggacgggagcccccctggcctcagagtgactgtgatgctgggaggttcctggttacagacactggaggctagtggctgtgt

SEQ ID NO: 2076 - DNA, 201 bp, Homo sapiens
cgctggagccagtggtcacttcgtggaggtctagagatgttgcctcaggcccttgaaacccacctgactagtaggggggtcagtgttctcagaggccagcsggtctgtgggctcagcctccaggcagaagggcgctggaaggtatctctaagggacagcagtctggaggctgaccacgttattagtgccattccagcttca

SEQ ID NO: 2077 - DNA, 201 bp, Homo sapiens
gactgtgcacagttttgcccagcgccgccttggacctgaggtggcgtctctagccatggacagtctctgccgtggagtgtttgcaggcaacagccgtgagstcagcatcaggtcctgctttcccagtctcttccaagctgagcaaacccatcgttccatattactgggcctgctgctgggggcagggcggaccccacagcc

SEQ ID NO: 2078 - DNA, 201 bp, Homo sapiens
gctgggggtgggagtagcggatttgaagcacttgttggcctacagaggtgtggcaagcagagcacctcagaactcaggcgtactgcccgccgcccgagccstgcgagggccgatagcgagggtgtggcccttatctgcacccagcagagcgccggcggggtacggtcttaggacctcgatctccttctccctcattttctc

SEQ ID NO: 2079 - DNA, 201 bp, Homo sapiens
agtctctgccgtggagtgtttgcaggcaacagccgtgagctcagcatcaggtcctgctttcccagtctcttccaagctgagcaaacccatcgttccatatkactgggcctgctgctgggggcagggcggaccccacagccagactcagcactcattcgccaggccttggctgagcgctggagccagtggtcacttcgtgga

SEQ ID NO: 2080 - DNA, 201 bp, Homo sapiens
ggtacggtcttaggacctcgatctccttctccctcattttctctcatccctacctattgtgggtttccgcatgggccggaccgtggtcgtgctgggcggargcatcagcggcttggccgccagttaccacctgagccgggccccctgcccccctaaggtggtcctagtggagagcagtgagcgtctgggaggctggattcg

SEQ ID NO: 2081 - DNA, 201 bp, Homo sapiens
atgttgcctcaggcccttgaaacccacctgactagtaggggggtcagtgttctcagaggccagccggtctgtgggctcagcctccaggcagaagggcgctrgaaggtatctctaagggacagcagtctggaggctgaccacgttattagtgccattccagcttcagtgctcagtgagctgctccctgctgaggctgcccct

SEQ ID NO: 2082 - DNA, 201 bp, Homo sapiens
ggtctgtgggctcagcctccaggcagaagggcgctggaaggtatctctaagggacagcagtctggaggctgaccacgttattagtgccattccagcttcartgctcagtgagctgctccctgctgaggctgcccctctggctcgtgccctgagtgccatcactgcagtgtctgtagctgtggtgaatctgcagtaccaagg

SEQ ID NO: 2083 - DNA, 201 bp, Homo sapiens
ctccaggcagaagggcgctggaaggtatctctaagggacagcagtctggaggctgaccacgttattagtgccattccagcttcagtgctcagtgagctgcyccctgctgaggctgcccctctggctcgtgccctgagtgccatcactgcagtgtctgtagctgtggtgaatctgcagtaccaaggagcccatctgcctgtc

SEQ ID NO: 2084 - DNA, 201 bp, Homo sapiens
ctgcccccctaaggtggtcctagtggagagcagtgagcgtctgggaggctggattcgctccgttcgaggccctaatggtgctatctttgagcttggacctyggggaattaggccagcgggagccctaggggcccggaccttgctcctggtttctgagcttggcttggattcagaagtgctgcctgtccggggagaccaccc

SEQ ID NO: 2085 - DNA, 201 bp, Homo sapiens
ctggctcgtgccctgagtgccatcactgcagtgtctgtagctgtggtgaatctgcagtaccaaggagcccatctgcctgtccagggatttggacatttggkgccatcttcagaagatccaggagtcctgggaatcgtgtatgactcagttgctttccctgagcaggacgggagcccccctggcctcagagtgactgtgatg

SEQ ID NO: 2086 - DNA, 201 bp, Homo sapiens
atccaggagtcctgggaatcgtgtatgactcagttgctttccctgagcaggacgggagcccccctggcctcagagtgactgtgatgctgggaggttcctgrttacagacactggaggctagtggctgtgtcttatctcaggagctgtttcaacagcgggcccaggaagcagctgctacacaattaggactgaaggagatgc

SEQ ID NO: 2087 - DNA, 201 bp, Homo sapiens
aggagtcctgggaatcgtgtatgactcagttgctttccctgagcaggacgggagcccccctggcctcagagtgactgtgatgctgggaggttcctggttayagacactggaggctagtggctgtgtcttatctcaggagctgtttcaacagcgggcccaggaagcagctgctacacaattaggactgaaggagatgccgag

SEQ ID NO: 2088 - DNA, 201 bp, Homo sapiens
gcaaaaactaggtaagttgggaaaacagctgggctgaggagggccaaggacatcagacccccagctaaaacattcctttcatcctttccttccagagtcasctaggcaattcctgactgctcacaggttgcccctgactctggctggagcctcctatgagggagttgctgttaatgactgtatagagagtgggcgccaggc

SEQ ID NO: 2089 - DNA, 201 bp, Homo sapiens
actaggtaagttgggaaaacagctgggctgaggagggccaaggacatcagacccccagctaaaacattcctttcatcctttccttccagagtcagctaggyaattcctgactgctcacaggttgcccctgactctggctggagcctcctatgagggagttgctgttaatgactgtatagagagtgggcgccaggcagcagt

SEQ ID NO: 2090 - DNA, 201 bp, Homo sapiens
actgggcctgctgctgggggcagggcggaccccacagccagactcagcactcattcgccaggccttggctgagcgctggagccagtggtcacttcgtggasgtctagagatgttgcctcaggcccttgaaacccacctgactagtaggggggtcagtgttctcagaggccagccggtctgtgggctcagcctccaggcaga

SEQ ID NO: 2091 - DNA, 201 bp, Homo sapiens
atcagacccccagctaaaacattcctttcatcctttccttccagagtcagctaggcaattcctgactgctcacaggttgcccctgactctggctggagccycctatgagggagttgctgttaatgactgtatagagagtgggcgccaggcagcagtcagtgtcctgggcacagaacctaacagctgatccccaactctcat

SEQ ID NO: 2092 - DNA, 201 bp, Homo sapiens
ctgggggcagggcggaccccacagccagactcagcactcattcgccaggccttggctgagcgctggagccagtggtcacttcgtggaggtctagagatgtygcctcaggcccttgaaacccacctgactagtaggggggtcagtgttctcagaggccagccggtctgtgggctcagcctccaggcagaagggcgctggaag

SEQ ID NO: 2093 - DNA, 201 bp, Homo sapiens
ggcaaagagcctgatgagactgtgcacagttttgcccagcgccgccttggacctgaggtggcgtctctagccatggacagtctctgccgtggagtgtttgyaggcaacagccgtgagctcagcatcaggtcctgctttcccagtctcttccaagctgagcaaacccatcgttccatattactgggcctgctgctgggggca

SEQ ID NO: 2094 - DNA, 201 bp, Homo sapiens
cagctaaaacattcctttcatcctttccttccagagtcagctaggcaattcctgactgctcacaggttgcccctgactctggctggagcctcctatgaggkagttgctgttaatgactgtatagagagtgggcgccaggcagcagtcagtgtcctgggcacagaacctaacagctgatccccaactctcattcatgaaaat

SEQ ID NO: 2095 - DNA, 201 bp, Homo sapiens
acctgaggtggcgtctctagccatggacagtctctgccgtggagtgtttgcaggcaacagccgtgagctcagcatcaggtcctgctttcccagtctcttcyaagctgagcaaacccatcgttccatattactgggcctgctgctgggggcagggcggaccccacagccagactcagcactcattcgccaggccttggctga

SEQ ID NO: 2096 - DNA, 201 bp, Homo sapiens
ccagctaaaacattcctttcatcctttccttccagagtcagctaggcaattcctgactgctcacaggttgcccctgactctggctggagcctcctatgagrgagttgctgttaatgactgtatagagagtgggcgccaggcagcagtcagtgtcctgggcacagaacctaacagctgatccccaactctcattcatgaaaa

SEQ ID NO: 2097 - DNA, 201 bp, Homo sapiens
agcaaacccatcgttccatattactgggcctgctgctgggggcagggcggaccccacagccagactcagcactcattcgccaggccttggctgagcgctgragccagtggtcacttcgtggaggtctagagatgttgcctcaggcccttgaaacccacctgactagtaggggggtcagtgttctcagaggccagccggtct

SEQ ID NO: 2098 - DNA, 201 bp, Homo sapiens
tgaggagggccaaggacatcagacccccagctaaaacattcctttcatcctttccttccagagtcagctaggcaattcctgactgctcacaggttgccccygactctggctggagcctcctatgagggagttgctgttaatgactgtatagagagtgggcgccaggcagcagtcagtgtcctgggcacagaacctaacagc

SEQ ID NO: 2099 - DNA, 201 bp, Homo sapiens
tcgctgttccaccagcccatccgtgcacacttagtttcccctaaagcagtttccgcatgggccggaccgtggtcgtgctgggcggaggcatcagcggcttsgccgccagttaccacctgagccgggccccctgcccccctaaggtggtcctagtggagagcagtgagcgtctgggaggctggattcgctccgttcgaggcc

SEQ ID NO: 2100 - DNA, 201 bp, Homo sapiens; identical to SEQ ID NO: 2058

SEQ ID NO: 2101 - DNA, 201 bp, Homo sapiens
acacaagaactgcattccccagtatacactaggtcactggcaaaaactagagtcagctaggcaattcctgactgctcacaggttgcccctgactctggctrgagcctcctatgagggagttgctgttaatgactgtatagagagtgggcgccaggcagcagtcagtgtcctgggcacagaacctaacagctgatccccaac

SEQ ID NO: 2102 - DNA, 201 bp, Homo sapiens; identical to SEQ ID NO: 2060

SEQ ID NO: 2103 - DNA, 181 bp, Homo sapiens
tcctggcccctggacggggacctcgctgttccaccagcccatccgtgcacacttagtttcccctaaagcagtttccgcatsggccggaccgtggtcgtgctgggcggaggcatcagcggcttggccgccagttaccacctgagccgggccccctgcccccctaaggtggtcctagtggaga

SEQ ID NO: 2104 - DNA, 180 bp, Homo sapiens
tcctggcccctggacggggacctcgctgttccaccagcccatccgtgcacacttagtttcccctaaagcagtttccgcaygggccggaccgtggtcgtgctgggcggaggcatcagcggcttggccgccagttaccacctgagccgggccccctgcccccctaaggtggtcctagtggag

SEQ ID NO: 2105 - DNA, 201 bp, Homo sapiens
tgctgggaggttcctggttacagacactggaggctagtggctgtgtcttatctcaggagctgtttcaacagcgggcccaggaagcagctgctacacaattmggactgaaggagatgccgagccactgcttggtccatctacacaagaactgcattccccagtatacactaggtcactggcaaaaactagagtcagctaggc

SEQ ID NO: 2106 - DNA, 201 bp, Homo sapiens
gacggggacctcgctgttccaccagcccatccgtgcacacttagtttcccctaaagcagtttccgcatgggccggaccgtggtcgtgctgggcggaggcaycagcggcttggccgccagttaccacctgagccgggccccctgcccccctaaggtggtcctagtggagagcagtgagcgtctgggaggctggattcgctcc

SEQ ID NO: 2107 - DNA, 201 bp, Homo sapiens; identical to SEQ ID NO: 2065

SEQ ID NO: 2108 - DNA, 201 bp, Homo sapiens; identical to SEQ ID NO: 2066

SEQ ID NO: 2109 - DNA, 201 bp, Homo sapiens; identical to SEQ ID NO: 2068

SEQ ID NO: 2110 - DNA, 201 bp, Homo sapiens
ctacgtgggcggtgccctgcatgccctacccactggcctcagggggctactccgcccttcaccccccttctccaaacctctgttttgggctgggctgaggkagctgaccaagccccggggcaaagagcctgatgagactgtgcacagttttgcccagcgccgccttggacctgagtcctagtctcacccttaaggtggcgt

SEQ ID NO: 2111 - DNA, 201 bp, Homo sapiens
ttcaccccccttctccaaacctctgttttgggctgggctgagggagctgaccaagccccggggcaaagagcctgatgagactgtgcacagttttgcccagygccgccttggacctgagtcctagtctcacccttaaggtggcgtctctagccatggacagtctctgccgtggagtgtttgcaggcaacagccgtgagctca

SEQ ID NO: 2112 - DNA, 201 bp, Homo sapiens
cccttctccaaacctctgttttgggctgggctgagggagctgaccaagccccggggcaaagagcctgatgagactgtgcacagttttgcccagcgccgccytggacctgagtcctagtctcacccttaaggtggcgtctctagccatggacagtctctgccgtggagtgtttgcaggcaacagccgtgagctcagcatcag

SEQ ID NO: 2113 - DNA, 201 bp, Homo sapiens
ctgagggagctgaccaagccccggggcaaagagcctgatgagactgtgcacagttttgcccagcgccgccttggacctgagtcctagtctcacccttaagrtggcgtctctagccatggacagtctctgccgtggagtgtttgcaggcaacagccgtgagctcagcatcaggtcctgctttcccagtctcttccaagctga

SEQ ID NO: 2114 - DNA, 201 bp, Homo sapiens
ctgcatgccctacccactggcctcagggggctactccgcccttcaccccccttctccaaacctctgttttgggctgggctgagggagctgaccaagccccsgggcaaagagcctgatgagactgtgcacagttttgcccagcgccgccttggacctgagtcctagtctcacccttaaggtggcgtctctagccatggacag

SEQ ID NO: 2115 - DNA, 201 bp, Homo sapiens; identical to SEQ ID NO: 2073

SEQ ID NO: 2116 - DNA, 201 bp, Homo sapiens
actggcctcagggggctactccgcccttcaccccccttctccaaacctctgttttgggctgggctgagggagctgaccaagccccggggcaaagagcctgwtgagactgtgcacagttttgcccagcgccgccttggacctgagtcctagtctcacccttaaggtggcgtctctagccatggacagtctctgccgtggagt

SEQ ID NO: 2117 - DNA, 201 bp, Homo sapiens; identical to SEQ ID NO: 2075

SEQ ID NO: 2118 - DNA, 201 bp, Homo sapiens; identical to SEQ ID NO: 2076

SEQ ID NO: 2119 - DNA, 201 bp, Homo sapiens
cagcgccgccttggacctgagtcctagtctcacccttaaggtggcgtctctagccatggacagtctctgccgtggagtgtttgcaggcaacagccgtgagstcagcatcaggtcctgctttcccagtctcttccaagctgagcaaacccatcgttccatattactgggcctgctgctgggggcagggcggaccccacagcc

SEQ ID NO: 2120 - DNA, 201 bp, Homo sapiens; identical to SEQ ID NO: 2079

SEQ ID NO: 2121 - DNA, 201 bp, Homo sapiens
cctggacggggacctcgctgttccaccagcccatccgtgcacacttagtttcccctaaagcagtttccgcatgggccggaccgtggtcgtgctgggcggargcatcagcggcttggccgccagttaccacctgagccgggccccctgcccccctaaggtggtcctagtggagagcagtgagcgtctgggaggctggattcg

SEQ ID NO: 2122 - DNA, 201 bp, Homo sapiens; identical to SEQ ID NO: 2081

SEQ ID NO: 2123 - DNA, 201 bp, Homo sapiens; identical to SEQ ID NO: 2082

SEQ ID NO: 2124 - DNA, 201 bp, Homo sapiens; identical to SEQ ID NO: 2083

SEQ ID NO: 2125 - DNA, 201 bp, Homo sapiens; identical to SEQ ID NO: 2084

SEQ ID NO: 2126 - DNA, 201 bp, Homo sapiens; identical to SEQ ID NO: 2085

SEQ ID NO: 2127 - DNA, 201 bp, Homo sapiens; identical to SEQ ID NO: 2086

SEQ ID NO: 2128 - DNA, 201 bp, Homo sapiens; identical to SEQ ID NO: 2087

SEQ ID NO: 2129 - DNA, 201 bp, Homo sapiens
acaattaggactgaaggagatgccgagccactgcttggtccatctacacaagaactgcattccccagtatacactaggtcactggcaaaaactagagtcasctaggcaattcctgactgctcacaggttgcccctgactctggctggagcctcctatgagggagttgctgttaatgactgtatagagagtgggcgccaggc

SEQ ID NO: 2130 - DNA, 201 bp, Homo sapiens
aggactgaaggagatgccgagccactgcttggtccatctacacaagaactgcattccccagtatacactaggtcactggcaaaaactagagtcagctaggyaattcctgactgctcacaggttgcccctgactctggctggagcctcctatgagggagttgctgttaatgactgtatagagagtgggcgccaggcagcagt

SEQ ID NO: 2131 - DNA, 201 bp, Homo sapiens; identical to SEQ ID NO: 2090

SEQ ID NO: 2132 - DNA, 201 bp, Homo sapiens
gaactgcattccccagtatacactaggtcactggcaaaaactagagtcagctaggcaattcctgactgctcacaggttgcccctgactctggctggagccycctatgagggagttgctgttaatgactgtatagagagtgggcgccaggcagcagtcagtgtcctgggcacagaacctaacagctgatccccaactctcat

SEQ ID NO: 2133 - DNA, 201 bp, Homo sapiens; identical to SEQ ID NO: 2092

SEQ ID NO: 2134 - DNA, 201 bp, Homo sapiens
ctgtgcacagttttgcccagcgccgccttggacctgagtcctagtctcacccttaaggtggcgtctctagccatggacagtctctgccgtggagtgtttgyaggcaacagccgtgagctcagcatcaggtcctgctttcccagtctcttccaagctgagcaaacccatcgttccatattactgggcctgctgctgggggca

SEQ ID NO: 2135 - DNA, 201 bp, Homo sapiens
ccttaaggtggcgtctctagccatggacagtctctgccgtggagtgtttgcaggcaacagccgtgagctcagcatcaggtcctgctttcccagtctcttcyaagctgagcaaacccatcgttccatattactgggcctgctgctgggggcagggcggaccccacagccagactcagcactcattcgccaggccttggctga

SEQ ID NO: 2136 - DNA, 201 bp, Homo sapiens
ccccagtatacactaggtcactggcaaaaactagagtcagctaggcaattcctgactgctcacaggttgcccctgactctggctggagcctcctatgaggkagttgctgttaatgactgtatagagagtgggcgccaggcagcagtcagtgtcctgggcacagaacctaacagctgatccccaactctcattcatgaaaat

SEQ ID NO: 2137 - DNA, 201 bp, Homo sapiens
tccccagtatacactaggtcactggcaaaaactagagtcagctaggcaattcctgactgctcacaggttgcccctgactctggctggagcctcctatgagrgagttgctgttaatgactgtatagagagtgggcgccaggcagcagtcagtgtcctgggcacagaacctaacagctgatccccaactctcattcatgaaaa

SEQ ID NO: 2138 - DNA, 201 bp, Homo sapiens; identical to SEQ ID NO: 2097

SEQ ID NO: 2139 - DNA, 201 bp, Homo sapiens
ttggtccatctacacaagaactgcattccccagtatacactaggtcactggcaaaaactagagtcagctaggcaattcctgactgctcacaggttgccccygactctggctggagcctcctatgagggagttgctgttaatgactgtatagagagtgggcgccaggcagcagtcagtgtcctgggcacagaacctaacagc

SEQ ID NO: 2140 - DNA, 134 bp, Homo sapiens; identical to SEQ ID NO: 2056

SEQ ID NO: 2141 - DNA, 201 bp, Homo sapiens; identical to SEQ ID NO: 2057

SEQ ID NO: 2142 - DNA, 201 bp, Homo sapiens; identical to SEQ ID NO: 2058

SEQ ID NO: 2143 - DNA, 201 bp, Homo sapiens; identical to SEQ ID NO: 2101

SEQ ID NO: 2144 - DNA, 201 bp, Homo sapiens; identical to SEQ ID NO: 2060

SEQ ID NO: 2145 - DNA, 201 bp, Homo sapiens; identical to SEQ ID NO: 2061

SEQ ID NO: 2146 - DNA, 201 bp, Homo sapiens; identical to SEQ ID NO: 2062

SEQ ID NO: 2147 - DNA, 201 bp, Homo sapiens; identical to SEQ ID NO: 2064

SEQ ID NO: 2148 - DNA, 201 bp, Homo sapiens; identical to SEQ ID NO: 2105

SEQ ID NO: 2149 - DNA, 201 bp, Homo sapiens; identical to SEQ ID NO: 2065

SEQ ID NO: 2150 - DNA, 201 bp, Homo sapiens
ggaggctggattcgctccgttcgaggccctaatggtgctatctttgagcttggacctcggggaattaggccagcgggagccctaggggcccggaccttgcycctgggggctactccgcccttcaccccccttctccaaacctctgttttgggctgggctgagggagctgaccaagccccggggcaaagagcctgatgagac

SEQ ID NO: 2151 - DNA, 201 bp, Homo sapiens
attaggccagcgggagccctaggggcccggaccttgctcctgggggctactccgcccttcaccccccttctccaaacctctgttttgggctgggctgaggkagctgaccaagccccggggcaaagagcctgatgagactgtgcacagttttgcccagcgccgccttggacctgaggtggcgtctctagccatggacagtct

SEQ ID NO: 2152 - DNA, 201 bp, Homo sapiens; identical to SEQ ID NO: 2069

SEQ ID NO: 2153 - DNA, 201 bp, Homo sapiens; identical to SEQ ID NO: 2070

SEQ ID NO: 2154 - DNA, 201 bp, Homo sapiens; identical to SEQ ID NO: 2071

SEQ ID NO: 2155 - DNA, 201 bp, Homo sapiens
ccctaggggcccggaccttgctcctgggggctactccgcccttcaccccccttctccaaacctctgttttgggctgggctgagggagctgaccaagccccsgggcaaagagcctgatgagactgtgcacagttttgcccagcgccgccttggacctgaggtggcgtctctagccatggacagtctctgccgtggagtgttt

SEQ ID NO: 2156 - DNA, 201 bp, Homo sapiens; identical to SEQ ID NO: 2073

SEQ ID NO: 2157 - DNA, 201 bp, Homo sapiens
ccttgctcctgggggctactccgcccttcaccccccttctccaaacctctgttttgggctgggctgagggagctgaccaagccccggggcaaagagcctgwtgagactgtgcacagttttgcccagcgccgccttggacctgaggtggcgtctctagccatggacagtctctgccgtggagtgtttgcaggcaacagccgt

SEQ ID NO: 2158 - DNA, 201 bp, Homo sapiens; identical to SEQ ID NO: 2075

SEQ ID NO: 2159 - DNA, 201 bp, Homo sapiens; identical to SEQ ID NO: 2076

SEQ ID NO: 2160 - DNA, 201 bp, Homo sapiens; identical to SEQ ID NO: 2078

SEQ ID NO: 2161 - DNA, 201 bp, Homo sapiens; identical to SEQ ID NO: 2077

SEQ ID NO: 2162 - DNA, 201 bp, Homo sapiens; identical to SEQ ID NO: 2079

SEQ ID NO: 2163 - DNA, 201 bp, Homo sapiens; identical to SEQ ID NO: 2081

SEQ ID NO: 2164 - DNA, 201 bp, Homo sapiens; identical to SEQ ID NO: 2080

SEQ ID NO: 2165 - DNA, 201 bp, Homo sapiens; identical to SEQ ID NO: 2082

SEQ ID NO: 2166 - DNA, 201 bp, Homo sapiens; identical to SEQ ID NO: 2083

SEQ ID NO: 2167 - DNA, 201 bp, Homo sapiens; identical to SEQ ID NO: 2085

SEQ ID NO: 2168 - DNA, 201 bp, Homo sapiens
ctgcccccctaaggtggtcctagtggagagcagtgagcgtctgggaggctggattcgctccgttcgaggccctaatggtgctatctttgagcttggacctyggggaattaggccagcgggagccctaggggcccggaccttgctcctgggggctactccgcccttcaccccccttctccaaacctctgttttgggctgggc

SEQ ID NO: 2169 - DNA, 201 bp, Homo sapiens; identical to SEQ ID NO: 2086

SEQ ID NO: 2170 - DNA, 201 bp, Homo sapiens; identical to SEQ ID NO: 2087

SEQ ID NO: 2171 - DNA, 201 bp, Homo sapiens; identical to SEQ ID NO: 2129

SEQ ID NO: 2172 - DNA, 201 bp, Homo sapiens; identical to SEQ ID NO: 2130

SEQ ID NO: 2173 - DNA, 201 bp, Homo sapiens; identical to SEQ ID NO: 2090

SEQ ID NO: 2174 - DNA, 201 bp, Homo sapiens; identical to SEQ ID NO: 2132

SEQ ID NO: 2175 - DNA, 201 bp, Homo sapiens; identical to SEQ ID NO: 2092

SEQ ID NO: 2176 - DNA, 201 bp, Homo sapiens; identical to SEQ ID NO: 2093

SEQ ID NO: 2177 - DNA, 201 bp, Homo sapiens; identical to SEQ ID NO: 2136

SEQ ID NO: 2178 - DNA, 201 bp, Homo sapiens; identical to SEQ ID NO: 2095

SEQ ID NO: 2179 - DNA, 201 bp, Homo sapiens; identical to SEQ ID NO: 2137

SEQ ID NO: 2180 - DNA, 201 bp, Homo sapiens; identical to SEQ ID NO: 2097

SEQ ID NO: 2181 - DNA, 201 bp, Homo sapiens; identical to SEQ ID NO: 2139

SEQ ID NO: 2182 - DNA, 134 bp, Homo sapiens; identical to SEQ ID NO: 2056

SEQ ID NO: 2183 - DNA, 201 bp, Homo sapiens; identical to SEQ ID NO: 2057

SEQ ID NO: 2184 - DNA, 201 bp, Homo sapiens; identical to SEQ ID NO: 2058

SEQ ID NO: 2185 - DNA, 201 bp, Homo sapiens; identical to SEQ ID NO: 2101

SEQ ID NO: 2186 - DNA, 201 bp, Homo sapiens; identical to SEQ ID NO: 2060

SEQ ID NO: 2187 - DNA, 201 bp, Homo sapiens; identical to SEQ ID NO: 2061

SEQ ID NO: 2188 - DNA, 201 bp, Homo sapiens; identical to SEQ ID NO: 2062

SEQ ID NO: 2189 - DNA, 201 bp, Homo sapiens; identical to SEQ ID NO: 2105

SEQ ID NO: 2190 - DNA, 201 bp, Homo sapiens; identical to SEQ ID NO: 2064

SEQ ID NO: 2191 - DNA, 201 bp, Homo sapiens; identical to SEQ ID NO: 2065

SEQ ID NO: 2192 - DNA, 201 bp, Homo sapiens; identical to SEQ ID NO: 2066

SEQ ID NO: 2193 - DNA, 201 bp, Homo sapiens; identical to SEQ ID NO: 2067

SEQ ID NO: 2194 - DNA, 201 bp, Homo sapiens; identical to SEQ ID NO: 2068

SEQ ID NO: 2195 - DNA, 201 bp, Homo sapiens; identical to SEQ ID NO: 2069

SEQ ID NO: 2196 - DNA, 201 bp, Homo sapiens; identical to SEQ ID NO: 2070

SEQ ID NO: 2197 - DNA, 201 bp, Homo sapiens; identical to SEQ ID NO: 2071

SEQ ID NO: 2198 - DNA, 201 bp, Homo sapiens; identical to SEQ ID NO: 2072

SEQ ID NO: 2199 - DNA, 201 bp, Homo sapiens; identical to SEQ ID NO: 2073

SEQ ID NO: 2200 - DNA, 201 bp, Homo sapiens; identical to SEQ ID NO: 2074

SEQ ID NO: 2201 - DNA, 201 bp, Homo sapiens; identical to SEQ ID NO: 2075

SEQ ID NO: 2202 - DNA, 201 bp, Homo sapiens; identical to SEQ ID NO: 2076

SEQ ID NO: 2203 - DNA, 201 bp, Homo sapiens; identical to SEQ ID NO: 2078

SEQ ID NO: 2204 - DNA, 201 bp, Homo sapiens; identical to SEQ ID NO: 2077

SEQ ID NO: 2205 - DNA, 201 bp, Homo sapiens; identical to SEQ ID NO: 2079

SEQ ID NO: 2206 - DNA, 201 bp, Homo sapiens; identical to SEQ ID NO: 2081

SEQ ID NO: 2207 - DNA, 201 bp, Homo sapiens; identical to SEQ ID NO: 2080

SEQ ID NO: 2208 - DNA, 201 bp, Homo sapiens; identical to SEQ ID NO: 2082

SEQ ID NO: 2209 - DNA, 201 bp, Homo sapiens; identical to SEQ ID NO: 2083

SEQ ID NO: 2210 - DNA, 201 bp, Homo sapiens; identical to SEQ ID NO: 2084

SEQ ID NO: 2211 - DNA, 201 bp, Homo sapiens; identical to SEQ ID NO: 2085

SEQ ID NO: 2212 - DNA, 201 bp, Homo sapiens; identical to SEQ ID NO: 2086

SEQ ID NO: 2213 - DNA, 201 bp, Homo sapiens; identical to SEQ ID NO: 2087

SEQ ID NO: 2214 - DNA, 201 bp, Homo sapiens; identical to SEQ ID NO: 2129

SEQ ID NO: 2215 - DNA, 201 bp, Homo sapiens; identical to SEQ ID NO: 2130

SEQ ID NO: 2216 - DNA, 201 bp, Homo sapiens; identical to SEQ ID NO: 2132

SEQ ID NO: 2217 - DNA, 201 bp, Homo sapiens; identical to SEQ ID NO: 2090

SEQ ID NO: 2218 - DNA, 201 bp, Homo sapiens; identical to SEQ ID NO: 2092

SEQ ID NO: 2219 - DNA, 201 bp, Homo sapiens; identical to SEQ ID NO: 2093

SEQ ID NO: 2220 - DNA, 201 bp, Homo sapiens; identical to SEQ ID NO: 2136

SEQ ID NO: 2221 - DNA, 201 bp, Homo sapiens; identical to SEQ ID NO: 2095

SEQ ID NO: 2222 - DNA, 201 bp, Homo sapiens; identical to SEQ ID NO: 2137

SEQ ID NO: 2223 - DNA, 201 bp, Homo sapiens; identical to SEQ ID NO: 2097

SEQ ID NO: 2224 - DNA, 201 bp, Homo sapiens; identical to SEQ ID NO: 2139

SEQ ID NO: 2225 - DNA, 134 bp, Homo sapiens; identical to SEQ ID NO: 2056

SEQ ID NO: 2226 - DNA, 201 bp, Homo sapiens; identical to SEQ ID NO: 2057

SEQ ID NO: 2227 - DNA, 201 bp, Homo sapiens; identical to SEQ ID NO: 2058

SEQ ID NO: 2228 - DNA, 201 bp, Homo sapiens; identical to SEQ ID NO: 2101

SEQ ID NO: 2229 - DNA, 201 bp, Homo sapiens; identical to SEQ ID NO: 2060

SEQ ID NO: 2230 - DNA, 201 bp, Homo sapiens; identical to SEQ ID NO: 2061

SEQ ID NO: 2231 - DNA, 201 bp, Homo sapiens; identical to SEQ ID NO: 2062

SEQ ID NO: 2232 - DNA, 201 bp, Homo sapiens; identical to SEQ ID NO: 2064

SEQ ID NO: 2233 - DNA, 201 bp, Homo sapiens; identical to SEQ ID NO: 2105

SEQ ID NO: 2234 - DNA, 201 bp, Homo sapiens; identical to SEQ ID NO: 2065

SEQ ID NO: 2235 - DNA, 201 bp, Homo sapiens; identical to SEQ ID NO: 2066

SEQ ID NO: 2236 - DNA, 201 bp, Homo sapiens; identical to SEQ ID NO: 2068

SEQ ID NO: 2237 - DNA, 201 bp, Homo sapiens; identical to SEQ ID NO: 2110

SEQ ID NO: 2238 - DNA, 201 bp, Homo sapiens; identical to SEQ ID NO: 2111

SEQ ID NO: 2239 - DNA, 201 bp, Homo sapiens; identical to SEQ ID NO: 2112

SEQ ID NO: 2240 - DNA, 201 bp, Homo sapiens; identical to SEQ ID NO: 2113

SEQ ID NO: 2241 - DNA, 201 bp, Homo sapiens; identical to SEQ ID NO: 2114

SEQ ID NO: 2242 - DNA, 201 bp, Homo sapiens; identical to SEQ ID NO: 2073

SEQ ID NO: 2243 - DNA, 201 bp, Homo sapiens; identical to SEQ ID NO: 2116

SEQ ID NO: 2244 - DNA, 201 bp, Homo sapiens; identical to SEQ ID NO: 2075

SEQ ID NO: 2245 - DNA, 201 bp, Homo sapiens; identical to SEQ ID NO: 2076

SEQ ID NO: 2246 - DNA, 201 bp, Homo sapiens; identical to SEQ ID NO: 2078

SEQ ID NO: 2247 - DNA, 201 bp, Homo sapiens; identical to SEQ ID NO: 2119

SEQ ID NO: 2248 - DNA, 201 bp, Homo sapiens; identical to SEQ ID NO: 2079

SEQ ID NO: 2249 - DNA, 201 bp, Homo sapiens; identical to SEQ ID NO: 2081

SEQ ID NO: 2250 - DNA, 201 bp, Homo sapiens; identical to SEQ ID NO: 2080

SEQ ID NO: 2251 - DNA, 201 bp, Homo sapiens; identical to SEQ ID NO: 2082

SEQ ID NO: 2252 - DNA, 201 bp, Homo sapiens; identical to SEQ ID NO: 2083

SEQ ID NO: 2253 - DNA, 201 bp, Homo sapiens; identical to SEQ ID NO: 2085

SEQ ID NO: 2254 - DNA, 201 bp, Homo sapiens; identical to SEQ ID NO: 2084

SEQ ID NO: 2255 - DNA, 201 bp, Homo sapiens; identical to SEQ ID NO: 2086

SEQ ID NO: 2256 - DNA, 201 bp, Homo sapiens; identical to SEQ ID NO: 2087

SEQ ID NO: 2257 - DNA, 201 bp, Homo sapiens; identical to SEQ ID NO: 2129

SEQ ID NO: 2258 - DNA, 201 bp, Homo sapiens; identical to SEQ ID NO: 2130

SEQ ID NO: 2259 - DNA, 201 bp, Homo sapiens; identical to SEQ ID NO: 2090

SEQ ID NO: 2260 - DNA, 201 bp, Homo sapiens; identical to SEQ ID NO: 2132

SEQ ID NO: 2261 - DNA, 201 bp, Homo sapiens; identical to SEQ ID NO: 2092

SEQ ID NO: 2262 - DNA, 201 bp, Homo sapiens; identical to SEQ ID NO: 2134

SEQ ID NO: 2263 - DNA, 201 bp, Homo sapiens; identical to SEQ ID NO: 2135

SEQ ID NO: 2264 - DNA, 201 bp, Homo sapiens; identical to SEQ ID NO: 2136

SEQ ID NO: 2265 - DNA, 201 bp, Homo sapiens; identical to SEQ ID NO: 2137

SEQ ID NO: 2266 - DNA, 201 bp, Homo sapiens; identical to SEQ ID NO: 2097

SEQ ID NO: 2267 - DNA, 201 bp, Homo sapiens; identical to SEQ ID NO: 2139

SEQ ID NO: 2268 - DNA, 201 bp, Homo sapiens; identical to SEQ ID NO: 2099

SEQ ID NO: 2269 - DNA, 201 bp, Homo sapiens; identical to SEQ ID NO: 2058

SEQ ID NO: 2270 - DNA, 201 bp, Homo sapiens; identical to SEQ ID NO: 2101

SEQ ID NO: 2271 - DNA, 201 bp, Homo sapiens; identical to SEQ ID NO: 2060

SEQ ID NO: 2272 - DNA, 181 bp, Homo sapiens; identical to SEQ ID NO: 2103

SEQ ID NO: 2273 - DNA, 180 bp, Homo sapiens; identical to SEQ ID NO: 2104

SEQ ID NO: 2274 - DNA, 201 bp, Homo sapiens; identical to SEQ ID NO: 2106

SEQ ID NO: 2275 - DNA, 201 bp, Homo sapiens; identical to SEQ ID NO: 2105

SEQ ID NO: 2276 - DNA, 201 bp, Homo sapiens; identical to SEQ ID NO: 2065

SEQ ID NO: 2277 - DNA, 201 bp, Homo sapiens; identical to SEQ ID NO: 2066

SEQ ID NO: 2278 - DNA, 201 bp, Homo sapiens; identical to SEQ ID NO: 2067

SEQ ID NO: 2279 - DNA, 201 bp, Homo sapiens; identical to SEQ ID NO: 2068

SEQ ID NO: 2280 - DNA, 201 bp, Homo sapiens; identical to SEQ ID NO: 2069

SEQ ID NO: 2281 - DNA, 201 bp, Homo sapiens; identical to SEQ ID NO: 2070

SEQ ID NO: 2282 - DNA, 201 bp, Homo sapiens; identical to SEQ ID NO: 2071

SEQ ID NO: 2283 - DNA, 201 bp, Homo sapiens; identical to SEQ ID NO: 2072

SEQ ID NO: 2284 - DNA, 201 bp, Homo sapiens; identical to SEQ ID NO: 2073

SEQ ID NO: 2285 - DNA, 201 bp, Homo sapiens; identical to SEQ ID NO: 2074

SEQ ID NO: 2286 - DNA, 201 bp, Homo sapiens; identical to SEQ ID NO: 2075

SEQ ID NO: 2287 - DNA, 201 bp, Homo sapiens; identical to SEQ ID NO: 2076

SEQ ID NO: 2288 - DNA, 201 bp, Homo sapiens; identical to SEQ ID NO: 2077

SEQ ID NO: 2289 - DNA, 201 bp, Homo sapiens; identical to SEQ ID NO: 2079

SEQ ID NO: 2290 - DNA, 201 bp, Homo sapiens; identical to SEQ ID NO: 2081

SEQ ID NO: 2291 - DNA, 201 bp, Homo sapiens; identical to SEQ ID NO: 2121

SEQ ID NO: 2292 - DNA, 201 bp, Homo sapiens; identical to SEQ ID NO: 2082

SEQ ID NO: 2293 - DNA, 201 bp, Homo sapiens; identical to SEQ ID NO: 2083

SEQ ID NO: 2294 - DNA, 201 bp, Homo sapiens; identical to SEQ ID NO: 2084

SEQ ID NO: 2295 - DNA, 201 bp, Homo sapiens; identical to SEQ ID NO: 2085

SEQ ID NO: 2296 - DNA, 201 bp, Homo sapiens; identical to SEQ ID NO: 2086

SEQ ID NO: 2297 - DNA, 201 bp, Homo sapiens; identical to SEQ ID NO: 2087

SEQ ID NO: 2298 - DNA, 201 bp, Homo sapiens; identical to SEQ ID NO: 2129

SEQ ID NO: 2299 - DNA, 201 bp, Homo sapiens; identical to SEQ ID NO: 2130

SEQ ID NO: 2300 - DNA, 201 bp, Homo sapiens; identical to SEQ ID NO: 2132

SEQ ID NO: 2301 - DNA, 201 bp, Homo sapiens; identical to SEQ ID NO: 2090

SEQ ID NO: 2302 - DNA, 201 bp, Homo sapiens; identical to SEQ ID NO: 2092

SEQ ID NO: 2303 - DNA, 201 bp, Homo sapiens; identical to SEQ ID NO: 2093

SEQ ID NO: 2304 - DNA, 201 bp, Homo sapiens; identical to SEQ ID NO: 2136

SEQ ID NO: 2305 - DNA, 201 bp, Homo sapiens; identical to SEQ ID NO: 2095

SEQ ID NO: 2306 - DNA, 201 bp, Homo sapiens; identical to SEQ ID NO: 2137

SEQ ID NO: 2307 - DNA, 201 bp, Homo sapiens; identical to SEQ ID NO: 2097

SEQ ID NO: 2308 - DNA, 201 bp, Homo sapiens; identical to SEQ ID NO: 2139

SEQ ID NO: 2309 - DNA, 201 bp, Homo sapiens
tccaggcccaggaatccataacactggaggatgtggctgtggacttcacttgggaggagtggcaactcctgggcgctgctcagaaggacctgtaccgggaygtgatgttggagaactacagcaacctggtggcagtggggtatcaagccagcaaaccggatgcactcttcaagttggaacaaggagaacaactgtggacaa

SEQ ID NO: 2310 - DNA, 201 bp, Homo sapiens
taccgggatgtgatgttggagaactacagcaacctggtggcagtggggtatcaagccagcaaaccggatgcactcttcaagttggaacaaggagaacaacygtggacaattgaagatggaatccacagtggagcctgttcagacatatggaaagttgatcatgtgctggagcgcttgcagagtgaaagcctggtgaacaga

SEQ ID NO: 2311 - DNA, 201 bp, Homo sapiens
acacaggaaagacgccctttgtgtgcagtgaatgtggaaaatcctgttctcagaaatcaggtctcattaaacatcaaagaattcacacaggagagaaaccmtttgaatgtagtgaatgtgggaaagcctttagcacaaagcaaaagctcattgtccatcaaaggactcatacaggagagagaccctatggctgtaacgagt

SEQ ID NO: 2312 - DNA, 201 bp, Homo sapiens
cccctcagacatcattaaacatcagcggcctcctcgcaaacaggaacgtagtccttgtgggacagccagtggtcagatgtgcagcctcaggagataacagwggatttgcacaggacagaaaccttgtgaatgcagtgaatgtggttgtgccttccgtgatcaattatgtcttattttatgttacagaaaacccataggaag

SEQ ID NO: 2313 - DNA, 201 bp, Homo sapiens
gctcgactgtgtcaattaaatgagtaaaggaagcccaagtacttttaagtggaggaaatgaagtactgtgaatttttaaaacagatgagataattggtgtygggagtgttgcagtgactgaaaagcttcataaggggcagttggtgggaaagggctaatactgtaatggtggaatgtgggacacatatgtgtcaattcagt

SEQ ID NO: 2314 - DNA, 201 bp, Homo sapiens
accctttgaatgtagtgaatgtgggaaagcctttagcacaaagcaaaagctcattgtccatcaaaggactcatacaggagagagaccctatggctgtaacragtgtgggaaagcgtttgcgtatatgtcgtgtctggttaagcataagagaatacacacaagggagaaacaagaggcagccaaggtggaaaatcctcctgc

SEQ ID NO: 2315 - DNA, 201 bp, Homo sapiens
gctcattacacaccagtgatgtcatgcaggagaaaaactctgctaacggggcgactacacaagtgccttctgtggcccctcagacatcattaaacatcagyggcctcctcgcaaacaggaacgtagtccttgtgggacagccagtggtcagatgtgcagcctcaggagataacagaggatttgcacaggacagaaaccttg

SEQ ID NO: 2316 - DNA, 201 bp, Homo sapiens
cttattttatgttacagaaaacccataggaagaaaactcagatctatgtggaaaagggttgagcaaaaatttgtagttcattatgtggccgaaaagcatayactgagagaacatgtataaggctgagatagcctgataaactcatcctattaaaatgtatgctgtgatacacaggcaaatttgatgttaacctaagcacat

SEQ ID NO: 2317 - DNA, 201 bp, Homo sapiens
agaagcatcatgtgtgcagtgaatgtgggaaagccttcatcaagaagtcttggctaactgatcaccaggtaatgcatacaggagagaaaccccacagatgyagtctatgtgagaaagccttctccagaaagttcatgcttactgaacatcagcgaactcatacaggagaaaaaccttatgaatgccctgaatgtggcaaag

SEQ ID NO: 2318 - DNA, 201 bp, Homo sapiens
cagaaggaaaccatgtcatgaacatgatgcatttgaaaatattgttcattgcagcaaaagtcagtttctgttagggcaaaatcatgatatatttgacttaygtggaaaaagtttgaaatccaatttaactttagttaaccagagcaaaggctatgaaataaagaactctgttgagtttactggaaatggggactcctttct

SEQ ID NO: 2319 - DNA, 201 bp, Homo sapiens; identical to SEQ ID NO: 2309

SEQ ID NO: 2320 - DNA, 201 bp, Homo sapiens; identical to SEQ ID NO: 2310

SEQ ID NO: 2321 - DNA, 201 bp, Homo sapiens; identical to SEQ ID NO: 2311

SEQ ID NO: 2322 - DNA, 201 bp, Homo sapiens; identical to SEQ ID NO: 2312

SEQ ID NO: 2323 - DNA, 201 bp, Homo sapiens; identical to SEQ ID NO: 2313

SEQ ID NO: 2324 - DNA, 201 bp, Homo sapiens; identical to SEQ ID NO: 2314

SEQ ID NO: 2325 - DNA, 201 bp, Homo sapiens; identical to SEQ ID NO: 2315

SEQ ID NO: 2326 - DNA, 201 bp, Homo sapiens; identical to SEQ ID NO: 2316

SEQ ID NO: 2327 - DNA, 201 bp, Homo sapiens; identical to SEQ ID NO: 2317

SEQ ID NO: 2328 - DNA, 201 bp, Homo sapiens; identical to SEQ ID NO: 2318

SEQ ID NO: 2329 - DNA, 201 bp, Homo sapiens
tgaagttcatgctcatcgtgaaagctaccaaactgttccctgtgggctacaacctcatgaagccattcctgagtgaggacactcgcaggaaaattattgtrttgggaaataactggaaggaaggtttgctgaaactcatcagtcctgaggaactgcctgcccagtttgggggcaccctgactgacccagatgggaacccca

SEQ ID NO: 2330 - DNA, 201 bp, Homo sapiens
ttctcaggtggcagttctcatctgatggtgcggacatcggcttcggagttttcctgaagaccaagatgggggagcgacagcgggcaggggagatgacagakgttctacccagccagcgctataacgcccacatggtgcccgaggatgggaacctcacctgctcagaggccggcgtctgtgtgagacaatgggatgtaatga

SEQ ID NO: 2331 - DNA, 201 bp, Homo sapiens
agtacgagcactcggtgcagatcaaccgcggctcatcacaccaagtggaatacgagatcctatttccaggctgcgttctcaggtggcagttctcatctgayggtgcggacatcggcttcggagttttcctgaagaccaagatgggggagcgacagcgggcaggggagatgacagatgttctacccagccagcgctataacg

SEQ ID NO: 2332 - DNA, 201 bp, Homo sapiens
agatcaaccgcggctcatcacaccaagtggaatacgagatcctatttccaggctgcgttctcaggtggcagttctcatctgatggtgcggacatcggcttyggagttttcctgaagaccaagatgggggagcgacagcgggcaggggagatgacagatgttctacccagccagcgctataacgcccacatggtgcccgagg

SEQ ID NO: 2333 - DNA, 201 bp, Homo sapiens
aattacccagagaccctgaagttcatgctcatcgtgaaagctaccaaactgttccctgtgggctacaacctcatgaagccattcctgagtgaggacactcrcaggaaaattattgtgttgggaaataactggaaggaaggtttgctgaaactcatcagtcctgaggaactgcctgcccagtttgggggcaccctgactgac

SEQ ID NO: 2334 - DNA, 201 bp, Homo sapiens
catatccttgattggcagcccccagaggtgatccagaagtacatgcctgggggcctgtgtggctatgaccgtgatggctgccccgtgtggtatgacatcaytgggccacttgatcccaaggggttgctcttctcagtcaccaagcaggacctgctcaagaccaagatgagggactgtgagcgcatcctgcatgagtgtgac

SEQ ID NO: 2335 - DNA, 201 bp, Homo sapiens
ctcagaggccggcgtctgtgtgagacaatgggatgtaatgaccattgttctcgatgccagtaaagccatgcctgggcacatgccaagaggagatgtcctaygcttcgacaacacctatagctttgtccacgccaagaaggtcagcttcacagtggaggtcctgctccctgacgagggcatgcagaaatatgataaggagct

SEQ ID NO: 2336 - DNA, 201 bp, Homo sapiens; identical to SEQ ID NO: 2329

SEQ ID NO: 2337 - DNA, 201 bp, Homo sapiens
ttctcaggtggcagttctcatctgatggtgcggacatcggcttcggagttttcctgaagaccaagatgggggagcgacagcgggcaggggagatgacagakgttctacccagccagcgctataacgcccacatggtgcccgaggatgggaacctcacctgctcagaggccggcgtctatgtcctacgcttcgacaacacct

SEQ ID NO: 2338 - DNA, 201 bp, Homo sapiens; identical to SEQ ID NO: 2331

SEQ ID NO: 2339 - DNA, 201 bp, Homo sapiens; identical to SEQ ID NO: 2332

SEQ ID NO: 2340 - DNA, 201 bp, Homo sapiens; identical to SEQ ID NO: 2333

SEQ ID NO: 2341 - DNA, 201 bp, Homo sapiens; identical to SEQ ID NO: 2334

SEQ ID NO: 2342 - DNA, 201 bp, Homo sapiens
aggggagatgacagatgttctacccagccagcgctataacgcccacatggtgcccgaggatgggaacctcacctgctcagaggccggcgtctatgtcctaygcttcgacaacacctatagctttgtccacgccaagaaggtcagcttcacagtggaggtcctgctccctgacgagggcatgcagaaatatgataaggagct

SEQ ID NO: 2343 - DNA, 201 bp, Homo sapiens
aagaagtttctgagctttgtggcctaccaagggagaaactggctgcagcagagcgagtacttcgttccaacatggacatcctgaagccaatcctggtgagyagacttgctcactggagaaacttcaagcactaatgctttcggaatgtgaggcttttccttggacagcatgactttgttttgtagaaaagtacggctggct

SEQ ID NO: 2344 - DNA, 201 bp, Homo sapiens
tgcgcaaagttctgagaacattacagcagatcaagaaatccagctcaaacttgaagcttcaagatttcctggtggacaatgaaaccttctctgggttcctrtatcacaacctctctctcccaaagtctactgtggacaagatgctgagggctgatgtcattctccacaaggtatttttgcaaggctaccagttacatttga

SEQ ID NO: 2345 - DNA, 201 bp, Homo sapiens
aacagagttcttcatatttaaaaaaaaaaagtcttgaaaccattgatgggaagatggatatctatttatgtttaaaaacccatcataaagatgacattgtrggctgtcacagttggaaggccctggaattagatgagaccacactatttagcttacttagtaataacattgcaaagaaaaattccgacgaagttttttcag

SEQ ID NO: 2346 - DNA, 201 bp, Homo sapiens
ggctaccagttacatttgacaagtctgtgcaatggatcaaaatcagaagagatgattcaacttggtgaccaagaagtttctgagctttgtggcctaccaarggagaaactggctgcagcagagcgagtacttcgttccaacatggacatcctgaagccaatcctggtgagtagacttgctcactggagaaacttcaagcac

SEQ ID NO: 2347 - DNA, 124 bp, Homo sapiens
tatccaggattctggttttctactcaccagatagattctcttaaaaccagggaaagattcctggaggaaggatgtatctggaaagagatgttccttattayaataaaatgaaattgtaatactc

SEQ ID NO: 2348 - DNA, 201 bp, Homo sapiens
gacgcaaacacaaaagtggaaaacagttaatgaccagccacggcgtccctgctgtgagctctggccgctgccttccagggctcccgagccacacgctgggsgtgctggctgagggaacatggcttgttggcctcagctgaggttgctgctgtggaagaacctcactttcagaagaagacaaacatgtcagctgctgctgga

SEQ ID NO: 2349 - DNA, 116 bp, Homo sapiens
attctggttttctactcaccagatagattctcttaaaaccagggaaagattcctggaggaaggatgtatctggaaagagatgttccttattataataaaaygaaattgtaatactc

SEQ ID NO: 2350 - DNA, 201 bp, Homo sapiens
atactggtgagcctgagcagtttggtcatcagagtgttttatatagttccagaacaaatatgtctctaggtgttctgagagctctggtgaaattcctctcsctaccccaaacatcatcatttaatatccaggattctggttttctactcaccagatagattctcttaaaaccagggaaagattcctggaggaaggatgtat

SEQ ID NO: 2351 - DNA, 201 bp, Homo sapiens
ggatatctatttatgtttaaaaacccatcataaagatgacattgtgggctgtcacagttggaaggccctggaattagatgagaccacactatttagcttayttagtaataacattgcaaagaaaaattccgacgaagttttttcagcctaggaatcaatagttcagagaagcactctatgagaatacccattcattcttaa

SEQ ID NO: 2352 - DNA, 201 bp, Homo sapiens
agatgacattgtgggctgtcacagttggaaggccctggaattagatgagaccacactatttagcttacttagtaataacattgcaaagaaaaattccgacraagttttttcagcctaggaatcaatagttcagagaagcactctatgagaatacccattcattcttaaccaaaaaatactggtgagcctgagcagtttggt

SEQ ID NO: 2353 - DNA, 201 bp, Homo sapiens
ctatgtggtgctcaccagcgtgaacctcttcattggcattaatggcagcgtggccacctttgtgctggagctgttcaccgacaataagctgaataatatcmatgatatcctgaagtccgtgttcttgatcttcccacatttttgcctgggacgagggctcatcgacatggtgaaaaaccaggcaatggctgatgccctgga

SEQ ID NO: 2354 - DNA, 201 bp, Homo sapiens
gttacgttgatgacatctttctgcgggtgatgagccggtcaatgcccctcttcatgacgctggcctggatttactcagtggctgtgatcatcaagggcatygtgtatgagaaggaggcacggctgaaagagaccatgcggatcatgggcctggacaacagcatcctctggtttagctggttcattagtagcctcattcctc

SEQ ID NO: 2355 - DNA, 201 bp, Homo sapiens
tcgatgtctctgctatctccaacctcatcaggaagcatgtgtctgaagcccggctggtggaagacatagggcatgagctgacctatgtgctgccatatgargctgctaaggagggagcctttgtggaactctttcatgagattgatgaccggctctcagacctgggcatttctagttatggcatctcagagacgaccctgg

SEQ ID NO: 2356 - DNA, 201 bp, Homo sapiens
gccatcaaacaaatgaagaaacacctaaagctggccaaggacagttctgcagatcgatttctcaacagcttgggaagatttatgacaggactggacaccaraaataatgtcaaggtgtggttcaataacaagggctggcatgcaatcagctctttcctgaatgtcatcaacaatgccattctccgggccaacctgcaaaag

SEQ ID NO: 2357 - DNA, 201 bp, Homo sapiens
tcagttcctgcagaaacagtagtagcactgtgtcatacctgaaaaaggaggacagtgtttctcagagcagttctgatgctggcctgggcagcgaccatgasagtgacacgctgaccatcgatgtctctgctatctccaacctcatcaggaagcatgtgtctgaagcccggctggtggaagacatagggcatgagctgacct

SEQ ID NO: 2358 - DNA, 201 bp, Homo sapiens; identical to SEQ ID NO: 2344

SEQ ID NO: 2359 - DNA, 201 bp, Homo sapiens
ctatggggtgatgacctggtacattgaggctgtctttccaggccagtacggaattcccaggccctggtattttccttgcaccaagtcctactggtttggcraggaaagtgatgagaagagccaccctggttccaaccagaagagaatatcagaaatctgcatggaggaggaacccacccacttgaagctgggcgtgtccat

SEQ ID NO: 2360 - DNA, 201 bp, Homo sapiens
ggctaccagttacatttgacaagtctgtgcaatggatcaaaatcagaagagatgattcaacttggtgaccaagaagtttctgagctttgtggcctaccaarggagaaactggctgcagcagagcgagtacttcgttccaacatggacatcctgaagccaatcctgagaacactaaactctacatctcccttcccgagcaag

SEQ ID NO: 2361 - DNA, 201 bp, Homo sapiens
cctggatttactcagtggctgtgatcatcaagggcatcgtgtatgagaaggaggcacggctgaaagagaccatgcggatcatgggcctggacaacagcatmctctggtttagctggttcattagtagcctcattcctcttcttgtgagcgctggcctgctagtggtcatcctgaagttaggaaacctgctgccctacagtg

SEQ ID NO: 2362 - DNA, 201 bp, Homo sapiens
ggctggtggaagacatagggcatgagctgacctatgtgctgccatatgaagctgctaaggagggagcctttgtggaactctttcatgagattgatgaccgrctctcagacctgggcatttctagttatggcatctcagagacgaccctggaagaaatattcctcaaggtggccgaagagagtggggtggatgctgagacct

SEQ ID NO: 2363 - DNA, 201 bp, Homo sapiens
aggaggtgatgtttctgaccaatgtgaacagctccagctcctccacccaaatctaccaggctgtgtctcgtattgtctgcgggcatcccgagggagggggrctgaagatcaagtctctcaactggtatgaggacaacaactacaaagccctctttggaggcaatggcactgaggaagatgctgaaaccttctatgacaact

SEQ ID NO: 2364 - DNA, 201 bp, Homo sapiens
ccctggttccaaccagaagagaatatcagaaatctgcatggaggaggaacccacccacttgaagctgggcgtgtccattcagaacctggtaaaagtctacygagatgggatgaaggtggctgtcgatggcctggcactgaatttttatgagggccagatcacctccttcctgggccacaatggagcggggaagacgaccac

SEQ ID NO: 2365 - DNA, 201 bp, Homo sapiens
agtatcttatcaaacatccatgaagtacatcagaacatgggctactgccctcagtttgatgccatcacagagctgttgactgggagagaacacgtggagtyctttgcccttttgagaggagtcccagagaaagaagttggcaaggttggtgagtgggcgattcggaaactgggcctcgtgaagtatggagaaaaatatgct

SEQ ID NO: 2366 - DNA, 201 bp, Homo sapiens
atgctgcctgtgtgtcccccaggggcaggggggctgcctcctccacaaagaaaacaaaacactgcagatatccttcaggacctgacaggaagaaacatttyggattatctggtgaagacgtatgtgcagatcatagccaaaagcttaaagaacaagatctgggtgaatgagtttaggtatggcggcttttccctgggtgtc

SEQ ID NO: 2367 - DNA, 201 bp, Homo sapiens
gtgacatgcgacaggaggtgatgtttctgaccaatgtgaacagctccagctcctccacccaaatctaccaggctgtgtctcgtattgtctgcgggcatccygagggaggggggctgaagatcaagtctctcaactggtatgaggacaacaactacaaagccctctttggaggcaatggcactgaggaagatgctgaaacct

SEQ ID NO: 2368 - DNA, 201 bp, Homo sapiens
ccatagcaacagaagtctggctcatcaacaagtccatggagctgctggatgagaggaagttctgggctggtattgtgttcactggaattactccaggcagyattgagctgccccatcatgtcaagtacaagatccgaatggacattgacaatgtggagaggacaaataaaatcaaggatgggtactgggaccctggtcctc

SEQ ID NO: 2369 - DNA, 201 bp, Homo sapiens
atgctcctgaggacacgggaaccctggaactcttaaacgccctcaccaaagaccctggcttcgggacccgctgtatggaaggaaacccaatcccagacacrccctgccaggcaggggaggaagagtggaccactgccccagttccccagaccatcatggacctcttccagaatgggaactggacaatgcagaacccttcac

SEQ ID NO: 2370 - DNA, 201 bp, Homo sapiens
atggtcaatggaaggttcaggtgccttggcagtgtccagcatctaaaaaataggtttggagatggttatacaatagttgtacgaatagcagggtccaaccyggacctgaagcctgtccaggatttctttggacttgcatttcctggaagtgttctaaaagagaaacaccggaacatgctacaataccagcttccatcttca

SEQ ID NO: 2371 - DNA, 201 bp, Homo sapiens
gaagatcctgtatacacctgacactccagccacaaggcaggtcatggctgaggtgaacaagaccttccaggaactggctgtgttccatgatctggaaggcmtgtgggaggaactcagccccaagatctggaccttcatggagaacagccaagaaatggaccttgtccggatgctgttggacagcagggacaatgaccactt

SEQ ID NO: 2372 - DNA, 201 bp, Homo sapiens
ctccagagccaacctggcagcagcctgtgggggcatcatctacttcacgctgtacctgccctacgtcctgtgtgtggcatggcaggactacgtgggcttcmcactcaagatcttcgctagcctgctgtctcctgtggcttttgggtttggctgtgagtactttgccctttttgaggagcagggcattggagtgcagtggga

SEQ ID NO: 2373 - DNA, 201 bp, Homo sapiens
gccctcattccaagcactttacgctgtctgtaatgggatctatttttgcactggaatatctgagaattgcaaaactagacaaaagtttcacaacagatttytaagttaaatcattttcattaaaaggaaaaaagaaaaaaaattttgtatgtcaataactttatatgaagtattaaaatgcatatttctatgttgtaatat

SEQ ID NO: 2374 - DNA, 201 bp, Homo sapiens
agggctcatcgacatggtgaaaaaccaggcaatggctgatgccctggaaaggtttggggagaatcgctttgtgtcaccattatcttgggacttggtgggaygaaacctcttcgccatggccgtggaaggggtggtgttcttcctcattactgttctgatccagtacagattcttcatcaggcccagacctgtaaatgcaaa

SEQ ID NO: 2375 - DNA, 201 bp, Homo sapiens
ccggcagaacctgggggtctgtccccagcataacgtgctgtttgacatgctgactgtcgaagaacacatctggttctatgcccgcttgaaagggctctctragaagcacgtgaaggcggagatggagcagatggccctggatgttggtttgccatcaagcaagctgaaaagcaaaacaagccagctgtcaggtggaatgca

SEQ ID NO: 2376 - DNA, 201 bp, Homo sapiens
cacactcttctccagagccaacctggcagcagcctgtgggggcatcatctacttcacgctgtacctgccctacgtcctgtgtgtggcatggcaggactacrtgggcttcacactcaagatcttcgctagcctgctgtctcctgtggcttttgggtttggctgtgagtactttgccctttttgaggagcagggcattggagt

SEQ ID NO: 2377 - DNA, 201 bp, Homo sapiens
ttcgcccgttcactgaagatgatgctgctgatccaaatgattctgacatagacccagaatccagagagacagacttgctcagtgggatggatggcaaaggrtcctaccaggtgaaaggctggaaacttacacagcaacagtttgtggcccttttgtggaagagactgctaattgccagacggagtcggaaaggattttttg

SEQ ID NO: 2378 - DNA, 201 bp, Homo sapiens
tggtcaatggaaggttcaggtgccttggcagtgtccagcatctaaaaaataggtttggagatggttatacaatagttgtacgaatagcagggtccaacccrgacctgaagcctgtccaggatttctttggacttgcatttcctggaagtgttctaaaagagaaacaccggaacatgctacaataccagcttccatcttcat

SEQ ID NO: 2379 - DNA, 201 bp, Homo sapiens
tgaatgatgaagatgaagatgtgaggcgggaaagacagagaattcttgatggtggaggccagaatgacatcttagaaatcaaggagttgacgaagatatayagaaggaagcggaagcctgctgttgacaggatttgcgtgggcattcctcctggtgagtgctttgggctcctgggagttaatggggctggaaaatcatcaa

SEQ ID NO: 2380 - DNA, 201 bp, Homo sapiens
acaccacatggatgaagcggacgtcctgggggacaggattgccatcatctcccatgggaagctgtgctgtgtgggctcctccctgtttctgaagaaccagytgggaacaggctactacctgaccttggtcaagaaagatgtggaatcctccctcagttcctgcagaaacagtagtagcactgtgtcatacctgaaaaagga

SEQ ID NO: 2381 - DNA, 201 bp, Homo sapiens
gggaagatttatgacaggactggacaccagaaataatgtcaaggtgtggttcaataacaagggctggcatgcaatcagctctttcctgaatgtcatcaacratgccattctccgggccaacctgcaaaagggagagaaccctagccattatggaattactgctttcaatcatcccctgaatctcaccaagcagcagctctc

SEQ ID NO: 2382 - DNA, 201 bp, Homo sapiens
acctcttccagaatgggaactggacaatgcagaacccttcacctgcatgccagtgtagcagcgacaaaatcaagaagatgctgcctgtgtgtcccccaggkgcaggggggctgcctcctccacaaagaaaacaaaacactgcagatatccttcaggacctgacaggaagaaacatttcggattatctggtgaagacgtatg

SEQ ID NO: 2383 - DNA, 201 bp, Homo sapiens
gttaactgtcttgagagaaaagaaaaatatgagagaactattgtttggggaagttcaagtgatctttcaatatcattactaacttcttccactttttccaraatttgaatattaacgctaaaggtgtaagacttcagatttcaaattaatctttctatattttttaaatttacagaatattatataacccactgctgaaaa

SEQ ID NO: 2384 - DNA, 201 bp, Homo sapiens
gtaatggttctgtgtacacctggagagaagctttcaacgagactaaccaggcaatccggaccatatctcgcttcatggagtgtgtcaacctgaacaagctrgaacccatagcaacagaagtctggctcatcaacaagtccatggagctgctggatgagaggaagttctgggctggtattgtgttcactggaattactccag

SEQ ID NO: 2385 - DNA, 201 bp, Homo sapiens
aagctgggcgtgtccattcagaacctggtaaaagtctaccgagatgggatgaaggtggctgtcgatggcctggcactgaatttttatgagggccagatcayctccttcctgggccacaatggagcggggaagacgaccaccatgtcaatcctgaccgggttgttccccccgacctcgggcaccgcctacatcctgggaaaa

SEQ ID NO: 2386 - DNA, 201 bp, Homo sapiens
taaaagtctaccgagatgggatgaaggtggctgtcgatggcctggcactgaatttttatgagggccagatcacctccttcctgggccacaatggagcgggraagacgaccaccatgtcaatcctgaccgggttgttccccccgacctcgggcaccgcctacatcctgggaaaagacattcgctctgagatgagcaccatcc

SEQ ID NO: 2387 - DNA, 201 bp, Homo sapiens
tgagtactttgccctttttgaggagcagggcattggagtgcagtgggacaacctgtttgagagtcctgtggaggaagatggcttcaatctcaccacttcgrtctccatgatgctgtttgacaccttcctctatggggtgatgacctggtacattgaggctgtctttccaggccagtacggaattcccaggccctggtattt

SEQ ID NO: 2388 - DNA, 201 bp, Homo sapiens
acggaattcccaggccctggtattttccttgcaccaagtcctactggtttggcgaggaaagtgatgagaagagccaccctggttccaaccagaagagaatrtcagaaatctgcatggaggaggaacccacccacttgaagctgggcgtgtccattcagaacctggtaaaagtctaccgagatgggatgaaggtggctgtcg

SEQ ID NO: 2389 - DNA, 201 bp, Homo sapiens
gtttgccatcaagcaagctgaaaagcaaaacaagccagctgtcaggtggaatgcagagaaagctatctgtggccttggcctttgtcgggggatctaaggtkgtcattctggatgaacccacagctggtgtggacccttactcccgcaggggaatatgggagctgctgctgaaataccgacaaggccgcaccattattctct

SEQ ID NO: 2390 - DNA, 201 bp, Homo sapiens
cgattcggaaactgggcctcgtgaagtatggagaaaaatatgctggtaactatagtggaggcaacaaacgcaagctctctacagccatggctttgatcggygggcctcctgtggtgtttctggatgaacccaccacaggcatggatcccaaagcccggcggttcttgtggaattgtgccctaagtgttgtcaaggagggga

SEQ ID NO: 2391 - DNA, 201 bp, Homo sapiens
actggctgcagcagagcgagtacttcgttccaacatggacatcctgaagccaatcctgagaacactaaactctacatctcccttcccgagcaaggagctgrctgaagccacaaaaacattgctgcatagtcttgggactctggcccaggagctgttcagcatgagaagctggagtgacatgcgacaggaggtgatgtttct

SEQ ID NO: 2392 - DNA, 201 bp, Homo sapiens
tgttcaagatccccagcacagcctatgtggtgctcaccagcgtgaacctcttcattggcattaatggcagcgtggccacctttgtgctggagctgttcacygacaataagctgaataatatcaatgatatcctgaagtccgtgttcttgatcttcccacatttttgcctgggacgagggctcatcgacatggtgaaaaacc

SEQ ID NO: 2393 - DNA, 201 bp, Homo sapiens
ttactcccgcaggggaatatgggagctgctgctgaaataccgacaaggccgcaccattattctctctacacaccacatggatgaagcggacgtcctggggkacaggattgccatcatctcccatgggaagctgtgctgtgtgggctcctccctgtttctgaagaaccagctgggaacaggctactacctgaccttggtcaa

SEQ ID NO: 2394 - DNA, 201 bp, Homo sapiens
tttatgagggccagatcacctccttcctgggccacaatggagcggggaagacgaccaccatgtcaatcctgaccgggttgttccccccgacctcgggcacygcctacatcctgggaaaagacattcgctctgagatgagcaccatccggcagaacctgggggtctgtccccagcataacgtgctgtttgacatgctgactg

SEQ ID NO: 2395 - DNA, 201 bp, Homo sapiens
tgaggagcagggcattggagtgcagtgggacaacctgtttgagagtcctgtggaggaagatggcttcaatctcaccacttcggtctccatgatgctgtttracaccttcctctatggggtgatgacctggtacattgaggctgtctttccaggccagtacggaattcccaggccctggtattttccttgcaccaagtccta

SEQ ID NO: 2396 - DNA, 201 bp, Homo sapiens
cgggccaacctgcaaaagggagagaaccctagccattatggaattactgctttcaatcatcccctgaatctcaccaagcagcagctctcagaggtggctcygatgaccacatcagtggatgtccttgtgtccatctgtgtcatctttgcaatgtccttcgtcccagccagctttgtcgtattcctgatccaggagcgggtc

SEQ ID NO: 2397 - DNA, 201 bp, Homo sapiens
agacaacacttgaccaagtatttgtgaactttgccaaggaccaaagtgatgatgaccacttaaaagacctctcattacacaaaaaccagacagtagtggamgttgcagttctcacatcttttctacaggatgagaaagtgaaagaaagctatgtatgaagaatcctgttcatacggggtggctgaaagtaaagaggaacta

SEQ ID NO: 2398 - DNA, 201 bp, Homo sapiens
cctctttcccgcattatctggaaagctctgaagccgctgctcgttgggaagatcctgtatacacctgacactccagccacaaggcaggtcatggctgaggygaacaagaccttccaggaactggctgtgttccatgatctggaaggcatgtgggaggaactcagccccaagatctggaccttcatggagaacagccaagaa

SEQ ID NO: 2399 - DNA, 201 bp, Homo sapiens
gagaggacaaataaaatcaaggatgggtactgggaccctggtcctcgagctgacccctttgaggacatgcggtacgtctgggggggcttcgcctacttgcrggatgtggtggagcaggcaatcatcagggtgctgacgggcaccgagaagaaaactggtgtctatatgcaacagatgccctatccctgttacgttgatgac

SEQ ID NO: 2400 - DNA, 201 bp, Homo sapiens
cgaatggacattgacaatgtggagaggacaaataaaatcaaggatgggtactgggaccctggtcctcgagctgacccctttgaggacatgcggtacgtctsggggggcttcgcctacttgcaggatgtggtggagcaggcaatcatcagggtgctgacgggcaccgagaagaaaactggtgtctatatgcaacagatgccc

SEQ ID NO: 2401 - DNA, 201 bp, Homo sapiens
aagaacaagatctgggtgaatgagtttaggtatggcggcttttccctgggtgtcagtaatactcaagcacttcctccgagtcaagaagttaatgatgccaycaaacaaatgaagaaacacctaaagctggccaaggacagttctgcagatcgatttctcaacagcttgggaagatttatgacaggactggacaccagaaat

SEQ ID NO: 2402 - DNA, 201 bp, Homo sapiens
ttctgcgggtgatgagccggtcaatgcccctcttcatgacgctggcctggatttactcagtggctgtgatcatcaagggcatcgtgtatgagaaggaggcrcggctgaaagagaccatgcggatcatgggcctggacaacagcatcctctggtttagctggttcattagtagcctcattcctcttcttgtgagcgctggcc

SEQ ID NO: 2403 - DNA, 201 bp, Homo sapiens
cctacttgcaggatgtggtggagcaggcaatcatcagggtgctgacgggcaccgagaagaaaactggtgtctatatgcaacagatgccctatccctgttasgttgatgacatctttctgcgggtgatgagccggtcaatgcccctcttcatgacgctggcctggatttactcagtggctgtgatcatcaagggcatcgtgt

SEQ ID NO: 2404 - DNA, 201 bp, Homo sapiens
ctggtaaaagtctaccgagatgggatgaaggtggctgtcgatggcctggcactgaatttttatgagggccagatcacctccttcctgggccacaatggagyggggaagacgaccaccatgtcaatcctgaccgggttgttccccccgacctcgggcaccgcctacatcctgggaaaagacattcgctctgagatgagcacc

SEQ ID NO: 2405 - DNA, 201 bp, Homo sapiens; identical to SEQ ID NO: 2344

SEQ ID NO: 2406 - DNA, 201 bp, Homo sapiens
ggctaccagttacatttgacaagtctgtgcaatggatcaaaatcagaagagatgattcaacttggtgaccaagaagtttctgagctttgtggcctaccaarggagaaactggctgcagcagagcgagtacttcgttccaacatggacatcctgaagccaatcctgatggatgtgacatgtgatgacattgcacatgggcag

SEQ ID NO: 2407 - DNA, 201 bp, Homo sapiens; identical to SEQ ID NO: 2348

SEQ ID NO: 2408 - DNA, 201 bp, Homo sapiens; identical to SEQ ID NO: 2353

SEQ ID NO: 2409 - DNA, 201 bp, Homo sapiens; identical to SEQ ID NO: 2354

SEQ ID NO: 2410 - DNA, 201 bp, Homo sapiens; identical to SEQ ID NO: 2355

SEQ ID NO: 2411 - DNA, 201 bp, Homo sapiens; identical to SEQ ID NO: 2356

SEQ ID NO: 2412 - DNA, 201 bp, Homo sapiens; identical to SEQ ID NO: 2357

SEQ ID NO: 2413 - DNA, 201 bp, Homo sapiens; identical to SEQ ID NO: 2344

SEQ ID NO: 2414 - DNA, 201 bp, Homo sapiens; identical to SEQ ID NO: 2359

SEQ ID NO: 2415 - DNA, 201 bp, Homo sapiens; identical to SEQ ID NO: 2360

SEQ ID NO: 2416 - DNA, 201 bp, Homo sapiens; identical to SEQ ID NO: 2361

SEQ ID NO: 2417 - DNA, 201 bp, Homo sapiens; identical to SEQ ID NO: 2362

SEQ ID NO: 2418 - DNA, 201 bp, Homo sapiens; identical to SEQ ID NO: 2363

SEQ ID NO: 2419 - DNA, 201 bp, Homo sapiens; identical to SEQ ID NO: 2364

SEQ ID NO: 2420 - DNA, 201 bp, Homo sapiens; identical to SEQ ID NO: 2365

SEQ ID NO: 2421 - DNA, 201 bp, Homo sapiens; identical to SEQ ID NO: 2366

SEQ ID NO: 2422 - DNA, 201 bp, Homo sapiens; identical to SEQ ID NO: 2367

SEQ ID NO: 2423 - DNA, 201 bp, Homo sapiens; identical to SEQ ID NO: 2368

SEQ ID NO: 2424 - DNA, 201 bp, Homo sapiens; identical to SEQ ID NO: 2369

SEQ ID NO: 2425 - DNA, 201 bp, Homo sapiens; identical to SEQ ID NO: 2370

SEQ ID NO: 2426 - DNA, 201 bp, Homo sapiens; identical to SEQ ID NO: 2371

SEQ ID NO: 2427 - DNA, 201 bp, Homo sapiens; identical to SEQ ID NO: 2372

SEQ ID NO: 2428 - DNA, 201 bp, Homo sapiens; identical to SEQ ID NO: 2373

SEQ ID NO: 2429 - DNA, 201 bp, Homo sapiens; identical to SEQ ID NO: 2374

SEQ ID NO: 2430 - DNA, 201 bp, Homo sapiens; identical to SEQ ID NO: 2375

SEQ ID NO: 2431 - DNA, 201 bp, Homo sapiens; identical to SEQ ID NO: 2376

SEQ ID NO: 2432 - DNA, 201 bp, Homo sapiens; identical to SEQ ID NO: 2377

SEQ ID NO: 2433 - DNA, 201 bp, Homo sapiens; identical to SEQ ID NO: 2348

SEQ ID NO: 2434 - DNA, 201 bp, Homo sapiens; identical to SEQ ID NO: 2378

SEQ ID NO: 2435 - DNA, 201 bp, Homo sapiens; identical to SEQ ID NO: 2379

SEQ ID NO: 2436 - DNA, 201 bp, Homo sapiens; identical to SEQ ID NO: 2380

SEQ ID NO: 2437 - DNA, 201 bp, Homo sapiens; identical to SEQ ID NO: 2381

SEQ ID NO: 2438 - DNA, 201 bp, Homo sapiens; identical to SEQ ID NO: 2382

SEQ ID NO: 2439 - DNA, 201 bp, Homo sapiens; identical to SEQ ID NO: 2383

SEQ ID NO: 2440 - DNA, 201 bp, Homo sapiens; identical to SEQ ID NO: 2384

SEQ ID NO: 2441 - DNA, 201 bp, Homo sapiens; identical to SEQ ID NO: 2385

SEQ ID NO: 2442 - DNA, 201 bp, Homo sapiens; identical to SEQ ID NO: 2386

SEQ ID NO: 2443 - DNA, 201 bp, Homo sapiens; identical to SEQ ID NO: 2387

SEQ ID NO: 2444 - DNA, 201 bp, Homo sapiens; identical to SEQ ID NO: 2388

SEQ ID NO: 2445 - DNA, 201 bp, Homo sapiens; identical to SEQ ID NO: 2389

SEQ ID NO: 2446 - DNA, 201 bp, Homo sapiens; identical to SEQ ID NO: 2390

SEQ ID NO: 2447 - DNA, 201 bp, Homo sapiens; identical to SEQ ID NO: 2391

SEQ ID NO: 2448 - DNA, 201 bp, Homo sapiens; identical to SEQ ID NO: 2392

SEQ ID NO: 2449 - DNA, 201 bp, Homo sapiens; identical to SEQ ID NO: 2393

SEQ ID NO: 2450 - DNA, 201 bp, Homo sapiens; identical to SEQ ID NO: 2394

SEQ ID NO: 2451 - DNA, 201 bp, Homo sapiens; identical to SEQ ID NO: 2395

SEQ ID NO: 2452 - DNA, 201 bp, Homo sapiens; identical to SEQ ID NO: 2396

SEQ ID NO: 2453 - DNA, 201 bp, Homo sapiens; identical to SEQ ID NO: 2397

SEQ ID NO: 2454 - DNA, 201 bp, Homo sapiens; identical to SEQ ID NO: 2398

SEQ ID NO: 2455 - DNA, 201 bp, Homo sapiens; identical to SEQ ID NO: 2399

SEQ ID NO: 2456 - DNA, 201 bp, Homo sapiens; identical to SEQ ID NO: 2400

SEQ ID NO: 2457 - DNA, 201 bp, Homo sapiens; identical to SEQ ID NO: 2401

SEQ ID NO: 2458 - DNA, 201 bp, Homo sapiens; identical to SEQ ID NO: 2402

SEQ ID NO: 2459 - DNA, 201 bp, Homo sapiens; identical to SEQ ID NO: 2403

SEQ ID NO: 2460 - DNA, 201 bp, Homo sapiens; identical to SEQ ID NO: 2404

SEQ ID NO: 2461 - DNA, 201 bp, Homo sapiens; identical to SEQ ID NO: 2353

SEQ ID NO: 2462 - DNA, 201 bp, Homo sapiens; identical to SEQ ID NO: 2354

SEQ ID NO: 2463 - DNA, 201 bp, Homo sapiens; identical to SEQ ID NO: 2355

SEQ ID NO: 2464 - DNA, 201 bp, Homo sapiens; identical to SEQ ID NO: 2356

SEQ ID NO: 2465 - DNA, 201 bp, Homo sapiens; identical to SEQ ID NO: 2357

SEQ ID NO: 2466 - DNA, 201 bp, Homo sapiens; identical to SEQ ID NO: 2344

SEQ ID NO: 2467 - DNA, 201 bp, Homo sapiens; identical to SEQ ID NO: 2359

SEQ ID NO: 2468 - DNA, 201 bp, Homo sapiens; identical to SEQ ID NO: 2360

SEQ ID NO: 2469 - DNA, 201 bp, Homo sapiens; identical to SEQ ID NO: 2361

SEQ ID NO: 2470 - DNA, 201 bp, Homo sapiens; identical to SEQ ID NO: 2362

SEQ ID NO: 2471 - DNA, 201 bp, Homo sapiens; identical to SEQ ID NO: 2363

SEQ ID NO: 2472 - DNA, 201 bp, Homo sapiens; identical to SEQ ID NO: 2364

SEQ ID NO: 2473 - DNA, 201 bp, Homo sapiens; identical to SEQ ID NO: 2365

SEQ ID NO: 2474 - DNA, 201 bp, Homo sapiens; identical to SEQ ID NO: 2366

SEQ ID NO: 2475 - DNA, 201 bp, Homo sapiens; identical to SEQ ID NO: 2367

SEQ ID NO: 2476 - DNA, 201 bp, Homo sapiens; identical to SEQ ID NO: 2368

SEQ ID NO: 2477 - DNA, 201 bp, Homo sapiens; identical to SEQ ID NO: 2369

SEQ ID NO: 2478 - DNA, 201 bp, Homo sapiens; identical to SEQ ID NO: 2370

SEQ ID NO: 2479 - DNA, 201 bp, Homo sapiens; identical to SEQ ID NO: 2371

SEQ ID NO: 2480 - DNA, 201 bp, Homo sapiens; identical to SEQ ID NO: 2372

SEQ ID NO: 2481 - DNA, 201 bp, Homo sapiens; identical to SEQ ID NO: 2373

SEQ ID NO: 2482 - DNA, 201 bp, Homo sapiens; identical to SEQ ID NO: 2374

SEQ ID NO: 2483 - DNA, 201 bp, Homo sapiens; identical to SEQ ID NO: 2375

SEQ ID NO: 2484 - DNA, 201 bp, Homo sapiens; identical to SEQ ID NO: 2376

SEQ ID NO: 2485 - DNA, 201 bp, Homo sapiens; identical to SEQ ID NO: 2377

SEQ ID NO: 2486 - DNA, 201 bp, Homo sapiens; identical to SEQ ID NO: 2378

SEQ ID NO: 2487 - DNA, 201 bp, Homo sapiens; identical to SEQ ID NO: 2379

SEQ ID NO: 2488 - DNA, 201 bp, Homo sapiens; identical to SEQ ID NO: 2380

SEQ ID NO: 2489 - DNA, 201 bp, Homo sapiens; identical to SEQ ID NO: 2381

SEQ ID NO: 2490 - DNA, 201 bp, Homo sapiens; identical to SEQ ID NO: 2382

SEQ ID NO: 2491 - DNA, 201 bp, Homo sapiens; identical to SEQ ID NO: 2383

SEQ ID NO: 2492 - DNA, 201 bp, Homo sapiens; identical to SEQ ID NO: 2384

SEQ ID NO: 2493 - DNA, 201 bp, Homo sapiens; identical to SEQ ID NO: 2385

SEQ ID NO: 2494 - DNA, 201 bp, Homo sapiens; identical to SEQ ID NO: 2386

SEQ ID NO: 2495 - DNA, 201 bp, Homo sapiens; identical to SEQ ID NO: 2387

SEQ ID NO: 2496 - DNA, 201 bp, Homo sapiens; identical to SEQ ID NO: 2388

SEQ ID NO: 2497 - DNA, 201 bp, Homo sapiens; identical to SEQ ID NO: 2389

SEQ ID NO: 2498 - DNA, 201 bp, Homo sapiens; identical to SEQ ID NO: 2390

SEQ ID NO: 2499 - DNA, 201 bp, Homo sapiens; identical to SEQ ID NO: 2391

SEQ ID NO: 2500 - DNA, 201 bp, Homo sapiens; identical to SEQ ID NO: 2392

SEQ ID NO: 2501 - DNA, 201 bp, Homo sapiens; identical to SEQ ID NO: 2393

SEQ ID NO: 2502 - DNA, 201 bp, Homo sapiens; identical to SEQ ID NO: 2394

SEQ ID NO: 2503 - DNA, 201 bp, Homo sapiens; identical to SEQ ID NO: 2395

SEQ ID NO: 2504 - DNA, 201 bp, Homo sapiens; identical to SEQ ID NO: 2396

SEQ ID NO: 2505 - DNA, 201 bp, Homo sapiens; identical to SEQ ID NO: 2397

SEQ ID NO: 2506 - DNA, 201 bp, Homo sapiens; identical to SEQ ID NO: 2398

SEQ ID NO: 2507 - DNA, 201 bp, Homo sapiens; identical to SEQ ID NO: 2399

SEQ ID NO: 2508 - DNA, 201 bp, Homo sapiens; identical to SEQ ID NO: 2400

SEQ ID NO: 2509 - DNA, 201 bp, Homo sapiens; identical to SEQ ID NO: 2401

SEQ ID NO: 2510 - DNA, 201 bp, Homo sapiens; identical to SEQ ID NO: 2402

SEQ ID NO: 2511 - DNA, 201 bp, Homo sapiens; identical to SEQ ID NO: 2403

SEQ ID NO: 2512 - DNA, 201 bp, Homo sapiens; identical to SEQ ID NO: 2404

SEQ ID NO: 2513 - DNA, 201 bp, Homo sapiens
cctgctgaccagacaggcacggccgcgggtgacaacatcagcccctctggtgggggcgccgggaagttgggcaggaggccaggggagtcaggggagaaggrcaggctggtgctggaggtggtggcagcggcggggggtggctgctgtgcagaaagggtgcctagggcgtgagcctctgggagagcagggctgggggccacc

SEQ ID NO: 2514 - DNA, 201 bp, Homo sapiens
accaccagggcttggagaggccacccaggcagaaggatgtggtgactggggtcttcagcaaccgcatttctggggctcccccctcccattcctgtccctgygtcttcagcaccaatgtcgggagaggccacggggccacactgggtcacagttccaagggctcctccacaggcaccgactggagctgggtcagaaccttgg

SEQ ID NO: 2515 - DNA, 201 bp, Homo sapiens
gtcagaaccttggcctcagcttccaacccctcgtcaacctcaccccctgcggtggcccccaggagcagcccctcagggtcggggtctggcagcctcagcayggtgtggggggcctgtgtccccagccccttttccgcttccagcagcccctctgttcctgcgcttagttccagccctgctgaccagacaggcacggccgcg

SEQ ID NO: 2516 - DNA, 201 bp, Homo sapiens
ccaccagggcttggagaggccacccaggcagaaggatgtggtgactggggtcttcagcaaccgcatttctggggctcccccctcccattcctgtccctgcrtcttcagcaccaatgtcgggagaggccacggggccacactgggtcacagttccaagggctcctccacaggcaccgactggagctgggtcagaaccttggc

SEQ ID NO: 2517 - DNA, 201 bp, Homo sapiens
agctccctgccagacaacctatgtaaaatgcccaactccctgccaaacctacgtgaagtgcccagctccctgccagatgacctacatcaaaagtccagctmcctgccagacccagacgtgctatgtccagggtgcttctccttgccagagctattatgttcaagctcctgcaagtggctcaacctcccagtactgtgtcac

SEQ ID NO: 2518 - DNA, 201 bp, Homo sapiens
cgtgctatgtccagggtgcttctccttgccagagctattatgttcaagctcctgcaagtggctcaacctcccagtactgtgtcactgacccatgctctgcrccctgttccaccagctactgctgtctggctccccggaccttcggggtgagtcccctgagacgctggattcagcggccccagaactgcaacacaggatcat

SEQ ID NO: 2519 - DNA, 201 bp, Homo sapiens
ccaggatgttttgtgccgctcagctcctgcccgtgtcattgtggtctcctcagagtcccatcggtggagatttacagatattaacgactccttgggaaaastggacttcagtcgcctctctccaacaaaaaacgactattgggcgatgctggcttataacaggtccaagctctgcaacatcctcttctccaacgagctgca

SEQ ID NO: 2520 - DNA, 201 bp, Homo sapiens
tgtaggttccgtatctccctggagaagcaccagcaattctctttcttttactgttatagaatagcctgaggtcccctcgtcccatccagctaccaccacgrccaccactgcagccaggggctggccttctcctacttagggaagaaaaagcaagtgttcactgctccttgctgcattgatccaggagataattgtttcatt

SEQ ID NO: 2521 - DNA, 201 bp, Homo sapiens
aagaacggcttggcagccagtccggctaagtggagctcagagcggatgggcacacacacccgccctgtgtgtgtcccctcacgcaagtgccagggctgggycccttccaaatgtccctccaacacagatccgcaagagtaaaggaaataagagcattcacaacagagtgaaaaatcttaagtaccaatgggaagcagggaa

SEQ ID NO: 2522 - DNA, 201 bp, Homo sapiens
gggaattcctggggtaaagtatcacttttctggggctgggctaggcataggtctctttgctttctggtggtggcctgtttgaaagtaaaaacctggttggygtgtaggttccgtatctccctggagaagcaccagcaattctctttcttttactgttatagaatagcctgaggtcccctcgtcccatccagctaccaccac

SEQ ID NO: 2523 - DNA, 201 bp, Homo sapiens
aagcagggaattcctggggtaaagtatcacttttctggggctgggctaggcataggtctctttgctttctggtggtggcctgtttgaaagtaaaaacctgsttggcgtgtaggttccgtatctccctggagaagcaccagcaattctctttcttttactgttatagaatagcctgaggtcccctcgtcccatccagctacc

SEQ ID NO: 2524 - DNA, 201 bp, Homo sapiens
tctcctacttagggaagaaaaagcaagtgttcactgctccttgctgcattgatccaggagataattgtttcattcatcctgaccaagactgagccagcttrgcaactgctggggagacaaatctcagaaccttgtcccagccagtgaggatgacagtgacacccagagggagtagaatacgcagaactaccaggtggcaaa

SEQ ID NO: 2525 - DNA, 201 bp, Homo sapiens
cctacttggacccaagactggcgtttactgtggatgataatccgaccaagccaaccacccggcaaagatacgacggcagcaccactgccatggaaattctscagggccgggatttcactggcaaagtggttgtggtcactggagctaattcaggaatagggttcgaaaccgccaagtcttttgccctccatggtgcacatg

SEQ ID NO: 2526 - DNA, 201 bp, Homo sapiens
gtcccagccagtgaggatgacagtgacacccagagggagtagaatacgcagaactaccaggtggcaaagtacttgtcatagactcctttgctaatgctatrcaaaaaattctttagagattataacaaatttttcaaatcattccttagataccttgaaaggcaggaagggaagcgtatatacttaagaatacacaggata

SEQ ID NO: 2527 - DNA, 201 bp, Homo sapiens
caagaaactgatgagaacggacaagtgttttttgttgaccatataaataaaagaaccacctacttggacccaagactggcgtttactgtggatgataatcygaccaagccaaccacccggcaaagatacgacggcagcaccactgccatggaaattctccagggccgggatttcactggcaaagtggttgtggtcactgga

SEQ ID NO: 2528 - DNA, 129 bp, Homo sapiens
agagaataaaacgttagttaatccctttgtctgtcaatcacagtctcagttctcttgctttcacattgtacttaaacctcctgctgtgcctcgcatcctaygcttaataaaagaacatgcttgaatatc

SEQ ID NO: 2529 - DNA, 201 bp, Homo sapiens
ggacctcgctctgctccgtagcgtgcagcattttgctgaagcattcaaggccaagaatgtgcctcttcatgtgcttgtgtgcaacgcagcaacttttgctstaccctggagtctcaccaaagatggcctggagaccacctttcaagtgaatcatctggggcacttctaccttgtccagctcctccaggatgttttgtgccg

SEQ ID NO: 2530 - DNA, 201 bp, Homo sapiens
acacccgccctgtgtgtgtcccctcacgcaagtgccagggctgggccccttccaaatgtccctccaacacagatccgcaagagtaaaggaaataagagcaktcacaacagagtgaaaaatcttaagtaccaatgggaagcagggaattcctggggtaaagtatcacttttctggggctgggctaggcataggtctctttgc

SEQ ID NO: 2531 - DNA, 201 bp, Homo sapiens
ggccgggatttcactggcaaagtggttgtggtcactggagctaattcaggaatagggttcgaaaccgccaagtcttttgccctccatggtgcacatgtgaycttggcctgcaggaacatggcaagggcgagtgaagcagtgtcacgcattttagaagaatggcataaagccaaggtagaaacaatgaccctggacctcgct

SEQ ID NO: 2532 - DNA, 201 bp, Homo sapiens
gtcgggccccgacgcgcgcgggtctcgtttggagcgggagtgagttcctgagcgagtggacccggcagcgggcgataggggggccaggtgcctccacagtyagccatggcagcgctgcgctacgcggggctggacgacacggacagtgaggacgagctgcctccgggctgggaggagagaaccaccaaggacggctgggtt

SEQ ID NO: 2533 - DNA, 201 bp, Homo sapiens
tccctggagaagcaccagcaattctctttcttttactgttatagaatagcctgaggtcccctcgtcccatccagctaccaccacggccaccactgcagccrggggctggccttctcctacttagggaagaaaaagcaagtgttcactgctccttgctgcattgatccaggagataattgtttcattcatcctgaccaagac

SEQ ID NO: 2534 - DNA, 201 bp, Homo sapiens
agtgaaaaatcttaagtaccaatgggaagcagggaattcctggggtaaagtatcacttttctggggctgggctaggcataggtctctttgctttctggtgstggcctgtttgaaagtaaaaacctggttggcgtgtaggttccgtatctccctggagaagcaccagcaattctctttcttttactgttatagaatagcctg

SEQ ID NO: 2535 - DNA, 201 bp, Homo sapiens
tctccaacaaaaaacgactattgggcgatgctggcttataacaggtccaagctctgcaacatcctcttctccaacgagctgcaccgtcgcctctccccacrcggggtcacgtcgaacgcagtgcatcctggaaatatgatgtactccaacattcatcgcagctggtgggtgtacacactgctgtttaccttggcgaggcct

SEQ ID NO: 2536 - DNA, 201 bp, Homo sapiens
gccgctgcatgccctcaccagaagctcagagcgaagagacggcccggaccctgtgggcgctcagcgagaggctgatccaagaacggcttggcagccagtcyggctaagtggagctcagagcggatgggcacacacacccgccctgtgtgtgtcccctcacgcaagtgccagggctgggccccttccaaatgtccctccaac

SEQ ID NO: 2537 - DNA, 201 bp, Homo sapiens
agctcctgcccgtgtcattgtggtctcctcagagtcccatcggtggagatttacagatattaacgactccttgggaaaactggacttcagtcgcctctctscaacaaaaaacgactattgggcgatgctggcttataacaggtccaagctctgcaacatcctcttctccaacgagctgcaccgtcgcctctccccacgcgg

SEQ ID NO: 2538 - DNA, 201 bp, Homo sapiens
cctccatggtgcacatgtgatcttggcctgcaggaacatggcaagggcgagtgaagcagtgtcacgcattttagaagaatggcataaagccaaggtagaarcaatgaccctggacctcgctctgctccgtagcgtgcagcattttgctgaagcattcaaggccaagaatgtgcctcttcatgtgcttgtgtgcaacgcagc

SEQ ID NO: 2539 - DNA, 201 bp, Homo sapiens
gtgccgctcagctcctgcccgtgtcattgtggtctcctcagagtcccatcggtggagatttacagatattaacgactccttgggaaaactggacttcagtygcctctctccaacaaaaaacgactattgggcgatgctggcttataacaggtccaagctctgcaacatcctcttctccaacgagctgcaccgtcgcctctc

SEQ ID NO: 2540 - DNA, 201 bp, Homo sapiens
ggtgtcttcatattaaaccttcacaaccttcatgatttcataggattattttggaaatatagcacttgactttatgaaaggatctgggctaggtatattargggtagttgccaataacctgaagaagctggcattgtttacagaaacagatcaagggctataatttatgtcattttatagcagcagtatctattaatacat

SEQ ID NO: 2541 - DNA, 201 bp, Homo sapiens
tcccagcatgacgaaaaattggagttctgccatttgagcagcttactggaaagatccagccttacttgtcttaaattgtccaacaaggtgactcattgccyggcaaacacttttaccctcagatgttactcatgatattataaaatatgaggccagtgctcaggtttgcatcataagtgagctatccctgaagggttttaa

SEQ ID NO: 2542 - DNA, 123 bp, Homo sapiens
aatgttttccatatactttgtcttgcctgtatgcagccctcgtgtaatacggtgaattagagtggtatttcactttgtattattttgtaaatatgtcaatrtaataaatagtgactaaattga

SEQ ID NO: 2543 - DNA, 201 bp, Homo sapiens
agagtccccattcaaggcagtcaagttaagacactaacttggccctttcctgatggaaatatttcctccatagcagaagttgtgttctgacaagactgagwgagttacatgttgggaaaaaaaagaagcattaacttagtagaactgaaccaggagcattaagttctgaaattttgaatcatctctgaaatgaagcaggtg

SEQ ID NO: 2544 - DNA, 201 bp, Homo sapiens
atttcataggattattttggaaatatagcacttgactttatgaaaggatctgggctaggtatattaggggtagttgccaataacctgaagaagctggcatwgtttacagaaacagatcaagggctataatttatgtcattttatagcagcagtatctattaatacatgccttttcctcccatccacctcccccgcacacac

SEQ ID NO: 2545 - DNA, 183 bp, Homo sapiens
gttttggaaaatttaaatgctgcagatttgtgtagagttctaataccaaagacagaagtaaatgttttccatatactttgtcttgcctgtatgcagccctygtgtaatacggtgaattagagtggtatttcactttgtattattttgtaaatatgtcaatataataaatagtgactaaattga

SEQ ID NO: 2546 - DNA, 201 bp, Homo sapiens
ccagagtccccattcaaggcagtcaagttaagacactaacttggccctttcctgatggaaatatttcctccatagcagaagttgtgttctgacaagactgmgagagttacatgttgggaaaaaaaagaagcattaacttagtagaactgaaccaggagcattaagttctgaaattttgaatcatctctgaaatgaagcagg

SEQ ID NO: 2547 - DNA, 201 bp, Homo sapiens
ttagcattaagtacaataatgaagcaaagcacatcaagattttaacaagagatggcttttttcacattgcagaaaatagaaaatttaaaagtttaatggarcttgtggagtactacaagcatcattctctcaaggaagggttcagaaccttagatacaactctgcagtttccatacaaggagccagaacattcagctggac

SEQ ID NO: 2548 - DNA, 174 bp, Homo sapiens
aatttaaatgctgcagatttgtgtagagttctaataccaaagacagaagtaaatgttttccatatactttgtcttgcctgtatgcagccctcgtgtaatayggtgaattagagtggtatttcactttgtattattttgtaaatatgtcaatataataaatagtgactaaattga

SEQ ID NO: 2549 - DNA, 201 bp, Homo sapiens
gaactcctaaacaggtggatccaggtttaccaaagatgcaggtcattaggaactattctggaacaccacccccagctctgcatgaaggaccccctttacasctccaggccggggataccgttgaacttctgaaaggagatgcacacagtctgttttggcagggcagaaatttagcatctggagaggttggattttttccaa

SEQ ID NO: 2550 - DNA, 201 bp, Homo sapiens
actgcgaagaactcctaaacaggtggatccaggtttaccaaagatgcaggtcattaggaactattctggaacaccacccccagctctgcatgaaggacccyctttacagctccaggccggggataccgttgaacttctgaaaggagatgcacacagtctgttttggcagggcagaaatttagcatctggagaggttggatt

SEQ ID NO: 2551 - DNA, 201 bp, Homo sapiens
tgtggaagaggatgaataaattcaaatcccgtgttgcaccctgcaccaaaaatttcagagaagggataaatagaagcctgcacagcatcgtgaattaactraagtgtttaaaaagctgcatttctggctgttcaacatcctccctccttagcccctcctaagtcttaatgctgagatttctaaagatgctggtactgacag

SEQ ID NO: 2552 - DNA, 201 bp, Homo sapiens; identical to SEQ ID NO: 2540

SEQ ID NO: 2553 - DNA, 123 bp, Homo sapiens; identical to SEQ ID NO: 2542

SEQ ID NO: 2554 - DNA, 201 bp, Homo sapiens; identical to SEQ ID NO: 2543

SEQ ID NO: 2555 - DNA, 201 bp, Homo sapiens
tggaaaggttatagaaacattatcacgactttctcgaacacctatagcattggccacaggaatcaggcccttcccaacagaagaaagcattaatgatgaaracatctacaaaggccttcctgatttaatagatgaaacccttgtggaagatgaagaagatctctatgactgtgtttatggggaagatgaaggtggagaagt

SEQ ID NO: 2556 - DNA, 201 bp, Homo sapiens
atcagcccaaatgtccagaaaatgatatacgaagttgttgtctagcagaaattaagcagacagaagaaaaatatacagaaactttggagtcaatagaaaartatttcatggcaccactaaaaagatttctgacagcagcagaatttgattcagtattcatcaacattcctgaacttgtaaaacttcatcggaacctaatgc

SEQ ID NO: 2557 - DNA, 201 bp, Homo sapiens
actgatccgactgagaaggcaaatctgaaactggctcttgatgccatgaaggacttggcacaatatgtgaatgaagtgaaaagagataatgagacccttcrtgaaattaaacagtttcagctatctatagagaatttgaaccaaccagttttgctttttggacgacctcagggagatggtgaaattcgaataaccactcta

SEQ ID NO: 2558 - DNA, 201 bp, Homo sapiens; identical to SEQ ID NO: 2551

SEQ ID NO: 2559 - DNA, 201 bp, Homo sapiens
tccatacccaaggacaaaatgggttagaattttattgcaaaacaaaagatttaaagaagaaatggctagaacagtttgaaatggctttgtctaacataagrccagactatgcagactccaatttccacgacttcaagatgcataccttcactcgagtcacatcctgcaaagtctgccagatgctcctgaggggaacatttt

SEQ ID NO: 2560 - DNA, 201 bp, Homo sapiens
gtaccaagtttttattaactacaaggaaagattggttatttacgggcagtactgcagtggagtggagtcagccatctctagtttagactacatttctaagwcaaaagaagatgtcaaactgaaattagaggaatgttccaaaagagcaaataatgggaaatttactcttcgagacttgcttgtggttcctatgcaacgtgt

SEQ ID NO: 2561 - DNA, 201 bp, Homo sapiens; identical to SEQ ID NO: 2541

SEQ ID NO: 2562 - DNA, 201 bp, Homo sapiens; identical to SEQ ID NO: 2544

SEQ ID NO: 2563 - DNA, 183 bp, Homo sapiens; identical to SEQ ID NO: 2545

SEQ ID NO: 2564 - DNA, 201 bp, Homo sapiens; identical to SEQ ID NO: 2546

SEQ ID NO: 2565 - DNA, 201 bp, Homo sapiens; identical to SEQ ID NO: 2547

SEQ ID NO: 2566 - DNA, 201 bp, Homo sapiens; identical to SEQ ID NO: 2549

SEQ ID NO: 2567 - DNA, 174 bp, Homo sapiens; identical to SEQ ID NO: 2548

SEQ ID NO: 2568 - DNA, 201 bp, Homo sapiens
gatgtcccagtttctctgtttgaagaacataaggacatttctcacggcctgttgtgagacgtttggaatgaggaaaagtgaacttttcgaggcatttgacytgtttgatgttcgtgactttggaaaggttatagaaacattatcacgactttctcgaacacctatagcattggccacaggaatcaggcccttcccaacaga

SEQ ID NO: 2569 - DNA, 201 bp, Homo sapiens; identical to SEQ ID NO: 2550

SEQ ID NO: 2570 - DNA, 201 bp, Homo sapiens
ggagtgccacaggtgaggcctggcaggagattatgctgtcatgccttggggagaagggctgtgagcctgacaccaccgcaccatcagggcagaacgagaaygaacgctgcggcaccgatctggcctacgtgtactttgtctccttcatcttcttctgctccttcttgatgctcaacctgtttgtggccgtcatcatggaca

SEQ ID NO: 2571 - DNA, 201 bp, Homo sapiens
ccagcaggaccccgtttcaggcctgagtggccggagtggatacccttcgatgagtccactctctccccaggatatattccagttggcttgtatggaccccrccgatgacggacagttccaagaacggcagtctctggtggtgacagaccctagctccatgagacgttcattttccactattcgggataagcgttcaaattc

SEQ ID NO: 2572 - DNA, 201 bp, Homo sapiens
ccatgcattatcagagaagaggaagtaaaggacaatcagaacaccagtcaaacccaccaaattgctttattcccctttgcaagatgggcactgccatagtyctgcctctttgctggggaaagaaaccaggaacgtggagggttattactgcgggagaagggacacgaggatggctttgcttccccttgccccttcccactt

SEQ ID NO: 2573 - DNA, 201 bp, Homo sapiens
tgcctcaggagatcattgctaatgccaaagccctgccttacctccagcaggaccccgtttcaggcctgagtggccggagtggatacccttcgatgagtccmctctctccccaggatatattccagttggcttgtatggaccccgccgatgacggacagttccaagaacggcagtctctggtggtgacagaccctagctcca

SEQ ID NO: 2574 - DNA, 201 bp, Homo sapiens
gtcatgggggaaccctgagggtgtgggtagagtagcaggggccacctaagagattaaaaacagagtctgttttccaaccagtgtggaagcaattaaatatrcgtaacagtgctacggccacaccagcacctcctggctgaaggtcagcccacactctggtccatgaggcagcaaggccagtgctgtgccaagcccggtaag

SEQ ID NO: 2575 - DNA, 101 bp, Homo sapiens
tattcaccttcccttgaccaagaaattgggtttcttttccctcagcctgcacttactcttctattaagaccagaaaataaaataattttccgttgagtcam

SEQ ID NO: 2576 - DNA, 201 bp, Homo sapiens
agaagaaggagaagcgtgagacaggcaaagccatggtgccccacagctcaatgttcatcttcagcaccaccaacccgatccggagggcctgccactacatygtgaacctgcgctactttgagatgtgcatcctcctggtgattgcagccagcagcatcgccctggcggcagaggaccccgtcctgaccaactcggagcgca

SEQ ID NO: 2577 - DNA, 201 bp, Homo sapiens
gtcggcagctcccacccgtcccgccaaagccccggcccctcctttcctacagctccctgattcgacacgcgggcagcatctctccacctgctgatggaagygaggagggctccccgctgacctcccaagctctggagagcaacaatgcttgcctgaccgagtcttccaactctccgcacccccagcagagccaacatgcct

SEQ ID NO: 2578 - DNA, 201 bp, Homo sapiens
ccaaagccctgccttacctccagcaggaccccgtttcaggcctgagtggccggagtggatacccttcgatgagtccactctctccccaggatatattccarttggcttgtatggaccccgccgatgacggacagttccaagaacggcagtctctggtggtgacagaccctagctccatgagacgttcattttccactattc

SEQ ID NO: 2579 - DNA, 201 bp, Homo sapiens
gccaacatgcctccccacagcgctacatctccgagccctacttggccctgcacgaagactcccacgcctcagactgtggtgaggaggagacgctcactttygaagcagccgtggctactagcctgggccgttccaacaccatcggctcagccccacccctgcggcatagctggcagatgcccaacgggcactatcggcggc

SEQ ID NO: 2580 - DNA, 201 bp, Homo sapiens
tttatcggcgacccagggccattgagggcctggccctgggcctggccctggagaagttcgaggaggagcgcatcagccgtggggggtccctcaagggggawggaggggaccgatccagtgccctggacaaccagaggacccctttgtccctgggccagcgggagccaccatggctggccaggccctgtcatggaaactgtg

SEQ ID NO: 2581 - DNA, 201 bp, Homo sapiens
gagggcaggtcacagacgcccaacagacagggcacaggttccctaagtgagagctccatcccctctgtctctgacaccagcaccccaagaagaagtcgtcrgcagctcccacccgtcccgccaaagccccggcccctcctttcctacagctccctgattcgacacgcgggcagcatctctccacctgctgatggaagcgag

SEQ ID NO: 2582 - DNA, 201 bp, Homo sapiens
gaggagccggacagaggccatgactcgagactccagtgatgagcactgtgttgatatctcctctgtgggcacacctctggcccgagccagtatcaaaagtkcaaaggtagacggggtctcttatttccggcacaaggaaaggcttctgcgcatctccattcgccacatggttaaatcccaggtgttttactggattgtgct

SEQ ID NO: 2583 - DNA, 119 bp, Homo sapiens
gtgaatcttatccttcttrtccacagggaatttgccaaagagagagagagagtggagaaccgaagggctttcatgaagctgcggcgccagcagcagattgagcgtgagctgaatggcta

SEQ ID NO: 2584 - DNA, 201 bp, Homo sapiens
ttgctgtcatcgcagttcagctcttcaagggaaagttcttttattgcacggacagttccaaggacacagagaaggagtgcataggcaactatgtagatcaygagaaaaacaagatggaggtgaagggccgggaatggaagcgccatgaattccactacgacaacattatctgggccctgctgaccctcttcaccgtctcca

SEQ ID NO: 2585 - DNA, 201 bp, Homo sapiens
gggaaggatggcctcaagttctgcagcactctgtagatgtgacagaggaagaccgaggcccaagccgcagcaaccgcatggagatgtctatcttttatgtrgtctactttgtggtcttccccttcttctttgtcaatatctttgtggctctcatcatcatcaccttccaggagcaaggggataagatgatggaggagtgca

SEQ ID NO: 2586 - DNA, 201 bp, Homo sapiens
gccagcagcagattgagcgtgagctgaatggctaccgtgcctggatagacaaagcagaggaagtcatgctcgctgaagaaaataaaaatgctggaacatcmgccttagaagtgcttcgaagggcaaccatcaagaggagccggacagaggccatgactcgagactccagtgatgagcactgtgttgatatctcctctgtgg

SEQ ID NO: 2587 - DNA, 201 bp, Homo sapiens; identical to SEQ ID NO: 2570

SEQ ID NO: 2588 - DNA, 201 bp, Homo sapiens
ccagcaggaccccgtttcaggcctgagtggccggagtggatacccttcgatgagtccactctctccccaggatatattccagttggcttgtatggaccccrccgatgacggacagttccaagaacggcagtctctggagccagaggttagtgaattaaaaagcgtgcagccctctaaccatggcatctaccttccttcgga

SEQ ID NO: 2589 - DNA, 201 bp, Homo sapiens; identical to SEQ ID NO: 2572

SEQ ID NO: 2590 - DNA, 201 bp, Homo sapiens; identical to SEQ ID NO: 2574

SEQ ID NO: 2591 - DNA, 101 bp, Homo sapiens; identical to SEQ ID NO: 2575

SEQ ID NO: 2592 - DNA, 201 bp, Homo sapiens
tgcctcaggagatcattgctaatgccaaagccctgccttacctccagcaggaccccgtttcaggcctgagtggccggagtggatacccttcgatgagtccmctctctccccaggatatattccagttggcttgtatggaccccgccgatgacggacagttccaagaacggcagtctctggagccagaggttagtgaattaa

SEQ ID NO: 2593 - DNA, 201 bp, Homo sapiens
tcttttgctttgaagctgggatcaaaattgtggccctggggttcatcttccataagggctcttacctccgcaatggctggaatgtcatggacttcatcgtsgtcctcagtggcatcctggccactgcaggaacccacttcaatactcacgtggacctgaggaccctccgggctgtgcgtgtcctgcggcctttgaagctcg

SEQ ID NO: 2594 - DNA, 201 bp, Homo sapiens
ccatggtacctcttctgcagattggccttctgctcttctttgccatcctgatgtttgctatcattggtttggagttctacagtggcaagttacatcgagcrtgcttcatgaacaattcaggtattctagaaggatttgacccccctcacccatgtggtgtgcagggctgcccagctggttatgaatgcaaggactggatcg

SEQ ID NO: 2595 - DNA, 201 bp, Homo sapiens; identical to SEQ ID NO: 2576

SEQ ID NO: 2596 - DNA, 201 bp, Homo sapiens
ccaaagccctgccttacctccagcaggaccccgtttcaggcctgagtggccggagtggatacccttcgatgagtccactctctccccaggatatattccarttggcttgtatggaccccgccgatgacggacagttccaagaacggcagtctctggagccagaggttagtgaattaaaaagcgtgcagccctctaaccatg

SEQ ID NO: 2597 - DNA, 201 bp, Homo sapiens; identical to SEQ ID NO: 2577

SEQ ID NO: 2598 - DNA, 201 bp, Homo sapiens; identical to SEQ ID NO: 2580

SEQ ID NO: 2599 - DNA, 201 bp, Homo sapiens; identical to SEQ ID NO: 2579

SEQ ID NO: 2600 - DNA, 201 bp, Homo sapiens; identical to SEQ ID NO: 2581

SEQ ID NO: 2601 - DNA, 201 bp, Homo sapiens; identical to SEQ ID NO: 2582

SEQ ID NO: 2602 - DNA, 201 bp, Homo sapiens; identical to SEQ ID NO: 2584

SEQ ID NO: 2603 - DNA, 201 bp, Homo sapiens; identical to SEQ ID NO: 2585

SEQ ID NO: 2604 - DNA, 201 bp, Homo sapiens; identical to SEQ ID NO: 2586

SEQ ID NO: 2605 - DNA, 201 bp, Homo sapiens; identical to SEQ ID NO: 2570

SEQ ID NO: 2606 - DNA, 201 bp, Homo sapiens; identical to SEQ ID NO: 2588

SEQ ID NO: 2607 - DNA, 201 bp, Homo sapiens; identical to SEQ ID NO: 2572

SEQ ID NO: 2608 - DNA, 201 bp, Homo sapiens; identical to SEQ ID NO: 2574

SEQ ID NO: 2609 - DNA, 101 bp, Homo sapiens; identical to SEQ ID NO: 2575

SEQ ID NO: 2610 - DNA, 201 bp, Homo sapiens; identical to SEQ ID NO: 2592

SEQ ID NO: 2611 - DNA, 201 bp, Homo sapiens; identical to SEQ ID NO: 2593

SEQ ID NO: 2612 - DNA, 201 bp, Homo sapiens; identical to SEQ ID NO: 2594

SEQ ID NO: 2613 - DNA, 201 bp, Homo sapiens; identical to SEQ ID NO: 2576

SEQ ID NO: 2614 - DNA, 201 bp, Homo sapiens; identical to SEQ ID NO: 2596

SEQ ID NO: 2615 - DNA, 201 bp, Homo sapiens; identical to SEQ ID NO: 2577

SEQ ID NO: 2616 - DNA, 201 bp, Homo sapiens; identical to SEQ ID NO: 2580

SEQ ID NO: 2617 - DNA, 201 bp, Homo sapiens; identical to SEQ ID NO: 2579

SEQ ID NO: 2618 - DNA, 201 bp, Homo sapiens; identical to SEQ ID NO: 2581

SEQ ID NO: 2619 - DNA, 201 bp, Homo sapiens; identical to SEQ ID NO: 2582

SEQ ID NO: 2620 - DNA, 201 bp, Homo sapiens; identical to SEQ ID NO: 2584

SEQ ID NO: 2621 - DNA, 201 bp, Homo sapiens; identical to SEQ ID NO: 2585

SEQ ID NO: 2622 - DNA, 201 bp, Homo sapiens; identical to SEQ ID NO: 2586

SEQ ID NO: 2623 - DNA, 201 bp, Homo sapiens; identical to SEQ ID NO: 2570

SEQ ID NO: 2624 - DNA, 201 bp, Homo sapiens; identical to SEQ ID NO: 2571

SEQ ID NO: 2625 - DNA, 201 bp, Homo sapiens; identical to SEQ ID NO: 2572

SEQ ID NO: 2626 - DNA, 201 bp, Homo sapiens; identical to SEQ ID NO: 2574

SEQ ID NO: 2627 - DNA, 101 bp, Homo sapiens; identical to SEQ ID NO: 2575

SEQ ID NO: 2628 - DNA, 201 bp, Homo sapiens; identical to SEQ ID NO: 2573

SEQ ID NO: 2629 - DNA, 201 bp, Homo sapiens; identical to SEQ ID NO: 2593

SEQ ID NO: 2630 - DNA, 201 bp, Homo sapiens; identical to SEQ ID NO: 2594

SEQ ID NO: 2631 - DNA, 201 bp, Homo sapiens; identical to SEQ ID NO: 2576

SEQ ID NO: 2632 - DNA, 201 bp, Homo sapiens; identical to SEQ ID NO: 2578

SEQ ID NO: 2633 - DNA, 201 bp, Homo sapiens; identical to SEQ ID NO: 2577

SEQ ID NO: 2634 - DNA, 201 bp, Homo sapiens; identical to SEQ ID NO: 2580

SEQ ID NO: 2635 - DNA, 201 bp, Homo sapiens; identical to SEQ ID NO: 2579

SEQ ID NO: 2636 - DNA, 201 bp, Homo sapiens; identical to SEQ ID NO: 2581

SEQ ID NO: 2637 - DNA, 201 bp, Homo sapiens; identical to SEQ ID NO: 2582

SEQ ID NO: 2638 - DNA, 201 bp, Homo sapiens; identical to SEQ ID NO: 2584

SEQ ID NO: 2639 - DNA, 201 bp, Homo sapiens; identical to SEQ ID NO: 2585

SEQ ID NO: 2640 - DNA, 201 bp, Homo sapiens; identical to SEQ ID NO: 2586

SEQ ID NO: 2641 - DNA, 201 bp, Homo sapiens; identical to SEQ ID NO: 2570

SEQ ID NO: 2642 - DNA, 201 bp, Homo sapiens; identical to SEQ ID NO: 2588

SEQ ID NO: 2643 - DNA, 201 bp, Homo sapiens; identical to SEQ ID NO: 2572

SEQ ID NO: 2644 - DNA, 201 bp, Homo sapiens; identical to SEQ ID NO: 2592

SEQ ID NO: 2645 - DNA, 201 bp, Homo sapiens; identical to SEQ ID NO: 2574

SEQ ID NO: 2646 - DNA, 101 bp, Homo sapiens; identical to SEQ ID NO: 2575

SEQ ID NO: 2647 - DNA, 201 bp, Homo sapiens; identical to SEQ ID NO: 2576

SEQ ID NO: 2648 - DNA, 201 bp, Homo sapiens; identical to SEQ ID NO: 2577

SEQ ID NO: 2649 - DNA, 201 bp, Homo sapiens; identical to SEQ ID NO: 2596

SEQ ID NO: 2650 - DNA, 201 bp, Homo sapiens; identical to SEQ ID NO: 2579

SEQ ID NO: 2651 - DNA, 201 bp, Homo sapiens; identical to SEQ ID NO: 2580

SEQ ID NO: 2652 - DNA, 201 bp, Homo sapiens; identical to SEQ ID NO: 2581

SEQ ID NO: 2653 - DNA, 201 bp, Homo sapiens; identical to SEQ ID NO: 2582

SEQ ID NO: 2654 - DNA, 119 bp, Homo sapiens; identical to SEQ ID NO: 2583

SEQ ID NO: 2655 - DNA, 201 bp, Homo sapiens; identical to SEQ ID NO: 2584

SEQ ID NO: 2656 - DNA, 201 bp, Homo sapiens; identical to SEQ ID NO: 2585

SEQ ID NO: 2657 - DNA, 201 bp, Homo sapiens; identical to SEQ ID NO: 2586

SEQ ID NO: 2658 - DNA, 201 bp, Homo sapiens; identical to SEQ ID NO: 2570

SEQ ID NO: 2659 - DNA, 201 bp, Homo sapiens; identical to SEQ ID NO: 2571

SEQ ID NO: 2660 - DNA, 201 bp, Homo sapiens; identical to SEQ ID NO: 2572

SEQ ID NO: 2661 - DNA, 201 bp, Homo sapiens; identical to SEQ ID NO: 2574

SEQ ID NO: 2662 - DNA, 101 bp, Homo sapiens; identical to SEQ ID NO: 2575

SEQ ID NO: 2663 - DNA, 201 bp, Homo sapiens; identical to SEQ ID NO: 2573

SEQ ID NO: 2664 - DNA, 201 bp, Homo sapiens; identical to SEQ ID NO: 2593

SEQ ID NO: 2665 - DNA, 201 bp, Homo sapiens; identical to SEQ ID NO: 2594

SEQ ID NO: 2666 - DNA, 201 bp, Homo sapiens; identical to SEQ ID NO: 2576

SEQ ID NO: 2667 - DNA, 201 bp, Homo sapiens; identical to SEQ ID NO: 2578

SEQ ID NO: 2668 - DNA, 201 bp, Homo sapiens; identical to SEQ ID NO: 2577

SEQ ID NO: 2669 - DNA, 201 bp, Homo sapiens; identical to SEQ ID NO: 2580

SEQ ID NO: 2670 - DNA, 201 bp, Homo sapiens; identical to SEQ ID NO: 2579

SEQ ID NO: 2671 - DNA, 201 bp, Homo sapiens; identical to SEQ ID NO: 2581

SEQ ID NO: 2672 - DNA, 201 bp, Homo sapiens; identical to SEQ ID NO: 2582

SEQ ID NO: 2673 - DNA, 201 bp, Homo sapiens; identical to SEQ ID NO: 2584

SEQ ID NO: 2674 - DNA, 201 bp, Homo sapiens; identical to SEQ ID NO: 2585

SEQ ID NO: 2675 - DNA, 201 bp, Homo sapiens; identical to SEQ ID NO: 2586

SEQ ID NO: 2676 - DNA, 201 bp, Homo sapiens; identical to SEQ ID NO: 2570

SEQ ID NO: 2677 - DNA, 201 bp, Homo sapiens; identical to SEQ ID NO: 2571

SEQ ID NO: 2678 - DNA, 201 bp, Homo sapiens; identical to SEQ ID NO: 2572

SEQ ID NO: 2679 - DNA, 201 bp, Homo sapiens; identical to SEQ ID NO: 2573

SEQ ID NO: 2680 - DNA, 201 bp, Homo sapiens; identical to SEQ ID NO: 2574

SEQ ID NO: 2681 - DNA, 101 bp, Homo sapiens; identical to SEQ ID NO: 2575

SEQ ID NO: 2682 - DNA, 201 bp, Homo sapiens; identical to SEQ ID NO: 2576

SEQ ID NO: 2683 - DNA, 201 bp, Homo sapiens; identical to SEQ ID NO: 2577

SEQ ID NO: 2684 - DNA, 201 bp, Homo sapiens; identical to SEQ ID NO: 2578

SEQ ID NO: 2685 - DNA, 201 bp, Homo sapiens; identical to SEQ ID NO: 2579

SEQ ID NO: 2686 - DNA, 201 bp, Homo sapiens; identical to SEQ ID NO: 2580

SEQ ID NO: 2687 - DNA, 201 bp, Homo sapiens; identical to SEQ ID NO: 2581

SEQ ID NO: 2688 - DNA, 201 bp, Homo sapiens; identical to SEQ ID NO: 2582

SEQ ID NO: 2689 - DNA, 119 bp, Homo sapiens; identical to SEQ ID NO: 2583

SEQ ID NO: 2690 - DNA, 201 bp, Homo sapiens; identical to SEQ ID NO: 2584

SEQ ID NO: 2691 - DNA, 201 bp, Homo sapiens; identical to SEQ ID NO: 2585

SEQ ID NO: 2692 - DNA, 201 bp, Homo sapiens; identical to SEQ ID NO: 2586

SEQ ID NO: 2693 - DNA, 105 bp, Homo sapiens
ttgatttaatatggtaatgcacaattccaactaacgtacattcaacagatcatgaaattgggttattaaaatgaatatttttgtcattaaataaaaattcygtcc

SEQ ID NO: 2694 - DNA, 201 bp, Homo sapiens
aaagcccaacaccttcccccactggattgactacagcaaagatgcccagtgttccactttcaagtgaccccttacctactcacaccactgcattctcaccsgcaagcacctttgaaagagaaaatgacttctcagagaccacaacttctcttagtccagacaatacttccacccaagtatccccggactctttggataatg

SEQ ID NO: 2695 - DNA, 201 bp, Homo sapiens
cacgagtggcactgaggggccagaacattctgtcaatggtcctgcaagtccagctttaaatcaaggttcataggaaaagacataaatgaggaaactccaamcctcctgttagctgttatttctatttttgtagaagtaggaagtgaaaataggtatacagtggattaattaaatgcagcgaaccaatatttgtagaagggt

SEQ ID NO: 2696 - DNA, 201 bp, Homo sapiens
cacagaagtatttgtgacagggcaaagcccaacaccttcccccactggattgactacagcaaagatgcccagtgttccactttcaagtgaccccttacctrctcacaccactgcattctcacccgcaagcacctttgaaagagaaaatgacttctcagagaccacaacttctcttagtccagacaatacttccacccaagt

SEQ ID NO: 2697 - DNA, 201 bp, Homo sapiens
tgatttgggaacagaaagccacagttattgtcatggtcactcgatgtgaagaaggaaacaggaacaagtgtgcagaatactggccgtcaatggaagagggyactcgggcttttggagatgttgttgtaaagatcaaccagcacaaaagatgtccagattacatcattcagaaattgaacattgtaaataaaaaagaaaaag

SEQ ID NO: 2698 - DNA, 201 bp, Homo sapiens
tttggataatgctagtgcttttaataccacaggtgtttcatcagtacagacgcctcaccttcccacgcacgcagactcgcagacgccctctgctggaactsacacgcagacattcagcggctccgccgccaatgcaaaactcaaccctaccccaggcagcaatgctatctcagatgtcccaggagagaggagtacagccag

SEQ ID NO: 2699 - DNA, 201 bp, Homo sapiens
tacagacccagtttccccattgacaaccaccctcagccttgcacaccacagctctgctgccttacctgcacgcacctccaacaccaccatcacagcgaacrcctcagatgcctaccttaatgcctctgaaacaaccactctgagcccttctggaagcgctgtcatttcaaccacaacaatagctactactccatctaagcc

SEQ ID NO: 2700 - DNA, 201 bp, Homo sapiens
caatacttgcacaaacaatgaggtgcataaccttacagaatgtaaaaatgcgtctgtttccatatctcataattcatgtactgctcctgataagacattamtattagatgtgccaccaggggttgaaaagtttcagttacatgattgtacacaagttgaaaaagcagatactactatttgtttaaaatggaaaaatattga

SEQ ID NO: 2701 - DNA, 201 bp, Homo sapiens
attgtacacaagttgaaaaagcagatactactatttgtttaaaatggaaaaatattgaaacctttacttgtgatacacagaatattacctacagatttcartgtggtaatatgatatttgataataaagaaattaaattagaaaaccttgaacccgaacatgagtataagtgtgactcagaaatactctataataaccaca

SEQ ID NO: 2702 - DNA, 112 bp, Homo sapiens
ggaaattgttcytcgtctgataagacaacagtggagaaaggacgcatgctgtttcttagggacacggctgacttccagatatgaccatgtatttgtggcttaaactcttggc

SEQ ID NO: 2703 - DNA, 201 bp, Homo sapiens
aatattagatgtgccaccaggggttgaaaagtttcagttacatgattgtacacaagttgaaaaagcagatactactatttgtttaaaatggaaaaatattraaacctttacttgtgatacacagaatattacctacagatttcagtgtggtaatatgatatttgataataaagaaattaaattagaaaaccttgaacccga

SEQ ID NO: 2704 - DNA, 201 bp, Homo sapiens
gggagtccaggagagcctcagattattttttgtagaagtgaagctgcacatcaaggagtaattacctggaatccccctcaaagatcatttcataattttaycctctgttatataaaagagacagaaaaagattgcctcaatctggataaaaacctgatcaaatatgatttgcaaaatttaaaaccttatacgaaatatgtt

SEQ ID NO: 2705 - DNA, 201 bp, Homo sapiens
agtggacaaagtaaagcaggatgctaattgtgttaatccacttggtgccccagaaaagctccctgaagcaaaggaacaggctgaaggttctgaacccacgmgtggcactgaggggccagaacattctgtcaatggtcctgcaagtccagctttaaatcaaggttcataggaaaagacataaatgaggaaactccaaacctc

SEQ ID NO: 2706 - DNA, 201 bp, Homo sapiens
gcacctaccctgctcagaatggacaagtaaagaaaaacaaccatcaagaagataaaattgaatttgataatgaagtggacaaagtaaagcaggatgctaaytgtgttaatccacttggtgccccagaaaagctccctgaagcaaaggaacaggctgaaggttctgaacccacgagtggcactgaggggccagaacattctg

SEQ ID NO: 2707 - DNA, 201 bp, Homo sapiens; identical to SEQ ID NO: 2694

SEQ ID NO: 2708 - DNA, 201 bp, Homo sapiens; identical to SEQ ID NO: 2695

SEQ ID NO: 2709 - DNA, 201 bp, Homo sapiens; identical to SEQ ID NO: 2696

SEQ ID NO: 2710 - DNA, 201 bp, Homo sapiens; identical to SEQ ID NO: 2697

SEQ ID NO: 2711 - DNA, 201 bp, Homo sapiens
tttggataatgctagtgcttttaataccacaggtgtttcatcagtacagacgcctcaccttcccacgcacgcagactcgcagacgccctctgctggaactsacacgcagacattcagcggctccgccgccaatgcaaaactcaaccctaccccaggcagcaatgctatctcagatgcctaccttaatgcctctgaaacaac

SEQ ID NO: 2712 - DNA, 201 bp, Homo sapiens; identical to SEQ ID NO: 2700

SEQ ID NO: 2713 - DNA, 201 bp, Homo sapiens; identical to SEQ ID NO: 2701

SEQ ID NO: 2714 - DNA, 112 bp, Homo sapiens; identical to SEQ ID NO: 2702

SEQ ID NO: 2715 - DNA, 201 bp, Homo sapiens; identical to SEQ ID NO: 2703

SEQ ID NO: 2716 - DNA, 201 bp, Homo sapiens; identical to SEQ ID NO: 2704

SEQ ID NO: 2717 - DNA, 201 bp, Homo sapiens; identical to SEQ ID NO: 2705

SEQ ID NO: 2718 - DNA, 201 bp, Homo sapiens; identical to SEQ ID NO: 2706

SEQ ID NO: 2719 - DNA, 201 bp, Homo sapiens; identical to SEQ ID NO: 2694

SEQ ID NO: 2720 - DNA, 201 bp, Homo sapiens; identical to SEQ ID NO: 2695

SEQ ID NO: 2721 - DNA, 181 bp, Homo sapiens
ggcaaagcccaacaccttcccccactggattgactacagcaaagatgcccagtgttccactttcaagtgaccccttacctrctcacaccactgcattctcacccgcaagcacctttgaaagagaaaatgacttctcagagaccacaacttctcttagtccagacaatacttccacccaagt

SEQ ID NO: 2722 - DNA, 201 bp, Homo sapiens; identical to SEQ ID NO: 2697

SEQ ID NO: 2723 - DNA, 201 bp, Homo sapiens; identical to SEQ ID NO: 2698

SEQ ID NO: 2724 - DNA, 201 bp, Homo sapiens; identical to SEQ ID NO: 2699

SEQ ID NO: 2725 - DNA, 201 bp, Homo sapiens; identical to SEQ ID NO: 2700

SEQ ID NO: 2726 - DNA, 201 bp, Homo sapiens; identical to SEQ ID NO: 2701

SEQ ID NO: 2727 - DNA, 201 bp, Homo sapiens; identical to SEQ ID NO: 2703

SEQ ID NO: 2728 - DNA, 201 bp, Homo sapiens; identical to SEQ ID NO: 2704

SEQ ID NO: 2729 - DNA, 201 bp, Homo sapiens; identical to SEQ ID NO: 2705

SEQ ID NO: 2730 - DNA, 201 bp, Homo sapiens; identical to SEQ ID NO: 2706

SEQ ID NO: 2731 - DNA, 201 bp, Homo sapiens; identical to SEQ ID NO: 2700

SEQ ID NO: 2732 - DNA, 201 bp, Homo sapiens; identical to SEQ ID NO: 2701

SEQ ID NO: 2733 - DNA, 201 bp, Homo sapiens; identical to SEQ ID NO: 2703

SEQ ID NO: 2734 - DNA, 201 bp, Homo sapiens; identical to SEQ ID NO: 2695

SEQ ID NO: 2735 - DNA, 201 bp, Homo sapiens; identical to SEQ ID NO: 2704

SEQ ID NO: 2736 - DNA, 201 bp, Homo sapiens; identical to SEQ ID NO: 2705

SEQ ID NO: 2737 - DNA, 201 bp, Homo sapiens; identical to SEQ ID NO: 2706

SEQ ID NO: 2738 - DNA, 201 bp, Homo sapiens; identical to SEQ ID NO: 2697

SEQ ID NO: 2739 - DNA, 201 bp, Homo sapiens; identical to SEQ ID NO: 2694

SEQ ID NO: 2740 - DNA, 201 bp, Homo sapiens; identical to SEQ ID NO: 2695

SEQ ID NO: 2741 - DNA, 181 bp, Homo sapiens; identical to SEQ ID NO: 2721

SEQ ID NO: 2742 - DNA, 201 bp, Homo sapiens; identical to SEQ ID NO: 2697

SEQ ID NO: 2743 - DNA, 201 bp, Homo sapiens; identical to SEQ ID NO: 2711

SEQ ID NO: 2744 - DNA, 201 bp, Homo sapiens; identical to SEQ ID NO: 2700

SEQ ID NO: 2745 - DNA, 201 bp, Homo sapiens; identical to SEQ ID NO: 2701

SEQ ID NO: 2746 - DNA, 201 bp, Homo sapiens; identical to SEQ ID NO: 2703

SEQ ID NO: 2747 - DNA, 201 bp, Homo sapiens; identical to SEQ ID NO: 2704

SEQ ID NO: 2748 - DNA, 201 bp, Homo sapiens; identical to SEQ ID NO: 2705

SEQ ID NO: 2749 - DNA, 201 bp, Homo sapiens; identical to SEQ ID NO: 2706

SEQ ID NO: 2750 - DNA, 201 bp, Homo sapiens
tccttccagattatctggttttgtccaactgcgagactggaagactgcaccataccagtctacccaccagatgtgatagctggtcaaactcagaccgttcrttggaacaggcttcatttgatgatgtttttgttgactgcctgcagccgctcccctccagtcatttggtccacccctcatgccatggcagtggagctcagg

SEQ ID NO: 2751 - DNA, 201 bp, Homo sapiens
tgatagctggtcaaactcagaccgttcattggaacaggcttcatttgatgatgtttttgttgactgcctgcagccgctcccctccagtcatttggtccacycctcatgccatggcagtggagctcaggaggtgccatcctcgaggcctcaggctgccctgatctggagtagagaaatcaatgggccacccagggaccactt

SEQ ID NO: 2752 - DNA, 201 bp, Homo sapiens
ccagagtgtaggcaattatgtcctgctttgataaaactgctagaggatggctatgcaaaagcataacgattcaaggaaacaaagtacaggtagtttttgasctgacagcagcaaaggcaccataagtcaaaatattggttttggtggagatgatcgatgtgtgtgtgtgagagagagctatgtttctaaccaagggcctaa

SEQ ID NO: 2753 - DNA, 201 bp, Homo sapiens
attatctgacaaaggctggtgcagaaaaaaaattgtaggcccaagtgtcaagaaccacaccagattggagatagaaaagaatagctgaaattatgtcagtrgtgaaatgtcactccattgacccaccgaaaaaagaaaagaaatctgtttctaccaaacatttccagaaacgtatttatagcatgaagaaacacacatggg

SEQ ID NO: 2754 - DNA, 201 bp, Homo sapiens
acttctttgtccacaaggaccttgcagctcgcaatattttaatcggagagcaacttcatgtaaagatttcagacttggggctttccagagaaatttactcygctgattactacagggtccagagtaagtccttgctgcccattcgctggatgccccctgaagccatcatgtatggcaaattctcttctgattcagatatct

SEQ ID NO: 2755 - DNA, 201 bp, Homo sapiens
ggaaaaatctataaaggccatctctatctcccaggcatggaccatgctcagctggttgctatcaagaccttgaaagactataacaacccccagcaatggayggaatttcaacaagaagcctccctaatggcagaactgcaccaccccaatattgtctgccttctaggtgccgtcactcaggaacaacctgtgtgcatgctt

SEQ ID NO: 2756 - DNA, 201 bp, Homo sapiens
ttgctttactcttcttcttcatttgcgtctgtcggaataaccagaagtcatcgtcggcaccagtccagaggcaaccaaaacacgtcagaggtcaaaatgtrgagatgtcaatgctgaatgcatataaacccaagagcaaggctaaagagctacctctttctgctgtacgctttatggaagaattgggtgagtgtgcctttg

SEQ ID NO: 2757 - DNA, 201 bp, Homo sapiens
agagcttttcagaaacagagctgtcagtcagtgctgaattagtgcctacctcatcatggaacatctcaagtgaactcaacaaagattcttacctgaccctygatgaaccaatgaataacatcaccacgtctctgggccagacagcagaactgcactgcaaagtctctgggaatccacctcccaccatccgctggttcaaaa

SEQ ID NO: 2758 - DNA, 201 bp, Homo sapiens
gaggccattcctactgccgcaacccagggaatcaaaaggaagctccctggtgcttcaccttggatgaaaactttaagtctgatctgtgtgacatcccagcktgcgattcaaaggattccaaggagaagaataaaatggaaatcctgtacatactagtgccaagtgtggccattcccctggccattgctttactcttcttct

SEQ ID NO: 2759 - DNA, 201 bp, Homo sapiens
acacaccgaatctatgatttctgcagaactgtaaaatgcacaacttttgtaaatgtggtatacaggacaaactagacggccgtagaaaagatttatattcmaatgtttttattaaagtaaggttctcatttagcagacatcgcaacaagtaccttctgtgaagtttcactgtgtcttaccaagcaggacagacactcggcc

SEQ ID NO: 2760 - DNA, 201 bp, Homo sapiens
acagcacaggtgtggactaccgggggaccgtcagtgtgaccaaatcagggcgccagtgccagccatggaattcccagtatccccacacacacactttcacygcccttcgtttcccagagctgaatggaggccattcctactgccgcaacccagggaatcaaaaggaagctccctggtgcttcaccttggatgaaaacttta

SEQ ID NO: 2761 - DNA, 201 bp, Homo sapiens
gctatgaggggctgcagtggctggacgaggcccgcacctgtttccgcgtgccctggaagcacttcgcgcgcaaggacctgagcgaggccgacgcgcgcatyttcaaggcctgggctgtggcccgcggcaggtggccgcctagcagcaggggaggtggcccgccccccgaggctgagactgcggagcgcgccggctggaaaa

SEQ ID NO: 2762 - DNA, 201 bp, Homo sapiens
gtgccgagtgcacctagagggcacgcagcgtgagggtgtgtcttccctggatagcagcagcctcagcctctgcctgtccagcgccaacagcctctatgacracatcgagtgcttccttatggagctggagcagcccgcctagaacccagtctaatgagaactccagaaagctggagcagcccacctagagctggccgcggc

SEQ ID NO: 2763 - DNA, 201 bp, Homo sapiens
cggcggctctggcacccagggtccggcctgcgccttcccgccaggcctggacactggttcaacacctgtgacttcatgtgtgcgcgccggccacacctgcrgtcacacctgtagccccctctgccaagagatccataccgaggcagcgtcggtggctacaagccctcagtccacacctgtggacacctgtgacacctggcc

SEQ ID NO: 2764 - DNA, 201 bp, Homo sapiens
ccgggagctgtgctggcgagaaggcccaggcacggaccagactgaggcagaggcccccgcagctgtcccaccaccacagggtgggcccccagggccattcytggcacacacacatgctggactccaagccccaggccccctccctgccccagctggtgacaagggggacctcctgctccaggcagtgcaacagagctgcct

SEQ ID NO: 2765 - DNA, 201 bp, Homo sapiens
agctgtcccaccaccacagggtgggcccccagggccattcctggcacacacacatgctggactccaagccccaggccccctccctgccccagctggtgacragggggacctcctgctccaggcagtgcaacagagctgcctggcagaccatctgctgacagcgtcatggggggcagatccagtcccaaccaaggctcctgg

SEQ ID NO: 2766 - DNA, 201 bp, Homo sapiens
gctggcgagaaggcccaggcacggaccagactgaggcagaggcccccgcagctgtcccaccaccacagggtgggcccccagggccattcctggcacacacrcatgctggactccaagccccaggccccctccctgccccagctggtgacaagggggacctcctgctccaggcagtgcaacagagctgcctggcagaccatc

SEQ ID NO: 2767 - DNA, 201 bp, Homo sapiens
gacacccgagctgcacgttcctatacggccccccagacccagctgtccgggccacagacccccagcaggtagcattccccagccctgccgagctcccggaycagaagcagctgcgctacacggaggaactgctgcggcacgtggcccctgggttgcacctggagcttcgggggccacagctgtgggcccggcgcatgggca

SEQ ID NO: 2768 - DNA, 201 bp, Homo sapiens
tgctgcggcacgtggcccctgggttgcacctggagcttcgggggccacagctgtgggcccggcgcatgggcaagtgcaaggtgtactgggaggtgggcggmcccccaggctccgccagcccctccaccccagcctgcctgctgcctcggaactgtgacacccccatcttcgacttcagagtcttcttccaagagctggtgg

SEQ ID NO: 2769 - DNA, 201 bp, Homo sapiens
gaggtgggcggacccccaggctccgccagcccctccaccccagcctgcctgctgcctcggaactgtgacacccccatcttcgacttcagagtcttcttccragagctggtggaattccgggcacggcagcgccgtggctccccacgctataccatctacctgggcttcgggcaggacctgtcagctgggaggcccaaggag

SEQ ID NO: 2770 - DNA, 201 bp, Homo sapiens
tgtggacacctgtgacacctggccacacgacctgtggccgcggcctggcgtctgctgcgacaggagcccttacctcccctgttataacacctgaccgccayctaactgcccctgcagaaggagcaatggccttggctcctgagagggcagccccacgcgtgctgttcggagagtggctccttggagagatcagcagcggct

SEQ ID NO: 2771 - DNA, 201 bp, Homo sapiens
gaggtggcccgccccccgaggctgagactgcggagcgcgccggctggaaaaccaacttccgctgcgcactgcgcagcacgcgtcgcttcgtgatgctgcgrgataactcgggggacccggccgacccgcacaaggtgtacgcgctcagccgggagctgtgctggcgagaaggcccaggcacggaccagactgaggcagagg

SEQ ID NO: 2772 - DNA, 201 bp, Homo sapiens; identical to SEQ ID NO: 2761

SEQ ID NO: 2773 - DNA, 201 bp, Homo sapiens; identical to SEQ ID NO: 2762

SEQ ID NO: 2774 - DNA, 201 bp, Homo sapiens; identical to SEQ ID NO: 2763

SEQ ID NO: 2775 - DNA, 201 bp, Homo sapiens; identical to SEQ ID NO: 2764

SEQ ID NO: 2776 - DNA, 201 bp, Homo sapiens; identical to SEQ ID NO: 2765

SEQ ID NO: 2777 - DNA, 201 bp, Homo sapiens; identical to SEQ ID NO: 2766

SEQ ID NO: 2778 - DNA, 201 bp, Homo sapiens; identical to SEQ ID NO: 2767

SEQ ID NO: 2779 - DNA, 201 bp, Homo sapiens; identical to SEQ ID NO: 2768

SEQ ID NO: 2780 - DNA, 201 bp, Homo sapiens; identical to SEQ ID NO: 2769

SEQ ID NO: 2781 - DNA, 201 bp, Homo sapiens; identical to SEQ ID NO: 2770

SEQ ID NO: 2782 - DNA, 201 bp, Homo sapiens; identical to SEQ ID NO: 2771

SEQ ID NO: 2783 - DNA, 201 bp, Homo sapiens; identical to SEQ ID NO: 2761

SEQ ID NO: 2784 - DNA, 201 bp, Homo sapiens; identical to SEQ ID NO: 2762

SEQ ID NO: 2785 - DNA, 201 bp, Homo sapiens
gcctttcccgtctccgcagggtccggcctgcgccttcccgccaggcctggacactggttcaacacctgtgacttcatgtgtgcgcgccggccacacctgcrgtcacacctgtagccccctctgccaagagatccataccgaggcagcgtcggtggctacaagccctcagtccacacctgtggacacctgtgacacctggcc

SEQ ID NO: 2786 - DNA, 201 bp, Homo sapiens; identical to SEQ ID NO: 2764

SEQ ID NO: 2787 - DNA, 201 bp, Homo sapiens; identical to SEQ ID NO: 2765

SEQ ID NO: 2788 - DNA, 201 bp, Homo sapiens; identical to SEQ ID NO: 2766

SEQ ID NO: 2789 - DNA, 201 bp, Homo sapiens; identical to SEQ ID NO: 2767

SEQ ID NO: 2790 - DNA, 201 bp, Homo sapiens; identical to SEQ ID NO: 2768

SEQ ID NO: 2791 - DNA, 201 bp, Homo sapiens
gagacgaaacttcccgtcccggcggctctggcacccaggtactggggaccccagacccacgcggtgcaggccgggagcgagagcctccgtgggggctccgygaccccggaggggtagagccaagagctgggggagcctgagagatgagggtcgggcggggagggaggcggaggcggaggcggggttccgcggagctgagaa

SEQ ID NO: 2792 - DNA, 201 bp, Homo sapiens; identical to SEQ ID NO: 2769

SEQ ID NO: 2793 - DNA, 201 bp, Homo sapiens; identical to SEQ ID NO: 2770

SEQ ID NO: 2794 - DNA, 201 bp, Homo sapiens; identical to SEQ ID NO: 2771

SEQ ID NO: 2795 - DNA, 201 bp, Homo sapiens; identical to SEQ ID NO: 2761

SEQ ID NO: 2796 - DNA, 201 bp, Homo sapiens; identical to SEQ ID NO: 2762

SEQ ID NO: 2797 - DNA, 201 bp, Homo sapiens; identical to SEQ ID NO: 2785

SEQ ID NO: 2798 - DNA, 201 bp, Homo sapiens; identical to SEQ ID NO: 2764

SEQ ID NO: 2799 - DNA, 201 bp, Homo sapiens; identical to SEQ ID NO: 2765

SEQ ID NO: 2800 - DNA, 201 bp, Homo sapiens; identical to SEQ ID NO: 2766

SEQ ID NO: 2801 - DNA, 201 bp, Homo sapiens; identical to SEQ ID NO: 2767

SEQ ID NO: 2802 - DNA, 201 bp, Homo sapiens; identical to SEQ ID NO: 2768

SEQ ID NO: 2803 - DNA, 201 bp, Homo sapiens; identical to SEQ ID NO: 2791

SEQ ID NO: 2804 - DNA, 201 bp, Homo sapiens; identical to SEQ ID NO: 2769

SEQ ID NO: 2805 - DNA, 201 bp, Homo sapiens
tgtggacacctgtgacacctggccacacgacctgtggccgcggcctggcgtctgctgcgacaggagcccttacctcccctgttataacacctgaccgccayctaactgcccctgcagaaggagcaatggccttggctcctgagaggtaagagcccggcccaccctctccagatgccagtccccgagcgccctgcagccggc

SEQ ID NO: 2806 - DNA, 201 bp, Homo sapiens; identical to SEQ ID NO: 2771

SEQ ID NO: 2807 - DNA, 201 bp, Homo sapiens; identical to SEQ ID NO: 2761

SEQ ID NO: 2808 - DNA, 201 bp, Homo sapiens; identical to SEQ ID NO: 2762

SEQ ID NO: 2809 - DNA, 182 bp, Homo sapiens
ggtccggcctgcgccttcccgccaggcctggacactggttcaacacctgtgacttcatgtgtgcgcgccggccacacctgcrgtcacacctgtagccccctctgccaagagatccataccgaggcagcgtcggtggctacaagccctcagtccacacctgtggacacctgtgacacctggcc

SEQ ID NO: 2810 - DNA, 201 bp, Homo sapiens; identical to SEQ ID NO: 2767

SEQ ID NO: 2811 - DNA, 201 bp, Homo sapiens; identical to SEQ ID NO: 2768

SEQ ID NO: 2812 - DNA, 201 bp, Homo sapiens; identical to SEQ ID NO: 2770

SEQ ID NO: 2813 - DNA, 201 bp, Homo sapiens; identical to SEQ ID NO: 2769

SEQ ID NO: 2814 - DNA, 201 bp, Homo sapiens; identical to SEQ ID NO: 2771

SEQ ID NO: 2815 - DNA, 201 bp, Homo sapiens; identical to SEQ ID NO: 2762

SEQ ID NO: 2816 - DNA, 189 bp, Homo sapiens
tccgcagggtccggcctgcgccttcccgccaggcctggacactggttcaacacctgtgacttcatgtgtgcgcgccggccacacctgcrgtcacacctgtagccccctctgccaagagatccataccgaggcagcgtcggtggctacaagccctcagtccacacctgtggacacctgtgacacctgacc

SEQ ID NO: 2817 - DNA, 201 bp, Homo sapiens; identical to SEQ ID NO: 2767

SEQ ID NO: 2818 - DNA, 201 bp, Homo sapiens; identical to SEQ ID NO: 2768

SEQ ID NO: 2819 - DNA, 201 bp, Homo sapiens; identical to SEQ ID NO: 2769

SEQ ID NO: 2820 - DNA, 201 bp, Homo sapiens
cacctgtagccccctctgccaagagatccataccgaggcagcgtcggtggctacaagccctcagtccacacctgtggacacctgtgacacctgaccgccayctaactgcccctgcagaaggagcaatggccttggctcctgagagggcagccccacgcgtgctgttcggagagtggctccttggagagatcagcagcggct

SEQ ID NO: 2821 - DNA, 201 bp, Homo sapiens
cacgtggcccgccccccgaggctgagactgcggagcgcgccggctggaaaaccaacttccgctgcgcactgcgcagcacgcgtcgcttcgtgatgctgcgrgataactcgggggacccggccgacccgcacaaggtgtacgcgctcagccgggagctgtgctggcgagaaggcccaggcacggaccagactgaggcagagg

SEQ ID NO: 2822 - DNA, 201 bp, Homo sapiens; identical to SEQ ID NO: 2761

SEQ ID NO: 2823 - DNA, 201 bp, Homo sapiens; identical to SEQ ID NO: 2762

SEQ ID NO: 2824 - DNA, 189 bp, Homo sapiens; identical to SEQ ID NO: 2816

SEQ ID NO: 2825 - DNA, 201 bp, Homo sapiens; identical to SEQ ID NO: 2764

SEQ ID NO: 2826 - DNA, 201 bp, Homo sapiens; identical to SEQ ID NO: 2765

SEQ ID NO: 2827 - DNA, 201 bp, Homo sapiens; identical to SEQ ID NO: 2766

SEQ ID NO: 2828 - DNA, 201 bp, Homo sapiens; identical to SEQ ID NO: 2767

SEQ ID NO: 2829 - DNA, 201 bp, Homo sapiens; identical to SEQ ID NO: 2768

SEQ ID NO: 2830 - DNA, 201 bp, Homo sapiens; identical to SEQ ID NO: 2769

SEQ ID NO: 2831 - DNA, 201 bp, Homo sapiens; identical to SEQ ID NO: 2820

SEQ ID NO: 2832 - DNA, 201 bp, Homo sapiens; identical to SEQ ID NO: 2771

SEQ ID NO: 2833 - DNA, 201 bp, Homo sapiens; identical to SEQ ID NO: 2761

SEQ ID NO: 2834 - DNA, 201 bp, Homo sapiens; identical to SEQ ID NO: 2762

SEQ ID NO: 2835 - DNA, 182 bp, Homo sapiens; identical to SEQ ID NO: 2809

SEQ ID NO: 2836 - DNA, 201 bp, Homo sapiens; identical to SEQ ID NO: 2764

SEQ ID NO: 2837 - DNA, 201 bp, Homo sapiens; identical to SEQ ID NO: 2765

SEQ ID NO: 2838 - DNA, 201 bp, Homo sapiens; identical to SEQ ID NO: 2766

SEQ ID NO: 2839 - DNA, 201 bp, Homo sapiens; identical to SEQ ID NO: 2767

SEQ ID NO: 2840 - DNA, 201 bp, Homo sapiens; identical to SEQ ID NO: 2768

SEQ ID NO: 2841 - DNA, 201 bp, Homo sapiens; identical to SEQ ID NO: 2769

SEQ ID NO: 2842 - DNA, 201 bp, Homo sapiens; identical to SEQ ID NO: 2770

SEQ ID NO: 2843 - DNA, 201 bp, Homo sapiens; identical to SEQ ID NO: 2771

SEQ ID NO: 2844 - DNA, 201 bp, Homo sapiens; identical to SEQ ID NO: 2761

SEQ ID NO: 2845 - DNA, 201 bp, Homo sapiens; identical to SEQ ID NO: 2762

SEQ ID NO: 2846 - DNA, 182 bp, Homo sapiens; identical to SEQ ID NO: 2809

SEQ ID NO: 2847 - DNA, 201 bp, Homo sapiens; identical to SEQ ID NO: 2764

SEQ ID NO: 2848 - DNA, 201 bp, Homo sapiens; identical to SEQ ID NO: 2765

SEQ ID NO: 2849 - DNA, 201 bp, Homo sapiens; identical to SEQ ID NO: 2766

SEQ ID NO: 2850 - DNA, 201 bp, Homo sapiens; identical to SEQ ID NO: 2767

SEQ ID NO: 2851 - DNA, 201 bp, Homo sapiens; identical to SEQ ID NO: 2768

SEQ ID NO: 2852 - DNA, 201 bp, Homo sapiens; identical to SEQ ID NO: 2769

SEQ ID NO: 2853 - DNA, 201 bp, Homo sapiens; identical to SEQ ID NO: 2770

SEQ ID NO: 2854 - DNA, 201 bp, Homo sapiens; identical to SEQ ID NO: 2771

SEQ ID NO: 2855 - DNA, 201 bp, Homo sapiens; identical to SEQ ID NO: 2761

SEQ ID NO: 2856 - DNA, 189 bp, Homo sapiens; identical to SEQ ID NO: 2816

SEQ ID NO: 2857 - DNA, 168 bp, Homo sapiens
gtgccgagtgcacctagagggcacgcagcgtgagggtgtgtcttccctggatagcagcagcctcagcctctgcctgtccagcgccaacagcctctatgacracatcgagtgcttccttatggagctggagcagcccgcctagaacccagtctaatgagaactccagaa

SEQ ID NO: 2858 - DNA, 201 bp, Homo sapiens; identical to SEQ ID NO: 2767

SEQ ID NO: 2859 - DNA, 201 bp, Homo sapiens
tgctgcggcacgtggcccctgggttgcacctggagcttcgggggccacagctgtgggcccggcgcatgggcaagtgcaaggtgtactgggaggtgggcggmcccccaggctccgccagcccctccaccccacttcgacttcagagtcttcttccaagagctggtggaattccgggcacggcagcgccgtggctccccacgc

SEQ ID NO: 2860 - DNA, 201 bp, Homo sapiens; identical to SEQ ID NO: 2820

SEQ ID NO: 2861 - DNA, 201 bp, Homo sapiens
gggcccggcgcatgggcaagtgcaaggtgtactgggaggtgggcggacccccaggctccgccagcccctccaccccacttcgacttcagagtcttcttccragagctggtggaattccgggcacggcagcgccgtggctccccacgctataccatctacctgggcttcgggcaggacctgtcagctgggaggcccaaggag

SEQ ID NO: 2862 - DNA, 201 bp, Homo sapiens; identical to SEQ ID NO: 2771

SEQ ID NO: 2863 - DNA, 201 bp, Homo sapiens; identical to SEQ ID NO: 2761

SEQ ID NO: 2864 - DNA, 201 bp, Homo sapiens; identical to SEQ ID NO: 2762

SEQ ID NO: 2865 - DNA, 201 bp, Homo sapiens; identical to SEQ ID NO: 2763

SEQ ID NO: 2866 - DNA, 201 bp, Homo sapiens; identical to SEQ ID NO: 2767

SEQ ID NO: 2867 - DNA, 201 bp, Homo sapiens; identical to SEQ ID NO: 2768

SEQ ID NO: 2868 - DNA, 201 bp, Homo sapiens; identical to SEQ ID NO: 2770

SEQ ID NO: 2869 - DNA, 201 bp, Homo sapiens; identical to SEQ ID NO: 2769

SEQ ID NO: 2870 - DNA, 201 bp, Homo sapiens; identical to SEQ ID NO: 2771

SEQ ID NO: 2871 - DNA, 201 bp, Homo sapiens
cacctcgggcccagataacaggataccgactgaccgtgggccttacccgaagaggacagcccaggcagtacaatgtgggtccctctgtctccaagtacccmctgaggaatctgcagcctgcatctgagtacaccgtatccctcgtggccataaagggcaaccaagagagccccaaagccactggagtctttaccacactgc

SEQ ID NO: 2872 - DNA, 201 bp, Homo sapiens
tcatcctgttggcactgatgaagaacccttacagttcagggttcctggaacttctaccagtgccactctgacaggcctcaccagaggtgccacctacaacrtcatagtggaggcactgaaagaccagcagaggcataaggttcgggaagaggttgttaccgtgggcaactctgtcaacgaaggcttgaaccaacctacgga

SEQ ID NO: 2873 - DNA, 201 bp, Homo sapiens
ttttaggcggaccacaccgcccacaacggccacccccataaggcataggccaagaccatacccgccgaatgtaggacaagaagctctctctcagacaaccrtctcatgggccccattccaggacacttctgagtacatcatttcatgtcatcctgttggcactgatgaagaacccttacagttcagggttcctggaacttc

SEQ ID NO: 2874 - DNA, 201 bp, Homo sapiens
acagtactcactttttccaaatgatcctagtaattgcctagaaatatctttctcttacctgttatttatcaatttttcccagtatttttatacggaaaaarttgtattgaaaacacttagtatgcagttgataagaggaatttggtataattatggtgggtgattattttttatactgtatgtgccaaagctttactactg

SEQ ID NO: 2875 - DNA, 201 bp, Homo sapiens
agtttgtcaatgaaactgattctactgtcctggtgagatggactccacctcgggcccagataacaggataccgactgaccgtgggccttacccgaagaggmcagcccaggcagtacaatgtgggtccctctgtctccaagtacccactgaggaatctgcagcctgcatctgagtacaccgtatccctcgtggccataaagg

SEQ ID NO: 2876 - DNA, 201 bp, Homo sapiens
ccgaaaatacattgtaaatgtctatcagatatctgaggatggggagcagagtttgatcctgtctacttcacaaacaacagcgcctgatgccccacctgacmcgactgtggaccaagttgatgacacctcaattgttgttcgctggagcagaccccaggctcccatcacagggtacagaatagtctattcgccatcagtaga

SEQ ID NO: 2877 - DNA, 201 bp, Homo sapiens
acagctcatccgtggttgtatcaggacttatggtggccaccaaatatgaagtgagtgtctatgctcttaaggacactttgacaagcagaccagctcagggwgttgtcaccactctggagaatgtcagcccaccaagaagggctcgtgtgacagatgctactgagaccaccatcaccattagctggagaaccaagactgaga

SEQ ID NO: 2878 - DNA, 201 bp, Homo sapiens
gcaaacttggtggcaacttgcctcccggtgcgggcgtctctcccccaccgtctcaacatgcttaggggtccggggcccgggctgctgctgctggccgtccwgtgcctggggacagcggtgccctccacgggagcctcgaagagcaagaggcaggctcagcaaatggttcagccccagtccccggtggctgtcagtcaaagc

SEQ ID NO: 2879 - DNA, 201 bp, Homo sapiens
ttcctggccgaaaatacattgtaaatgtctatcagatatctgaggatggggagcagagtttgatcctgtctacttcacaaacaacagcgcctgatgccccwcctgacccgactgtggaccaagttgatgacacctcaattgttgttcgctggagcagaccccaggctcccatcacagggtacagaatagtctattcgccat

SEQ ID NO: 2880 - DNA, 201 bp, Homo sapiens
agtgggaccgtcagggagaaaatggccagatgatgagctgcacatgtcttgggaacggaaaaggagaattcaagtgtgaccctcatgaggcaacgtgttaygatgatgggaagacataccacgtaggagaacagtggcagaaggaatatctcggtgccatttgctcctgcacatgctttggaggccagcggggctggcgct

SEQ ID NO: 2881 - DNA, 201 bp, Homo sapiens
cgagggacctggaagttgttgctgcgacccccaccagcctactgatcagctgggatgctcctgctgtcacagtgagatattacaggatcacttacggagaracaggaggaaatagccctgtccaggagttcactgtgcctgggagcaagtctacagctaccatcagcggccttaaacctggagttgattataccatcactg

SEQ ID NO: 2882 - DNA, 201 bp, Homo sapiens
tgtctctctgccaagatccatctaaactggagtgatgttagcagacccagcttagagttcttctttctttcttaagccctttgctctggaggaagttctcyagcttcagctcaactcacagcttctccaagcatcaccctgggagtttcctgagggttttctcataaatgagggctgcacattgcctgttctgcttcgaag

SEQ ID NO: 2883 - DNA, 201 bp, Homo sapiens
ctgaagagacttgctttgacaagtacactgggaacacttaccgagtgggtgacacttatgagcgtcctaaagactccatgatctgggactgtacctgcatyggggctgggcgagggagaataagctgtaccatcgcaaaccgctgccatgaagggggtcagtcctacaagattggtgacacctggaggagaccacatgaga

SEQ ID NO: 2884 - DNA, 201 bp, Homo sapiens
ttctactgtcctggtgagatggactccacctcgggcccagataacaggataccgactgaccgtgggccttacccgaagaggacagcccaggcagtacaatrtgggtccctctgtctccaagtacccactgaggaatctgcagcctgcatctgagtacaccgtatccctcgtggccataaagggcaaccaagagagccccaa

SEQ ID NO: 2885 - DNA, 201 bp, Homo sapiens
cctggaacttctaccagtgccactctgacaggcctcaccagaggtgccacctacaacatcatagtggaggcactgaaagaccagcagaggcataaggttcrggaagaggttgttaccgtgggcaactctgtcaacgaaggcttgaaccaacctacggatgactcgtgctttgacccctacacagtttcccattatgccgtt

SEQ ID NO: 2886 - DNA, 201 bp, Homo sapiens; identical to SEQ ID NO: 2883

SEQ ID NO: 2887 - DNA, 201 bp, Homo sapiens; identical to SEQ ID NO: 2878

SEQ ID NO: 2888 - DNA, 201 bp, Homo sapiens; identical to SEQ ID NO: 2871

SEQ ID NO: 2889 - DNA, 201 bp, Homo sapiens; identical to SEQ ID NO: 2872

SEQ ID NO: 2890 - DNA, 201 bp, Homo sapiens; identical to SEQ ID NO: 2873

SEQ ID NO: 2891 - DNA, 201 bp, Homo sapiens; identical to SEQ ID NO: 2875

SEQ ID NO: 2892 - DNA, 201 bp, Homo sapiens; identical to SEQ ID NO: 2877

SEQ ID NO: 2893 - DNA, 201 bp, Homo sapiens; identical to SEQ ID NO: 2881

SEQ ID NO: 2894 - DNA, 201 bp, Homo sapiens; identical to SEQ ID NO: 2874

SEQ ID NO: 2895 - DNA, 201 bp, Homo sapiens; identical to SEQ ID NO: 2876

SEQ ID NO: 2896 - DNA, 201 bp, Homo sapiens; identical to SEQ ID NO: 2878

SEQ ID NO: 2897 - DNA, 201 bp, Homo sapiens; identical to SEQ ID NO: 2879

SEQ ID NO: 2898 - DNA, 201 bp, Homo sapiens
gccctaaaggactggcattcactgatgtggatgtcgattccatcaaaattgcttgggaaagcccacaggggcaagtttccaggtacagggtgacctactckagccctgaggatggaatccatgagctattccctgcacctgatggtgaagaagacactgcagagctgcaaggcctcagaccgggttctgagtacacagtca

SEQ ID NO: 2899 - DNA, 201 bp, Homo sapiens; identical to SEQ ID NO: 2880

SEQ ID NO: 2900 - DNA, 201 bp, Homo sapiens; identical to SEQ ID NO: 2882

SEQ ID NO: 2901 - DNA, 201 bp, Homo sapiens; identical to SEQ ID NO: 2883

SEQ ID NO: 2902 - DNA, 201 bp, Homo sapiens; identical to SEQ ID NO: 2884

SEQ ID NO: 2903 - DNA, 201 bp, Homo sapiens; identical to SEQ ID NO: 2885

SEQ ID NO: 2904 - DNA, 201 bp, Homo sapiens; identical to SEQ ID NO: 2871

SEQ ID NO: 2905 - DNA, 201 bp, Homo sapiens; identical to SEQ ID NO: 2872

SEQ ID NO: 2906 - DNA, 201 bp, Homo sapiens; identical to SEQ ID NO: 2873

SEQ ID NO: 2907 - DNA, 201 bp, Homo sapiens; identical to SEQ ID NO: 2874

SEQ ID NO: 2908 - DNA, 201 bp, Homo sapiens; identical to SEQ ID NO: 2875

SEQ ID NO: 2909 - DNA, 201 bp, Homo sapiens
ccgaaaatacattgtaaatgtctatcagatatctgaggatggggagcagagtttgatcctgtctacttcacaaacaacagcgcctgatgccccacctgacmcgactgtggaccaagttgatgacacctcaattgttgttcgctggagcagaccccaggctcccatcacaggtcagctaaaatagtctattcgccatcagta

SEQ ID NO: 2910 - DNA, 201 bp, Homo sapiens; identical to SEQ ID NO: 2877

SEQ ID NO: 2911 - DNA, 201 bp, Homo sapiens; identical to SEQ ID NO: 2878

SEQ ID NO: 2912 - DNA, 201 bp, Homo sapiens
ttcctggccgaaaatacattgtaaatgtctatcagatatctgaggatggggagcagagtttgatcctgtctacttcacaaacaacagcgcctgatgccccwcctgacccgactgtggaccaagttgatgacacctcaattgttgttcgctggagcagaccccaggctcccatcacaggtcagctaaaatagtctattcgcc

SEQ ID NO: 2913 - DNA, 201 bp, Homo sapiens; identical to SEQ ID NO: 2880

SEQ ID NO: 2914 - DNA, 201 bp, Homo sapiens; identical to SEQ ID NO: 2881

SEQ ID NO: 2915 - DNA, 201 bp, Homo sapiens; identical to SEQ ID NO: 2882

SEQ ID NO: 2916 - DNA, 201 bp, Homo sapiens; identical to SEQ ID NO: 2883

SEQ ID NO: 2917 - DNA, 201 bp, Homo sapiens; identical to SEQ ID NO: 2884

SEQ ID NO: 2918 - DNA, 201 bp, Homo sapiens; identical to SEQ ID NO: 2885

SEQ ID NO: 2919 - DNA, 201 bp, Homo sapiens; identical to SEQ ID NO: 2871

SEQ ID NO: 2920 - DNA, 201 bp, Homo sapiens; identical to SEQ ID NO: 2872

SEQ ID NO: 2921 - DNA, 201 bp, Homo sapiens
cgaatatacaatttatgtcattgccctgaagaataatcagaagagcgagcccctgattggaaggaaaaagacaggacaagaagctctctctcagacaaccrtctcatgggccccattccaggacacttctgagtacatcatttcatgtcatcctgttggcactgatgaagaacccttacagttcagggttcctggaacttc

SEQ ID NO: 2922 - DNA, 201 bp, Homo sapiens; identical to SEQ ID NO: 2875

SEQ ID NO: 2923 - DNA, 201 bp, Homo sapiens; identical to SEQ ID NO: 2877

SEQ ID NO: 2924 - DNA, 201 bp, Homo sapiens; identical to SEQ ID NO: 2881

SEQ ID NO: 2925 - DNA, 201 bp, Homo sapiens; identical to SEQ ID NO: 2874

SEQ ID NO: 2926 - DNA, 201 bp, Homo sapiens; identical to SEQ ID NO: 2909

SEQ ID NO: 2927 - DNA, 201 bp, Homo sapiens; identical to SEQ ID NO: 2878

SEQ ID NO: 2928 - DNA, 201 bp, Homo sapiens; identical to SEQ ID NO: 2912

SEQ ID NO: 2929 - DNA, 201 bp, Homo sapiens; identical to SEQ ID NO: 2898

SEQ ID NO: 2930 - DNA, 201 bp, Homo sapiens; identical to SEQ ID NO: 2880

SEQ ID NO: 2931 - DNA, 201 bp, Homo sapiens; identical to SEQ ID NO: 2882

SEQ ID NO: 2932 - DNA, 201 bp, Homo sapiens; identical to SEQ ID NO: 2883

SEQ ID NO: 2933 - DNA, 201 bp, Homo sapiens; identical to SEQ ID NO: 2884

SEQ ID NO: 2934 - DNA, 201 bp, Homo sapiens; identical to SEQ ID NO: 2885

SEQ ID NO: 2935 - DNA, 201 bp, Homo sapiens; identical to SEQ ID NO: 2871

SEQ ID NO: 2936 - DNA, 201 bp, Homo sapiens; identical to SEQ ID NO: 2875

SEQ ID NO: 2937 - DNA, 201 bp, Homo sapiens; identical to SEQ ID NO: 2876

SEQ ID NO: 2938 - DNA, 201 bp, Homo sapiens; identical to SEQ ID NO: 2878

SEQ ID NO: 2939 - DNA, 201 bp, Homo sapiens; identical to SEQ ID NO: 2877

SEQ ID NO: 2940 - DNA, 201 bp, Homo sapiens; identical to SEQ ID NO: 2898

SEQ ID NO: 2941 - DNA, 201 bp, Homo sapiens; identical to SEQ ID NO: 2879

SEQ ID NO: 2942 - DNA, 201 bp, Homo sapiens; identical to SEQ ID NO: 2881

SEQ ID NO: 2943 - DNA, 201 bp, Homo sapiens; identical to SEQ ID NO: 2883

SEQ ID NO: 2944 - DNA, 201 bp, Homo sapiens; identical to SEQ ID NO: 2884

SEQ ID NO: 2945 - DNA, 201 bp, Homo sapiens; identical to SEQ ID NO: 2871

SEQ ID NO: 2946 - DNA, 201 bp, Homo sapiens; identical to SEQ ID NO: 2872

SEQ ID NO: 2947 - DNA, 201 bp, Homo sapiens
tcacatccccagggaagatgtagactatcacctgtacccacacggtccgggactcaatccaaatgcctctacaggacaagaagctctctctcagacaaccrtctcatgggccccattccaggacacttctgagtacatcatttcatgtcatcctgttggcactgatgaagaacccttacagttcagggttcctggaacttc

SEQ ID NO: 2948 - DNA, 201 bp, Homo sapiens; identical to SEQ ID NO: 2875

SEQ ID NO: 2949 - DNA, 201 bp, Homo sapiens; identical to SEQ ID NO: 2877

SEQ ID NO: 2950 - DNA, 201 bp, Homo sapiens
cataggccaagaccatacccgccgaatgtaggtgaggaaatccaaattggtcacatccccagggaagatgtagactatcacctgtacccacacggtccggkactcaatccaaatgcctctacaggacaagaagctctctctcagacaaccatctcatgggccccattccaggacacttctgagtacatcatttcatgtcat

SEQ ID NO: 2951 - DNA, 201 bp, Homo sapiens; identical to SEQ ID NO: 2881

SEQ ID NO: 2952 - DNA, 201 bp, Homo sapiens; identical to SEQ ID NO: 2874

SEQ ID NO: 2953 - DNA, 201 bp, Homo sapiens; identical to SEQ ID NO: 2876

SEQ ID NO: 2954 - DNA, 201 bp, Homo sapiens; identical to SEQ ID NO: 2878

SEQ ID NO: 2955 - DNA, 201 bp, Homo sapiens; identical to SEQ ID NO: 2879

SEQ ID NO: 2956 - DNA, 201 bp, Homo sapiens; identical to SEQ ID NO: 2898

SEQ ID NO: 2957 - DNA, 201 bp, Homo sapiens; identical to SEQ ID NO: 2880

SEQ ID NO: 2958 - DNA, 201 bp, Homo sapiens; identical to SEQ ID NO: 2882

SEQ ID NO: 2959 - DNA, 201 bp, Homo sapiens; identical to SEQ ID NO: 2883

SEQ ID NO: 2960 - DNA, 201 bp, Homo sapiens; identical to SEQ ID NO: 2884

SEQ ID NO: 2961 - DNA, 201 bp, Homo sapiens; identical to SEQ ID NO: 2885

SEQ ID NO: 2962 - DNA, 201 bp, Homo sapiens; identical to SEQ ID NO: 2883

SEQ ID NO: 2963 - DNA, 201 bp, Homo sapiens; identical to SEQ ID NO: 2878

SEQ ID NO: 2964 - DNA, 201 bp, Homo sapiens; identical to SEQ ID NO: 2871

SEQ ID NO: 2965 - DNA, 201 bp, Homo sapiens; identical to SEQ ID NO: 2874

SEQ ID NO: 2966 - DNA, 201 bp, Homo sapiens; identical to SEQ ID NO: 2875

SEQ ID NO: 2967 - DNA, 201 bp, Homo sapiens; identical to SEQ ID NO: 2876

SEQ ID NO: 2968 - DNA, 201 bp, Homo sapiens; identical to SEQ ID NO: 2877

SEQ ID NO: 2969 - DNA, 201 bp, Homo sapiens; identical to SEQ ID NO: 2878

SEQ ID NO: 2970 - DNA, 201 bp, Homo sapiens
gtgtttacactgtcaaggatgacaaggaaagtgtccctatctctgataccatcatcccagaggtgccccaactcactgacctaagctttgttgatataacygattcaagcatcggcctgaggtggaccccgctaaactcttccaccattattgggtaccgcatcacagtagttgcggcaggagaaggtatccctatttttg

SEQ ID NO: 2971 - DNA, 201 bp, Homo sapiens; identical to SEQ ID NO: 2898

SEQ ID NO: 2972 - DNA, 201 bp, Homo sapiens; identical to SEQ ID NO: 2879

SEQ ID NO: 2973 - DNA, 201 bp, Homo sapiens; identical to SEQ ID NO: 2880

SEQ ID NO: 2974 - DNA, 201 bp, Homo sapiens; identical to SEQ ID NO: 2881

SEQ ID NO: 2975 - DNA, 201 bp, Homo sapiens; identical to SEQ ID NO: 2882

SEQ ID NO: 2976 - DNA, 201 bp, Homo sapiens; identical to SEQ ID NO: 2883

SEQ ID NO: 2977 - DNA, 201 bp, Homo sapiens; identical to SEQ ID NO: 2884

SEQ ID NO: 2978 - DNA, 201 bp, Homo sapiens
cggcctggagtacaatgtcagtgtttacactgtcaaggatgacaaggaaagtgtccctatctctgataccatcatcccagaggtgccccaactcactgacytaagctttgttgatataaccgattcaagcatcggcctgaggtggaccccgctaaactcttccaccattattgggtaccgcatcacagtagttgcggcagg

SEQ ID NO: 2979 - DNA, 201 bp, Homo sapiens; identical to SEQ ID NO: 2871

SEQ ID NO: 2980 - DNA, 201 bp, Homo sapiens
tcatcctgttggcactgatgaagaacccttacagttcagggttcctggaacttctaccagtgccactctgacaggcctcaccagaggtgccacctacaacrtcatagtggaggcactgaaagaccagcagaggcataaggttcgggaagaggttgttaccgtgggcaactctggatggtgccatgacaatggtgtgaacta

SEQ ID NO: 2981 - DNA, 201 bp, Homo sapiens; identical to SEQ ID NO: 2921

SEQ ID NO: 2982 - DNA, 201 bp, Homo sapiens; identical to SEQ ID NO: 2875

SEQ ID NO: 2983 - DNA, 201 bp, Homo sapiens; identical to SEQ ID NO: 2877

SEQ ID NO: 2984 - DNA, 201 bp, Homo sapiens; identical to SEQ ID NO: 2881

SEQ ID NO: 2985 - DNA, 201 bp, Homo sapiens; identical to SEQ ID NO: 2874

SEQ ID NO: 2986 - DNA, 201 bp, Homo sapiens; identical to SEQ ID NO: 2909

SEQ ID NO: 2987 - DNA, 201 bp, Homo sapiens; identical to SEQ ID NO: 2878

SEQ ID NO: 2988 - DNA, 201 bp, Homo sapiens; identical to SEQ ID NO: 2912

SEQ ID NO: 2989 - DNA, 201 bp, Homo sapiens; identical to SEQ ID NO: 2898

SEQ ID NO: 2990 - DNA, 201 bp, Homo sapiens; identical to SEQ ID NO: 2880

SEQ ID NO: 2991 - DNA, 201 bp, Homo sapiens; identical to SEQ ID NO: 2882

SEQ ID NO: 2992 - DNA, 201 bp, Homo sapiens; identical to SEQ ID NO: 2883

SEQ ID NO: 2993 - DNA, 201 bp, Homo sapiens; identical to SEQ ID NO: 2884

SEQ ID NO: 2994 - DNA, 201 bp, Homo sapiens
cctggaacttctaccagtgccactctgacaggcctcaccagaggtgccacctacaacatcatagtggaggcactgaaagaccagcagaggcataaggttcrggaagaggttgttaccgtgggcaactctggatggtgccatgacaatggtgtgaactacaagattggagagaagtgggaccgtcagggagaaaatggccag

SEQ ID NO: 2995 - DNA, 201 bp, Homo sapiens; identical to SEQ ID NO: 2871

SEQ ID NO: 2996 - DNA, 201 bp, Homo sapiens; identical to SEQ ID NO: 2872

SEQ ID NO: 2997 - DNA, 201 bp, Homo sapiens; identical to SEQ ID NO: 2947

SEQ ID NO: 2998 - DNA, 201 bp, Homo sapiens; identical to SEQ ID NO: 2875

SEQ ID NO: 2999 - DNA, 201 bp, Homo sapiens; identical to SEQ ID NO: 2877

SEQ ID NO: 3000 - DNA, 201 bp, Homo sapiens; identical to SEQ ID NO: 2950

SEQ ID NO: 3001 - DNA, 201 bp, Homo sapiens; identical to SEQ ID NO: 2881

SEQ ID NO: 3002 - DNA, 201 bp, Homo sapiens; identical to SEQ ID NO: 2874

SEQ ID NO: 3003 - DNA, 201 bp, Homo sapiens; identical to SEQ ID NO: 2876

SEQ ID NO: 3004 - DNA, 201 bp, Homo sapiens; identical to SEQ ID NO: 2878

SEQ ID NO: 3005 - DNA, 201 bp, Homo sapiens; identical to SEQ ID NO: 2879

SEQ ID NO: 3006 - DNA, 201 bp, Homo sapiens; identical to SEQ ID NO: 2880

SEQ ID NO: 3007 - DNA, 201 bp, Homo sapiens; identical to SEQ ID NO: 2882

SEQ ID NO: 3008 - DNA, 201 bp, Homo sapiens; identical to SEQ ID NO: 2883

SEQ ID NO: 3009 - DNA, 201 bp, Homo sapiens; identical to SEQ ID NO: 2884

SEQ ID NO: 3010 - DNA, 201 bp, Homo sapiens; identical to SEQ ID NO: 2885

SEQ ID NO: 3011 - DNA, 201 bp, Homo sapiens; identical to SEQ ID NO: 2880

SEQ ID NO: 3012 - DNA, 201 bp, Homo sapiens; identical to SEQ ID NO: 2872

SEQ ID NO: 3013 - DNA, 201 bp, Homo sapiens; identical to SEQ ID NO: 2873

SEQ ID NO: 3014 - DNA, 201 bp, Homo sapiens; identical to SEQ ID NO: 2874

SEQ ID NO: 3015 - DNA, 201 bp, Homo sapiens; identical to SEQ ID NO: 2882

SEQ ID NO: 3016 - DNA, 201 bp, Homo sapiens; identical to SEQ ID NO: 2885

SEQ ID NO: 3017 - DNA, 201 bp, Homo sapiens; identical to SEQ ID NO: 2877

SEQ ID NO: 3018 - DNA, 201 bp, Homo sapiens; identical to SEQ ID NO: 2871

SEQ ID NO: 3019 - DNA, 201 bp, Homo sapiens; identical to SEQ ID NO: 2874

SEQ ID NO: 3020 - DNA, 201 bp, Homo sapiens; identical to SEQ ID NO: 2875

SEQ ID NO: 3021 - DNA, 201 bp, Homo sapiens; identical to SEQ ID NO: 2876

SEQ ID NO: 3022 - DNA, 201 bp, Homo sapiens; identical to SEQ ID NO: 2877

SEQ ID NO: 3023 - DNA, 201 bp, Homo sapiens; identical to SEQ ID NO: 2878

SEQ ID NO: 3024 - DNA, 201 bp, Homo sapiens; identical to SEQ ID NO: 2879

SEQ ID NO: 3025 - DNA, 201 bp, Homo sapiens; identical to SEQ ID NO: 2898

SEQ ID NO: 3026 - DNA, 201 bp, Homo sapiens; identical to SEQ ID NO: 2880

SEQ ID NO: 3027 - DNA, 201 bp, Homo sapiens; identical to SEQ ID NO: 2882

SEQ ID NO: 3028 - DNA, 201 bp, Homo sapiens; identical to SEQ ID NO: 2881

SEQ ID NO: 3029 - DNA, 201 bp, Homo sapiens; identical to SEQ ID NO: 2883

SEQ ID NO: 3030 - DNA, 201 bp, Homo sapiens; identical to SEQ ID NO: 2884

SEQ ID NO: 3031 - DNA, 201 bp, Homo sapiens; identical to SEQ ID NO: 2871

SEQ ID NO: 3032 - DNA, 201 bp, Homo sapiens; identical to SEQ ID NO: 2872

SEQ ID NO: 3033 - DNA, 201 bp, Homo sapiens; identical to SEQ ID NO: 2873

SEQ ID NO: 3034 - DNA, 201 bp, Homo sapiens; identical to SEQ ID NO: 2875

SEQ ID NO: 3035 - DNA, 201 bp, Homo sapiens; identical to SEQ ID NO: 2877

SEQ ID NO: 3036 - DNA, 201 bp, Homo sapiens; identical to SEQ ID NO: 2881

SEQ ID NO: 3037 - DNA, 201 bp, Homo sapiens; identical to SEQ ID NO: 2874

SEQ ID NO: 3038 - DNA, 201 bp, Homo sapiens; identical to SEQ ID NO: 2876

SEQ ID NO: 3039 - DNA, 201 bp, Homo sapiens; identical to SEQ ID NO: 2878

SEQ ID NO: 3040 - DNA, 201 bp, Homo sapiens; identical to SEQ ID NO: 2879

SEQ ID NO: 3041 - DNA, 201 bp, Homo sapiens; identical to SEQ ID NO: 2898

SEQ ID NO: 3042 - DNA, 201 bp, Homo sapiens; identical to SEQ ID NO: 2880

SEQ ID NO: 3043 - DNA, 201 bp, Homo sapiens; identical to SEQ ID NO: 2882

SEQ ID NO: 3044 - DNA, 201 bp, Homo sapiens; identical to SEQ ID NO: 2883

SEQ ID NO: 3045 - DNA, 201 bp, Homo sapiens; identical to SEQ ID NO: 2884

SEQ ID NO: 3046 - DNA, 201 bp, Homo sapiens; identical to SEQ ID NO: 2885

SEQ ID NO: 3047 - DNA, 201 bp, Homo sapiens
ctccgcaccaagaatggtgttgtctaccagaccttctgtgacatgacttctgggggtggcggctggaccctggtggccagcgtgcacgagaatgacatgcrtgggaagtgcacggtgggtgatcgctggtccagtcagcagggcaacaaagcagactacccagagggggatggcaactgggccaactacaacacctttgga

SEQ ID NO: 3048 - DNA, 201 bp, Homo sapiens
agaacaaggagctccggagcaagctccacgagatggagggggccgtcaagtccaagttcaagtccaccatcgcggcgctggaggccaagattgcacagctrgaggagcaggtcgagcaggaggccagagagaaacaggcggccaccaagtcgctgaagcagaaagacaagaagctgaaggaaatcttgctgcaggtggagg

SEQ ID NO: 3049 - DNA, 201 bp, Homo sapiens
tgaacaaagccctggacaagacccatcggcaaggggcttccttcctggggatcctggatatagctggatttgagatctttgaggtgaactccttcgagcarctgtgcatcaactacaccaacgagaagctgcagcagctcttcaaccacaccatgttcatcctggagcaggaggagtaccagcgcgagggcatcgagtgga

SEQ ID NO: 3050 - DNA, 201 bp, Homo sapiens
gaagtgacttgcttttggagggcttcaacaactacaccttcctctccaatggctttgtgcccatcccagcagcccaggatgatgagatgttccaggaaacygtggaggccatggcaatcatgggtttcagcgaggaggagcagctatccatattgaaggtggtatcatcggtcctgcagcttggaaatatcgtcttcaaga

SEQ ID NO: 3051 - DNA, 201 bp, Homo sapiens
agctgggcaagctgatgaccacgctacgcaacaccacgcccaacttcgtgcgctgcatcatccccaaccacgagaagaggtccggcaagctggatgcgttyctggtgctggagcagctgcggtgcaatggggtgctggaaggcattcgcatctgccggcagggcttccccaaccggatcgtcttccaggagttccgccaac

SEQ ID NO: 3052 - DNA, 201 bp, Homo sapiens
accgggtccgcaaagccacacagcaggccgagcagctcagcaacgagctggccacagagcgcagcacggcccagaagaatgagagtgcccggcagcagctygagcggcagaacaaggagctccggagcaagctccacgagatggagggggccgtcaagtccaagttcaagtccaccatcgcggcgctggaggccaagattg

SEQ ID NO: 3053 - DNA, 201 bp, Homo sapiens
agttcctctttgtggacaaaaacttcatcaacagcccagtggcccaggctgactgggccgccaagagactcgtctgggtcccctcggagaagcagggcttygaggcagccagcattaaggaggagaagggggatgaggtggttgtggagctggtggagaatggcaagaaggtcacggttgggaaagatgacatccagaaga

SEQ ID NO: 3054 - DNA, 201 bp, Homo sapiens
ccaaaacagtgaagaacgacaactcctcacgattcggcaaattcatccgcatcaacttcgacgtcacgggttacatcgtgggagccaacattgagacctayctgctagaaaaatcacgggcaattcgccaagccagagacgagaggacattccacatcttttactacatgattgctggagccaaggagaagatgagaagtg

SEQ ID NO: 3055 - DNA, 201 bp, Homo sapiens
tgagagcgtcacagggatgcttaacgaggccgaggggaaggccattaagctggccaaggacgtggcgtccctcagttcccagctccaggacacccaggagytgcttcaagaagaaacccggcagaagctcaacgtgtctacgaagctgcgccagctggaggaggagcggaacagcctgcaagaccagctggacgaggagat

SEQ ID NO: 3056 - DNA, 201 bp, Homo sapiens
ctggcctcttctgcgtggtggtcaacccctataaacacctgcccatctactcggagaagatcgtcgacatgtacaagggcaagaagaggcacgagatgccrcctcacatctacgccatcgcagacacggcctaccggagcatgcttcaagatcgggaggaccagtccattctatgcacaggcgagtctggagccgggaaaa

SEQ ID NO: 3057 - DNA, 201 bp, Homo sapiens
tgaggagaagaggaggcaactgcagagacagcttcacgagtatgagacggaactggaagacgagcgaaagcaacgtgccctggcagctgcagcaaagaagmagctggaaggggacctgaaagacctggagcttcaggccgactctgccatcaaggggagggaggaagccatcaagcagctacgcaaactgcaggctcagat

SEQ ID NO: 3058 - DNA, 201 bp, Homo sapiens
tgaggcagaagccagggagaaggaaaccaaggccctgtccctggctcgggcccttgaagaggccttggaagccaaagaggaactcgagcggaccaacaaartgctcaaagccgaaatggaagacctggtcagctccaaggatgacgtgggcaagaacgtccatgagctggagaagtccaagcgggccctggagacccagat

SEQ ID NO: 3059 - DNA, 141 bp, Homo sapiens
agagcaagctcaggcgaggaaacgagacctctttcgttccttctagaaggtctggaggacgtagagttattcaatggaaccaaggccagtgaataagcaabtttctacagttttgcaccacggcaagaaaaccaaaaacca

SEQ ID NO: 3060 - DNA, 201 bp, Homo sapiens
ggcagctgtacaaggagcagctgggcaagctgatgaccacgctacgcaacaccacgcccaacttcgtgcgctgcatcatccccaaccacgagaagaggtcyggcaagctggatgcgttcctggtgctggagcagctgcggtgcaatggggtgctggaaggcattcgcatctgccggcagggcttccccaaccggatcgtct

SEQ ID NO: 3061 - DNA, 201 bp, Homo sapiens
gaactggcagtggtggaggcttttcaccaaagtgaagccactgctgcaggtgacacggcaggaggaggagatgcaggccaaggaggatgaactgcagaagrccaaggagcggcagcagaaggcagagaatgagcttaaggagctggaacagaagcactcgcagctgaccgaggagaagaacctgctacaggaacagctgca

SEQ ID NO: 3062 - DNA, 201 bp, Homo sapiens
tggccttccaggcgatgtgtcgtggctacttggccagaaaggcttttgccaagaggcagcagcagctgaccgccatgaaggtgattcagaggaactgcgcygcctacctcaagctgcggaactggcagtggtggaggcttttcaccaaagtgaagccactgctgcaggtgacacggcaggaggaggagatgcaggccaagg

SEQ ID NO: 3063 - DNA, 201 bp, Homo sapiens
acacgcacaggcggtggaggagctcacagagcagcttgagcagttcaagagggccaaggcgaacctagacaagaataagcagacgctggagaaagagaacrcagacctggccggggagctgcgggtcctgggccaggccaagcaggaggtggaacataagaagaagaagctggaggcgcaggtgcaggagctgcagtccaa

SEQ ID NO: 3064 - DNA, 201 bp, Homo sapiens
ggagctcaatgacaaagtccacaagctgcagaatgaagttgagagcgtcacagggatgcttaacgaggccgaggggaaggccattaagctggccaaggacrtggcgtccctcagttcccagctccaggacacccaggagctgcttcaagaagaaacccggcagaagctcaacgtgtctacgaagctgcgccagctggagga

SEQ ID NO: 3065 - DNA, 201 bp, Homo sapiens
gatcgctgacctccaggcgcagatcgcagagctcaagatgcagctggccaagaaggaggaggagctgcaggcggccctggccaggcttgacgatgaaatcrctcagaagaacaatgccctgaagaagatccgggagctggagggccacatctcagacctccaggaggacctggactcagagcgggccgccaggaacaaggc

SEQ ID NO: 3066 - DNA, 201 bp, Homo sapiens
caggaggaggagatgcaggccaaggaggatgaactgcagaagaccaaggagcggcagcagaaggcagagaatgagcttaaggagctggaacagaagcactygcagctgaccgaggagaagaacctgctacaggaacagctgcaggcagagacagagctgtatgcagaggctgaggagatgcgggtgcggctggcggccaag

SEQ ID NO: 3067 - DNA, 201 bp, Homo sapiens
gggtgctggaaggcattcgcatctgccggcagggcttccccaaccggatcgtcttccaggagttccgccaacgctacgagatcctggcggcgaatgccatycccaaaggcttcatggacgggaagcaggcctgcattctcatgatcaaagccctggaacttgaccccaacttatacaggatagggcagagcaaaatcttct

SEQ ID NO: 3068 - DNA, 201 bp, Homo sapiens
ttgatttggacaaccagcggcaactcgtgtccaacctggaaaagaagcagaggaaatttgatcagttgttagccgaggagaaaaacatctcttccaaataygcggatgagagggacagagctgaggcagaagccagggagaaggaaaccaaggccctgtccctggctcgggcccttgaagaggccttggaagccaaagagg

SEQ ID NO: 3069 - DNA, 201 bp, Homo sapiens
ctttcgtggagaagctgtgcacggagcagggcagccaccccaagttccagaagcccaagcagctcaaggacaagactgagttctccatcatccattatgcygggaaggtggactataatgcgagtgcctggctgaccaagaatatggacccgctgaatgacaacgtgacttccctgctcaatgcctcctccgacaagtttg

SEQ ID NO: 3070 - DNA, 201 bp, Homo sapiens
aggactttgccagcaccgtggaagctctggaagaggggaagaagaggttccagaaggagatcgagaacctcacccagcagtacgaggagaaggcggccgcktatgataaactggaaaagaccaagaacaggcttcagcaggagctggacgacctggttgttgatttggacaaccagcggcaactcgtgtccaacctggaaa

SEQ ID NO: 3071 - DNA, 201 bp, Homo sapiens
gggagcggtacttctcagggctaatatatacgtactctggcctcttctgcgtggtggtcaacccctataaacacctgcccatctactcggagaagatcgtygacatgtacaagggcaagaagaggcacgagatgccgcctcacatctacgccatcgcagacacggcctaccggagcatgcttcaagatcgggaggaccagt

SEQ ID NO: 3072 - DNA, 201 bp, Homo sapiens
cccagaagaatgagagtgcccggcagcagctcgagcggcagaacaaggagctccggagcaagctccacgagatggagggggccgtcaagtccaagttcaartccaccatcgcggcgctggaggccaagattgcacagctggaggagcaggtcgagcaggaggccagagagaaacaggcggccaccaagtcgctgaagcaga

SEQ ID NO: 3073 - DNA, 201 bp, Homo sapiens
ccacggaggacgccaaactgcggctggaagtcaacatgcaggcgctcaagggccagttcgaaagggatctccaagcccgggacgagcagaatgaggagaaraggaggcaactgcagagacagcttcacgagtatgagacggaactggaagacgagcgaaagcaacgtgccctggcagctgcagcaaagaagaagctggaag

SEQ ID NO: 3074 - DNA, 201 bp, Homo sapiens; identical to SEQ ID NO: 3048

SEQ ID NO: 3075 - DNA, 201 bp, Homo sapiens; identical to SEQ ID NO: 3049

SEQ ID NO: 3076 - DNA, 201 bp, Homo sapiens; identical to SEQ ID NO: 3050

SEQ ID NO: 3077 - DNA, 201 bp, Homo sapiens; identical to SEQ ID NO: 3051

SEQ ID NO: 3078 - DNA, 201 bp, Homo sapiens; identical to SEQ ID NO: 3052

SEQ ID NO: 3079 - DNA, 201 bp, Homo sapiens; identical to SEQ ID NO: 3053

SEQ ID NO: 3080 - DNA, 201 bp, Homo sapiens; identical to SEQ ID NO: 3054

SEQ ID NO: 3081 - DNA, 201 bp, Homo sapiens; identical to SEQ ID NO: 3055

SEQ ID NO: 3082 - DNA, 201 bp, Homo sapiens; identical to SEQ ID NO: 3056

SEQ ID NO: 3083 - DNA, 201 bp, Homo sapiens; identical to SEQ ID NO: 3057

SEQ ID NO: 3084 - DNA, 201 bp, Homo sapiens; identical to SEQ ID NO: 3058

SEQ ID NO: 3085 - DNA, 201 bp, Homo sapiens
tctggaggacgtagagttattgaaaatgcagatggttctgaggaggaaacggacactcgagacgcagacttcaatggaaccaaggccagtgaataagcaabtttctacagttttgcaccacggcaagaaaaccaaaaaccaaaacaaacaaacaaaaaaaacccaacaacaacccagaacaaagctcccgggttcaagcga

SEQ ID NO: 3086 - DNA, 201 bp, Homo sapiens; identical to SEQ ID NO: 3060

SEQ ID NO: 3087 - DNA, 201 bp, Homo sapiens; identical to SEQ ID NO: 3061

SEQ ID NO: 3088 - DNA, 201 bp, Homo sapiens; identical to SEQ ID NO: 3062

SEQ ID NO: 3089 - DNA, 201 bp, Homo sapiens; identical to SEQ ID NO: 3063

SEQ ID NO: 3090 - DNA, 201 bp, Homo sapiens; identical to SEQ ID NO: 3064

SEQ ID NO: 3091 - DNA, 201 bp, Homo sapiens; identical to SEQ ID NO: 3065

SEQ ID NO: 3092 - DNA, 201 bp, Homo sapiens; identical to SEQ ID NO: 3066

SEQ ID NO: 3093 - DNA, 201 bp, Homo sapiens; identical to SEQ ID NO: 3067

SEQ ID NO: 3094 - DNA, 201 bp, Homo sapiens; identical to SEQ ID NO: 3068

SEQ ID NO: 3095 - DNA, 201 bp, Homo sapiens; identical to SEQ ID NO: 3069

SEQ ID NO: 3096 - DNA, 201 bp, Homo sapiens; identical to SEQ ID NO: 3070

SEQ ID NO: 3097 - DNA, 201 bp, Homo sapiens; identical to SEQ ID NO: 3071

SEQ ID NO: 3098 - DNA, 201 bp, Homo sapiens; identical to SEQ ID NO: 3072

SEQ ID NO: 3099 - DNA, 201 bp, Homo sapiens; identical to SEQ ID NO: 3073

SEQ ID NO: 3100 - DNA, 201 bp, Homo sapiens; identical to SEQ ID NO: 3048

SEQ ID NO: 3101 - DNA, 201 bp, Homo sapiens; identical to SEQ ID NO: 3049

SEQ ID NO: 3102 - DNA, 201 bp, Homo sapiens; identical to SEQ ID NO: 3050

SEQ ID NO: 3103 - DNA, 201 bp, Homo sapiens; identical to SEQ ID NO: 3051

SEQ ID NO: 3104 - DNA, 201 bp, Homo sapiens; identical to SEQ ID NO: 3052

SEQ ID NO: 3105 - DNA, 201 bp, Homo sapiens; identical to SEQ ID NO: 3053

SEQ ID NO: 3106 - DNA, 201 bp, Homo sapiens; identical to SEQ ID NO: 3054

SEQ ID NO: 3107 - DNA, 201 bp, Homo sapiens; identical to SEQ ID NO: 3055

SEQ ID NO: 3108 - DNA, 201 bp, Homo sapiens; identical to SEQ ID NO: 3056

SEQ ID NO: 3109 - DNA, 201 bp, Homo sapiens; identical to SEQ ID NO: 3057

SEQ ID NO: 3110 - DNA, 201 bp, Homo sapiens; identical to SEQ ID NO: 3058

SEQ ID NO: 3111 - DNA, 201 bp, Homo sapiens
tctggaggacgtagagttattgaaaatgcagatggttctgaggaggaaacggacactcgagacgcagacttcaatggaaccaaggccagtgaataagcaabtttctacagttttgcaccacggcaagaaaaccaaaaaccaaaacaaacaaacaaaaaaaacccaacaacaacccagaacaaagcaaaacccagcagactg

SEQ ID NO: 3112 - DNA, 201 bp, Homo sapiens
taaaacctcatctatacaagaatttaaaaataagctgggcgtggtggtacacacctgtggtcccagctactagggaggctgagccaggaagaacgctccarcccaggacttcgaggctgcaatgagctataattgcatcattgcactccagcctgggcaacagagaccctgtctcaaccaccaccaccaccaccaccccta

SEQ ID NO: 3113 - DNA, 201 bp, Homo sapiens; identical to SEQ ID NO: 3060

SEQ ID NO: 3114 - DNA, 201 bp, Homo sapiens
ggctgcaatgagctataattgcatcattgcactccagcctgggcaacagagaccctgtctcaaccaccaccaccaccaccacccctactacccctgtattsaaggtaaaaattgaagtttgtatgatgtaagagatgagaaaaacccaacaggaaacacagacacatcctccagttctatcaatggattgtgcagacactg

SEQ ID NO: 3115 - DNA, 201 bp, Homo sapiens; identical to SEQ ID NO: 3061

SEQ ID NO: 3116 - DNA, 201 bp, Homo sapiens; identical to SEQ ID NO: 3062

SEQ ID NO: 3117 - DNA, 201 bp, Homo sapiens
aacctttccaacttctcacgtcaggcctttgagaattctttccccctctcctggtttccacacctcagacacgcacagttcaccaagtgccttctgtagtyacatgaattgaaaaggagacgctgctcccacggaggggagcaggaatgctgcactgtttacaccctgactgtgcttaaaaacactttcactaataaatgg

SEQ ID NO: 3118 - DNA, 201 bp, Homo sapiens; identical to SEQ ID NO: 3063

SEQ ID NO: 3119 - DNA, 201 bp, Homo sapiens; identical to SEQ ID NO: 3064

SEQ ID NO: 3120 - DNA, 201 bp, Homo sapiens; identical to SEQ ID NO: 3065

SEQ ID NO: 3121 - DNA, 201 bp, Homo sapiens; identical to SEQ ID NO: 3066

SEQ ID NO: 3122 - DNA, 201 bp, Homo sapiens; identical to SEQ ID NO: 3067

SEQ ID NO: 3123 - DNA, 201 bp, Homo sapiens; identical to SEQ ID NO: 3068

SEQ ID NO: 3124 - DNA, 201 bp, Homo sapiens; identical to SEQ ID NO: 3069

SEQ ID NO: 3125 - DNA, 201 bp, Homo sapiens; identical to SEQ ID NO: 3070

SEQ ID NO: 3126 - DNA, 201 bp, Homo sapiens; identical to SEQ ID NO: 3071

SEQ ID NO: 3127 - DNA, 201 bp, Homo sapiens; identical to SEQ ID NO: 3072

SEQ ID NO: 3128 - DNA, 201 bp, Homo sapiens; identical to SEQ ID NO: 3073

SEQ ID NO: 3129 - DNA, 201 bp, Homo sapiens; identical to SEQ ID NO: 3048

SEQ ID NO: 3130 - DNA, 201 bp, Homo sapiens; identical to SEQ ID NO: 3049

SEQ ID NO: 3131 - DNA, 201 bp, Homo sapiens; identical to SEQ ID NO: 3050

SEQ ID NO: 3132 - DNA, 201 bp, Homo sapiens; identical to SEQ ID NO: 3051

SEQ ID NO: 3133 - DNA, 201 bp, Homo sapiens; identical to SEQ ID NO: 3052

SEQ ID NO: 3134 - DNA, 201 bp, Homo sapiens; identical to SEQ ID NO: 3053

SEQ ID NO: 3135 - DNA, 201 bp, Homo sapiens; identical to SEQ ID NO: 3054

SEQ ID NO: 3136 - DNA, 201 bp, Homo sapiens; identical to SEQ ID NO: 3055

SEQ ID NO: 3137 - DNA, 201 bp, Homo sapiens; identical to SEQ ID NO: 3056

SEQ ID NO: 3138 - DNA, 201 bp, Homo sapiens; identical to SEQ ID NO: 3057

SEQ ID NO: 3139 - DNA, 201 bp, Homo sapiens; identical to SEQ ID NO: 3058

SEQ ID NO: 3140 - DNA, 201 bp, Homo sapiens; identical to SEQ ID NO: 3085

SEQ ID NO: 3141 - DNA, 201 bp, Homo sapiens; identical to SEQ ID NO: 3060

SEQ ID NO: 3142 - DNA, 201 bp, Homo sapiens; identical to SEQ ID NO: 3061

SEQ ID NO: 3143 - DNA, 201 bp, Homo sapiens; identical to SEQ ID NO: 3062

SEQ ID NO: 3144 - DNA, 201 bp, Homo sapiens; identical to SEQ ID NO: 3063

SEQ ID NO: 3145 - DNA, 201 bp, Homo sapiens; identical to SEQ ID NO: 3064

SEQ ID NO: 3146 - DNA, 201 bp, Homo sapiens; identical to SEQ ID NO: 3065

SEQ ID NO: 3147 - DNA, 201 bp, Homo sapiens; identical to SEQ ID NO: 3066

SEQ ID NO: 3148 - DNA, 201 bp, Homo sapiens; identical to SEQ ID NO: 3068

SEQ ID NO: 3149 - DNA, 201 bp, Homo sapiens; identical to SEQ ID NO: 3067

SEQ ID NO: 3150 - DNA, 201 bp, Homo sapiens; identical to SEQ ID NO: 3069

SEQ ID NO: 3151 - DNA, 201 bp, Homo sapiens; identical to SEQ ID NO: 3070

SEQ ID NO: 3152 - DNA, 201 bp, Homo sapiens; identical to SEQ ID NO: 3071

SEQ ID NO: 3153 - DNA, 201 bp, Homo sapiens; identical to SEQ ID NO: 3072

SEQ ID NO: 3154 - DNA, 201 bp, Homo sapiens; identical to SEQ ID NO: 3073

SEQ ID NO: 3155 - DNA, 201 bp, Homo sapiens; identical to SEQ ID NO: 3048

SEQ ID NO: 3156 - DNA, 201 bp, Homo sapiens; identical to SEQ ID NO: 3049

SEQ ID NO: 3157 - DNA, 201 bp, Homo sapiens; identical to SEQ ID NO: 3050

SEQ ID NO: 3158 - DNA, 201 bp, Homo sapiens; identical to SEQ ID NO: 3051

SEQ ID NO: 3159 - DNA, 201 bp, Homo sapiens; identical to SEQ ID NO: 3052

SEQ ID NO: 3160 - DNA, 201 bp, Homo sapiens; identical to SEQ ID NO: 3053

SEQ ID NO: 3161 - DNA, 201 bp, Homo sapiens; identical to SEQ ID NO: 3054

SEQ ID NO: 3162 - DNA, 201 bp, Homo sapiens; identical to SEQ ID NO: 3055

SEQ ID NO: 3163 - DNA, 201 bp, Homo sapiens; identical to SEQ ID NO: 3056

SEQ ID NO: 3164 - DNA, 201 bp, Homo sapiens; identical to SEQ ID NO: 3057

SEQ ID NO: 3165 - DNA, 201 bp, Homo sapiens; identical to SEQ ID NO: 3058

SEQ ID NO: 3166 - DNA, 201 bp, Homo sapiens; identical to SEQ ID NO: 3085

SEQ ID NO: 3167 - DNA, 201 bp, Homo sapiens; identical to SEQ ID NO: 3060

SEQ ID NO: 3168 - DNA, 201 bp, Homo sapiens; identical to SEQ ID NO: 3061

SEQ ID NO: 3169 - DNA, 201 bp, Homo sapiens; identical to SEQ ID NO: 3062

SEQ ID NO: 3170 - DNA, 201 bp, Homo sapiens; identical to SEQ ID NO: 3063

SEQ ID NO: 3171 - DNA, 201 bp, Homo sapiens; identical to SEQ ID NO: 3064

SEQ ID NO: 3172 - DNA, 201 bp, Homo sapiens; identical to SEQ ID NO: 3065

SEQ ID NO: 3173 - DNA, 201 bp, Homo sapiens; identical to SEQ ID NO: 3066

SEQ ID NO: 3174 - DNA, 201 bp, Homo sapiens; identical to SEQ ID NO: 3067

SEQ ID NO: 3175 - DNA, 201 bp, Homo sapiens; identical to SEQ ID NO: 3068

SEQ ID NO: 3176 - DNA, 201 bp, Homo sapiens; identical to SEQ ID NO: 3069

SEQ ID NO: 3177 - DNA, 201 bp, Homo sapiens; identical to SEQ ID NO: 3070

SEQ ID NO: 3178 - DNA, 201 bp, Homo sapiens; identical to SEQ ID NO: 3071

SEQ ID NO: 3179 - DNA, 201 bp, Homo sapiens; identical to SEQ ID NO: 3072

SEQ ID NO: 3180 - DNA, 201 bp, Homo sapiens; identical to SEQ ID NO: 3073

SEQ ID NO: 3181 - DNA, 201 bp, Homo sapiens; identical to SEQ ID NO: 3049

SEQ ID NO: 3182 - DNA, 201 bp, Homo sapiens; identical to SEQ ID NO: 3050

SEQ ID NO: 3183 - DNA, 201 bp, Homo sapiens; identical to SEQ ID NO: 3051

SEQ ID NO: 3184 - DNA, 201 bp, Homo sapiens; identical to SEQ ID NO: 3053

SEQ ID NO: 3185 - DNA, 201 bp, Homo sapiens; identical to SEQ ID NO: 3054

SEQ ID NO: 3186 - DNA, 201 bp, Homo sapiens; identical to SEQ ID NO: 3056

SEQ ID NO: 3187 - DNA, 201 bp, Homo sapiens; identical to SEQ ID NO: 3060

SEQ ID NO: 3188 - DNA, 201 bp, Homo sapiens; identical to SEQ ID NO: 3061

SEQ ID NO: 3189 - DNA, 201 bp, Homo sapiens; identical to SEQ ID NO: 3117

SEQ ID NO: 3190 - DNA, 201 bp, Homo sapiens; identical to SEQ ID NO: 3062

SEQ ID NO: 3191 - DNA, 201 bp, Homo sapiens
acacgcacaggcggtggaggagctcacagagcagcttgagcagttcaagagggccaaggcgaacctagacaagaataagcagacgctggagaaagagaacrcagacctggccggggagctgcgggtcctgggccaggccaagcaggaggtggaacataagaagaagaagctggaggcgcaggtgcagacactgagttttta

SEQ ID NO: 3192 - DNA, 201 bp, Homo sapiens; identical to SEQ ID NO: 3065

SEQ ID NO: 3193 - DNA, 201 bp, Homo sapiens; identical to SEQ ID NO: 3066

SEQ ID NO: 3194 - DNA, 201 bp, Homo sapiens; identical to SEQ ID NO: 3067

SEQ ID NO: 3195 - DNA, 201 bp, Homo sapiens; identical to SEQ ID NO: 3069

SEQ ID NO: 3196 - DNA, 201 bp, Homo sapiens; identical to SEQ ID NO: 3071

SEQ ID NO: 3197 - DNA, 201 bp, Homo sapiens; identical to SEQ ID NO: 3048

SEQ ID NO: 3198 - DNA, 201 bp, Homo sapiens; identical to SEQ ID NO: 3049

SEQ ID NO: 3199 - DNA, 201 bp, Homo sapiens; identical to SEQ ID NO: 3050

SEQ ID NO: 3200 - DNA, 201 bp, Homo sapiens; identical to SEQ ID NO: 3051

SEQ ID NO: 3201 - DNA, 201 bp, Homo sapiens; identical to SEQ ID NO: 3052

SEQ ID NO: 3202 - DNA, 201 bp, Homo sapiens; identical to SEQ ID NO: 3053

SEQ ID NO: 3203 - DNA, 201 bp, Homo sapiens; identical to SEQ ID NO: 3054

SEQ ID NO: 3204 - DNA, 201 bp, Homo sapiens; identical to SEQ ID NO: 3055

SEQ ID NO: 3205 - DNA, 201 bp, Homo sapiens; identical to SEQ ID NO: 3056

SEQ ID NO: 3206 - DNA, 201 bp, Homo sapiens; identical to SEQ ID NO: 3057

SEQ ID NO: 3207 - DNA, 201 bp, Homo sapiens; identical to SEQ ID NO: 3058

SEQ ID NO: 3208 - DNA, 201 bp, Homo sapiens; identical to SEQ ID NO: 3111

SEQ ID NO: 3209 - DNA, 201 bp, Homo sapiens; identical to SEQ ID NO: 3112

SEQ ID NO: 3210 - DNA, 201 bp, Homo sapiens; identical to SEQ ID NO: 3060

SEQ ID NO: 3211 - DNA, 201 bp, Homo sapiens; identical to SEQ ID NO: 3114

SEQ ID NO: 3212 - DNA, 201 bp, Homo sapiens; identical to SEQ ID NO: 3061

SEQ ID NO: 3213 - DNA, 201 bp, Homo sapiens; identical to SEQ ID NO: 3062

SEQ ID NO: 3214 - DNA, 201 bp, Homo sapiens; identical to SEQ ID NO: 3117

SEQ ID NO: 3215 - DNA, 201 bp, Homo sapiens; identical to SEQ ID NO: 3063

SEQ ID NO: 3216 - DNA, 201 bp, Homo sapiens; identical to SEQ ID NO: 3064

SEQ ID NO: 3217 - DNA, 201 bp, Homo sapiens; identical to SEQ ID NO: 3065

SEQ ID NO: 3218 - DNA, 201 bp, Homo sapiens; identical to SEQ ID NO: 3066

SEQ ID NO: 3219 - DNA, 201 bp, Homo sapiens; identical to SEQ ID NO: 3067

SEQ ID NO: 3220 - DNA, 201 bp, Homo sapiens; identical to SEQ ID NO: 3068

SEQ ID NO: 3221 - DNA, 201 bp, Homo sapiens; identical to SEQ ID NO: 3069

SEQ ID NO: 3222 - DNA, 201 bp, Homo sapiens; identical to SEQ ID NO: 3070

SEQ ID NO: 3223 - DNA, 201 bp, Homo sapiens; identical to SEQ ID NO: 3071

SEQ ID NO: 3224 - DNA, 201 bp, Homo sapiens; identical to SEQ ID NO: 3072

SEQ ID NO: 3225 - DNA, 201 bp, Homo sapiens; identical to SEQ ID NO: 3073

SEQ ID NO: 3226 - DNA, 201 bp, Homo sapiens
tgtaaggggattttgcaaaaggctgagacactgtacaccatgggagactttgagtttgccttggtattctatcatcgaggctacaagctgaggcctgatcrggaattcagagttggcattcagaaagcccaggaagccatcaacaactcagtgggaagtccttcttccattaagctggagaacaaaggggacctctccttc

SEQ ID NO: 3227 - DNA, 201 bp, Homo sapiens
agcttttctttgattgtctctgctttagcgtctctaaatccggtcaccatgtcggaccccgaaggcgagaccttgcgaagcacctttccctcttatatggscgaaggcgagcggctctacctgtgcggggaattttctaaagccgcgcagagcttcagcaacgctctttaccttcaggatggagacaagaactgcctggtt

SEQ ID NO: 3228 - DNA, 201 bp, Homo sapiens
ttgctaagaaacggagcttccacaaaccagatagaggttctccagcttttctttgattgtctctgctttagcgtctctaaatccggtcaccatgtcggacyccgaaggcgagaccttgcgaagcacctttccctcttatatggccgaaggcgagcggctctacctgtgcggggaattttctaaagccgcgcagagcttcag

SEQ ID NO: 3229 - DNA, 201 bp, Homo sapiens; identical to SEQ ID NO: 3226

SEQ ID NO: 3230 - DNA, 201 bp, Homo sapiens; identical to SEQ ID NO: 3227

SEQ ID NO: 3231 - DNA, 201 bp, Homo sapiens
caccctggagaagacctggctgttccacgagatcggccgctgctacttggagctggaccaggcctggcaggcccagaattatggcgagaagtcccagcagwgtgccgaggaggaaggggacattgagtggcaactgaatgccagtgttctggtggcccaggcacaagtgaagctgagagacttcgagtcagccgtgaacaa

SEQ ID NO: 3232 - DNA, 201 bp, Homo sapiens
agaagactgtccgccagcttctgggggagctctacgtggacaaagagtatttggagaagctcctattggatgaagacctgatcaaaggcaccatgaagggyggcctgactgtggaggacctcatcatgacgggcatcaactacctggatactcacagcaacttctggaggcagcagaagccgatctacgccagggagcggg

SEQ ID NO: 3233 - DNA, 201 bp, Homo sapiens; identical to SEQ ID NO: 3228

SEQ ID NO: 3234 - DNA, 201 bp, Homo sapiens
attaaagctggaggagagttatgacttggagcctttccttcgaagattaggaatgatcgatgcttttgacgaagccaaggcagacttttctggaatgtcarctgagaagaatgtgcctctgtccaaggttgcccacaagtgcttcgtggaggtcaatgaggaaggcacagaggctgccgcagccactgctgtggtcaggaa

SEQ ID NO: 3235 - DNA, 201 bp, Homo sapiens
gcagcaggagaccttctctgatggatgacctctgtgaagcaaatggcacttttgccatcagcttatttaaaatattgggggaagaggacaactcaagaaaygtattcttctctcccatgagcatctcctctgccctggccatggtcttcatgggggcaaagggaagcactgcagcccagatgtcccaggcactttgtttat

SEQ ID NO: 3236 - DNA, 201 bp, Homo sapiens
acagaggctgccgcagccactgctgtggtcaggaattcccggtgcagcagaatggagccaagattctgtgcagaccacccttttcttttcttcatcaggcrccacaaaaccaactgcatcttgttctgtggcaggttctcttctccgtaaagaggagcaattgctgtacataccctcctttccttctacctatcttgcctt

SEQ ID NO: 3237 - DNA, 201 bp, Homo sapiens
atctcctctgccctggccatggtcttcatgggggcaaagggaagcactgcagcccagatgtcccaggcactttgtttatacaaagacggagatattcaccraggtttccagtcacttctcagtgaagttaacagaactggcactcagtacttgcttagaactgccaacagactctttggagaaaagacgtgtgatttcctt

SEQ ID NO: 3238 - DNA, 201 bp, Homo sapiens
tttgacagaaagtacacaaggggaatgctctttaaaaccaacgaggaaaaaaagacagtgcagatgatgtttaaggaagctaagtttaaaatggggtatgyggatgaggtacacacccaggtcctggagctgccctatgtggaagaggagctgagcatggtcattctgcttcccgatgacaacacggacctcgccgtggtg

SEQ ID NO: 3239 - DNA, 201 bp, Homo sapiens
ctttccttcgaagattaggaatgatcgatgcttttgacgaagccaaggcagacttttctggaatgtcaactgagaagaatgtgcctctgtccaaggttgcycacaagtgcttcgtggaggtcaatgaggaaggcacagaggctgccgcagccactgctgtggtcaggaattcccggtgcagcagaatggagccaagattct

SEQ ID NO: 3240 - DNA, 201 bp, Homo sapiens
aagagtgcaggaagcatataaatgactgggtggcagagaagactgaaggtaagatttcagaggtactggatgctgggacagtcgatcccctgacaaagctrgtccttgtgaatgccatttatttcaagggaaagtggaatgagcaatttgacagaaagtacacaaggggaatgctctttaaaaccaacgaggaaaaaaaga

SEQ ID NO: 3241 - DNA, 201 bp, Homo sapiens
agaatgtgcctctgtccaaggttgcccacaagtgcttcgtggaggtcaatgaggaaggcacagaggctgccgcagccactgctgtggtcaggaattcccgrtgcagcagaatggagccaagattctgtgcagaccacccttttcttttcttcatcaggcaccacaaaaccaactgcatcttgttctgtggcaggttctctt

SEQ ID NO: 3242 - DNA, 201 bp, Homo sapiens
cactttaggactgagctaggaggcaaatatctgaagcttgctatgctgttctttccattccttttccctctgaaacacacaaaataccaaaggaacttacrcaacacaccactgagtcctctaactaatcatatgtgctcagacacagctcaagcacaccccttagttaagaaagaacctccatatacattaatttttttc

SEQ ID NO: 3243 - DNA, 201 bp, Homo sapiens
ctgaagagtgcaggaagcatataaatgactgggtggcagagaagactgaaggtaagatttcagaggtactggatgctgggacagtcgatcccctgacaaasctggtccttgtgaatgccatttatttcaagggaaagtggaatgagcaatttgacagaaagtacacaaggggaatgctctttaaaaccaacgaggaaaaaa

SEQ ID NO: 3244 - DNA, 201 bp, Homo sapiens
actgtgtggctggatttctataattgaatctaattttagacagtttgagtaattaaaattatttctattaacaaataatagattgctaataatatatattrtgctgttttggatatactaaatatttgctcacatccttaatatattttttaaaattcctaacaatagtactgttgagataaaagttgagcacattttgag

SEQ ID NO: 3245 - DNA, 201 bp, Homo sapiens
atggagatattcatcgaggttttcagtcacttcttgttgcaattaacagaactgacactgaatatgtgcttagaactgccaacgggctctttggagaaaartcttatgatttcctcacaggttttacagattcctgtggcaaattctaccaagcaacgataaaacagctagactttgtgaatgatacagagaagtccacaa

SEQ ID NO: 3246 - DNA, 201 bp, Homo sapiens; identical to SEQ ID NO: 3234

SEQ ID NO: 3247 - DNA, 201 bp, Homo sapiens
aaaactaaagaccttctctgatggatgacctctgtgaagcaaatggcacttttgccatcagcttatttaaaatattgggggaagaggacaactcaagaaaygtattcttctctcccatgagcatctcctctgccctggccatggtcttcatgggggcaaagggaagcactgcagcccagatgtcccaggcactttgtttat

SEQ ID NO: 3248 - DNA, 201 bp, Homo sapiens; identical to SEQ ID NO: 3245

SEQ ID NO: 3249 - DNA, 201 bp, Homo sapiens; identical to SEQ ID NO: 3236

SEQ ID NO: 3250 - DNA, 201 bp, Homo sapiens; identical to SEQ ID NO: 3237

SEQ ID NO: 3251 - DNA, 201 bp, Homo sapiens; identical to SEQ ID NO: 3238

SEQ ID NO: 3252 - DNA, 201 bp, Homo sapiens; identical to SEQ ID NO: 3239

SEQ ID NO: 3253 - DNA, 201 bp, Homo sapiens; identical to SEQ ID NO: 3240

SEQ ID NO: 3254 - DNA, 201 bp, Homo sapiens; identical to SEQ ID NO: 3241

SEQ ID NO: 3255 - DNA, 201 bp, Homo sapiens; identical to SEQ ID NO: 3242

SEQ ID NO: 3256 - DNA, 201 bp, Homo sapiens; identical to SEQ ID NO: 3243

SEQ ID NO: 3257 - DNA, 201 bp, Homo sapiens; identical to SEQ ID NO: 3244

SEQ ID NO: 3258 - DNA, 201 bp, Homo sapiens
tcaatgagtgtcttgagagcccaggcatttgttcaaatggtcaatgtatcaacaccgacggatcttttcgctgtgaatgtccaatgggctacaaccttgaytacactggagtacgctgtgtggatactgatgagtgttcaatcggcaatccgtgtggaaatggtacatgcaccaatgttattgggagttttgaatgcaatt

SEQ ID NO: 3259 - DNA, 201 bp, Homo sapiens
aaccgaggggatgttcttactgggcggccattttacaaagacatcaatgaatgcaaagcatttcctgggatgtgcacttatgggaagtgcagaaatacaaycggaagcttcaaatgccgttgcaatagtggctttgctctagacatggaggaaagaaactgcacggacatcgacgagtgcaggatttctcctgacctctgt

SEQ ID NO: 3260 - DNA, 201 bp, Homo sapiens
gtgggtctcaaccttcgctttgtggagcaaagggaatctgtcaaaacactccaggcagtttcagctgtgaatgccaaagagggttctctcttgatgccacyggactgaactgtgaagatgttgatgaatgtgatgggaaccacaggtgccaacacggctgccagaacatcctgggtggctacagatgtggctgcccccaag

SEQ ID NO: 3261 - DNA, 201 bp, Homo sapiens
acaagaagaaggagcttaagaaactggaagagagcaatgaggatgactacctcctaggggagcttggggaggctctcagaatgaggctgcagattcagctstattaacccttcacagacttgggcccaggctcaaatcctagcacagccagtctgcagaagcatttgaaaagtcaaggactaattttaaagaggaaaaata

SEQ ID NO: 3262 - DNA, 201 bp, Homo sapiens
cgagaactgcattgatataaatgaatgtgatgaagatcccaacatttgtctttttggttcctgtactaatactccagggggcttccagtgcctctgccccsctggctttgtactatctgataatggacggagatgctttgatactcgccagagcttctgcttcacaaattttgaaaatggaaagtgttctgtacccaaagc

SEQ ID NO: 3263 - DNA, 201 bp, Homo sapiens
ccccgaaaccatgcaactacatctgcaagaacactgaggggagttatcagtgttcatgtccgagggggtatgtcctgcaagaggatggaaagacatgcaargaccttgatgaatgtcaaacaaagcagcataactgccagttcctctgtgtcaacaccctgggggggtttacctgtaaatgtccacctggtttcacacagc

SEQ ID NO: 3264 - DNA, 201 bp, Homo sapiens
ttgacattcacacaggaaaagctgttgacattgatgaatgtaaagagattccaggcatttgtgcaaatggtgtgtgcattaaccagattggcagtttccgytgtgaatgccctacaggattcagttacaatgacctgctgttggtttgtgaagatatagatgagtgcagcaatggtgataatctctgccagcggaatgcag

SEQ ID NO: 3265 - DNA, 201 bp, Homo sapiens
gtgttgatctgcaaggaagttaccagtgcatctgccacaatggctttaaggcttctcaggaccagaccatgtgcatggatgttgatgagtgcgagcggcayccatgtggaaatggaacttgtaaaaacaccgttggatcctataactgtctgtgctacccagggtttgaactcactcataataatgattgcctggacatag

SEQ ID NO: 3266 - DNA, 201 bp, Homo sapiens
ggattggaaacggcatcaagtgtattgatctggacgaatgttctaatggaacccaccagtgtagcatcaatgctcagtgtgtaaataccccgggctcatamcgctgtgcctgctccgaaggtttcactggtgatggctttacctgctcagatgttgatgagtgtgcagaaaacataaacctctgtgagaacggacagtgcc

SEQ ID NO: 3267 - DNA, 201 bp, Homo sapiens
aaggattccagtcaagttcttcaggcactgaatgccttgacaatcgacagggtctctgctttgcagaggtactgcagacaatatgtcaaatggcatccagyagtcgcaatctcgtcactaagtcagaatgctgctgtgatggtgggcgaggctggggccaccagtgcgagctttgcccacttcctggaactgcccagtaca

SEQ ID NO: 3268 - DNA, 201 bp, Homo sapiens
tagtttgctttagtcatttaaaaagatattgtaccaggatgtgctattaagagcacgtatccattattcttctcaacccaagaacctgtttcctggaccartgaccaaacctcatatgtgaaatggccaaagcacatgcaggctcctggttgttcctctcaaacctgtgctgaccaaagattagtaaccagttatacccag

SEQ ID NO: 3269 - DNA, 201 bp, Homo sapiens
aagacatgaatgtcattagatcctttataacgtagatcgaagccaaagcagctcatttgtgacaacatttcatatcaccagacacaccaggcaacagaagwtgaagcacaaccactgtagcaaaataccttgactgcttgtgagaccattagcattgcaggccaaaccgtactgtatttccttctcataacctcaaggaac

SEQ ID NO: 3270 - DNA, 201 bp, Homo sapiens
aggagcttaagaaactggaagagagcaatgaggatgactacctcctaggggagcttggggaggctctcagaatgaggctgcagattcagctctattaaccsttcacagacttgggcccaggctcaaatcctagcacagccagtctgcagaagcatttgaaaagtcaaggactaattttaaagaggaaaaataataataact

SEQ ID NO: 3271 - DNA, 201 bp, Homo sapiens
ccgttcctggaaagttccgcatggatgcctgctgctgtgctgtcggggcggcttggggcaccgagtgtgaggagtgccccaaacctggcaccaaggaataygagacgctgtgcccccgcggggctggctttgctaaccgaggggatgttcttactgggcggccattttacaaagacatcaatgaatgcaaagcatttcctg

SEQ ID NO: 3272 - DNA, 201 bp, Homo sapiens
ggaaacggcatcaagtgtattgatctggacgaatgttctaatggaacccaccagtgtagcatcaatgctcagtgtgtaaataccccgggctcataccgctstgcctgctccgaaggtttcactggtgatggctttacctgctcagatgttgatgagtgtgcagaaaacataaacctctgtgagaacggacagtgccttaat

SEQ ID NO: 3273 - DNA, 201 bp, Homo sapiens
gggatttaacaaggggcagtacctgtcactggatacagaggtcgatgaggaaaatgctctgtccccagaagcatgctacgagtgcaaaatcaacggctatyctaagaaagacagcaggcagaagagaagtattcatgaacctgatcccactgctgttgaacagatcagcctagagagtgtcgacatggacagccccgtcaa

SEQ ID NO: 3274 - DNA, 201 bp, Homo sapiens
ggatgcctgctgctgtgctgtcggggcggcttggggcaccgagtgtgaggagtgccccaaacctggcaccaaggaatacgagacgctgtgcccccgcgggkctggctttgctaaccgaggggatgttcttactgggcggccattttacaaagacatcaatgaatgcaaagcatttcctgggatgtgcacttatgggaagtg

SEQ ID NO: 3275 - DNA, 201 bp, Homo sapiens
ctgtgagcggtgtgaactagatacagcttgcccaagagggcttgccaggattaaaggtgttacgtgtgaagatgttaatgagtgtgaggtgttccctggcrtttgtccaaatggacgctgtgtcaacagtaagggatcttttcattgcgagtgccctgaaggccttacgttggatgggactggccgtgtatgtttggatat

SEQ ID NO: 3276 - DNA, 201 bp, Homo sapiens
gaacctatcagtgctcttgcaatcctggatatcaggctacgccagaccgccagggctgtacagatattgatgaatgtatgataatgaacggaggctgtgayacccagtgcacaaattcagagggaagctacgaatgcagctgcagtgagggttatgccctgatgccagatgggagatcgtgtgcagacattgatgaatgtg

SEQ ID NO: 3277 - DNA, 201 bp, Homo sapiens
tcaacagtaagggatcttttcattgcgagtgccctgaaggccttacgttggatgggactggccgtgtatgtttggatattcgcatggagcagtgttacttraagtgggatgaagatgaatgcatccaccccgttcctggaaagttccgcatggatgcctgctgctgtgctgtcggggcggcttggggcaccgagtgtgagg

SEQ ID NO: 3278 - DNA, 201 bp, Homo sapiens
ttattttgaatcaaacccaggcatcctatcatttcatctataaagactttagttcctaaaagtggaattgctggatcaaagggtaaaggcataggcaattytagagcatttagatttaatgtgatggacaggaatgaaccatgaagccacgagtgtttgatttttaaattgtgatattccactaaatgagaaatgaccagg

SEQ ID NO: 3279 - DNA, 201 bp, Homo sapiens
ccagtagtcgcaatctcgtcactaagtcagaatgctgctgtgatggtgggcgaggctggggccaccagtgcgagctttgcccacttcctggaactgcccaktacaaaaagatatgtcctcatggcccaggatatacaactgatggaagagatattgatgaatgtaaggtaatgccaaacctctgcaccaatggtcagtgca

SEQ ID NO: 3280 - DNA, 201 bp, Homo sapiens
gcctgaaggggacctgttggctcaacatccaggacagccgctgtgaggtgaatattaatggagccactctgaaatctgaatgctgtgccaccctcggagcygcctgggggagcccctgtgagcggtgtgaactagatacagcttgcccaagagggcttgccaggattaaaggtgttacgtgtgaagatgttaatgagtgtg

SEQ ID NO: 3281 - DNA, 201 bp, Homo sapiens
gcctgctgctgtgctgtcggggcggcttggggcaccgagtgtgaggagtgccccaaacctggcaccaaggaatacgagacgctgtgcccccgcggggctgrctttgctaaccgaggggatgttcttactgggcggccattttacaaagacatcaatgaatgcaaagcatttcctgggatgtgcacttatgggaagtgcaga

SEQ ID NO: 3282 - DNA, 201 bp, Homo sapiens
tgtaagcatcatgctaacctttgtttaaatggacgctgtataccaactgtctcaagctaccgatgtgaatgcaacatgggttataagcaggatgcaaatgsagattgtatagatgttgatgaatgcacatcaaatccctgcactaatggagattgtgttaacacacctggttcctattattgtaaatgtcatgctggattc

SEQ ID NO: 3283 - DNA, 201 bp, Homo sapiens
tttgagccagggcccatgatgaattatatcaacgaatgtgcccagaacccactgctgtgtgctttccgctgcatgaacacttttgggtcctatgaatgcaygtgcccgattggctatgccctcagggaagatcaaaagatgtgcaaagatctggatgaatgtgctgaagggttacacgactgtgaatctaggggcatgatg

SEQ ID NO: 3284 - DNA, 201 bp, Homo sapiens
ctatgaaagtggcttcatgatgatgaagaactgcatggacattgacgaatgtgaacgtaaccctctcctttgtaggggtggcacctgtgtgaacactgagkgcagctttcagtgtgactgcccactgggacacgagctgtcaccatcccgtgaggactgtgtggatattaatgaatgctccctgagtgacaatctctgcag

SEQ ID NO: 3285 - DNA, 201 bp, Homo sapiens
tttcctttggttttctgccagtcatccagctgatacacacctgatgattttaaagaaagccacacagagctgaatgggcagtgtaatcaataatttaaaaracatgaatgtcattagatcctttataacgtagatcgaagccaaagcagctcatttgtgacaacatttcatatcaccagacacaccaggcaacagaagttg

SEQ ID NO: 3286 - DNA, 201 bp, Homo sapiens
atgtcaaatggcatccagtagtcgcaatctcgtcactaagtcagaatgctgctgtgatggtgggcgaggctggggccaccagtgcgagctttgcccacttmctggaactgcccagtacaaaaagatatgtcctcatggcccaggatatacaactgatggaagagatattgatgaatgtaaggtaatgccaaacctctgcac

SEQ ID NO: 3287 - DNA, 201 bp, Homo sapiens
atgagtgtgaaattggtgctcataactgcgacatgcatgcctcatgtctgaatatcccaggaagcttcaagtgtagctgcagagaaggctggattggaaayggcatcaagtgtattgatctggacgaatgttctaatggaacccaccagtgtagcatcaatgctcagtgtgtaaataccccgggctcataccgctgtgcct

SEQ ID NO: 3288 - DNA, 201 bp, Homo sapiens
caaatatctgcatgtttggggaatgtgagaacacaaagggatccttcatttgccactgtcagctgggttactcagtgaagaaggggaccacaggatgtacmgatgtggatgagtgtgaaattggtgctcataactgcgacatgcatgcctcatgtctgaatatcccaggaagcttcaagtgtagctgcagagaaggctgga

SEQ ID NO: 3289 - DNA, 201 bp, Homo sapiens
gccttaatgtcccgggtgcatatcgctgcgagtgtgagatgggcttcactccagcctcagacagcagatcctgccaagatattgatgaatgctccttccawaacatttgtgtctttggaacatgtaataacctgcctggaatgtttcattgcatctgcgatgatggttatgaattggacagaacaggagggaactgtacag

SEQ ID NO: 3290 - DNA, 201 bp, Homo sapiens
ccttcgaccagttctccagtgcctgccacgacgtgaatgagtgctcgtcctccaagaacccctgcaattacggctgctctaacacggaggggggctacctytgtggctgcccccctgggtattacagagtgggacaaggccactgtgtctcaggaatgggatttaacaaggggcagtacctgtcactggatacagaggtcg

SEQ ID NO: 3291 - DNA, 201 bp, Homo sapiens
caggctcctggttgttcctctcaaacctgtgctgaccaaagattagtaaccagttatacccagtattttgaggttttattgtttttttaataactaaaaaraaaaaaggaacagtgtaaatttgtaatcaagagtttgtgaggaaaaacttatggtttttggttttgtttgtttttgtaggtctgtgtatcaaatatgaca

SEQ ID NO: 3292 - DNA, 201 bp, Homo sapiens
cgctgtgtggatactgatgagtgttcaatcggcaatccgtgtggaaatggtacatgcaccaatgttattgggagttttgaatgcaattgcaatgaaggctytgagccagggcccatgatgaattatatcaacgaatgtgcccagaacccactgctgtgtgctttccgctgcatgaacacttttgggtcctatgaatgcacg

SEQ ID NO: 3293 - DNA, 201 bp, Homo sapiens
tcttctcaacccaagaacctgtttcctggaccagtgaccaaacctcatatgtgaaatggccaaagcacatgcaggctcctggttgttcctctcaaacctgygctgaccaaagattagtaaccagttatacccagtattttgaggttttattgtttttttaataactaaaaagaaaaaaggaacagtgtaaatttgtaatca

SEQ ID NO: 3294 - DNA, 201 bp, Homo sapiens
cacgtgcccgattggctatgccctcagggaagatcaaaagatgtgcaaagatctggatgaatgtgctgaagggttacacgactgtgaatctaggggcatgrtgtgtaagaatctaatcggcaccttcatgtgcatctgccctcctggaatggcccgaaggcccgatggagaaggctgtgtagatgaaaatgaatgcaggac

SEQ ID NO: 3295 - DNA, 201 bp, Homo sapiens
ccaggctcaaatcctagcacagccagtctgcagaagcatttgaaaagtcaaggactaattttaaagaggaaaaataataataactcttgtttctttcctcyctgtcttagactttgaatgttgaccctcacagggagggataatttagactctggtatggccaaagatttgagcacaaaggcaaccgtggttactgtattt

SEQ ID NO: 3296 - DNA, 201 bp, Homo sapiens
agtgctcttgcaatcctggatatcaggctacgccagaccgccagggctgtacagatattgatgaatgtatgataatgaacggaggctgtgacacccagtgsacaaattcagagggaagctacgaatgcagctgcagtgagggttatgccctgatgccagatgggagatcgtgtgcagacattgatgaatgtgaaaacaatc

SEQ ID NO: 3297 - DNA, 201 bp, Homo sapiens
accctctcctttgtaggggtggcacctgtgtgaacactgagggcagctttcagtgtgactgcccactgggacacgagctgtcaccatcccgtgaggactgkgtggatattaatgaatgctccctgagtgacaatctctgcagaaatggaaaatgtgtgaacatgattggaacctatcagtgctcttgcaatcctggatatc

SEQ ID NO: 3298 - DNA, 201 bp, Homo sapiens
actgtattttttatataacttcattttaaaatatattaaaagaaacctaaatgttcaagatatcagcatatggcactaaatgcacaaaaataatgtgagctttttttttttttcctgttagcagtctgtaacactttgggtattaatatatggagaaatgaacaaactatgtaaacaaaaagggaaactcacttgtttttc

SEQ ID NO: 3299 - DNA, 201 bp, Homo sapiens
gccagaccgccagggctgtacagatattgatgaatgtatgataatgaacggaggctgtgacacccagtgcacaaattcagagggaagctacgaatgcagcygcagtgagggttatgccctgatgccagatgggagatcgtgtgcagacattgatgaatgtgaaaacaatcctgatatctgtgatggcggccagtgtaccaa

SEQ ID NO: 3300 - DNA, 201 bp, Homo sapiens
tgtgtcaacaccctgggggggtttacctgtaaatgtccacctggtttcacacagcatcacactgcttgtatcgacaacaacgaatgtgggtctcaaccttygctttgtggagcaaagggaatctgtcaaaacactccaggcagtttcagctgtgaatgccaaagagggttctctcttgatgccaccggactgaactgtgaa

SEQ ID NO: 3301 - DNA, 201 bp, Homo sapiens
gagtgacaatctctgcagaaatggaaaatgtgtgaacatgattggaacctatcagtgctcttgcaatcctggatatcaggctacgccagaccgccagggcygtacagatattgatgaatgtatgataatgaacggaggctgtgacacccagtgcacaaattcagagggaagctacgaatgcagctgcagtgagggttatgc

SEQ ID NO: 3302 - DNA, 201 bp, Homo sapiens
gaggaaagaaactgcacggacatcgacgagtgcaggatttctcctgacctctgtggcagtggaatctgcgtcaatacaccgggcagctttgagtgcgagtkcttcgaaggctatgaaagtggcttcatgatgatgaagaactgcatggacattgacgaatgtgaacgtaaccctctcctttgtaggggtggcacctgtgtg

SEQ ID NO: 3303 - DNA, 201 bp, Homo sapiens; identical to SEQ ID NO: 3258

SEQ ID NO: 3304 - DNA, 201 bp, Homo sapiens; identical to SEQ ID NO: 3259

SEQ ID NO: 3305 - DNA, 201 bp, Homo sapiens; identical to SEQ ID NO: 3260

SEQ ID NO: 3306 - DNA, 201 bp, Homo sapiens; identical to SEQ ID NO: 3261

SEQ ID NO: 3307 - DNA, 201 bp, Homo sapiens; identical to SEQ ID NO: 3262

SEQ ID NO: 3308 - DNA, 201 bp, Homo sapiens; identical to SEQ ID NO: 3263

SEQ ID NO: 3309 - DNA, 201 bp, Homo sapiens; identical to SEQ ID NO: 3264

SEQ ID NO: 3310 - DNA, 201 bp, Homo sapiens; identical to SEQ ID NO: 3265

SEQ ID NO: 3311 - DNA, 201 bp, Homo sapiens; identical to SEQ ID NO: 3266

SEQ ID NO: 3312 - DNA, 201 bp, Homo sapiens; identical to SEQ ID NO: 3267

SEQ ID NO: 3313 - DNA, 201 bp, Homo sapiens; identical to SEQ ID NO: 3268

SEQ ID NO: 3314 - DNA, 201 bp, Homo sapiens; identical to SEQ ID NO: 3269

SEQ ID NO: 3315 - DNA, 201 bp, Homo sapiens; identical to SEQ ID NO: 3270

SEQ ID NO: 3316 - DNA, 201 bp, Homo sapiens; identical to SEQ ID NO: 3271

SEQ ID NO: 3317 - DNA, 201 bp, Homo sapiens; identical to SEQ ID NO: 3272

SEQ ID NO: 3318 - DNA, 201 bp, Homo sapiens; identical to SEQ ID NO: 3273

SEQ ID NO: 3319 - DNA, 201 bp, Homo sapiens; identical to SEQ ID NO: 3274

SEQ ID NO: 3320 - DNA, 201 bp, Homo sapiens; identical to SEQ ID NO: 3275

SEQ ID NO: 3321 - DNA, 201 bp, Homo sapiens; identical to SEQ ID NO: 3276

SEQ ID NO: 3322 - DNA, 201 bp, Homo sapiens; identical to SEQ ID NO: 3277

SEQ ID NO: 3323 - DNA, 201 bp, Homo sapiens; identical to SEQ ID NO: 3278

SEQ ID NO: 3324 - DNA, 201 bp, Homo sapiens; identical to SEQ ID NO: 3279

SEQ ID NO: 3325 - DNA, 201 bp, Homo sapiens; identical to SEQ ID NO: 3280

SEQ ID NO: 3326 - DNA, 201 bp, Homo sapiens; identical to SEQ ID NO: 3281

SEQ ID NO: 3327 - DNA, 201 bp, Homo sapiens; identical to SEQ ID NO: 3282

SEQ ID NO: 3328 - DNA, 201 bp, Homo sapiens
ccagggcccatgatgaattgtgaagatatcaacgaatgtgcccagaacccactgctgtgtgctttccgctgcatgaacacttttgggtcctatgaatgcaygtgcccgattggctatgccctcagggaagatcaaaagatgtgcaaagatctggatgaatgtgctgaagggttacacgactgtgaatctaggggcatgatg

SEQ ID NO: 3329 - DNA, 201 bp, Homo sapiens; identical to SEQ ID NO: 3284

SEQ ID NO: 3330 - DNA, 201 bp, Homo sapiens; identical to SEQ ID NO: 3285

SEQ ID NO: 3331 - DNA, 201 bp, Homo sapiens; identical to SEQ ID NO: 3286

SEQ ID NO: 3332 - DNA, 201 bp, Homo sapiens; identical to SEQ ID NO: 3287

SEQ ID NO: 3333 - DNA, 201 bp, Homo sapiens; identical to SEQ ID NO: 3288

SEQ ID NO: 3334 - DNA, 201 bp, Homo sapiens; identical to SEQ ID NO: 3289

SEQ ID NO: 3335 - DNA, 201 bp, Homo sapiens; identical to SEQ ID NO: 3290

SEQ ID NO: 3336 - DNA, 201 bp, Homo sapiens; identical to SEQ ID NO: 3291

SEQ ID NO: 3337 - DNA, 201 bp, Homo sapiens
cgctgtgtggatactgatgagtgttcaatcggcaatccgtgtggaaatggtacatgcaccaatgttattgggagttttgaatgcaattgcaatgaaggctytgagccagggcccatgatgaattgtgaagatatcaacgaatgtgcccagaacccactgctgtgtgctttccgctgcatgaacacttttgggtcctatgaa

SEQ ID NO: 3338 - DNA, 201 bp, Homo sapiens; identical to SEQ ID NO: 3293

SEQ ID NO: 3339 - DNA, 201 bp, Homo sapiens; identical to SEQ ID NO: 3294

SEQ ID NO: 3340 - DNA, 201 bp, Homo sapiens; identical to SEQ ID NO: 3295

SEQ ID NO: 3341 - DNA, 201 bp, Homo sapiens; identical to SEQ ID NO: 3296

SEQ ID NO: 3342 - DNA, 201 bp, Homo sapiens; identical to SEQ ID NO: 3297

SEQ ID NO: 3343 - DNA, 201 bp, Homo sapiens
actgtattttttatataacttcattttaaaatatattaaaagaaacctaaatgttcaagatatcagcatatggcactaaatgcacaaaaataatgtgagctttttttttttttcctgttagcagtctgtaacactttgggtattttgctatagttgctaattaaaaaaatatagatgtttatttatttttaatgcagtaat

SEQ ID NO: 3344 - DNA, 201 bp, Homo sapiens; identical to SEQ ID NO: 3299

SEQ ID NO: 3345 - DNA, 201 bp, Homo sapiens; identical to SEQ ID NO: 3300

SEQ ID NO: 3346 - DNA, 201 bp, Homo sapiens; identical to SEQ ID NO: 3301

SEQ ID NO: 3347 - DNA, 201 bp, Homo sapiens; identical to SEQ ID NO: 3302

SEQ ID NO: 3348 - DNA, 201 bp, Homo sapiens; identical to SEQ ID NO: 3258

SEQ ID NO: 3349 - DNA, 201 bp, Homo sapiens; identical to SEQ ID NO: 3259

SEQ ID NO: 3350 - DNA, 130 bp, Homo sapiens
gtgggtctcaaccttcgctttgtggagcaaagggaatctgtcaaaacactccaggcagtttcagctgtgaatgccaaagagggttctctcttgatgccacyggactgaactgtgaaggttagttgatttg

SEQ ID NO: 3351 - DNA, 201 bp, Homo sapiens; identical to SEQ ID NO: 3262

SEQ ID NO: 3352 - DNA, 201 bp, Homo sapiens; identical to SEQ ID NO: 3264

SEQ ID NO: 3353 - DNA, 201 bp, Homo sapiens; identical to SEQ ID NO: 3263

SEQ ID NO: 3354 - DNA, 201 bp, Homo sapiens; identical to SEQ ID NO: 3265

SEQ ID NO: 3355 - DNA, 201 bp, Homo sapiens; identical to SEQ ID NO: 3266

SEQ ID NO: 3356 - DNA, 201 bp, Homo sapiens; identical to SEQ ID NO: 3267

SEQ ID NO: 3357 - DNA, 201 bp, Homo sapiens; identical to SEQ ID NO: 3271

SEQ ID NO: 3358 - DNA, 201 bp, Homo sapiens; identical to SEQ ID NO: 3272

SEQ ID NO: 3359 - DNA, 201 bp, Homo sapiens; identical to SEQ ID NO: 3275

SEQ ID NO: 3360 - DNA, 201 bp, Homo sapiens; identical to SEQ ID NO: 3274

SEQ ID NO: 3361 - DNA, 201 bp, Homo sapiens; identical to SEQ ID NO: 3276

SEQ ID NO: 3362 - DNA, 201 bp, Homo sapiens; identical to SEQ ID NO: 3277

SEQ ID NO: 3363 - DNA, 201 bp, Homo sapiens; identical to SEQ ID NO: 3278

SEQ ID NO: 3364 - DNA, 201 bp, Homo sapiens; identical to SEQ ID NO: 3279

SEQ ID NO: 3365 - DNA, 201 bp, Homo sapiens; identical to SEQ ID NO: 3280

SEQ ID NO: 3366 - DNA, 201 bp, Homo sapiens; identical to SEQ ID NO: 3282

SEQ ID NO: 3367 - DNA, 201 bp, Homo sapiens; identical to SEQ ID NO: 3281

SEQ ID NO: 3368 - DNA, 201 bp, Homo sapiens; identical to SEQ ID NO: 3328

SEQ ID NO: 3369 - DNA, 201 bp, Homo sapiens; identical to SEQ ID NO: 3284

SEQ ID NO: 3370 - DNA, 201 bp, Homo sapiens; identical to SEQ ID NO: 3286

SEQ ID NO: 3371 - DNA, 201 bp, Homo sapiens; identical to SEQ ID NO: 3287

SEQ ID NO: 3372 - DNA, 201 bp, Homo sapiens; identical to SEQ ID NO: 3288

SEQ ID NO: 3373 - DNA, 201 bp, Homo sapiens; identical to SEQ ID NO: 3289

SEQ ID NO: 3374 - DNA, 201 bp, Homo sapiens; identical to SEQ ID NO: 3337

SEQ ID NO: 3375 - DNA, 201 bp, Homo sapiens; identical to SEQ ID NO: 3294

SEQ ID NO: 3376 - DNA, 201 bp, Homo sapiens; identical to SEQ ID NO: 3297

SEQ ID NO: 3377 - DNA, 201 bp, Homo sapiens; identical to SEQ ID NO: 3296

SEQ ID NO: 3378 - DNA, 201 bp, Homo sapiens; identical to SEQ ID NO: 3301

SEQ ID NO: 3379 - DNA, 201 bp, Homo sapiens; identical to SEQ ID NO: 3299

SEQ ID NO: 3380 - DNA, 201 bp, Homo sapiens; identical to SEQ ID NO: 3300

SEQ ID NO: 3381 - DNA, 201 bp, Homo sapiens; identical to SEQ ID NO: 3302

SEQ ID NO: 3382 - DNA, 201 bp, Homo sapiens; identical to SEQ ID NO: 3278

SEQ ID NO: 3383 - DNA, 201 bp, Homo sapiens; identical to SEQ ID NO: 3280

SEQ ID NO: 3384 - DNA, 201 bp, Homo sapiens; identical to SEQ ID NO: 3259

SEQ ID NO: 3385 - DNA, 201 bp, Homo sapiens; identical to SEQ ID NO: 3281

SEQ ID NO: 3386 - DNA, 201 bp, Homo sapiens; identical to SEQ ID NO: 3282

SEQ ID NO: 3387 - DNA, 201 bp, Homo sapiens; identical to SEQ ID NO: 3284

SEQ ID NO: 3388 - DNA, 201 bp, Homo sapiens; identical to SEQ ID NO: 3266

SEQ ID NO: 3389 - DNA, 201 bp, Homo sapiens; identical to SEQ ID NO: 3287

SEQ ID NO: 3390 - DNA, 201 bp, Homo sapiens; identical to SEQ ID NO: 3288

SEQ ID NO: 3391 - DNA, 201 bp, Homo sapiens
atgaagttttcctggccaagagccagtagttggaagtttggatcattcttttttcttttttaaccatttcttctcttctttctcttttttatcactaaatkaatgacatgtggagaaactattcagcttttaaagtatgctccattacttgtctcaactaccactatttattgtgtttatcaaaatcataaaaagctcatt

SEQ ID NO: 3392 - DNA, 201 bp, Homo sapiens
catagcacatgctgcactataaaagtcattcgtttaagcgtggattattttgccgaatgaataatgatgatggcggctttcatctcttatgaagttttccyggccaagagccagtagttggaagtttggatcattcttttttcttttttaaccatttcttctcttctttctcttttttatcactaaatgaatgacatgtgg

SEQ ID NO: 3393 - DNA, 201 bp, Homo sapiens; identical to SEQ ID NO: 3271

SEQ ID NO: 3394 - DNA, 201 bp, Homo sapiens; identical to SEQ ID NO: 3272

SEQ ID NO: 3395 - DNA, 201 bp, Homo sapiens; identical to SEQ ID NO: 3296

SEQ ID NO: 3396 - DNA, 201 bp, Homo sapiens; identical to SEQ ID NO: 3297

SEQ ID NO: 3397 - DNA, 201 bp, Homo sapiens; identical to SEQ ID NO: 3301

SEQ ID NO: 3398 - DNA, 201 bp, Homo sapiens; identical to SEQ ID NO: 3299

SEQ ID NO: 3399 - DNA, 201 bp, Homo sapiens; identical to SEQ ID NO: 3274

SEQ ID NO: 3400 - DNA, 201 bp, Homo sapiens; identical to SEQ ID NO: 3302

SEQ ID NO: 3401 - DNA, 201 bp, Homo sapiens; identical to SEQ ID NO: 3275

SEQ ID NO: 3402 - DNA, 201 bp, Homo sapiens; identical to SEQ ID NO: 3276

SEQ ID NO: 3403 - DNA, 201 bp, Homo sapiens; identical to SEQ ID NO: 3277

SEQ ID NO: 3404 - DNA, 201 bp, Homo sapiens; identical to SEQ ID NO: 3258

SEQ ID NO: 3405 - DNA, 201 bp, Homo sapiens; identical to SEQ ID NO: 3259

SEQ ID NO: 3406 - DNA, 201 bp, Homo sapiens; identical to SEQ ID NO: 3260

SEQ ID NO: 3407 - DNA, 201 bp, Homo sapiens; identical to SEQ ID NO: 3261

SEQ ID NO: 3408 - DNA, 201 bp, Homo sapiens; identical to SEQ ID NO: 3262

SEQ ID NO: 3409 - DNA, 201 bp, Homo sapiens; identical to SEQ ID NO: 3263

SEQ ID NO: 3410 - DNA, 201 bp, Homo sapiens; identical to SEQ ID NO: 3264

SEQ ID NO: 3411 - DNA, 201 bp, Homo sapiens; identical to SEQ ID NO: 3265

SEQ ID NO: 3412 - DNA, 201 bp, Homo sapiens; identical to SEQ ID NO: 3266

SEQ ID NO: 3413 - DNA, 201 bp, Homo sapiens; identical to SEQ ID NO: 3267

SEQ ID NO: 3414 - DNA, 201 bp, Homo sapiens; identical to SEQ ID NO: 3268

SEQ ID NO: 3415 - DNA, 201 bp, Homo sapiens; identical to SEQ ID NO: 3269

SEQ ID NO: 3416 - DNA, 201 bp, Homo sapiens; identical to SEQ ID NO: 3270

SEQ ID NO: 3417 - DNA, 201 bp, Homo sapiens; identical to SEQ ID NO: 3271

SEQ ID NO: 3418 - DNA, 201 bp, Homo sapiens; identical to SEQ ID NO: 3272

SEQ ID NO: 3419 - DNA, 201 bp, Homo sapiens; identical to SEQ ID NO: 3273

SEQ ID NO: 3420 - DNA, 201 bp, Homo sapiens; identical to SEQ ID NO: 3274

SEQ ID NO: 3421 - DNA, 201 bp, Homo sapiens; identical to SEQ ID NO: 3275

SEQ ID NO: 3422 - DNA, 201 bp, Homo sapiens; identical to SEQ ID NO: 3276

SEQ ID NO: 3423 - DNA, 201 bp, Homo sapiens; identical to SEQ ID NO: 3277

SEQ ID NO: 3424 - DNA, 201 bp, Homo sapiens; identical to SEQ ID NO: 3279

SEQ ID NO: 3425 - DNA, 201 bp, Homo sapiens; identical to SEQ ID NO: 3280

SEQ ID NO: 3426 - DNA, 201 bp, Homo sapiens; identical to SEQ ID NO: 3281

SEQ ID NO: 3427 - DNA, 201 bp, Homo sapiens; identical to SEQ ID NO: 3282

SEQ ID NO: 3428 - DNA, 201 bp, Homo sapiens; identical to SEQ ID NO: 3328

SEQ ID NO: 3429 - DNA, 201 bp, Homo sapiens; identical to SEQ ID NO: 3284

SEQ ID NO: 3430 - DNA, 201 bp, Homo sapiens; identical to SEQ ID NO: 3285

SEQ ID NO: 3431 - DNA, 201 bp, Homo sapiens; identical to SEQ ID NO: 3286

SEQ ID NO: 3432 - DNA, 201 bp, Homo sapiens; identical to SEQ ID NO: 3287

SEQ ID NO: 3433 - DNA, 201 bp, Homo sapiens; identical to SEQ ID NO: 3288

SEQ ID NO: 3434 - DNA, 201 bp, Homo sapiens; identical to SEQ ID NO: 3290

SEQ ID NO: 3435 - DNA, 201 bp, Homo sapiens; identical to SEQ ID NO: 3289

SEQ ID NO: 3436 - DNA, 201 bp, Homo sapiens; identical to SEQ ID NO: 3291

SEQ ID NO: 3437 - DNA, 201 bp, Homo sapiens; identical to SEQ ID NO: 3337

SEQ ID NO: 3438 - DNA, 201 bp, Homo sapiens; identical to SEQ ID NO: 3293

SEQ ID NO: 3439 - DNA, 201 bp, Homo sapiens; identical to SEQ ID NO: 3294

SEQ ID NO: 3440 - DNA, 201 bp, Homo sapiens; identical to SEQ ID NO: 3295

SEQ ID NO: 3441 - DNA, 201 bp, Homo sapiens; identical to SEQ ID NO: 3296

SEQ ID NO: 3442 - DNA, 201 bp, Homo sapiens; identical to SEQ ID NO: 3297

SEQ ID NO: 3443 - DNA, 201 bp, Homo sapiens; identical to SEQ ID NO: 3343

SEQ ID NO: 3444 - DNA, 201 bp, Homo sapiens; identical to SEQ ID NO: 3299

SEQ ID NO: 3445 - DNA, 201 bp, Homo sapiens; identical to SEQ ID NO: 3300

SEQ ID NO: 3446 - DNA, 201 bp, Homo sapiens; identical to SEQ ID NO: 3301

SEQ ID NO: 3447 - DNA, 201 bp, Homo sapiens; identical to SEQ ID NO: 3302

SEQ ID NO: 3448 - DNA, 182 bp, Homo sapiens
ggttgcagtgagccgacatcacgccactgctctccagcttggggaacagagcaaacctccgtctcaaaaaaaaaaaaaaaaatctagggaagttgaaaacattttgcagtcaaagctatctttgctatctgcatcttgaaataaaataaacattcatacatgtaacctcattaatctgatta

SEQ ID NO: 3449 - DNA, 201 bp, Homo sapiens
aagggagcttctgtgcatcgcctgagagcagcagggatgacttccaggagggaagggagggcattgtggcccggctaacagagagcctgttcctggacctkctcggagaggagaatgggggcttttgccagcaggacatgggggagtcatgccttcttccaccttcgggaagtacgagtgctcacatgccctgggatgagt

SEQ ID NO: 3450 - DNA, 201 bp, Homo sapiens
gggaagggagggcattgtggcccggctaacagagagcctgttcctggacctgctcggagaggagaatgggggcttttgccagcaggacatgggggagtcaygccttcttccaccttcgggaagtacgagtgctcacatgccctgggatgagttcccaagtgcagggcccaaggaggcacctccctggggcaaggagcagcc

SEQ ID NO: 3451 - DNA, 181 bp, Homo sapiens
ggttgcagtgagccgacatcacgccactgctctccagcttggggaacagagcaaacctccgtctcaaaaaaaaaaaaaaaaatctagggaagttgaaaacattttgcagtcaaagctatctttgctatctgcatcttgaaataaaataaacattcatacatgtaacctcattaatctgatt

SEQ ID NO: 3452 - DNA, 201 bp, Homo sapiens
gaagggagggcattgtggcccggctaacagagagcctgttcctggacctgctcggagaggagaatgggggcttttgccagcaggacatgggggagtcatgycttcttccaccttcgggaagtacgagtgctcacatgccctgggatgagttcccaagtgcagggcccaaggaggcacctccctggggcaaggagcagcctc

SEQ ID NO: 3453 - DNA, 201 bp, Homo sapiens
gccccggtggagtgtgaggaggaggaggaggtagaggaagaaaaagggagcttctgtgcatcgcctgagagcagcagggatgacttccaggagggaagggmgggcattgtggcccggctaacagagagcctgttcctggacctgctcggagaggagaatgggggcttttgccagcaggacatgggggagtcatgccttctt

SEQ ID NO: 3454 - DNA, 201 bp, Homo sapiens
gggagggcattgtggcccggctaacagagagcctgttcctggacctgctcggagaggagaatgggggcttttgccagcaggacatgggggagtcatgcctycttccaccttcgggaagtacgagtgctcacatgccctgggatgagttcccaagtgcagggcccaaggaggcacctccctggggcaaggagcagcctctcc

SEQ ID NO: 3455 - DNA, 201 bp, Homo sapiens
tgagccagaaacctgggagcagatcctccgccgaaatgtcctccagcatggggcagctgcagcccccgtctcggcccccaccagtggctatcaggagtttrtacatgcggtggagcagggtggcacccaggccagtgcggtggtgggcttgggtcccccaggagaggctggttacaaggccttctcaagcctgcttgccag

SEQ ID NO: 3456 - DNA, 201 bp, Homo sapiens
agggcattgtggcccggctaacagagagcctgttcctggacctgctcggagaggagaatgggggcttttgccagcaggacatgggggagtcatgccttctyccaccttcgggaagtacgagtgctcacatgccctgggatgagttcccaagtgcagggcccaaggaggcacctccctggggcaaggagcagcctctccacc

SEQ ID NO: 3457 - DNA, 201 bp, Homo sapiens
ccctggggaccctgccccagtccctgtccccttgttcacctttggactggacagggagccacctcgcagtccgcagagctcacatctcccaagcagctccycagagcacctgggtctggagccgggggaaaaggtagaggacatgccaaagcccccacttccccaggagcaggccacagacccccttgtggacagcctggg

SEQ ID NO: 3458 - DNA, 201 bp, Homo sapiens
caaaatcgtgaactttgtctccgtgggacccacatacatgagggtctcttaggtgcatgtcctcttgttgctgagtctgcagatgaggactagggcttatycatgcctgggaaatgccacctcctggaaggcagccaggctggcagatttccaaaagacttgaagaaccatggtatgaaggtgattggccccactgacgtt

SEQ ID NO: 3459 - DNA, 201 bp, Homo sapiens
actggaccccgcccagcattgggctgggctcgccacatcccatgagagtagagggcactgggtcgccgtgccccacggcaggcccctgcaggaaaactgargcccttgggcacctcgacttgtgaacgagttgttggctgctccctccacagcttctgcagcagactgtccctgttgtaactgcccaaggcatgttttgcc

SEQ ID NO: 3460 - DNA, 201 bp, Homo sapiens
gcccagcattgggctgggctcgccacatcccatgagagtagagggcactgggtcgccgtgccccacggcaggcccctgcaggaaaactgaggcccttgggmacctcgacttgtgaacgagttgttggctgctccctccacagcttctgcagcagactgtccctgttgtaactgcccaaggcatgttttgcccaccagatca

SEQ ID NO: 3461 - DNA, 201 bp, Homo sapiens
gagggtctcttaggtgcatgtcctcttgttgctgagtctgcagatgaggactagggcttatccatgcctgggaaatgccacctcctggaaggcagccaggstggcagatttccaaaagacttgaagaaccatggtatgaaggtgattggccccactgacgttggcctaacactgggctgcagagactggaccccgcccagc

SEQ ID NO: 3462 - DNA, 201 bp, Homo sapiens
ctgctctccagcttggggaacagagcaaacctccgtctcaaaaaaaaaaaaaaaaatctagggaagttgaaaacattttgcagtcaaagctatctttgctrtctgcatcttgaaataaaataaacattcatacatgtaacctcattaatctgattagagatagtgataagtactgggacagacataaacagggtgctgtga

SEQ ID NO: 3463 - DNA, 201 bp, Homo sapiens
catcctgcccctggcaatgctcagagctcaagccagacccccaaaatcgtgaactttgtctccgtgggacccacatacatgagggtctcttaggtgcatgycctcttgttgctgagtctgcagatgaggactagggcttatccatgcctgggaaatgccacctcctggaaggcagccaggctggcagatttccaaaagact

SEQ ID NO: 3464 - DNA, 201 bp, Homo sapiens
tccatcctgcccctggcaatgctcagagctcaagccagacccccaaaatcgtgaactttgtctccgtgggacccacatacatgagggtctcttaggtgcaygtcctcttgttgctgagtctgcagatgaggactagggcttatccatgcctgggaaatgccacctcctggaaggcagccaggctggcagatttccaaaaga

SEQ ID NO: 3465 - DNA, 201 bp, Homo sapiens
gactaaagcagggacaatttgctgccaaacacccatgcccagctgtatggctgggggctcctcgtatgcatggaacccccagaataaatatgctcagccaycctgtgggccgggcaatccagacagcaggcataaggcaccagttaccctgcatgttggcccagacctcaggtgctagggaaggcgggaaccttgggttga

SEQ ID NO: 3466 - DNA, 201 bp, Homo sapiens
ttcatttaacagagcttccttaggttgatgctggaggcagaatcccggctgtcaaggggtgttcagttaaggggagcaacagaggacatgaaaaattgctrtgactaaagcagggacaatttgctgccaaacacccatgcccagctgtatggctgggggctcctcgtatgcatggaacccccagaataaatatgctcagcc

SEQ ID NO: 3467 - DNA, 201 bp, Homo sapiens
ttgtgaacgagttgttggctgctccctccacagcttctgcagcagactgtccctgttgtaactgcccaaggcatgttttgcccaccagatcatggcccacrtggaggcccacctgcctctgtctcactgaactagaagccgagcctagaaactaacacagccatcaagggaatgacttgggcggccttgggaaatcgatga

SEQ ID NO: 3468 - DNA, 201 bp, Homo sapiens
ctcgccccctacaacccccctgagggccccagacccctctccaggtggggttccactggaggccagtctgtgtccggcctccctggcaccctcgggcatcycagagaagagtaaatcctcatcatccttccatcctgcccctggcaatgctcagagctcaagccagacccccaaaatcgtgaactttgtctccgtgggacc

SEQ ID NO: 3469 - DNA, 201 bp, Homo sapiens
atgtctccgacactctgctgctgacctggagcaacccgtatccccctgacaattacctgtataatcatctcacctatgcagtcaacatttggagtgaaaaygacccggcagatttcagaatctataacgtgacctacctagaaccctccctccgcatcgcagccagcaccctgaagtctgggatttcctacagggcacggg

SEQ ID NO: 3470 - DNA, 201 bp, Homo sapiens
ggagcttctgtgcatcgcctgagagcagcagggatgacttccaggagggaagggagggcattgtggcccggctaacagagagcctgttcctggacctgctyggagaggagaatgggggcttttgccagcaggacatgggggagtcatgccttcttccaccttcgggaagtacgagtgctcacatgccctgggatgagttcc

SEQ ID NO: 3471 - DNA, 201 bp, Homo sapiens
  misc_feature (1)...(201): n = A,T,C or G, or insertion/deletion polymorphism (see Tables 1-2)
ctctacttgcgagtggaagatgaatggtcccaccaattgcagcaccgagctccgcctgttgtaccagctggtttttctgctctccgaagcccacacgtgtntccctgagaacaacggaggcgcggggtgcgtgtgccacctgctcatggatgacgtggtcagtgcggataactatacactggacctgtgggctgggcagca

SEQ ID NO: 3472 - DNA, 201 bp, Homo sapiens
aactatacactggacctgtgggctgggcagcagctgctgtggaagggctccttcaagcccagcgagcatgtgaaacccagggccccaggaaacctgacagktcacaccaatgtctccgacactctgctgctgacctggagcaacccgtatccccctgacaattacctgtataatcatctcacctatgcagtcaacatttgg

SEQ ID NO: 3473 - DNA, 201 bp, Homo sapiens
gcattgtcatcctggccgtctgcctgttgtgctatgtcagcatcaccaagattaagaaagaatggtgggatcagattcccaacccagcccgcagccgcctsgtggctataataatccaggatgctcaggggtcacagtgggagaagcggtcccgaggccaggaaccagccaagtgcccacactggaagaattgtcttacca

SEQ ID NO: 3474 - DNA, 201 bp, Homo sapiens
aggatgctcaggggtcacagtgggagaagcggtcccgaggccaggaaccagccaagtgcccacactggaagaattgtcttaccaagctcttgccctgtttyctggagcacaacatgaaaagggatgaagatcctcacaaggctgccaaagagatgcctttccagggctctggaaaatcagcatggtgcccagtggagatca

SEQ ID NO: 3475 - DNA, 201 bp, Homo sapiens
caggtggggttccactggaggccagtctgtgtccggcctccctggcaccctcgggcatctcagagaagagtaaatcctcatcatccttccatcctgccccyggcaatgctcagagctcaagccagacccccaaaatcgtgaactttgtctccgtgggacccacatacatgagggtctcttaggtgcatgtcctcttgttgc

SEQ ID NO: 3476 - DNA, 201 bp, Homo sapiens
agcaacagaggacatgaaaaattgctgtgactaaagcagggacaatttgctgccaaacacccatgcccagctgtatggctgggggctcctcgtatgcatgsaacccccagaataaatatgctcagccaccctgtgggccgggcaatccagacagcaggcataaggcaccagttaccctgcatgttggcccagacctcaggt

SEQ ID NO: 3477 - DNA, 201 bp, Homo sapiens
actcctacagggagcccttcgagcagcacctcctgctgggcgtcagcgtttcctgcattgtcatcctggccgtctgcctgttgtgctatgtcagcatcacsaagattaagaaagaatggtgggatcagattcccaacccagcccgcagccgcctcgtggctataataatccaggatgctcaggggtcacagtgggagaagc

SEQ ID NO: 3478 - DNA, 201 bp, Homo sapiens
ccccaacctgagccagaaacctgggagcagatcctccgccgaaatgtcctccagcatggggcagctgcagcccccgtctcggcccccaccagtggctatcrggagtttgtacatgcggtggagcagggtggcacccaggccagtgcggtggtgggcttgggtcccccaggagaggctggttacaaggccttctcaagcctg

SEQ ID NO: 3479 - DNA, 201 bp, Homo sapiens
ccacctgtgcggccacctgaaacagtgtcatggccaggaggatggtggccagacccctgtcatggccagtccttgctgtggctgctgctgtggagacaggkcctcgccccctacaacccccctgagggccccagacccctctccaggtggggttccactggaggccagtctgtgtccggcctccctggcaccctcgggcat

SEQ ID NO: 3480 - DNA, 201 bp, Homo sapiens
aagtcctcctgccagcccgacccagagtccagacaacctgacttgcacagagacgcccctcgtcatcgcaggcaaccctgcttaccgcagcttcagcaacyccctgagccagtcaccgtgtcccagagagctgggtccagacccactgctggccagacacctggaggaagtagaacccgagatgccctgtgtcccccagct

SEQ ID NO: 3481 - DNA, 201 bp, Homo sapiens
gtggcccggctaacagagagcctgttcctggacctgctcggagaggagaatgggggcttttgccagcaggacatgggggagtcatgccttcttccaccttygggaagtacgagtgctcacatgccctgggatgagttcccaagtgcagggcccaaggaggcacctccctggggcaaggagcagcctctccacctggagcca

SEQ ID NO: 3482 - DNA, 201 bp, Homo sapiens
ggaattccacgcaccgatcagtactgggaaaagatctaatctgccgtgggcctgtcgtgccagtcctgggggcgagatcggggtagaaatgcattttattytttaagttcacgtaagatacaagtttcagacagggtctgaaggactggattggccaaacatcagacctgtcttccaaggagaccaagtcctggctacatc

SEQ ID NO: 3483 - DNA, 201 bp, Homo sapiens
acatgagctacttgaagaggctatgtggtaccttcctgggtgggcccaagccaccccagagagttatgtttaccgaggacctgaagctgcctgcaagcttygatgcacgggaacaatggccacagtgtcccaccatcaaagagatcagagaccagggctcctgtggctcctgctgggccttcggggctgtggaagccatct

SEQ ID NO: 3484 - DNA, 201 bp, Homo sapiens
gggagtacctgctgccccagctgactgtggccccctccgtgatccatccatctccagggagcaagacagagacgcaggaatggaaagcggagttcctaacrggatgaaagttcccccatcagttcccccagtacctccaagcaagtagctttccacatttgtcacagaaatcagaggagagatggtgttgggagccctttg

SEQ ID NO: 3485 - DNA, 139 bp, Homo sapiens
agctctgaaaatctgaggaacattgtaggaaaggtttgttaagcatctcttaagtgccatgatgagcataacagccggccgtggtggctcacgcctgtaakcccagcactttgggaggccaaggtgggaggatgacaag

SEQ ID NO: 3486 - DNA, 157 bp, Homo sapiens
cagatgctagatcaaataagctctgaaaatctgaggaacattgtaggaaaggtttgttaagcatctcttaagtgccatgatgagcataacagccggccgtsgtggctcacgcctgtaatcccagcactttgggaggccaaggtgggaggatgacaag

SEQ ID NO: 3487 - DNA, 201 bp, Homo sapiens
taagtgcctggtaagcttgcccttgcttaagaactcaaaacatagctgtgctctatttttttgttgttgttgtgactgacagagtgagattccgtctcccrggctggagtgcagtggcgccttctcagctcactgcaacctgcagcctcctagattcaagcgattctcctgcttcagccttccgagtagctgggatgacag

SEQ ID NO: 3488 - DNA, 201 bp, Homo sapiens
ctgtgctagttttacagattgcctccttatgacgcggctcaaaaggaaaccaagtggtcaggagttgtttctgacccactgatctctactaccacaaggaraatagtttaggagaaaccagcttttactgtttttgaaaaattacagcttcaccctgtcaagttaacaaggaatgcctgtgccaataaaaggtttctccaa

SEQ ID NO: 3489 - DNA, 201 bp, Homo sapiens
gaaaccaagtggtcaggagttgtttctgacccactgatctctactaccacaaggaaaatagtttaggagaaaccagcttttactgtttttgaaaaattacagcttcaccctgtcaagttaacaaggaatgcctgtgccaataaaaggtttctccaacttgaagtctactctgatgggatctcagatcctttgtcactgcct

SEQ ID NO: 3490 - DNA, 201 bp, Homo sapiens
ggagatacccccaagtgtagcaagatctgtgagcctggctacagcccgacctacaaacaggacaagcactacggatacaattcctacagcgtctccaatarcgagaaggacatcatggccgagatctacaaaaacggccccgtggagggagctttctctgtgtattcggacttcctgctctacaagtcaggagtgtaccaa

SEQ ID NO: 3491 - DNA, 201 bp, Homo sapiens
ttctttaatagaagttttattttttcgtgcactctgctaatcatgtgggtgagccagtggaacagcgggagacctgtgctagttttacagattgcctcctwatgacgcggctcaaaaggaaaccaagtggtcaggagttgtttctgacccactgatctctactaccacaaggaaaatagtttaggagaaaccagcttttac

SEQ ID NO: 3492 - DNA, 201 bp, Homo sapiens
ggaaaccaagtggtcaggagttgtttctgacccactgatctctactaccacaaggaaaatagtttaggagaaaccagcttttactgtttttgaaaaattacagcttcaccctgtcaagttaacaaggaatgcctgtgccaataaaaggtttctccaacttgaagtctactctgatgggatctcagatcctttgtcactgcc

SEQ ID NO: 3493 - DNA, 201 bp, Homo sapiens
tccttccccctgtagactagtgccgtagggagtacctgctgccccagctgactgtggccccctccgtgatccatccatctccagggagcaagacagagacscaggaatggaaagcggagttcctaacaggatgaaagttcccccatcagttcccccagtacctccaagcaagtagctttccacatttgtcacagaaatcag

SEQ ID NO: 3494 - DNA, 201 bp, Homo sapiens
catcccagcctgtggttacagtgcagacaggccatgtgagccaccgctgccagcacagagcgtccttccccctgtagactagtgccgtagggagtacctgytgccccagctgactgtggccccctccgtgatccatccatctccagggagcaagacagagacgcaggaatggaaagcggagttcctaacaggatgaaagtt

SEQ ID NO: 3495 - DNA, 201 bp, Homo sapiens
aaagttcccccatcagttcccccagtacctccaagcaagtagctttccacatttgtcacagaaatcagaggagagatggtgttgggagccctttggagaaygccagtctcccaggccccctgcatctatcgagtttgcaatgtcacaacctctctgatcttgtgctcagcatgattctttaatagaagttttattttttcg

SEQ ID NO: 3496 - DNA, 201 bp, Homo sapiens
tctggacaagaaaaggcctggtttctggtggcctctatgaatcccatgtagggtgcagaccgtactccatccctccctgtgagcaccacgtcaacggctcycggcccccatgcacgggggagggagatacccccaagtgtagcaagatctgtgagcctggctacagcccgacctacaaacaggacaagcactacggataca

SEQ ID NO: 3497 - DNA, 201 bp, Homo sapiens
catcaaagagatcagagaccagggctcctgtggctcctgctgggccttcggggctgtggaagccatctctgaccggatctgcatccacaccaatgcgcacrtcagcgtggaggtgtcggcggaggacctgctcacctgctgtggcagcatgtgtggggacggctgtaatggtggctatcctgctgaagcttggaacttctg

SEQ ID NO: 3498 - DNA, 201 bp, Homo sapiens
gagacctgtgctagttttacagattgcctccttatgacgcggctcaaaaggaaaccaagtggtcaggagttgtttctgacccactgatctctactaccacwaggaaaatagtttaggagaaaccagcttttactgtttttgaaaaattacagcttcaccctgtcaagttaacaaggaatgcctgtgccaataaaaggtttc

SEQ ID NO: 3499 - DNA, 201 bp, Homo sapiens
aatcgaatcagaagtggtggctggaattccacgcaccgatcagtactgggaaaagatctaatctgccgtgggcctgtcgtgccagtcctgggggcgagatsggggtagaaatgcattttattctttaagttcacgtaagatacaagtttcagacagggtctgaaggactggattggccaaacatcagacctgtcttccaag

SEQ ID NO: 3500 - DNA, 201 bp, Homo sapiens
cttaacttctcgctgccccagccatgttttcaaccatggcatccctcccccaattagttccctgtcatcctcgtcaaccttctctgtaagtgcctggtaarcttgcccttgcttaagaactcaaaacatagctgtgctctatttttttgttgttgttgtgactgacagagtgagattccgtctcccaggctggagtgcagt

SEQ ID NO: 3501 - DNA, 201 bp, Homo sapiens
gttcttggtatagagcaaactagaagaaccagcaatcattccactgtcctgccaaggtacacctcagtactccccttcccaactgaagtggtatgaggctrgctctttccaaaagcattcaagtttggcttctgatgtgactcagaatttaggaaccagatgctagatcaaataagctctgaaaatctgaggaacattgta

SEQ ID NO: 3502 - DNA, 201 bp, Homo sapiens
tgcaggctctcggctgcagcgctggatgtggcagctctgggcctccctctgctgcctgctggtgttggccaatgcccggagcaggccctctttccatcccstgtcggatgagctggtcaactatgtcaacaaacggaataccacgtggcaggccgggcacaacttctacaacgtggacatgagctacttgaagaggctatg

SEQ ID NO: 3503 - DNA, 201 bp, Homo sapiens
aagtggtcaggagttgtttctgacccactgatctctactaccacaaggaaaatagtttaggagaaaccagcttttactgtttttgaaaaattacagcttcmccctgtcaagttaacaaggaatgcctgtgccaataaaaggtttctccaacttgaagtctactctgatgggatctcagatcctttgtcactgcctatagac

SEQ ID NO: 3504 - DNA, 149 bp, Homo sapiens
agatcaaataagctctgaaaatctgaggaacattgtaggaaaggtttgttaagcatctcttaagtgccatgatgagcataacagccggccgtggtggctcrcgcctgtaatcccagcactttgggaggccaaggtgggaggatgacaag

SEQ ID NO: 3505 - DNA, 201 bp, Homo sapiens
cagggtctgaaggactggattggccaaacatcagacctgtcttccaaggagaccaagtcctggctacatcccagcctgtggttacagtgcagacaggccaygtgagccaccgctgccagcacagagcgtccttccccctgtagactagtgccgtagggagtacctgctgccccagctgactgtggccccctccgtgatcca

SEQ ID NO: 3506 - DNA, 201 bp, Homo sapiens
tgctgccccagctgactgtggccccctccgtgatccatccatctccagggagcaagacagagacgcaggaatggaaagcggagttcctaacaggatgaaasttcccccatcagttcccccagtacctccaagcaagtagctttccacatttgtcacagaaatcagaggagagatggtgttgggagccctttggagaacgcc

SEQ ID NO: 3507 - DNA, 201 bp, Homo sapiens
ggtttctccaacttgaagtctactctgatgggatctcagatcctttgtcactgcctatagacttgtagctgctgtctctctttgtccctgcagagaatcaygtcctggaactgcatgttcttgcgactcttgggacttcatcttaacttctcgctgccccagccatgttttcaaccatggcatccctcccccaattagttc

SEQ ID NO: 3508 - DNA, 201 bp, Homo sapiens
ttgcctccttatgacgcggctcaaaaggaaaccaagtggtcaggagttgtttctgacccactgatctctactaccacaaggaaaatagtttaggagaaacsagcttttactgtttttgaaaaattacagcttcaccctgtcaagttaacaaggaatgcctgtgccaataaaaggtttctccaacttgaagtctactctgat

SEQ ID NO: 3509 - DNA, 201 bp, Homo sapiens
tggtgtcttggtgatctcacataaccaagatgctaccccgtggggaaccacatccccctggatgccctccagccttggtttgggctggagtcagggcctgkatacagtattttgaatttgtatgccactggtttgcattgctggtcaggaactctagtgctttgcatagccctggtttagaaacatgttatagcagttctt

SEQ ID NO: 3510 - DNA, 201 bp, Homo sapiens
caaagtgttgggattacaggtgtgagccactgggccctgcctgtactttttatcagccacaaatccagcaacaagctgaggattcagctcataaaacaggyttggtgtcttggtgatctcacataaccaagatgctaccccgtggggaaccacatccccctggatgccctccagccttggtttgggctggagtcagggcct

SEQ ID NO: 3511 - DNA, 201 bp, Homo sapiens
caggccctctttccatcccctgtcggatgagctggtcaactatgtcaacaaacggaataccacgtggcaggccgggcacaacttctacaacgtggacatgrgctacttgaagaggctatgtggtaccttcctgggtgggcccaagccaccccagagagttatgtttaccgaggacctgaagctgcctgcaagcttcgatgc

SEQ ID NO: 3512 - DNA, 201 bp, Homo sapiens
tggccaggctagtttcaaactcccggcctcaggtggtctgcctgcctcagcctcccaaagtgttgggattacaggtgtgagccactgggccctgcctgtaytttttatcagccacaaatccagcaacaagctgaggattcagctcataaaacaggtttggtgtcttggtgatctcacataaccaagatgctaccccgtggg

SEQ ID NO: 3513 - DNA, 201 bp, Homo sapiens
gagccagtggaacagcgggagacctgtgctagttttacagattgcctccttatgacgcggctcaaaaggaaaccaagtggtcaggagttgtttctgacccmctgatctctactaccacaaggaaaatagtttaggagaaaccagcttttactgtttttgaaaaattacagcttcaccctgtcaagttaacaaggaatgcct

SEQ ID NO: 3514 - DNA, 201 bp, Homo sapiens
aagatctaatctgccgtgggcctgtcgtgccagtcctgggggcgagatcggggtagaaatgcattttattctttaagttcacgtaagatacaagtttcagrcagggtctgaaggactggattggccaaacatcagacctgtcttccaaggagaccaagtcctggctacatcccagcctgtggttacagtgcagacaggcca

SEQ ID NO: 3515 - DNA, 201 bp, Homo sapiens
aagtacatacaggatttcaccatgttggccaggctagtttcaaactcccggcctcaggtggtctgcctgcctcagcctcccaaagtgttgggattacaggygtgagccactgggccctgcctgtactttttatcagccacaaatccagcaacaagctgaggattcagctcataaaacaggtttggtgtcttggtgatctca

SEQ ID NO: 3516 - DNA, 201 bp, Homo sapiens
gtttcagacagggtctgaaggactggattggccaaacatcagacctgtcttccaaggagaccaagtcctggctacatcccagcctgtggttacagtgcagrcaggccatgtgagccaccgctgccagcacagagcgtccttccccctgtagactagtgccgtagggagtacctgctgccccagctgactgtggccccctcc

SEQ ID NO: 3517 - DNA, 201 bp, Homo sapiens
tagctgggatgacaggcactcaccaatatgcctgggtaatttttgtatttttaagtacatacaggatttcaccatgttggccaggctagtttcaaactccyggcctcaggtggtctgcctgcctcagcctcccaaagtgttgggattacaggtgtgagccactgggccctgcctgtactttttatcagccacaaatccagc

SEQ ID NO: 3518 - DNA, 201 bp, Homo sapiens
tacctgctgccccagctgactgtggccccctccgtgatccatccatctccagggagcaagacagagacgcaggaatggaaagcggagttcctaacaggatraaagttcccccatcagttcccccagtacctccaagcaagtagctttccacatttgtcacagaaatcagaggagagatggtgttgggagccctttggagaa

SEQ ID NO: 3519 - DNA, 201 bp, Homo sapiens
cctgctgggccttcggggctgtggaagccatctctgaccggatctgcatccacaccaatgcgcacgtcagcgtggaggtgtcggcggaggacctgctcacvtgctgtggcagcatgtgtggggacggctgtaatggtggctatcctgctgaagcttggaacttctggacaagaaaaggcctggtttctggtggcctctatg

SEQ ID NO: 3520 - DNA, 201 bp, Homo sapiens
gaaagcggagttcctaacaggatgaaagttcccccatcagttcccccagtacctccaagcaagtagctttccacatttgtcacagaaatcagaggagagayggtgttgggagccctttggagaacgccagtctcccaggccccctgcatctatcgagtttgcaatgtcacaacctctctgatcttgtgctcagcatgattc

SEQ ID NO: 3521 - DNA, 201 bp, Homo sapiens
cagaaatcagaggagagatggtgttgggagccctttggagaacgccagtctcccaggccccctgcatctatcgagtttgcaatgtcacaacctctctgatsttgtgctcagcatgattctttaatagaagttttattttttcgtgcactctgctaatcatgtgggtgagccagtggaacagcgggagacctgtgctagttt

SEQ ID NO: 3522 - DNA, 201 bp, Homo sapiens
ccacaaggaaaatagtttaggagaaaccagcttttactgtttttgaaaaattacagcttcaccctgtcaagttaacaaggaatgcctgtgccaataaaagktttctccaacttgaagtctactctgatgggatctcagatcctttgtcactgcctatagacttgtagctgctgtctctctttgtccctgcagagaatcacg

SEQ ID NO: 3523 - DNA, 201 bp, Homo sapiens; identical to SEQ ID NO: 3482

SEQ ID NO: 3524 - DNA, 201 bp, Homo sapiens
ctgggctggtgtgcagtggtgcgaccacggctcacggcagcctcagccacccagatgtaagcgatctggttcccacctcagcctcccgagtagtggatctmggatccggcttccaacatgtggcagctctgggcctccctctgctgcctgctggtgttggccaatgcccggagcaggccctctttccatcccctgtcggat

SEQ ID NO: 3525 - DNA, 201 bp, Homo sapiens; identical to SEQ ID NO: 3483

SEQ ID NO: 3526 - DNA, 201 bp, Homo sapiens; identical to SEQ ID NO: 3484

SEQ ID NO: 3527 - DNA, 139 bp, Homo sapiens; identical to SEQ ID NO: 3485

SEQ ID NO: 3528 - DNA, 201 bp, Homo sapiens
tggtgtgcagtggtgcgaccacggctcacggcagcctcagccacccagatgtaagcgatctggttcccacctcagcctcccgagtagtggatctaggatcyggcttccaacatgtggcagctctgggcctccctctgctgcctgctggtgttggccaatgcccggagcaggccctctttccatcccctgtcggatgagctg

SEQ ID NO: 3529 - DNA, 157 bp, Homo sapiens; identical to SEQ ID NO: 3486

SEQ ID NO: 3530 - DNA, 201 bp, Homo sapiens; identical to SEQ ID NO: 3487

SEQ ID NO: 3531 - DNA, 201 bp, Homo sapiens; identical to SEQ ID NO: 3488

SEQ ID NO: 3532 - DNA, 201 bp, Homo sapiens; identical to SEQ ID NO: 3489

SEQ ID NO: 3533 - DNA, 201 bp, Homo sapiens; identical to SEQ ID NO: 3490

SEQ ID NO: 3534 - DNA, 201 bp, Homo sapiens; identical to SEQ ID NO: 3491

SEQ ID NO: 3535 - DNA, 201 bp, Homo sapiens; identical to SEQ ID NO: 3492

SEQ ID NO: 3536 - DNA, 201 bp, Homo sapiens; identical to SEQ ID NO: 3493

SEQ ID NO: 3537 - DNA, 201 bp, Homo sapiens
cgcgcaggctgggctgcaggctctcggctgcagcgctgggctggtgtgcagtggtgcgaccacggctcacggcagcctcagccacccagatgtaagcgatytggttcccacctcagcctcccgagtagtggatctaggatccggcttccaacatgtggcagctctgggcctccctctgctgcctgctggtgttggccaatg

SEQ ID NO: 3538 - DNA, 201 bp, Homo sapiens; identical to SEQ ID NO: 3494

SEQ ID NO: 3539 - DNA, 201 bp, Homo sapiens; identical to SEQ ID NO: 3495

SEQ ID NO: 3540 - DNA, 201 bp, Homo sapiens; identical to SEQ ID NO: 3496

SEQ ID NO: 3541 - DNA, 201 bp, Homo sapiens; identical to SEQ ID NO: 3497

SEQ ID NO: 3542 - DNA, 201 bp, Homo sapiens; identical to SEQ ID NO: 3498

SEQ ID NO: 3543 - DNA, 201 bp, Homo sapiens; identical to SEQ ID NO: 3499

SEQ ID NO: 3544 - DNA, 201 bp, Homo sapiens; identical to SEQ ID NO: 3500

SEQ ID NO: 3545 - DNA, 201 bp, Homo sapiens; identical to SEQ ID NO: 3501

SEQ ID NO: 3546 - DNA, 201 bp, Homo sapiens
gtggatctaggatccggcttccaacatgtggcagctctgggcctccctctgctgcctgctggtgttggccaatgcccggagcaggccctctttccatcccstgtcggatgagctggtcaactatgtcaacaaacggaataccacgtggcaggccgggcacaacttctacaacgtggacatgagctacttgaagaggctatg

SEQ ID NO: 3547 - DNA, 201 bp, Homo sapiens; identical to SEQ ID NO: 3503

SEQ ID NO: 3548 - DNA, 149 bp, Homo sapiens; identical to SEQ ID NO: 3504

SEQ ID NO: 3549 - DNA, 201 bp, Homo sapiens; identical to SEQ ID NO: 3505

SEQ ID NO: 3550 - DNA, 201 bp, Homo sapiens; identical to SEQ ID NO: 3506

SEQ ID NO: 3551 - DNA, 201 bp, Homo sapiens
cagcgctgggctggtgtgcagtggtgcgaccacggctcacggcagcctcagccacccagatgtaagcgatctggttcccacctcagcctcccgagtagtgratctaggatccggcttccaacatgtggcagctctgggcctccctctgctgcctgctggtgttggccaatgcccggagcaggccctctttccatcccctgt

SEQ ID NO: 3552 - DNA, 201 bp, Homo sapiens; identical to SEQ ID NO: 3507

SEQ ID NO: 3553 - DNA, 201 bp, Homo sapiens; identical to SEQ ID NO: 3508

SEQ ID NO: 3554 - DNA, 201 bp, Homo sapiens; identical to SEQ ID NO: 3509

SEQ ID NO: 3555 - DNA, 201 bp, Homo sapiens; identical to SEQ ID NO: 3510

SEQ ID NO: 3556 - DNA, 201 bp, Homo sapiens; identical to SEQ ID NO: 3511

SEQ ID NO: 3557 - DNA, 201 bp, Homo sapiens; identical to SEQ ID NO: 3513

SEQ ID NO: 3558 - DNA, 201 bp, Homo sapiens; identical to SEQ ID NO: 3512

SEQ ID NO: 3559 - DNA, 201 bp, Homo sapiens; identical to SEQ ID NO: 3515

SEQ ID NO: 3560 - DNA, 201 bp, Homo sapiens; identical to SEQ ID NO: 3514

SEQ ID NO: 3561 - DNA, 201 bp, Homo sapiens; identical to SEQ ID NO: 3517

SEQ ID NO: 3562 - DNA, 201 bp, Homo sapiens; identical to SEQ ID NO: 3516

SEQ ID NO: 3563 - DNA, 201 bp, Homo sapiens; identical to SEQ ID NO: 3518

SEQ ID NO: 3564 - DNA, 201 bp, Homo sapiens; identical to SEQ ID NO: 3519

SEQ ID NO: 3565 - DNA, 201 bp, Homo sapiens; identical to SEQ ID NO: 3520

SEQ ID NO: 3566 - DNA, 201 bp, Homo sapiens; identical to SEQ ID NO: 3521

SEQ ID NO: 3567 - DNA, 201 bp, Homo sapiens; identical to SEQ ID NO: 3522

SEQ ID NO: 3568 - DNA, 201 bp, Homo sapiens
ggctggcccaggctacggcggcaaccgctccggcaacgccaaccgctccgctgcgcgcaggctgggctgcaggctctcggctgcagcgctgggtggatctmggatccggcttccaacatgtggcagctctgggcctccctctgctgcctgctggtgttggccaatgcccggagcaggccctctttccatcccctgtcggat

SEQ ID NO: 3569 - DNA, 201 bp, Homo sapiens
gccggggctggcccaggctacggcggcaaccgctccggcaacgccaaccgctccgctgcgcgcaggctgggctgcaggctctcggctgcagcgctgggtgratctaggatccggcttccaacatgtggcagctctgggcctccctctgctgcctgctggtgttggccaatgcccggagcaggccctctttccatcccctgt

SEQ ID NO: 3570 - DNA, 201 bp, Homo sapiens; identical to SEQ ID NO: 3483

SEQ ID NO: 3571 - DNA, 201 bp, Homo sapiens
aagtggtggctggaattccacgcaccgatcagtactgggaaaagatctaatctgccgtgggcctgtcgtgccagtcctgggggcgagatcgggagaatcaygtcctggaactgcatgttcttgcgactcttgggacttcatcttaacttctcgctgccccagccatgttttcaaccatggcatccctcccccaattagttc

SEQ ID NO: 3572 - DNA, 201 bp, Homo sapiens
agctctgaaaatctgaggaacattgtaggaaaggtttgttaagcatctcttaagtgccatgatgagcataacagccggccgtggtggctcacgcctgtaakcccagcactttgggaggccaaggtgggaggatgacaaggtcaggagttttgagatcagccttggcaacacggtgaaaccccatctctactaaaaatacaa

SEQ ID NO: 3573 - DNA, 201 bp, Homo sapiens
cccaggctacggcggcaaccgctccggcaacgccaaccgctccgctgcgcgcaggctgggctgcaggctctcggctgcagcgctgggtggatctaggatcyggcttccaacatgtggcagctctgggcctccctctgctgcctgctggtgttggccaatgcccggagcaggccctctttccatcccctgtcggatgagctg

SEQ ID NO: 3574 - DNA, 201 bp, Homo sapiens
cagatgctagatcaaataagctctgaaaatctgaggaacattgtaggaaaggtttgttaagcatctcttaagtgccatgatgagcataacagccggccgtsgtggctcacgcctgtaatcccagcactttgggaggccaaggtgggaggatgacaaggtcaggagttttgagatcagccttggcaacacggtgaaacccca

SEQ ID NO: 3575 - DNA, 201 bp, Homo sapiens
ctccctgctcccaaactgagttgattcattccatgcgcactgtctccctcacctccatcgtatacgcacctgcagctccttgcctgcttctagcatggagscagcggggatgtgctggtgagtgacaaggaattgtggggcatgtcgacatcagcttaaggctttgttagaaacacctgccttgcagtgtttgtgactggg

SEQ ID NO: 3576 - DNA, 201 bp, Homo sapiens; identical to SEQ ID NO: 3487

SEQ ID NO: 3577 - DNA, 201 bp, Homo sapiens; identical to SEQ ID NO: 3490

SEQ ID NO: 3578 - DNA, 201 bp, Homo sapiens
tccagtttcaagtagaatatattcataacctcaataaagttctccctgctcccaaactgagttgattcattccatgcgcactgtctccctcacctccatcrtatacgcacctgcagctccttgcctgcttctagcatggagccagcggggatgtgctggtgagtgacaaggaattgtggggcatgtcgacatcagcttaag

SEQ ID NO: 3579 - DNA, 201 bp, Homo sapiens
tgcactccagcctgggggacaagagtgaatctgtgtctcaccaaaaaaaaaaagaaaaagaaagatgcttaacaaaggttaccataagccacaaattcatraccacttatccttccagtttcaagtagaatatattcataacctcaataaagttctccctgctcccaaactgagttgattcattccatgcgcactgtctcc

SEQ ID NO: 3580 - DNA, 201 bp, Homo sapiens; identical to SEQ ID NO: 3509

SEQ ID NO: 3581 - DNA, 201 bp, Homo sapiens; identical to SEQ ID NO: 3510

SEQ ID NO: 3582 - DNA, 201 bp, Homo sapiens; identical to SEQ ID NO: 3496

SEQ ID NO: 3583 - DNA, 201 bp, Homo sapiens; identical to SEQ ID NO: 3511

SEQ ID NO: 3584 - DNA, 201 bp, Homo sapiens; identical to SEQ ID NO: 3497

SEQ ID NO: 3585 - DNA, 201 bp, Homo sapiens; identical to SEQ ID NO: 3512

SEQ ID NO: 3586 - DNA, 201 bp, Homo sapiens
aatcgaatcagaagtggtggctggaattccacgcaccgatcagtactgggaaaagatctaatctgccgtgggcctgtcgtgccagtcctgggggcgagatsgggagaatcacgtcctggaactgcatgttcttgcgactcttgggacttcatcttaacttctcgctgccccagccatgttttcaaccatggcatccctccc

SEQ ID NO: 3587 - DNA, 201 bp, Homo sapiens; identical to SEQ ID NO: 3515

SEQ ID NO: 3588 - DNA, 201 bp, Homo sapiens; identical to SEQ ID NO: 3517

SEQ ID NO: 3589 - DNA, 201 bp, Homo sapiens; identical to SEQ ID NO: 3500

SEQ ID NO: 3590 - DNA, 201 bp, Homo sapiens; identical to SEQ ID NO: 3501

SEQ ID NO: 3591 - DNA, 201 bp, Homo sapiens; identical to SEQ ID NO: 3546

SEQ ID NO: 3592 - DNA, 201 bp, Homo sapiens; identical to SEQ ID NO: 3519

SEQ ID NO: 3593 - DNA, 201 bp, Homo sapiens
agatcaaataagctctgaaaatctgaggaacattgtaggaaaggtttgttaagcatctcttaagtgccatgatgagcataacagccggccgtggtggctcrcgcctgtaatcccagcactttgggaggccaaggtgggaggatgacaaggtcaggagttttgagatcagccttggcaacacggtgaaaccccatctctact

SEQ ID NO: 3594 - DNA, 165 bp, Homo sapiens
tgatcataactttgtcacctcagttcaatagtttctcctggattcttgtccaagtgagatgacaggtggacgtaacaatgccttttcagtctttacctagmctctccagagaatcactccagaatagaaattagagtataggtaggcagtccaacctctgcattt

SEQ ID NO: 3595 - DNA, 201 bp, Homo sapiens; identical to SEQ ID NO: 3546

SEQ ID NO: 3596 - DNA, 201 bp, Homo sapiens
agatgctggtgcttttttttggtttttgagagagtctcactctgtcacccaggctggagtgcagtggcacgatcttggctcactgcaaactctgtctcccrggttcaagcgattctcatgccacagcctcctgagtagctggggccacaggcttgcaccaccgtgcacggctaatatttgtatttttagtagagactgggt

SEQ ID NO: 3597 - DNA, 201 bp, Homo sapiens
caggccctctttccatcccctgtcggatgagctggtcaactatgtcaacaaacggaataccacgtggcaggccgggcacaacttctacaacgtggacatgrgctacttgaagaggctatgtggtaccttcctgggtgggcccaagccaccccagaggtgagtgcctgctcctctgcaccgctgtaatgtgagtggcaggcg

SEQ ID NO: 3598 - DNA, 201 bp, Homo sapiens; identical to SEQ ID NO: 3568

SEQ ID NO: 3599 - DNA, 201 bp, Homo sapiens; identical to SEQ ID NO: 3569

SEQ ID NO: 3600 - DNA, 201 bp, Homo sapiens
ggaagtgggagagtgaaggcctctctggcgtccgcagggctcatgctgcccagggctgccgacaccgcttgaggtacagtacttgtttcttttcatttttrtattactttctttttttattttattttttccttctcaagttattagtagagaagatgctggtgcttttttttggtttttgagagagtctcactctgtcac

SEQ ID NO: 3601 - DNA, 201 bp, Homo sapiens; identical to SEQ ID NO: 3573

SEQ ID NO: 3602 - DNA, 201 bp, Homo sapiens
gtgaaggcctctctggcgtccgcagggctcatgctgcccagggctgccgacaccgcttgaggtacagtacttgtttcttttcatttttgtattactttctytttttattttattttttccttctcaagttattagtagagaagatgctggtgcttttttttggtttttgagagagtctcactctgtcacccaggctggagt

SEQ ID NO: 3603 - DNA, 201 bp, Homo sapiens
gaggctgaggctagagaatcgcatgaacccgggaggcagaggttgcggtgagctgagatgatgccacttcccacgtgaggatggggtagttaagttgcacracactgccttctgcacaatggggatgatatgagaaatgatgagaggatcctgggcagaggttgaggcaggagagcagggcaagaaacactatctggactg

SEQ ID NO: 3604 - DNA, 201 bp, Homo sapiens; identical to SEQ ID NO: 3482

SEQ ID NO: 3605 - DNA, 201 bp, Homo sapiens
acctcagcctcccgagtagtgtcttcaggcctatggagagcagcttgcgtgggctgggcctgcagtacctggtttgcatagatgattggcaggtggatctmggatccggcttccaacatgtggcagctctgggcctccctctgctgcctgctggtgttggccaatgcccggagcaggccctctttccatcccctgtcggat

SEQ ID NO: 3606 - DNA, 201 bp, Homo sapiens; identical to SEQ ID NO: 3483

SEQ ID NO: 3607 - DNA, 201 bp, Homo sapiens; identical to SEQ ID NO: 3484

SEQ ID NO: 3608 - DNA, 201 bp, Homo sapiens; identical to SEQ ID NO: 3572

SEQ ID NO: 3609 - DNA, 201 bp, Homo sapiens
gcctcccgagtagtgtcttcaggcctatggagagcagcttgcgtgggctgggcctgcagtacctggtttgcatagatgattggcaggtggatctaggatcyggcttccaacatgtggcagctctgggcctccctctgctgcctgctggtgttggccaatgcccggagcaggccctctttccatcccctgtcggatgagctg

SEQ ID NO: 3610 - DNA, 201 bp, Homo sapiens; identical to SEQ ID NO: 3574

SEQ ID NO: 3611 - DNA, 201 bp, Homo sapiens; identical to SEQ ID NO: 3487

SEQ ID NO: 3612 - DNA, 201 bp, Homo sapiens; identical to SEQ ID NO: 3488

SEQ ID NO: 3613 - DNA, 201 bp, Homo sapiens; identical to SEQ ID NO: 3489

SEQ ID NO: 3614 - DNA, 201 bp, Homo sapiens; identical to SEQ ID NO: 3490

SEQ ID NO: 3615 - DNA, 201 bp, Homo sapiens; identical to SEQ ID NO: 3491

SEQ ID NO: 3616 - DNA, 201 bp, Homo sapiens; identical to SEQ ID NO: 3492

SEQ ID NO: 3617 - DNA, 201 bp, Homo sapiens; identical to SEQ ID NO: 3493

SEQ ID NO: 3618 - DNA, 201 bp, Homo sapiens
cgcgcaggctgggctgcaggctctcggctgcagcgctgggctggtgtgcagtggtgcgaccacggctcacggcagcctcagccacccagatgtaagcgatytggttcccacctcagcctcccgagtagtgtcttcaggcctatggagagcagcttgcgtgggctgggcctgcagtacctggtttgcatagatgattggcag

SEQ ID NO: 3619 - DNA, 201 bp, Homo sapiens; identical to SEQ ID NO: 3494

SEQ ID NO: 3620 - DNA, 201 bp, Homo sapiens; identical to SEQ ID NO: 3495

SEQ ID NO: 3621 - DNA, 201 bp, Homo sapiens; identical to SEQ ID NO: 3496

SEQ ID NO: 3622 - DNA, 201 bp, Homo sapiens; identical to SEQ ID NO: 3497

SEQ ID NO: 3623 - DNA, 201 bp, Homo sapiens; identical to SEQ ID NO: 3498

SEQ ID NO: 3624 - DNA, 201 bp, Homo sapiens; identical to SEQ ID NO: 3499

SEQ ID NO: 3625 - DNA, 201 bp, Homo sapiens; identical to SEQ ID NO: 3500

SEQ ID NO: 3626 - DNA, 201 bp, Homo sapiens; identical to SEQ ID NO: 3501

SEQ ID NO: 3627 - DNA, 201 bp, Homo sapiens; identical to SEQ ID NO: 3546

SEQ ID NO: 3628 - DNA, 201 bp, Homo sapiens; identical to SEQ ID NO: 3503

SEQ ID NO: 3629 - DNA, 201 bp, Homo sapiens; identical to SEQ ID NO: 3593

SEQ ID NO: 3630 - DNA, 165 bp, Homo sapiens; identical to SEQ ID NO: 3594

SEQ ID NO: 3631 - DNA, 201 bp, Homo sapiens; identical to SEQ ID NO: 3505

SEQ ID NO: 3632 - DNA, 201 bp, Homo sapiens; identical to SEQ ID NO: 3506

SEQ ID NO: 3633 - DNA, 201 bp, Homo sapiens
ttcccacctcagcctcccgagtagtgtcttcaggcctatggagagcagcttgcgtgggctgggcctgcagtacctggtttgcatagatgattggcaggtgratctaggatccggcttccaacatgtggcagctctgggcctccctctgctgcctgctggtgttggccaatgcccggagcaggccctctttccatcccctgt

SEQ ID NO: 3634 - DNA, 201 bp, Homo sapiens; identical to SEQ ID NO: 3507

SEQ ID NO: 3635 - DNA, 201 bp, Homo sapiens; identical to SEQ ID NO: 3575

SEQ ID NO: 3636 - DNA, 201 bp, Homo sapiens; identical to SEQ ID NO: 3578

SEQ ID NO: 3637 - DNA, 201 bp, Homo sapiens; identical to SEQ ID NO: 3508

SEQ ID NO: 3638 - DNA, 201 bp, Homo sapiens; identical to SEQ ID NO: 3579

SEQ ID NO: 3639 - DNA, 201 bp, Homo sapiens; identical to SEQ ID NO: 3509

SEQ ID NO: 3640 - DNA, 201 bp, Homo sapiens; identical to SEQ ID NO: 3511

SEQ ID NO: 3641 - DNA, 201 bp, Homo sapiens; identical to SEQ ID NO: 3510

SEQ ID NO: 3642 - DNA, 201 bp, Homo sapiens; identical to SEQ ID NO: 3513

SEQ ID NO: 3643 - DNA, 201 bp, Homo sapiens; identical to SEQ ID NO: 3512

SEQ ID NO: 3644 - DNA, 201 bp, Homo sapiens; identical to SEQ ID NO: 3515

SEQ ID NO: 3645 - DNA, 201 bp, Homo sapiens; identical to SEQ ID NO: 3514

SEQ ID NO: 3646 - DNA, 201 bp, Homo sapiens; identical to SEQ ID NO: 3517

SEQ ID NO: 3647 - DNA, 201 bp, Homo sapiens; identical to SEQ ID NO: 3516

SEQ ID NO: 3648 - DNA, 201 bp, Homo sapiens; identical to SEQ ID NO: 3518

SEQ ID NO: 3649 - DNA, 201 bp, Homo sapiens; identical to SEQ ID NO: 3519

SEQ ID NO: 3650 - DNA, 201 bp, Homo sapiens; identical to SEQ ID NO: 3520

SEQ ID NO: 3651 - DNA, 201 bp, Homo sapiens; identical to SEQ ID NO: 3521

SEQ ID NO: 3652 - DNA, 201 bp, Homo sapiens; identical to SEQ ID NO: 3522

SEQ ID NO: 3653 - DNA, 201 bp, Homo sapiens; identical to SEQ ID NO: 3482

SEQ ID NO: 3654 - DNA, 201 bp, Homo sapiens
tctcggctgcagcgctgggtgtcttcaggcctatggagagcagcttgcgtgggctgggcctgcagtacctggtttgcatagatgattggcaggtggatctmggatccggcttccaacatgtggcagctctgggcctccctctgctgcctgctggtgttggccaatgcccggagcaggccctctttccatcccctgtcggat

SEQ ID NO: 3655 - DNA, 201 bp, Homo sapiens; identical to SEQ ID NO: 3483

SEQ ID NO: 3656 - DNA, 201 bp, Homo sapiens; identical to SEQ ID NO: 3484

SEQ ID NO: 3657 - DNA, 139 bp, Homo sapiens; identical to SEQ ID NO: 3485

SEQ ID NO: 3658 - DNA, 201 bp, Homo sapiens
ctgcagcgctgggtgtcttcaggcctatggagagcagcttgcgtgggctgggcctgcagtacctggtttgcatagatgattggcaggtggatctaggatcyggcttccaacatgtggcagctctgggcctccctctgctgcctgctggtgttggccaatgcccggagcaggccctctttccatcccctgtcggatgagctg

SEQ ID NO: 3659 - DNA, 157 bp, Homo sapiens; identical to SEQ ID NO: 3486

SEQ ID NO: 3660 - DNA, 201 bp, Homo sapiens; identical to SEQ ID NO: 3487

SEQ ID NO: 3661 - DNA, 201 bp, Homo sapiens; identical to SEQ ID NO: 3488

SEQ ID NO: 3662 - DNA, 201 bp, Homo sapiens; identical to SEQ ID NO: 3489

SEQ ID NO: 3663 - DNA, 201 bp, Homo sapiens; identical to SEQ ID NO: 3490

SEQ ID NO: 3664 - DNA, 201 bp, Homo sapiens; identical to SEQ ID NO: 3491

SEQ ID NO: 3665 - DNA, 201 bp, Homo sapiens; identical to SEQ ID NO: 3492

SEQ ID NO: 3666 - DNA, 201 bp, Homo sapiens; identical to SEQ ID NO: 3493

SEQ ID NO: 3667 - DNA, 201 bp, Homo sapiens; identical to SEQ ID NO: 3494

SEQ ID NO: 3668 - DNA, 201 bp, Homo sapiens; identical to SEQ ID NO: 3495

SEQ ID NO: 3669 - DNA, 201 bp, Homo sapiens; identical to SEQ ID NO: 3496

SEQ ID NO: 3670 - DNA, 201 bp, Homo sapiens; identical to SEQ ID NO: 3497

SEQ ID NO: 3671 - DNA, 201 bp, Homo sapiens; identical to SEQ ID NO: 3498

SEQ ID NO: 3672 - DNA, 201 bp, Homo sapiens; identical to SEQ ID NO: 3499

SEQ ID NO: 3673 - DNA, 201 bp, Homo sapiens; identical to SEQ ID NO: 3500

SEQ ID NO: 3674 - DNA, 201 bp, Homo sapiens; identical to SEQ ID NO: 3501

SEQ ID NO: 3675 - DNA, 201 bp, Homo sapiens; identical to SEQ ID NO: 3546

SEQ ID NO: 3676 - DNA, 201 bp, Homo sapiens; identical to SEQ ID NO: 3503

SEQ ID NO: 3677 - DNA, 149 bp, Homo sapiens; identical to SEQ ID NO: 3504

SEQ ID NO: 3678 - DNA, 201 bp, Homo sapiens; identical to SEQ ID NO: 3505

SEQ ID NO: 3679 - DNA, 201 bp, Homo sapiens; identical to SEQ ID NO: 3506

SEQ ID NO: 3680 - DNA, 201 bp, Homo sapiens
caggctctcggctgcagcgctgggtgtcttcaggcctatggagagcagcttgcgtgggctgggcctgcagtacctggtttgcatagatgattggcaggtgratctaggatccggcttccaacatgtggcagctctgggcctccctctgctgcctgctggtgttggccaatgcccggagcaggccctctttccatcccctgt

SEQ ID NO: 3681 - DNA, 201 bp, Homo sapiens; identical to SEQ ID NO: 3507

SEQ ID NO: 3682 - DNA, 201 bp, Homo sapiens; identical to SEQ ID NO: 3508

SEQ ID NO: 3683 - DNA, 201 bp, Homo sapiens; identical to SEQ ID NO: 3509

SEQ ID NO: 3684 - DNA, 201 bp, Homo sapiens; identical to SEQ ID NO: 3510

SEQ ID NO: 3685 - DNA, 201 bp, Homo sapiens; identical to SEQ ID NO: 3511

SEQ ID NO: 3686 - DNA, 201 bp, Homo sapiens; identical to SEQ ID NO: 3513

SEQ ID NO: 3687 - DNA, 201 bp, Homo sapiens; identical to SEQ ID NO: 3512

SEQ ID NO: 3688 - DNA, 201 bp, Homo sapiens; identical to SEQ ID NO: 3515

SEQ ID NO: 3689 - DNA, 201 bp, Homo sapiens; identical to SEQ ID NO: 3514

SEQ ID NO: 3690 - DNA, 201 bp, Homo sapiens; identical to SEQ ID NO: 3517

SEQ ID NO: 3691 - DNA, 201 bp, Homo sapiens; identical to SEQ ID NO: 3516

SEQ ID NO: 3692 - DNA, 201 bp, Homo sapiens; identical to SEQ ID NO: 3518

SEQ ID NO: 3693 - DNA, 201 bp, Homo sapiens; identical to SEQ ID NO: 3519

SEQ ID NO: 3694 - DNA, 201 bp, Homo sapiens; identical to SEQ ID NO: 3520

SEQ ID NO: 3695 - DNA, 201 bp, Homo sapiens; identical to SEQ ID NO: 3521

SEQ ID NO: 3696 - DNA, 201 bp, Homo sapiens; identical to SEQ ID NO: 3522

SEQ ID NO: 3697 - DNA, 201 bp, Homo sapiens; identical to SEQ ID NO: 3482

SEQ ID NO: 3698 - DNA, 201 bp, Homo sapiens
ccaggctggtgtgcagtggtgcgaccacggctcacggcagcctcagccacccagatgtaagcgatctggttcccacctcagcctcccgagtagtggatctmggatccggcttccaacatgtggcagctctgggcctccctctgctgcctgctggtgttggccaatgcccggagcaggccctctttccatcccctgtcggat

SEQ ID NO: 3699 - DNA, 201 bp, Homo sapiens; identical to SEQ ID NO: 3483

SEQ ID NO: 3700 - DNA, 201 bp, Homo sapiens; identical to SEQ ID NO: 3484

SEQ ID NO: 3701 - DNA, 139 bp, Homo sapiens; identical to SEQ ID NO: 3485

SEQ ID NO: 3702 - DNA, 201 bp, Homo sapiens; identical to SEQ ID NO: 3528

SEQ ID NO: 3703 - DNA, 157 bp, Homo sapiens; identical to SEQ ID NO: 3486

SEQ ID NO: 3704 - DNA, 201 bp, Homo sapiens; identical to SEQ ID NO: 3487

SEQ ID NO: 3705 - DNA, 201 bp, Homo sapiens; identical to SEQ ID NO: 3488

SEQ ID NO: 3706 - DNA, 201 bp, Homo sapiens; identical to SEQ ID NO: 3489

SEQ ID NO: 3707 - DNA, 201 bp, Homo sapiens; identical to SEQ ID NO: 3490

SEQ ID NO: 3708 - DNA, 201 bp, Homo sapiens; identical to SEQ ID NO: 3491

SEQ ID NO: 3709 - DNA, 201 bp, Homo sapiens; identical to SEQ ID NO: 3492

SEQ ID NO: 3710 - DNA, 201 bp, Homo sapiens; identical to SEQ ID NO: 3493

SEQ ID NO: 3711 - DNA, 201 bp, Homo sapiens
ctctcggctgcagcgctggggtcttgctttgtctcccaggctggtgtgcagtggtgcgaccacggctcacggcagcctcagccacccagatgtaagcgatytggttcccacctcagcctcccgagtagtggatctaggatccggcttccaacatgtggcagctctgggcctccctctgctgcctgctggtgttggccaatg

SEQ ID NO: 3712 - DNA, 201 bp, Homo sapiens; identical to SEQ ID NO: 3494

SEQ ID NO: 3713 - DNA, 201 bp, Homo sapiens; identical to SEQ ID NO: 3495

SEQ ID NO: 3714 - DNA, 201 bp, Homo sapiens; identical to SEQ ID NO: 3496

SEQ ID NO: 3715 - DNA, 201 bp, Homo sapiens; identical to SEQ ID NO: 3497

SEQ ID NO: 3716 - DNA, 201 bp, Homo sapiens; identical to SEQ ID NO: 3498

SEQ ID NO: 3717 - DNA, 201 bp, Homo sapiens; identical to SEQ ID NO: 3499

SEQ ID NO: 3718 - DNA, 201 bp, Homo sapiens; identical to SEQ ID NO: 3500

SEQ ID NO: 3719 - DNA, 201 bp, Homo sapiens; identical to SEQ ID NO: 3501

SEQ ID NO: 3720 - DNA, 201 bp, Homo sapiens; identical to SEQ ID NO: 3546

SEQ ID NO: 3721 - DNA, 201 bp, Homo sapiens; identical to SEQ ID NO: 3503

SEQ ID NO: 3722 - DNA, 149 bp, Homo sapiens; identical to SEQ ID NO: 3504

SEQ ID NO: 3723 - DNA, 201 bp, Homo sapiens; identical to SEQ ID NO: 3505

SEQ ID NO: 3724 - DNA, 201 bp, Homo sapiens; identical to SEQ ID NO: 3506

SEQ ID NO: 3725 - DNA, 201 bp, Homo sapiens
gtctcccaggctggtgtgcagtggtgcgaccacggctcacggcagcctcagccacccagatgtaagcgatctggttcccacctcagcctcccgagtagtgratctaggatccggcttccaacatgtggcagctctgggcctccctctgctgcctgctggtgttggccaatgcccggagcaggccctctttccatcccctgt

SEQ ID NO: 3726 - DNA, 201 bp, Homo sapiens; identical to SEQ ID NO: 3507

SEQ ID NO: 3727 - DNA, 201 bp, Homo sapiens; identical to SEQ ID NO: 3508

SEQ ID NO: 3728 - DNA, 201 bp, Homo sapiens; identical to SEQ ID NO: 3509

SEQ ID NO: 3729 - DNA, 201 bp, Homo sapiens; identical to SEQ ID NO: 3510

SEQ ID NO: 3730 - DNA, 201 bp, Homo sapiens; identical to SEQ ID NO: 3511

SEQ ID NO: 3731 - DNA, 201 bp, Homo sapiens; identical to SEQ ID NO: 3513

SEQ ID NO: 3732 - DNA, 201 bp, Homo sapiens; identical to SEQ ID NO: 3512

SEQ ID NO: 3733 - DNA, 201 bp, Homo sapiens; identical to SEQ ID NO: 3515

SEQ ID NO: 3734 - DNA, 201 bp, Homo sapiens; identical to SEQ ID NO: 3514

SEQ ID NO: 3735 - DNA, 201 bp, Homo sapiens; identical to SEQ ID NO: 3517

SEQ ID NO: 3736 - DNA, 201 bp, Homo sapiens; identical to SEQ ID NO: 3516

SEQ ID NO: 3737 - DNA, 201 bp, Homo sapiens; identical to SEQ ID NO: 3518

SEQ ID NO: 3738 - DNA, 201 bp, Homo sapiens; identical to SEQ ID NO: 3519

SEQ ID NO: 3739 - DNA, 201 bp, Homo sapiens; identical to SEQ ID NO: 3520

SEQ ID NO: 3740 - DNA, 201 bp, Homo sapiens; identical to SEQ ID NO: 3521

SEQ ID NO: 3741 - DNA, 201 bp, Homo sapiens; identical to SEQ ID NO: 3522

SEQ ID NO: 3742 - DNA, 201 bp, Homo sapiens; identical to SEQ ID NO: 3482

SEQ ID NO: 3743 - DNA, 201 bp, Homo sapiens; identical to SEQ ID NO: 3605

SEQ ID NO: 3744 - DNA, 201 bp, Homo sapiens; identical to SEQ ID NO: 3483

SEQ ID NO: 3745 - DNA, 201 bp, Homo sapiens; identical to SEQ ID NO: 3484

SEQ ID NO: 3746 - DNA, 139 bp, Homo sapiens; identical to SEQ ID NO: 3485

SEQ ID NO: 3747 - DNA, 201 bp, Homo sapiens; identical to SEQ ID NO: 3609

SEQ ID NO: 3748 - DNA, 157 bp, Homo sapiens; identical to SEQ ID NO: 3486

SEQ ID NO: 3749 - DNA, 201 bp, Homo sapiens; identical to SEQ ID NO: 3487

SEQ ID NO: 3750 - DNA, 201 bp, Homo sapiens; identical to SEQ ID NO: 3488

SEQ ID NO: 3751 - DNA, 201 bp, Homo sapiens; identical to SEQ ID NO: 3489

SEQ ID NO: 3752 - DNA, 201 bp, Homo sapiens; identical to SEQ ID NO: 3490

SEQ ID NO: 3753 - DNA, 201 bp, Homo sapiens; identical to SEQ ID NO: 3491

SEQ ID NO: 3754 - DNA, 201 bp, Homo sapiens; identical to SEQ ID NO: 3492

SEQ ID NO: 3755 - DNA, 201 bp, Homo sapiens; identical to SEQ ID NO: 3493

SEQ ID NO: 3756 - DNA, 201 bp, Homo sapiens; identical to SEQ ID NO: 3618

SEQ ID NO: 3757 - DNA, 201 bp, Homo sapiens; identical to SEQ ID NO: 3494

SEQ ID NO: 3758 - DNA, 201 bp, Homo sapiens; identical to SEQ ID NO: 3495

SEQ ID NO: 3759 - DNA, 201 bp, Homo sapiens; identical to SEQ ID NO: 3496

SEQ ID NO: 3760 - DNA, 201 bp, Homo sapiens; identical to SEQ ID NO: 3497

SEQ ID NO: 3761 - DNA, 201 bp, Homo sapiens; identical to SEQ ID NO: 3498

SEQ ID NO: 3762 - DNA, 201 bp, Homo sapiens; identical to SEQ ID NO: 3499

SEQ ID NO: 3763 - DNA, 201 bp, Homo sapiens; identical to SEQ ID NO: 3500

SEQ ID NO: 3764 - DNA, 201 bp, Homo sapiens; identical to SEQ ID NO: 3501

SEQ ID NO: 3765 - DNA, 201 bp, Homo sapiens; identical to SEQ ID NO: 3546

SEQ ID NO: 3766 - DNA, 201 bp, Homo sapiens; identical to SEQ ID NO: 3503

SEQ ID NO: 3767 - DNA, 149 bp, Homo sapiens; identical to SEQ ID NO: 3504

SEQ ID NO: 3768 - DNA, 201 bp, Homo sapiens; identical to SEQ ID NO: 3505

SEQ ID NO: 3769 - DNA, 201 bp, Homo sapiens; identical to SEQ ID NO: 3506

SEQ ID NO: 3770 - DNA, 201 bp, Homo sapiens; identical to SEQ ID NO: 3633

SEQ ID NO: 3771 - DNA, 201 bp, Homo sapiens; identical to SEQ ID NO: 3507

SEQ ID NO: 3772 - DNA, 201 bp, Homo sapiens; identical to SEQ ID NO: 3508

SEQ ID NO: 3773 - DNA, 201 bp, Homo sapiens; identical to SEQ ID NO: 3509

SEQ ID NO: 3774 - DNA, 201 bp, Homo sapiens; identical to SEQ ID NO: 3510

SEQ ID NO: 3775 - DNA, 201 bp, Homo sapiens; identical to SEQ ID NO: 3511

SEQ ID NO: 3776 - DNA, 201 bp, Homo sapiens; identical to SEQ ID NO: 3513

SEQ ID NO: 3777 - DNA, 201 bp, Homo sapiens; identical to SEQ ID NO: 3512

SEQ ID NO: 3778 - DNA, 201 bp, Homo sapiens; identical to SEQ ID NO: 3515

SEQ ID NO: 3779 - DNA, 201 bp, Homo sapiens; identical to SEQ ID NO: 3514

SEQ ID NO: 3780 - DNA, 201 bp, Homo sapiens; identical to SEQ ID NO: 3517

SEQ ID NO: 3781 - DNA, 201 bp, Homo sapiens; identical to SEQ ID NO: 3516

SEQ ID NO: 3782 - DNA, 201 bp, Homo sapiens; identical to SEQ ID NO: 3518

SEQ ID NO: 3783 - DNA, 201 bp, Homo sapiens; identical to SEQ ID NO: 3519

SEQ ID NO: 3784 - DNA, 201 bp, Homo sapiens; identical to SEQ ID NO: 3520

SEQ ID NO: 3785 - DNA, 201 bp, Homo sapiens; identical to SEQ ID NO: 3521

SEQ ID NO: 3786 - DNA, 201 bp, Homo sapiens; identical to SEQ ID NO: 3522

SEQ ID NO: 3787 - DNA, 201 bp, Homo sapiens
gagagaaccagcccagagcctccctgtctgagagctcagggttcatctcagctccgtgaatagaaaagccctaggaagtcaaaagcacactcagaagactycaacacatacttgctggaagacgatgctccatgcatcttgtgttctgctcacctatgagcagaggcactgactgtcttggcttcacactatcttttcaaa

SEQ ID NO: 3788 - DNA, 201 bp, Homo sapiens
gtcttggcttcacactatcttttcaaagagtttgtagagcaaatagtcttagaagagacagagatggtatctccctctcgacagtgccaccctgtggccasgagaggccagaaatcagcacacgccacatctgattctacagcaggatagggcctctgtgcagctcagagcaaaggttgtgcccacttcataagattcagc

SEQ ID NO: 3789 - DNA, 201 bp, Homo sapiens
gctcttgttgcccaggctggagtgcagtggtgtgaactcagctcaccgcaacctccgcctcccaggttcaagcgattctcctgcctcagcctcccgaggarctgggattacaggcatgcgccatcatgcccagctaatgttttgtatgcaccttttcttaactattattgaaggggtggcctgcccctccacacctgtggg

SEQ ID NO: 3790 - DNA, 201 bp, Homo sapiens
gactgcttttccccatagctgtgtctccccaacagccccaaaccccttgtccctgtctctttctccccatgctttcctgtcccacaggcctcttccttgcyggcttagagtttctgagaggccagacatgagttcacagtgaatcaaaggaaggagaaacagccaaccactcagtagtgatgtggaaccacaggacagatc

SEQ ID NO: 3791 - DNA, 201 bp, Homo sapiens
tctctcttcttctccagcccttccccatatccccaccttccagccctccctcctgcaggctggtggccagccacactccacacctcaccctcacccaagtrggagagaagtggcaccaaccttgtagtcatcgctcgtggccgcctctgcagatccaaaggtgttgtagttggcccagttgccatccccctctgggtagtc

SEQ ID NO: 3792 - DNA, 201 bp, Homo sapiens
ccagggataagcagaagacagatgccttcctcttatctcaactgcaaagaggccttcctcttttactaatcctcctcagcacagaccctttgtgggtgtcrggctgggggacagtcaggtctttcccttcccacgaggccatatctcaggctatcacatggggagaaaccttggacaatacctggctttcctagacagagg

SEQ ID NO: 3793 - DNA, 201 bp, Homo sapiens
atctcagctccgtgaatagaaaagccctaggaagtcaaaagcacactcagaagactccaacacatacttgctggaagacgatgctccatgcatcttgtgtkctgctcacctatgagcagaggcactgactgtcttggcttcacactatcttttcaaagagtttgtagagcaaatagtcttagaagagacagagatggtatc

SEQ ID NO: 3794 - DNA, 201 bp, Homo sapiens
tccaaaggtgttgtagttggcccagttgccatccccctctgggtagtctgctttgttgccctgctgactggaccagcgatcacccaccgtgcacttcccaygcatgtcattctcgtgcacgctggccaccagggtccagccgccacccccagaagtcatgtcacagaaggtctggtagacaacaccattcttggtgcggag

SEQ ID NO: 3795 - DNA, 201 bp, Homo sapiens
tatttctctcttcttctccagcccttccccatatccccaccttccagccctccctcctgcaggctggtggccagccacactccacacctcaccctcacccragtgggagagaagtggcaccaaccttgtagtcatcgctcgtggccgcctctgcagatccaaaggtgttgtagttggcccagttgccatccccctctgggt

SEQ ID NO: 3796 - DNA, 201 bp, Homo sapiens
cctgtctgagagctcagggttcatctcagctccgtgaatagaaaagccctaggaagtcaaaagcacactcagaagactccaacacatacttgctggaagaygatgctccatgcatcttgtgttctgctcacctatgagcagaggcactgactgtcttggcttcacactatcttttcaaagagtttgtagagcaaatagtct

SEQ ID NO: 3797 - DNA, 201 bp, Homo sapiens
atccattaaaccgtgagtcaacacagcacatgtctctgtgagcacagggttgggggtagggttacagattaacagcatctcaaggcagaagaatttttctyagcacagaccaaaatggagtctcttatgtctacttctttctacatagacacagtaacagtctgatctctttttcttttccccacaattataagagtatac

SEQ ID NO: 3798 - DNA, 201 bp, Homo sapiens
agctcagggttcatctcagctccgtgaatagaaaagccctaggaagtcaaaagcacactcagaagactccaacacatacttgctggaagacgatgctccaygcatcttgtgttctgctcacctatgagcagaggcactgactgtcttggcttcacactatcttttcaaagagtttgtagagcaaatagtcttagaagagac

SEQ ID NO: 3799 - DNA, 201 bp, Homo sapiens
acaatacctggctttcctagacagaggtccctgcggccttccgcagtgtattgtgtccctgggtacttgagattagagagtggtgatgacctttaacaagyatgctgccttcaagcacttgtttaacaaagcacatcctgcacagccctaaatccattaaaccgtgagtcaacacagcacatgtctctgtgagcacagggt

SEQ ID NO: 3800 - DNA, 201 bp, Homo sapiens
gtgtctccccaacagccccaaaccccttgtccctgtctctttctccccatgctttcctgtcccacaggcctcttccttgctggcttagagtttctgagagrccagacatgagttcacagtgaatcaaaggaaggagaaacagccaaccactcagtagtgatgtggaaccacaggacagatctgccccctaccctagacact

SEQ ID NO: 3801 - DNA, 201 bp, Homo sapiens
agagagttattttattcctgaagtccggatctatgactcagggacatataaatgtactgtgattgtgaacaacaaagagaaaaccactgcagagtaccagstgttggtggaaggagtgcccagtcccagggtgacactggacaagaaagaggccatccaaggtgggatcgtgagggtcaactgttctgtcccagaggaaaa

SEQ ID NO: 3802 - DNA, 201 bp, Homo sapiens
ctgtttttgtctacactctttctcttttcctctaccatgctgaaggctgaaagacaggaagatggtgccatcagcaaatattattcttaattgaaaacttraaatgtgtatgtttcttactaatttttaaaaatgtattccttgccagggcaggcaaggtggctcacgcctgtaatcccagcacttcaggaggctgaggtg

SEQ ID NO: 3803 - DNA, 201 bp, Homo sapiens
tggagaatagtaccaagaactcaaatgatcctgcggtattcaaagacaaccccactgaagacgtcgaataccagtgtgttgcagataattgccattcccaygccaaaatgttaagtgaggttctgagggtgaaggtgatagccccggtggatgaggtccagatttctatcctgtcaagtaaggtggtggagtctggagagg

SEQ ID NO: 3804 - DNA, 201 bp, Homo sapiens
aatgtccaggccagcagtaccacttctgaactccaacaacgagaaaatgtcagatcccaatatggaagctaacagtcattacggtcacaatgacgatgtcrgaaaccatgcaatgaaaccaataaatgataataaagagcctctgaactcagacgtgcagtacacggaagttcaagtgtcctcagctgagtctcacaaaga

SEQ ID NO: 3805 - DNA, 201 bp, Homo sapiens
ttgggagcaccgcctgtgaaataccaacctgaagacaccgttcattcaggcaacgcacaaaacagaaaatgaaggtggaacaagcacagatgttcttcaamtgtttttgtctacactctttctcttttcctctaccatgctgaaggctgaaagacaggaagatggtgccatcagcaaatattattcttaattgaaaacttg

SEQ ID NO: 3806 - DNA, 201 bp, Homo sapiens
attgccattcccacgccaaaatgttaagtgaggttctgagggtgaaggtgatagccccggtggatgaggtccagatttctatcctgtcaagtaaggtggtrgagtctggagaggacattgtgctgcaatgtgctgtgaatgaaggatctggtcccatcacctataagttttacagagaaaaagagggcaaacccttctatc

SEQ ID NO: 3807 - DNA, 201 bp, Homo sapiens
acaaccccactgaagacgtcgaataccagtgtgttgcagataattgccattcccacgccaaaatgttaagtgaggttctgagggtgaaggtgatagccccrgtggatgaggtccagatttctatcctgtcaagtaaggtggtggagtctggagaggacattgtgctgcaatgtgctgtgaatgaaggatctggtcccatca

SEQ ID NO: 3808 - DNA, 201 bp, Homo sapiens
ggtcccatcacctataagttttacagagaaaaagagggcaaacccttctatcaaatgacctcaaatgccacccaggcattttggaccaagcagaaggctadcaaggaacaggagggagagtattactgcacagccttcaacagagccaaccacgcctccagtgtccccagaagcaaaatactgacagtcagagtcattctt

SEQ ID NO: 3809 - DNA, 201 bp, Homo sapiens
cagacagcctccccctgtcccctctatgacctcgccctccacaaatgggaaaaccagactacttgggagcaccgcctgtgaaataccaacctgaagacacsgttcattcaggcaacgcacaaaacagaaaatgaaggtggaacaagcacagatgttcttcaactgtttttgtctacactctttctcttttcctctaccatg

SEQ ID NO: 3810 - DNA, 201 bp, Homo sapiens
ccatctcaaaaaaaacaaaaaacaaaattgcttgctaaagaagtggtctcctgaggtcttaagacattcctgacagtgtcttgagtgggtgggagagaggytgctgtcattgcgctgtggaatttcacagatgagaaccacgcctagccaaaatcacttttcctgtttgcctcagtgacacagctgcagggaccctcgtgg

SEQ ID NO: 3811 - DNA, 201 bp, Homo sapiens
ctctcttgatcattgcggccaaatgttattttctgaggaaagccaaggccaagcagatgccagtggaaatgtccaggccagcagtaccacttctgaactcyaacaacgagaaaatgtcagatcccaatatggaagctaacagtcattacggtcacaatgacgatgtcggaaaccatgcaatgaaaccaataaatgataata

SEQ ID NO: 3812 - DNA, 201 bp, Homo sapiens
ccaattttcttttttatactcaatcatttctagcgcatggcctggttagaggctggttttttctcttttcctttggtccttcaaaggcttgtagttttggstagtccttgttctttggaaatacacagtgctgaccagacagcctccccctgtcccctctatgacctcgccctccacaaatgggaaaaccagactacttgg

SEQ ID NO: 3813 - DNA, 109 bp, Homo sapiens
agatgagaaccacgcctagccaaaatcacttttcctgtttgcctcagtgacacagctgcagggaccctcgtggatgttgtattaaataaatttgacctttrctctttgc

SEQ ID NO: 3814 - DNA, 201 bp, Homo sapiens
aatccatcctgctaagttaatgttgggtagaaagagatacagaggggctgttgaatttcccacataccctccttccaccaagttggaacatccttggaaaytggaagagcacaagaggagatccagggcaaggccattgggatattctgaaacttgaatattttgttttgtgcagagataaagaccttttccatgcaccct

SEQ ID NO: 3815 - DNA, 201 bp, Homo sapiens
aagcagatactctagaacggaaggctcccttgatggaacttagacagcaaggccagatgcacatccctggaaggacatccatgttccgagaagaacagatratccctgtatttcaagacctctgtgcacttatttatgaacctgccctgctcccacagaacacagcaattcctcaggctaagctgccggttcttaaatcca

SEQ ID NO: 3816 - DNA, 201 bp, Homo sapiens
tgttctttggaaatacacagtgctgaccagacagcctccccctgtcccctctatgacctcgccctccacaaatgggaaaaccagactacttgggagcacckcctgtgaaataccaacctgaagacaccgttcattcaggcaacgcacaaaacagaaaatgaaggtggaacaagcacagatgttcttcaactgtttttgtct

SEQ ID NO: 3817 - DNA, 201 bp, Homo sapiens
tgggcggatcacctgaggtcaggagtttgagaccagcctgatgaaaccctgtctctactaaaaatacaagaattagccgggcgtggtggcgcatgcctgtrgtatcagctactcaagaggctgaggtgagattatcgcttgaacccaggaaacggaggttgtagtgagcggagatcgcgccactgcactccagcctgagtg

SEQ ID NO: 3818 - DNA, 201 bp, Homo sapiens
gaatccatctcaaaaaaaacaaaaaacaaaattgcttgctaaagaagtggtctcctgaggtcttaagacattcctgacagtgtcttgagtgggtgggagaraggttgctgtcattgcgctgtggaatttcacagatgagaaccacgcctagccaaaatcacttttcctgtttgcctcagtgacacagctgcagggaccctc

SEQ ID NO: 3819 - DNA, 201 bp, Homo sapiens; identical to SEQ ID NO: 3801

SEQ ID NO: 3820 - DNA, 201 bp, Homo sapiens; identical to SEQ ID NO: 3802

SEQ ID NO: 3821 - DNA, 201 bp, Homo sapiens; identical to SEQ ID NO: 3803

SEQ ID NO: 3822 - DNA, 201 bp, Homo sapiens; identical to SEQ ID NO: 3804

SEQ ID NO: 3823 - DNA, 201 bp, Homo sapiens; identical to SEQ ID NO: 3805

SEQ ID NO: 3824 - DNA, 201 bp, Homo sapiens; identical to SEQ ID NO: 3806

SEQ ID NO: 3825 - DNA, 201 bp, Homo sapiens; identical to SEQ ID NO: 3807

SEQ ID NO: 3826 - DNA, 201 bp, Homo sapiens; identical to SEQ ID NO: 3808

SEQ ID NO: 3827 - DNA, 201 bp, Homo sapiens; identical to SEQ ID NO: 3809

SEQ ID NO: 3828 - DNA, 201 bp, Homo sapiens; identical to SEQ ID NO: 3810

SEQ ID NO: 3829 - DNA, 201 bp, Homo sapiens; identical to SEQ ID NO: 3811

SEQ ID NO: 3830 - DNA, 201 bp, Homo sapiens; identical to SEQ ID NO: 3812

SEQ ID NO: 3831 - DNA, 109 bp, Homo sapiens; identical to SEQ ID NO: 3813

SEQ ID NO: 3832 - DNA, 201 bp, Homo sapiens; identical to SEQ ID NO: 3814

SEQ ID NO: 3833 - DNA, 201 bp, Homo sapiens; identical to SEQ ID NO: 3815

SEQ ID NO: 3834 - DNA, 201 bp, Homo sapiens; identical to SEQ ID NO: 3816

SEQ ID NO: 3835 - DNA, 201 bp, Homo sapiens; identical to SEQ ID NO: 3817

SEQ ID NO: 3836 - DNA, 201 bp, Homo sapiens; identical to SEQ ID NO: 3818

SEQ ID NO: 3837 - DNA, 201 bp, Homo sapiens
tcagacactctgtcaacagcactctcccccagttctctacctccaaaaatatccacagctttccacacccagcagagtgaaggtgcagagaccacaggacrgcctcatgagaggagctcattctctccaggtgtgtctcaagaaatatttactctacatgaaacaacaacatggccttcctcattctccagcaaaggccac

SEQ ID NO: 3838 - DNA, 201 bp, Homo sapiens
tccacaagcacctctcctcaggaatcaccagctgtttcccaaaggggtcacactcaagccccgcagaccacacaagaatcacaaaccacgaggtccgtctmccccatgactgacaccaagacagtcaccaccccaggttcttccttcacagccagtgggcactcgccctcagaaattgttcctcaggacgcacccaccata

SEQ ID NO: 3839 - DNA, 201 bp, Homo sapiens
aggacaagaaccagcagagggtctgacactatcagcctggcgtcccaggcaaccgacaccttctcaacagtcccacccacacctccatcgatcacatccastgggcttacatctccacaaacccagacccacactctgtcaccttcagggtctggtaaaaccttcaccacggccctcatcagcaacgccacccctcttcct

SEQ ID NO: 3840 - DNA, 201 bp, Homo sapiens
tcctcaggacgcacccaccataagtgcagcaacaacctttgccccagctcccaccggggatggtcacacaacccaggccccgaccacagcactgcaggcarcacccagcagccatgatgccaccctggggccctcaggaggcacgtcactttccaaaacaggtgcccttactctggccaactctgtagtgtcaacaccagg

SEQ ID NO: 3841 - DNA, 201 bp, Homo sapiens
gagggtcccctgggtgtccctgagctgcctgtgtctctgcctccttccgcatgtggtcccaggaaccacagaggacacattaataactggaagtaaaactsctgccccagtcacctcaacaggctcaacaacagcgacactagagggacaatcaactgcagcttcttcaaggacctctaatcaggacatatcagcttcatc

SEQ ID NO: 3842 - DNA, 201 bp, Homo sapiens
gacatcactatctgtaagtggaaccatttctgcaatcacttccaaagtttcaaccatatggtggtcagacactctgtcaacagcactctcccccagttctytacctccaaaaatatccacagctttccacacccagcagagtgaaggtgcagagaccacaggacggcctcatgagaggagctcattctctccaggtgtgtc

SEQ ID NO: 3843 - DNA, 201 bp, Homo sapiens
ctggagaggctcttctcagcagcccaagctacagtgtgactcagatgataaaaacggccacatccccatcttcttcacctatgctggatagacacacatcmcaacaaattacaacggcaccatcaacaaatcattcaacaatacattccacaagcacctctcctcaggaatcaccagctgtttcccaaaggggtcacactc

SEQ ID NO: 3844 - DNA, 201 bp, Homo sapiens
gtttctcaggagacattcccttctggtgaaacaaccatctcatccccttccagtgtcagcaatacattcctggtaacatcaaaggtgttcagaatgccaayctccagagactctactcttggaaacacagaggagacatcactatctgtaagtggaaccatttctgcaatcacttccaaagtttcaaccatatggtggtca

SEQ ID NO: 3845 - DNA, 201 bp, Homo sapiens
ctcacaccggttacaacatcaactgttttatcctcaccaagtggattcaacccaagtggaacagtttctcaggagacattcccttctggtgaaacaaccayctcatccccttccagtgtcagcaatacattcctggtaacatcaaaggtgttcagaatgccaatctccagagactctactcttggaaacacagaggagaca

SEQ ID NO: 3846 - DNA, 201 bp, Homo sapiens
cttggaaacacagaagagacatcaacagcaggaactgaaagttctaccccagtgacctcagcagtctcaataacagctggacaggaaggacaatcacgaamaacttcctggaggacctctatccaagacacatcagcttcttctcagaaccactggactcggagcacgcagaccaccagggaatctcaaaccagcacccta

SEQ ID NO: 3847 - DNA, 201 bp, Homo sapiens
gacaacctccacaggctccactcttggaaacccaggggagacatcatcagtacctgttactggaagtcttatgccagtcacctcagcagccttagtaacakttgatccagaaggacaatcaccagcaactttctcaaggacttctactcaggacacaacagctttttctaagaaccaccagactcagagcgtggagaccac

SEQ ID NO: 3848 - DNA, 201 bp, Homo sapiens
atcagtacctgttactggaagtcttatgccagtcacctcagcagccttagtaacagttgatccagaaggacaatcaccagcaactttctcaaggacttctmctcaggacacaacagctttttctaagaaccaccagactcagagcgtggagaccaccagagtatctcaaatcaacaccctcaacaccctcacaccggttac

SEQ ID NO: 3849 - DNA, 201 bp, Homo sapiens
attctccagcaaaggccacacaacttggtcacaaacagaactgccctcaacatcaacaggtgctgccactaggcttgtcacaggaaatccatctacagggrcagctggcactattccaagggtcccctctaaggtctcagcaataggggaaccaggagagcccaccacatactcctcccacagcacaactctcccaaaaac

SEQ ID NO: 3850 - DNA, 140 bp, Homo sapiens
cacagtgtttatttgacactgaaacgaagagcttctgtamaatagaaagcacagtgtgtgcctggctctaaggcaggatgctaagagagagaaccagggtcagctggagaatagacaaatgcagagctcagagaggtggg

SEQ ID NO: 3851 - DNA, 201 bp, Homo sapiens
caacatactggaattcacactggaaaggaactgtacaagtgtaatgagtgtggcagagcctttggtggtcagtcaacacttactcaccatcaagcaatccrtggtatagggaaacttgactaatgtaatgattgtcacaaagtcttcagtaatattacagccattgcaaaacattggagaatccataatgaaggaggtctt

SEQ ID NO: 3852 - DNA, 201 bp, Homo sapiens
tggcaaggtcttcagtccgaggttactccttgcagaatatcataacgttcatttttgaggtaatagttacaaatgcggtgagcacagcaaaccatcaaggrttgacagtagagtcaattcagaattgacttgagtttgagttgacttaaaacattcagttgaagcattaattgacattaaagtgtttatgttaagaggatt

SEQ ID NO: 3853 - DNA, 201 bp, Homo sapiens
aggttactccttgcagaatatcataacgttcatttttgaggtaatagttacaaatgcggtgagcacagcaaaccatcaaggattgacagtagagtcaattsagaattgacttgagtttgagttgacttaaaacattcagttgaagcattaattgacattaaagtgtttatgttaagaggattgggccaggcgtgtggctca

SEQ ID NO: 3854 - DNA, 201 bp, Homo sapiens
gttcatttttgaggtaatagttacaaatgcggtgagcacagcaaaccatcaaggattgacagtagagtcaattcagaattgacttgagtttgagttgactkaaaacattcagttgaagcattaattgacattaaagtgtttatgttaagaggattgggccaggcgtgtggctcacgcctgtaaacccagcactttaggagc

SEQ ID NO: 3855 - DNA, 201 bp, Homo sapiens
aacctattaaaaatgagcttggatcaagctttcattcgcatctgcctgaagtgcacatatttcaccccgaagggaaaattggtaatcaagttgagaaggcyatcaacgatgctttctcagtttcagcatcccaacgaatttcctgtaggccaaaaactcgtatttctaataagtataggaataatttcctccagtcttcat

SEQ ID NO: 3856 - DNA, 201 bp, Homo sapiens
tgaaggtcgcaccgcggcggattgacttctaaagacttggtacgtgaggaaaaaacacggaagaggaagaggaaagcaaaggagtcagggatggctcttcytcagggtctactgacattcagggatgtggccatagaattctctcaggaggagtggaaatgcctggaccctgctcagaggactctatacagagacgtgatg

SEQ ID NO: 3857 - DNA, 201 bp, Homo sapiens
gtcaaaccttgcatgtcatcatagactttatactggagagaaaccttacaaatgtgaagaatgtgacaaaagttttcaatttcaaatcactccttgaaatrcataggagagttcatactggagagaaaccatacaaatgtaaggtttgtgacaaggatttcgggtgtgattcacacctggcccaacatactggaattcaca

SEQ ID NO: 3858 - DNA, 201 bp, Homo sapiens
ttaggagacaaacagtataaatgtgatgtatgcggcaaggactttcatcagaagcgataccttgcatgccatagatgtcacactggtgagaatccttacamgtgtaatgagtgtggcaagacattcagtcacaattcagccctgttagttcacaaggcaattcatactggagagaaaccttacaagtgtaatgaatgtggc

SEQ ID NO: 3859 - DNA, 201 bp, Homo sapiens
caaatcaaaccttgcatgtcatcgtagacttcatactggagagaaaccttacaagtgtaatgaatgtggcaaggtttttaatcgaaaatcaaaccttgaaygtcatcatagacttcatactggaaagaaatcttagaagtgtaaatttgcaaggtttttaggcaacagtcaaaccttgcatgtcatcatagactttatact

SEQ ID NO: 3860 - DNA, 201 bp, Homo sapiens
aagtacacacaagagaaaaatctttccaacgtaatgagagtggcaaagcctttaatggtagctcactcttaaaaaaacatcagataatccatttaggagayaaacagtataaatgtgatgtatgcggcaaggactttcatcagaagcgataccttgcatgccatagatgtcacactggtgagaatccttacacgtgtaatg

SEQ ID NO: 3861 - DNA, 201 bp, Homo sapiens
tctcttgtaatgcataaggtcattcatactggagagaaacgttacaagtgtaatgaatgtggcaaggtttttaatcacaaatcaaaccttgcatgtcatcrtagacttcatactggagagaaaccttacaagtgtaatgaatgtggcaaggtttttaatcgaaaatcaaaccttgaacgtcatcatagacttcatactgga

SEQ ID NO: 3862 - DNA, 201 bp, Homo sapiens
ggagatacttgcttccaggaaattgagaaagatattcatgactttgtgtttcagtggcaagaaaatgaaacaaatggccatgaagcactcatgacaaaaaycaaaaagttgatgagtagtacagagcgacatgatcaaaggcatgctggaaacaaacctattaaaaatgagcttggatcaagctttcattcgcatctgcct

SEQ ID NO: 3863 - DNA, 201 bp, Homo sapiens
ggacagtggaatacctctatagtcaggatggcagcttccacttcttggagctgaatcctcgcttgcaggtggaacatccctgcacagaaatgattgctgaygttaatctgccggccgcccagctacagggttttaagccgagctccgggactgtccaggaactgaatttccggagcagcaagaacgtgtggggttacttca

SEQ ID NO: 3864 - DNA, 201 bp, Homo sapiens
atttttgtatttttggtagagacagagtttcaccaggttggtcaggctggtctcaaactcttgacttcaggtaatccacccaccttggcctcccaaagtgmtgggattacaggcatgagccaccatcttcagccagatgatttttttattgagagagtgaaatgctattttgttccccaaatggcgctagtgaatcactag

SEQ ID NO: 3865 - DNA, 201 bp, Homo sapiens
aatgagtcgggctactacctggacatcagcctctacaaagaagtgactgactccagatctggaaatatcatgtttcactccttcggcaacaagcaagggcsccagcacgggatgctgatcaatactccctacgtcaccaaggatctgctccaggccaagcgattccaggcccagaccctgggaaccacctacatctatgac

SEQ ID NO: 3866 - DNA, 201 bp, Homo sapiens
ccaggtcctcccagcggattcactactgaacctcgtagatgtggaattaatttacggaggtgttaagtacattctcaaggtggcccggcagtctctgaccrtgttcgttctcatcatgaatggctgccacatcgagattgatgcccaccggctgaatgatggggggctcctgctctcctacaatgggaacagctacaccac

SEQ ID NO: 3867 - DNA, 201 bp, Homo sapiens
tcgcgactgctccatccagcggcggcatcagaagatcgttgaggaagcaccggccaccatcgccccgctggccatattcgagttcatggagcagtgtgccrtccgcctggccaagaccgtgggctatgtgagtgcagggacagtggaatacctctatagtcaggatggcagcttccacttcttggagctgaatcctcgctt

SEQ ID NO: 3868 - DNA, 201 bp, Homo sapiens
ttgcggattcccaatttgggcactgcttctcctggggagagaaccgggaagaggccatttcgaacatggtggtggctttgaaggaactgtccatccgaggygactttaggactaccgtggaatacctcattaacctcctggagaccgagagcttccagaacaacgacatcgacaccgggtggttggactacctcattgctg

SEQ ID NO: 3869 - DNA, 201 bp, Homo sapiens
agtccctgcagaccctgccaacctggattctgaggccaagataattcagcaggcaggacaggtgtggttcccagactcagcctacaaaaccgcccaggccrtcaaggacttcaaccgggagaagttgcccctgatgatctttgccaactggagggggttctccggtggcatgaaagacatgtatgaccaggtgctgaagtt

SEQ ID NO: 3870 - DNA, 201 bp, Homo sapiens
agcaagctggctccccctccaaagaagacaagaagcaggcaaacatcaagaggcagctgatgaccaacttcatcctgggctcttttgatgactactcctcygacgaggactctgttgctggctcatctcgtgagtctacccggaagggcagccgggccagcttgggggccctgtccctggaggcttatctgaccacaggtg

SEQ ID NO: 3871 - DNA, 119 bp, Homo sapiens
atggtcttgcttctttgtytatcttgtctgattttctcctgtctgaccttttcctggttaaaaatctgggggaaaatgacggactccaagccgatcaccaagagtaaatcagaagcaaa

SEQ ID NO: 3872 - DNA, 201 bp, Homo sapiens
cagcctctacaaagaagtgactgactccagatctggaaatatcatgtttcactccttcggcaacaagcaagggccccagcacgggatgctgatcaatactscctacgtcaccaaggatctgctccaggccaagcgattccaggcccagaccctgggaaccacctacatctatgacttcccggaaatgttcaggcaggcaag

SEQ ID NO: 3873 - DNA, 201 bp, Homo sapiens
atcaccgtgccagatgactttgagggggtttataccatcctggagtggctgtcctatatgccaaaggataatcacagccctgtccctatcatcacacccaytgaccccattgacagagaaattgaattcctcccatccagagctccctacgacccccggtggatgcttgcaggaaggcctcacccaactctgaagggaacg

SEQ ID NO: 3874 - DNA, 201 bp, Homo sapiens
aagaatttcccaagtttttcacattcagagcaagagatgagtttgcagaagatcgcatttaccgtcacttggaacctgccctggccttccagctggaactyaaccggatgcgtaacttcgatctgaccgccgtgccctgtgccaaccacaagatgcacctttacctgggtgctgccaaggtgaaggaaggtgtggaagtga

SEQ ID NO: 3875 - DNA, 201 bp, Homo sapiens
cccgtcacctggaagttcagatcctcgctgaccagtatgggaatgctgtgtctctgtttggtcgcgactgctccatccagcggcggcatcagaagatcgtkgaggaagcaccggccaccatcgccccgctggccatattcgagttcatggagcagtgtgccatccgcctggccaagaccgtgggctatgtgagtgcaggga

SEQ ID NO: 3876 - DNA, 201 bp, Homo sapiens
ccatgccgatttgctcagggagaacgttgcaatgcacccagcagctcctggctctgcaggcggcacagcctggggccctgtgatcctctggtttcttccaytggggcggagtcgggggtggagggagctggccacaacccactgctctgatgggtggtttgtccaaggatgctgaatgtaatgcctggtcaatgtggaagc

SEQ ID NO: 3877 - DNA, 201 bp, Homo sapiens
tgtgatatacctgagccagcacatcagcccagctgagcgggcgcaggtcgttcacctgctgtctaccatggacagcccggcctccacctgaccgtggcccrcccagccactcccgggaccacggcaaaaggaaccacccagacccaccacccgtacaccctcagcagaccctgaagacttgcttttaaacaaagaaaatcc

SEQ ID NO: 3878 - DNA, 201 bp, Homo sapiens
agcctggggccctgtgatcctctggtttcttccattggggcggagtcgggggtggagggagctggccacaacccactgctctgatgggtggtttgtccaargatgctgaatgtaatgcctggtcaatgtggaagcccatgaggttgcccagggaagcctccaaaagctgggatgcttgagggtatccaagttgaaaaagac

SEQ ID NO: 3879 - DNA, 201 bp, Homo sapiens
acccgtacaccctcagcagaccctgaagacttgcttttaaacaaagaaaatcctgggcacttctgcagggctgctggttccgagctgacacccgtcttaayaaaaggcccaggagtgcctcttccaaacaaaaacagcctcctctccatagctgggaagtttattttgttttgtctctgaagacagcagttttattgcatc

SEQ ID NO: 3880 - DNA, 201 bp, Homo sapiens
cgcaaacaaagtcgtgtgcatggcgtccttggaggtttacgtgcggaggggctacatcgcctatgagttaaacagcctgcagcaccggcagctcccggacrgcacctgcgtggtagaattccagttcatgctgccgtcctcccacccaaaccggatgaccgtgcccatcagcatcaccaaccctgacctgctgaggcacag

SEQ ID NO: 3881 - DNA, 201 bp, Homo sapiens
ctgaaccgttcacaggagaactccctgcccagcagacactgcccatcctcggagagaaactgcaccaggtcttccacagcgtcctggaaaacctcaccaaygtcatgagtggcttttgtctgccagagcccgtttttagcataaagctgaaggagtgggtgcagaagctcatgatgaccctccggcacccgtcactgccgc

SEQ ID NO: 3882 - DNA, 201 bp, Homo sapiens
ataactcaggggagacaccgcagagaaatggggagggccacactctgcccaagacacccagccaggccgagccagcctcccacaaaggccccaaagatgcyggtcggcggagaaactccctaccaccctcccaccagaagcccccaagaaaccccctttcttccagtgacgcagcaccctccccagagcttcaagccaacg

SEQ ID NO: 3883 - DNA, 201 bp, Homo sapiens
gggtgaagtacatcaagcgtccaggtgccgtgctggaagcaggctgcgtggtggccaggctggagctcgatgacccttctaaagtccacccggctgaaccrttcacaggagaactccctgcccagcagacactgcccatcctcggagagaaactgcaccaggtcttccacagcgtcctggaaaacctcaccaacgtcatga

SEQ ID NO: 3884 - DNA, 201 bp, Homo sapiens
acagagactttaccgtggcttctcccgctgagtttgtcacacgctttgggggggatcgggtcatcgagaaggtgcttattgccaacaacgggattgccgcygtgaagtgcatgcgctccatccgcaggtgggcctatgagatgttccgcaacgagcgggccatccggtttgttgtgatggtgacccccgaggaccttaagg

SEQ ID NO: 3885 - DNA, 201 bp, Homo sapiens
gtacccggaaggacgggatgtgatcgtcatcggcaatgacatcacctttcgcattggatcctttggccctggagaggaccttctgtacctgcgggcatccragatggcccgggcagagggcattcccaaaatttacgtggcagccaacagtggcgcccgtattggcatggcagaggagatcaaacacatgttccacgtggc

SEQ ID NO: 3886 - DNA, 201 bp, Homo sapiens
acggccttagacaatacaaacagcccatcctgatctatatcccgccctatgcggagctccggggaggctcctgggtggtcatagatgccaccatcaaccckctgtgcatagaaatgtatgcagacaaagagagcaggggtggtgttctggaaccagaggggacagtggagattaagttccgaaagaaagatctgataaagt

SEQ ID NO: 3887 - DNA, 201 bp, Homo sapiens
gactccccaagactacaccagaatcagctccctgaactccgtccactgtaaacacatcgaggaaggaggagagtccagatacatgatcacggatatcatcrggaaggatgatggcttgggcgtggagaatctgaggggctcaggcatgattgctggggagtcctctctggcttacgaagagatcgtcaccattagcttggt

SEQ ID NO: 3888 - DNA, 201 bp, Homo sapiens
gggagaacgttgcaatgcacccagcagctcctggctctgcaggcggcacagcctggggccctgtgatcctctggtttcttccattggggcggagtcggggrtggagggagctggccacaacccactgctctgatgggtggtttgtccaaggatgctgaatgtaatgcctggtcaatgtggaagcccatgaggttgcccagg

SEQ ID NO: 3889 - DNA, 201 bp, Homo sapiens
aattcctcccatccagagctccctacgacccccggtggatgcttgcaggaaggcctcacccaactctgaagggaacgtggcagagcggattctttgaccayggcagtttcaaggaaatcatggcaccctgggcgcagaccgtggtgacaggacgagcaaggcttggggggattcccgtgggagtgattgctgtggagacac

SEQ ID NO: 3890 - DNA, 201 bp, Homo sapiens
tggaggtggcagtccctgcagaccctgccaacctggattctgaggccaagataattcagcaggcaggacaggtgtggttcccagactcagcctacaaaacygcccaggccatcaaggacttcaaccgggagaagttgcccctgatgatctttgccaactggagggggttctccggtggcatgaaagacatgtatgaccagg

SEQ ID NO: 3891 - DNA, 201 bp, Homo sapiens
ggacagtggaatacctctatagtcaggatggcagcttccacttcttggagctgaatcctcgcttgcaggtggaacatccctgcacagaaatgattgctgaygttaatctgccggccgcccagctacagatcgccatgggcgtgccactgcaccggctgaaggatatccggcttctgtatggagagtcaccatggggagtga

SEQ ID NO: 3892 - DNA, 201 bp, Homo sapiens; identical to SEQ ID NO: 3864

SEQ ID NO: 3893 - DNA, 201 bp, Homo sapiens; identical to SEQ ID NO: 3865

SEQ ID NO: 3894 - DNA, 201 bp, Homo sapiens; identical to SEQ ID NO: 3866

SEQ ID NO: 3895 - DNA, 201 bp, Homo sapiens; identical to SEQ ID NO: 3867

SEQ ID NO: 3896 - DNA, 201 bp, Homo sapiens
gctactggaggcctgcacgagtttgcggattcccaatttgggcactgcttctcctggggagagaaccgggaagaggccatttcgaactgtccatccgaggygactttaggactaccgtggaatacctcattaacctcctggagaccgagagcttccagaacaacgacatcgacaccgggtggttggactacctcattgctg

SEQ ID NO: 3897 - DNA, 201 bp, Homo sapiens
ggatatccggcttctgtatggagagtcaccatggggagtgactcccatttcttttgaaaccccctcaaaccctcccctcgcccgaggccacgtcattgccrccagaatcaccagcgaaaacccagacgaggcaaccgagctccgggactgtccaggaactgaatttccggagcagcaagaacgtgtggggttacttcagcg

SEQ ID NO: 3898 - DNA, 201 bp, Homo sapiens; identical to SEQ ID NO: 3869

SEQ ID NO: 3899 - DNA, 201 bp, Homo sapiens; identical to SEQ ID NO: 3870

SEQ ID NO: 3900 - DNA, 201 bp, Homo sapiens
cagcctctacaaagaagtgactgactccagatctggaaatatcatgtttcactccttcggcaacaagcaagggccccagcacgggatgctgatcaatactscctacgtcaccaaggatctgctccaggccaagcgattccaggcccagaccctgggaaccacctacatctatgacttcccggaaatgttcaggcaggcaaa

SEQ ID NO: 3901 - DNA, 119 bp, Homo sapiens; identical to SEQ ID NO: 3871

SEQ ID NO: 3902 - DNA, 201 bp, Homo sapiens; identical to SEQ ID NO: 3873

SEQ ID NO: 3903 - DNA, 201 bp, Homo sapiens; identical to SEQ ID NO: 3874

SEQ ID NO: 3904 - DNA, 201 bp, Homo sapiens; identical to SEQ ID NO: 3875

SEQ ID NO: 3905 - DNA, 201 bp, Homo sapiens
cctgcacagaaatgattgctgacgttaatctgccggccgcccagctacagatcgccatgggcgtgccactgcaccggctgaaggatatccggcttctgtayggagagtcaccatggggagtgactcccatttcttttgaaaccccctcaaaccctcccctcgcccgaggccacgtcattgccgccagaatcaccagcgaaa

SEQ ID NO: 3906 - DNA, 201 bp, Homo sapiens; identical to SEQ ID NO: 3876

SEQ ID NO: 3907 - DNA, 201 bp, Homo sapiens; identical to SEQ ID NO: 3877

SEQ ID NO: 3908 - DNA, 201 bp, Homo sapiens
catcttcgacgtcctgcctactttcttctatcacgcaaacaaagtcgtgtgcatggcgtccttggagttaaacagcctgcagcaccggcagctcccggacrgcacctgcgtggtagaattccagttcatgctgccgtcctcccacccaaaccggcacagcacagagctcttcatggacagcggcttctccccactgtgcca

SEQ ID NO: 3909 - DNA, 201 bp, Homo sapiens; identical to SEQ ID NO: 3879

SEQ ID NO: 3910 - DNA, 201 bp, Homo sapiens; identical to SEQ ID NO: 3878

SEQ ID NO: 3911 - DNA, 201 bp, Homo sapiens; identical to SEQ ID NO: 3881

SEQ ID NO: 3912 - DNA, 201 bp, Homo sapiens; identical to SEQ ID NO: 3882

SEQ ID NO: 3913 - DNA, 201 bp, Homo sapiens; identical to SEQ ID NO: 3883

SEQ ID NO: 3914 - DNA, 201 bp, Homo sapiens; identical to SEQ ID NO: 3884

SEQ ID NO: 3915 - DNA, 201 bp, Homo sapiens; identical to SEQ ID NO: 3886

SEQ ID NO: 3916 - DNA, 201 bp, Homo sapiens; identical to SEQ ID NO: 3885

SEQ ID NO: 3917 - DNA, 201 bp, Homo sapiens; identical to SEQ ID NO: 3887

SEQ ID NO: 3918 - DNA, 201 bp, Homo sapiens; identical to SEQ ID NO: 3888

SEQ ID NO: 3919 - DNA, 201 bp, Homo sapiens; identical to SEQ ID NO: 3890

SEQ ID NO: 3920 - DNA, 201 bp, Homo sapiens; identical to SEQ ID NO: 3889

SEQ ID NO: 3921 - DNA, 201 bp, Homo sapiens; identical to SEQ ID NO: 3891

SEQ ID NO: 3922 - DNA, 201 bp, Homo sapiens; identical to SEQ ID NO: 3864

SEQ ID NO: 3923 - DNA, 201 bp, Homo sapiens; identical to SEQ ID NO: 3865

SEQ ID NO: 3924 - DNA, 201 bp, Homo sapiens; identical to SEQ ID NO: 3866

SEQ ID NO: 3925 - DNA, 201 bp, Homo sapiens; identical to SEQ ID NO: 3867

SEQ ID NO: 3926 - DNA, 201 bp, Homo sapiens; identical to SEQ ID NO: 3868

SEQ ID NO: 3927 - DNA, 201 bp, Homo sapiens
ggatatccggcttctgtatggagagtcaccatggggagtgactcccatttcttttgaaaccccctcaaaccctcccctcgcccgaggccacgtcattgccrccagaatcaccagcgaaaacccagacgagggttttaagccgagctccgggactgtccaggaactgaatttccggagcagcaagaacgtgtggggttactt

SEQ ID NO: 3928 - DNA, 201 bp, Homo sapiens; identical to SEQ ID NO: 3869

SEQ ID NO: 3929 - DNA, 201 bp, Homo sapiens; identical to SEQ ID NO: 3870

SEQ ID NO: 3930 - DNA, 201 bp, Homo sapiens
cagcctctacaaagaagtgactgactccagatctggaaatatcatgtttcactccttcggcaacaagcaagggccccagcacgggatgctgatcaatactscctacgtcaccaaggatctgctccaggccaagcgattccaggcccagaccctgggaaccacctacatctatgacttcccggaaatgttcaggcaggctct

SEQ ID NO: 3931 - DNA, 119 bp, Homo sapiens; identical to SEQ ID NO: 3871

SEQ ID NO: 3932 - DNA, 201 bp, Homo sapiens; identical to SEQ ID NO: 3873

SEQ ID NO: 3933 - DNA, 201 bp, Homo sapiens; identical to SEQ ID NO: 3874

SEQ ID NO: 3934 - DNA, 201 bp, Homo sapiens; identical to SEQ ID NO: 3875

SEQ ID NO: 3935 - DNA, 201 bp, Homo sapiens; identical to SEQ ID NO: 3905

SEQ ID NO: 3936 - DNA, 201 bp, Homo sapiens; identical to SEQ ID NO: 3876

SEQ ID NO: 3937 - DNA, 201 bp, Homo sapiens; identical to SEQ ID NO: 3877

SEQ ID NO: 3938 - DNA, 201 bp, Homo sapiens; identical to SEQ ID NO: 3880

SEQ ID NO: 3939 - DNA, 201 bp, Homo sapiens; identical to SEQ ID NO: 3879

SEQ ID NO: 3940 - DNA, 201 bp, Homo sapiens; identical to SEQ ID NO: 3878

SEQ ID NO: 3941 - DNA, 201 bp, Homo sapiens; identical to SEQ ID NO: 3881

SEQ ID NO: 3942 - DNA, 201 bp, Homo sapiens; identical to SEQ ID NO: 3882

SEQ ID NO: 3943 - DNA, 201 bp, Homo sapiens; identical to SEQ ID NO: 3883

SEQ ID NO: 3944 - DNA, 201 bp, Homo sapiens; identical to SEQ ID NO: 3884

SEQ ID NO: 3945 - DNA, 201 bp, Homo sapiens; identical to SEQ ID NO: 3886

SEQ ID NO: 3946 - DNA, 201 bp, Homo sapiens; identical to SEQ ID NO: 3885

SEQ ID NO: 3947 - DNA, 201 bp, Homo sapiens; identical to SEQ ID NO: 3887

SEQ ID NO: 3948 - DNA, 201 bp, Homo sapiens; identical to SEQ ID NO: 3888

SEQ ID NO: 3949 - DNA, 201 bp, Homo sapiens; identical to SEQ ID NO: 3890

SEQ ID NO: 3950 - DNA, 201 bp, Homo sapiens; identical to SEQ ID NO: 3889

SEQ ID NO: 3951 - DNA, 143 bp, Homo sapiens
attcctccggcctcagatgaccaggcaccactagatacagaayactgtgctttccttctccaagctttttctttcctggctgatgatttgtcattctagtcacttcctgccttgtgaccacacacccaggcttgacaaagctg

SEQ ID NO: 3952 - DNA, 201 bp, Homo sapiens
tgcgttatgaagagctaatttactggacaaagaattccaaagcaaaaccagaacagtatgaatttgagcaggtctcataggttgagcaatttccccctaaaccaactgaaggctaaaaagcaacaggccattgtgaaccaatgcaagacgccctctatcatggtgaaaagctccatcaatgaggtatcttctttagtggtg

SEQ ID NO: 3953 - DNA, 201 bp, Homo sapiens
ccctgttcctggaggtcagcatttgatctgttgcaagcccctctttctgtcccctcttcctaccctgcctcccatgactttgctcctcacacttttggaaycatgccttccgggggggcccatctcttctggccgtccttgtctctgggccacttggagtgtgtgataaatcagtcaagctgttgaagtctcaggagtctc

SEQ ID NO: 3954 - DNA, 201 bp, Homo sapiens
gaggggaaacatcacacctgccctaaaccctgttcctggaggtcagcatttgatctgttgcaagcccctctttctgtcccctcttcctaccctgcctcccwtgactttgctcctcacacttttggaaccatgccttccgggggggcccatctcttctggccgtccttgtctctgggccacttggagtgtgtgataaatcag

SEQ ID NO: 3955 - DNA, 106 bp, Homo sapiens
gatgatttcccccctccgcctccaggaagaaagaatgttactgccttaataaaaaatgaaaagagaatgatgctcaaaatctttccaaataaaatgttccytatat

SEQ ID NO: 3956 - DNA, 201 bp, Homo sapiens
gaaagaagttattttccaggtacccttctcgcttttgccattagccaaggatagaagctgcagtggtattaattttgatataatctttcaaaccagcttcwtgtggcttcccttttctttgttcaagatgagggccaggaggggaaacatcacacctgccctaaaccctgttcctggaggtcagcatttgatctgttgcaa

SEQ ID NO: 3957 - DNA, 201 bp, Homo sapiens
ccactagatacagaatactgtgctttccttctccaagctttttctttcctggctgatgatttgtcattctagtcacttcctgccttgtgaccacacacccrggcttgacaaagctgttctgcagatcagaaagaaggggttcctggtcatacaccagtactaccaaggacagcttttttcctgcaagatctgttacctaaa

SEQ ID NO: 3958 - DNA, 201 bp, Homo sapiens
tctagagcttagcatatctgattgttgtcaggccatattatcaatgtttacttttttggtactataaaagctttctgccacccctaaactccaggggggamaatatgtgccaatcaatagcacccctactcacatacacacacacctagccagctgtcaagggcagaatgaatctatgctggataagaaatggtggaactg

SEQ ID NO: 3959 - DNA, 201 bp, Homo sapiens
agaaagaagttattttccaggtacccttctcgcttttgccattagccaaggatagaagctgcagtggtattaattttgatataatctttcaaaccagcttsatgtggcttcccttttctttgttcaagatgagggccaggaggggaaacatcacacctgccctaaaccctgttcctggaggtcagcatttgatctgttgca

SEQ ID NO: 3960 - DNA, 201 bp, Homo sapiens
gagaaggtatacactgaatatcctcgaagaaattggtggtggccagaaggtcaatgatgacattattgtcaactgggtgaatgaaacattgagggaagcaragaaaagttcatccatctctagtttcaaggacccgaagattagtacaagtctgcctgttctggacctcatcgatgccatccaaccaggttccattaacta

SEQ ID NO: 3961 - DNA, 201 bp, Homo sapiens
gtggtggccagaaggtcaatgatgacattattgtcaactgggtgaatgaaacattgagggaagcaaagaaaagttcatccatctctagtttcaaggaccckaagattagtacaagtctgcctgttctggacctcatcgatgccatccaaccaggttccattaactatgaccttctgaagacagaaaatctgaatgatgatg

SEQ ID NO: 3962 - DNA, 201 bp, Homo sapiens; identical to SEQ ID NO: 3952

SEQ ID NO: 3963 - DNA, 201 bp, Homo sapiens; identical to SEQ ID NO: 3953

SEQ ID NO: 3964 - DNA, 201 bp, Homo sapiens; identical to SEQ ID NO: 3954

SEQ ID NO: 3965 - DNA, 106 bp, Homo sapiens; identical to SEQ ID NO: 3955

SEQ ID NO: 3966 - DNA, 201 bp, Homo sapiens; identical to SEQ ID NO: 3956

SEQ ID NO: 3967 - DNA, 164 bp, Homo sapiens
ctttttctttcctggctgatgatttgtcattctagtcacttcctgccttgtgaccacacacccrggcttgacaaagctgttctgcagatcagaaagaaggggttcctggtcatacaccagtactaccaaggacagcttttttcctgcaagatctgttacctaaa

SEQ ID NO: 3968 - DNA, 201 bp, Homo sapiens; identical to SEQ ID NO: 3958

SEQ ID NO: 3969 - DNA, 201 bp, Homo sapiens; identical to SEQ ID NO: 3959

SEQ ID NO: 3970 - DNA, 201 bp, Homo sapiens; identical to SEQ ID NO: 3960

SEQ ID NO: 3971 - DNA, 201 bp, Homo sapiens; identical to SEQ ID NO: 3961

SEQ ID NO: 3972 - DNA, 201 bp, Homo sapiens
agcatcatatcttacaaaagttgaggaaatactgtatttccagcttaggaaactgaagattcctccggcctcagatgaccaggcaccactagatacagaayactgtgctttccttctccaagtcacttcctgccttgtgaccacacacccaggcttgacaaagctgttctgcagatcagaaagaaggggttcctggtcata

SEQ ID NO: 3973 - DNA, 201 bp, Homo sapiens
tgcgttatgaagagctaatttactggacaaagaattccaaagcaaaaccagaacagtatgaatttgagcaggtctcataggttgagcaatttccccctaaaccaactgaaggctaaaaagcaacaggccattgtgaaccatggtgaaaagctccatcaatgaggtatcttctttagtggtggtatgtaatggaacttagcc

SEQ ID NO: 3974 - DNA, 201 bp, Homo sapiens; identical to SEQ ID NO: 3953

SEQ ID NO: 3975 - DNA, 201 bp, Homo sapiens; identical to SEQ ID NO: 3954

SEQ ID NO: 3976 - DNA, 201 bp, Homo sapiens; identical to SEQ ID NO: 3956

SEQ ID NO: 3977 - DNA, 201 bp, Homo sapiens
aactgaagattcctccggcctcagatgaccaggcaccactagatacagaatactgtgctttccttctccaagtcacttcctgccttgtgaccacacacccrggcttgacaaagctgttctgcagatcagaaagaaggggttcctggtcatacaccagtactaccaaggacagcttttttcctgcaagatctgttacctaaa

SEQ ID NO: 3978 - DNA, 201 bp, Homo sapiens; identical to SEQ ID NO: 3958

SEQ ID NO: 3979 - DNA, 201 bp, Homo sapiens; identical to SEQ ID NO: 3959

SEQ ID NO: 3980 - DNA, 201 bp, Homo sapiens; identical to SEQ ID NO: 3960

SEQ ID NO: 3981 - DNA, 201 bp, Homo sapiens; identical to SEQ ID NO: 3961

SEQ ID NO: 3982 - DNA, 201 bp, Homo sapiens
agctctgccgggccgcggcggtgatcgatggggagcggctggagcggacccagcgagtgagggcgcacagccgggacgccgaggcggcgggcgggagaccmgcaccagcgcagccggccctcggcgggacgtgacgcagcgcccggggcgcgggtttgatatttgacaaattgatctaaaatggctgggtttttatctgaa

SEQ ID NO: 3983 - DNA, 201 bp, Homo sapiens
gatttaatatctgagaagtgtatatagtttgtggtaaaaagattatatatcataaagtatgccttcctgtttaaaaaaagtatatattctacacatatatrtatatgtatatctatatctctaaactgctgttaattgattaaaatctggcaaagttatatttactttaaaataaaataattttattgcaatgtatttatc

SEQ ID NO: 3984 - DNA, 201 bp, Homo sapiens
ccccaaaagccaaatcccactcaaacctttcaacaaaaatgagcacgctttcctaccgcccctcagataatgtaagctcatccaccaagaagcctgcaccrtgttttgaggttgagtgacatgttcgaaacctgtccataaagtaattttgtgaaagaaggagcaagagaacattcctctgcagcacttcactaccaaatg

SEQ ID NO: 3985 - DNA, 201 bp, Homo sapiens
tcaaacctttcaacaaaaatgagcacgctttcctaccgcccctcagataatgtaagctcatccaccaagaagcctgcaccatgttttgaggttgagtgacrtgttcgaaacctgtccataaagtaattttgtgaaagaaggagcaagagaacattcctctgcagcacttcactaccaaatgagcattagctacttttcaga

SEQ ID NO: 3986 - DNA, 201 bp, Homo sapiens
tttgaggttgagtgacatgttcgaaacctgtccataaagtaattttgtgaaagaaggagcaagagaacattcctctgcagcacttcactaccaaatgagcmttagctacttttcagaattgaaggagaaaatgcattatgtggactgaaccgacttttctaaagctctgaacaaaagcttttctttccttttgcaacaaga

SEQ ID NO: 3987 - DNA, 201 bp, Homo sapiens
gaagcctgcaccatgttttgaggttgagtgacatgttcgaaacctgtccataaagtaattttgtgaaagaaggagcaagagaacattcctctgcagcactkcactaccaaatgagcattagctacttttcagaattgaaggagaaaatgcattatgtggactgaaccgacttttctaaagctctgaacaaaagcttttctt

SEQ ID NO: 3988 - DNA, 201 bp, Homo sapiens
cctggattccccaccaaatattcacttttctggatgtattgattcaactaggcatcatacgtgactgtagaattgcagatattgtggacacggccatgccyatcaccatttgtatagcttattttaacaattgcctgaatcctcttttttatggctttctggggaaaaaatttaaaagatattttctccagcttctaaaat

SEQ ID NO: 3989 - DNA, 201 bp, Homo sapiens
accaaatattcacttttctggatgtattgattcaactaggcatcatacgtgactgtagaattgcagatattgtggacacggccatgcctatcaccatttgkatagcttattttaacaattgcctgaatcctcttttttatggctttctggggaaaaaatttaaaagatattttctccagcttctaaaatatattcccccaa

SEQ ID NO: 3990 - DNA, 201 bp, Homo sapiens
tggctttctggggaaaaaatttaaaagatattttctccagcttctaaaatatattcccccaaaagccaaatcccactcaaacctttcaacaaaaatgagcmcgctttcctaccgcccctcagataatgtaagctcatccaccaagaagcctgcaccatgttttgaggttgagtgacatgttcgaaacctgtccataaagta

SEQ ID NO: 3991 - DNA, 201 bp, Homo sapiens
aactaggcatcatacgtgactgtagaattgcagatattgtggacacggccatgcctatcaccatttgtatagcttattttaacaattgcctgaatcctctkttttatggctttctggggaaaaaatttaaaagatattttctccagcttctaaaatatattcccccaaaagccaaatcccactcaaacctttcaacaaaaa

SEQ ID NO: 3992 - DNA, 201 bp, Homo sapiens
ttgagtgacatgttcgaaacctgtccataaagtaattttgtgaaagaaggagcaagagaacattcctctgcagcacttcactaccaaatgagcattagctrcttttcagaattgaaggagaaaatgcattatgtggactgaaccgacttttctaaagctctgaacaaaagcttttctttccttttgcaacaagacaaagca

SEQ ID NO: 3993 - DNA, 201 bp, Homo sapiens
atgacggctgctcgaagaacaatgtcagaaactcgatgaatgtgttgatttgagaaattttactgacagaaatgcaatctccctagcctgcttttgtcctrttattttttatttccacataaaggtatttagaatatattaaatcgttagaggagcaacaggagatgagagttccagattgttctgtccagtttccaaagg

SEQ ID NO: 3994 - DNA, 201 bp, Homo sapiens
aaagaaggagcaagagaacattcctctgcagcacttcactaccaaatgagcattagctacttttcagaattgaaggagaaaatgcattatgtggactgaaycgacttttctaaagctctgaacaaaagcttttctttccttttgcaacaagacaaagcaaagccacattttgcattagacagatgacggctgctcgaagaa

SEQ ID NO: 3995 - DNA, 201 bp, Homo sapiens
aaaggtatttagaatatattaaatcgttagaggagcaacaggagatgagagttccagattgttctgtccagtttccaaagggcagtaaagttttcgtgcckgttttcagctattagcaactgtgctacacttgcacctggtactgcacattttgtacaaagatatgctaagcagtagtcgtcaagttgcagatctttttgt

SEQ ID NO: 3996 - DNA, 201 bp, Homo sapiens
tggccagtttgccagctataatccatcgaaatgtatttttcattgagaacaccaatattacagtttgtgctttccattatgagtcccaaaattcaaccctyccgatagggctgggcctgaccaaaaatatactgggtttcctgtttccttttctgatcattcttacaagttatactcttatttggaaggccctaaagaagg

SEQ ID NO: 3997 - DNA, 201 bp, Homo sapiens
actgtagaattgcagatattgtggacacggccatgcctatcaccatttgtatagcttattttaacaattgcctgaatcctcttttttatggctttctgggraaaaaatttaaaagatattttctccagcttctaaaatatattcccccaaaagccaaatcccactcaaacctttcaacaaaaatgagcacgctttcctacc

SEQ ID NO: 3998 - DNA, 201 bp, Homo sapiens
tgcctatcaccatttgtatagcttattttaacaattgcctgaatcctcttttttatggctttctggggaaaaaatttaaaagatattttctccagcttctraaatatattcccccaaaagccaaatcccactcaaacctttcaacaaaaatgagcacgctttcctaccgcccctcagataatgtaagctcatccaccaaga

SEQ ID NO: 3999 - DNA, 201 bp, Homo sapiens
tgcccgtaagatggcttatttgtataatggtgttactaaagtcacatataaaagttaaactacttgtaaaggtgctgcactggtcccaagtagtagtgtcytcctagtatattagtttgatttaatatctgagaagtgtatatagtttgtggtaaaaagattatatatcataaagtatgccttcctgtttaaaaaaagtat

SEQ ID NO: 4000 - DNA, 201 bp, Homo sapiens
tagcttattttaacaattgcctgaatcctcttttttatggctttctggggaaaaaatttaaaagatattttctccagcttctaaaatatattcccccaaargccaaatcccactcaaacctttcaacaaaaatgagcacgctttcctaccgcccctcagataatgtaagctcatccaccaagaagcctgcaccatgttttg

SEQ ID NO: 4001 - DNA, 201 bp, Homo sapiens
acttgcacctggtactgcacattttgtacaaagatatgctaagcagtagtcgtcaagttgcagatctttttgtgaaattcaacctgtgtcttataggtttmcactgccaaaacaatgcccgtaagatggcttatttgtataatggtgttactaaagtcacatataaaagttaaactacttgtaaaggtgctgcactggtcc

SEQ ID NO: 4002 - DNA, 129 bp, Homo sapiens
agggcatgccattgcaagagaatgctcakccatgttcatctggggacctgctcctggtagagcaataggatctgtgtgcccagcaccactgcccacctagctgtcctggcctgtgcccaatgctgacct

SEQ ID NO: 4003 - DNA, 201 bp, Homo sapiens; identical to SEQ ID NO: 3983

SEQ ID NO: 4004 - DNA, 158 bp, Homo sapiens
agggcatgccattgcaagagaatgctcagccatgttcatctggggacctgctcctggyagagcaataggatctgtgtgcccagcaccactgcccacctagctgtcctggcctgtgcccaatgctgaccttcacctcagagtgtggctgtaccacattc

SEQ ID NO: 4005 - DNA, 201 bp, Homo sapiens; identical to SEQ ID NO: 3984

SEQ ID NO: 4006 - DNA, 201 bp, Homo sapiens; identical to SEQ ID NO: 3985

SEQ ID NO: 4007 - DNA, 201 bp, Homo sapiens; identical to SEQ ID NO: 3986

SEQ ID NO: 4008 - DNA, 201 bp, Homo sapiens; identical to SEQ ID NO: 3987

SEQ ID NO: 4009 - DNA, 201 bp, Homo sapiens; identical to SEQ ID NO: 3988

SEQ ID NO: 4010 - DNA, 201 bp, Homo sapiens; identical to SEQ ID NO: 3989

SEQ ID NO: 4011 - DNA, 201 bp, Homo sapiens; identical to SEQ ID NO: 3990

SEQ ID NO: 4012 - DNA, 201 bp, Homo sapiens; identical to SEQ ID NO: 3991

SEQ ID NO: 4013 - DNA, 201 bp, Homo sapiens; identical to SEQ ID NO: 3992

SEQ ID NO: 4014 - DNA, 201 bp, Homo sapiens; identical to SEQ ID NO: 3993

SEQ ID NO: 4015 - DNA, 201 bp, Homo sapiens; identical to SEQ ID NO: 3994

SEQ ID NO: 4016 - DNA, 201 bp, Homo sapiens; identical to SEQ ID NO: 3995

SEQ ID NO: 4017 - DNA, 201 bp, Homo sapiens; identical to SEQ ID NO: 3996

SEQ ID NO: 4018 - DNA, 201 bp, Homo sapiens; identical to SEQ ID NO: 3997

SEQ ID NO: 4019 - DNA, 201 bp, Homo sapiens; identical to SEQ ID NO: 3998

SEQ ID NO: 4020 - DNA, 201 bp, Homo sapiens; identical to SEQ ID NO: 3999

SEQ ID NO: 4021 - DNA, 201 bp, Homo sapiens; identical to SEQ ID NO: 4000

SEQ ID NO: 4022 - DNA, 201 bp, Homo sapiens; identical to SEQ ID NO: 4001

SEQ ID NO: 4023 - DNA, 200 bp, Homo sapiens
agggcatgccattgcaagagaatgctcagccatgttcatctggggacctgctcctggtagagcaataggatctgtgtgcccagcaccactgcccacctakctgtcctggcctgtgcccaatgctgaccttcacctcagagtgtggctgtaccacattcggtgtatttgatatagtgtttgcaacaaattcgacccaggtg

SEQ ID NO: 4024 - DNA, 201 bp, Homo sapiens
atctggggacctgctcctggtagagcaataggatctgtgtgcccagcaccactgcccacctagctgtcctggcctgtgcccaatgctgaccttcacctcakagtgtggctgtaccacattcggtgtatttgatatagtgtttgcaacaaattcgacccaggtgatcaaaatgattctcaactcttctactgaagatggtat

SEQ ID NO: 4025 - DNA, 201 bp, Homo sapiens
agctctgccgggccgcggcggtgatcgatggggagcggctggagcggacccagcgagtgagggcgcacagccgggacgccgaggcggcgggcgggagaccmgcaccagcgcagccggccctcggcgggacgtgacgcagcgcccggggcgcggatgaagaaaatgaatcacaagtcaactgacagtccaaaggctccacag

SEQ ID NO: 4026 - DNA, 201 bp, Homo sapiens; identical to SEQ ID NO: 3983

SEQ ID NO: 4027 - DNA, 201 bp, Homo sapiens; identical to SEQ ID NO: 3984

SEQ ID NO: 4028 - DNA, 201 bp, Homo sapiens; identical to SEQ ID NO: 3985

SEQ ID NO: 4029 - DNA, 201 bp, Homo sapiens; identical to SEQ ID NO: 3986

SEQ ID NO: 4030 - DNA, 201 bp, Homo sapiens; identical to SEQ ID NO: 3987

SEQ ID NO: 4031 - DNA, 201 bp, Homo sapiens; identical to SEQ ID NO: 3988

SEQ ID NO: 4032 - DNA, 201 bp, Homo sapiens; identical to SEQ ID NO: 3989

SEQ ID NO: 4033 - DNA, 201 bp, Homo sapiens; identical to SEQ ID NO: 3990

SEQ ID NO: 4034 - DNA, 201 bp, Homo sapiens; identical to SEQ ID NO: 3991

SEQ ID NO: 4035 - DNA, 201 bp, Homo sapiens; identical to SEQ ID NO: 3992

SEQ ID NO: 4036 - DNA, 201 bp, Homo sapiens; identical to SEQ ID NO: 3993

SEQ ID NO: 4037 - DNA, 201 bp, Homo sapiens; identical to SEQ ID NO: 3994

SEQ ID NO: 4038 - DNA, 201 bp, Homo sapiens; identical to SEQ ID NO: 3995

SEQ ID NO: 4039 - DNA, 201 bp, Homo sapiens; identical to SEQ ID NO: 3996

SEQ ID NO: 4040 - DNA, 201 bp, Homo sapiens
cgcagccggccctcggcgggacgtgacgcagcgcccggggcgcggatgaagaaaatgaatcacaagtcaactgacagtccaaaggctccacagctcagagraggtgtatttgatatagtgtttgcaacaaattcgacccaggtgatcaaaatgattctcaactcttctactgaagatggtattaaaagaatccaagatgat

SEQ ID NO: 4041 - DNA, 201 bp, Homo sapiens; identical to SEQ ID NO: 3997

SEQ ID NO: 4042 - DNA, 201 bp, Homo sapiens; identical to SEQ ID NO: 3998

SEQ ID NO: 4043 - DNA, 201 bp, Homo sapiens; identical to SEQ ID NO: 3999

SEQ ID NO: 4044 - DNA, 201 bp, Homo sapiens; identical to SEQ ID NO: 4000

SEQ ID NO: 4045 - DNA, 201 bp, Homo sapiens; identical to SEQ ID NO: 4001

SEQ ID NO: 4046 - DNA, 201 bp, Homo sapiens; identical to SEQ ID NO: 3982

SEQ ID NO: 4047 - DNA, 201 bp, Homo sapiens; identical to SEQ ID NO: 3983

SEQ ID NO: 4048 - DNA, 201 bp, Homo sapiens; identical to SEQ ID NO: 3984

SEQ ID NO: 4049 - DNA, 201 bp, Homo sapiens; identical to SEQ ID NO: 3985

SEQ ID NO: 4050 - DNA, 201 bp, Homo sapiens; identical to SEQ ID NO: 3986

SEQ ID NO: 4051 - DNA, 201 bp, Homo sapiens; identical to SEQ ID NO: 3987

SEQ ID NO: 4052 - DNA, 201 bp, Homo sapiens; identical to SEQ ID NO: 3988

SEQ ID NO: 4053 - DNA, 201 bp, Homo sapiens; identical to SEQ ID NO: 3989

SEQ ID NO: 4054 - DNA, 201 bp, Homo sapiens; identical to SEQ ID NO: 3990

SEQ ID NO: 4055 - DNA, 201 bp, Homo sapiens; identical to SEQ ID NO: 3991

SEQ ID NO: 4056 - DNA, 201 bp, Homo sapiens; identical to SEQ ID NO: 3992

SEQ ID NO: 4057 - DNA, 201 bp, Homo sapiens; identical to SEQ ID NO: 3993

SEQ ID NO: 4058 - DNA, 201 bp, Homo sapiens; identical to SEQ ID NO: 3994

SEQ ID NO: 4059 - DNA, 201 bp, Homo sapiens; identical to SEQ ID NO: 3995

SEQ ID NO: 4060 - DNA, 201 bp, Homo sapiens; identical to SEQ ID NO: 3996

SEQ ID NO: 4061 - DNA, 201 bp, Homo sapiens
ttatctgaataactcactgatgccatcccagaaagtcggcaccagatgaagaaaatgaatcacaagtcaactgacagtccaaaggctccacagctcagagraggtgtatttgatatagtgtttgcaacaaattcgacccaggtgatcaaaatgattctcaactcttctactgaagatggtattaaaagaatccaagatgat

SEQ ID NO: 4062 - DNA, 201 bp, Homo sapiens; identical to SEQ ID NO: 3997

SEQ ID NO: 4063 - DNA, 201 bp, Homo sapiens; identical to SEQ ID NO: 3998

SEQ ID NO: 4064 - DNA, 201 bp, Homo sapiens; identical to SEQ ID NO: 3999

SEQ ID NO: 4065 - DNA, 201 bp, Homo sapiens; identical to SEQ ID NO: 4000

SEQ ID NO: 4066 - DNA, 201 bp, Homo sapiens; identical to SEQ ID NO: 4001

SEQ ID NO: 4067 - DNA, 201 bp, Homo sapiens
agctctgccgggccgcggcggtgatcgatggggagcggctggagcggacccagcgagtgagggcgcacagccgggacgccgaggcggcgggcgggagaccmgcaccagcgcagccggccctcggcgggacgtgacgcagcgcccggggcgcgggtgtatttgatatagtgtttgcaacaaattcgacccaggtgatcaaaa

SEQ ID NO: 4068 - DNA, 201 bp, Homo sapiens; identical to SEQ ID NO: 3983

SEQ ID NO: 4069 - DNA, 201 bp, Homo sapiens; identical to SEQ ID NO: 3984

SEQ ID NO: 4070 - DNA, 201 bp, Homo sapiens; identical to SEQ ID NO: 3985

SEQ ID NO: 4071 - DNA, 201 bp, Homo sapiens; identical to SEQ ID NO: 3986

SEQ ID NO: 4072 - DNA, 201 bp, Homo sapiens; identical to SEQ ID NO: 3987

SEQ ID NO: 4073 - DNA, 201 bp, Homo sapiens; identical to SEQ ID NO: 3988

SEQ ID NO: 4074 - DNA, 201 bp, Homo sapiens; identical to SEQ ID NO: 3989

SEQ ID NO: 4075 - DNA, 201 bp, Homo sapiens; identical to SEQ ID NO: 3990

SEQ ID NO: 4076 - DNA, 201 bp, Homo sapiens; identical to SEQ ID NO: 3991

SEQ ID NO: 4077 - DNA, 201 bp, Homo sapiens; identical to SEQ ID NO: 3992

SEQ ID NO: 4078 - DNA, 201 bp, Homo sapiens; identical to SEQ ID NO: 3993

SEQ ID NO: 4079 - DNA, 201 bp, Homo sapiens; identical to SEQ ID NO: 3994

SEQ ID NO: 4080 - DNA, 201 bp, Homo sapiens; identical to SEQ ID NO: 3995

SEQ ID NO: 4081 - DNA, 201 bp, Homo sapiens; identical to SEQ ID NO: 3996

SEQ ID NO: 4082 - DNA, 201 bp, Homo sapiens; identical to SEQ ID NO: 3997

SEQ ID NO: 4083 - DNA, 201 bp, Homo sapiens; identical to SEQ ID NO: 3998

SEQ ID NO: 4084 - DNA, 201 bp, Homo sapiens; identical to SEQ ID NO: 3999

SEQ ID NO: 4085 - DNA, 201 bp, Homo sapiens; identical to SEQ ID NO: 4000

SEQ ID NO: 4086 - DNA, 201 bp, Homo sapiens; identical to SEQ ID NO: 4001

SEQ ID NO: 4087 - DNA, 201 bp, Homo sapiens
aatattcctgtggtgtctggcaaagaatgtgaggaaattatcaggaaaggaggtgaaacatctgaaatgtatctcattcaacctgacagttctgtcaaacygtatagagtatactgtgacatgaatacagaaaatggaggatggacagtgattcagaaccgtcaagacggtagtgttgactttggcaggaaatgggatcca

SEQ ID NO: 4088 - DNA, 168 bp, Homo sapiens
tgaagtcattcctagcagaggactcagatatatataggattgaagatctctcagttaagtctacatgraaaggatggtttcttggagcttccacaaacttaaaaccatgaaacatctattattgctactattgtgtgtttttctagttaagtcccaaggtgtcaacga

SEQ ID NO: 4089 - DNA, 201 bp, Homo sapiens
gaggtgaaacatctgaaatgtatctcattcaacctgacagttctgtcaaaccgtatagagtatactgtgacatgaatacagaaaatggaggatggacagtkattcagaaccgtcaagacggtagtgttgactttggcaggaaatgggatccatataaacagggatttggaaatgttgcaaccaacacagatgggaagaatt

SEQ ID NO: 4090 - DNA, 201 bp, Homo sapiens
aagaggcagaagcaagtaaaagataatgaaaatgtagtcaatgagtactcctcagaactggaaaagcaccaattatatatagatgagactgtgaatagcartatcccaactaaccttcgtgtgcttcgttcaatcctggaaaacctgagaagcaaaatacaaaagttagaatctgatgtctcagctcaaatggaatattgt

SEQ ID NO: 4091 - DNA, 201 bp, Homo sapiens
cagaacttttgatagaaatggaggactggaaaggagacaaagtaaaggctcactatggaggattcactgtacagaatgaagccaacaaataccagatctcrgtgaacaaatacagaggaacagccggtaatgccctcatggatggagcatctcagctgatgggagaaaacaggaccatgaccattcacaacggcatgttct

SEQ ID NO: 4092 - DNA, 201 bp, Homo sapiens
aaaagataatgaaaatgtagtcaatgagtactcctcagaactggaaaagcaccaattatatatagatgagactgtgaatagcaatatcccaactaaccttygtgtgcttcgttcaatcctggaaaacctgagaagcaaaatacaaaagttagaatctgatgtctcagctcaaatggaatattgtcgcaccccatgcactgt

SEQ ID NO: 4093 - DNA, 201 bp, Homo sapiens
ccatgaaacatctattattgctactattgtgtgtttttctagttaagtcccaaggtgtcaacgacaatgaggagggtttcttcagtgcccgtggtcatcgrccccttgacaagaagagagaagaggctttgctacaacaggaaaggccaatcagaaatagtgttgatgagttaaataacaatgtggaagctgtttcccaga

SEQ ID NO: 4094 - DNA, 201 bp, Homo sapiens
tctgaaatgtatctcattcaacctgacagttctgtcaaaccgtatagagtatactgtgacatgaatacagaaaatggaggatggacagtgattcagaaccrtcaagacggtagtgttgactttggcaggaaatgggatccatataaacagggatttggaaatgttgcaaccaacacagatgggaagaattactgtggccta

SEQ ID NO: 4095 - DNA, 201 bp, Homo sapiens
gaagaattactgtggcctaccaggtgaatattggcttggaaatgataaaattagccagcttaccaggatgggacccacagaacttttgatagaaatggagkactggaaaggagacaaagtaaaggctcactatggaggattcactgtacagaatgaagccaacaaataccagatctcagtgaacaaatacagaggaacagc

SEQ ID NO: 4096 - DNA, 201 bp, Homo sapiens
caaacttaaaaccatgaaacatctattattgctactattgtgtgtttttctagttaagtcccaaggtgtcaacgacaatgaggagggtttcttcagtgccygtggtcatcgaccccttgacaagaagagagaagaggctttgctacaacaggaaaggccaatcagaaatagtgttgatgagttaaataacaatgtggaagc

SEQ ID NO: 4097 - DNA, 201 bp, Homo sapiens
gcttaccaggatgggacccacagaacttttgatagaaatggaggactggaaaggagacaaagtaaaggctcactatggaggattcactgtacagaatgaarccaacaaataccagatctcagtgaacaaatacagaggaacagccggtaatgccctcatggatggagcatctcagctgatgggagaaaacaggaccatgac

SEQ ID NO: 4098 - DNA, 201 bp, Homo sapiens
agatactactggggtggacagtacacctgggacatggcaaagcatggcacagatgatggtgtagtatggatgaattggaaggggtcatggtactcaatgargaagatgagtatgaagatcaggcccttcttcccacagcaatagtccccaatacgtagatttttgctcttctgtatgtgacaacatttttgtacattatgt

SEQ ID NO: 4099 - DNA, 201 bp, Homo sapiens
acttaaaaccatgaaacatctattattgctactattgtgtgtttttctagttaagtcccaaggtgtcaacgacaatgaggagggtttcttcagtgcccgtkgtcatcgaccccttgacaagaagagagaagaggctttgctacaacaggaaaggccaatcagaaatagtgttgatgagttaaataacaatgtggaagctgt

SEQ ID NO: 4100 - DNA, 201 bp, Homo sapiens
gacaaagtaaaggctcactatggaggattcactgtacagaatgaagccaacaaataccagatctcagtgaacaaatacagaggaacagccggtaatgccckcatggatggagcatctcagctgatgggagaaaacaggaccatgaccattcacaacggcatgttcttcagcacgtatgacagagacaatgacggctggtta

SEQ ID NO: 4101 - DNA, 201 bp, Homo sapiens
tagaaatggaggactggaaaggagacaaagtaaaggctcactatggaggattcactgtacagaatgaagccaacaaataccagatctcagtgaacaaatayagaggaacagccggtaatgccctcatggatggagcatctcagctgatgggagaaaacaggaccatgaccattcacaacggcatgttcttcagcacgtatg

SEQ ID NO: 4102 - DNA, 201 bp, Homo sapiens
atgaccattcacaacggcatgttcttcagcacgtatgacagagacaatgacggctggttaacatcagatcccagaaaacagtgttctaaagaagacggtgrtggatggtggtataatagatgtcatgcagccaatccaaacggcagatactactggggtggacagtacacctgggacatggcaaagcatggcacagatgat

SEQ ID NO: 4103 - DNA, 201 bp, Homo sapiens
tcaatgagtactcctcagaactggaaaagcaccaattatatatagatgagactgtgaatagcaatatcccaactaaccttcgtgtgcttcgttcaatcctrgaaaacctgagaagcaaaatacaaaagttagaatctgatgtctcagctcaaatggaatattgtcgcaccccatgcactgtcagttgcaatattcctgtgg

SEQ ID NO: 4104 - DNA, 201 bp, Homo sapiens
tgtcatgcagccaatccaaacggcagatactactggggtggacagtacacctgggacatggcaaagcatggcacagatgatggtgtagtatggatgaattrgaaggggtcatggtactcaatgaggaagatgagtatgaagatcaggcccttcttcccacagcaatagtccccaatacgtagatttttgctcttctgtatg

SEQ ID NO: 4105 - DNA, 201 bp, Homo sapiens
gcagaagcaagtaaaagataatgaaaatgtagtcaatgagtactcctcagaactggaaaagcaccaattatatatagatgagactgtgaatagcaatatcscaactaaccttcgtgtgcttcgttcaatcctggaaaacctgagaagcaaaatacaaaagttagaatctgatgtctcagctcaaatggaatattgtcgcac

SEQ ID NO: 4106 - DNA, 201 bp, Homo sapiens
gcatggcacagatgatggtgtagtatggatgaattggaaggggtcatggtactcaatgaggaagatgagtatgaagatcaggcccttcttcccacagcaawagtccccaatacgtagatttttgctcttctgtatgtgacaacatttttgtacattatgttattggaattttctttcatacattatattcctctaaaactc

SEQ ID NO: 4107 - DNA, 201 bp, Homo sapiens
aaaagaggcagaagcaagtaaaagataatgaaaatgtagtcaatgagtactcctcagaactggaaaagcaccaattatatatagatgagactgtgaatagyaatatcccaactaaccttcgtgtgcttcgttcaatcctggaaaacctgagaagcaaaatacaaaagttagaatctgatgtctcagctcaaatggaatatt

SEQ ID NO: 4108 - DNA, 113 bp, Homo sapiens
aaaggaaaaactgatgtttaaaagtccacttttaaaactatatttatttatgtaggatctgtcaaagaaaacttccaaaaagatttattaattaaaccagmctctgttgcaat

SEQ ID NO: 4109 - DNA, 201 bp, Homo sapiens
gaagccaacaaataccagatctcagtgaacaaatacagaggaacagccggtaatgccctcatggatggagcatctcagctgatgggagaaaacaggaccaygaccattcacaacggcatgttcttcagcacgtatgacagagacaatgacggctggttaacatcagatcccagaaaacagtgttctaaagaagacggtggt

SEQ ID NO: 4110 - DNA, 201 bp, Homo sapiens
tgtttcccagacctcctcttcttcctttcagtacatgtatttgctgaaagacctgtggcaaaagaggcagaagcaagtaaaagataatgaaaatgtagtcmatgagtactcctcagaactggaaaagcaccaattatatatagatgagactgtgaatagcaatatcccaactaaccttcgtgtgcttcgttcaatcctgga

SEQ ID NO: 4111 - DNA, 162 bp, Homo sapiens
aaataaggaagaggggtcttttatccttgtcgtaggaaaaccatgacggaaaggaaaaactgatgtttaaaagtccacttttaaaactatatttatttatrtaggatctgtcaaagaaaacttccaaaaagatttattaattaaaccagactctgttgcaat

SEQ ID NO: 4112 - DNA, 201 bp, Homo sapiens
ggctcccagcctgaggcctgccccaccgcccatcagtggaggtggctatcgggctcgtccagccaaagcagctgccactcaaaagaaagtagaaattgtgycctacaggatgtcagttgcaagaggctttgctacaacaggaaaggccaatcagaaatagtgttgatgagttaaataacaatgtggaagctgtttcccaga

SEQ ID NO: 4113 - DNA, 201 bp, Homo sapiens; identical to SEQ ID NO: 4087

SEQ ID NO: 4114 - DNA, 111 bp, Homo sapiens
agtctacatgraaaggatggtttcttggagcttccacaaacttaaaaccatgaaacatctattattgctactattgtgtgtttttctagttaagtcccaaggtgtcaacga

SEQ ID NO: 4115 - DNA, 201 bp, Homo sapiens; identical to SEQ ID NO: 4089

SEQ ID NO: 4116 - DNA, 201 bp, Homo sapiens; identical to SEQ ID NO: 4090

SEQ ID NO: 4117 - DNA, 201 bp, Homo sapiens; identical to SEQ ID NO: 4091

SEQ ID NO: 4118 - DNA, 201 bp, Homo sapiens
ccatgaaacatctattattgctactattgtgtgtttttctagttaagtcccaaggtgtcaacgacaatgaggagggtttcttcagtgcccgtggtcatcgrccccttgacaagaagagagaagaggctcccagcctgaggcctgccccaccgcccatcagtggaggtggctatcgggctcgtccagccaaagcagctgcca

SEQ ID NO: 4119 - DNA, 201 bp, Homo sapiens; identical to SEQ ID NO: 4092

SEQ ID NO: 4120 - DNA, 201 bp, Homo sapiens; identical to SEQ ID NO: 4094

SEQ ID NO: 4121 - DNA, 201 bp, Homo sapiens; identical to SEQ ID NO: 4095

SEQ ID NO: 4122 - DNA, 201 bp, Homo sapiens; identical to SEQ ID NO: 4097

SEQ ID NO: 4123 - DNA, 201 bp, Homo sapiens
caaacttaaaaccatgaaacatctattattgctactattgtgtgtttttctagttaagtcccaaggtgtcaacgacaatgaggagggtttcttcagtgccygtggtcatcgaccccttgacaagaagagagaagaggctcccagcctgaggcctgccccaccgcccatcagtggaggtggctatcgggctcgtccagccaa

SEQ ID NO: 4124 - DNA, 201 bp, Homo sapiens; identical to SEQ ID NO: 4098

SEQ ID NO: 4125 - DNA, 201 bp, Homo sapiens; identical to SEQ ID NO: 4100

SEQ ID NO: 4126 - DNA, 201 bp, Homo sapiens
acttaaaaccatgaaacatctattattgctactattgtgtgtttttctagttaagtcccaaggtgtcaacgacaatgaggagggtttcttcagtgcccgtkgtcatcgaccccttgacaagaagagagaagaggctcccagcctgaggcctgccccaccgcccatcagtggaggtggctatcgggctcgtccagccaaagc

SEQ ID NO: 4127 - DNA, 201 bp, Homo sapiens; identical to SEQ ID NO: 4101

SEQ ID NO: 4128 - DNA, 201 bp, Homo sapiens; identical to SEQ ID NO: 4102

SEQ ID NO: 4129 - DNA, 201 bp, Homo sapiens
cttcagtgcccgtggtcatcgaccccttgacaagaagagagaagaggctcccagcctgaggcctgccccaccgcccatcagtggaggtggctatcgggctygtccagccaaagcagctgccactcaaaagaaagtagaaattgtgtcctacaggatgtcagttgcaagaggctttgctacaacaggaaaggccaatcagaa

SEQ ID NO: 4130 - DNA, 201 bp, Homo sapiens; identical to SEQ ID NO: 4104

SEQ ID NO: 4131 - DNA, 201 bp, Homo sapiens; identical to SEQ ID NO: 4103

SEQ ID NO: 4132 - DNA, 201 bp, Homo sapiens; identical to SEQ ID NO: 4105

SEQ ID NO: 4133 - DNA, 201 bp, Homo sapiens; identical to SEQ ID NO: 4106

SEQ ID NO: 4134 - DNA, 201 bp, Homo sapiens; identical to SEQ ID NO: 4107

SEQ ID NO: 4135 - DNA, 113 bp, Homo sapiens; identical to SEQ ID NO: 4108

SEQ ID NO: 4136 - DNA, 201 bp, Homo sapiens; identical to SEQ ID NO: 4109

SEQ ID NO: 4137 - DNA, 201 bp, Homo sapiens; identical to SEQ ID NO: 4110

SEQ ID NO: 4138 - DNA, 162 bp, Homo sapiens; identical to SEQ ID NO: 4111

SEQ ID NO: 4139 - DNA, 201 bp, Homo sapiens; identical to SEQ ID NO: 4087

SEQ ID NO: 4140 - DNA, 168 bp, Homo sapiens; identical to SEQ ID NO: 4088

SEQ ID NO: 4141 - DNA, 201 bp, Homo sapiens
gcccatcagtggaggtggctatcgggctcgtccagccaaagcagctgccactcaaaagaaagtagaaagaaaagcccctgatgctggaggctgtcttcacrctgagactgtgaatagcaatatcccaactaaccttcgtgtgcttcgttcaatcctggaaaacctgagaagcaaaatacaaaagttagaatctgatgtctc

SEQ ID NO: 4142 - DNA, 201 bp, Homo sapiens; identical to SEQ ID NO: 4089

SEQ ID NO: 4143 - DNA, 201 bp, Homo sapiens
tatcgggctcgtccagccaaagcagctgccactcaaaagaaagtagaaagaaaagcccctgatgctggaggctgtcttcacgctgagactgtgaatagcartatcccaactaaccttcgtgtgcttcgttcaatcctggaaaacctgagaagcaaaatacaaaagttagaatctgatgtctcagctcaaatggaatattgt

SEQ ID NO: 4144 - DNA, 201 bp, Homo sapiens; identical to SEQ ID NO: 4091

SEQ ID NO: 4145 - DNA, 201 bp, Homo sapiens
caaagcagctgccactcaaaagaaagtagaaagaaaagcccctgatgctggaggctgtcttcacgctgagactgtgaatagcaatatcccaactaaccttygtgtgcttcgttcaatcctggaaaacctgagaagcaaaatacaaaagttagaatctgatgtctcagctcaaatggaatattgtcgcaccccatgcactgt

SEQ ID NO: 4146 - DNA, 201 bp, Homo sapiens; identical to SEQ ID NO: 4118

SEQ ID NO: 4147 - DNA, 201 bp, Homo sapiens
cgcccatcagtggaggtggctatcgggctcgtccagccaaagcagctgccactcaaaagaaagtagaaagaaaagcccctgatgctggaggctgtcttcaygctgagactgtgaatagcaatatcccaactaaccttcgtgtgcttcgttcaatcctggaaaacctgagaagcaaaatacaaaagttagaatctgatgtct

SEQ ID NO: 4148 - DNA, 201 bp, Homo sapiens; identical to SEQ ID NO: 4094

SEQ ID NO: 4149 - DNA, 201 bp, Homo sapiens; identical to SEQ ID NO: 4095

SEQ ID NO: 4150 - DNA, 201 bp, Homo sapiens; identical to SEQ ID NO: 4123

SEQ ID NO: 4151 - DNA, 201 bp, Homo sapiens; identical to SEQ ID NO: 4097

SEQ ID NO: 4152 - DNA, 201 bp, Homo sapiens; identical to SEQ ID NO: 4098

SEQ ID NO: 4153 - DNA, 201 bp, Homo sapiens; identical to SEQ ID NO: 4126

SEQ ID NO: 4154 - DNA, 201 bp, Homo sapiens; identical to SEQ ID NO: 4100

SEQ ID NO: 4155 - DNA, 201 bp, Homo sapiens; identical to SEQ ID NO: 4101

SEQ ID NO: 4156 - DNA, 201 bp, Homo sapiens
cttcagtgcccgtggtcatcgaccccttgacaagaagagagaagaggctcccagcctgaggcctgccccaccgcccatcagtggaggtggctatcgggctygtccagccaaagcagctgccactcaaaagaaagtagaaagaaaagcccctgatgctggaggctgtcttcacgctgagactgtgaatagcaatatcccaac

SEQ ID NO: 4157 - DNA, 201 bp, Homo sapiens; identical to SEQ ID NO: 4102

SEQ ID NO: 4158 - DNA, 201 bp, Homo sapiens
agaaagtagaaagaaaagcccctgatgctggaggctgtcttcacgctgagactgtgaatagcaatatcccaactaaccttcgtgtgcttcgttcaatcctrgaaaacctgagaagcaaaatacaaaagttagaatctgatgtctcagctcaaatggaatattgtcgcaccccatgcactgtcagttgcaatattcctgtgg

SEQ ID NO: 4159 - DNA, 201 bp, Homo sapiens; identical to SEQ ID NO: 4104

SEQ ID NO: 4160 - DNA, 201 bp, Homo sapiens
ggctcgtccagccaaagcagctgccactcaaaagaaagtagaaagaaaagcccctgatgctggaggctgtcttcacgctgagactgtgaatagcaatatcscaactaaccttcgtgtgcttcgttcaatcctggaaaacctgagaagcaaaatacaaaagttagaatctgatgtctcagctcaaatggaatattgtcgcac

SEQ ID NO: 4161 - DNA, 201 bp, Homo sapiens; identical to SEQ ID NO: 4106

SEQ ID NO: 4162 - DNA, 201 bp, Homo sapiens
gctatcgggctcgtccagccaaagcagctgccactcaaaagaaagtagaaagaaaagcccctgatgctggaggctgtcttcacgctgagactgtgaatagyaatatcccaactaaccttcgtgtgcttcgttcaatcctggaaaacctgagaagcaaaatacaaaagttagaatctgatgtctcagctcaaatggaatatt

SEQ ID NO: 4163 - DNA, 113 bp, Homo sapiens; identical to SEQ ID NO: 4108

SEQ ID NO: 4164 - DNA, 201 bp, Homo sapiens; identical to SEQ ID NO: 4109

SEQ ID NO: 4165 - DNA, 162 bp, Homo sapiens; identical to SEQ ID NO: 4111

SEQ ID NO: 4166 - DNA, 201 bp, Homo sapiens
gagaagaggctcccagcctgaggcctgccccaccgcccatcagtggaggtggctatcgggctcgtccagccaaagcagctgccactcaaaagaaattgtgycctacaggatgtcagttgcaagaggctttgctacaacaggaaaggccaatcagaaatagtgttgatgagttaaataacaatgtggaagctgtttcccaga

SEQ ID NO: 4167 - DNA, 201 bp, Homo sapiens; identical to SEQ ID NO: 4087

SEQ ID NO: 4168 - DNA, 201 bp, Homo sapiens; identical to SEQ ID NO: 4089

SEQ ID NO: 4169 - DNA, 201 bp, Homo sapiens; identical to SEQ ID NO: 4090

SEQ ID NO: 4170 - DNA, 201 bp, Homo sapiens; identical to SEQ ID NO: 4091

SEQ ID NO: 4171 - DNA, 201 bp, Homo sapiens; identical to SEQ ID NO: 4092

SEQ ID NO: 4172 - DNA, 201 bp, Homo sapiens; identical to SEQ ID NO: 4118

SEQ ID NO: 4173 - DNA, 201 bp, Homo sapiens; identical to SEQ ID NO: 4094

SEQ ID NO: 4174 - DNA, 201 bp, Homo sapiens; identical to SEQ ID NO: 4095

SEQ ID NO: 4175 - DNA, 201 bp, Homo sapiens; identical to SEQ ID NO: 4123

SEQ ID NO: 4176 - DNA, 201 bp, Homo sapiens; identical to SEQ ID NO: 4097

SEQ ID NO: 4177 - DNA, 201 bp, Homo sapiens; identical to SEQ ID NO: 4098

SEQ ID NO: 4178 - DNA, 201 bp, Homo sapiens; identical to SEQ ID NO: 4126

SEQ ID NO: 4179 - DNA, 201 bp, Homo sapiens; identical to SEQ ID NO: 4100

SEQ ID NO: 4180 - DNA, 201 bp, Homo sapiens; identical to SEQ ID NO: 4101

SEQ ID NO: 4181 - DNA, 201 bp, Homo sapiens
cttcagtgcccgtggtcatcgaccccttgacaagaagagagaagaggctcccagcctgaggcctgccccaccgcccatcagtggaggtggctatcgggctygtccagccaaagcagctgccactcaaaagaaattgtgtcctacaggatgtcagttgcaagaggctttgctacaacaggaaaggccaatcagaaatagtgt

SEQ ID NO: 4182 - DNA, 201 bp, Homo sapiens; identical to SEQ ID NO: 4102

SEQ ID NO: 4183 - DNA, 201 bp, Homo sapiens; identical to SEQ ID NO: 4103

SEQ ID NO: 4184 - DNA, 201 bp, Homo sapiens; identical to SEQ ID NO: 4104

SEQ ID NO: 4185 - DNA, 201 bp, Homo sapiens; identical to SEQ ID NO: 4105

SEQ ID NO: 4186 - DNA, 201 bp, Homo sapiens; identical to SEQ ID NO: 4106

SEQ ID NO: 4187 - DNA, 201 bp, Homo sapiens; identical to SEQ ID NO: 4107

SEQ ID NO: 4188 - DNA, 113 bp, Homo sapiens; identical to SEQ ID NO: 4108

SEQ ID NO: 4189 - DNA, 201 bp, Homo sapiens; identical to SEQ ID NO: 4109

SEQ ID NO: 4190 - DNA, 201 bp, Homo sapiens; identical to SEQ ID NO: 4110

SEQ ID NO: 4191 - DNA, 162 bp, Homo sapiens; identical to SEQ ID NO: 4111

SEQ ID NO: 4192 - DNA, 201 bp, Homo sapiens
ctcgtccagccaaagcagctgccactcaaaagaaagtagaaagaaaagcccctgatgctggaggctgtcttcacgctgacccagacctgggggtgttgtgycctacaggatgtcagttgcaagaggctttgctacaacaggaaaggccaatcagaaatagtgttgatgagttaaataacaatgtggaagctgtttcccaga

SEQ ID NO: 4193 - DNA, 201 bp, Homo sapiens
gcaatattcctgtggtgtctggcaaagaatgtgaggaaattatcaggaaaggaggtgaaacatctgaaatgtatctcattcaacctgacagttctgtcaaygatggacagtgattcagaaccgtcaagacggtagtgttgactttggcaggaaatgggatccatataaacagggatttggaaatgttgcaaccaacacaga

SEQ ID NO: 4194 - DNA, 201 bp, Homo sapiens
gtggtgtctggcaaagaatgtgaggaaattatcaggaaaggaggtgaaacatctgaaatgtatctcattcaacctgacagttctgtcaaagatggacagtkattcagaaccgtcaagacggtagtgttgactttggcaggaaatgggatccatataaacagggatttggaaatgttgcaaccaacacagatgggaagaatt

SEQ ID NO: 4195 - DNA, 201 bp, Homo sapiens
gcccatcagtggaggtggctatcgggctcgtccagccaaagcagctgccactcaaaagaaagtagaaagaaaagcccctgatgctggaggctgtcttcacrctgacccagacctgggggtgttgtgtcctacaggatgtcagttgcaagaggctttgctacaacaggaaaggccaatcagaaatagtgttgatgagttaaa

SEQ ID NO: 4196 - DNA, 201 bp, Homo sapiens; identical to SEQ ID NO: 4091

SEQ ID NO: 4197 - DNA, 201 bp, Homo sapiens
aagaggcagaagcaagtaaaagataatgaaaatgtagtcaatgagtactcctcagaactggaaaagcaccaattatatatagatgagactgtgaatagcartatcccaactaaccttcgtgtgcttcgttcaatcctggaaaacctgagaagcaaaatacaaaatgtcagttgcaatattcctgtggtgtctggcaaagaa

SEQ ID NO: 4198 - DNA, 201 bp, Homo sapiens
aaaagataatgaaaatgtagtcaatgagtactcctcagaactggaaaagcaccaattatatatagatgagactgtgaatagcaatatcccaactaaccttygtgtgcttcgttcaatcctggaaaacctgagaagcaaaatacaaaatgtcagttgcaatattcctgtggtgtctggcaaagaatgtgaggaaattatcag

SEQ ID NO: 4199 - DNA, 201 bp, Homo sapiens; identical to SEQ ID NO: 4118

SEQ ID NO: 4200 - DNA, 201 bp, Homo sapiens
cgcccatcagtggaggtggctatcgggctcgtccagccaaagcagctgccactcaaaagaaagtagaaagaaaagcccctgatgctggaggctgtcttcaygctgacccagacctgggggtgttgtgtcctacaggatgtcagttgcaagaggctttgctacaacaggaaaggccaatcagaaatagtgttgatgagttaa

SEQ ID NO: 4201 - DNA, 201 bp, Homo sapiens
caaagaatgtgaggaaattatcaggaaaggaggtgaaacatctgaaatgtatctcattcaacctgacagttctgtcaaagatggacagtgattcagaaccrtcaagacggtagtgttgactttggcaggaaatgggatccatataaacagggatttggaaatgttgcaaccaacacagatgggaagaattactgtggccta

SEQ ID NO: 4202 - DNA, 201 bp, Homo sapiens; identical to SEQ ID NO: 4095

SEQ ID NO: 4203 - DNA, 201 bp, Homo sapiens; identical to SEQ ID NO: 4123

SEQ ID NO: 4204 - DNA, 201 bp, Homo sapiens; identical to SEQ ID NO: 4097

SEQ ID NO: 4205 - DNA, 201 bp, Homo sapiens; identical to SEQ ID NO: 4126

SEQ ID NO: 4206 - DNA, 201 bp, Homo sapiens; identical to SEQ ID NO: 4098

SEQ ID NO: 4207 - DNA, 201 bp, Homo sapiens; identical to SEQ ID NO: 4100

SEQ ID NO: 4208 - DNA, 201 bp, Homo sapiens
cttcagtgcccgtggtcatcgaccccttgacaagaagagagaagaggctcccagcctgaggcctgccccaccgcccatcagtggaggtggctatcgggctygtccagccaaagcagctgccactcaaaagaaagtagaaagaaaagcccctgatgctggaggctgtcttcacgctgacccagacctgggggtgttgtgtcc

SEQ ID NO: 4209 - DNA, 201 bp, Homo sapiens; identical to SEQ ID NO: 4101

SEQ ID NO: 4210 - DNA, 201 bp, Homo sapiens; identical to SEQ ID NO: 4102

SEQ ID NO: 4211 - DNA, 201 bp, Homo sapiens
tcaatgagtactcctcagaactggaaaagcaccaattatatatagatgagactgtgaatagcaatatcccaactaaccttcgtgtgcttcgttcaatcctrgaaaacctgagaagcaaaatacaaaatgtcagttgcaatattcctgtggtgtctggcaaagaatgtgaggaaattatcaggaaaggaggtgaaacatctg

SEQ ID NO: 4212 - DNA, 201 bp, Homo sapiens; identical to SEQ ID NO: 4104

SEQ ID NO: 4213 - DNA, 201 bp, Homo sapiens
gcagaagcaagtaaaagataatgaaaatgtagtcaatgagtactcctcagaactggaaaagcaccaattatatatagatgagactgtgaatagcaatatcscaactaaccttcgtgtgcttcgttcaatcctggaaaacctgagaagcaaaatacaaaatgtcagttgcaatattcctgtggtgtctggcaaagaatgtga

SEQ ID NO: 4214 - DNA, 201 bp, Homo sapiens; identical to SEQ ID NO: 4106

SEQ ID NO: 4215 - DNA, 201 bp, Homo sapiens
aaaagaggcagaagcaagtaaaagataatgaaaatgtagtcaatgagtactcctcagaactggaaaagcaccaattatatatagatgagactgtgaatagyaatatcccaactaaccttcgtgtgcttcgttcaatcctggaaaacctgagaagcaaaatacaaaatgtcagttgcaatattcctgtggtgtctggcaaag

SEQ ID NO: 4216 - DNA, 103 bp, Homo sapiens
aaaggaaaaactgatgtttaaaagtccacttttaaaactatatttatttatgtaggatctgtcaaagaaaacttccaaaaagatttattaattaaaccagmct

SEQ ID NO: 4217 - DNA, 201 bp, Homo sapiens; identical to SEQ ID NO: 4109

SEQ ID NO: 4218 - DNA, 201 bp, Homo sapiens
cagtggaggtggctatcgggctcgtccagccaaagcagctgccactcaaaagaaagtagaaagaaaagcccctgatgctggaggctgtcttcacgctgacycagacctgggggtgttgtgtcctacaggatgtcagttgcaagaggctttgctacaacaggaaaggccaatcagaaatagtgttgatgagttaaataacaa

SEQ ID NO: 4219 - DNA, 152 bp, Homo sapiens
aaataaggaagaggggtcttttatccttgtcgtaggaaaaccatgacggaaaggaaaaactgatgtttaaaagtccacttttaaaactatatttatttatrtaggatctgtcaaagaaaacttccaaaaagatttattaattaaaccagact

SEQ ID NO: 4220 - DNA, 201 bp, Homo sapiens; identical to SEQ ID NO: 4110

SEQ ID NO: 4221 - DNA, 201 bp, Homo sapiens
ttgattccaacagggatggcgccttgtccaagaagagacccagagccagtgaatgggacatagggtttatttaggacttaaatacagatgtggtccagtgkcagtgggctggacaggaccgctactatttgtaaagagtatgtagtttatataacatttctacttagcactctccacttagcaacctccatttaacccaaa

SEQ ID NO: 4222 - DNA, 201 bp, Homo sapiens; identical to SEQ ID NO: 4195

SEQ ID NO: 4223 - DNA, 168 bp, Homo sapiens; identical to SEQ ID NO: 4088

SEQ ID NO: 4224 - DNA, 201 bp, Homo sapiens; identical to SEQ ID NO: 4090

SEQ ID NO: 4225 - DNA, 201 bp, Homo sapiens; identical to SEQ ID NO: 4092

SEQ ID NO: 4226 - DNA, 201 bp, Homo sapiens; identical to SEQ ID NO: 4118

SEQ ID NO: 4227 - DNA, 201 bp, Homo sapiens; identical to SEQ ID NO: 4094

SEQ ID NO: 4228 - DNA, 201 bp, Homo sapiens; identical to SEQ ID NO: 4200

SEQ ID NO: 4229 - DNA, 201 bp, Homo sapiens; identical to SEQ ID NO: 4095

SEQ ID NO: 4230 - DNA, 201 bp, Homo sapiens; identical to SEQ ID NO: 4097

SEQ ID NO: 4231 - DNA, 201 bp, Homo sapiens
ttcttaaattcaaattttttagctggagtaaaaatggtcccagtaccatttcctgttcccttcactataacctacatttttgtcacattaagtttttcccyattccaggacaggtcaggccctttaaaaatttcaacagctttattgagatataattgatataatttaaaaaatcctgcacatgtgtcatgctggagccct

SEQ ID NO: 4232 - DNA, 201 bp, Homo sapiens; identical to SEQ ID NO: 4098

SEQ ID NO: 4233 - DNA, 201 bp, Homo sapiens; identical to SEQ ID NO: 4100

SEQ ID NO: 4234 - DNA, 201 bp, Homo sapiens; identical to SEQ ID NO: 4101

SEQ ID NO: 4235 - DNA, 201 bp, Homo sapiens; identical to SEQ ID NO: 4102

SEQ ID NO: 4236 - DNA, 201 bp, Homo sapiens; identical to SEQ ID NO: 4104

SEQ ID NO: 4237 - DNA, 201 bp, Homo sapiens; identical to SEQ ID NO: 4103

SEQ ID NO: 4238 - DNA, 201 bp, Homo sapiens; identical to SEQ ID NO: 4105

SEQ ID NO: 4239 - DNA, 201 bp, Homo sapiens; identical to SEQ ID NO: 4106

SEQ ID NO: 4240 - DNA, 201 bp, Homo sapiens; identical to SEQ ID NO: 4107

SEQ ID NO: 4241 - DNA, 201 bp, Homo sapiens
tgctactactctctttaattactcaccaaatccaactttaacttttgacctggtttctctgccacaagttctgtcccactggagcccatactcacctaccrctttgccatcacatttaacagaaaactcttatcaacttacttcctgcttaacattagctccttcctatctatatccaaatttcttaaattcaaatttttt

SEQ ID NO: 4242 - DNA, 201 bp, Homo sapiens
caaatagctaataaaccggtcttgaatatttgaagatttaaaatctgactctaggacgggcacggtggctcacgactataatcccaacactttgggaggcygaggcgggcggtcacaaggtcaggagttcaagaccagcctgaccaatatggtgaaaccccatctctactaaaaatacaaaaattagccaggcgtggtggc

SEQ ID NO: 4243 - DNA, 201 bp, Homo sapiens
aaaggaaaaactgatgtttaaaagtccacttttaaaactatatttatttatgtaggatctgtcaaagaaaacttccaaaaagatttattaattaaaccagmctctgttgcaataagttaatgttttcttgttttgtaatccacacattcaatgagttaggctttgcacttgtaaggaaggagaagcgttcacaacctcaaa

SEQ ID NO: 4244 - DNA, 201 bp, Homo sapiens
taacctacatttttgtcacattaagtttttccccattccaggacaggtcaggccctttaaaaatttcaacagctttattgagatataattgatataatttwaaaaatcctgcacatgtgtcatgctggagccctattgattccaacagggatggcgccttgtccaagaagagacccagagccagtgaatgggacatagggt

SEQ ID NO: 4245 - DNA, 201 bp, Homo sapiens; identical to SEQ ID NO: 4109

SEQ ID NO: 4246 - DNA, 201 bp, Homo sapiens; identical to SEQ ID NO: 4110

SEQ ID NO: 4247 - DNA, 201 bp, Homo sapiens
ccacttttaaaactatatttatttatgtaggatctgtcaaagaaaacttccaaaaagatttattaattaaaccagactctgttgcaataagttaatgtttycttgttttgtaatccacacattcaatgagttaggctttgcacttgtaaggaaggagaagcgttcacaacctcaaatagctaataaaccggtcttgaatat

SEQ ID NO: 4248 - DNA, 201 bp, Homo sapiens
caaaaaaaaaaaaaaaagaatctgactatataccatggaaaagccaccactctgccacttaaataaacatcaggatcagagattccaagaggacaatctgsatcaagtcttcaccaagtgttttttaagcgaaataatgaaatagggagcagaatatgcctgttgcccatagaaacgaggtctattcttgtcctcaattag

SEQ ID NO: 4249 - DNA, 201 bp, Homo sapiens
aatatgcctgttgcccatagaaacgaggtctattcttgtcctcaattaggcttttttttcttcatagttacaccagaactaaagtaaaagtggtttttctsttctttctacttctccccatgaaatgggcatatcatctcaacacttcactccaagtcgccacgggcaaccttatgaccctaggtcctccacccctaatgt

SEQ ID NO: 4250 - DNA, 201 bp, Homo sapiens; identical to SEQ ID NO: 4192

SEQ ID NO: 4251 - DNA, 201 bp, Homo sapiens; identical to SEQ ID NO: 4087

SEQ ID NO: 4252 - DNA, 201 bp, Homo sapiens; identical to SEQ ID NO: 4089

SEQ ID NO: 4253 - DNA, 201 bp, Homo sapiens; identical to SEQ ID NO: 4091

SEQ ID NO: 4254 - DNA, 201 bp, Homo sapiens
ttaacattagctccttcctatctatatccaaatttcttaaattcaaattttttagctggagtaaaaatggtcccagtaccatttcctgttcccttcactayaacctacatttttgtcacattaagtttttccccattccaggacaggtcaggccctttaaaaatttcaacagctttattgagatataattgatataattta

SEQ ID NO: 4255 - DNA, 201 bp, Homo sapiens; identical to SEQ ID NO: 4123

SEQ ID NO: 4256 - DNA, 201 bp, Homo sapiens; identical to SEQ ID NO: 4126

SEQ ID NO: 4257 - DNA, 201 bp, Homo sapiens; identical to SEQ ID NO: 4208

SEQ ID NO: 4258 - DNA, 201 bp, Homo sapiens; identical to SEQ ID NO: 4218

SEQ ID NO: 4259 - DNA, 201 bp, Homo sapiens
aaataaggaagaggggtcttttatccttgtcgtaggaaaaccatgacggaaaggaaaaactgatgtttaaaagtccacttttaaaactatatttatttatrtaggatctgtcaaagaaaacttccaaaaagatttattaattaaaccagactctgttgcaataagttaatgttttcttgttttgtaatccacacattcaat

SEQ ID NO: 4260 - DNA, 201 bp, Homo sapiens
aagtccacttttaaaactatatttatttatgtaggatctgtcaaagaaaacttccaaaaagatttattaattaaaccagactctgttgcaataagttaatrttttcttgttttgtaatccacacattcaatgagttaggctttgcacttgtaaggaaggagaagcgttcacaacctcaaatagctaataaaccggtcttga

SEQ ID NO: 4261 - DNA, 201 bp, Homo sapiens; identical to SEQ ID NO: 4112

SEQ ID NO: 4262 - DNA, 201 bp, Homo sapiens; identical to SEQ ID NO: 4087

SEQ ID NO: 4263 - DNA, 201 bp, Homo sapiens; identical to SEQ ID NO: 4089

SEQ ID NO: 4264 - DNA, 201 bp, Homo sapiens; identical to SEQ ID NO: 4090

SEQ ID NO: 4265 - DNA, 201 bp, Homo sapiens; identical to SEQ ID NO: 4091

SEQ ID NO: 4266 - DNA, 201 bp, Homo sapiens
tgagggtgttggaatagttacattccaaatcttctataacactctgtattatatttctgcctcattccttgtagggtttcttcagtgcccgtggtcatcgrccccttgacaagaagagagaagaggctcccagcctgaggcctgccccaccgcccatcagtggaggtggctatcgggctcgtccagccaaagcagctgcca

SEQ ID NO: 4267 - DNA, 201 bp, Homo sapiens; identical to SEQ ID NO: 4092

SEQ ID NO: 4268 - DNA, 201 bp, Homo sapiens; identical to SEQ ID NO: 4094

SEQ ID NO: 4269 - DNA, 201 bp, Homo sapiens; identical to SEQ ID NO: 4095

SEQ ID NO: 4270 - DNA, 201 bp, Homo sapiens; identical to SEQ ID NO: 4097

SEQ ID NO: 4271 - DNA, 201 bp, Homo sapiens
aaattataaaatgagggtgttggaatagttacattccaaatcttctataacactctgtattatatttctgcctcattccttgtagggtttcttcagtgccygtggtcatcgaccccttgacaagaagagagaagaggctcccagcctgaggcctgccccaccgcccatcagtggaggtggctatcgggctcgtccagccaa

SEQ ID NO: 4272 - DNA, 201 bp, Homo sapiens; identical to SEQ ID NO: 4098

SEQ ID NO: 4273 - DNA, 201 bp, Homo sapiens; identical to SEQ ID NO: 4100

SEQ ID NO: 4274 - DNA, 201 bp, Homo sapiens
ttataaaatgagggtgttggaatagttacattccaaatcttctataacactctgtattatatttctgcctcattccttgtagggtttcttcagtgcccgtkgtcatcgaccccttgacaagaagagagaagaggctcccagcctgaggcctgccccaccgcccatcagtggaggtggctatcgggctcgtccagccaaagc

SEQ ID NO: 4275 - DNA, 201 bp, Homo sapiens; identical to SEQ ID NO: 4101

SEQ ID NO: 4276 - DNA, 201 bp, Homo sapiens; identical to SEQ ID NO: 4102

SEQ ID NO: 4277 - DNA, 201 bp, Homo sapiens; identical to SEQ ID NO: 4129

SEQ ID NO: 4278 - DNA, 201 bp, Homo sapiens; identical to SEQ ID NO: 4104

SEQ ID NO: 4279 - DNA, 201 bp, Homo sapiens; identical to SEQ ID NO: 4103

SEQ ID NO: 4280 - DNA, 201 bp, Homo sapiens; identical to SEQ ID NO: 4105

SEQ ID NO: 4281 - DNA, 201 bp, Homo sapiens; identical to SEQ ID NO: 4106

SEQ ID NO: 4282 - DNA, 201 bp, Homo sapiens; identical to SEQ ID NO: 4107

SEQ ID NO: 4283 - DNA, 113 bp, Homo sapiens; identical to SEQ ID NO: 4108

SEQ ID NO: 4284 - DNA, 201 bp, Homo sapiens; identical to SEQ ID NO: 4109

SEQ ID NO: 4285 - DNA, 201 bp, Homo sapiens; identical to SEQ ID NO: 4110

SEQ ID NO: 4286 - DNA, 162 bp, Homo sapiens; identical to SEQ ID NO: 4111

SEQ ID NO: 4287 - DNA, 201 bp, Homo sapiens; identical to SEQ ID NO: 4195

SEQ ID NO: 4288 - DNA, 168 bp, Homo sapiens; identical to SEQ ID NO: 4088

SEQ ID NO: 4289 - DNA, 201 bp, Homo sapiens; identical to SEQ ID NO: 4090

SEQ ID NO: 4290 - DNA, 201 bp, Homo sapiens; identical to SEQ ID NO: 4118

SEQ ID NO: 4291 - DNA, 201 bp, Homo sapiens; identical to SEQ ID NO: 4092

SEQ ID NO: 4292 - DNA, 201 bp, Homo sapiens; identical to SEQ ID NO: 4200

SEQ ID NO: 4293 - DNA, 201 bp, Homo sapiens; identical to SEQ ID NO: 4094

SEQ ID NO: 4294 - DNA, 201 bp, Homo sapiens; identical to SEQ ID NO: 4095

SEQ ID NO: 4295 - DNA, 201 bp, Homo sapiens; identical to SEQ ID NO: 4097

SEQ ID NO: 4296 - DNA, 201 bp, Homo sapiens
agatactactggggtggacagtacacctgggacatggcaaagcatggcacagatgatggtgtagtatggatgaattggaaggggtcatggtactcaatgargaagatgaatttttgctcttctgtatgtgacaacatttttgtacattatgttattggaattttctttcatacattatattcctctaaaactctcaagcag

SEQ ID NO: 4297 - DNA, 201 bp, Homo sapiens; identical to SEQ ID NO: 4100

SEQ ID NO: 4298 - DNA, 201 bp, Homo sapiens; identical to SEQ ID NO: 4101

SEQ ID NO: 4299 - DNA, 201 bp, Homo sapiens; identical to SEQ ID NO: 4102

SEQ ID NO: 4300 - DNA, 201 bp, Homo sapiens; identical to SEQ ID NO: 4103

SEQ ID NO: 4301 - DNA, 201 bp, Homo sapiens
tgtcatgcagccaatccaaacggcagatactactggggtggacagtacacctgggacatggcaaagcatggcacagatgatggtgtagtatggatgaattrgaaggggtcatggtactcaatgaggaagatgaatttttgctcttctgtatgtgacaacatttttgtacattatgttattggaattttctttcatacatta

SEQ ID NO: 4302 - DNA, 201 bp, Homo sapiens; identical to SEQ ID NO: 4105

SEQ ID NO: 4303 - DNA, 201 bp, Homo sapiens; identical to SEQ ID NO: 4107

SEQ ID NO: 4304 - DNA, 201 bp, Homo sapiens; identical to SEQ ID NO: 4242

SEQ ID NO: 4305 - DNA, 201 bp, Homo sapiens; identical to SEQ ID NO: 4243

SEQ ID NO: 4306 - DNA, 201 bp, Homo sapiens; identical to SEQ ID NO: 4109

SEQ ID NO: 4307 - DNA, 201 bp, Homo sapiens; identical to SEQ ID NO: 4110

SEQ ID NO: 4308 - DNA, 201 bp, Homo sapiens; identical to SEQ ID NO: 4247

SEQ ID NO: 4309 - DNA, 201 bp, Homo sapiens; identical to SEQ ID NO: 4248

SEQ ID NO: 4310 - DNA, 201 bp, Homo sapiens; identical to SEQ ID NO: 4192

SEQ ID NO: 4311 - DNA, 201 bp, Homo sapiens; identical to SEQ ID NO: 4087

SEQ ID NO: 4312 - DNA, 201 bp, Homo sapiens; identical to SEQ ID NO: 4089

SEQ ID NO: 4313 - DNA, 201 bp, Homo sapiens; identical to SEQ ID NO: 4091

SEQ ID NO: 4314 - DNA, 201 bp, Homo sapiens; identical to SEQ ID NO: 4123

SEQ ID NO: 4315 - DNA, 201 bp, Homo sapiens; identical to SEQ ID NO: 4126

SEQ ID NO: 4316 - DNA, 201 bp, Homo sapiens; identical to SEQ ID NO: 4208

SEQ ID NO: 4317 - DNA, 201 bp, Homo sapiens; identical to SEQ ID NO: 4218

SEQ ID NO: 4318 - DNA, 201 bp, Homo sapiens; identical to SEQ ID NO: 4259

SEQ ID NO: 4319 - DNA, 201 bp, Homo sapiens; identical to SEQ ID NO: 4260

SEQ ID NO: 4320 - DNA, 201 bp, Homo sapiens; identical to SEQ ID NO: 4192

SEQ ID NO: 4321 - DNA, 201 bp, Homo sapiens; identical to SEQ ID NO: 4087

SEQ ID NO: 4322 - DNA, 201 bp, Homo sapiens; identical to SEQ ID NO: 4195

SEQ ID NO: 4323 - DNA, 201 bp, Homo sapiens; identical to SEQ ID NO: 4089

SEQ ID NO: 4324 - DNA, 168 bp, Homo sapiens; identical to SEQ ID NO: 4088

SEQ ID NO: 4325 - DNA, 201 bp, Homo sapiens; identical to SEQ ID NO: 4090

SEQ ID NO: 4326 - DNA, 201 bp, Homo sapiens; identical to SEQ ID NO: 4091

SEQ ID NO: 4327 - DNA, 201 bp, Homo sapiens; identical to SEQ ID NO: 4118

SEQ ID NO: 4328 - DNA, 201 bp, Homo sapiens; identical to SEQ ID NO: 4092

SEQ ID NO: 4329 - DNA, 201 bp, Homo sapiens; identical to SEQ ID NO: 4200

SEQ ID NO: 4330 - DNA, 201 bp, Homo sapiens; identical to SEQ ID NO: 4094

SEQ ID NO: 4331 - DNA, 201 bp, Homo sapiens; identical to SEQ ID NO: 4095

SEQ ID NO: 4332 - DNA, 201 bp, Homo sapiens; identical to SEQ ID NO: 4123

SEQ ID NO: 4333 - DNA, 201 bp, Homo sapiens; identical to SEQ ID NO: 4097

SEQ ID NO: 4334 - DNA, 201 bp, Homo sapiens; identical to SEQ ID NO: 4126

SEQ ID NO: 4335 - DNA, 201 bp, Homo sapiens; identical to SEQ ID NO: 4100

SEQ ID NO: 4336 - DNA, 139 bp, Homo sapiens
agatactactggggtggacagtacacctgggacatggcaaagcatggcacagatgatggtgtagtatggatgaattggaaggggtcatggtactcaatgargaagatgagtatgaagatcaggcccttcttcccacagc

SEQ ID NO: 4337 - DNA, 201 bp, Homo sapiens; identical to SEQ ID NO: 4101

SEQ ID NO: 4338 - DNA, 201 bp, Homo sapiens; identical to SEQ ID NO: 4208

SEQ ID NO: 4339 - DNA, 201 bp, Homo sapiens; identical to SEQ ID NO: 4103

SEQ ID NO: 4340 - DNA, 163 bp, Homo sapiens
ccagaaaacaccaatccaaacggcagatactactggggtggacagtacacctgggacatggcaaagcatggcacagatgatggtgtagtatggatgaattrgaaggggtcatggtactcaatgaggaagatgagtatgaagatcaggcccttcttcccacagc

SEQ ID NO: 4341 - DNA, 201 bp, Homo sapiens; identical to SEQ ID NO: 4105

SEQ ID NO: 4342 - DNA, 201 bp, Homo sapiens; identical to SEQ ID NO: 4107

SEQ ID NO: 4343 - DNA, 201 bp, Homo sapiens
gaagccaacaaataccagatctcagtgaacaaatacagaggaacagccggtaatgccctcatggatggagcatctcagctgatgggagaaaacaggaccaygaccattcacaacggcatgttcttcagcacgtatgacagagacaatgacggctggttaacatcagatcccagaaaacaccaatccaaacggcagatacta

SEQ ID NO: 4344 - DNA, 201 bp, Homo sapiens; identical to SEQ ID NO: 4218

SEQ ID NO: 4345 - DNA, 201 bp, Homo sapiens; identical to SEQ ID NO: 4110

SEQ ID NO: 4346 - DNA, 201 bp, Homo sapiens
gtgcccgtggtcatcgaccccttgacaagaagagagaagaggctcccacccctgatgctggaggctgtcttcacgctgacccagacctgggggtgttgtgycctacaggatgtcagttgcaagaggctttgctacaacaggaaaggccaatcagaaatagtgttgatgagttaaataacaatgtggaagctgtttcccaga

SEQ ID NO: 4347 - DNA, 201 bp, Homo sapiens
aatattcctgtggtgtctggcaaagaatgtgaggaaattatcaggaaaggaggtgaaacatctgaaatgtatctcattcaacctgacagttctgtcaaacygtatagagtatactgtgacatgaatacagaaaatggagggatggacagtgattcagaaccgtcaagacggtagtgttgactttggcaggaaatgggatcc

SEQ ID NO: 4348 - DNA, 201 bp, Homo sapiens
caacgacaatgaggagggtttcttcagtgcccgtggtcatcgaccccttgacaagaagagagaagaggctcccacccctgatgctggaggctgtcttcacrctgacccagacctgggggtgttgtgtcctacaggatgtcagttgcaagaggctttgctacaacaggaaaggccaatcagaaatagtgttgatgagttaaa

SEQ ID NO: 4349 - DNA, 168 bp, Homo sapiens; identical to SEQ ID NO: 4088

SEQ ID NO: 4350 - DNA, 201 bp, Homo sapiens
aggtgaaacatctgaaatgtatctcattcaacctgacagttctgtcaaaccgtatagagtatactgtgacatgaatacagaaaatggagggatggacagtkattcagaaccgtcaagacggtagtgttgactttggcaggaaatgggatccatataaacagggatttggaaatgttgcaaccaacacagatgggaagaatt

SEQ ID NO: 4351 - DNA, 201 bp, Homo sapiens; identical to SEQ ID NO: 4091

SEQ ID NO: 4352 - DNA, 201 bp, Homo sapiens; identical to SEQ ID NO: 4090

SEQ ID NO: 4353 - DNA, 201 bp, Homo sapiens
ccatgaaacatctattattgctactattgtgtgtttttctagttaagtcccaaggtgtcaacgacaatgaggagggtttcttcagtgcccgtggtcatcgrccccttgacaagaagagagaagaggctcccacccctgatgctggaggctgtcttcacgctgacccagacctgggggtgttgtgtcctacaggatgtcagt

SEQ ID NO: 4354 - DNA, 201 bp, Homo sapiens; identical to SEQ ID NO: 4092

SEQ ID NO: 4355 - DNA, 201 bp, Homo sapiens
ctgaaatgtatctcattcaacctgacagttctgtcaaaccgtatagagtatactgtgacatgaatacagaaaatggagggatggacagtgattcagaaccrtcaagacggtagtgttgactttggcaggaaatgggatccatataaacagggatttggaaatgttgcaaccaacacagatgggaagaattactgtggccta

SEQ ID NO: 4356 - DNA, 201 bp, Homo sapiens
tcaacgacaatgaggagggtttcttcagtgcccgtggtcatcgaccccttgacaagaagagagaagaggctcccacccctgatgctggaggctgtcttcaygctgacccagacctgggggtgttgtgtcctacaggatgtcagttgcaagaggctttgctacaacaggaaaggccaatcagaaatagtgttgatgagttaa

SEQ ID NO: 4357 - DNA, 201 bp, Homo sapiens; identical to SEQ ID NO: 4095

SEQ ID NO: 4358 - DNA, 201 bp, Homo sapiens
caaacttaaaaccatgaaacatctattattgctactattgtgtgtttttctagttaagtcccaaggtgtcaacgacaatgaggagggtttcttcagtgccygtggtcatcgaccccttgacaagaagagagaagaggctcccacccctgatgctggaggctgtcttcacgctgacccagacctgggggtgttgtgtcctac

SEQ ID NO: 4359 - DNA, 201 bp, Homo sapiens; identical to SEQ ID NO: 4097

SEQ ID NO: 4360 - DNA, 201 bp, Homo sapiens
acttaaaaccatgaaacatctattattgctactattgtgtgtttttctagttaagtcccaaggtgtcaacgacaatgaggagggtttcttcagtgcccgtkgtcatcgaccccttgacaagaagagagaagaggctcccacccctgatgctggaggctgtcttcacgctgacccagacctgggggtgttgtgtcctacagg

SEQ ID NO: 4361 - DNA, 201 bp, Homo sapiens; identical to SEQ ID NO: 4098

SEQ ID NO: 4362 - DNA, 201 bp, Homo sapiens; identical to SEQ ID NO: 4100

SEQ ID NO: 4363 - DNA, 201 bp, Homo sapiens; identical to SEQ ID NO: 4101

SEQ ID NO: 4364 - DNA, 201 bp, Homo sapiens; identical to SEQ ID NO: 4102

SEQ ID NO: 4365 - DNA, 201 bp, Homo sapiens; identical to SEQ ID NO: 4103

SEQ ID NO: 4366 - DNA, 201 bp, Homo sapiens; identical to SEQ ID NO: 4104

SEQ ID NO: 4367 - DNA, 201 bp, Homo sapiens; identical to SEQ ID NO: 4105

SEQ ID NO: 4368 - DNA, 201 bp, Homo sapiens; identical to SEQ ID NO: 4106

SEQ ID NO: 4369 - DNA, 201 bp, Homo sapiens; identical to SEQ ID NO: 4107

SEQ ID NO: 4370 - DNA, 113 bp, Homo sapiens; identical to SEQ ID NO: 4108

SEQ ID NO: 4371 - DNA, 201 bp, Homo sapiens; identical to SEQ ID NO: 4109

SEQ ID NO: 4372 - DNA, 201 bp, Homo sapiens
caatgaggagggtttcttcagtgcccgtggtcatcgaccccttgacaagaagagagaagaggctcccacccctgatgctggaggctgtcttcacgctgacycagacctgggggtgttgtgtcctacaggatgtcagttgcaagaggctttgctacaacaggaaaggccaatcagaaatagtgttgatgagttaaataacaa

SEQ ID NO: 4373 - DNA, 201 bp, Homo sapiens; identical to SEQ ID NO: 4110

SEQ ID NO: 4374 - DNA, 162 bp, Homo sapiens; identical to SEQ ID NO: 4111

SEQ ID NO: 4375 - DNA, 201 bp, Homo sapiens
tatgatgattgcttccacccacacgactgcaacatacaggtgccttggggaaatgtggagaacattcaatcttgccgtcactattcatcaatgaagattarcactgagatccagagaggctggatgacttgctcaagttcaccagcatggtagtggcaaagagaggtccagagtcctggcccttgatgcccagctcagtgc

SEQ ID NO: 4376 - DNA, 201 bp, Homo sapiens
agagaggctggatgacttgctcaagttcaccagcatggtagtggcaaagagaggtccagagtcctggcccttgatgcccagctcagtgccacaaagctcartaggagggatgttccagtggatgagggccaccaggaagcacaggtccaaggctggtcccacacttatcagcagcaacaactgtcagttcatcctgcatgg

SEQ ID NO: 4377 - DNA, 201 bp, Homo sapiens
tctggacctcagtttccctctgtatacaaggatcagattcttgctgtgacccaagaactcctgaaatcatatagaaaggctggggtgggccctgtcattcrtggttgatttcaatacactcaagtgccattcatcctttaagaaaaacatctggatatcaaggtggaaatggcccatttaatgattgattatatcattttg

SEQ ID NO: 4378 - DNA, 171 bp, Homo sapiens
gcccatttaatgattgattatatcattttgtggatatagttataatctgatgggcctggctgggagtggaagaagggaagccttttgcaaatagtagagtrtcagttgcaggtgccaatgactaactttttgaattctatgttggcattaacaataaagcattttgcaaac

SEQ ID NO: 4379 - DNA, 201 bp, Homo sapiens
acatcctcttccttggcaaagtgaaccgcccctgaggtggggcttctcctgaaatctacaggcctcagggtgggagatgaagggggctaagctatggcccwtctgtatgctggtagctagtgatttacacaggtttagttgactaatgaggcattacaaataatattactctatgatgattgcttccacccacacgactgc

SEQ ID NO: 4380 - DNA, 201 bp, Homo sapiens
ggcccatctgtatgctggtagctagtgatttacacaggtttagttgactaatgaggcattacaaataatattactctatgatgattgcttccacccacacractgcaacatacaggtgccttggggaaatgtggagaacattcaatcttgccgtcactattcatcaatgaagattaacactgagatccagagaggctggat

SEQ ID NO: 4381 - DNA, 201 bp, Homo sapiens
ggggctgggtccagcacaaagatgcagatcctggagggcctgggcctcaacctccagaaaagctcagagaaggagctgcacagaggctttcagcagctccytcaggaactcaaccagcccagagatggcttccagctgagcctcggcaatgcccttttcaccgacctggtggtagacctgcaggacaccttcgtaagtgcc

SEQ ID NO: 4382 - DNA, 201 bp, Homo sapiens
tcagtgccacaaagctcaataggagggatgttccagtggatgagggccaccaggaagcacaggtccaaggctggtcccacacttatcagcagcaacaactstcagttcatcctgcatgggaaaaatgttggaatgggagtctgaaatggggctactgtttcagtcctaatgtgctgtgtgacattgggacaacactttccc

SEQ ID NO: 4383 - DNA, 201 bp, Homo sapiens
gctggtcccacacttatcagcagcaacaactgtcagttcatcctgcatgggaaaaatgttggaatgggagtctgaaatggggctactgtttcagtcctaaygtgctgtgtgacattgggacaacactttccctctctggacctcagtttccctctgtatacaaggatcagattcttgctgtgacccaagaactcctgaaat

SEQ ID NO: 4384 - DNA, 201 bp, Homo sapiens
aaatctacaggcctcagggtgggagatgaagggggctaagctatggcccatctgtatgctggtagctagtgatttacacaggtttagttgactaatgaggyattacaaataatattactctatgatgattgcttccacccacacgactgcaacatacaggtgccttggggaaatgtggagaacattcaatcttgccgtcac

SEQ ID NO: 4385 - DNA, 201 bp, Homo sapiens
cccagccagagcatcttcttctcccctgtgagcatctccatgagcctggccatgctctccctgggggctgggtccagcacaaagatgcagatcctggaggkcctgggcctcaacctccagaaaagctcagagaaggagctgcacagaggctttcagcagctccttcaggaactcaaccagcccagagatggcttccagctg

SEQ ID NO: 4386 - DNA, 201 bp, Homo sapiens
gcttctcagccctcagggggcctcccttcaccgccaccacccccgggagatgaagaagagagtcgaggacctccatgtaggtgccacggtggcccccagcrgcagaagggactttacctttgacctctacagggccttggcttccgctgcccccagccagagcatcttcttctcccctgtgagcatctccatgagcctggc

SEQ ID NO: 4387 - DNA, 201 bp, Homo sapiens
atatccaggtgtctgagatggtgcacaaagctgtggtggaggtggacgagtcgggaaccagagcagcggcagccacggggacaatattcactttcaggtcrgcccgcctgaactctcagaggctagtgttcaacaggccctttctgatgttcattgtggataacaacatcctcttccttggcaaagtgaaccgcccctgag

SEQ ID NO: 4388 - DNA, 151 bp, Homo sapiens
tatcattttgtggatatagttataatctgatgggcctggctgggagtggaagaagggaagccttttgcaaatagtagagtatcagttgcaggtgccaatgrctaactttttgaattctatgttggcattaacaataaagcattttgcaaac

SEQ ID NO: 4389 - DNA, 201 bp, Homo sapiens
aaagatgcagatcctggagggcctgggcctcaacctccagaaaagctcagagaaggagctgcacagaggctttcagcagctccttcaggaactcaaccagsccagagatggcttccagctgagcctcggcaatgcccttttcaccgacctggtggtagacctgcaggacaccttcgtaagtgccatgaagacgctgtacct

SEQ ID NO: 4390 - DNA, 201 bp, Homo sapiens
aatgcggtcgtgatcatggtgaattacatcttctttaaagctaagtgggagacaagcttcaaccacaaaggcacccaagagcaagacttctacgtgacctyggagactgtggtgcgggtacccatgatgagccgcgaggatcagtatcactacctcctggaccggaacctctcctgcagggtggtgggggtcccctaccaa

SEQ ID NO: 4391 - DNA, 201 bp, Homo sapiens
ttaccttcccaaattctccattgagggctcctatcagctggagaaagtcctccccagtctggggatcagtaacgtcttcacctcccatgctgatctgtccsgcatcagcaaccactcaaatatccaggtgtctgagatggtgcacaaagctgtggtggaggtggacgagtcgggaaccagagcagcggcagccacggggac

SEQ ID NO: 4392 - DNA, 201 bp, Homo sapiens
gattgtggacttgcttaagaacctcgatagcaatgcggtcgtgatcatggtgaattacatcttctttaaagctaagtgggagacaagcttcaaccacaaasgcacccaagagcaagacttctacgtgacctcggagactgtggtgcgggtacccatgatgagccgcgaggatcagtatcactacctcctggaccggaacct

SEQ ID NO: 4393 - DNA, 201 bp, Homo sapiens
caccacccccgggagatgaagaagagagtcgaggacctccatgtaggtgccacggtggcccccagcagcagaagggactttacctttgacctctacagggycttggcttccgctgcccccagccagagcatcttcttctcccctgtgagcatctccatgagcctggccatgctctccctgggggctgggtccagcacaaag

SEQ ID NO: 4394 - DNA, 201 bp, Homo sapiens
tatccaaggcagcagaggtgagtgggtcccccgagctctgtgaccttatgctccacactaactctggcagagcctccgtttcctcatagaacaaagaacakccaccatgcagctcttcctcctcttgtgcctggtgcttctcagccctcagggggcctcccttcaccgccaccacccccgggagatgaagaagagagtcga

SEQ ID NO: 4395 - DNA, 201 bp, Homo sapiens
catctccatgagcctggccatgctctccctgggggctgggtccagcacaaagatgcagatcctggagggcctgggcctcaacctccagaaaagctcagagraggagctgcacagaggctttcagcagctccttcaggaactcaaccagcccagagatggcttccagctgagcctcggcaatgcccttttcaccgacctggt

SEQ ID NO: 4396 - DNA, 201 bp, Homo sapiens
aatattactctatgatgattgcttccacccacacgactgcaacatacaggtgccttggggaaatgtggagaacattcaatcttgccgtcactattcatcartgaagattaacactgagatccagagaggctggatgacttgctcaagttcaccagcatggtagtggcaaagagaggtccagagtcctggcccttgatgccc

SEQ ID NO: 4397 - DNA, 141 bp, Homo sapiens
ctttctgagcccgagggactgccacctccactgtgtgcacrctcagctacgggacacatttcaggtatccaaggcagcagaggtgagtgggtcccccgagctctgtgaccttatgctccacactaactctggcagagcctc

SEQ ID NO: 4398 - DNA, 201 bp, Homo sapiens
acgtgacctcggagactgtggtgcgggtacccatgatgagccgcgaggatcagtatcactacctcctggaccggaacctctcctgcagggtggtgggggtsccctaccaaggcaatgccacggctttgttcattctccccagtgagggaaagatgcagcaggtggagaatggactgagtgagaaaacgctgaggaagtggc

SEQ ID NO: 4399 - DNA, 201 bp, Homo sapiens
cctcccttcaccgccaccacccccgggagatgaagaagagagtcgaggacctccatgtaggtgccacggtggcccccagcagcagaagggactttaccttygacctctacagggccttggcttccgctgcccccagccagagcatcttcttctcccctgtgagcatctccatgagcctggccatgctctccctgggggctg

SEQ ID NO: 4400 - DNA, 201 bp, Homo sapiens
gtcgaggacctccatgtaggtgccacggtggcccccagcagcagaagggactttacctttgacctctacagggccttggcttccgctgcccccagccagarcatcttcttctcccctgtgagcatctccatgagcctggccatgctctccctgggggctgggtccagcacaaagatgcagatcctggagggcctgggcctc

SEQ ID NO: 4401 - DNA, 201 bp, Homo sapiens
agctgagcctcggcaatgcccttttcaccgacctggtggtagacctgcaggacaccttcgtaagtgccatgaagacgctgtacctggcagacactttcccyaccaactttagggactctgcaggggccatgaagcagatcaatgattatgtggcaaagcaaacgaagggcaagattgtggacttgcttaagaacctcgata

SEQ ID NO: 4402 - DNA, 201 bp, Homo sapiens
tcgaggacctccatgtaggtgccacggtggcccccagcagcagaagggactttacctttgacctctacagggccttggcttccgctgcccccagccagagyatcttcttctcccctgtgagcatctccatgagcctggccatgctctccctgggggctgggtccagcacaaagatgcagatcctggagggcctgggcctca

SEQ ID NO: 4403 - DNA, 201 bp, Homo sapiens
ccctttctgatgttcattgtggataacaacatcctcttccttggcaaagtgaaccgcccctgaggtggggcttctcctgaaatctacaggcctcagggtgrgagatgaagggggctaagctatggcccatctgtatgctggtagctagtgatttacacaggtttagttgactaatgaggcattacaaataatattactcta

SEQ ID NO: 4404 - DNA, 201 bp, Homo sapiens
tccctaccaactttagggactctgcaggggccatgaagcagatcaatgattatgtggcaaagcaaacgaagggcaagattgtggacttgcttaagaacctmgatagcaatgcggtcgtgatcatggtgaattacatcttctttaaagctaagtgggagacaagcttcaaccacaaaggcacccaagagcaagacttctacg

SEQ ID NO: 4405 - DNA, 201 bp, Homo sapiens
tcagcaaccactcaaatatccaggtgtctgagatggtgcacaaagctgtggtggaggtggacgagtcgggaaccagagcagcggcagccacggggacaatmttcactttcaggtcggcccgcctgaactctcagaggctagtgttcaacaggccctttctgatgttcattgtggataacaacatcctcttccttggcaaag

SEQ ID NO: 4406 - DNA, 201 bp, Homo sapiens
acattgggacaacactttccctctctggacctcagtttccctctgtatacaaggatcagattcttgctgtgacccaagaactcctgaaatcatatagaaargctggggtgggccctgtcattcgtggttgatttcaatacactcaagtgccattcatcctttaagaaaaacatctggatatcaaggtggaaatggcccatt

SEQ ID NO: 4407 - DNA, 201 bp, Homo sapiens
tgtggataacaacatcctcttccttggcaaagtgaaccgcccctgaggtggggcttctcctgaaatctacaggcctcagggtgggagatgaagggggctawgctatggcccatctgtatgctggtagctagtgatttacacaggtttagttgactaatgaggcattacaaataatattactctatgatgattgcttccacc

SEQ ID NO: 4408 - DNA, 201 bp, Homo sapiens; identical to SEQ ID NO: 4375

SEQ ID NO: 4409 - DNA, 201 bp, Homo sapiens; identical to SEQ ID NO: 4376

SEQ ID NO: 4410 - DNA, 201 bp, Homo sapiens; identical to SEQ ID NO: 4377

SEQ ID NO: 4411 - DNA, 171 bp, Homo sapiens; identical to SEQ ID NO: 4378

SEQ ID NO: 4412 - DNA, 201 bp, Homo sapiens; identical to SEQ ID NO: 4379

SEQ ID NO: 4413 - DNA, 201 bp, Homo sapiens; identical to SEQ ID NO: 4380

SEQ ID NO: 4414 - DNA, 201 bp, Homo sapiens; identical to SEQ ID NO: 4381

SEQ ID NO: 4415 - DNA, 201 bp, Homo sapiens; identical to SEQ ID NO: 4382

SEQ ID NO: 4416 - DNA, 201 bp, Homo sapiens; identical to SEQ ID NO: 4383

SEQ ID NO: 4417 - DNA, 201 bp, Homo sapiens; identical to SEQ ID NO: 4384

SEQ ID NO: 4418 - DNA, 201 bp, Homo sapiens; identical to SEQ ID NO: 4385

SEQ ID NO: 4419 - DNA, 201 bp, Homo sapiens; identical to SEQ ID NO: 4386

SEQ ID NO: 4420 - DNA, 201 bp, Homo sapiens; identical to SEQ ID NO: 4387

SEQ ID NO: 4421 - DNA, 151 bp, Homo sapiens; identical to SEQ ID NO: 4388

SEQ ID NO: 4422 - DNA, 201 bp, Homo sapiens; identical to SEQ ID NO: 4389

SEQ ID NO: 4423 - DNA, 201 bp, Homo sapiens; identical to SEQ ID NO: 4390

SEQ ID NO: 4424 - DNA, 201 bp, Homo sapiens; identical to SEQ ID NO: 4391

SEQ ID NO: 4425 - DNA, 201 bp, Homo sapiens; identical to SEQ ID NO: 4392

SEQ ID NO: 4426 - DNA, 201 bp, Homo sapiens; identical to SEQ ID NO: 4393

SEQ ID NO: 4427 - DNA, 170 bp, Homo sapiens
ctttctgagcccgagggactgccacctccactgtgtgcacactcagctacgggacacaaacaaagaacakccaccatgcagctcttcctcctcttgtgcctggtgcttctcagccctcagggggcctcccttcaccgccaccacccccgggagatgaagaagagagtcga

SEQ ID NO: 4428 - DNA, 201 bp, Homo sapiens; identical to SEQ ID NO: 4395

SEQ ID NO: 4429 - DNA, 201 bp, Homo sapiens; identical to SEQ ID NO: 4396

SEQ ID NO: 4430 - DNA, 141 bp, Homo sapiens
ctttctgagcccgagggactgccacctccactgtgtgcacrctcagctacgggacacaaacaaagaacagccaccatgcagctcttcctcctcttgtgcctggtgcttctcagccctcagggggcctcccttcaccgccac

SEQ ID NO: 4431 - DNA, 201 bp, Homo sapiens; identical to SEQ ID NO: 4398

SEQ ID NO: 4432 - DNA, 201 bp, Homo sapiens; identical to SEQ ID NO: 4399

SEQ ID NO: 4433 - DNA, 201 bp, Homo sapiens; identical to SEQ ID NO: 4400

SEQ ID NO: 4434 - DNA, 201 bp, Homo sapiens; identical to SEQ ID NO: 4401

SEQ ID NO: 4435 - DNA, 201 bp, Homo sapiens; identical to SEQ ID NO: 4402

SEQ ID NO: 4436 - DNA, 201 bp, Homo sapiens; identical to SEQ ID NO: 4403

SEQ ID NO: 4437 - DNA, 201 bp, Homo sapiens; identical to SEQ ID NO: 4404

SEQ ID NO: 4438 - DNA, 201 bp, Homo sapiens; identical to SEQ ID NO: 4405

SEQ ID NO: 4439 - DNA, 201 bp, Homo sapiens; identical to SEQ ID NO: 4406

SEQ ID NO: 4440 - DNA, 201 bp, Homo sapiens; identical to SEQ ID NO: 4407

SEQ ID NO: 4441 - DNA, 201 bp, Homo sapiens; identical to SEQ ID NO: 4375

SEQ ID NO: 4442 - DNA, 201 bp, Homo sapiens; identical to SEQ ID NO: 4376

SEQ ID NO: 4443 - DNA, 201 bp, Homo sapiens; identical to SEQ ID NO: 4377

SEQ ID NO: 4444 - DNA, 171 bp, Homo sapiens; identical to SEQ ID NO: 4378

SEQ ID NO: 4445 - DNA, 201 bp, Homo sapiens; identical to SEQ ID NO: 4379

SEQ ID NO: 4446 - DNA, 201 bp, Homo sapiens; identical to SEQ ID NO: 4380

SEQ ID NO: 4447 - DNA, 201 bp, Homo sapiens; identical to SEQ ID NO: 4381

SEQ ID NO: 4448 - DNA, 201 bp, Homo sapiens; identical to SEQ ID NO: 4382

SEQ ID NO: 4449 - DNA, 201 bp, Homo sapiens; identical to SEQ ID NO: 4383

SEQ ID NO: 4450 - DNA, 201 bp, Homo sapiens; identical to SEQ ID NO: 4384

SEQ ID NO: 4451 - DNA, 201 bp, Homo sapiens; identical to SEQ ID NO: 4385

SEQ ID NO: 4452 - DNA, 201 bp, Homo sapiens; identical to SEQ ID NO: 4386

SEQ ID NO: 4453 - DNA, 201 bp, Homo sapiens; identical to SEQ ID NO: 4387

SEQ ID NO: 4454 - DNA, 151 bp, Homo sapiens; identical to SEQ ID NO: 4388

SEQ ID NO: 4455 - DNA, 201 bp, Homo sapiens; identical to SEQ ID NO: 4389

SEQ ID NO: 4456 - DNA, 201 bp, Homo sapiens; identical to SEQ ID NO: 4390

SEQ ID NO: 4457 - DNA, 201 bp, Homo sapiens; identical to SEQ ID NO: 4391

SEQ ID NO: 4458 - DNA, 201 bp, Homo sapiens; identical to SEQ ID NO: 4392

SEQ ID NO: 4459 - DNA, 201 bp, Homo sapiens; identical to SEQ ID NO: 4393

SEQ ID NO: 4460 - DNA, 201 bp, Homo sapiens
aggatggactctagagttttggggtttggggtctgcaaagctctgaaggagtctcatctctgcagtttcaggtatccaaggcagcagagaacaaagaacakccaccatgcagctcttcctcctcttgtgcctggtgcttctcagccctcagggggcctcccttcaccgccaccacccccgggagatgaagaagagagtcga

SEQ ID NO: 4461 - DNA, 201 bp, Homo sapiens; identical to SEQ ID NO: 4395

SEQ ID NO: 4462 - DNA, 201 bp, Homo sapiens; identical to SEQ ID NO: 4396

SEQ ID NO: 4463 - DNA, 201 bp, Homo sapiens; identical to SEQ ID NO: 4398

SEQ ID NO: 4464 - DNA, 201 bp, Homo sapiens; identical to SEQ ID NO: 4399

SEQ ID NO: 4465 - DNA, 201 bp, Homo sapiens; identical to SEQ ID NO: 4400

SEQ ID NO: 4466 - DNA, 116 bp, Homo sapiens
gacacagtaagtaccratgccgcaaagggaggtccccagggcttgagggcatgtgaggcgaggagaggatggactctagagttttggggtttggggtctgcaaagctctgaaggag

SEQ ID NO: 4467 - DNA, 201 bp, Homo sapiens; identical to SEQ ID NO: 4401

SEQ ID NO: 4468 - DNA, 201 bp, Homo sapiens; identical to SEQ ID NO: 4402

SEQ ID NO: 4469 - DNA, 201 bp, Homo sapiens; identical to SEQ ID NO: 4403

SEQ ID NO: 4470 - DNA, 126 bp, Homo sapiens
gacacagtaagtaccgatgccgcaamgggaggtccccagggcttgagggcatgtgaggcgaggagaggatggactctagagttttggggtttggggtctgcaaagctctgaaggagtctcatctct

SEQ ID NO: 4471 - DNA, 201 bp, Homo sapiens; identical to SEQ ID NO: 4404

SEQ ID NO: 4472 - DNA, 201 bp, Homo sapiens; identical to SEQ ID NO: 4405

SEQ ID NO: 4473 - DNA, 201 bp, Homo sapiens; identical to SEQ ID NO: 4406

SEQ ID NO: 4474 - DNA, 201 bp, Homo sapiens; identical to SEQ ID NO: 4407

SEQ ID NO: 4475 - DNA, 201 bp, Homo sapiens; identical to SEQ ID NO: 4375

SEQ ID NO: 4476 - DNA, 201 bp, Homo sapiens; identical to SEQ ID NO: 4376

SEQ ID NO: 4477 - DNA, 201 bp, Homo sapiens; identical to SEQ ID NO: 4377

SEQ ID NO: 4478 - DNA, 171 bp, Homo sapiens; identical to SEQ ID NO: 4378

SEQ ID NO: 4479 - DNA, 201 bp, Homo sapiens; identical to SEQ ID NO: 4379

SEQ ID NO: 4480 - DNA, 201 bp, Homo sapiens; identical to SEQ ID NO: 4380

SEQ ID NO: 4481 - DNA, 201 bp, Homo sapiens; identical to SEQ ID NO: 4381

SEQ ID NO: 4482 - DNA, 201 bp, Homo sapiens; identical to SEQ ID NO: 4382

SEQ ID NO: 4483 - DNA, 201 bp, Homo sapiens; identical to SEQ ID NO: 4383

SEQ ID NO: 4484 - DNA, 201 bp, Homo sapiens; identical to SEQ ID NO: 4384

SEQ ID NO: 4485 - DNA, 201 bp, Homo sapiens; identical to SEQ ID NO: 4385

SEQ ID NO: 4486 - DNA, 201 bp, Homo sapiens; identical to SEQ ID NO: 4386

SEQ ID NO: 4487 - DNA, 201 bp, Homo sapiens; identical to SEQ ID NO: 4387

SEQ ID NO: 4488 - DNA, 151 bp, Homo sapiens; identical to SEQ ID NO: 4388

SEQ ID NO: 4489 - DNA, 201 bp, Homo sapiens; identical to SEQ ID NO: 4389

SEQ ID NO: 4490 - DNA, 201 bp, Homo sapiens; identical to SEQ ID NO: 4390

SEQ ID NO: 4491 - DNA, 201 bp, Homo sapiens; identical to SEQ ID NO: 4391

SEQ ID NO: 4492 - DNA, 201 bp, Homo sapiens; identical to SEQ ID NO: 4392

SEQ ID NO: 4493 - DNA, 201 bp, Homo sapiens; identical to SEQ ID NO: 4393

SEQ ID NO: 4494 - DNA, 194 bp, Homo sapiens
ctttctgagcccgagggactgccacctccactgtgtgcacactcagctacgggacacatttcaggtatccaaggcagcagagaacaaagaacakccaccatgcagctcttcctcctcttgtgcctggtgcttctcagccctcagggggcctcccttcaccgccaccacccccgggagatgaagaagagagtcga

SEQ ID NO: 4495 - DNA, 201 bp, Homo sapiens; identical to SEQ ID NO: 4395

SEQ ID NO: 4496 - DNA, 201 bp, Homo sapiens; identical to SEQ ID NO: 4396

SEQ ID NO: 4497 - DNA, 141 bp, Homo sapiens
ctttctgagcccgagggactgccacctccactgtgtgcacrctcagctacgggacacatttcaggtatccaaggcagcagagaacaaagaacagccaccatgcagctcttcctcctcttgtgcctggtgcttctcagccct

SEQ ID NO: 4498 - DNA, 201 bp, Homo sapiens; identical to SEQ ID NO: 4398

SEQ ID NO: 4499 - DNA, 201 bp, Homo sapiens; identical to SEQ ID NO: 4399

SEQ ID NO: 4500 - DNA, 201 bp, Homo sapiens; identical to SEQ ID NO: 4400

SEQ ID NO: 4501 - DNA, 201 bp, Homo sapiens; identical to SEQ ID NO: 4401

SEQ ID NO: 4502 - DNA, 201 bp, Homo sapiens; identical to SEQ ID NO: 4402

SEQ ID NO: 4503 - DNA, 201 bp, Homo sapiens; identical to SEQ ID NO: 4403

SEQ ID NO: 4504 - DNA, 201 bp, Homo sapiens; identical to SEQ ID NO: 4404

SEQ ID NO: 4505 - DNA, 201 bp, Homo sapiens; identical to SEQ ID NO: 4405

SEQ ID NO: 4506 - DNA, 201 bp, Homo sapiens; identical to SEQ ID NO: 4406

SEQ ID NO: 4507 - DNA, 201 bp, Homo sapiens; identical to SEQ ID NO: 4407

SEQ ID NO: 4508 - DNA, 201 bp, Homo sapiens; identical to SEQ ID NO: 4375

SEQ ID NO: 4509 - DNA, 201 bp, Homo sapiens; identical to SEQ ID NO: 4376

SEQ ID NO: 4510 - DNA, 201 bp, Homo sapiens; identical to SEQ ID NO: 4377

SEQ ID NO: 4511 - DNA, 171 bp, Homo sapiens; identical to SEQ ID NO: 4378

SEQ ID NO: 4512 - DNA, 201 bp, Homo sapiens; identical to SEQ ID NO: 4379

SEQ ID NO: 4513 - DNA, 201 bp, Homo sapiens; identical to SEQ ID NO: 4381

SEQ ID NO: 4514 - DNA, 201 bp, Homo sapiens; identical to SEQ ID NO: 4380

SEQ ID NO: 4515 - DNA, 201 bp, Homo sapiens; identical to SEQ ID NO: 4382

SEQ ID NO: 4516 - DNA, 201 bp, Homo sapiens; identical to SEQ ID NO: 4384

SEQ ID NO: 4517 - DNA, 201 bp, Homo sapiens; identical to SEQ ID NO: 4383

SEQ ID NO: 4518 - DNA, 201 bp, Homo sapiens; identical to SEQ ID NO: 4385

SEQ ID NO: 4519 - DNA, 201 bp, Homo sapiens; identical to SEQ ID NO: 4386

SEQ ID NO: 4520 - DNA, 201 bp, Homo sapiens; identical to SEQ ID NO: 4387

SEQ ID NO: 4521 - DNA, 201 bp, Homo sapiens; identical to SEQ ID NO: 4389

SEQ ID NO: 4522 - DNA, 151 bp, Homo sapiens; identical to SEQ ID NO: 4388

SEQ ID NO: 4523 - DNA, 201 bp, Homo sapiens; identical to SEQ ID NO: 4390

SEQ ID NO: 4524 - DNA, 201 bp, Homo sapiens; identical to SEQ ID NO: 4391

SEQ ID NO: 4525 - DNA, 201 bp, Homo sapiens; identical to SEQ ID NO: 4392

SEQ ID NO: 4526 - DNA, 201 bp, Homo sapiens; identical to SEQ ID NO: 4393

SEQ ID NO: 4527 - DNA, 201 bp, Homo sapiens; identical to SEQ ID NO: 4395

SEQ ID NO: 4528 - DNA, 148 bp, Homo sapiens
atggggacaaaatgtcggctggataggaggtgctcaaacaaagaacakccaccatgcagctcttcctcctcttgtgcctggtgcttctcagccctcagggggcctcccttcaccgccaccacccccgggagatgaagaagagagtcga

SEQ ID NO: 4529 - DNA, 201 bp, Homo sapiens; identical to SEQ ID NO: 4400

SEQ ID NO: 4530 - DNA, 201 bp, Homo sapiens; identical to SEQ ID NO: 4399

SEQ ID NO: 4531 - DNA, 201 bp, Homo sapiens; identical to SEQ ID NO: 4398

SEQ ID NO: 4532 - DNA, 201 bp, Homo sapiens; identical to SEQ ID NO: 4396

SEQ ID NO: 4533 - DNA, 201 bp, Homo sapiens; identical to SEQ ID NO: 4402

SEQ ID NO: 4534 - DNA, 201 bp, Homo sapiens; identical to SEQ ID NO: 4401

SEQ ID NO: 4535 - DNA, 201 bp, Homo sapiens; identical to SEQ ID NO: 4404

SEQ ID NO: 4536 - DNA, 201 bp, Homo sapiens; identical to SEQ ID NO: 4403

SEQ ID NO: 4537 - DNA, 201 bp, Homo sapiens; identical to SEQ ID NO: 4405

SEQ ID NO: 4538 - DNA, 201 bp, Homo sapiens; identical to SEQ ID NO: 4407

SEQ ID NO: 4539 - DNA, 201 bp, Homo sapiens; identical to SEQ ID NO: 4406

SEQ ID NO: 4540 - DNA, 201 bp, Homo sapiens
aacatggaagttatgaagatgctgttcactctggagcccttaatgattgatctgatgttccttttatttataacaatgttaaatgcaattgtcttgtaccktgagttgagtattacacattaaagtaaagtacaagctgtaaacttgggtttttgtgatgtaggaaatggtttccatctgtactttggtcctctgatttca

SEQ ID NO: 4541 - DNA, 201 bp, Homo sapiens
ttcccataatggaaggctccacacccacttgggaccaggaaactatccgtgctaaaggtgtaagcccacgtttatcagcttctgacttcttcataagaacracagctgcagcaccatcatttattcctgaagcattggctggggtgactgttcccgttccatcagtaagaaagtaaggctttagcttggacatggcttcta

SEQ ID NO: 4542 - DNA, 201 bp, Homo sapiens
aaagaaattgaggttgttcaaagtttaagcaattcattctctctgaacacacattgctattcccatcccacccccaatgcacagggctgcaacaccacgayttctgcccattctctccagtgtgtgtaacagggtcacaagaattcgacagccagatgctccaagagggtggcccaaggctatagcccctccttcaatatt

SEQ ID NO: 4543 - DNA, 201 bp, Homo sapiens
aaggctatagcccctccttcaatattgacggtcctattcccataatggaaggctccacacccacttgggaccaggaaactatccgtgctaaaggtgtaagyccacgtttatcagcttctgacttcttcataagaacgacagctgcagcaccatcatttattcctgaagcattggctggggtgactgttcccgttccatcag

SEQ ID NO: 4544 - DNA, 201 bp, Homo sapiens
aatcaccattcttcgaattgatgatcttattaaattacatccagaaagtaaagatgataaacatggaagttatgaagatgctgttcactctggagcccttwatgattgatctgatgttccttttatttataacaatgttaaatgcaattgtcttgtaccttgagttgagtattacacattaaagtaaagtacaagctgtaa

SEQ ID NO: 4545 - DNA, 201 bp, Homo sapiens
tcccgttccatcagtaagaaagtaaggctttagcttggacatggcttctatgttgctcccatggcgaggaaactcatctgttttaacttcaataagacctyttctagttgacaccaaaactggtacaatctctttgtcaaaatggccagctttctgtgcattctctgtcctgttctgggacagaactgcaaccttgtcctg

SEQ ID NO: 4546 - DNA, 201 bp, Homo sapiens
tttgagcaatggtaaacctcgagacaacaaacaagcaggggtgtttgaaccaaccatagttaaagttaagagtttgaaatttgcaacagaagctgcaatcmccattcttcgaattgatgatcttattaaattacatccagaaagtaaagatgataaacatggaagttatgaagatgctgttcactctggagcccttaatga

SEQ ID NO: 4547 - DNA, 201 bp, Homo sapiens
atcaccattcttcgaattgatgatcttattaaattacatccagaaagtaaagatgataaacatggaagttatgaagatgctgttcactctggagcccttawtgattgatctgatgttccttttatttataacaatgttaaatgcaattgtcttgtaccttgagttgagtattacacattaaagtaaagtacaagctgtaaa

SEQ ID NO: 4548 - DNA, 201 bp, Homo sapiens
ccagaaagtaaagatgataaacatggaagttatgaagatgctgttcactctggagcccttaatgattgatctgatgttccttttatttataacaatgttaratgcaattgtcttgtaccttgagttgagtattacacattaaagtaaagtacaagctgtaaacttgggtttttgtgatgtaggaaatggtttccatctgta

SEQ ID NO: 4549 - DNA, 201 bp, Homo sapiens
cagccgggaagcgggtggggtggtgtgttacccagtagctcctgggacatcgctcgggtacgctccacgccgtcgcagccactgctgtggtcgccggtcgsccgaggggccgcgatactggttgcccgcggtgtaagcagaattcgacgtgtatcgctgccgtcaagatggaggggcctttgtccgtgttcggtgaccgca

SEQ ID NO: 4550 - DNA, 201 bp, Homo sapiens
ccttcccgccgtgccccgcggccgggccggggcagccgggaagcgggtggggtggtgtgttacccagtagctcctgggacatcgctcgggtacgctccacrccgtcgcagccactgctgtggtcgccggtcggccgaggggccgcgatactggttgcccgcggtgtaagcagaattcgacgtgtatcgctgccgtcaagat

SEQ ID NO: 4551 - DNA, 201 bp, Homo sapiens; identical to SEQ ID NO: 4540

SEQ ID NO: 4552 - DNA, 201 bp, Homo sapiens
ccattctctccagtgtgtgtaacagggtcacaagaattcgacagccagatgctccaagagggtggcccaaggctatagcccctccttcaatattgacctarcgggggagaaaagatttagattgtttattcttctgtggacacagtttaaaatcttaaacttgtctttttcctcttaatgtatcagcatgctaccctttca

SEQ ID NO: 4553 - DNA, 192 bp, Homo sapiens
cctgttgtccctgcctctttttccttcccgccgtgccccgcggccgggccggggcagccgggaagcgggtggggtggtgtgttacccagtakctcctgggacatcgctcgggtacgctccacgccgtcgcagccactgctgtggtcgccggtcggccgaggggccgcgatactggttgcccgcggtgtaagc

SEQ ID NO: 4554 - DNA, 201 bp, Homo sapiens; identical to SEQ ID NO: 4542

SEQ ID NO: 4555 - DNA, 201 bp, Homo sapiens; identical to SEQ ID NO: 4544

SEQ ID NO: 4556 - DNA, 201 bp, Homo sapiens; identical to SEQ ID NO: 4547

SEQ ID NO: 4557 - DNA, 201 bp, Homo sapiens; identical to SEQ ID NO: 4546

SEQ ID NO: 4558 - DNA, 201 bp, Homo sapiens; identical to SEQ ID NO: 4548

SEQ ID NO: 4559 - DNA, 201 bp, Homo sapiens
cttcccgccgtgccccgcggccgggccggggcagccgggaagcgggtggggtggtgtgttacccagtagctcctgggacatcgctcgggtacgctccacgycgtcgcagccactgctgtggtcgccggtcggccgaggggccgcgatactggttgcccgcggtgtaagcagaattcgacgtgtatcgctgccgtcaagatg

SEQ ID NO: 4560 - DNA, 201 bp, Homo sapiens; identical to SEQ ID NO: 4549

SEQ ID NO: 4561 - DNA, 201 bp, Homo sapiens; identical to SEQ ID NO: 4550

SEQ ID NO: 4562 - DNA, 201 bp, Homo sapiens; identical to SEQ ID NO: 4540

SEQ ID NO: 4563 - DNA, 192 bp, Homo sapiens; identical to SEQ ID NO: 4553

SEQ ID NO: 4564 - DNA, 201 bp, Homo sapiens; identical to SEQ ID NO: 4541

SEQ ID NO: 4565 - DNA, 201 bp, Homo sapiens; identical to SEQ ID NO: 4542

SEQ ID NO: 4566 - DNA, 201 bp, Homo sapiens; identical to SEQ ID NO: 4543

SEQ ID NO: 4567 - DNA, 201 bp, Homo sapiens; identical to SEQ ID NO: 4544

SEQ ID NO: 4568 - DNA, 201 bp, Homo sapiens; identical to SEQ ID NO: 4546

SEQ ID NO: 4569 - DNA, 201 bp, Homo sapiens; identical to SEQ ID NO: 4547

SEQ ID NO: 4570 - DNA, 201 bp, Homo sapiens; identical to SEQ ID NO: 4545

SEQ ID NO: 4571 - DNA, 201 bp, Homo sapiens; identical to SEQ ID NO: 4548

SEQ ID NO: 4572 - DNA, 201 bp, Homo sapiens; identical to SEQ ID NO: 4559

SEQ ID NO: 4573 - DNA, 193 bp, Homo sapiens
gcaaagctcctcctcgcagcccacaggcctgccgcgggcgggacctgagctcaggactggaatcccacgggcgagaatctcgagtgcgagcccggcccgcrgcgggtctcagcacagctctgatgggtccttttgctctcggcggcttcgggaggtcctatgcgtttctcctggcgccagtcattcgctcgcg

SEQ ID NO: 4574 - DNA, 201 bp, Homo sapiens
caagacctacgcctacctgttttcccatccctctcggatgcccgtctaccccaaatgggtgggggccgaccatagagatgagatccagtacatctttgggragccctttgccaccccactccgggctaccggccccaagacaggacagtctctaaggccatgaccgcctactggaccaactttgccaaaacaggggacccc

SEQ ID NO: 4575 - DNA, 201 bp, Homo sapiens
cttcctgcgctactggaccctcacctatctggcgctgcccacagtgaccgaccaggaggccagttccatgccctccacaggggactctgaggccactcccrtctcccccgacaggcaactccgagtctgcccccgtccctgcaacgggtgactctcaggatgcccctgtgcccctcacaagtgactctgaggctgcccccg

SEQ ID NO: 4576 - DNA, 201 bp, Homo sapiens
gatgcccgtctaccccaaatgggtgggggccgaccatagagatgagatccagtacatctttggggagccctttgccaccccactccgggctaccggccccragacaggacagtctctaaggccatgaccgcctactggaccaactttgccaaaacaggggaccccaacatgggccactcggctgtgcccacacactgggaa

SEQ ID NO: 4577 - DNA, 201 bp, Homo sapiens
acaggcaactccgagtctgcccccgtccctgcaacgggtgactctcaggatgcccctgtgcccctcacaagtgactctgaggctgcccccgtgcccccctyaggtgactctgaggctcccccgtaccccctacgggtgactctgaggcccgtgcccaccttgggtgactctgaggccgcccctgtgtcccccacagatgac

SEQ ID NO: 4578 - DNA, 201 bp, Homo sapiens
tcccccgacaggcaactccgagtctgcccccgtccctgcaacgggtgactctcaggatgcccctgtgcccctcacaagtgactctgaggctgcccccgtgyccccctcaggtgactctgaggctcccccgtaccccctacgggtgactctgaggcccgtgcccaccttgggtgactctgaggccgcccctgtgtcccccac

SEQ ID NO: 4579 - DNA, 201 bp, Homo sapiens
ccagcacagagccaatgccaagagtgccaagacctacgcctacctgttttcccatccctctcggatgcccgtctaccccaaatgggtgggggccgaccatrgagatgagatccagtacatctttggggagccctttgccaccccactccgggctaccggccccaagacaggacagtctctaaggccatgaccgcctactgg

SEQ ID NO: 4580 - DNA, 201 bp, Homo sapiens
ccaccccactccgggctaccggccccaagacaggacagtctctaaggccatgaccgcctactggaccaactttgccaaaacaggggaccccaacatgggcsactcggctgtgcccacacactgggaaccctacactacggaaaacagcggctacctggagatcaccaagaagatgggcagcagctccatgaagcggagcct

SEQ ID NO: 4581 - DNA, 201 bp, Homo sapiens
cagcacagagccaatgccaagagtgccaagacctacgcctacctgttttcccatccctctcggatgcccgtctaccccaaatgggtgggggccgaccatasagatgagatccagtacatctttggggagccctttgccaccccactccgggctaccggccccaagacaggacagtctctaaggccatgaccgcctactgga

SEQ ID NO: 4582 - DNA, 179 bp, Homo sapiens
tccctgcaacgggtgactctcaggatgcccctgtgcccctcacaagtgactctgaggctgcccccgtgcccccctcaggtgactctgaggctcccccgtaycccctacgggtgactctgaggcccgtgcccaccttgggtgactctgaggccgcccctgtgtcccccacagatgactcc

SEQ ID NO: 4583 - DNA, 201 bp, Homo sapiens
gcctactggaccaactttgccaaaacaggggaccccaacatgggccactcggctgtgcccacacactgggaaccctacactacggaaaacagcggctaccyggagatcaccaagaagatgggcagcagctccatgaagcggagcctgagaaccaacttcctgcgctactggaccctcacctatctggcgctgcccacagtg

SEQ ID NO: 4584 - DNA, 201 bp, Homo sapiens
ctaccccaaatgggtgggggccgaccatagagatgagatccagtacatctttggggagccctttgccaccccactccgggctaccggccccaagacaggayagtctctaaggccatgaccgcctactggaccaactttgccaaaacaggggaccccaacatgggccactcggctgtgcccacacactgggaaccctacact

SEQ ID NO: 4585 - DNA, 201 bp, Homo sapiens
gtgggggccgaccatagagatgagatccagtacatctttggggagccctttgccaccccactccgggctaccggccccaagacaggacagtctctaaggcyatgaccgcctactggaccaactttgccaaaacaggggaccccaacatgggccactcggctgtgcccacacactgggaaccctacactacggaaaacagcg

SEQ ID NO: 4586 - DNA, 201 bp, Homo sapiens
gagccaatgccaagagtgccaagacctacgcctacctgttttcccatccctctcggatgcccgtctaccccaaatgggtgggggccgaccatagagatgasatccagtacatctttggggagccctttgccaccccactccgggctaccggccccaagacaggacagtctctaaggccatgaccgcctactggaccaactt

SEQ ID NO: 4587 - DNA, 201 bp, Homo sapiens; identical to SEQ ID NO: 4574

SEQ ID NO: 4588 - DNA, 201 bp, Homo sapiens
cttcctgcgctactggaccctcacctatctggcgctgcccacagtgaccgaccaggaggccagttccatgccctccacaggggactctgaggccactcccrtctcccccgacaggcaactccgagtctgcccccgtccctgcaacgggtgactctcaggatgcccctgtgcccctcacaagtgactctgaggctcccccgt

SEQ ID NO: 4589 - DNA, 201 bp, Homo sapiens; identical to SEQ ID NO: 4576

SEQ ID NO: 4590 - DNA, 201 bp, Homo sapiens; identical to SEQ ID NO: 4579

SEQ ID NO: 4591 - DNA, 201 bp, Homo sapiens; identical to SEQ ID NO: 4580

SEQ ID NO: 4592 - DNA, 201 bp, Homo sapiens; identical to SEQ ID NO: 4581

SEQ ID NO: 4593 - DNA, 201 bp, Homo sapiens
ctcccccgacaggcaactccgagtctgcccccgtccctgcaacgggtgactctcaggatgcccctgtgcccctcacaagtgactctgaggctcccccgtaycccctacgggtgactctgaggcccgtgcccaccttgggtgactctgaggccgcccctgtgtcccccacagatgactccgaggaagctcagatgctgcagt

SEQ ID NO: 4594 - DNA, 201 bp, Homo sapiens; identical to SEQ ID NO: 4583

SEQ ID NO: 4595 - DNA, 201 bp, Homo sapiens; identical to SEQ ID NO: 4584

SEQ ID NO: 4596 - DNA, 201 bp, Homo sapiens; identical to SEQ ID NO: 4585

SEQ ID NO: 4597 - DNA, 201 bp, Homo sapiens; identical to SEQ ID NO: 4586

SEQ ID NO: 4598 - DNA, 201 bp, Homo sapiens; identical to SEQ ID NO: 4574

SEQ ID NO: 4599 - DNA, 201 bp, Homo sapiens; identical to SEQ ID NO: 4588

SEQ ID NO: 4600 - DNA, 201 bp, Homo sapiens; identical to SEQ ID NO: 4576

SEQ ID NO: 4601 - DNA, 201 bp, Homo sapiens; identical to SEQ ID NO: 4579

SEQ ID NO: 4602 - DNA, 201 bp, Homo sapiens; identical to SEQ ID NO: 4580

SEQ ID NO: 4603 - DNA, 201 bp, Homo sapiens; identical to SEQ ID NO: 4581

SEQ ID NO: 4604 - DNA, 201 bp, Homo sapiens; identical to SEQ ID NO: 4593

SEQ ID NO: 4605 - DNA, 201 bp, Homo sapiens; identical to SEQ ID NO: 4583

SEQ ID NO: 4606 - DNA, 201 bp, Homo sapiens; identical to SEQ ID NO: 4584

SEQ ID NO: 4607 - DNA, 201 bp, Homo sapiens; identical to SEQ ID NO: 4585

SEQ ID NO: 4608 - DNA, 201 bp, Homo sapiens; identical to SEQ ID NO: 4586

SEQ ID NO: 4609 - DNA, 201 bp, Homo sapiens
agcagcagttcgaggagctggtgcggcccttcggcagcctggagcgctgcttcctggtctacagtgagcgcactggccaatccaagggctatggctttgcygagtacatgaagaaggactcggctgcccgtgccaagtcggacctgctgggcaagccgctgggaccacgcaccctctacgtgcactggacggatgccgggc

SEQ ID NO: 4610 - DNA, 201 bp, Homo sapiens
caaaggagctggtggccagtggcatgggctgggcagccttcaatctcagcaacgtgactggcaacagtcggatcctctgctcagtgtactgcaatggctcycagataacaggctcctctaacatcaccgtgtacaggctcccggagcgtgtggagctggcacccctgcctccttggcagccggtgggccagaacttcaccc

SEQ ID NO: 4611 - DNA, 201 bp, Homo sapiens
ggaagccaccacccctgctgccatccgtgcttggccctgctgggggtgaccgggaggccctgggcttgggtcccccagcggcccagctcactcctcccccmgcccctgtggggctccgaggctctggcctcagaggcctccagaaagacagtgggcctctgccgacgccccctggggtctcactgctgggggagcccccca

SEQ ID NO: 4612 - DNA, 201 bp, Homo sapiens
tggagcgctgcttcctggtctacagtgagcgcactggccaatccaagggctatggctttgctgagtacatgaagaaggactcggctgcccgtgccaagtcrgacctgctgggcaagccgctgggaccacgcaccctctacgtgcactggacggatgccgggcaactgacgcctgcccttctccactcccgctgcctctgtg

SEQ ID NO: 4613 - DNA, 201 bp, Homo sapiens
aacatcaccgtgtacaggctcccggagcgtgtggagctggcacccctgcctccttggcagccggtgggccagaacttcaccctgcgctgccaagtggaggrtgggtcgccccggaccagcctcacggtggtgctgcttcgctgggaggaggagctgagccggcagcccgcagtggaggagccagcggaggtcactgccact

SEQ ID NO: 4614 - DNA, 201 bp, Homo sapiens
gacgtgtccgttactcaccggcccccgctgagccctaagtctggggccgaagtcgaagccggcgatgccgcggagcgccgggcgccggaagaagagctgcygcctctagatccagaagagatccggaaacgcctggaacacaccgagcgccagttccgtaaccgccgcaagatactgatccggggcctcccgggggacgtg

SEQ ID NO: 4615 - DNA, 184 bp, Homo sapiens
ctgcctcattgctcctgtaattttggcctttcgagtgccttggaggtttccctgacctcccgtgaagatacagagactgtctcctttttttttaactttgwcgctctgattccttcaaggcccggcctgtccgggccaccattccacaccttgcggtttgaaacagctgtttttcccacatttg

SEQ ID NO: 4616 - DNA, 201 bp, Homo sapiens
tgggggaccagatgctgaatgcgacagtcatgaaccacggggacacgctaacggccacagccacagccacggcgcgcgcggatcaggagggtgcccgggaratcgtctgcaacgtgaccctagggggcgagagacgggaggcccgggagaacttgacggtctttagcttcctaggacccattgtgaacctcagcgagccca

SEQ ID NO: 4617 - DNA, 201 bp, Homo sapiens
cggctcgctggtcccagaaggcgccgggtttcccaagatggcggcggacgtgtccgttactcaccggcccccgctgagccctaagtctggggccgaagtcraagccggcgatgccgcggagcgccgggcgccggaagaagagctgccgcctctagatccagaagagatccggaaacgcctggaacacaccgagcgccagtt

SEQ ID NO: 4618 - DNA, 201 bp, Homo sapiens
ttgtggacaaatacaaagggacagccttcgtgaccctgctgaatggggagcaggccgaggccgcaatcaatgctttccaccagagccgcctgcgggagcgygaactgtcggtgcagctgcagcccacggatgccctgctgtgtgtggccaacctgccccccagcctcacacagcagcagttcgaggagctggtgcggccct

SEQ ID NO: 4619 - DNA, 201 bp, Homo sapiens
agccttcaatctcagcaacgtgactggcaacagtcggatcctctgctcagtgtactgcaatggctcccagataacaggctcctctaacatcaccgtgtacrggctcccggagcgtgtggagctggcacccctgcctccttggcagccggtgggccagaacttcaccctgcgctgccaagtggaggatgggtcgccccggac

SEQ ID NO: 4620 - DNA, 201 bp, Homo sapiens
ccaatcgacgggcgcgccctcgttgccgctctatgccgctccgccccggctcgctggtcccagaaggcgccgggtttcccaagatggcggcggacgtgtcygttactcaccggcccccgctgagccctaagtctggggccgaagtcgaagccggcgatgccgcggagcgccgggcgccggaagaagagctgccgcctctag

SEQ ID NO: 4621 - DNA, 157 bp, Homo sapiens
ttcccctgcctgcccttcgggcacctcaggaaggcaccttcctctgtcagaatggcyaccatggtaccatccgtgttgtggcccagggcctgctggactctgctggtctgctgtctgctgaccccaggtgtccaggggcaggagttccttttgcggg

SEQ ID NO: 4622 - DNA, 201 bp, Homo sapiens
gcggtgttactgaccctgggcgtggtgactatcgtactggccttaatgtacgtcttcagggagcaccaacggagcggcagttaccatgttagggaggagascacctatctgcccctcacgtctatgcagccgacagaagcaatgggggaagaaccgtccagagctgagtgacgctgggatccgggatcaaagttggcgggg

SEQ ID NO: 4623 - DNA, 201 bp, Homo sapiens
caagaaatacggcactcgctgctccagctgctggctggtgcccaggaaaaatgtccagcccaagaggctatgtggcagatgtggagtgtccctggaccccrttcaggaaggttaaacccagcttcaccctgctgagctgctgcttctgcctccgtttcaccagtgggagaatgggcagaagcagctctcctaggaggattg

SEQ ID NO: 4624 - DNA, 201 bp, Homo sapiens
gagctgctgcttctgcctccgtttcaccagtgggagaatgggcagaagcagctctcctaggaggattggggaaagagccggcctgcctcctctctgccatytccagattcaaggatcccgggggaagacccaggcctcaggtggcagagcctgctaggggtcaccagccccttctccagtcagccttggccgaggccccct

SEQ ID NO: 4625 - DNA, 201 bp, Homo sapiens; identical to SEQ ID NO: 4613

SEQ ID NO: 4626 - DNA, 201 bp, Homo sapiens
tataccccagccgtggggcccggggtccctgccgcagccccctccccttctgatgccttaaaagctgggccccaggccctgctggccagagccacagatgscaagctctgggagcttgactatggaccaaacagctctggcctagggattgggccaccctacccaggatctccaccctggggacagtagaaggggaaagcc

SEQ ID NO: 4627 - DNA, 201 bp, Homo sapiens
ctgcctcattgctcctgtaattttggcctttcgagtgccttggaggtttccctgacctcccgtgaagatacagagactgtctcctttttttttaactttgwcaactgacttctgtttccttttctaagttttatttttcaaaccaccccggacagcccccagctctgattccttcaaggcccggcctgtccgggccaccat

SEQ ID NO: 4628 - DNA, 201 bp, Homo sapiens; identical to SEQ ID NO: 4614

SEQ ID NO: 4629 - DNA, 201 bp, Homo sapiens
aaggggaaagccttcatcttggcgaaccggccccaccaccccctcctacccgggcctccgtgcagagatgggctttctctgccagtcccctgctgtctgtmtgtgggagtcggacattgtgcccatctcccggagcctctgctgtcactcgcttgttgaagatgaattcttgaattctgcctgcccacccccggccagatc

SEQ ID NO: 4630 - DNA, 201 bp, Homo sapiens; identical to SEQ ID NO: 4617

SEQ ID NO: 4631 - DNA, 201 bp, Homo sapiens
aagacgacatgctagacatggcccccctcctccaggagaactcgcggctgggctgccagattgtgctgacaccggagctggaaggagcggaattcaccctkcccaagatcaccaggaacttctacgtggatggccatgtccccaagccccactgacatgaacacctggaccattccacattgccatggccccagggcccag

SEQ ID NO: 4632 - DNA, 201 bp, Homo sapiens; identical to SEQ ID NO: 4619

SEQ ID NO: 4633 - DNA, 201 bp, Homo sapiens
gtcggtgagtcacgtgatgcatgtcatggccgcctccatggcccggggaggcgtgagtgccagggttctgctgcaggctgccaggggcacctggtggaacrgacctgggggcacttccgggtcgggggagggggtggcgctggggacaaccagaaagtttcaagcgacaggctcgcgcccggctggagaggaggacgcggg

SEQ ID NO: 4634 - DNA, 157 bp, Homo sapiens; identical to SEQ ID NO: 4621

SEQ ID NO: 4635 - DNA, 201 bp, Homo sapiens; identical to SEQ ID NO: 4620

SEQ ID NO: 4636 - DNA, 201 bp, Homo sapiens
ggggcacctggtggaacagacctgggggcacttccgggtcgggggagggggtggcgctggggacaaccagaaagtttcaagcgacaggctcgcgcccggckggagaggaggacgcgggcggcccggagcggcccggggacgtggtgaacgtggtgttcgtagaccgctcaggccagcggatcccagtgagtggcagagtcg

SEQ ID NO: 4637 - DNA, 201 bp, Homo sapiens
tccctcgcctccctggcgcggcgcatgctcagtcggtgagtcacgtgatgcatgtcatggccgcctccatggcccggggaggcgtgagtgccagggttctrctgcaggctgccaggggcacctggtggaacagacctgggggcacttccgggtcgggggagggggtggcgctggggacaaccagaaagtttcaagcgacag

SEQ ID NO: 4638 - DNA, 201 bp, Homo sapiens; identical to SEQ ID NO: 4610

SEQ ID NO: 4639 - DNA, 201 bp, Homo sapiens; identical to SEQ ID NO: 4616

SEQ ID NO: 4640 - DNA, 201 bp, Homo sapiens; identical to SEQ ID NO: 4622

SEQ ID NO: 4641 - DNA, 201 bp, Homo sapiens; identical to SEQ ID NO: 4609

SEQ ID NO: 4642 - DNA, 201 bp, Homo sapiens; identical to SEQ ID NO: 4610

SEQ ID NO: 4643 - DNA, 201 bp, Homo sapiens; identical to SEQ ID NO: 4612

SEQ ID NO: 4644 - DNA, 201 bp, Homo sapiens; identical to SEQ ID NO: 4613

SEQ ID NO: 4645 - DNA, 201 bp, Homo sapiens; identical to SEQ ID NO: 4614

SEQ ID NO: 4646 - DNA, 201 bp, Homo sapiens; identical to SEQ ID NO: 4617

SEQ ID NO: 4647 - DNA, 201 bp, Homo sapiens; identical to SEQ ID NO: 4616

SEQ ID NO: 4648 - DNA, 201 bp, Homo sapiens
ctcccgggggacgtgaccaaccagccttcgtgaccctgctgaatggggagcaggccgaggccgcaatcaatgctttccaccagagccgcctgcgggagcgygaactgtcggtgcagctgcagcccacggatgccctgctgtgtgtggccaacctgccccccagcctcacacagcagcagttcgaggagctggtgcggccct

SEQ ID NO: 4649 - DNA, 201 bp, Homo sapiens; identical to SEQ ID NO: 4619

SEQ ID NO: 4650 - DNA, 201 bp, Homo sapiens; identical to SEQ ID NO: 4620

SEQ ID NO: 4651 - DNA, 157 bp, Homo sapiens; identical to SEQ ID NO: 4621

SEQ ID NO: 4652 - DNA, 201 bp, Homo sapiens; identical to SEQ ID NO: 4622

SEQ ID NO: 4653 - DNA, 201 bp, Homo sapiens; identical to SEQ ID NO: 4629

SEQ ID NO: 4654 - DNA, 201 bp, Homo sapiens; identical to SEQ ID NO: 4631

SEQ ID NO: 4655 - DNA, 201 bp, Homo sapiens; identical to SEQ ID NO: 4636

SEQ ID NO: 4656 - DNA, 201 bp, Homo sapiens; identical to SEQ ID NO: 4637

SEQ ID NO: 4657 - DNA, 201 bp, Homo sapiens; identical to SEQ ID NO: 4633

SEQ ID NO: 4658 - DNA, 201 bp, Homo sapiens; identical to SEQ ID NO: 4626

SEQ ID NO: 4659 - DNA, 201 bp, Homo sapiens; identical to SEQ ID NO: 4627

SEQ ID NO: 4660 - DNA, 201 bp, Homo sapiens; identical to SEQ ID NO: 4610

SEQ ID NO: 4661 - DNA, 201 bp, Homo sapiens; identical to SEQ ID NO: 4613

SEQ ID NO: 4662 - DNA, 201 bp, Homo sapiens; identical to SEQ ID NO: 4614

SEQ ID NO: 4663 - DNA, 201 bp, Homo sapiens; identical to SEQ ID NO: 4617

SEQ ID NO: 4664 - DNA, 201 bp, Homo sapiens; identical to SEQ ID NO: 4616

SEQ ID NO: 4665 - DNA, 201 bp, Homo sapiens; identical to SEQ ID NO: 4619

SEQ ID NO: 4666 - DNA, 201 bp, Homo sapiens; identical to SEQ ID NO: 4620

SEQ ID NO: 4667 - DNA, 157 bp, Homo sapiens; identical to SEQ ID NO: 4621

SEQ ID NO: 4668 - DNA, 201 bp, Homo sapiens; identical to SEQ ID NO: 4622

SEQ ID NO: 4669 - DNA, 201 bp, Homo sapiens; identical to SEQ ID NO: 4613

SEQ ID NO: 4670 - DNA, 201 bp, Homo sapiens; identical to SEQ ID NO: 4624

SEQ ID NO: 4671 - DNA, 201 bp, Homo sapiens; identical to SEQ ID NO: 4626

SEQ ID NO: 4672 - DNA, 201 bp, Homo sapiens; identical to SEQ ID NO: 4627

SEQ ID NO: 4673 - DNA, 201 bp, Homo sapiens; identical to SEQ ID NO: 4614

SEQ ID NO: 4674 - DNA, 201 bp, Homo sapiens; identical to SEQ ID NO: 4629

SEQ ID NO: 4675 - DNA, 201 bp, Homo sapiens; identical to SEQ ID NO: 4617

SEQ ID NO: 4676 - DNA, 201 bp, Homo sapiens; identical to SEQ ID NO: 4631

SEQ ID NO: 4677 - DNA, 201 bp, Homo sapiens; identical to SEQ ID NO: 4619

SEQ ID NO: 4678 - DNA, 201 bp, Homo sapiens; identical to SEQ ID NO: 4633

SEQ ID NO: 4679 - DNA, 157 bp, Homo sapiens; identical to SEQ ID NO: 4621

SEQ ID NO: 4680 - DNA, 201 bp, Homo sapiens; identical to SEQ ID NO: 4620

SEQ ID NO: 4681 - DNA, 201 bp, Homo sapiens
agaggtccctctggcctgcatgccaggagtcggtcaccgccctgtgcttcctccaagagacagtggagaggctgggtcagtcccctgcccaggacaccccrgtcctggggccttgctgggacccgatggctctggggactcagggccgcctgctgctggacagggattccaaggacacacagaccaggatcagccaaaagg

SEQ ID NO: 4682 - DNA, 201 bp, Homo sapiens; identical to SEQ ID NO: 4636

SEQ ID NO: 4683 - DNA, 201 bp, Homo sapiens; identical to SEQ ID NO: 4637

SEQ ID NO: 4684 - DNA, 201 bp, Homo sapiens; identical to SEQ ID NO: 4610

SEQ ID NO: 4685 - DNA, 201 bp, Homo sapiens; identical to SEQ ID NO: 4616

SEQ ID NO: 4686 - DNA, 201 bp, Homo sapiens; identical to SEQ ID NO: 4623

SEQ ID NO: 4687 - DNA, 201 bp, Homo sapiens; identical to SEQ ID NO: 4622

SEQ ID NO: 4688 - DNA, 201 bp, Homo sapiens
ctctaacctgccattggaacctcacccatagcccagaagcctcattcacaacccttcccagactccactccaacttagagaacctgaaaaatggacatgtrgacatgtatctgaaagaaagtctaggcggttgcacttagacaagggcctacggctttattaacagatgtcgaggaagctttcaggtgctggtagccatga

SEQ ID NO: 4689 - DNA, 201 bp, Homo sapiens
agaagcctcattcacaacccttcccagactccactccaacttagagaacctgaaaaatggacatgtggacatgtatctgaaagaaagtctaggcggttgcrcttagacaagggcctacggctttattaacagatgtcgaggaagctttcaggtgctggtagccatgagggtctggttttaaggatggcctttaaggaaagg

SEQ ID NO: 4690 - DNA, 201 bp, Homo sapiens
acctccagaggtttccagcgaagctgtaacaatccaccctgcagctctatgacagggaggagggcgaatcaaatccatcatcttacgccagacttcagccstgcgggagctgctgcctccaaagaaagcggggacctgggcggactgcgtctctcccccgtgtggagaacgtgacagatgtgaaggttgggctgacagaca

SEQ ID NO: 4691 - DNA, 201 bp, Homo sapiens
ggacatgtggacatgtatctgaaagaaagtctaggcggttgcacttagacaagggcctacggctttattaacagatgtcgaggaagctttcaggtgctggyagccatgagggtctggttttaaggatggcctttaaggaaaggccgtggcaggcgggctgagaggggcggctccagctcagccctgcccacagcacaggct

SEQ ID NO: 4692 - DNA, 166 bp, Homo sapiens
gaatggctttgtgcttagttttaattgtagtttgtgctattctgtgaattaacaattcaaacaaaataagaaagccatgttgttaaacagtagaggagccrgggactctgtctccattctctcatcacacacaagtcatgcatctaccaaaaaaaaaaaaacaaaa

SEQ ID NO: 4693 - DNA, 201 bp, Homo sapiens
taacagatgtcgaggaagctttcaggtgctggtagccatgagggtctggttttaaggatggcctttaaggaaaggccgtggcaggcgggctgagaggggckgctccagctcagccctgcccacagcacaggctcacagaagccgagatccacatcaccgcctggcatgcaaaggagttgaagacaaaaccatttttttcca

SEQ ID NO: 4694 - DNA, 105 bp, Homo sapiens
caaaataagaaagccatgttgttaaacagtagaggagccagggactctgtctccattctctcatcacacacaagtcatgcatctaccaaaaaaaaaaaaacaaaa

SEQ ID NO: 4695 - DNA, 201 bp, Homo sapiens
gagtacagaggctggagtgcattttctgctaacaaaaaccactgtgatattctcccagtttagagggaaaagtctatctcaggccgactcagatgtggcakaaataagtgggtctgaagtgcattttcagttgtttctgcccggaaggagcccggatgatacaaacaggtctggggttcgtggctctggcaagcgcccaga

SEQ ID NO: 4696 - DNA, 201 bp, Homo sapiens
ggtggcccccagccctgctctcccagaggctcacgccctaggcaccctttctgcacagcagccaccccccgccgctgccaccacctccagcaccagcctgyccttctcccctgactcccctggcctcctgcccaacttcccggcgcccccaccagaggggctgatgttgtcacccgcggccgtgcctgtctggtcagcagg

SEQ ID NO: 4697 - DNA, 201 bp, Homo sapiens
cgcggccgtgcctgtctggtcagcagggctggaactaagcgcaggaacagaggggctgctggaagcggaaaaggggctggggacacaggccccccacaccrtgctgaggctgccagaccccgaccctgaggggctgctcctgggggccaccgcagggggtgaggttgacgaggggttggaagctgaggccaaggttctgac

SEQ ID NO: 4698 - DNA, 201 bp, Homo sapiens
ccaaggttctgacccagctccagtcggtgcctgtggaggagcccttggaactgtgacccagtgtggccccgtggcctctcccgacattggtgctgaagacrcagggacaggaatgggaggggggagccccagaaatgcggttgctgaagaccccagtcaccacatccttctgcctgggtggcctctccaagccctggtggt

SEQ ID NO: 4699 - DNA, 201 bp, Homo sapiens
gccaaggttctgacccagctccagtcggtgcctgtggaggagcccttggaactgtgacccagtgtggccccgtggcctctcccgacattggtgctgaagaygcagggacaggaatgggaggggggagccccagaaatgcggttgctgaagaccccagtcaccacatccttctgcctgggtggcctctccaagccctggtgg

SEQ ID NO: 4700 - DNA, 201 bp, Homo sapiens
ggtgggcgtgactgccctgcagctgccttcggccactgccccaggaaacttcctcctggccaaccctgtgtctggcagccccatcgtgacgggtgtggccstgcagcagggcaagatcatcctcaccgccaccttccccaccagcatgctcgtctcccaggtcctgccgccagcccccggcctggccctgccactgaagcc

SEQ ID NO: 4701 - DNA, 201 bp, Homo sapiens
tttccatgccagagagtggatttctcctgcattctgccagtggtttgtaagagaggctgttcgtacctatggacgtgagatccaagtgacagagcttctcracaagttagacttttatgtcctgcctgtgctcaatattgatggctacatctacacctggaccaagagccgattttggagaaagactcgctccacccatac

SEQ ID NO: 4702 - DNA, 201 bp, Homo sapiens
gctctgacgactgggcttatgaccaaggaatcagatattccttcacctttgaacttcgagatacaggcagatatggctttctccttccagaatcccagatscgggctacctgcgaggagaccttcctggcaatcaagtatgttgccagctacgtcctggaacacctgtactagttgagaaagctgatggccttgtttcaaa

SEQ ID NO: 4703 - DNA, 116 bp, Homo sapiens
ttctctctctctctcrctcttggttctggtgactgtggccctggcatctgctcatcatggtggtgagcactttgaaggcgagaaggtgttccgtgttaacgttgaagatgaaaatc

SEQ ID NO: 4704 - DNA, 201 bp, Homo sapiens; identical to SEQ ID NO: 4701

SEQ ID NO: 4705 - DNA, 201 bp, Homo sapiens
agctctgccgggccgcggcggtgatcgatggggagcggctggagcggacccagcgagtgagggcgcacagccgggacgccgaggcggcgggcgggagaccmgcaccagcgcagccggccctcggcgggacgtgacgcagcgcccggggcgcgggtgttgagagagataccctctcagactttacacagctaccaaggcaac

SEQ ID NO: 4706 - DNA, 201 bp, Homo sapiens
gctaccaaggcaacaatgccaggaaaactattaatcaagatatgatagttcctgtttgcaatcaggagaagaaagcaaagaacactcaggattataaaagyagatgagacctacccactagacctggtcagacacaatgttggcactcttggttctggtgactgtggccctggcatctgctcatcatggtggtgagcactt

SEQ ID NO: 4707 - DNA, 201 bp, Homo sapiens; identical to SEQ ID NO: 4702

SEQ ID NO: 4708 - DNA, 201 bp, Homo sapiens
atagttcctgtttgcaatcaggagaagaaagcaaagaacactcaggattataaaagcagatgagacctacccactagacctggtcagacacaatgttggcrctcttggttctggtgactgtggccctggcatctgctcatcatggtggtgagcactttgaaggcgagaaggtgttccgtgttaacgttgaagatgaaaatc

SEQ ID NO: 4709 - DNA, 201 bp, Homo sapiens
tccccctcggtgtatttctactaataaatgcacagctccagaagttgaaaatgcaattagagtaccaggaaacaggagtttctttaccctcactgagatcrtcagatttagatgtcagcccgggtttgtcatggtagggtcccacactgtgcagtgccagaccaatggcagatgggggcccaagctgccacactgctccag

SEQ ID NO: 4710 - DNA, 201 bp, Homo sapiens
ttgcaccagcaaagatgatcaagttggtgtttggagcagccctccccctcggtgtatttctactaataaatgcacagctccagaagttgaaaatgcaattrgagtaccaggaaacaggagtttctttaccctcactgagatcatcagatttagatgtcagcccgggtttgtcatggtagggtcccacactgtgcagtgcca

SEQ ID NO: 4711 - DNA, 201 bp, Homo sapiens
cctgccaacacgcccggctaatttttttgtatttttagtagagacggggtttcaccatgttagccaggatggtctggatctcctgacctcgtgatccaccygcctcggcctcccaaagtgctgcgattacaggcatgagccaccgcgcctggccgctttcgatattttctaaactttaattcaaaagcactttgtgctgtg

SEQ ID NO: 4712 - DNA, 201 bp, Homo sapiens
ggacatctttgaattatgaatgccgtcctgggtattttgggaaaatgttctctatctcctgcctagaaaacttggtctggtcaagtgttgaagacaactgyagacgaaaatcatgtggacctccaccagaacccttcaatggaatggtgcatataaacacagatacacagtttggatcaacagttaattattcttgtaatg

SEQ ID NO: 4713 - DNA, 201 bp, Homo sapiens
tctcccaggctggagtgcagtggcgtaatctcggctcactgcaagctccgcctcccgggttgacaccattttcctgcctcagcctcctgagtagttgggaytaccagtagatgggactacaggcacctgccaacacgcccggctaatttttttgtatttttagtagagacggggtttcaccatgttagccaggatggtctg

SEQ ID NO: 4714 - DNA, 201 bp, Homo sapiens
aggcagcagcgttcatccccgaactctgcaaacaaatgaagaaaatagcagggtccttccttgacaaagtactatacagctgaagaacatctcgaatacarttttggtgggaaaggagccaattgatttcaacagaatcagatctgagcttcataaagtctttgaagtgacttcacagagacgcagacatgtgcacttgaa

SEQ ID NO: 4715 - DNA, 201 bp, Homo sapiens
tcatgggaatggggtttggagcagccctgcccctcgctgtgaactttctgttcgtgctggtcactgtaaaaccccagagcagtttccatttgccagtcctwcgatcccaattaatgactttgagtttccagtcgggacatctttgaattatgaatgccgtcctgggtattttgggaaaatgttctctatctcctgcctaga

SEQ ID NO: 4716 - DNA, 201 bp, Homo sapiens
ggaggcagcagcgttcatccccgaactctgcaaacaaatgaagaaaatagcagggtccttccttgacaaagtactatacagctgaagaacatctcgaatayaattttggtgggaaaggagccaattgatttcaacagaatcagatctgagcttcataaagtctttgaagtgacttcacagagacgcagacatgtgcacttg

SEQ ID NO: 4717 - DNA, 201 bp, Homo sapiens
tgctggcggttgtggtgctgcttgcgctgccggtggcctggggtcaatgcaatgccccagaatggcttccatttgccaggcctaccaacctaactgatgartttgagtttcccattgggacatatctgaactatgaatgccgccctggttattccggaagaccgttttctatcatctgcctaaaaaactcagtctggactg

SEQ ID NO: 4718 - DNA, 201 bp, Homo sapiens
atagcagtgttccagtgtgtgaacaaatcttttgtccaagtcctccagttattcctaatgggagacacacaggaaaacctctggaagtctttccctttggraaaacagtaaattacacatgcgacccccacccagacagagggacgagcttcgacctcattggagagagcaccatccgctgcacaagtgaccctcaaggga

SEQ ID NO: 4719 - DNA, 201 bp, Homo sapiens
tgacttcacagagacgcagacatgtgcacttgaagatgctgccccttccctggtacctagcaaagctcctgcctctttgtgtgcgtcactgtgaaaccccyacccttctgcctcgtgctaaacgcacacagtatctagtcaggggaaaagactgcatttaggagatagaaaatagtttggattacttaaaggaataaggtg

SEQ ID NO: 4720 - DNA, 201 bp, Homo sapiens
gtggaaaatggaatattggtatctgacaacagaagcttattttccttaaatgaagttgtggagtttaggtgtcagcctggctttgtcatgaaaggaccccrccgtgtgaagtgccaggccctgaacaaatgggagccagagttaccaagctgctccagggtgtgtcagccgcctccagaaatcctgcatggtgagcatacc

SEQ ID NO: 4721 - DNA, 201 bp, Homo sapiens
gatccaaaacgggcattacattggaggacacgtatctctatatcttcctgggatgacaatcagctacatttgtgaccccggctacctgttagtgggaaagrgcttcattttctgtacagaccagggaatctggagccaattggatcattattgcaaagaagtaaattgtagcttcccactgtttatgaatggaatctcgaa

SEQ ID NO: 4722 - DNA, 201 bp, Homo sapiens
ccctatggaaaagaaatatcttacgcatgcgacacccacccagacagagggatgaccttcaacctcattggggagagctccatccgctgcacaagtgaccstcaagggaatggggtttggagcagccctgcccctcgctgtgaactttctgttcctgctgcctgcccacatccacccaagatccaaaacgggcattacatt

SEQ ID NO: 4723 - DNA, 201 bp, Homo sapiens
gggagaaaggtgtttgagcttgtgggtgagccctccatatactgcaccagcaatgacgatcaagtgggcatctggagcggcccggcccctcagtgcattayacctaacaaatgcacgcctccaaatgtggaaaatggaatattggtatctgacaacagaagcttattttccttaaatgaagttgtggagtttaggtgtcag

SEQ ID NO: 4724 - DNA, 201 bp, Homo sapiens
tgggggcctcttctccaagaagcccggagcctgtcgggccgccggcgcccggtctccccttctgctgcggaggatccctgctggcggttgtggtgctgctygcgctgccggtggcctggggtcaatgcaatgccccagaatggcttccatttgccaggcctaccaacctaactgatgagtttgagtttcccattgggacat

SEQ ID NO: 4725 - DNA, 201 bp, Homo sapiens
aatgggagccggagctaccaagctgctccagggtatgtcagccacctccagatgtcctgcatgctgagcgtacccaaagggacaaggacaacttttcaccygggcaggaagtgttctacagctgtgagcccggctacgacctcagaggggctgcgtctatgcgctgcacaccccagggagactggagccctgcagccccca

SEQ ID NO: 4726 - DNA, 201 bp, Homo sapiens
catgggaatggggtttggagcagccctgcccctcgctgtgaactttctgttcgtgctggtcactgtaaaaccccagagcagtttccatttgccagtcctaygatcccaattaatgactttgagtttccagtcgggacatctttgaattatgaatgccgtcctgggtattttgggaaaatgttctctatctcctgcctagaa

SEQ ID NO: 4727 - DNA, 201 bp, Homo sapiens
gcttggggagaatgggggcctcttctccaagaagcccggagcctgtcgggccgccggcgcccggtctccccttctgctgcggaggatccctgctggcggtygtggtgctgcttgcgctgccggtggcctggggtcaatgcaatgccccagaatggcttccatttgccaggcctaccaacctaactgatgagtttgagtttc

SEQ ID NO: 4728 - DNA, 201 bp, Homo sapiens
cagtgttccagtgtgtgaacaaatcttttgtccaagtcctccagttattcctaatgggagacacacaggaaaacctctggaagtctttccctttgggaaarcagtaaattacacatgcgacccccacccagacagagggacgagcttcgacctcattggagagagcaccatccgctgcacaagtgaccctcaagggaatgg

SEQ ID NO: 4729 - DNA, 201 bp, Homo sapiens
tccatccgctgcacaagtgaccctcaagggaatggggtttggagcagccctgcccctcgctgtgaactttctgttcctgctgcctgcccacatccacccargatccaaaacgggcattacattggaggacacgtatctctatatcttcctgggatgacaatcagctacatttgtgaccccggctacctgttagtgggaaag

SEQ ID NO: 4730 - DNA, 201 bp, Homo sapiens
gctgtttgagcttgtgggagaacggtcaatatattgcaccagcaaagatgatcaagttggtgtttggagcagccctccccctcggtgtatttctactaatraatgcacagctccagaagttgaaaatgcaattagagtaccaggaaacaggagtttctttaccctcactgagatcatcagatttagatgtcagcccgggtt

SEQ ID NO: 4731 - DNA, 201 bp, Homo sapiens
ctatggatcagtggtgacctaccgctgcaatcctggaagcggagggagaaaggtgtttgagcttgtgggtgagccctccatatactgcaccagcaatgacratcaagtgggcatctggagcggccccgcccctcagtgcattatacctaacaaatgcacgcctccaaatgtggaaaatggaatattggtatctgacaacag

SEQ ID NO: 4732 - DNA, 201 bp, Homo sapiens
tggagacttctacagcaacaatagaacatcttttcacaatggaacggtggtaacttaccagtgccacactggaccagatggagaacagctgtttgagcttrtgggagaacggtcaatatattgcaccagcaaagatgatcaagttggtgtttggagcagccctccccctcggtgtatttctactaataaatgcacagctcc

SEQ ID NO: 4733 - DNA, 201 bp, Homo sapiens
tgggataagaaggcacctatttgtgagatcatatcttgtgagccacctccaaccatatccaatggagacttctacagcaacaatagaacatcttttcacartggaacggtggtaacttaccagtgccacactggaccagatggagaacagctgtttgagcttgtgggagaacggtcaatatattgcaccagcaaagatgat

SEQ ID NO: 4734 - DNA, 201 bp, Homo sapiens
tgtttggagcagccctccccctcggtgtatttctactaataaatgcacagctccagaagttgaaaatgcaattagagtaccaggaaacaggagtttctttwccctcactgagatcatcagatttagatgtcagcccgggtttgtcatggtagggtcccacactgtgcagtgccagaccaatggcagatgggggcccaagct

SEQ ID NO: 4735 - DNA, 201 bp, Homo sapiens
ccccgccgtgtgaagtgccaggccctgaacaaatgggagccagagttaccaagctgctccagggtgtgtcagccgcctccagaaatcctgcatggtgagcrtaccccaagccatcaggacaacttttcacctgggcaggaagtgttctacagctgtgagcctggctatgacctcagaggggctgcgtctctgcactgcaca

SEQ ID NO: 4736 - DNA, 201 bp, Homo sapiens
gccaattgatttcaacagaatcagatctgagcttcataaagtctttgaagtgacttcacagagacgcagacatgtgcacttgaagatgctgccccttcccyggtacctagcaaagctcctgcctctttgtgtgcgtcactgtgaaacccccacccttctgcctcgtgctaaacgcacacagtatctagtcaggggaaaaga

SEQ ID NO: 4737 - DNA, 201 bp, Homo sapiens
tgaatgccgccctggttattccggaagaccgttttctatcatctgcctaaaaaactcagtctggactggtgctaaggacaggtgcagacgtaaatcatgtygtaatcctccagatcctgtgaatggcatggtgcatgtgatcaaaggcatccagttcggatcccaaattaaatattcttgtactaaaggataccgactcat

SEQ ID NO: 4738 - DNA, 201 bp, Homo sapiens
tttgaagtgtgaagatgggtatactctggaaggcagtccctggagccagtgccaggcggatgacagatgggaccctcctctggccaaatgtacctctcgtrcacatgatgctctcatagttggcactttatctggtacgatcttctttattttactcatcattttcctctcttggataattctaaagcacagaaaaggcaa

SEQ ID NO: 4739 - DNA, 201 bp, Homo sapiens
actccagacagacggctttggaatccaccagctacatccagctccctgaggcagagttgagaatggagagaatgttacctctcctggctctggggctcttrgcggctgggttctgccctgctgtcctctgccaccctaacagcccacttgacgaggagaatctgacccaggagaaccaagaccgagggacacacgtggacc

SEQ ID NO: 4740 - DNA, 201 bp, Homo sapiens
ctggcctctcccagaggggctgctctgaagcatgtggatttgatcaggataatcaagtccgagaacagaacacttggttgtcctggcatttcccaagcagkgggaggagttctctgcaggaataaataagcctcagcattcatgaaaatccactactccagacagacggctttggaatccaccagctacatccagctccct

SEQ ID NO: 4741 - DNA, 152 bp, Homo sapiens
agtggccatggcatgtgtggccctgtctgcttatccttggaaggtgacagcgattccctgtgtagctctcacatgcacaggggcccatggactcttcagtytggagggtcctgggcctcctgacagcaataaataatttcgttggacacgtt

SEQ ID NO: 4742 - DNA, 201 bp, Homo sapiens
gctgccacagcagtcaaaatcaccctcctttctgcattagtggagacaaggaccattgtgcgtttcaacaggcccttcctgatgatcattgtccctacagrcacccagaacatcttcttcatgagcaaagtcaccaatcccaagcaagcctagagcttgccatcaagcagtggggctctcagtaaggaacttggaatgcaa

SEQ ID NO: 4743 - DNA, 201 bp, Homo sapiens
gtctaatcacaagaaaatgacagccaatcccaagttcagggacatttggcaaaatagcccaccactcctacttaaaagtgtcgaggtcttgaaaggcaagraaaccctgggaaatcgtctttggccggaggaaactcagcagacatgacgactaaatgcaatgtagaatcctcggacagaaaaggacattagtaggacagc

SEQ ID NO: 4744 - DNA, 106 bp, Homo sapiens
acagcgattccctgtgtagctctcacatgcacaggggcccatggactcttcagtctggagggtcctgggcctcctgacagcaataaataatttcgttggamacgtt

SEQ ID NO: 4745 - DNA, 201 bp, Homo sapiens
caccctcctttctgcattagtggagacaaggaccattgtgcgtttcaacaggcccttcctgatgatcattgtccctacagacacccagaacatcttcttcrtgagcaaagtcaccaatcccaagcaagcctagagcttgccatcaagcagtggggctctcagtaaggaacttggaatgcaagctggatgcctgggtctctg

SEQ ID NO: 4746 - DNA, 201 bp, Homo sapiens
acgtggacttcgctttcagcctgtacaagcagttagtcctgaaggcccctgataagaatgtcatcttctccccactgagcatctccaccgccttggccttyctgtctctgggggcccataataccaccctgacagagattctcaaaggcctcaagttcaacctcacggagacttctgaggcagaaattcaccagagcttcc

SEQ ID NO: 4747 - DNA, 201 bp, Homo sapiens
acagcccacttgacgaggagaatctgacccaggagaaccaagaccgagggacacacgtggacctcggattagcctccgccaacgtggacttcgctttcagyctgtacaagcagttagtcctgaaggcccctgataagaatgtcatcttctccccactgagcatctccaccgccttggccttcctgtctctgggggcccata

SEQ ID NO: 4748 - DNA, 201 bp, Homo sapiens
aaataagcctcagcattcatgaaaatccactactccagacagacggctttggaatccaccagctacatccagctccctgaggcagagttgagaatggagaraatgttacctctcctggctctggggctcttggcggctgggttctgccctgctgtcctctgccaccctaacagcccacttgacgaggagaatctgacccag

SEQ ID NO: 4749 - DNA, 201 bp, Homo sapiens
atcccaagttcagggacatttggcaaaatagcccaccactcctacttaaaagtgtcgaggtcttgaaaggcaaggaaaccctgggaaatcgtctttggccrgaggaaactcagcagacatgacgactaaatgcaatgtagaatcctcggacagaaaaggacattagtaggacagctggtgaaacccaaaggaagaacctgt

SEQ ID NO: 4750 - DNA, 201 bp, Homo sapiens
gatgccctttgacccccaagatactcatcagtcaaggttctacttgagcaagaaaaagtgggtaatggtgcccatgatgagtttgcatcacctgactatascttacttccgggacgaggagctgtcctgcaccgtggtggagctgaagtacacaggcaatgccagcgcactcttcatcctccctgatcaagacaagatgga

SEQ ID NO: 4751 - DNA, 201 bp, Homo sapiens
gtggacctcggattagcctccgccaacgtggacttcgctttcagcctgtacaagcagttagtcctgaaggcccctgataagaatgtcatcttctccccacygagcatctccaccgccttggccttcctgtctctgggggcccataataccaccctgacagagattctcaaaggcctcaagttcaacctcacggagacttct

SEQ ID NO: 4752 - DNA, 201 bp, Homo sapiens
cagggacatttggcaaaatagcccaccactcctacttaaaagtgtcgaggtcttgaaaggcaaggaaaccctgggaaatcgtctttggccggaggaaactmagcagacatgacgactaaatgcaatgtagaatcctcggacagaaaaggacattagtaggacagctggtgaaacccaaaggaagaacctgtgtcaggaccc

SEQ ID NO: 4753 - DNA, 201 bp, Homo sapiens
aggcaaggaaaccctgggaaatcgtctttggccggaggaaactcagcagacatgacgactaaatgcaatgtagaatcctcggacagaaaaggacattagtrggacagctggtgaaacccaaaggaagaacctgtgtcaggacccccagagcggtgtctccactaagcagaagtctctgtttctctcctggcctctcccaga

SEQ ID NO: 4754 - DNA, 201 bp, Homo sapiens
tataatgtgacaagataacataatgaaaaagaatgaagaataaaatagaaaagtaaaatggattgcatgtcacttgatgacaagtactgtggaatgaggcygtcatctaaatggagcacagaaagtggaacatggcgacatctcagccaaaagacccggcagacaccatcttggccaagggatcgaggttggcatcgccag

SEQ ID NO: 4755 - DNA, 201 bp, Homo sapiens
aagataacataatgaaaaagaatgaagaataaaatagaaaagtaaaatggattgcatgtcacttgatgacaagtactgtggaatgaggccgtcatctaaayggagcacagaaagtggaacatggcgacatctcagccaaaagacccggcagacaccatcttggccaagggatcgaggttggcatcgccagctgtgagcagt

SEQ ID NO: 4756 - DNA, 201 bp, Homo sapiens
catgaaaatccactactccagacagacggctttggaatccaccagctacatccagctccctgaggcagagttgagaatggagagaatgttacctctcctgrctctggggctcttggcggctgggttctgccctgctgtcctctgccaccctaacagcccacttgacgaggagaatctgacccaggagaaccaagaccgagg

SEQ ID NO: 4757 - DNA, 201 bp, Homo sapiens
tggtgcccatgatgagtttgcatcacctgactataccttacttccgggacgaggagctgtcctgcaccgtggtggagctgaagtacacaggcaatgccagygcactcttcatcctccctgatcaagacaagatggaggaagtggaagccatgctgctcccagagaccctgaagcggtggagagactctctggagttcagag

SEQ ID NO: 4758 - DNA, 159 bp, Homo sapiens
tgcaccgagtggccatggcatgtgtggccctgtctgcttatccttggaaggtgacagcgattccctgtgtagctctcacatgcacaggggcccatggactyttcagtctggagggtcctgggcctcctgacagcaataaataatttcgttggacacgtt

SEQ ID NO: 4759 - DNA, 168 bp, Homo sapiens
tggtgcacaaagctgtggtggaggtggacgagtcgggaaccagagcagcggcagccacggggacaatmttcactttcagatattcactgaatggccactgtgtgcctggcactgttccaagtgctgaagaaaaatgaagaaaacaaaaatccctgcccttatagagga

SEQ ID NO: 4760 - DNA, 201 bp, Homo sapiens
ctgactttcaggactcagctgcagctaagaagctcatcaacgactacgtgaagaatggaactagggggaaaatcacagatctgatcaaggaccttgactcrcagacaatgatggtcctggtgaattacatcttctttaaagccaaatgggagatgccctttgacccccaagatactcatcagtcaaggttctacttgagca

SEQ ID NO: 4761 - DNA, 201 bp, Homo sapiens
caaagttttccatctcgagggactataacctgaacgacatacttctccagctgggcattgaggaagccttcaccagcaaggctgacctgtcagggatcacrggggccaggaacctagcagtctcccaggtggtccataaggctgtgcttgatgtatttgaggagggcacagaagcatctgctgccacagcagtcaaaatca

SEQ ID NO: 4762 - DNA, 201 bp, Homo sapiens
ggccgttgatgttggctgggaactcacctggggctgctggcctgaatgcttataggtggcctctccttgtggcctgggcctcctcacaacatggtgtctgkattcccaggatgagcatcccaggatcgcaagagccatgtagaagctgcatcttgtttatacctttgccttggaagttgcatggcatcacctccaccatac

SEQ ID NO: 4763 - DNA, 201 bp, Homo sapiens
tggcctgaatgcttataggtggcctctccttgtggcctgggcctcctcacaacatggtgtctggattcccaggatgagcatcccaggatcgcaagagccaygtagaagctgcatcttgtttatacctttgccttggaagttgcatggcatcacctccaccatactccatcagttagagctgacacaaacctgcctgggttt

SEQ ID NO: 4764 - DNA, 201 bp, Homo sapiens
cccagactccctgcatccccaaggaaggggcatctccaacatcatcatccaacgaagactcagctgcaaatggttctgctgaaacatctgccttggacacrgggttctcgctcaacctttcagagctgagagaatatacagagggtctcacggaagccaaggaagacgatgatggggaccacagttcccttcagtctggtc

SEQ ID NO: 4765 - DNA, 201 bp, Homo sapiens
tcaaagaagctgtggcccaggctgtggaaaacaccaagtttggaaaggagaggcatcagtggagtctggaaggtgtcaaaaggctggaaagcagttggcaygggcggcccaccttggagaaggaacgagagaagaactcagcacccccgcatcgcagggctcagaaggtcatgatccgctccagcagtgacagcagctaca

SEQ ID NO: 4766 - DNA, 201 bp, Homo sapiens
acactggagaagatgtcggcagggctgggcttcagcctggaaggagggaagggctccctacacggagacaagcctctcaccattaacaggattttcaaagktggacacagaggacttcgtgccagaggcaagatccctgtaaatattgttgcacaaaaatctcactagctctcttcccataccacccaatgctgatgtcct

SEQ ID NO: 4767 - DNA, 201 bp, Homo sapiens
gaattggctgaactcatgagaagttgatatagaacagtgcttgccacagagcggggactcggtaagcacttaacgaatgaatgaattctaagtcaatccargagtctgatgatttcttgaaaagggtgttagctaaaggatcttaggcatgactgtagaatttgtagttgcaatagaacagagaaagaggaagctttctgt

SEQ ID NO: 4768 - DNA, 201 bp, Homo sapiens
ttccttgttccccatcatctgtggaacccattaccttctccctcatttcaggagcagcctcagaacaaagtgagacagtccagcctggagatgaaatcttrcagctgggtggcactgccatgcagggcctcacacggtttgaagcctggaacatcatcaaggcactgcctgatggacctgtcacgattgtcatcaggagaa

SEQ ID NO: 4769 - DNA, 201 bp, Homo sapiens
atgggctggcctcccaggaagggactattcagaagggcaatgaggttctttccatcaacggcaagtctctcaaggggaccacgcaccatgatgccttggcmatcctccgccaagctcgagagcccaggcaagctgtgattgtcacaaggaagctgactccagaggccatgcccgacctcaactcctccactgactctgcag

SEQ ID NO: 4770 - DNA, 201 bp, Homo sapiens
tttccatcaacggcaagtctctcaaggggaccacgcaccatgatgccttggccatcctccgccaagctcgagagcccaggcaagctgtgattgtcacaagraagctgactccagaggccatgcccgacctcaactcctccactgactctgcagcctcagcctctgcagccagtgatgtttctgtagaatctacagcagagg

SEQ ID NO: 4771 - DNA, 201 bp, Homo sapiens
gaaagcacaggtgggcttcccagtggctgctgcccaggcccagaccttctaggacgccacccagcaaaaggttgttcctaaaataagggcagagtcacackggggcagctgatacaaattgcagactgtgtaaaaagagagcttaatgataatattgtggtgccacaaataaaatggatttattagaatttcatatgacat

SEQ ID NO: 4772 - DNA, 201 bp, Homo sapiens
gagacagtcaccccaggactcaaaaatagggaagtaacagtaacgcaggggaaacgttttctgtttggaggagcaaaggctgagaacactgtgaaaacatyttgcgcgcacaatagtaacctgggtaaatgcagcgtgaagggattttagtcacacgtggtctttcttacaaggaaggtggtgggggtgcagatgaggttg

SEQ ID NO: 4773 - DNA, 201 bp, Homo sapiens
ccatcttacacaaggaggaaggtgctggtcttgggttcagcttggcaggaggagcagatctagaaaacaaggtgattacggttcacagagtgtttccaaakgggctggcctcccaggaagggactattcagaagggcaatgaggttctttccatcaacggcaagtctctcaaggggaccacgcaccatgatgccttggcca

SEQ ID NO: 4774 - DNA, 201 bp, Homo sapiens
aaacctcttgggaagcatgaggaaggacggttttctggactcttggggcgaggggctgcacccactcttgtgccccagcagcctgagcaagtactgtcctyggggtcccctgcagcctccgaggccagagacccaggtgtgtctgagtcccctcccccagggcggcagcccaatcagaaaactctcccccctggcccggac

SEQ ID NO: 4775 - DNA, 201 bp, Homo sapiens
gtgtggggacgagattgtggaaatcagtgattcccctgtgcactgcctgacgctcaatgaagtctacacgatcctgagtcactgtgatcccggtccagtcyccatcattgttagccgacatccagacccacaggtctctgaacagcaactcaaagaagctgtggcccaggctgtggaaaacaccaagtttggaaaggagag

SEQ ID NO: 4776 - DNA, 201 bp, Homo sapiens
cccagtgacccaaacatccccgataaaacacccactgcttaagaggcaggctcggatggactatagctttgataccacagccgaagacccttgggttaggrtttctgactgcatcaaaaacttatttagccccatcatgagtgagaaccatggccacatgcctctacagcccaatgccagcctgaatgaagaagaagggac

SEQ ID NO: 4777 - DNA, 201 bp, Homo sapiens
agtgtcatcggctgtcatgaaatccttgctgtgccttccatcttctatctcctgtgcccagactccctgcatccccaaggaaggggcatctccaacatcawcatccaacgaagactcagctgcaaatggttctgctgaaacatctgccttggacacagggttctcgctcaacctttcagagctgagagaatatacagaggg

SEQ ID NO: 4778 - DNA, 201 bp, Homo sapiens
agagtgtttccaaatgggctggcctcccaggaagggactattcagaagggcaatgaggttctttccatcaacggcaagtctctcaaggggaccacgcaccrtgatgccttggccatcctccgccaagctcgagagcccaggcaagctgtgattgtcacaaggaagctgactccagaggccatgcccgacctcaactcctcc

SEQ ID NO: 4779 - DNA, 201 bp, Homo sapiens
aggggaccacgcaccatgatgccttggccatcctccgccaagctcgagagcccaggcaagctgtgattgtcacaaggaagctgactccagaggccatgccygacctcaactcctccactgactctgcagcctcagcctctgcagccagtgatgtttctgtagaatctacagcagaggccacagtctgcacggtgacactgg

SEQ ID NO: 4780 - DNA, 201 bp, Homo sapiens
ttgttagccgacatccagacccacaggtctctgaacagcaactcaaagaagctgtggcccaggctgtggaaaacaccaagtttggaaaggagaggcatcartggagtctggaaggtgtcaaaaggctggaaagcagttggcacgggcggcccaccttggagaaggaacgagagaagaactcagcacccccgcatcgcaggg

SEQ ID NO: 4781 - DNA, 103 bp, Homo sapiens
attgaaagtgtttttccttaatgcttatcctgtttttaaaccattatttccaagttgacaccttttttaaggaaaaataaatattttgcggcattaaagcyat

SEQ ID NO: 4782 - DNA, 201 bp, Homo sapiens
gacaaaggagcccagagactgagcctccagccctcctctggggaggcagcaaaacctcttgggaagcatgaggaaggacggttttctggactcttggggcraggggctgcacccactcttgtgccccagcagcctgagcaagtactgtcctcggggtcccctgcagcctccgaggccagagacccaggtgtgtctgagtcc

SEQ ID NO: 4783 - DNA, 201 bp, Homo sapiens
cgccccacccagatgggggaaagcacaggtgggcttcccagtggctgctgcccaggcccagaccttctaggacgccacccagcaaaaggttgttcctaaartaagggcagagtcacacgggggcagctgatacaaattgcagactgtgtaaaaagagagcttaatgataatattgtggtgccacaaataaaatggatttat

SEQ ID NO: 4784 - DNA, 201 bp, Homo sapiens
cgacaaggaaaggcaaatgcccaagggaaagaaaaggaaggctcttctccccagagttccccatgcagacatgagtgcgtgctcagttcagaatcacttcygagaactcatccctaatgctgcagatttgggctggaacagattcacactgtctggtttcaccgaggacatgaaactccaccttgcggggataaagagaga

SEQ ID NO: 4785 - DNA, 201 bp, Homo sapiens
agccctcctctggggaggcagcaaaacctcttgggaagcatgaggaaggacggttttctggactcttggggcgaggggctgcacccactcttgtgccccarcagcctgagcaagtactgtcctcggggtcccctgcagcctccgaggccagagacccaggtgtgtctgagtcccctcccccagggcggcagcccaatcaga

SEQ ID NO: 4786 - DNA, 201 bp, Homo sapiens
atgaagtttccttggctggtgcacctagaattggctgaactcatgagaagttgatatagaacagtgcttgccacagagcggggactcggtaagcacttaaygaatgaatgaattctaagtcaatccaagagtctgatgatttcttgaaaagggtgttagctaaaggatcttaggcatgactgtagaatttgtagttgcaat

SEQ ID NO: 4787 - DNA, 201 bp, Homo sapiens
tgagctgtcatgttttaaagcttgctcacatcttggcacatttaagagacagtcaccccaggactcaaaaatagggaagtaacagtaacgcaggggaaacrttttctgtttggaggagcaaaggctgagaacactgtgaaaacattttgcgcgcacaatagtaacctgggtaaatgcagcgtgaagggattttagtcacac

SEQ ID NO: 4788 - DNA, 201 bp, Homo sapiens
gggtctctgctgccgccccacccagatgggggaaagcacaggtgggcttcccagtggctgctgcccaggcccagaccttctaggacgccacccagcaaaargttgttcctaaaataagggcagagtcacacgggggcagctgatacaaattgcagactgtgtaaaaagagagcttaatgataatattgtggtgccacaaat

SEQ ID NO: 4789 - DNA, 201 bp, Homo sapiens
tggagctcagagagggcaggcatgaagtttccttggctggtgcacctagaattggctgaactcatgagaagttgatatagaacagtgcttgccacagagcrgggactcggtaagcacttaacgaatgaatgaattctaagtcaatccaagagtctgatgatttcttgaaaagggtgttagctaaaggatcttaggcatgac

SEQ ID NO: 4790 - DNA, 201 bp, Homo sapiens
agacagtcaccccaggactcaaaaatagggaagtaacagtaacgcaggggaaacgttttctgtttggaggagcaaaggctgagaacactgtgaaaacattytgcgcgcacaatagtaacctgggtaaatgcagcgtgaagggattttagtcacacgtggtctttcttacaaggaaggtggtgggggtgcagatgaggttgc

SEQ ID NO: 4791 - DNA, 201 bp, Homo sapiens
ttcactcatacatctggccgttgatgttggctgggaactcacctggggctgctggcctgaatgcttataggtggcctctccttgtggcctgggcctcctcwcaacatggtgtctggattcccaggatgagcatcccaggatcgcaagagccatgtagaagctgcatcttgtttatacctttgccttggaagttgcatggca

SEQ ID NO: 4792 - DNA, 201 bp, Homo sapiens
tacacggagacaagcctctcaccattaacaggattttcaaaggtggacacagaggacttcgtgccagaggcaagatccctgtaaatattgttgcacaaaawtctcactagctctcttcccataccacccaatgctgatgtcctcaccacatgcggagaacaaatgtgaagggagtaggatattgggtcagtgtccaaagca

SEQ ID NO: 4793 - DNA, 201 bp, Homo sapiens; identical to SEQ ID NO: 4762

SEQ ID NO: 4794 - DNA, 201 bp, Homo sapiens; identical to SEQ ID NO: 4763

SEQ ID NO: 4795 - DNA, 201 bp, Homo sapiens; identical to SEQ ID NO: 4764

SEQ ID NO: 4796 - DNA, 201 bp, Homo sapiens; identical to SEQ ID NO: 4765

SEQ ID NO: 4797 - DNA, 201 bp, Homo sapiens; identical to SEQ ID NO: 4766

SEQ ID NO: 4798 - DNA, 201 bp, Homo sapiens; identical to SEQ ID NO: 4768

SEQ ID NO: 4799 - DNA, 201 bp, Homo sapiens; identical to SEQ ID NO: 4769

SEQ ID NO: 4800 - DNA, 201 bp, Homo sapiens; identical to SEQ ID NO: 4770

SEQ ID NO: 4801 - DNA, 201 bp, Homo sapiens; identical to SEQ ID NO: 4771

SEQ ID NO: 4802 - DNA, 201 bp, Homo sapiens; identical to SEQ ID NO: 4773

SEQ ID NO: 4803 - DNA, 201 bp, Homo sapiens; identical to SEQ ID NO: 4774

SEQ ID NO: 4804 - DNA, 201 bp, Homo sapiens; identical to SEQ ID NO: 4775

SEQ ID NO: 4805 - DNA, 201 bp, Homo sapiens; identical to SEQ ID NO: 4776

SEQ ID NO: 4806 - DNA, 201 bp, Homo sapiens; identical to SEQ ID NO: 4777

SEQ ID NO: 4807 - DNA, 201 bp, Homo sapiens; identical to SEQ ID NO: 4778

SEQ ID NO: 4808 - DNA, 201 bp, Homo sapiens; identical to SEQ ID NO: 4779

SEQ ID NO: 4809 - DNA, 201 bp, Homo sapiens; identical to SEQ ID NO: 4780

SEQ ID NO: 4810 - DNA, 201 bp, Homo sapiens; identical to SEQ ID NO: 4782

SEQ ID NO: 4811 - DNA, 201 bp, Homo sapiens; identical to SEQ ID NO: 4783

SEQ ID NO: 4812 - DNA, 201 bp, Homo sapiens; identical to SEQ ID NO: 4785

SEQ ID NO: 4813 - DNA, 201 bp, Homo sapiens; identical to SEQ ID NO: 4788

SEQ ID NO: 4814 - DNA, 201 bp, Homo sapiens; identical to SEQ ID NO: 4791

SEQ ID NO: 4815 - DNA, 201 bp, Homo sapiens; identical to SEQ ID NO: 4792

SEQ ID NO: 4816 - DNA, 201 bp, Homo sapiens
ctattactccaaagtgataataaactgtctctgaacagcaactcaaagaagctgtggcccaggctgtggaaaacaccaagtttggaaaggagaggcatcartggagtctggaagatgcagaaatggagttgggtcccccaggaagctgactctgagatggagtttggtctgcaggcagtgtcctggggttcactacctgtg

SEQ ID NO: 4817 - DNA, 201 bp, Homo sapiens
acaggtgaggccagggggtatttctgttttctgaagctcagctgtgaagattctcttgtgcttcccacacaggtgtcaaaaggctggaaagcagttggcaygggcggcccaccttggagaaggaacgagagaagaactcagcacccccgcatcgcagggctcagaaggtcatgatccgctccagcagtgacagcagctaca

SEQ ID NO: 4818 - DNA, 201 bp, Homo sapiens
atggagttgggtcccccaggaagctgactctgagatggagtttggtctgcaggcagtgtcctggggttcactacctgtggcagggaggggagcaggcaggktagacagagggaggatggagctgaggtgcacacccaacagcttcagccaagccctggagctctgcagccaaagtccccattagagttgtcctatgttggc

SEQ ID NO: 4819 - DNA, 201 bp, Homo sapiens
caggaagctgactctgagatggagtttggtctgcaggcagtgtcctggggttcactacctgtggcagggaggggagcaggcagggtagacagagggaggayggagctgaggtgcacacccaacagcttcagccaagccctggagctctgcagccaaagtccccattagagttgtcctatgttggccaacatagctgggcct

SEQ ID NO: 4820 - DNA, 201 bp, Homo sapiens
gtgtggggacgagattgtggaaatcagtgattcccctgtgcactgcctgacgctcaatgaagtctacacgatcctgagtcactgtgatcccggtccagtcyccatcattgttagccgacatccagacccacagaaggaagaaatggaggctcaggaggttaagtaacttgtctaggtgttcacacctagacagtagaggaa

SEQ ID NO: 4821 - DNA, 201 bp, Homo sapiens
ttcaaactaaagttgagttcagattctgttaaattaaatagcaaagaaacagtcactcttggttttattcctcttagacaggaagcagggcagtggggaaytgacatgagccgttcctcggtgattaacctgcagtttatgttgtttctaggtgacgtgcccatcatgcaggaagcttctccaaggctggcgagagcaact

SEQ ID NO: 4822 - DNA, 201 bp, Homo sapiens
gaagcttctccaaggctggcgagagcaacttgtctgctttgagaaatgcagatctatcaggatccagaatcggactctgaaaaagctgtcatttcatgtcyctaaaacagcctttgatttaatgtacaagatgtcaagaagtaaaggacaataaaataaaaaccaaaaaaggagaactatttcaattaagaagcattccta

SEQ ID NO: 4823 - DNA, 184 bp, Homo sapiens
ccagaatcggactctgaaaaagctgtcatttcatgtctctaaaacagcctttgatttaatgtacaagatgtcaagaagtaaaggacaataaaataaaaacsaaaaaaggagaactatttcaattaagaagcattcctatatcaattcttggaaatcacataaaataaaagctgtcagaatcaat

SEQ ID NO: 4824 - DNA, 201 bp, Homo sapiens
tgcccatcatgcaggaagcttctccaaggctggcgagagcaacttgtctgctttgagaaatgcagatctatcaggatccagaatcggactctgaaaaagcygtcatttcatgtctctaaaacagcctttgatttaatgtacaagatgtcaagaagtaaaggacaataaaataaaaaccaaaaaaggagaactatttcaatt

SEQ ID NO: 4825 - DNA, 201 bp, Homo sapiens
ttgagttcagattctgttaaattaaatagcaaagaaacagtcactcttggttttattcctcttagacaggaagcagggcagtggggaattgacatgagccrttcctcggtgattaacctgcagtttatgttgtttctaggtgacgtgcccatcatgcaggaagcttctccaaggctggcgagagcaacttgtctgctttga

SEQ ID NO: 4826 - DNA, 127 bp, Homo sapiens
gcgtgaataactgcctaattagtggayatgaaaactggacagtctccaaagtcatcagagatgaccacgcttgccaggcaacttactagactaaggatacgacagggaaaaacagtccatgaggacg

SEQ ID NO: 4827 - DNA, 201 bp, Homo sapiens
aaggctggcgagagcaacttgtctgctttgagaaatgcagatctatcaggatccagaatcggactctgaaaaagctgtcatttcatgtctctaaaacagcytttgatttaatgtacaagatgtcaagaagtaaaggacaataaaataaaaaccaaaaaaggagaactatttcaattaagaagcattcctatatcaattctt

SEQ ID NO: 4828 - DNA, 201 bp, Homo sapiens
aggaagcagggcagtggggaattgacatgagccgttcctcggtgattaacctgcagtttatgttgtttctaggtgacgtgcccatcatgcaggaagcttcyccaaggctggcgagagcaacttgtctgctttgagaaatgcagatctatcaggatccagaatcggactctgaaaaagctgtcatttcatgtctctaaaaca

SEQ ID NO: 4829 - DNA, 201 bp, Homo sapiens
tttgggttaaatggaggttgctaagtggagagtgctaagtagaaatgttatataaactacatactctttacaaatagtagcggtcctgtccagcccactgmcactggaccacatctgtatttaagtcctaaataaaccctatgtcccattcactggctctgggtctcttcttggacaaggcgccatccctgttggaatcaa

SEQ ID NO: 4830 - DNA, 201 bp, Homo sapiens
ctaattgaggacaagaatagacctcgtttctatgggcaacaggcatattctgctccctatttcattatttcgcttaaaaaacacttggtgaagacttgatscagattgtcctcttggaatctctgatcctgatgtttatttaagtggcagagtggtggcttttccatggtatatagtcagattcttttttttttttttttg

SEQ ID NO: 4831 - DNA, 201 bp, Homo sapiens
taaattatatcaattatatctcaataaagctgttgaaatttttaaagggcctgacctgtcctggaatggggaaaaacttaatgtgacaaaaatgtaggttrtagtgaagggaacaggaaatggtactgggaccatttttactccagctaaaaaatttgaatttaagaaatttggatatagataggaaggagctaatgttaa

SEQ ID NO: 4832 - DNA, 201 bp, Homo sapiens
acattaggggtggaggacctagggtcataaggttgcccgtggcgacttggagtgaagtgttgagatgatatgcccatttcatggggagaagtagaaagaasagaaaaaccacttttactttagttctggtgtaactatgaagaaaaaaaagcctaattgaggacaagaatagacctcgtttctatgggcaacaggcatatt

SEQ ID NO: 4833 - DNA, 201 bp, Homo sapiens
aaaaaatttgaatttaagaaatttggatatagataggaaggagctaatgttaagcaggaagtaagttgataagagttttctgttaaatgtgatggcaaagyggtaggtgagtatgggctccagtgggacagaacttgtggcagagaaaccaggtcaaaagttaaagttggatttggtgagtaattaaagagagtagtagca

SEQ ID NO: 4834 - DNA, 201 bp, Homo sapiens
accctatgtcccattcactggctctgggtctcttcttggacaaggcgccatccctgttggaatcaatagggctccagcatgacacatgtgcaggatttttwaaattatatcaattatatctcaataaagctgttgaaatttttaaagggcctgacctgtcctggaatggggaaaaacttaatgtgacaaaaatgtaggtta

SEQ ID NO: 4835 - DNA, 201 bp, Homo sapiens
agggctccagcatgacacatgtgcaggattttttaaattatatcaattatatctcaataaagctgttgaaatttttaaagggcctgacctgtcctggaatrgggaaaaacttaatgtgacaaaaatgtaggttatagtgaagggaacaggaaatggtactgggaccatttttactccagctaaaaaatttgaatttaagaa

SEQ ID NO: 4836 - DNA, 117 bp, Homo sapiens
atgaatgatcgtgaatyggggagccctcagaatcacagcagtttcagagatactccaggggtgccttgtgatcagaacgaatttatagacaaaaaaggttctacccatcacctacag

SEQ ID NO: 4837 - DNA, 144 bp, Homo sapiens
attccagcaaaaggaaaaacctcatcaaagaagaggaagcagagaaaagtaggtccaactacacctttagcaaccacagacaagaagttcacagctgaagraggagaggagactcctatagctcagcgttttcacacaccatag

SEQ ID NO: 4838 - DNA, 201 bp, Homo sapiens
tgatcaatgatttaaaacttaattcaacaaggagagacgaatatgacaaaattcagattgccgacttgatggaagaaaagttcccaggtgatgctggtttkggcaaactgagaactcttcaaagaaataccaacactgggagaggagaccttgctgaaactcttagaaaagtcaaaagatcatctgctctgggtttagatg

SEQ ID NO: 4839 - DNA, 201 bp, Homo sapiens
gatcgtgaatcggggagccctcagaatcacagcagtttcagagatactccaggggtgccttgtgatcagaacgaatttatagacaaaaaaggttctacccrtcacctacagataatggtgagtaaatacaagaacaatgttctgctgaaaggattagaagccatcaatgactatcacttcagcataattaattccttactg

SEQ ID NO: 4840 - DNA, 201 bp, Homo sapiens
ttgtgatcagaacgaatttatagacaaaaaaggttctacccatcacctacagataatggtgagtaaatacaagaacaatgttctgctgaaaggattagaarccatcaatgactatcacttcagcataattaattccttactgatcaatgatttaaaacttaattcaacaaggagagacgaatatgacaaaattcagattgc

SEQ ID NO: 4841 - DNA, 201 bp, Homo sapiens
taacaaactcattaggaatgtgattgccttgcgggaccagcaagctgccgaagagaggcggagagacttcctccaaatggtcctggatgcccgacattctrcaagtcccatgggcgtgcaagactttgacatcgtcagagacgttttctcctctactgggtgcaagccgaacccttcccggcaacaccagcccagccctat

SEQ ID NO: 4842 - DNA, 201 bp, Homo sapiens
cattaggaatgtgattgccttgcgggaccagcaagctgccgaagagaggcggagagacttcctccaaatggtcctggatgcccgacattctgcaagtcccrtgggcgtgcaagactttgacatcgtcagagacgttttctcctctactgggtgcaagccgaacccttcccggcaacaccagcccagccctatggccaggcc

SEQ ID NO: 4843 - DNA, 201 bp, Homo sapiens
ccggcaacaccagcccagccctatggccaggcctttgactgtggatgagattgtgggccaggccttcatcttcctcatcgctggctatgaaatcatcaccmacacactttcttttgccacctacctactggccaccaaccctgactgccaagagaagcttctgagagaggtagacgtttttaaggagaaacacatggcccc

SEQ ID NO: 4844 - DNA, 201 bp, Homo sapiens
agctcaggactgcgaggtgctggggcagcgcatccccgcaggcgctgtgctagagatggccgtgggtgccctgcaccatgaccctgagcactggccaagcscggagaccttcaaccctgaaaggttcacggctgaggcccggcagcagcaccggcccttcacgtacctgcccttcggggccggcccacggagctgcctcgg

SEQ ID NO: 4845 - DNA, 201 bp, Homo sapiens
ggcccggcagcagcaccggcccttcacgtacctgcccttcggggccggcccacggagctgcctcggggtgcgtctagggctgcttgaggtcaagttgacamtgctccacgtgctgcacaagttccggttccaagcctgccctgagacccaggtaccgctgcagctagaatccaaatctgccctaggtccaaaaaatggtgt

SEQ ID NO: 4846 - DNA, 201 bp, Homo sapiens
gagattgtgggccaggccttcatcttcctcatcgctggctatgaaatcatcaccaacacactttcttttgccacctacctactggccaccaaccctgactyccaagagaagcttctgagagaggtagacgtttttaaggagaaacacatggcccctgagttctgcagcctcgaggaaggcctgccctatctggacatggtg

SEQ ID NO: 4847 - DNA, 201 bp, Homo sapiens
gcagcgcatccccgcaggcgctgtgctagagatggccgtgggtgccctgcaccatgaccctgagcactggccaagcccggagaccttcaaccctgaaaggytcacggctgaggcccggcagcagcaccggcccttcacgtacctgcccttcggggccggcccacggagctgcctcggggtgcgtctagggctgcttgaggt

SEQ ID NO: 4848 - DNA, 112 bp, Homo sapiens
aaggataagaggttctttacataacatttcctaaatgcttaataaacgtttgttgcacttggttttgacattgccaatggggtttgaaccagtgctctctrtaaatgaagaa

SEQ ID NO: 4849 - DNA, 201 bp, Homo sapiens
gggtggggggagggcacccccaaattcaaagaaaaccctaagtgtggatgttcagaattttggaaaaatgtcactgaagtgattgaaagagtgcctggcasgcaaggataagaggttctttacataacatttcctaaatgcttaataaacgtttgttgcacttggttttgacattgccaatggggtttgaaccagtgctct

SEQ ID NO: 4850 - DNA, 201 bp, Homo sapiens
agtcggtagccgacagcgttctgtttttacgtgacaaaagatgggaagaggtcagaggtgccctgatgtctgctttcagtcctgaaaagctgaacgagatrgttcccctcatcagccaagcctgcgaccttctcctggctcatttaaaacgctatgcggaatctggggacgcatttgacatccagaggtgctactgcaatt

SEQ ID NO: 4851 - DNA, 201 bp, Homo sapiens
tcgcctttggcaccccggtggactcctggcaggcccctgaggatccctttgtgaaacactgcaagcgtttcttcgaattctgcatccccagacctatcctsgttttactcttatcatttccatccataatggtcccactggcccggattttgcccaataagaaccgagacgaactgaatggcttttttaacaaactcatta

SEQ ID NO: 4852 - DNA, 201 bp, Homo sapiens
tctggttgagttggatgtttaaatagaaggcagaacaacaacaggtactccacatcagcattctcaagactggagaagttaggcctcagacatcccaagcrttctcctttcattggaaacttgacatttttccgccagggtttttgggaaagccaaatggagctcagaaagctgtatggacctctgtgtgggtactatctt

SEQ ID NO: 4853 - DNA, 70 bp, Homo sapiens
aaacgtttgttgcacttggttttgacattgccaatggggtttgaaccagtgctctctctaaatgaagaar

SEQ ID NO: 4854 - DNA, 201 bp, Homo sapiens
cgggcgcacggctccgagtccagcgcagccgagccggtctgcagaggggcccccagaactttgtgtgtgtgtgtgcacgcgcgcgcgtgtgtgcccaggtkcgagggtgcgcgcgtgtgctggcggggagggaaccgacccgaaagagagccccacgctggcaaagtggctcgcccatctcacagccggttggcgctcgcg

SEQ ID NO: 4855 - DNA, 201 bp, Homo sapiens
cctcgaggaaggcctgccctatctggacatggtgattgcagagacgctgaggatgtacccgccagctttcagattcacacgggaggcagctcaggactgcraggtgctggggcagcgcatccccgcaggcgctgtgctagagatggccgtgggtgccctgcaccatgaccctgagcactggccaagcccggagaccttcaa

SEQ ID NO: 4856 - DNA, 201 bp, Homo sapiens
ttccgccagggtttttgggaaagccaaatggagctcagaaagctgtatggacctctgtgtgggtactatcttggtcgtcggatgtttattgttatttctgrgccagacatgatcaagcaggtgttggttgagaacttcagtaactttaccaacagaatggcgtcgggtttggagttcaagtcggtagccgacagcgttctg

SEQ ID NO: 4857 - DNA, 201 bp, Homo sapiens
ctacctactggccaccaaccctgactgccaagagaagcttctgagagaggtagacgtttttaaggagaaacacatggcccctgagttctgcagcctcgagsaaggcctgccctatctggacatggtgattgcagagacgctgaggatgtacccgccagctttcagattcacacgggaggcagctcaggactgcgaggtgct

SEQ ID NO: 4858 - DNA, 201 bp, Homo sapiens
ccccgcaggcgctgtgctagagatggccgtgggtgccctgcaccatgaccctgagcactggccaagcccggagaccttcaaccctgaaaggttcacggctraggcccggcagcagcaccggcccttcacgtacctgcccttcggggccggcccacggagctgcctcggggtgcgtctagggctgcttgaggtcaagttgac

SEQ ID NO: 4859 - DNA, 131 bp, Homo sapiens
gagggccggcctggacccggcgggcgcacgyctccgagtccagcgcagccgagccggtctgcagaggggcccccagaactttgtgtgtgtgtgtgcacgcgcgcgcgtgtgtgcccaggtgcgagggtgcg

SEQ ID NO: 4860 - DNA, 201 bp, Homo sapiens
gcgaccttctcctggctcatttaaaacgctatgcggaatctggggacgcatttgacatccagaggtgctactgcaattacaccacagatgtggttgccagmgtcgcctttggcaccccggtggactcctggcaggcccctgaggatccctttgtgaaacactgcaagcgtttcttcgaattctgcatccccagacctatcc

SEQ ID NO: 4861 - DNA, 201 bp, Homo sapiens
gaaggcctgccctatctggacatggtgattgcagagacgctgaggatgtacccgccagctttcagattcacacgggaggcagctcaggactgcgaggtgckggggcagcgcatccccgcaggcgctgtgctagagatggccgtgggtgccctgcaccatgaccctgagcactggccaagcccggagaccttcaaccctgaa

SEQ ID NO: 4862 - DNA, 201 bp, Homo sapiens
aggcgctgtgctagagatggccgtgggtgccctgcaccatgaccctgagcactggccaagcccggagaccttcaaccctgaaaggttcacggctgaggccrggcagcagcaccggcccttcacgtacctgcccttcggggccggcccacggagctgcctcggggtgcgtctagggctgcttgaggtcaagttgacactgct

SEQ ID NO: 4863 - DNA, 201 bp, Homo sapiens
cgctgaggatgtacccgccagctttcagattcacacgggaggcagctcaggactgcgaggtgctggggcagcgcatccccgcaggcgctgtgctagagatrgccgtgggtgccctgcaccatgaccctgagcactggccaagcccggagaccttcaaccctgaaaggttcacggctgaggcccggcagcagcaccggccct

SEQ ID NO: 4864 - DNA, 201 bp, Homo sapiens
tggccgtgggtgccctgcaccatgaccctgagcactggccaagcccggagaccttcaaccctgaaaggttcacggctgaggcccggcagcagcaccggccyttcacgtacctgcccttcggggccggcccacggagctgcctcggggtgcgtctagggctgcttgaggtcaagttgacactgctccacgtgctgcacaagt

SEQ ID NO: 4865 - DNA, 201 bp, Homo sapiens
ccttctcctggctcatttaaaacgctatgcggaatctggggacgcatttgacatccagaggtgctactgcaattacaccacagatgtggttgccagcgtcmcctttggcaccccggtggactcctggcaggcccctgaggatccctttgtgaaacactgcaagcgtttcttcgaattctgcatccccagacctatcctggt

SEQ ID NO: 4866 - DNA, 201 bp, Homo sapiens
gagaccttcaaccctgaaaggttcacggctgaggcccggcagcagcaccggcccttcacgtacctgcccttcggggccggcccacggagctgcctcggggmgcgtctagggctgcttgaggtcaagttgacactgctccacgtgctgcacaagttccggttccaagcctgccctgagacccaggtaccgctgcagctagaa

SEQ ID NO: 4867 - DNA, 201 bp, Homo sapiens
cgtggcatttccgtggacagcccgccgtcagggtggctggggctggcacgggtgtcgaggcaggaaggattgtttctggtgactgcagccgctgccgtcgygacacagggcttggtggtggtagcatttgggtctgagatcggcccagctctgactgaaggggcttggcttccactcagcatcagcgtggcagtcaccacc

SEQ ID NO: 4868 - DNA, 201 bp, Homo sapiens
gctggggctggcacgggtgtcgaggcaggaaggattgtttctggtgactgcagccgctgccgtcgcgacacagggcttggtggtggtagcatttgggtctkagatcggcccagctctgactgaaggggcttggcttccactcagcatcagcgtggcagtcaccaccccagtgaggacctcgatgtccagctgctgtcaggt

SEQ ID NO: 4869 - DNA, 201 bp, Homo sapiens
taaatgccccatctcatgggggagagacagccacggaggccttcctctgaccatagctgatggactggcggttgctcaggtccggctccgagaatgttccygtgtctgagcctggaagaggctcgggtctggctccgggcgtggttcccttcccgtgtctgagcctggaagaggctcgggtccggctccgagcgtggttcc

SEQ ID NO: 4870 - DNA, 136 bp, Homo sapiens
agaggctcgggtctggctccgggcgtggttcccttcccgtgtctgagcctggaagaggctcgggtccggctccgagcgtggttcccttcccgtgtctgagyctggaagaggctcgggtccggctccgagcgtggtt

SEQ ID NO: 4871 - DNA, 201 bp, Homo sapiens
gccacggaggccttcctctgaccatagctgatggactggcggttgctcaggtccggctccgagaatgttcctgtgtctgagcctggaagaggctcgggtcyggctccgggcgtggttcccttcccgtgtctgagcctggaagaggctcgggtccggctccgagcgtggttcccttcccgtgtctgagtctggaagaggctc

SEQ ID NO: 4872 - DNA, 201 bp, Homo sapiens
cggcgaagaactggacaagctctggcgggagttcctgcatcacaaagagaaagttcacgagtacaacgtcctgctggagaccctgagcaggaccgaagaartccacgagaacgtcattagcccctcggacctgagcgacatcaagggcagcgtcctgcacagcaggcacacggagctgaaggagaagctgcgcagcatcaa

SEQ ID NO: 4873 - DNA, 201 bp, Homo sapiens
agatcggcccagctctgactgaaggggcttggcttccactcagcatcagcgtggcagtcaccaccccagtgaggacctcgatgtccagctgctgtcaggtytgatagtcctctgctaaaacaacacgatttacataaaaaatcttacacatctgccaccggaaataccatgcacagagtccttaaaaaatagagtgcagta

SEQ ID NO: 4874 - DNA, 201 bp, Homo sapiens
aggccttcctctgaccatagctgatggactggcggttgctcaggtccggctccgagaatgttcctgtgtctgagcctggaagaggctcgggtctggctccrggcgtggttcccttcccgtgtctgagcctggaagaggctcgggtccggctccgagcgtggttcccttcccgtgtctgagtctggaagaggctcgggtccg

SEQ ID NO: 4875 - DNA, 201 bp, Homo sapiens
ggaggggcggaccaaggagctgggctacacggtgaagaagcatctgcaggacctgtccggcaggatctccagagctcggcacaacgaactctgaaggcatyggggagcccagcccggcagggaagaggccagcgtgaaggacctgggctcttggccgtggcatttccgtggacagcccgccgtcagggtggctggggctgg

SEQ ID NO: 4876 - DNA, 201 bp, Homo sapiens
ccatgcacagagtccttaaaaaatagagtgcagtatttaaaccacccgcttgttggctggtcactaagtgtcctggtggctggggccggagccagtgctcktgaagggatcgcgtcatagccagcttcccctctgggccctgtgggtctttgcagccaacctccttttcccgtgagacggcccggcctgatttaaagccaa

SEQ ID NO: 4877 - DNA, 162 bp, Homo sapiens
agaatgttcctgtgtctgagcctggaagaggctcgggtctggctccgggcgtggttcccttcccgtgtctgagcctggaagaggctcgggtccggctccgrgcgtggttcccttcccgtgtctgagtctggaagaggctcgggtccggctccgagcgtggtt

SEQ ID NO: 4878 - DNA, 201 bp, Homo sapiens
ggcggaccaaggagctgggctacacggtgaagaagcatctgcaggacctgtccggcaggatctccagagctcggcacaacgaactctgaaggcattggggrgcccagcccggcagggaagaggccagcgtgaaggacctgggctcttggccgtggcatttccgtggacagcccgccgtcagggtggctggggctggcacgg

SEQ ID NO: 4879 - DNA, 201 bp, Homo sapiens
gcagccaacctccttttcccgtgagacggcccggcctgatttaaagccaagagcgcttgagttgagtttgaggggaagatgtggagcgtgtggttctgtgkacagtcagagactgtggcctgggggcagcgtctttcaactctcacctctgcagctcagggacctcgggagacctcaccaaacctgcagggcctccgtgtc

SEQ ID NO: 4880 - DNA, 133 bp, Homo sapiens
gggcatcggcaggctaggttttctccgcgcagsgccagtcgcagaggaagatggcgccgcggagggtcaggtcgtttctgcgcgggctcccggcgctgctactgctgctgctcttcctcgggccctggcccgc

SEQ ID NO: 4881 - DNA, 201 bp, Homo sapiens
tgcacagcaggcacacggagctgaaggagaagctgcgcagcatcaaccagggcctggaccgcctgcgcagggtcagccaccagggctacagcactgaggcygagttcgaggagcccagggtgattgacctgtgggacctggcgcagtccgccaacctcacggacaaggagctggaggcgttccgggaggagctcaagcact

SEQ ID NO: 4882 - DNA, 170 bp, Homo sapiens
cggctccgagaatgttcctgtgtctgagcctggaagaggctcgggtctggctccgggcgtggttcccttcccgtgtctgagcctggaagaggctcgggtcyggctccgagcgtggttcccttcccgtgtctgagtctggaagaggctcgggtccggctccgagcgtggtt

SEQ ID NO: 4883 - DNA, 163 bp, Homo sapiens
gagaatgttcctgtgtctgagcctggaagaggctcgggtctggctccgggcgtggttcccttcccgtgtctgagcctggaagaggctcgggtccggctccragcgtggttcccttcccgtgtctgagtctggaagaggctcgggtccggctccgagcgtggtt

SEQ ID NO: 4884 - DNA, 201 bp, Homo sapiens
tggaggggcggaccaaggagctgggctacacggtgaagaagcatctgcaggacctgtccggcaggatctccagagctcggcacaacgaactctgaaggcaytggggagcccagcccggcagggaagaggccagcgtgaaggacctgggctcttggccgtggcatttccgtggacagcccgccgtcagggtggctggggctg

SEQ ID NO: 4885 - DNA, 201 bp, Homo sapiens
ctggaggggcggaccaaggagctgggctacacggtgaagaagcatctgcaggacctgtccggcaggatctccagagctcggcacaacgaactctgaaggcrttggggagcccagcccggcagggaagaggccagcgtgaaggacctgggctcttggccgtggcatttccgtggacagcccgccgtcagggtggctggggct

SEQ ID NO: 4886 - DNA, 201 bp, Homo sapiens
agagtccttaaaaaatagagtgcagtatttaaaccacccgcttgttggctggtcactaagtgtcctggtggctggggccggagccagtgctcgtgaagggrtcgcgtcatagccagcttcccctctgggccctgtgggtctttgcagccaacctccttttcccgtgagacggcccggcctgatttaaagccaagagcgctt

SEQ ID NO: 4887 - DNA, 201 bp, Homo sapiens
tccgggaggagctcaagcacttcgaagccaaaatcgagaagcacaaccactaccagaagcagctggagattgcgcacgagaagctgaggcacgcagagagygtgggcgacggcgagcgtgtgagccgcagccgcgagaagcacgccctgctggaggggcggaccaaggagctgggctacacggtgaagaagcatctgcagg

SEQ ID NO: 4888 - DNA, 201 bp, Homo sapiens
agctcaagcacttcgaagccaaaatcgagaagcacaaccactaccagaagcagctggagattgcgcacgagaagctgaggcacgcagagagcgtgggcgayggcgagcgtgtgagccgcagccgcgagaagcacgccctgctggaggggcggaccaaggagctgggctacacggtgaagaagcatctgcaggacctgtccg

SEQ ID NO: 4889 - DNA, 201 bp, Homo sapiens
caacgaactctgaaggcattggggagcccagcccggcagggaagaggccagcgtgaaggacctgggctcttggccgtggcatttccgtggacagcccgccrtcagggtggctggggctggcacgggtgtcgaggcaggaaggattgtttctggtgactgcagccgctgccgtcgcgacacagggcttggtggtggtagcat

SEQ ID NO: 4890 - DNA, 201 bp, Homo sapiens
ccgggaggagctcaagcacttcgaagccaaaatcgagaagcacaaccactaccagaagcagctggagattgcgcacgagaagctgaggcacgcagagagcrtgggcgacggcgagcgtgtgagccgcagccgcgagaagcacgccctgctggaggggcggaccaaggagctgggctacacggtgaagaagcatctgcagga

SEQ ID NO: 4891 - DNA, 201 bp, Homo sapiens
ctgaagatacaggagagggacgaactcgcctggaagaaactaaagcttgacggcttggacgaagatggggagaaggaagcgagactcatacgcaacctcartgtcatcttggccaagtatggtctggacggaaagaaggacgctcggcaggtgaccagcaactccctcagtggcacccaggaagacgggctggatgacccc

SEQ ID NO: 4892 - DNA, 201 bp, Homo sapiens
tcttggccgtggcatttccgtggacagcccgccgtcagggtggctggggctggcacgggtgtcgaggcaggaaggattgtttctggtagcatttgggtctkagatcggcccagctctgactgaaggggcttggcttccactcagcatcagcgtggcagtcaccaccccagtgaggacctcgatgtccagctgctgtcaggt

SEQ ID NO: 4893 - DNA, 201 bp, Homo sapiens; identical to SEQ ID NO: 4869

SEQ ID NO: 4894 - DNA, 136 bp, Homo sapiens; identical to SEQ ID NO: 4870

SEQ ID NO: 4895 - DNA, 201 bp, Homo sapiens; identical to SEQ ID NO: 4871

SEQ ID NO: 4896 - DNA, 201 bp, Homo sapiens; identical to SEQ ID NO: 4872

SEQ ID NO: 4897 - DNA, 201 bp, Homo sapiens; identical to SEQ ID NO: 4873

SEQ ID NO: 4898 - DNA, 201 bp, Homo sapiens; identical to SEQ ID NO: 4874

SEQ ID NO: 4899 - DNA, 201 bp, Homo sapiens; identical to SEQ ID NO: 4875

SEQ ID NO: 4900 - DNA, 201 bp, Homo sapiens; identical to SEQ ID NO: 4876

SEQ ID NO: 4901 - DNA, 162 bp, Homo sapiens; identical to SEQ ID NO: 4877

SEQ ID NO: 4902 - DNA, 201 bp, Homo sapiens; identical to SEQ ID NO: 4878

SEQ ID NO: 4903 - DNA, 201 bp, Homo sapiens; identical to SEQ ID NO: 4879

SEQ ID NO: 4904 - DNA, 133 bp, Homo sapiens; identical to SEQ ID NO: 4880

SEQ ID NO: 4905 - DNA, 201 bp, Homo sapiens; identical to SEQ ID NO: 4881

SEQ ID NO: 4906 - DNA, 170 bp, Homo sapiens; identical to SEQ ID NO: 4882

SEQ ID NO: 4907 - DNA, 163 bp, Homo sapiens; identical to SEQ ID NO: 4883

SEQ ID NO: 4908 - DNA, 201 bp, Homo sapiens; identical to SEQ ID NO: 4884

SEQ ID NO: 4909 - DNA, 201 bp, Homo sapiens; identical to SEQ ID NO: 4885

SEQ ID NO: 4910 - DNA, 201 bp, Homo sapiens; identical to SEQ ID NO: 4886

SEQ ID NO: 4911 - DNA, 201 bp, Homo sapiens; identical to SEQ ID NO: 4887

SEQ ID NO: 4912 - DNA, 201 bp, Homo sapiens; identical to SEQ ID NO: 4888

SEQ ID NO: 4913 - DNA, 201 bp, Homo sapiens
caacgaactctgaaggcattggggagcccagcccggcagggaagaggccagcgtgaaggacctgggctcttggccgtggcatttccgtggacagcccgccrtcagggtggctggggctggcacgggtgtcgaggcaggaaggattgtttctggtagcatttgggtctgagatcggcccagctctgactgaaggggcttggc

SEQ ID NO: 4914 - DNA, 201 bp, Homo sapiens; identical to SEQ ID NO: 4890

SEQ ID NO: 4915 - DNA, 201 bp, Homo sapiens; identical to SEQ ID NO: 4891

SEQ ID NO: 4916 - DNA, 201 bp, Homo sapiens
tgccaactacacgtggctgctggtggagggcgtctacctgcacagtctcctggtgctcgtgggaggctccgaggagggccacttccgctactacctgctcstcggctggggggcccccgcgcttttcgtcattccctgggtgatcgtcaggtacctgtacgagaacacgcagtgctgggagcgcaacgaagtcaaggccat

SEQ ID NO: 4917 - DNA, 198 bp, Homo sapiens
ggcagcggtggcaggggctgcaggagcaagtgaccaggagcaggactggggacaggcctgatcgcccctgcacgaaccagacccttcgccgccctcasgatgactacctctccgatcctgcagctgctgctgcggctctcactgtgcgggctgctgctccagagggcggagacaggctctaaggggcagacggcgggg

SEQ ID NO: 4918 - DNA, 201 bp, Homo sapiens
tctcctgtccaagctgaggacacggcaaatgcgctgccgggattaccggctgaggctggctcgctccacgctgacgctggtgcccctgctgggtgtccacsaggtggtgtttgctcccgtgacagaggaacaggcccggggcgccctgcgcttcgccaagctcggctttgagatcttcctcagctccttccagggcttcct

SEQ ID NO: 4919 - DNA, 201 bp, Homo sapiens
atcaacctgttcacgtctttcatgctgcgagctgcggccattctcagccgagaccgtctgctacctcgacctggcccctaccttggggaccaggcccttgygctgtggaaccaggccctcgctgcctgccgcacggcccagatcgtgacccagtactgcgtgggtgccaactacacgtggctgctggtggagggcgtctac

SEQ ID NO: 4920 - DNA, 201 bp, Homo sapiens
aaaacatcaagttccacacacgctatggaatggttatgaagggaagcgagaagggggcctagggtggtctgggaggcgtctccaaggaggtgacacttaarccatccccgaaagaggtgaaagagatcactttggggagagctggagaacaggattctaggcggaagcgatagcataggcaaaggcccttgggcaggaagg

SEQ ID NO: 4921 - DNA, 201 bp, Homo sapiens
tgcaggtcatgtacactgtcggctactccctgtctctcgccacactgctgctagccctgctcatcttgagtttgttcaggcggctacattgcactagaaaytatatccacatcaacctgttcacgtctttcatgctgcgagctgcggccattctcagccgagaccgtctgctacctcgacctggcccctaccttggggacc

SEQ ID NO: 4922 - DNA, 201 bp, Homo sapiens
gctacattgcactagaaactatatccacatcaacctgttcacgtctttcatgctgcgagctgcggccattctcagccgagaccgtctgctacctcgacctkgcccctaccttggggaccaggcccttgcgctgtggaaccaggccctcgctgcctgccgcacggcccagatcgtgacccagtactgcgtgggtgccaacta

SEQ ID NO: 4923 - DNA, 201 bp, Homo sapiens
ccagccgcggcttgtcctcggggaccctcccagggcctgggaatgaggccagccgggagttggaaagttactgctagggggcgggatccccgtgtctgttmagttagcatggatttattgagtgccaactgcgtgccaggcccagtacggaggacgctggggaaatggtgaaggaaacagaaaaaaggtccctgcccttct

SEQ ID NO: 4924 - DNA, 201 bp, Homo sapiens; identical to SEQ ID NO: 4916

SEQ ID NO: 4925 - DNA, 198 bp, Homo sapiens; identical to SEQ ID NO: 4917

SEQ ID NO: 4926 - DNA, 201 bp, Homo sapiens; identical to SEQ ID NO: 4918

SEQ ID NO: 4927 - DNA, 201 bp, Homo sapiens; identical to SEQ ID NO: 4919

SEQ ID NO: 4928 - DNA, 201 bp, Homo sapiens; identical to SEQ ID NO: 4921

SEQ ID NO: 4929 - DNA, 201 bp, Homo sapiens; identical to SEQ ID NO: 4922

SEQ ID NO: 4930 - DNA, 201 bp, Homo sapiens
gctactgctggcatcatttacaggccggtgccccgcgggtgagctggagacctcagacgtggtaactgtggtgctgggccaggacgcaaaactgccctgcytctaccgaggggactccggcgagcaagtggggcaagtggcatgggctcgggtggacgcgggcgaaggcgcccaggaactagcgctactgcactccaaata

SEQ ID NO: 4931 - DNA, 201 bp, Homo sapiens
gagccagccggaggagagtgtagggctgagagccgagggccaccctgatagtctcaaggacaacagtagctgctctgtgatgagtgaagagcccgagggcygcagttactccacgctgaccacggtgagggagatagaaacacagactgaactgctgtctccaggctctgggcgggccgaggaggaggaagatcaggatga

SEQ ID NO: 4932 - DNA, 201 bp, Homo sapiens
ggacgcgggcgaaggcgcccaggaactagcgctactgcactccaaatacgggcttcatgtgagcccggcttacgagggccgcgtggagcagccgccgcccmcacgcaaccccctggacggctcagtgctcctgcgcaacgcagtgcaggcggatgagggcgagtacgagtgccgggtcagcaccttccccgccggcagctt

SEQ ID NO: 4933 - DNA, 107 bp, Homo sapiens
tgccgtygttgttggccacagcgtgggaagcagctctgggggagctcggagctcccgatcacggcttcttgggggtagctacggctgggtgtgtagaacggggccgg

SEQ ID NO: 4934 - DNA, 201 bp, Homo sapiens
ccgtggtgtgtattatgctgtcatatcagagtcaagtgaactgtggtgtatgtgccacgggatttgagtggttgcgtgggcaacactgtcagggtttggcktgtgtgtcatgtggctgtgtgtgacctctgcctgaaaaagcaggtattttctcagaccccagagcagtattaatgatgcagaggttggaggagagaggtg

SEQ ID NO: 4935 - DNA, 201 bp, Homo sapiens; identical to SEQ ID NO: 4930

SEQ ID NO: 4936 - DNA, 201 bp, Homo sapiens
gaaatatgaggaggagctgaccctgaccagggagaactccatccggaggctgcattcccatcacacggaccccaggagccagagtgaagagcccgagggcygcagttactccacgctgaccacggtgagggagatagaaacacagactgaactgctgtctccaggctctgggcgggccgaggaggaggaagatcaggatga

SEQ ID NO: 4937 - DNA, 201 bp, Homo sapiens; identical to SEQ ID NO: 4932

SEQ ID NO: 4938 - DNA, 107 bp, Homo sapiens; identical to SEQ ID NO: 4933

SEQ ID NO: 4939 - DNA, 201 bp, Homo sapiens; identical to SEQ ID NO: 4934

SEQ ID NO: 4940 - DNA, 201 bp, Homo sapiens
ccttccatgtgaatgcacaggaagctgagatgaaccctggcatttggcctcttgtagtcttggctaaggaaattctaacgcaaaaatagctcttgctttgrcttaggtgtgaagacccagacaggactgcagagggccccagagtggagatcccacatatttcaaaaacatgcttttccaaacccaggctattcggcaagg

SEQ ID NO: 4941 - DNA, 201 bp, Homo sapiens
gctgagatgaaccctggcatttggcctcttgtagtcttggctaaggaaattctaacgcaaaaatagctcttgctttgacttaggtgtgaagacccagacakgactgcagagggccccagagtggagatcccacatatttcaaaaacatgcttttccaaacccaggctattcggcaaggaagttagtttttaatctctccac

SEQ ID NO: 4942 - DNA, 201 bp, Homo sapiens
gaccgcctttggaggcagaagagcagttccacccaataactctaatgcagcggaagatgacctgcccacagtggagcttcagggcgtggtgccccggggcrtcaacctgcaagagtttcttaatgtcacgagcgttcacctgttcaaggagagatgggacactaacaaggtggaccaccacactgacaagtatgaaaacaa

SEQ ID NO: 4943 - DNA, 201 bp, Homo sapiens
cagaaggtgtcatgaaatcaaggtccaacgttgacatggactttgaagtggaaaatgctgtgctgggaaaagacttcaagctctccatcaccttccggaavaacagccacaaccgttacaccatcacagcttatctctcagccaacatcaccttctacaccggggtcccgaaggcagaattcaagaaggagacgttcgacg

SEQ ID NO: 4944 - DNA, 201 bp, Homo sapiens
cgaaccagtcgaaacccagaaacagacacgtacattctcttcaatccttggtgtgaagatgatgctgtgtatctggacaatgagaaagaaagagaagagtwtgtcctgaatgacatcggggtaattttttatggagaggtcaatgacatcaagaccagaagctggagctatggtcagtttgaagatggcatcctggacact

SEQ ID NO: 4945 - DNA, 201 bp, Homo sapiens
agaggacaggtctgtgcggctgtccatccagtcttcccccaaatgtattgtggggaaattccgcatgtatgttgctgtctggactccctatggcgtacttygaaccagtcgaaacccagaaacagacacgtacattctcttcaatccttggtgtgaagatgatgctgtgtatctggacaatgagaaagaaagagaagagta

SEQ ID NO: 4946 - DNA, 201 bp, Homo sapiens
gtttcttaatgtcacgagcgttcacctgttcaaggagagatgggacactaacaaggtggaccaccacactgacaagtatgaaaacaacaagctgattgtcygcagagggcagtctttctatgtgcagattgacttcagtcgtccatatgaccccagaagggatctcttcagggtggaatacgtcattggtcgctacccaca

SEQ ID NO: 4947 - DNA, 201 bp, Homo sapiens
aggctgatttatggtcagaatttccctctgatatgtctagggtgtgatttaggtcagtagactgtgattcttagcaaaaaatgaacagtgataagtatacwgggggcaaaatcagaatggaatgctctggtctatataaccacatttctaagcctttgagactgttcctgagccttcagcactaacctatgagggtgagct

SEQ ID NO: 4948 - DNA, 201 bp, Homo sapiens
tgcagtgggaagaagtgtgccggccctgggtctctgggcatcggaagctgatagccagcatgagcagtgactccctgagacatgtgtatggcgagctggaygtgcagattcaaagacgaccttccatgtgaatgcacaggaagctgagatgaaccctggcatttggcctcttgtagtcttggctaaggaaattctaacgca

SEQ ID NO: 4949 - DNA, 201 bp, Homo sapiens
gtcagaaacttccaggaccgcctttggaggcagaagagcagttccacccaataactctaatgcagcggaagatgacctgcccacagtggagcttcagggcktggtgccccggggcgtcaacctgcaagagtttcttaatgtcacgagcgttcacctgttcaaggagagatgggacactaacaaggtggaccaccacactga

SEQ ID NO: 4950 - DNA, 201 bp, Homo sapiens
aaccatccctgagatcatcatcaaggtccgtggcactcaggtagttggttctgacatgactgtgacaattcagtttaccaatcctttaaaagaaaccctgygaaatgtctgggtacacctggatggtcctggagtaacaagaccaatgaagaagatgttccgtgaaatccggcccaactccaccgtgcagtgggaagaagt

SEQ ID NO: 4951 - DNA, 201 bp, Homo sapiens
ctaaccatccctgagatcatcatcaaggtccgtggcactcaggtagttggttctgacatgactgtgacaattcagtttaccaatcctttaaaagaaacccygcgaaatgtctgggtacacctggatggtcctggagtaacaagaccaatgaagaagatgttccgtgaaatccggcccaactccaccgtgcagtgggaagaa

SEQ ID NO: 4952 - DNA, 201 bp, Homo sapiens
aatacctggcctcatttaaaacaagacttcagattccccactcagccttttgggaataatagcacatgatttgggctctagaattccagtcccctttctcrgggtcaggttctaccctccatgtgagaatatttttcccaggactagagcacaacataatttttatttttggcaaagccagaaaaagatctttcattttgc

SEQ ID NO: 4953 - DNA, 201 bp, Homo sapiens
acaaattggaggagatggcatgatggatattactgatacttacaaattccaagaaggtcaagaagaagagagattggccctagaaactgccctgatgtacrgagctaaaaagcccctcaacacagaaggtgtcatgaaatcaaggtccaacgttgacatggactttgaagtggaaaatgctgtgctgggaaaagacttcaa

SEQ ID NO: 4954 - DNA, 201 bp, Homo sapiens
tcatttacattacagctaagaaagatggcactcatgtggtggaaaatgtggatgccacccacattgggaaattaattgtgaccaaacaaattggaggagayggcatgatggatattactgatacttacaaattccaagaaggtcaagaagaagagagattggccctagaaactgccctgatgtacggagctaaaaagcccc

SEQ ID NO: 4955 - DNA, 201 bp, Homo sapiens
tatagaaggactgcagccactgattctctcttgtccttcacatcacccatgttgagacctcagcttggcactcaggtgctgaagggtaatatggactcagscttgcaaatagccagtgctagttctgacccaaccacagaggatgctgacatcatttgtattatgttccaaggctactacagagaaggctgcctgctatgt

SEQ ID NO: 4956 - DNA, 201 bp, Homo sapiens
agctctccatcaccttccggaacaacagccacaaccgttacaccatcacagcttatctctcagccaacatcaccttctacaccggggtcccgaaggcagarttcaagaaggagacgttcgacgtgacgctggagcccttgtccttcaagaaagaggcggtgctgatccaagccggcgagtacatgggtcagctgctggaac

SEQ ID NO: 4957 - DNA, 201 bp, Homo sapiens
agggccccagagtggagatcccacatatttcaaaaacatgcttttccaaacccaggctattcggcaaggaagttagtttttaatctctccaccttccaaaragtgctaagcattagctttaattaagctctcatagctcataagagtaacagtcatcatttatcatcacaaatggctacatctccaaatatcagtgggctc

SEQ ID NO: 4958 - DNA, 201 bp, Homo sapiens
gctgggaaaagacttcaagctctccatcaccttccggaacaacagccacaaccgttacaccatcacagcttatctctcagccaacatcaccttctacaccrgggtcccgaaggcagaattcaagaaggagacgttcgacgtgacgctggagcccttgtccttcaagaaagaggcggtgctgatccaagccggcgagtacat

SEQ ID NO: 4959 - DNA, 201 bp, Homo sapiens
gacatcaagaccagaagctggagctatggtcagtttgaagatggcatcctggacacttgcctgtatgtgatggacagagcacaaatggacctctctggaakagggaatcccatcaaagtcagccgtgtggggtctgcaatggtgaatgccaaagatgacgaaggtgtcctcgttggatcctgggacaatatctatgcctat

SEQ ID NO: 4960 - DNA, 201 bp, Homo sapiens
actagagcacaacataatttttatttttggcaaagccagaaaaagatctttcattttgcacctgcagccaagcaaatgcctgccaaattttagatttaccwtgttagaagaggtggccccatattaacaaattgcatttgtgggaaacttaaccacctacaaggagataagaaagcaggtgcaacactcaagtctattgaa

SEQ ID NO: 4961 - DNA, 201 bp, Homo sapiens
tataataagcccaacaagttgaagaagctggcggatctagtgaccagatatatagaaggactgcagccactgattctctcttgtccttcacatcacccatkttgagacctcagcttggcactcaggtgctgaagggtaatatggactcagccttgcaaatagccagtgctagttctgacccaaccacagaggatgctgaca

SEQ ID NO: 4962 - DNA, 201 bp, Homo sapiens
tctggaagagggaatcccatcaaagtcagccgtgtggggtctgcaatggtgaatgccaaagatgacgaaggtgtcctcgttggatcctgggacaatatctrtgcctatggcgtccccccatcggcctggactggaagcgttgacattctattggaataccggagctctgagaatccagtccggtatggccaatgctgggtt

SEQ ID NO: 4963 - DNA, 201 bp, Homo sapiens
aaagacttcaagctctccatcaccttccggaacaacagccacaaccgttacaccatcacagcttatctctcagccaacatcaccttctacaccggggtccygaaggcagaattcaagaaggagacgttcgacgtgacgctggagcccttgtccttcaagaaagaggcggtgctgatccaagccggcgagtacatgggtcag

SEQ ID NO: 4964 - DNA, 201 bp, Homo sapiens
actggaagcgttgacattctattggaataccggagctctgagaatccagtccggtatggccaatgctgggtttttgctggtgtctttaacacatttttacratgccttggaataccagcaagaattgttaccaattatttctctgcccatgataatgatgccaatttgcaaatggacatcttcctggaagaagatgggaac

SEQ ID NO: 4965 - DNA, 201 bp, Homo sapiens
ggattcagtgtggaactaccactgctggaatgaagcatggatgacaaggcctgaccttcctgttggatttggaggctggcaagctgtggacagcacccccyaggaaaatagcgatggcatgtatcggtgtggccccgcctcggttcaagccatcaagcacggccatgtctgcttccaatttgatgcaccttttgtttttgc

SEQ ID NO: 4966 - DNA, 201 bp, Homo sapiens
ccacagtggagcttcagggcgtggtgccccggggcgtcaacctgcaagagtttcttaatgtcacgagcgttcacctgttcaaggagagatgggacactaamaaggtggaccaccacactgacaagtatgaaaacaacaagctgattgtccgcagagggcagtctttctatgtgcagattgacttcagtcgtccatatgacc

SEQ ID NO: 4967 - DNA, 201 bp, Homo sapiens
tggaatgaagcatggatgacaaggcctgaccttcctgttggatttggaggctggcaagctgtggacagcaccccccaggaaaatagcgatggcatgtatcrgtgtggccccgcctcggttcaagccatcaagcacggccatgtctgcttccaatttgatgcaccttttgtttttgcagaggtcaacagcgacctcatttac

SEQ ID NO: 4968 - DNA, 201 bp, Homo sapiens
atcaaggtccgtggcactcaggtagttggttctgacatgactgtgacaattcagtttaccaatcctttaaaagaaaccctgcgaaatgtctgggtacaccyggatggtcctggagtaacaagaccaatgaagaagatgttccgtgaaatccggcccaactccaccgtgcagtgggaagaagtgtgccggccctgggtctct

SEQ ID NO: 4969 - DNA, 201 bp, Homo sapiens
acaaggagataagaaagcaggtgcaacactcaagtctattgaataatgtagttttgtgatgcattttatagaatgtgtcacactgtggcctgatcagcagragccaatatcccttactttaaccctttctgggatgcaatactaggaagtaaagtgaagaatttatctctttagttagtgattatatttcacccatctctc

SEQ ID NO: 4970 - DNA, 201 bp, Homo sapiens
attctaacgcaaaaatagctcttgctttgacttaggtgtgaagacccagacaggactgcagagggccccagagtggagatcccacatatttcaaaaacatrcttttccaaacccaggctattcggcaaggaagttagtttttaatctctccaccttccaaagagtgctaagcattagctttaattaagctctcatagctca

SEQ ID NO: 4971 - DNA, 169 bp, Homo sapiens
ctttcccgagtccgtttgaggaagtccccgaggcgcacagagcaagcccacgcgagggcacctctggasgggagcgcctgcaggaccttgtaaagtcaaaaatgtcagaaacttccaggaccgcctttggaggcagaagagcagttccacccaataactctaatgcagc

SEQ ID NO: 4972 - DNA, 201 bp, Homo sapiens
ggatgttctggccaagcaaaagtccaccgtgctaaccatccctgagatcatcatcaaggtccgtggcactcaggtagttggttctgacatgactgtgacarttcagtttaccaatcctttaaaagaaaccctgcgaaatgtctgggtacacctggatggtcctggagtaacaagaccaatgaagaagatgttccgtgaaat

SEQ ID NO: 4973 - DNA, 201 bp, Homo sapiens
gccaacatcaccttctacaccggggtcccgaaggcagaattcaagaaggagacgttcgacgtgacgctggagcccttgtccttcaagaaagaggcggtgcwgatccaagccggcgagtacatgggtcagctgctggaacaagcgtccctgcacttctttgtcacagctcgcatcaatgagaccagggatgttctggccaag

SEQ ID NO: 4974 - DNA, 201 bp, Homo sapiens
attctctcttgtccttcacatcacccatgttgagacctcagcttggcactcaggtgctgaagggtaatatggactcagccttgcaaatagccagtgctagytctgacccaaccacagaggatgctgacatcatttgtattatgttccaaggctactacagagaaggctgcctgctatgtatttgcaaggctgatttatggt

SEQ ID NO: 4975 - DNA, 201 bp, Homo sapiens
tgttctggccaagcaaaagtccaccgtgctaaccatccctgagatcatcatcaaggtccgtggcactcaggtagttggttctgacatgactgtgacaattsagtttaccaatcctttaaaagaaaccctgcgaaatgtctgggtacacctggatggtcctggagtaacaagaccaatgaagaagatgttccgtgaaatccg

SEQ ID NO: 4976 - DNA, 201 bp, Homo sapiens
tgttggatttggaggctggcaagctgtggacagcaccccccaggaaaatagcgatggcatgtatcggtgtggccccgcctcggttcaagccatcaagcacrgccatgtctgcttccaatttgatgcaccttttgtttttgcagaggtcaacagcgacctcatttacattacagctaagaaagatggcactcatgtggtgga

SEQ ID NO: 4977 - DNA, 201 bp, Homo sapiens
ataaccacatttctaagcctttgagactgttcctgagccttcagcactaacctatgagggtgagctggtcccctctatatatacatcatacttaactttaytaagtaatctcacagcatttgccaagtctcccaatatccaattttaaaatgaaatgcattttgctagacagttaaactggcttaacttagtatattatta

SEQ ID NO: 4978 - DNA, 201 bp, Homo sapiens
ggagagatgggacactaacaaggtggaccaccacactgacaagtatgaaaacaacaagctgattgtccgcagagggcagtctttctatgtgcagattgacytcagtcgtccatatgaccccagaagggatctcttcagggtggaatacgtcattggtcgctacccacaggagaacaagggaacctacatcccagtgcctat

SEQ ID NO: 4979 - DNA, 201 bp, Homo sapiens
ggtctgcaatggtgaatgccaaagatgacgaaggtgtcctcgttggatcctgggacaatatctatgcctatggcgtccccccatcggcctggactggaagsgttgacattctattggaataccggagctctgagaatccagtccggtatggccaatgctgggtttttgctggtgtctttaacacatttttacgatgccttg

SEQ ID NO: 4980 - DNA, 201 bp, Homo sapiens
tggcatttggcctcttgtagtcttggctaaggaaattctaacgcaaaaatagctcttgctttgacttaggtgtgaagacccagacaggactgcagagggcyccagagtggagatcccacatatttcaaaaacatgcttttccaaacccaggctattcggcaaggaagttagtttttaatctctccaccttccaaagagtgc

SEQ ID NO: 4981 - DNA, 201 bp, Homo sapiens
ttctattggaataccggagctctgagaatccagtccggtatggccaatgctgggtttttgctggtgtctttaacacatttttacgatgccttggaataccmgcaagaattgttaccaattatttctctgcccatgataatgatgccaatttgcaaatggacatcttcctggaagaagatgggaacgtgaattccaaactca

SEQ ID NO: 4982 - DNA, 201 bp, Homo sapiens
aacgttgacatggactttgaagtggaaaatgctgtgctgggaaaagacttcaagctctccatcaccttccggaacaacagccacaaccgttacaccatcayagcttatctctcagccaacatcaccttctacaccggggtcccgaaggcagaattcaagaaggagacgttcgacgtgacgctggagcccttgtccttcaag

SEQ ID NO: 4983 - DNA, 201 bp, Homo sapiens
caacagccacaaccgttacaccatcacagcttatctctcagccaacatcaccttctacaccggggtcccgaaggcagaattcaagaaggagacgttcgacrtgacgctggagcccttgtccttcaagaaagaggcggtgctgatccaagccggcgagtacatgggtcagctgctggaacaagcgtccctgcacttctttgt

SEQ ID NO: 4984 - DNA, 201 bp, Homo sapiens
tttaacacatttttacgatgccttggaataccagcaagaattgttaccaattatttctctgcccatgataatgatgccaatttgcaaatggacatcttccyggaagaagatgggaacgtgaattccaaactcaccaaggattcagtgtggaactaccactgctggaatgaagcatggatgacaaggcctgaccttcctgtt

SEQ ID NO: 4985 - DNA, 201 bp, Homo sapiens
gacatcaagaccagaagctggagctatggtcagtttgaagatggcatcctggacacttgcctgtatgtgatggacagagcacaaatggacctctctggaakagggaatcccatcaaagtcagccgtgtggggtctgcaatgggctttctcacttacgaagtgggtattgattctttgcaggatcctgtgtgcctggtcata

SEQ ID NO: 4986 - DNA, 201 bp, Homo sapiens; identical to SEQ ID NO: 4981

SEQ ID NO: 4987 - DNA, 201 bp, Homo sapiens; identical to SEQ ID NO: 4964

SEQ ID NO: 4988 - DNA, 141 bp, Homo sapiens
ggagcctcacctcaggggggctacagttttgcacagagcggccccactgttgacgccaacagaggccatggtctgagctccttagctgttcaggagagggmtggggactcaggaacctcagaagggcagagcagggcagag

SEQ ID NO: 4989 - DNA, 201 bp, Homo sapiens
ttaactgcagtttgggatggaggtggtgctcagcttttatataaagggggaagcaagtatgatgctgtgtatctggacaatgagaaagaaagagaagagtwtgtcctgaatgacatcggggtaattttttatggagaggtcaatgacatcaagaccagaagctggagctatggtcagtttgaagatggcatcctggacact

SEQ ID NO: 4990 - DNA, 201 bp, Homo sapiens
agaggacaggtctgtgcggctgtccatccagtcttcccccaaatgtattgtggggaaattccgcatgtatgttgctgtctggactccctatggcgtacttygaaccagtcgaaacccagaaacagacacgtacattctcttcaatccttggtgtgaagggatttctgacttcatggctgcctctgcctctaggagtcctac

SEQ ID NO: 4991 - DNA, 201 bp, Homo sapiens
ttcactgtgacacacctacatgtaccacctccatccatatttgctccagtgaatgccaaagatgacgaaggtgtcctcgttggatcctgggacaatatctrtgcctatggcgtccccccatcggcctggactggaagcgttgacattctattggaataccggagctctgagaatccagtccggtatggccaatgctgggtt

SEQ ID NO: 4992 - DNA, 201 bp, Homo sapiens
tttaacacatttttacgatgccttggaataccagcaagaattgttaccaattatttctctgcccatgataatgatgccaatttgcaaatggacatcttccyggaagaagatgggaacgtgaattccaaactcaccaaggattcagtgtgcaaggatctcaggagctattggcctcatacttacctccctccacaggctctg

SEQ ID NO: 4993 - DNA, 201 bp, Homo sapiens
taggagtcctactcacacttgtgctgctgcaagtgagaaacttgaccgtcaccttcaatttcaatgttggcaacaacaacaaaagcagccacacacaacayctgtgaatgcccagaccttaactgcagtttgggatggaggtggtgctcagcttttatataaagggggaagcaagtatgatgctgtgtatctggacaatga

SEQ ID NO: 4994 - DNA, 201 bp, Homo sapiens
gaaatagcacatagatctcagttcatccccaggatctggcagcaactatgggcagagaatttcccccaaggagatgcagctgcttctgcaaaggctgccgytactgcagataaaggctcgttattcactgtgacacacctacatgtaccacctccatccatatttgctccagtgaatgccaaagatgacgaaggtgtcctc

SEQ ID NO: 4995 - DNA, 201 bp, Homo sapiens
tatttgctccagtgaatgccaaagatgacgaaggtgtcctcgttggatcctgggacaatatctatgcctatggcgtccccccatcggcctggactggaagsgttgacattctattggaataccggagctctgagaatccagtccggtatggccaatgctgggtttttgctggtgtctttaacacatttttacgatgccttg

SEQ ID NO: 4996 - DNA, 201 bp, Homo sapiens
aagaagaatggaatgaacataatgccaaaataattaaatatataagaactaagacaaagccccatttgttttatattcctggaagaatgtgtccagctacycaaaaactaatagaagagtcacagagaaaaatgaacgctttatttgaaggtagacgcatcgaatttgcagaacaaataaataaaatggaggctaggccta

SEQ ID NO: 4997 - DNA, 115 bp, Homo sapiens
gtcagtcctttcgcrcctcggcggcgcggcatagcccggctcggcctgtaaagcagtctcaagcctgccgcagggagaagatggcggtcgccgtgagaactttgcaggaacagct

SEQ ID NO: 4998 - DNA, 201 bp, Homo sapiens
gcagtggaagtagttccagcagtggaagtagtagcagtcgcagtagttccagtagcagctccagtacaagtggcagcagcagcagagatagtagcagtagyactagtagtagtagtgagagtagaagtcggagtaggggccggggacataatagagatagaaagcacagaaggagcgtggatcggaagagaagggatactt

SEQ ID NO: 4999 - DNA, 201 bp, Homo sapiens
acctcagcctcagtctcagccccagcttcagcttcaatcccagtcccaaccagtactccagtcccagcctccctctcagcctgaggatttgtcattagctsttttacagccaacaccccaagttactcaggagcaagggcatttactacctgagaggaaggattttcctgtagagtctgtaaaactcactgaggtaccagt

SEQ ID NO: 5000 - DNA, 201 bp, Homo sapiens
gacgcatcgaatttgcagaacaaataaataaaatggaggctaggcctagaagacaatcaatgaaggaaaaagagcatcaggtggtgcgtaatgaagaacasaaggcggaacaagaagagggtaaggtggctcagcgagaggaagagttggaggagacaggtaatcagcacaatgatgtagaaatagaggaagcaggagagg

SEQ ID NO: 5001 - DNA, 201 bp, Homo sapiens
agacaatcaatgaaggaaaaagagcatcaggtggtgcgtaatgaagaacagaaggcggaacaagaagagggtaaggtggctcagcgagaggaagagttggwggagacaggtaatcagcacaatgatgtagaaatagaggaagcaggagaggaagaggaaaaggaaatagcgattgttcatagtgatgcagagaaagaacag

SEQ ID NO: 5002 - DNA, 201 bp, Homo sapiens
aggaaaaagagcatcaggtggtgcgtaatgaagaacagaaggcggaacaagaagagggtaaggtggctcagcgagaggaagagttggaggagacaggtaaycagcacaatgatgtagaaatagaggaagcaggagaggaagaggaaaaggaaatagcgattgttcatagtgatgcagagaaagaacaggaggaggaagaac

SEQ ID NO: 5003 - DNA, 201 bp, Homo sapiens
aggtggtgcgtaatgaagaacagaaggcggaacaagaagagggtaaggtggctcagcgagaggaagagttggaggagacaggtaatcagcacaatgatgtwgaaatagaggaagcaggagaggaagaggaaaaggaaatagcgattgttcatagtgatgcagagaaagaacaggaggaggaagaacaaaaacaggaaatgg

SEQ ID NO: 5004 - DNA, 201 bp, Homo sapiens
tggaggagacaggtaatcagcacaatgatgtagaaatagaggaagcaggagaggaagaggaaaaggaaatagcgattgttcatagtgatgcagagaaagarcaggaggaggaagaacaaaaacaggaaatggaggttaagatggaggaggaaactgaggtaagggaaagtgagaagcagcaggatagtcagcctgaagaag

SEQ ID NO: 5005 - DNA, 201 bp, Homo sapiens
aactgaggtaagggaaagtgagaagcagcaggatagtcagcctgaagaagttatggatgtgctagagatggttgagaatgtcaaacatgtaattgctgacsaggaggtaatggaaactaatcgagttgaaagtgtagaaccttcagaaaatgaagctagcaaagaattggaaccagaaatggaatttgaaattgagccaga

SEQ ID NO: 5006 - DNA, 201 bp, Homo sapiens
gtaatcagcacaatgatgtagaaatagaggaagcaggagaggaagaggaaaaggaaatagcgattgttcatagtgatgcagagaaagaacaggaggaggargaacaaaaacaggaaatggaggttaagatggaggaggaaactgaggtaagggaaagtgagaagcagcaggatagtcagcctgaagaagttatggatgtgc

SEQ ID NO: 5007 - DNA, 201 bp, Homo sapiens
aaccagaaatggaatttgaaattgagccagataaagaatgtaaatccctttctcctgggaaagagaatgtcagtgctttagacatggaaaaggagtctgasgaaaaagaagaaaaagaatctgagccccaacctgagcctgtggctcaacctcagcctcagtctcagccccagcttcagcttcaatcccagtcccaaccag

SEQ ID NO: 5008 - DNA, 201 bp, Homo sapiens
agtagaagtcggagtaggggccggggacataatagagatagaaagcacagaaggagcgtggatcggaagagaagggatacttcaggactagaaagaagtcmcaaatcttcaaaaggtggtagtagtagagatacaaaaggatcaaaggataagaattcccggtccgacagaaagaggtctatatcagagagtagtcgatca

SEQ ID NO: 5009 - DNA, 201 bp, Homo sapiens
gagtctgaggaaaaagaagaaaaagaatctgagccccaacctgagcctgtggctcaacctcagcctcagtctcagccccagcttcagcttcaatcccagtsccaaccagtactccagtcccagcctccctctcagcctgaggatttgtcattagctgttttacagccaacaccccaagttactcaggagcaagggcattta

SEQ ID NO: 5010 - DNA, 195 bp, Homo sapiens
gtcagtcctttcgcgcctcggcggcgcggcatagcccggctcggcctgtaaagcagtctcaagcctgccgcagggagaagatggcggtcgccgtragaactttgcaggaacagctggaaaaggccaaagagagtcttaagaacgtggatgagaacattcgcaagctcaccgggcgggatccgaatgacgtgaggc

SEQ ID NO: 5011 - DNA, 201 bp, Homo sapiens
ctgaggaaaaagaagaaaaagaatctgagccccaacctgagcctgtggctcaacctcagcctcagtctcagccccagcttcagcttcaatcccagtcccawccagtactccagtcccagcctccctctcagcctgaggatttgtcattagctgttttacagccaacaccccaagttactcaggagcaagggcatttactac

SEQ ID NO: 5012 - DNA, 201 bp, Homo sapiens
aagaatctgagccccaacctgagcctgtggctcaacctcagcctcagtctcagccccagcttcagcttcaatcccagtcccaaccagtactccagtcccakcctccctctcagcctgaggatttgtcattagctgttttacagccaacaccccaagttactcaggagcaagggcatttactacctgagaggaaggattttc

SEQ ID NO: 5013 - DNA, 201 bp, Homo sapiens
cccaacctgagcctgtggctcaacctcagcctcagtctcagccccagcttcagcttcaatcccagtcccaaccagtactccagtcccagcctccctctcarcctgaggatttgtcattagctgttttacagccaacaccccaagttactcaggagcaagggcatttactacctgagaggaaggattttcctgtagagtctg

SEQ ID NO: 5014 - DNA, 201 bp, Homo sapiens
aatcccagtcccaaccagtactccagtcccagcctccctctcagcctgaggatttgtcattagctgttttacagccaacaccccaagttactcaggagcawgggcatttactacctgagaggaaggattttcctgtagagtctgtaaaactcactgaggtaccagtagagccagtcttgacagtacatccagagagcaaga

SEQ ID NO: 5015 - DNA, 201 bp, Homo sapiens
gcagtagttccagtagcagctccagtacaagtggcagcagcagcagagatagtagcagtagcactagtagtagtagtgagagtagaagtcggagtaggggycggggacataatagagatagaaagcacagaaggagcgtggatcggaagagaagggatacttcaggactagaaagaagtcacaaatcttcaaaaggtggta

SEQ ID NO: 5016 - DNA, 201 bp, Homo sapiens
aactaatcgagttgaaagtgtagaaccttcagaaaatgaagctagcaaagaattggaaccagaaatggaatttgaaattgagccagataaagaatgtaaawccctttctcctgggaaagagaatgtcagtgctttagacatggaaaaggagtctgaggaaaaagaagaaaaagaatctgagccccaacctgagcctgtggc

SEQ ID NO: 5017 - DNA, 201 bp, Homo sapiens
aaactgaggtaagggaaagtgagaagcagcaggatagtcagcctgaagaagttatggatgtgctagagatggttgagaatgtcaaacatgtaattgctgascaggaggtaatggaaactaatcgagttgaaagtgtagaaccttcagaaaatgaagctagcaaagaattggaaccagaaatggaatttgaaattgagccag

SEQ ID NO: 5018 - DNA, 201 bp, Homo sapiens
attctttgcagcagaagatttcttgataaaaaaggattacctttccttgtaaagaggatgctgccttaagaattgcatgttgtaaaaaatctttttggaaratacagactgtttgtttaccagacattcttgtactttttgcataattttgtaagagttatttatcaaaattatgtgaggttccaaaatatgtaaaaatga

SEQ ID NO: 5019 - DNA, 201 bp, Homo sapiens
ccggggacataatagagatagaaagcacagaaggagcgtggatcggaagagaagggatacttcaggactagaaagaagtcacaaatcttcaaaaggtggtrgtagtagagatacaaaaggatcaaaggataagaattcccggtccgacagaaagaggtctatatcagagagtagtcgatcaggcaaaagatcttcaagaag

SEQ ID NO: 5020 - DNA, 201 bp, Homo sapiens
caaaggataagaattcccggtccgacagaaagaggtctatatcagagagtagtcgatcaggcaaaagatcttcaagaagtgaaagagaccgaaaatcagayaggaaagacaaaaggcgttaatggaagaagccaggctttcttagccattctttgcagcagaagatttcttgataaaaaaggattacctttccttgtaaag

SEQ ID NO: 5021 - DNA, 201 bp, Homo sapiens
agaagtgaaagagaccgaaaatcagacaggaaagacaaaaggcgttaatggaagaagccaggctttcttagccattctttgcagcagaagatttcttgatraaaaaggattacctttccttgtaaagaggatgctgccttaagaattgcatgttgtaaaaaatctttttggaaaatacagactgtttgtttaccagacatt

SEQ ID NO: 5022 - DNA, 201 bp, Homo sapiens
gcctgactgggaaattaaagaaggctgatgctgtacgtgtgattacattcactggctgcatgggagaaacatactttgacaacaaacctataggtttgtgraatttccgagaaaaagaaggtgactgcaaaggatgcactgtcagtcctcaggtggaagatagtgaggggactattcaatttgatggagaaggttatgcat

SEQ ID NO: 5023 - DNA, 201 bp, Homo sapiens
atgtgaccgctgtgcccacggctatttcaacttccaagaaggaggctgcacagcttgtgaatgttctcatctgggtaataattgtgacccaaagactgggygatgcatttgccctcccaataccattggagagaaatgttctaaatgtgcacccaatacctggggccacagcattaccactggttgtaaggcttgtaactg

SEQ ID NO: 5024 - DNA, 201 bp, Homo sapiens
aaggctgggacctttggcctacaatcagcaaggggctgtgttccctgcaactgcaattcttttgggtctaagtcattcgactgtgaagagagtggacaatrttggtgccaacctggagtcacagggaagaaatgtgaccgctgtgcccacggctatttcaacttccaagaaggaggctgcacagcttgtgaatgttctcat

SEQ ID NO: 5025 - DNA, 201 bp, Homo sapiens
ttcagcaccaagaatgagtccggcatcattcttttgggaagtggagggacaccagcaccacctaggagaaaacgaaggcagactggacaggcctattatgyaatactcctcaacaggggccgtctggaagtgcatctctccacaggggcacgaacaatgaggaaaattgtgatcagaccagagccaaatctgtttcatgat

SEQ ID NO: 5026 - DNA, 201 bp, Homo sapiens
tcactgctgtctatgatgctggggttccagggcatttgtgtgatggacaatggcataaagtcactgccaacaagatcaaacaccgcattgagctcacagtygatgggaaccaggtggaagcccaaagcccaaacccagcatctacatcagctgacacaaatgaccctgtgtttgttggaggcttcccagatgacctcaagc

SEQ ID NO: 5027 - DNA, 201 bp, Homo sapiens
aaagttgatgtttcatgtggacaatggtgcgggcagattcactgctgtctatgatgctggggttccagggcatttgtgtgatggacaatggcataaagtcrctgccaacaagatcaaacaccgcattgagctcacagtcgatgggaaccaggtggaagcccaaagcccaaacccagcatctacatcagctgacacaaatga

SEQ ID NO: 5028 - DNA, 201 bp, Homo sapiens
caacgactggagttcttctggggatcagtagtcaaaaaatggatggaatgggtattgaaatgattgatgaaaagttgatgtttcatgtggacaatggtgcrggcagattcactgctgtctatgatgctggggttccagggcatttgtgtgatggacaatggcataaagtcactgccaacaagatcaaacaccgcattgagc

SEQ ID NO: 5029 - DNA, 201 bp, Homo sapiens
aacgaaggcagactggacaggcctattatgcaatactcctcaacaggggccgtctggaagtgcatctctccacaggggcacgaacaatgaggaaaattgtsatcagaccagagccaaatctgtttcatgatggaagagaacattccgttcatgtagagcgaactagaggcatctttacagttcaagtggatgaaaacagaa

SEQ ID NO: 5030 - DNA, 151 bp, Homo sapiens
cagcgactcctctggctcccgagaagtggatccggtcgcggccactacgaygccgggagccgccggggtcctcctccttctgctgctctccggaggcctcgggggcgtacaggcgcagcggccgcagcagcagcggcagtcacaggcacat

SEQ ID NO: 5031 - DNA, 122 bp, Homo sapiens
atttgtgcatgtacatagaattctttctgtattcagatggtgctaattcagactccagactgaattttaattcaagttctttctcaagtctataaataatattaaactgattatttcattct

SEQ ID NO: 5032 - DNA, 201 bp, Homo sapiens
caccaagggcattgtttttcaacatccagagattgttgcccacatggacctgatgagagaagatctccatttggaacctttttattggaaacttccagaayaatttgaaggaaagaagttgatggcctatgggggcaaactcaagtatgcaatctatttcgaggctcgggaagaaacaggtttctctacatataatcctca

SEQ ID NO: 5033 - DNA, 123 bp, Homo sapiens
aatttgtgcatgtacatagaattctttctgtattcagatggtgctaattcagactccagactgaattttaattcaagttctttctcaagtctataaataatattaaactgattatttcattct

SEQ ID NO: 5034 - DNA, 201 bp, Homo sapiens
gacaggcctattatgcaatactcctcaacaggggccgtctggaagtgcatctctccacaggggcacgaacaatgaggaaaattgtgatcagaccagagccraatctgtttcatgatggaagagaacattccgttcatgtagagcgaactagaggcatctttacagttcaagtggatgaaaacagaagatacatgcaaaacc

SEQ ID NO: 5035 - DNA, 124 bp, Homo sapiens
taatttgtgcatgtacatagaattctttctgtattcagatggtgctaattcagactccagactgaattttaattcaagttctttctcaagtctataaataatattaaactgattatttcattct

SEQ ID NO: 5036 - DNA, 201 bp, Homo sapiens
gaaatgacagagaaagaatggaaatattatggggatgatcctcgagtccatagaactgtgacccgagaagacttcttggatatactatatgatattcattrcattcttatcaaagctacttatggaaatttcatgcgacaaagcaggatttctgaaatctcaatggaggtagctgaacaaggacgtggaacaacaatgact

SEQ ID NO: 5037 - DNA, 201 bp, Homo sapiens
ggatccttggatttccaatgcaatgtaaatacaggccaatgcaactgtcatccaaaattctctggtgcaaaatgtacagagtgcagtcgaggtcactggarctaccctcgctgcaatctctgtgactgcttcctccctgggacagatgccacaacctgtgattcagagactaaaaaatgctcctgtagtgatcaaactggg

SEQ ID NO: 5038 - DNA, 199 bp, Homo sapiens
ccaggaagagtctgtcaaaacaagtatatcaagtaaaacaaacaaatatattttacctatatatgttaattaaactaatttgtgcatgtacatagaattcyttctgtattcagatggtgctaattcagactccagactgaattttaattcaagttctttctcaagtctataaataatattaaactgattatttcattct

SEQ ID NO: 5039 - DNA, 201 bp, Homo sapiens
tgaagaagaggaagaagatacagaacgtgttctccagcttatgattatcttagagggtaatgacttgagcatcagcacagcccaagatgaggtgtacctgsacccatctgaagaacatactaatgtattgttacttaaagaagaatcatttaccatacatggcacacattttccagtccgtagaaaggaatttatgacagt

SEQ ID NO: 5040 - DNA, 201 bp, Homo sapiens
gaagatacatgcaaaacctgacagttgaacagcctatcgaagttaaaaagcttttcgttgggggtgctccacctgaatttcaaccttccccactcagaaayattcctccttttgaaggctgcatatggaatcttgttattaactctgtccccatggactttgcaaggcctgtgtccttcaaaaatgctgacattggtcgct

SEQ ID NO: 5041 - DNA, 201 bp, Homo sapiens
ctggacagtgtgagtgcagagccaacgttcagggtcagagatgtgacaaatgcaaggctgggacctttggcctacaatcagcaaggggctgtgttccctgmaactgcaattcttttgggtctaagtcattcgactgtgaagagagtggacaatgttggtgccaacctggagtcacagggaagaaatgtgaccgctgtgccc

SEQ ID NO: 5042 - DNA, 201 bp, Homo sapiens
gggctgtgttccctgcaactgcaattcttttgggtctaagtcattcgactgtgaagagagtggacaatgttggtgccaacctggagtcacagggaagaaaygtgaccgctgtgcccacggctatttcaacttccaagaaggaggctgcacagcttgtgaatgttctcatctgggtaataattgtgacccaaagactgggcg

SEQ ID NO: 5043 - DNA, 201 bp, Homo sapiens
gaattgtcaagggattgccaaatgactgtcagcaatgtgcctgccctctgatttcttccagtaacaatttcagcccctcttgtgtcgcagaaggacttgaygactaccgctgcacggcttgtccacggggatatgaaggccagtactgtgaaaggtgtgcccctggctatactggcagtccaggcaaccctggaggctcct

SEQ ID NO: 5044 - DNA, 201 bp, Homo sapiens
atcaggaggagaatatagcaacttcgtcttctggaaacaactttggtcttgacttgaaagcagatgacaaaatatattttggtggcctgccaacgctgagwaacttgagtattcaataggccagaagtaaatctgaagaaatattccggctgcctcaaagatattgaaatttcaagaactccgtacaatatactcagtagt

SEQ ID NO: 5045 - DNA, 201 bp, Homo sapiens
cggactgcaaagcctgtaactgcagtgggttagggagcaaaaatgaggatccttgttttggcccctgtatctgcaaggaaaatgttgaaggaggagactgyagtcgttgcaaatccggcttcttcaatttgcaagaggataattggaaaggctgcgatgagtgtttctgttcaggggtttcaaacagatgtcagagttcct

SEQ ID NO: 5046 - DNA, 201 bp, Homo sapiens
gcgtacaggcgcagcggccgcagcagcagcggcagtcacaggcacatcagcaaagaggtttattccctgctgtcctgaatcttgcttctaatgctcttatyacgaccaatgcaacatgtggagaaaaaggacctgaaatgtactgcaaattggtagaacatgtccctgggcagcctgtgaggaacccgcagtgtcgaatct

SEQ ID NO: 5047 - DNA, 201 bp, Homo sapiens
cacaagagcaaagtccctgggagaattcattaaggagcttgcccgggatgcagaagctgtaaatgaaaaagctataaaactaaatgaaactctaggaactygagacgaggcctttgagagaaatttggaagggcttcagaaagagattgaccagatgattaaagaactgaggaggaaaaatctagagacacaaaaggaaat

SEQ ID NO: 5048 - DNA, 201 bp, Homo sapiens
gcaaaggatgcactgtcagtcctcaggtggaagatagtgaggggactattcaatttgatggagaaggttatgcattggtcagccgtcccattcgctggtamcccaacatctccactgtcatgttcaagttcagaacattttcttcgagtgctcttctgatgtatcttgccacacgagacctgagagatttcatgagtgtgg

SEQ ID NO: 5049 - DNA, 201 bp, Homo sapiens
ggcacgaacaatgaggaaaattgtgatcagaccagagccaaatctgtttcatgatggaagagaacattccgttcatgtagagcgaactagaggcatctttrcagttcaagtggatgaaaacagaagatacatgcaaaacctgacagttgaacagcctatcgaagttaaaaagcttttcgttgggggtgctccacctgaatt

SEQ ID NO: 5050 - DNA, 201 bp, Homo sapiens
tctgtgctgatggatattttggagatgcagttgatgcgaagaactgtcagccctgtcgctgtaatgccggtggctctttctctgaggtttgccacagtcaractggacagtgtgagtgcagagccaacgttcagggtcagagatgtgacaaatgcaaggctgggacctttggcctacaatcagcaaggggctgtgttccct

SEQ ID NO: 5051 - DNA, 201 bp, Homo sapiens
tgatgaggctaaaaacatctccttcaatgccactgcagccttcaaagcttacagcaatattaaggactatattgatgaagctgagaaagttgccaaagaarccaaagatcttgcacatgaagctacaaaactggcaacaggtcctcggggtttattaaaggaagatgccaaaggctgtcttcagaaaagcttcaggattct

SEQ ID NO: 5052 - DNA, 201 bp, Homo sapiens
tgttccagatcgcgtatgtgattgtgaaggcagctaactccccccggcctggaaactggattttggaacgctctcttgatgatgttgaatacaagccctgrcagtatcatgctgtgacagacacggagtgcctaacgctttacaatatttatccccgcactgggccaccgtcatatgccaaagatgatgaggtcatctgca

SEQ ID NO: 5053 - DNA, 201 bp, Homo sapiens
tgctcctctgattggccaattgacaaggcatgaaattgaaatgacagagaaagaatggaaatattatggggatgatcctcgagtccatagaactgtgaccygagaagacttcttggatatactatatgatattcattacattcttatcaaagctacttatggaaatttcatgcgacaaagcaggatttctgaaatctcaat

SEQ ID NO: 5054 - DNA, 201 bp, Homo sapiens
ttttgagagaagccacagataaaatcagagaagctaatcgcctatttgcagtaaatcagaaaaacatgactgcattggagaaaaagaaggaggctgttgaragcggcaaacgacaaattgagaacactttaaaagagggcaatgacatactcgatgaagccaaccgtcttgcagatgaaatcaactccatcatagactatg

SEQ ID NO: 5055 - DNA, 201 bp, Homo sapiens
tggattgatctgtgatggatgccctgtcgggtacacaggaccacgctgtgagaggtgtgcagaaggctattttggacaaccctctgtacctggaggatcaygtcagccatgccaatgcaatgacaaccttgacttctccatccctggcagctgtgacagcttgtctggctcctgtctgatatgtaaaccaggtacaacagg

SEQ ID NO: 5056 - DNA, 201 bp, Homo sapiens
acacagctaaagatgtactggcacagattacagagctccaccagaacctcgatggcctgaagaagaattacaataaactagcagacagcgtcgccaaaacraatgctgtggttaaagatccttccaagaacattgccgatgcagatgccactgtcaaaaatttagaacaggaagctgaccggctaatagataaactcaaac

SEQ ID NO: 5057 - DNA, 201 bp, Homo sapiens
gatcagcatcagtaacgcggaggcccggcaagccctgccgcacagctactactggagcgcgccggctccctatctgggaaacaaactcccagcagtaggargacagttgacatttaccatatcatatgaccttgaagaagaggaagaagatacagaacgtgttctccagcttatgattatcttagagggtaatgacttgag

SEQ ID NO: 5058 - DNA, 201 bp, Homo sapiens
accagagacacccgattacaaatgctattgatggaaagaacacttggtggcagagtcccagtattaagaatggaatcgaataccattatgtgacaattacmctggatttacagcaggtgttccagatcgcgtatgtgattgtgaaggcagctaactccccccggcctggaaactggattttggaacgctctcttgatgatg

SEQ ID NO: 5059 - DNA, 201 bp, Homo sapiens
agtgtttctgttcaggggtttcaaacagatgtcagagttcctactggacctatggcaaaatacaagatatgagtggctggtatctgactgaccttcctggycgcattcgagtggctccccagcaggacgacttggactcacctcagcagatcagcatcagtaacgcggaggcccggcaagccctgccgcacagctactact

SEQ ID NO: 5060 - DNA, 201 bp, Homo sapiens
gacctttggcctacaatcagcaaggggctgtgttccctgcaactgcaattcttttgggtctaagtcattcgactgtgaagagagtggacaatgttggtgcyaacctggagtcacagggaagaaatgtgaccgctgtgcccacggctatttcaacttccaagaaggaggctgcacagcttgtgaatgttctcatctgggtaa

SEQ ID NO: 5061 - DNA, 201 bp, Homo sapiens
ctgaaatgtactgcaaattggtagaacatgtccctgggcagcctgtgaggaacccgcagtgtcgaatctgcaatcaaaacagcagcaatccaaaccagagmcacccgattacaaatgctattgatggaaagaacacttggtggcagagtcccagtattaagaatggaatcgaataccattatgtgacaattacactggatt

SEQ ID NO: 5062 - DNA, 201 bp, Homo sapiens
tggaactgaggggcgttcaacctgtatcatgcccagccaactaataaaaataagtgtaaccccaggaagagtctgtcaaaacaagtatatcaagtaaaacmaacaaatatattttacctatatatgttaattaaactaatttgtgcatgtacatagaattctttctgtattcagatggtgctaattcagactccagactga

SEQ ID NO: 5063 - DNA, 201 bp, Homo sapiens
atcgcctatttgcagtaaatcagaaaaacatgactgcattggagaaaaagaaggaggctgttgaaagcggcaaacgacaaattgagaacactttaaaagarggcaatgacatactcgatgaagccaaccgtcttgcagatgaaatcaactccatcatagactatgttgaagacatccaaactaaattgccacctatgtctg

SEQ ID NO: 5064 - DNA, 201 bp, Homo sapiens
atactggcagtccaggcaaccctggaggctcctgccaagaatgtgagtgtgatccctatggctcactgcctgtgccctgtgaccctgtcacaggattctgmacgtgccgacctggagccacgggaaggaagtgtgacggctgcaagcactggcatgcacgcgagggctgggagtgtgttttttgtggagatgagtgcactg

SEQ ID NO: 5065 - DNA, 201 bp, Homo sapiens
acaccccttagaaaatggagagattcacatctctttaatcaatgggagaccaagtgccgatgatccttctccagaactgctagaatttacctccgctcgcyatattcgcctgagatttcagaggatccgcacactgaatgctgacttgatgatgtttgctcacaaagacccaagagaaattgaccccattgtcaccagaag

SEQ ID NO: 5066 - DNA, 201 bp, Homo sapiens
ttgaaaatatgactcaggagctaaagcacttgctgtcacctcagcgggccccagagaggcttattcagctggcagagggcaatctgaatacactcgtgacmgaaatgaacgagctgctgaccagggctaccaaagtgacagcagatggcgagcagaccggacaggatgctgagaggaccaacacaagagcaaagtccctgg

SEQ ID NO: 5067 - DNA, 201 bp, Homo sapiens
tctctgtgactgcttcctccctgggacagatgccacaacctgtgattcagagactaaaaaatgctcctgtagtgatcaaactgggcagtgcacttgtaagrtgaatgtggaaggcatccactgtgacagatgccggcctggcaaattcggactcgatgccaagaatccacttggctgcagcagctgctattgcttcggcac

SEQ ID NO: 5068 - DNA, 201 bp, Homo sapiens
gaaatattcctccttttgaaggctgcatatggaatcttgttattaactctgtccccatggactttgcaaggcctgtgtccttcaaaaatgctgacattggwcgctgtgcccatcagaaactccgtgaagatgaagatggagcagctccagctgaaatagttatccagcctgagccagttcccaccccagcctttcctacgc

SEQ ID NO: 5069 - DNA, 201 bp, Homo sapiens
tgtctgatatgtaaaccaggtacaacaggccggtactgtgagctctgtgctgatggatattttggagatgcagttgatgcgaagaactgtcagccctgtckctgtaatgccggtggctctttctctgaggtttgccacagtcaaactggacagtgtgagtgcagagccaacgttcagggtcagagatgtgacaaatgcaag

SEQ ID NO: 5070 - DNA, 201 bp, Homo sapiens
taaagcacttgctgtcacctcagcgggccccagagaggcttattcagctggcagagggcaatctgaatacactcgtgaccgaaatgaacgagctgctgacsagggctaccaaagtgacagcagatggcgagcagaccggacaggatgctgagaggaccaacacaagagcaaagtccctgggagaattcattaaggagcttg

SEQ ID NO: 5071 - DNA, 201 bp, Homo sapiens
aactttagcccaacgtgccatttagaccggagtcttggattgatctgtgatggatgccctgtcgggtacacaggaccacgctgtgagaggtgtgcagaagrctattttggacaaccctctgtacctggaggatcatgtcagccatgccaatgcaatgacaaccttgacttctccatccctggcagctgtgacagcttgtct

SEQ ID NO: 5072 - DNA, 201 bp, Homo sapiens
gcgccggctccctatctgggaaacaaactcccagcagtaggaggacagttgacatttaccatatcatatgaccttgaagaagaggaagaagatacagaacrtgttctccagcttatgattatcttagagggtaatgacttgagcatcagcacagcccaagatgaggtgtacctgcacccatctgaagaacatactaatgta

SEQ ID NO: 5073 - DNA, 201 bp, Homo sapiens
tactacccagtgctctgaagcaaaaggactgatccggacgtgggtgactctgaaggctgagcagaccattctacccctggtagatgaggctctgcagcacrcgaccaccaagggcattgtttttcaacatccagagattgttgcccacatggacctgatgagagaagatctccatttggaacctttttattggaaacttcc

SEQ ID NO: 5074 - DNA, 201 bp, Homo sapiens
aaacccagcatctacatcagctgacacaaatgaccctgtgtttgttggaggcttcccagatgacctcaagcagtttggcctaacaaccagtattccgttcygaggttgcatcagatccctgaagctcaccaaaggcacaggcaagccactggaggttaattttgccaaggccctggaactgaggggcgttcaacctgtatc

SEQ ID NO: 5075 - DNA, 201 bp, Homo sapiens
cagtccaggcaaccctggaggctcctgccaagaatgtgagtgtgatccctatggctcactgcctgtgccctgtgaccctgtcacaggattctgcacgtgcygacctggagccacgggaaggaagtgtgacggctgcaagcactggcatgcacgcgagggctgggagtgtgttttttgtggagatgagtgcactggccttct

SEQ ID NO: 5076 - DNA, 201 bp, Homo sapiens
ctgtgacagatgccggcctggcaaattcggactcgatgccaagaatccacttggctgcagcagctgctattgcttcggcactactacccagtgctctgaarcaaaaggactgatccggacgtgggtgactctgaaggctgagcagaccattctacccctggtagatgaggctctgcagcacacgaccaccaagggcattgt

SEQ ID NO: 5077 - DNA, 201 bp, Homo sapiens
tttcctaagcctggttttgtggagctctcccctgtgccaattgatgtaggaacagaaatcaacctgtcattcagcaccaagaatgagtccggcatcattcytttgggaagtggagggacaccagcaccacctaggagaaaacgaaggcagactggacaggcctattatgcaatactcctcaacaggggccgtctggaagtg

SEQ ID NO: 5078 - DNA, 201 bp, Homo sapiens; identical to SEQ ID NO: 5022

SEQ ID NO: 5079 - DNA, 201 bp, Homo sapiens; identical to SEQ ID NO: 5023

SEQ ID NO: 5080 - DNA, 201 bp, Homo sapiens; identical to SEQ ID NO: 5024

SEQ ID NO: 5081 - DNA, 201 bp, Homo sapiens; identical to SEQ ID NO: 5026

SEQ ID NO: 5082 - DNA, 201 bp, Homo sapiens; identical to SEQ ID NO: 5025

SEQ ID NO: 5083 - DNA, 201 bp, Homo sapiens; identical to SEQ ID NO: 5027

SEQ ID NO: 5084 - DNA, 201 bp, Homo sapiens; identical to SEQ ID NO: 5028

SEQ ID NO: 5085 - DNA, 201 bp, Homo sapiens; identical to SEQ ID NO: 5029

SEQ ID NO: 5086 - DNA, 151 bp, Homo sapiens; identical to SEQ ID NO: 5030

SEQ ID NO: 5087 - DNA, 122 bp, Homo sapiens; identical to SEQ ID NO: 5031

SEQ ID NO: 5088 - DNA, 201 bp, Homo sapiens; identical to SEQ ID NO: 5032

SEQ ID NO: 5089 - DNA, 123 bp, Homo sapiens; identical to SEQ ID NO: 5033

SEQ ID NO: 5090 - DNA, 201 bp, Homo sapiens; identical to SEQ ID NO: 5034

SEQ ID NO: 5091 - DNA, 124 bp, Homo sapiens; identical to SEQ ID NO: 5035

SEQ ID NO: 5092 - DNA, 201 bp, Homo sapiens; identical to SEQ ID NO: 5036

SEQ ID NO: 5093 - DNA, 201 bp, Homo sapiens; identical to SEQ ID NO: 5037

SEQ ID NO: 5094 - DNA, 199 bp, Homo sapiens; identical to SEQ ID NO: 5038

SEQ ID NO: 5095 - DNA, 201 bp, Homo sapiens; identical to SEQ ID NO: 5040

SEQ ID NO: 5096 - DNA, 201 bp, Homo sapiens; identical to SEQ ID NO: 5039

SEQ ID NO: 5097 - DNA, 201 bp, Homo sapiens; identical to SEQ ID NO: 5041

SEQ ID NO: 5098 - DNA, 201 bp, Homo sapiens; identical to SEQ ID NO: 5042

SEQ ID NO: 5099 - DNA, 201 bp, Homo sapiens; identical to SEQ ID NO: 5043

SEQ ID NO: 5100 - DNA, 201 bp, Homo sapiens
atcaggaggagaatatagcaacttcgtcttctggaaacaactttggtcttgacttgaaagcagatgacaaaatatattttggtggcctgccaacgctgagwaacttgaggccagaagtaaatctgaagaaatattccggctgcctcaaagatattgaaatttcaagaactccgtacaatatactcagtagtcccgattatg

SEQ ID NO: 5101 - DNA, 201 bp, Homo sapiens; identical to SEQ ID NO: 5045

SEQ ID NO: 5102 - DNA, 201 bp, Homo sapiens; identical to SEQ ID NO: 5046

SEQ ID NO: 5103 - DNA, 201 bp, Homo sapiens; identical to SEQ ID NO: 5047

SEQ ID NO: 5104 - DNA, 201 bp, Homo sapiens; identical to SEQ ID NO: 5049

SEQ ID NO: 5105 - DNA, 201 bp, Homo sapiens; identical to SEQ ID NO: 5048

SEQ ID NO: 5106 - DNA, 201 bp, Homo sapiens; identical to SEQ ID NO: 5050

SEQ ID NO: 5107 - DNA, 201 bp, Homo sapiens; identical to SEQ ID NO: 5051

SEQ ID NO: 5108 - DNA, 201 bp, Homo sapiens; identical to SEQ ID NO: 5052

SEQ ID NO: 5109 - DNA, 201 bp, Homo sapiens; identical to SEQ ID NO: 5053

SEQ ID NO: 5110 - DNA, 201 bp, Homo sapiens; identical to SEQ ID NO: 5054

SEQ ID NO: 5111 - DNA, 201 bp, Homo sapiens; identical to SEQ ID NO: 5055

SEQ ID NO: 5112 - DNA, 201 bp, Homo sapiens; identical to SEQ ID NO: 5056

SEQ ID NO: 5113 - DNA, 201 bp, Homo sapiens; identical to SEQ ID NO: 5058

SEQ ID NO: 5114 - DNA, 201 bp, Homo sapiens; identical to SEQ ID NO: 5057

SEQ ID NO: 5115 - DNA, 201 bp, Homo sapiens; identical to SEQ ID NO: 5059

SEQ ID NO: 5116 - DNA, 201 bp, Homo sapiens; identical to SEQ ID NO: 5060

SEQ ID NO: 5117 - DNA, 201 bp, Homo sapiens; identical to SEQ ID NO: 5061

SEQ ID NO: 5118 - DNA, 201 bp, Homo sapiens; identical to SEQ ID NO: 5062

SEQ ID NO: 5119 - DNA, 201 bp, Homo sapiens; identical to SEQ ID NO: 5063

SEQ ID NO: 5120 - DNA, 201 bp, Homo sapiens; identical to SEQ ID NO: 5064

SEQ ID NO: 5121 - DNA, 201 bp, Homo sapiens; identical to SEQ ID NO: 5065

SEQ ID NO: 5122 - DNA, 201 bp, Homo sapiens; identical to SEQ ID NO: 5066

SEQ ID NO: 5123 - DNA, 201 bp, Homo sapiens; identical to SEQ ID NO: 5067

SEQ ID NO: 5124 - DNA, 201 bp, Homo sapiens; identical to SEQ ID NO: 5068

SEQ ID NO: 5125 - DNA, 201 bp, Homo sapiens; identical to SEQ ID NO: 5070

SEQ ID NO: 5126 - DNA, 201 bp, Homo sapiens; identical to SEQ ID NO: 5069

SEQ ID NO: 5127 - DNA, 201 bp, Homo sapiens; identical to SEQ ID NO: 5073

SEQ ID NO: 5128 - DNA, 201 bp, Homo sapiens; identical to SEQ ID NO: 5072

SEQ ID NO: 5129 - DNA, 201 bp, Homo sapiens; identical to SEQ ID NO: 5071

SEQ ID NO: 5130 - DNA, 201 bp, Homo sapiens; identical to SEQ ID NO: 5074

SEQ ID NO: 5131 - DNA, 201 bp, Homo sapiens; identical to SEQ ID NO: 5075

SEQ ID NO: 5132 - DNA, 201 bp, Homo sapiens; identical to SEQ ID NO: 5076

SEQ ID NO: 5133 - DNA, 201 bp, Homo sapiens; identical to SEQ ID NO: 5077

SEQ ID NO: 5134 - DNA, 201 bp, Homo sapiens; identical to SEQ ID NO: 5022

SEQ ID NO: 5135 - DNA, 201 bp, Homo sapiens; identical to SEQ ID NO: 5023

SEQ ID NO: 5136 - DNA, 201 bp, Homo sapiens; identical to SEQ ID NO: 5024

SEQ ID NO: 5137 - DNA, 201 bp, Homo sapiens; identical to SEQ ID NO: 5025

SEQ ID NO: 5138 - DNA, 201 bp, Homo sapiens; identical to SEQ ID NO: 5026

SEQ ID NO: 5139 - DNA, 201 bp, Homo sapiens; identical to SEQ ID NO: 5027

SEQ ID NO: 5140 - DNA, 201 bp, Homo sapiens; identical to SEQ ID NO: 5028

SEQ ID NO: 5141 - DNA, 201 bp, Homo sapiens; identical to SEQ ID NO: 5029

SEQ ID NO: 5142 - DNA, 151 bp, Homo sapiens; identical to SEQ ID NO: 5030

SEQ ID NO: 5143 - DNA, 122 bp, Homo sapiens; identical to SEQ ID NO: 5031

SEQ ID NO: 5144 - DNA, 201 bp, Homo sapiens; identical to SEQ ID NO: 5032

SEQ ID NO: 5145 - DNA, 123 bp, Homo sapiens; identical to SEQ ID NO: 5033

SEQ ID NO: 5146 - DNA, 201 bp, Homo sapiens; identical to SEQ ID NO: 5034

SEQ ID NO: 5147 - DNA, 124 bp, Homo sapiens; identical to SEQ ID NO: 5035

SEQ ID NO: 5148 - DNA, 201 bp, Homo sapiens; identical to SEQ ID NO: 5036

SEQ ID NO: 5149 - DNA, 201 bp, Homo sapiens; identical to SEQ ID NO: 5037

SEQ ID NO: 5150 - DNA, 199 bp, Homo sapiens; identical to SEQ ID NO: 5038

SEQ ID NO: 5151 - DNA, 201 bp, Homo sapiens; identical to SEQ ID NO: 5039

SEQ ID NO: 5152 - DNA, 201 bp, Homo sapiens; identical to SEQ ID NO: 5040

SEQ ID NO: 5153 - DNA, 201 bp, Homo sapiens; identical to SEQ ID NO: 5041

SEQ ID NO: 5154 - DNA, 201 bp, Homo sapiens; identical to SEQ ID NO: 5042

SEQ ID NO: 5155 - DNA, 201 bp, Homo sapiens; identical to SEQ ID NO: 5043

SEQ ID NO: 5156 - DNA, 201 bp, Homo sapiens; identical to SEQ ID NO: 5044

SEQ ID NO: 5157 - DNA, 201 bp, Homo sapiens; identical to SEQ ID NO: 5045

SEQ ID NO: 5158 - DNA, 201 bp, Homo sapiens; identical to SEQ ID NO: 5046

SEQ ID NO: 5159 - DNA, 201 bp, Homo sapiens; identical to SEQ ID NO: 5047

SEQ ID NO: 5160 - DNA, 201 bp, Homo sapiens; identical to SEQ ID NO: 5049

SEQ ID NO: 5161 - DNA, 201 bp, Homo sapiens; identical to SEQ ID NO: 5048

SEQ ID NO: 5162 - DNA, 201 bp, Homo sapiens; identical to SEQ ID NO: 5050

SEQ ID NO: 5163 - DNA, 201 bp, Homo sapiens; identical to SEQ ID NO: 5051

SEQ ID NO: 5164 - DNA, 201 bp, Homo sapiens; identical to SEQ ID NO: 5052

SEQ ID NO: 5165 - DNA, 201 bp, Homo sapiens; identical to SEQ ID NO: 5054

SEQ ID NO: 5166 - DNA, 201 bp, Homo sapiens; identical to SEQ ID NO: 5053

SEQ ID NO: 5167 - DNA, 201 bp, Homo sapiens; identical to SEQ ID NO: 5055

SEQ ID NO: 5168 - DNA, 201 bp, Homo sapiens
acacagctaaagatgtactggcacagattacagagctccaccagaacctcgatggcctgaagaagaattacaataaactagcagacagcgtcgccaaaacraatgctgtggttaaagatccttccaagaacattctatgcagttgccgatgcagatgccactgtcaaaaatttagaacaggaagctgaccggctaatagat

SEQ ID NO: 5169 - DNA, 201 bp, Homo sapiens; identical to SEQ ID NO: 5057

SEQ ID NO: 5170 - DNA, 201 bp, Homo sapiens; identical to SEQ ID NO: 5058

SEQ ID NO: 5171 - DNA, 201 bp, Homo sapiens; identical to SEQ ID NO: 5059

SEQ ID NO: 5172 - DNA, 201 bp, Homo sapiens; identical to SEQ ID NO: 5060

SEQ ID NO: 5173 - DNA, 201 bp, Homo sapiens; identical to SEQ ID NO: 5061

SEQ ID NO: 5174 - DNA, 201 bp, Homo sapiens; identical to SEQ ID NO: 5062

SEQ ID NO: 5175 - DNA, 201 bp, Homo sapiens; identical to SEQ ID NO: 5063

SEQ ID NO: 5176 - DNA, 201 bp, Homo sapiens; identical to SEQ ID NO: 5064

SEQ ID NO: 5177 - DNA, 201 bp, Homo sapiens; identical to SEQ ID NO: 5065

SEQ ID NO: 5178 - DNA, 201 bp, Homo sapiens; identical to SEQ ID NO: 5066

SEQ ID NO: 5179 - DNA, 201 bp, Homo sapiens; identical to SEQ ID NO: 5067

SEQ ID NO: 5180 - DNA, 201 bp, Homo sapiens; identical to SEQ ID NO: 5068

SEQ ID NO: 5181 - DNA, 201 bp, Homo sapiens; identical to SEQ ID NO: 5069

SEQ ID NO: 5182 - DNA, 201 bp, Homo sapiens; identical to SEQ ID NO: 5070

SEQ ID NO: 5183 - DNA, 201 bp, Homo sapiens; identical to SEQ ID NO: 5071

SEQ ID NO: 5184 - DNA, 201 bp, Homo sapiens; identical to SEQ ID NO: 5072

SEQ ID NO: 5185 - DNA, 201 bp, Homo sapiens; identical to SEQ ID NO: 5073

SEQ ID NO: 5186 - DNA, 201 bp, Homo sapiens; identical to SEQ ID NO: 5074

SEQ ID NO: 5187 - DNA, 201 bp, Homo sapiens; identical to SEQ ID NO: 5075

SEQ ID NO: 5188 - DNA, 201 bp, Homo sapiens; identical to SEQ ID NO: 5076

SEQ ID NO: 5189 - DNA, 201 bp, Homo sapiens; identical to SEQ ID NO: 5077

SEQ ID NO: 5190 - DNA, 201 bp, Homo sapiens
aagcaggctgatactacacagtatgtccccatgctagaaaggaaagaggtttctaaatattccgacatccagagatcactctatgatcgtccagcctcatrtaagaagaaatctatgttagactcagaagtcaaaaacctcctttcagatgataactcagaaggccttactttattggatttgttgagcttcacctatcaa

SEQ ID NO: 5191 - DNA, 201 bp, Homo sapiens
ccacggtgaaagacagtggagattacgaatgtgctgcccgccaggctaccagggaggtcaaagaaatgaagaaagtcactatttctgtccatgagaaaggkttcattgaaatcaaacccaccttcagccagttggaagctgtcaacctgcatgaagtcaaacattttgttgtagaggtgcgggcctacccacctcccagga

SEQ ID NO: 5192 - DNA, 201 bp, Homo sapiens
tattgagtggatgatatgcaaagatattaagaaatgtaataatgaaacttcctggactattttggccaacaatgtctcaaacatcatcacggagatccacycccgagacaggagtaccgtggagggccgtgtgactttcgccaaagtggaggagaccatcgccgtgcgatgcctggctaagaatctccttggagctgagaa

SEQ ID NO: 5193 - DNA, 201 bp, Homo sapiens
tctctgagatgctttggggagagtgaagtgagctggcagtaccccatgtctgaagaagagagctccgatgtggaaatcagaaatgaagaaaacaacagcgrcctttttgtgacggtcttggaagtgagcagtgcctcggcggcccacacagggttgtacacttgctattacaaccacactcagacagaagagaatgagctt

SEQ ID NO: 5194 - DNA, 201 bp, Homo sapiens
aaaatgaaaaggttgtgcagctgaattcatccttttctctgagatgctttggggagagtgaagtgagctggcagtaccccatgtctgaagaagagagctcygatgtggaaatcagaaatgaagaaaacaacagcggcctttttgtgacggtcttggaagtgagcagtgcctcggcggcccacacagggttgtacacttgct

SEQ ID NO: 5195 - DNA, 201 bp, Homo sapiens
gaaccctgctgatgaaagcacacggagctatgttattttatcttttgaaaacaatggtgactacatggacatgaagcaggctgatactacacagtatgtcyccatgctagaaaggaaagaggtttctaaatattccgacatccagagatcactctatgatcgtccagcctcatataagaagaaatctatgttagactcaga

SEQ ID NO: 5196 - DNA, 201 bp, Homo sapiens
  misc_feature (1)...(201): n = A,T,C or G, or insertion/deletion polymorphism (see Tables 1-2)
ctttattggatttgttgagcttcacctatcaagttgcccgaggaatggagtttttggcttcaaaaaattgtgtccaccgtgatctggctgctcgcaacgtnctcctggcacaaggaaaaattgtgaagatctgtgactttggcctggccagagacatcatgcatgattcgaactatgtgtcgaaaggcagtacctttctgc

SEQ ID NO: 5197 - DNA, 201 bp, Homo sapiens
cctacgacagcagacagggctttaatgggaccttcactgtagggccctatatctgtgaggccaccgtcaaaggaaagaagttccagaccatcccatttaaygtttatgctttaaaagcaacatcagagctggatctagaaatggaagctcttaaaaccgtgtataagtcaggggaaacgattgtggtcacctgtgctgttt

SEQ ID NO: 5198 - DNA, 201 bp, Homo sapiens
taaaacaatccttactaagtaggtgatgagtttgacagtttttgacatttatattaaataacatgtttctctataaagtatggtaatagctttagtgaatyaaatttagttgagcatagagaacaaagtaaaagtagtgttgtccaggaagtcagaatttttaactgtactgaataggttccccaatccatcgtattaaaa

SEQ ID NO: 5199 - DNA, 201 bp, Homo sapiens
ggtgaactttgtgcttcaaggacattggtgagagtccaacagacacaatttatactgcgacagaacttcagcattgtaattatgtaaataactctaaccamggctgtgtttagattgtattaactatcttctttggacttctgaagagaccactcaatccatccatgtacttccctcttgaaacctgatgtcagctgctgt

SEQ ID NO: 5200 - DNA, 201 bp, Homo sapiens
tgttggtgattgtgatcatctcacttattgtcctggttgtcatttggaaacagaaaccgaggtatgaaattcgctggagggtcattgaatcaatcagcccrgatggacatgaatatatttatgtggacccgatgcagctgccttatgactcaagatgggagtttccaagagatggactagtgcttggtcgggtcttggggt

SEQ ID NO: 5201 - DNA, 201 bp, Homo sapiens
cctacccacctcccaggatatcctggctgaaaaacaatctgactctgattgaaaatctcactgagatcaccactgatgtggaaaagattcaggaaataagstatcgaagcaaattaaagctgatccgtgctaaggaagaagacagtggccattatactattgtagctcaaaatgaagatgctgtgaagagctatacttttg

SEQ ID NO: 5202 - DNA, 201 bp, Homo sapiens
gctcgcagacctctgaagagagtgccattgagacgggttccagcagttccaccttcatcaagagagaggacgagaccattgaagacatcgacatgatggaygacatcggcatagactcttcagacctggtggaagacagcttcctgtaactggcggattcgaggggttccttccacttctggggccacctctggatcccgt

SEQ ID NO: 5203 - DNA, 201 bp, Homo sapiens
tggtggaagacagcttcctgtaactggcggattcgaggggttccttccacttctggggccacctctggatcccgttcagaaaaccactttattgcaatgcrgaggttgagaggaggacttggttgatgtttaaagagaagttcccagccaagggcctcggggagcgttctaaatatgaatgaatgggatattttgaaatga

SEQ ID NO: 5204 - DNA, 201 bp, Homo sapiens
ctccctggctgttctgatcggccagttttcggaaacactgacttaggtttcaggaagttgccatgggaaacaaataatttgaactttggaacagggttggmattcaaccacgcaggaagcctactatttaaatccttggcttcaggttagtgacatttaatgccatctagctagcaattgcgaccttaatttaactttcca

SEQ ID NO: 5205 - DNA, 201 bp, Homo sapiens
attgtagctcaaaatgaagatgctgtgaagagctatacttttgaactgttaactcaagttccttcatccattctggacttggtcgatgatcaccatggctyaactgggggacagacggtgaggtgcacagctgaaggcacgccgcttcctgatattgagtggatgatatgcaaagatattaagaaatgtaataatgaaact

SEQ ID NO: 5206 - DNA, 143 bp, Homo sapiens
cctacgacagcagacagggctttaatgggaccttcactgtagggccctatatctgtgaggccaccgtcaaaggaaagaagttccagaccatcccatttaaygtttatgctttaaaaggtacttgtatcatctccttccttctt

SEQ ID NO: 5207 - DNA, 201 bp, Homo sapiens; identical to SEQ ID NO: 5193

SEQ ID NO: 5208 - DNA, 201 bp, Homo sapiens; identical to SEQ ID NO: 5194

SEQ ID NO: 5209 - DNA, 159 bp, Homo sapiens
tacaatcccaacactttgggaggctgaggaaggggcatcacttgaaccaggagttcagtactaacctgggcaacaaagaggcccctgtctctgataaaaaraaaaaaaatgaaaaaataaaaatgaacaggtataaaaagagaatatggtacaaagtca

SEQ ID NO: 5210 - DNA, 201 bp, Homo sapiens
ttggcggctgatcctggactgggtaccttacatcaatggcaagtttaagaaggataattaattacacaaacccttcacagactgctctggtgcctggtggygctagctcctcccacctcagcacctgctgcatctggagcagcccaagcctcaggatggacaagaggaaacccacagctcagcttcaggcttcttatgttt

SEQ ID NO: 5211 - DNA, 201 bp, Homo sapiens
ttcacagactgctctggtgcctggtggtgctagctcctcccacctcagcacctgctgcatctggagcagcccaagcctcaggatggacaagaggaaacccmcagctcagcttcaggcttcttatgtttctgaaaacagcttggatattttaatgcacgttgcattaaacctcactgaaacctgctccgtgcccggatgttg

SEQ ID NO: 5212 - DNA, 201 bp, Homo sapiens
cctggtggtgctagctcctcccacctcagcacctgctgcatctggagcagcccaagcctcaggatggacaagaggaaacccacagctcagcttcaggcttyttatgtttctgaaaacagcttggatattttaatgcacgttgcattaaacctcactgaaacctgctccgtgcccggatgttgatcatgctggtggcttggt

SEQ ID NO: 5213 - DNA, 201 bp, Homo sapiens
caatggcaagtttaagaaggataattaattacacaaacccttcacagactgctctggtgcctggtggtgctagctcctcccacctcagcacctgctgcatytggagcagcccaagcctcaggatggacaagaggaaacccacagctcagcttcaggcttcttatgtttctgaaaacagcttggatattttaatgcacgttg

SEQ ID NO: 5214 - DNA, 201 bp, Homo sapiens
ttttgaagggaagaatatcagaattggtagacatttcaaactgtcacattagggatacaaaaatgaacaggctgggagtggtggctcagcctacaatcccracactttgggaggctgaggaaggggcatcacttgaaccaggagttcagtactaacctgggcaacaaagaggcccctgtctctgataaaaagaaaaaaaat

SEQ ID NO: 5215 - DNA, 201 bp, Homo sapiens
tggacaagaggaaacccacagctcagcttcaggcttcttatgtttctgaaaacagcttggatattttaatgcacgttgcattaaacctcactgaaacctgmtccgtgcccggatgttgatcatgctggtggcttggttactgtgactgtagctggagtggcacaggtgacccaggcgtcctttcagctccagaatgttgca

SEQ ID NO: 5216 - DNA, 201 bp, Homo sapiens
ccaaagtgctgggattagaggcgtgagccactgcacccagcctggaagggacacttctactcaccctgcctcgtctgctctccctccaggtgcctggtggygctagctcctcccacctcagcacctgctgcatctggagcagcccaagcctcaggatggacaagaggaaacccacagctcagcttcaggcttcttatgttt

SEQ ID NO: 5217 - DNA, 201 bp, Homo sapiens
tctgctctccctccaggtgcctggtggtgctagctcctcccacctcagcacctgctgcatctggagcagcccaagcctcaggatggacaagaggaaacccmcagctcagcttcaggcttcttatgtttctgaaaacagcttggatattttaatgcacgttgcattaaacctcactgaaacctgctccgtgcccggatgttg

SEQ ID NO: 5218 - DNA, 201 bp, Homo sapiens; identical to SEQ ID NO: 5212

SEQ ID NO: 5219 - DNA, 201 bp, Homo sapiens
cacccagcctggaagggacacttctactcaccctgcctcgtctgctctccctccaggtgcctggtggtgctagctcctcccacctcagcacctgctgcatytggagcagcccaagcctcaggatggacaagaggaaacccacagctcagcttcaggcttcttatgtttctgaaaacagcttggatattttaatgcacgttg

SEQ ID NO: 5220 - DNA, 191 bp, Homo sapiens
ttttgaagggaagaatatcagaattggtagacatttcaaactgtcacattagggatacaaaaatgaacaggctgggagtggtggctcagcctacaatcccracactttgggaggctgaggaaggggcatcacttgaaccaggagttcagtactaacctgggcaacaaagaggcccctgtctctgataaaaa

SEQ ID NO: 5221 - DNA, 201 bp, Homo sapiens; identical to SEQ ID NO: 5215

SEQ ID NO: 5222 - DNA, 201 bp, Homo sapiens
agaaggacgccaactccgacttctcctcctacgccgactcgctctggtgggggacgattacattgacaaccatcggctatggtgacaagacaccgcacacrtggctgggcagggtcctggctgctggcttcgccttactgggcatctctttctttgccctgcctgccggcatcctaggctccggctttgccctgaaggtcc

SEQ ID NO: 5223 - DNA, 201 bp, Homo sapiens
gcctggtacatcgggttcctggtgctcatcttcgcctccttcctggtctacctggctgagaaggacgccaactccgacttctcctcctacgccgactcgcwctggtgggggacgattacattgacaaccatcggctatggtgacaagacaccgcacacatggctgggcagggtcctggctgctggcttcgccttactgggc

SEQ ID NO: 5224 - DNA, 201 bp, Homo sapiens
tgctgggctcagtggtctacgcgcatagcaaggagctgatcaccgcctggtacatcgggttcctggtgctcatcttcgcctccttcctggtctacctggcygagaaggacgccaactccgacttctcctcctacgccgactcgctctggtgggggacgattacattgacaaccatcggctatggtgacaagacaccgcaca

SEQ ID NO: 5225 - DNA, 201 bp, Homo sapiens
tacatcgggttcctggtgctcatcttcgcctccttcctggtctacctggctgagaaggacgccaactccgacttctcctcctacgccgactcgctctggtsggggacgattacattgacaaccatcggctatggtgacaagacaccgcacacatggctgggcagggtcctggctgctggcttcgccttactgggcatctct

SEQ ID NO: 5226 - DNA, 201 bp, Homo sapiens
gtgctcatcttcgcctccttcctggtctacctggctgagaaggacgccaactccgacttctcctcctacgccgactcgctctggtgggggacgattacatygacaaccatcggctatggtgacaagacaccgcacacatggctgggcagggtcctggctgctggcttcgccttactgggcatctctttctttgccctgcct

SEQ ID NO: 5227 - DNA, 201 bp, Homo sapiens
cgcctccttcctggtctacctggctgagaaggacgccaactccgacttctcctcctacgccgactcgctctggtgggggacgattacattgacaaccatcdgctatggtgacaagacaccgcacacatggctgggcagggtcctggctgctggcttcgccttactgggcatctctttctttgccctgcctgccggcatcct

SEQ ID NO: 5228 - DNA, 201 bp, Homo sapiens
tgacaagacaccgcacacatggctgggcagggtcctggctgctggcttcgccttactgggcatctctttctttgccctgcctgccggcatcctaggctccrgctttgccctgaaggtccaggagcagcaccggcagaagcacttcgagaagcggaggatgccggcagccaacctcatccaggctgcctggcgcctgtactc

SEQ ID NO: 5229 - DNA, 201 bp, Homo sapiens
tgagctcacggtggacgacatcatgcctgctgtgaagacagtcatccgctccatcaggattctcaagttcctggtggccaaaaggaaattcaaggagacaytgcgaccgtacgacgtgaaggacgtcattgagcagtactcagcaggccacctggacatgctgggccggatcaagagcctgcaaactcgggtggaccaaat

SEQ ID NO: 5230 - DNA, 201 bp, Homo sapiens
gcagcacctccttctgccctggggaaagcagccggatgggcatcaaagaccgcatccgcatgggcagctcccagcggcggacgggtccttccaagcagcakctggcacctccaacaatgcccacctccccaagcagcgagcaggtgggtgaggccaccagccccaccaaggtgcaaaagagctggagcttcaatgaccgca

SEQ ID NO: 5231 - DNA, 201 bp, Homo sapiens
ggtgctcatcttcgcctccttcctggtctacctggctgagaaggacgccaactccgacttctcctcctacgccgactcgctctggtgggggacgattacaytgacaaccatcggctatggtgacaagacaccgcacacatggctgggcagggtcctggctgctggcttcgccttactgggcatctctttctttgccctgcc

SEQ ID NO: 5232 - DNA, 201 bp, Homo sapiens
cctgagtgggcgtggtacctgctgtgggtgccagcgccccttccccacctcaggagcgtgagatgccaggtcgcacagagggcagcagcagcggccgtccygcggcctctgggccccccagtgccctgcccactccatcaaggccctatgtggcccacctggcaggggcacagccccgggagtgggagcgggcgctggggc

SEQ ID NO: 5233 - DNA, 201 bp, Homo sapiens
cggtggacgacatcatgcctgctgtgaagacagtcatccgctccatcaggattctcaagttcctggtggccaaaaggaaattcaaggagacactgcgaccrtacgacgtgaaggacgtcattgagcagtactcagcaggccacctggacatgctgggccggatcaagagcctgcaaactcgggtggaccaaattgtgggtc

SEQ ID NO: 5234 - DNA, 201 bp, Homo sapiens
atgcaatgacgtgacacacttggagacatgagtgcagagccactcagccgctcctgggcctctgcagcagatgccagtggactggccttgcagggtgacgwccactaagaggaagacccccaactccatctgagcaggagaaggagctttgaagtaacccgagagctctccaggccccacccagacctttacccgctcccc

SEQ ID NO: 5235 - DNA, 139 bp, Homo sapiens
atgccaggtcgcacagagggcagcagcagcggccgtccygcggcctctgggccccccagtgccctgcccactccatcaaggccctatgtggcccacctggcaggggcacagccccgggagtgggagcgggcgctggggc

SEQ ID NO: 5236 - DNA, 201 bp, Homo sapiens
tggtggcctatgatcccgatgagagaatcgccgcccaccaggccctgcagcacccctacttccaagaacagaggaaaacagagaagcgggctctgggcagycacagaaaagctggctttccggagcaccctgtggcaccggaaccactcagtaacagctgccagatttccaaggagggcagaaagcagaaacagtccctaa

SEQ ID NO: 5237 - DNA, 201 bp, Homo sapiens
acaccaagcccgaccgggccaggcctgggtgatctgctgctgagacgccacggagggctggggatgcgcctgcgtccgtttcgcgctggccggggctctgrgtgctgccctgcgccctgccgcacccgcggcccgcgcagctgcctaggatgttctgggctaatatacttgtaaaaccaccgcattctagggttttctttc

SEQ ID NO: 5238 - DNA, 201 bp, Homo sapiens
agccccacgctgcagtccgtgcttggatctggaacaaatggaagagtgccggtgctgagacccttgaagtgcatccctgcgagcaagaagacagatccgcrgaaggaccttaagcctgccccgcagcagtgtcgcctgcccaccatagtgcggaaaggcggaagataactgagcagcaccgtcgtctcgacttcggaggca

SEQ ID NO: 5239 - DNA, 117 bp, Homo sapiens
tgtcccttcccagcgctgctggtcagtcgtggagcgccatcatgtcttaccagtgacgctgctgacacccctgacttttattaaagaataagctgtcgttrcagtattgcattttaa

SEQ ID NO: 5240 - DNA, 201 bp, Homo sapiens
tggccggggctctgggtgctgccctgcgccctgccgcacccgcggcccgcgcagctgcctaggatgttctgggctaatatacttgtaaaaccaccgcattytagggttttctttcattttcgttaagaatttggggcaggaaatactttgtaactttgtatatgaatcaaaacaaacgagcaggcatttctgtgatgtgtt

SEQ ID NO: 5241 - DNA, 201 bp, Homo sapiens
accgggccccggagtgtctcctcactgatgggttctacacgtacaagatggacctgtggagcgccggctgtgtgttctacgagatcgccagtctgcagccsctctttcctggagtaaatgaactggaccaaatctcaaaaatccacgatgtcatcggcacacccgctcagaagatcctcaccaagttcaaacagtcgagag

SEQ ID NO: 5242 - DNA, 201 bp, Homo sapiens
gtcgcctgcccaccatagtgcggaaaggcggaagataactgagcagcaccgtcgtctcgacttcggaggcaacaccaagcccgaccgggccaggcctgggygatctgctgctgagacgccacggagggctggggatgcgcctgcgtccgtttcgcgctggccggggctctgggtgctgccctgcgccctgccgcacccgcg

SEQ ID NO: 5243 - DNA, 201 bp, Homo sapiens
gatcatattcacaggtatgctctcggagatttgacagctctgaaattaataaaatgtgttaacattcagattcaagaatttgaataaatgaagtgtaattytatttttcctttatactgaatgcagaaatggaatatttcacagagatgtaaaaccagaaaatatactaataaagcaggatgtcctgaaattaggggactt

SEQ ID NO: 5244 - DNA, 184 bp, Homo sapiens
ataaggagaccccatctctacaaaatatcaaaaaattacccaggtatggtggcacacacgtgtgattccagctactcgggaggctgagatgggagaatggygtgaacccgggaggcggagcttgcagtgagccgagattgcgccactgcactccagcctggacaacagagggagactccatctc

SEQ ID NO: 5245 - DNA, 196 bp, Homo sapiens
agcctaggcaacataaggagaccccatctctacaaaatatcaaaaaattacccaggtatggtggcacacacgtgtgattccagctactcgggaggctgagrtgggagaatggcgtgaacccgggaggcggagcttgcagtgagccgagattgcgccactgcactccagcctggacaacagagggagactccatctc

SEQ ID NO: 5246 - DNA, 201 bp, Homo sapiens; identical to SEQ ID NO: 5241

SEQ ID NO: 5247 - DNA, 201 bp, Homo sapiens
tggccaaatgcaaactgcattccagaaccagcgaagggtgacagactgggctgaggcagagctaggactaaccatctcgagtgatgccatctcggggccarcaaaagttttggacacggctggatcatctgaccaaactgctcaaatctttacacaattattgtcctggtattaaactttcacctgccacttccaacaaac

SEQ ID NO: 5248 - DNA, 201 bp, Homo sapiens
ccaagaacagagaacccagaacggaagcgaggatgaggcctcagccgtcctcctccccattcaaacacgttcatccctcaaccctctgctgagcacctgcrtgctgcccggccgcagtgtcacccttcttgtgtgagcctaccctcatccacccacctcaccctcctgaccttaaagaagacaccgggcagaagcacaggg

SEQ ID NO: 5249 - DNA, 152 bp, Homo sapiens
aaattacccaggtatggtggcacacacgtgtgattccagctactcgggaggctgagatgggagaatggcgtgaacccgggaggcggagcttgcagtgagcygagattgcgccactgcactccagcctggacaacagagggagactccatctc

SEQ ID NO: 5250 - DNA, 201 bp, Homo sapiens
atgaggcctcagccgtcctcctccccattcaaacacgttcatccctcaaccctctgctgagcacctgcatgctgcccggccgcagtgtcacccttcttgtrtgagcctaccctcatccacccacctcaccctcctgaccttaaagaagacaccgggcagaagcacaggggagcccagtcacaccccacactggcgggggca

SEQ ID NO: 5251 - DNA, 195 bp, Homo sapiens
gcctaggcaacataaggagaccccatctctacaaaatatcaaaaaattacccaggtatggtggcacacacgtgtgattccagctactcgggaggctgagaygggagaatggcgtgaacccgggaggcggagcttgcagtgagccgagattgcgccactgcactccagcctggacaacagagggagactccatctc

SEQ ID NO: 5252 - DNA, 201 bp, Homo sapiens; identical to SEQ ID NO: 5236

SEQ ID NO: 5253 - DNA, 201 bp, Homo sapiens
aggggtccctcttggtggtgcacgttctgtgggctgggacaggtgtagactctgcagtcataaaccattccccaccacacagggcccttagttgtgacagyggaccaccggtgcgctcagtgacagcatgaccatttattatcattgggtttttaatacaggtcgagagctatgaattttgattttccttttaaaaaggga

SEQ ID NO: 5254 - DNA, 201 bp, Homo sapiens
gctgaggctgggagttgggacttcccagggagggcctgtgggctgaggggcaagtagcacccagcggcccccacatcccagggagggagaaggtggcaaccattttggactcttctttttttgttaaattttatttcattcttctcatgtgggaaggtgatattaatcttttataggaaaggtagttttcttacattttta

SEQ ID NO: 5255 - DNA, 201 bp, Homo sapiens; identical to SEQ ID NO: 5238

SEQ ID NO: 5256 - DNA, 201 bp, Homo sapiens; identical to SEQ ID NO: 5240

SEQ ID NO: 5257 - DNA, 201 bp, Homo sapiens
accgggccccggagtgtctcctcactgatgggttctacacgtacaagatggacctgtggagcgccggctgtgtgttctacgagatcgccagtctgcagccsctctttcctggagtaaatgaactggaccaaatctcaaaaatccacgatgtcatcggcacacccgctcagaagatcctcaccaagttcaaacagtaagtat

SEQ ID NO: 5258 - DNA, 201 bp, Homo sapiens; identical to SEQ ID NO: 5237

SEQ ID NO: 5259 - DNA, 117 bp, Homo sapiens; identical to SEQ ID NO: 5239

SEQ ID NO: 5260 - DNA, 201 bp, Homo sapiens; identical to SEQ ID NO: 5242

SEQ ID NO: 5261 - DNA, 201 bp, Homo sapiens; identical to SEQ ID NO: 5237

SEQ ID NO: 5262 - DNA, 201 bp, Homo sapiens; identical to SEQ ID NO: 5238

SEQ ID NO: 5263 - DNA, 117 bp, Homo sapiens; identical to SEQ ID NO: 5239

SEQ ID NO: 5264 - DNA, 201 bp, Homo sapiens; identical to SEQ ID NO: 5240

SEQ ID NO: 5265 - DNA, 201 bp, Homo sapiens
accgggccccggagtgtctcctcactgatgggttctacacgtacaagatggacctgtggagcgccggctgtgtgttctacgagatcgccagtctgcagccsctctttcctggagtaaatgaactggaccaaatctcaaaaatccacgatgtcatcggcacacccgctcagaagatcctcaccaagttcaaacagtggccta

SEQ ID NO: 5266 - DNA, 201 bp, Homo sapiens; identical to SEQ ID NO: 5242

SEQ ID NO: 5267 - DNA, 201 bp, Homo sapiens; identical to SEQ ID NO: 5237

SEQ ID NO: 5268 - DNA, 201 bp, Homo sapiens; identical to SEQ ID NO: 5238

SEQ ID NO: 5269 - DNA, 117 bp, Homo sapiens; identical to SEQ ID NO: 5239

SEQ ID NO: 5270 - DNA, 201 bp, Homo sapiens; identical to SEQ ID NO: 5240

SEQ ID NO: 5271 - DNA, 201 bp, Homo sapiens
accgggccccggagtgtctcctcactgatgggttctacacgtacaagatggacctgtggagcgccggctgtgtgttctacgagatcgccagtctgcagccsctctttcctggagtaaatgaactggaccaaatctcaaaaatccacgatgtcatcggcacacccgctcagaagatcctcaccaagttcaaacacacgcaat

SEQ ID NO: 5272 - DNA, 201 bp, Homo sapiens; identical to SEQ ID NO: 5242

SEQ ID NO: 5273 - DNA, 201 bp, Homo sapiens
ggctgaggttgcgccactacactccagcctgggtgacagagtgagactctgcctcaaaaaaaaaaaaaaaaaaaaaaaattcactatctacaaacctagamtatttaaaatacaaagattgcctgttttcaaacactattgaataagagggtgagatatttcttaacaacaacaacaacaaaaaaaacaggttgttttgaa

SEQ ID NO: 5274 - DNA, 201 bp, Homo sapiens
ctggcggtagaatcttcccagtaggcggcgcgggagggaaaagaggattgaggggctaggccgggcggatcccgtcctcccccgatgtgagcagttttcckaaaccccgtcaggcgaaggctgcccagagaggtggagtcggtagcggggccgggaacatgaggcagtctctcctattcctgaccagcgtggttcctttcg

SEQ ID NO: 5275 - DNA, 201 bp, Homo sapiens
agctgagcatcaatacttttggaaagtttttagcagacaacatcgttgggtctgtcctggttttctccttgatattttggattcctttcagcattcttgtycattgtgtggataagaaattggataaacagtatgaatctctgtctctgtttcaccccagtaacgtcgaaatgctgagcagcatggattctgcatcggttc

SEQ ID NO: 5276 - DNA, 111 bp, Homo sapiens
tcgagcctggmggtagaatcttcccagtaggcggcgcgggagggaaaagaggattgaggggctaggccgggcggatcccgtcctcccccgatgtgagcagttttccgaaac

SEQ ID NO: 5277 - DNA, 201 bp, Homo sapiens
atgggaaatgcatccctttctgcgagagggaacagcagctggagtcctgtgcatgtaatgaaactgacaactcctgcaaggtgtgctgcagggacctttcyggccgctgtgtgccctatgtcgatgctgaacaaaagaacttatttttgaggaaaggaaagccctgtacagtaggattttgtgacatgaatggcaaatgtg

SEQ ID NO: 5278 - DNA, 201 bp, Homo sapiens
ttgacagcaaagaaacagagtgctaatttagttctcagctcttctgacttaagtgtgcaaaatatttttatagatttgacctacaaatcaatcacagcttrtattttgtgaagactgggaagtgacttagcagatgctggtcatgtgtttgaacttcctgcaggtaaacagttcttgtgtggtttggcccttctccttttg

SEQ ID NO: 5279 - DNA, 201 bp, Homo sapiens
gaaatgctgagcagcatggattctgcatcggttcgcattatcaaaccctttcctgcgccccagactccaggccgcctgcagcctgcccctgtgatcccttyggcgccagcagctccaaaactggaccaccagagaatggacaccatccaggaagaccccagcacagactcacatatggacgaggatgggtttgagaaggac

SEQ ID NO: 5280 - DNA, 201 bp, Homo sapiens
cagcgtcagaatcgtgttgacagcaaagaaacagagtgctaatttagttctcagctcttctgacttaagtgtgcaaaatatttttatagatttgacctacaaatcaatcacagcttgtattttgtgaagactgggaagtgacttagcagatgctggtcatgtgtttgaacttcctgcaggtaaacagttcttgtgtggttt

SEQ ID NO: 5281 - DNA, 201 bp, Homo sapiens
tggctgggagtggtggctcatgcctgtaatcccagcacttggagaggctgaggttgcgccactacactccagcctgggtgacagagtgagactctgcctcaaaaaaaaaaaaaaaaaaaaaaaattcactatctacaaacctagaatatttaaaatacaaagattgcctgttttcaaacactattgaataagagggtgaga

SEQ ID NO: 5282 - DNA, 140 bp, Homo sapiens
gttgggggctgtccccacaagacttgatacttcagaaaccctttttattgacccacaagcagatatttgaattacttcttactttattgctccaggattcyggatgggctgcatttactgtgtgaaggataaaaatcatt

SEQ ID NO: 5283 - DNA, 201 bp, Homo sapiens
ataaatctagtatacattgtctctaaattgtgggtctatttctagttattacccaaagtttttatgtagcagggaaaatatatatctaaatttaaaaatcrtttgggttaatatggctcttcataattctaaaactaatgctctctaaaaacctaaccacctaccttacagtgagggctatacatggtagccagttgaatt

SEQ ID NO: 5284 - DNA, 201 bp, Homo sapiens
ggctgggagtggtggctcatgcctgtaatcccagcacttggagaggctgaggttgcgccactacactccagcctgggtgacagagtgagactctgcctcaaaaaaaaaaaaaaaaaaaaaaaattcactatctacaaacctagaatatttaaaatacaaagattgcctgttttcaaacactattgaataagagggtgagat

SEQ ID NO: 5285 - DNA, 201 bp, Homo sapiens
atctgaagatatcaagaatgtttcacgtttgcagtctccaaaagtgtgtggttatttaaaagtggataatgaagagttgctcccaaaagggttagtagacrgagaaccacctgaagagcttgttcatcgagtgaaaagaagagctgacccagatcccatgaagaacacgtgtaaattattggtggtagcagatcatcgctt

SEQ ID NO: 5286 - DNA, 201 bp, Homo sapiens
aggtgaatctagcttattttgaggctttcaggttttagtttttaaaatatcttttgacctgtggtgcaaaagcagaaaatacagctggattgggttatgartatttacgtttttgtaaattaatcttttatattgataacagcactgactagggaaatgatcagtttttttttatacactgtaatgaaccgctgaatatga

SEQ ID NO: 5287 - DNA, 201 bp, Homo sapiens
agcccacataagagatgatgatgttataatcagaatcaacacagatggggccgaatataacatagagccactttggagatttgttaatgataccaaagacraaagaatgttagtttataaatctgaagatatcaagaatgtttcacgtttgcagtctccaaaagtgtgtggttatttaaaagtggataatgaagagttgct

SEQ ID NO: 5288 - DNA, 201 bp, Homo sapiens; identical to SEQ ID NO: 5273

SEQ ID NO: 5289 - DNA, 201 bp, Homo sapiens; identical to SEQ ID NO: 5274

SEQ ID NO: 5290 - DNA, 201 bp, Homo sapiens
agctgagcatcaatacttttggaaagtttttagcagacaacatcgttgggtctgtcctggttttctccttgatattttggattcctttcagcattcttgtycattgtgtgaacgtcgaaatgctgagcagcatggattctgcatcggttcgcattatcaaaccctttcctgcgccccagactccaggccgcctgcagcctg

SEQ ID NO: 5291 - DNA, 111 bp, Homo sapiens; identical to SEQ ID NO: 5276

SEQ ID NO: 5292 - DNA, 201 bp, Homo sapiens; identical to SEQ ID NO: 5277

SEQ ID NO: 5293 - DNA, 201 bp, Homo sapiens; identical to SEQ ID NO: 5278

SEQ ID NO: 5294 - DNA, 201 bp, Homo sapiens; identical to SEQ ID NO: 5279

SEQ ID NO: 5295 - DNA, 201 bp, Homo sapiens; identical to SEQ ID NO: 5280

SEQ ID NO: 5296 - DNA, 201 bp, Homo sapiens; identical to SEQ ID NO: 5281

SEQ ID NO: 5297 - DNA, 140 bp, Homo sapiens; identical to SEQ ID NO: 5282

SEQ ID NO: 5298 - DNA, 201 bp, Homo sapiens; identical to SEQ ID NO: 5283

SEQ ID NO: 5299 - DNA, 201 bp, Homo sapiens; identical to SEQ ID NO: 5284

SEQ ID NO: 5300 - DNA, 201 bp, Homo sapiens; identical to SEQ ID NO: 5285

SEQ ID NO: 5301 - DNA, 201 bp, Homo sapiens; identical to SEQ ID NO: 5286

SEQ ID NO: 5302 - DNA, 201 bp, Homo sapiens; identical to SEQ ID NO: 5287

SEQ ID NO: 5303 - DNA, 201 bp, Homo sapiens; identical to SEQ ID NO: 5274

SEQ ID NO: 5304 - DNA, 201 bp, Homo sapiens; identical to SEQ ID NO: 5275

SEQ ID NO: 5305 - DNA, 111 bp, Homo sapiens; identical to SEQ ID NO: 5276

SEQ ID NO: 5306 - DNA, 201 bp, Homo sapiens; identical to SEQ ID NO: 5277

SEQ ID NO: 5307 - DNA, 201 bp, Homo sapiens; identical to SEQ ID NO: 5278

SEQ ID NO: 5308 - DNA, 201 bp, Homo sapiens; identical to SEQ ID NO: 5279

SEQ ID NO: 5309 - DNA, 201 bp, Homo sapiens; identical to SEQ ID NO: 5280

SEQ ID NO: 5310 - DNA, 201 bp, Homo sapiens; identical to SEQ ID NO: 5283

SEQ ID NO: 5311 - DNA, 201 bp, Homo sapiens; identical to SEQ ID NO: 5285

SEQ ID NO: 5312 - DNA, 201 bp, Homo sapiens; identical to SEQ ID NO: 5286

SEQ ID NO: 5313 - DNA, 201 bp, Homo sapiens; identical to SEQ ID NO: 5287

SEQ ID NO: 5314 - DNA, 201 bp, Homo sapiens; identical to SEQ ID NO: 5274

SEQ ID NO: 5315 - DNA, 201 bp, Homo sapiens; identical to SEQ ID NO: 5275

SEQ ID NO: 5316 - DNA, 111 bp, Homo sapiens; identical to SEQ ID NO: 5276

SEQ ID NO: 5317 - DNA, 201 bp, Homo sapiens; identical to SEQ ID NO: 5277

SEQ ID NO: 5318 - DNA, 201 bp, Homo sapiens; identical to SEQ ID NO: 5278

SEQ ID NO: 5319 - DNA, 201 bp, Homo sapiens; identical to SEQ ID NO: 5279

SEQ ID NO: 5320 - DNA, 201 bp, Homo sapiens; identical to SEQ ID NO: 5280

SEQ ID NO: 5321 - DNA, 201 bp, Homo sapiens; identical to SEQ ID NO: 5283

SEQ ID NO: 5322 - DNA, 201 bp, Homo sapiens; identical to SEQ ID NO: 5285

SEQ ID NO: 5323 - DNA, 201 bp, Homo sapiens; identical to SEQ ID NO: 5286

SEQ ID NO: 5324 - DNA, 201 bp, Homo sapiens; identical to SEQ ID NO: 5287

SEQ ID NO: 5325 - DNA, 201 bp, Homo sapiens; identical to SEQ ID NO: 5274

SEQ ID NO: 5326 - DNA, 201 bp, Homo sapiens; identical to SEQ ID NO: 5290

SEQ ID NO: 5327 - DNA, 111 bp, Homo sapiens; identical to SEQ ID NO: 5276

SEQ ID NO: 5328 - DNA, 201 bp, Homo sapiens; identical to SEQ ID NO: 5277

SEQ ID NO: 5329 - DNA, 201 bp, Homo sapiens; identical to SEQ ID NO: 5278

SEQ ID NO: 5330 - DNA, 201 bp, Homo sapiens; identical to SEQ ID NO: 5279

SEQ ID NO: 5331 - DNA, 201 bp, Homo sapiens; identical to SEQ ID NO: 5280

SEQ ID NO: 5332 - DNA, 201 bp, Homo sapiens; identical to SEQ ID NO: 5283

SEQ ID NO: 5333 - DNA, 201 bp, Homo sapiens; identical to SEQ ID NO: 5285

SEQ ID NO: 5334 - DNA, 201 bp, Homo sapiens; identical to SEQ ID NO: 5286

SEQ ID NO: 5335 - DNA, 201 bp, Homo sapiens; identical to SEQ ID NO: 5287

SEQ ID NO: 5336 - DNA, 201 bp, Homo sapiens
tgcgcctccccaccccaaacttgcactggagggagatctccagtgggcatctggaattggagtggcagcacccatcgtcctgggcagcccaagagacctgytatcaactccgatacacaggagaaggccatcaggactggaaggtgctggagccgcctctcggggcccgaggagggaccctggagctgcgcccgcgatctc

SEQ ID NO: 5337 - DNA, 201 bp, Homo sapiens
gggaacttcagatcagctgggaggagccagctccagaaatcagtgatttcctgaggtacgaactccgctatggccccagagatcccaagaactccactggycccacggtcatacagctgattgccacagaaacctgctgccctgctctgcagaggcctcactcagcctctgctctggaccagtctccatgtgctcagccca

SEQ ID NO: 5338 - DNA, 201 bp, Homo sapiens
cacctcctgcctcctcctggcccctcaaaacctggcccaagtcagcagccaagatgtctccttgctggcatcagactcagagcccctgaagtgtttctccygaacatttgaggacctcacttgcttctgggatgaggaagaggcagcgcccagtgggacataccagctgctgtatgcctacccgcggagggacctcttcta

SEQ ID NO: 5339 - DNA, 201 bp, Homo sapiens
gctgctgtatgcctacccgcggagggacctcttctatgccaacagggagaagccccgtgcttgccccctgagttcccagagcatgccccactttggaaccygatacgtgtgccagtttccagaccaggaggaagtgcgtctcttctttccgctgcacctctgggtgaagaatgtgttcctaaaccagactcggactcagcg

SEQ ID NO: 5340 - DNA, 201 bp, Homo sapiens
tgcaatggcgcgatctcagctcactgcaacctccacctccgggttcaagcgattcttgtgcctcggcctccctagtagctgggattacaggcgcacaccaycacacacagctaattttttttttttttttttttttttttttttagacggagccttgctctgttgccagactggagtgcagtggcacgatctcggctcact

SEQ ID NO: 5341 - DNA, 201 bp, Homo sapiens
gccaacagggagaagccccgtgcttgccccctgagttcccagagcatgccccactttggaacccgatacgtgtgccagtttccagaccaggaggaagtgcstctcttctttccgctgcacctctgggtgaagaatgtgttcctaaaccagactcggactcagcgagtcctctttgtggacagtgtaggcctgccggctccc

SEQ ID NO: 5342 - DNA, 201 bp, Homo sapiens
ctcagcgccgtcctgggcctgctgctgctgaggtggcagtttcctgcacactacaggagactgaggcatgccctgtggccctcacttccagacctgcaccrggtcctaggccagtaccttagggacactgcagccctgagcccgcccaaggccacagtctcagatacctgtgaagaagtggaacccagcctccttgaaatc

SEQ ID NO: 5343 - DNA, 201 bp, Homo sapiens
agccaagatgtctccttgctggcatcagactcagagcccctgaagtgtttctcccgaacatttgaggacctcacttgcttctgggatgaggaagaggcagygcccagtgggacataccagctgctgtatgcctacccgcggagggacctcttctatgccaacagggagaagccccgtgcttgccccctgagttcccagagc

SEQ ID NO: 5344 - DNA, 201 bp, Homo sapiens
ggaccagtctccatgtgctcagcccacaatgccctggcaagatggaccaaagcagacctccccaagactccagcctggcaactcctactggctgcagctgygcagcgaacctgatgggatctccctcggtggctcctggggatcctggtccctccctgtgactgtggacctgcctggagatgcagtggcacttggactgca

SEQ ID NO: 5345 - DNA, 201 bp, Homo sapiens
ccctgaagtgtttctcccgaacatttgaggacctcacttgcttctgggatgaggaagaggcagcgcccagtgggacataccagctgctgtatgcctacccrcggagggacctcttctatgccaacagggagaagccccgtgcttgccccctgagttcccagagcatgccccactttggaacccgatacgtgtgccagtttc

SEQ ID NO: 5346 - DNA, 201 bp, Homo sapiens
tccccccagtatcatcaaggccatgggtgggagccagccaggggaacttcagatcagctgggaggagccagctccagaaatcagtgatttcctgaggtacraactccgctatggccccagagatcccaagaactccactggtcccacggtcatacagctgattgccacagaaacctgctgccctgctctgcagaggcctca

SEQ ID NO: 5347 - DNA, 201 bp, Homo sapiens
ttcccagagcatgccccactttggaacccgatacgtgtgccagtttccagaccaggaggaagtgcgtctcttctttccgctgcacctctgggtgaagaatrtgttcctaaaccagactcggactcagcgagtcctctttgtggacagtgtaggcctgccggctccccccagtatcatcaaggccatgggtgggagccagcc

SEQ ID NO: 5348 - DNA, 201 bp, Homo sapiens
ctcttctttccgctgcacctctgggtgaagaatgtgttcctaaaccagactcggactcagcgagtcctctttgtggacagtgtaggcctgccggctccccmcagtatcatcaaggccatgggtgggagccagccaggggaacttcagatcagctgggaggagccagctccagaaatcagtgatttcctgaggtacgaactc

SEQ ID NO: 5349 - DNA, 201 bp, Homo sapiens
cagctgggaggagccagctccagaaatcagtgatttcctgaggtacgaactccgctatggccccagagatcccaagaactccactggtcccacggtcatayagctgattgccacagaaacctgctgccctgctctgcagaggcctcactcagcctctgctctggaccagtctccatgtgctcagcccacaatgccctggca

SEQ ID NO: 5350 - DNA, 201 bp, Homo sapiens
gtttacagctgcgcgccaggctcaacggccccacctaccaaggtccctggagctcgtggtcggacccaactagggtggagaccgccaccgagaccgcctgratctccttggtgaccgctctgcatctagtgctgggcctcagcgccgtcctgggcctgctgctgctgaggtggcagtttcctgcacactacaggagactga

SEQ ID NO: 5351 - DNA, 201 bp, Homo sapiens
atgcccctgtctgtgtgcccacccatggctgagtcagggtcctgctgtaccacccacattgccaaccattcctacctaccactaagctattggcagcagcyttgaggacaggctcctcactcccagttccctggacagagctaaactctcgagacttctctgtgaacttccctaccctacccccacaacacaagcacccca

SEQ ID NO: 5352 - DNA, 201 bp, Homo sapiens
tcttcatggtcacctcctgcctcctcctggcccctcaaaacctggcccaagtcagcagccaagatgtctccttgctggcatcagactcagagcccctgaaktgtttctcccgaacatttgaggacctcacttgcttctgggatgaggaagaggcagcgcccagtgggacataccagctgctgtatgcctacccgcggaggg

SEQ ID NO: 5353 - DNA, 201 bp, Homo sapiens; identical to SEQ ID NO: 5336

SEQ ID NO: 5354 - DNA, 201 bp, Homo sapiens; identical to SEQ ID NO: 5337

SEQ ID NO: 5355 - DNA, 201 bp, Homo sapiens
cacctcctgcctcctcctggcccctcaaaacctggcccaagtcagcagccaagatgtctccttgctggcatcagactcagagcccctgaagtgtttctccygaacatttgaggacctcacttgcttctgggatgaggaagaggcagcgcccagtgggacataccagctgctgtatgcctacccgcgggagaagccccgtgc

SEQ ID NO: 5356 - DNA, 201 bp, Homo sapiens
ggcagcgcccagtgggacataccagctgctgtatgcctacccgcgggagaagccccgtgcttgccccctgagttcccagagcatgccccactttggaaccygatacgtgtgccagtttccagaccaggaggaagtgcgtctcttctttccgctgcacctctgggtgaagaatgtgttcctaaaccagactcggactcagcg

SEQ ID NO: 5357 - DNA, 201 bp, Homo sapiens; identical to SEQ ID NO: 5340

SEQ ID NO: 5358 - DNA, 201 bp, Homo sapiens
tacccgcgggagaagccccgtgcttgccccctgagttcccagagcatgccccactttggaacccgatacgtgtgccagtttccagaccaggaggaagtgcstctcttctttccgctgcacctctgggtgaagaatgtgttcctaaaccagactcggactcagcgagtcctctttgtggacagtgtaggcctgccggctccc

SEQ ID NO: 5359 - DNA, 201 bp, Homo sapiens; identical to SEQ ID NO: 5342

SEQ ID NO: 5360 - DNA, 201 bp, Homo sapiens
agccaagatgtctccttgctggcatcagactcagagcccctgaagtgtttctcccgaacatttgaggacctcacttgcttctgggatgaggaagaggcagygcccagtgggacataccagctgctgtatgcctacccgcgggagaagccccgtgcttgccccctgagttcccagagcatgccccactttggaacccgatac

SEQ ID NO: 5361 - DNA, 201 bp, Homo sapiens
gcagacctccccaagtagagaagcttcagctctgacagcagagggtggaagctgcctcatctcaggactccagcctggcaactcctactggctgcagctgygcagcgaacctgatgggatctccctcggtggctcctggggatcctggtccctccctgtgactgtggacctgcctggagatgcagtggcacttggactgca

SEQ ID NO: 5362 - DNA, 201 bp, Homo sapiens
ccctgaagtgtttctcccgaacatttgaggacctcacttgcttctgggatgaggaagaggcagcgcccagtgggacataccagctgctgtatgcctacccrcgggagaagccccgtgcttgccccctgagttcccagagcatgccccactttggaacccgatacgtgtgccagtttccagaccaggaggaagtgcgtctct

SEQ ID NO: 5363 - DNA, 201 bp, Homo sapiens; identical to SEQ ID NO: 5346

SEQ ID NO: 5364 - DNA, 201 bp, Homo sapiens
tgcagaggcctcactcagcctctgctctggaccagtctccatgtgctcagcccacaatgccctggcaagatggaccaaagcagacctccccaagtagagargcttcagctctgacagcagagggtggaagctgcctcatctcaggactccagcctggcaactcctactggctgcagctgcgcagcgaacctgatgggatct

SEQ ID NO: 5365 - DNA, 201 bp, Homo sapiens; identical to SEQ ID NO: 5347

SEQ ID NO: 5366 - DNA, 201 bp, Homo sapiens; identical to SEQ ID NO: 5348

SEQ ID NO: 5367 - DNA, 201 bp, Homo sapiens; identical to SEQ ID NO: 5349

SEQ ID NO: 5368 - DNA, 201 bp, Homo sapiens; identical to SEQ ID NO: 5350

SEQ ID NO: 5369 - DNA, 201 bp, Homo sapiens; identical to SEQ ID NO: 5351

SEQ ID NO: 5370 - DNA, 201 bp, Homo sapiens
tcttcatggtcacctcctgcctcctcctggcccctcaaaacctggcccaagtcagcagccaagatgtctccttgctggcatcagactcagagcccctgaaktgtttctcccgaacatttgaggacctcacttgcttctgggatgaggaagaggcagcgcccagtgggacataccagctgctgtatgcctacccgcgggaga

SEQ ID NO: 5371 - DNA, 201 bp, Homo sapiens; identical to SEQ ID NO: 5336

SEQ ID NO: 5372 - DNA, 201 bp, Homo sapiens; identical to SEQ ID NO: 5337

SEQ ID NO: 5373 - DNA, 201 bp, Homo sapiens; identical to SEQ ID NO: 5355

SEQ ID NO: 5374 - DNA, 201 bp, Homo sapiens; identical to SEQ ID NO: 5360

SEQ ID NO: 5375 - DNA, 201 bp, Homo sapiens; identical to SEQ ID NO: 5361

SEQ ID NO: 5376 - DNA, 201 bp, Homo sapiens; identical to SEQ ID NO: 5362

SEQ ID NO: 5377 - DNA, 201 bp, Homo sapiens; identical to SEQ ID NO: 5346

SEQ ID NO: 5378 - DNA, 201 bp, Homo sapiens; identical to SEQ ID NO: 5364

SEQ ID NO: 5379 - DNA, 201 bp, Homo sapiens; identical to SEQ ID NO: 5356

SEQ ID NO: 5380 - DNA, 201 bp, Homo sapiens; identical to SEQ ID NO: 5358

SEQ ID NO: 5381 - DNA, 201 bp, Homo sapiens; identical to SEQ ID NO: 5347

SEQ ID NO: 5382 - DNA, 201 bp, Homo sapiens; identical to SEQ ID NO: 5348

SEQ ID NO: 5383 - DNA, 201 bp, Homo sapiens; identical to SEQ ID NO: 5349

SEQ ID NO: 5384 - DNA, 201 bp, Homo sapiens
gtttacagctgcgcgccaggctcaacggccccacctaccaaggtccctggagctcgtggtcggacccaactagggtggagaccgccaccgagaccgcctgratctccttggtgaccgctctgcatctagtgctgggcctcagcgccgtcctgggcctgctgctgctgaggtggcagtttcctgcacactacaggtaccgcc

SEQ ID NO: 5385 - DNA, 201 bp, Homo sapiens; identical to SEQ ID NO: 5370

SEQ ID NO: 5386 - DNA, 201 bp, Homo sapiens
atctggaaagtcagcgataacgagtcgtcatctaactatacctacaagatacatgtggcgggggagacagattcttccaatctcaacgtcagtgagcctcrcgctgtcatccccggactccgctccagcaccttctacaacatcacagtgtgtcctgtcctaggtgacatcgagggcacgccgggcttcctccaagtgcac

SEQ ID NO: 5387 - DNA, 201 bp, Homo sapiens
attggaagccatgaggagttgactcaagactcaagacttcaggtcaatatctcgggcctgaagccaggggttcaatacaacatcaacccgtatcttctacmatcaaataagacaaagggagaccccttgggcacagaaggtggcttggatgccagcaatacagagagaagccgggcagggagccccaccgcccctgtgcat

SEQ ID NO: 5388 - DNA, 201 bp, Homo sapiens
tacaatgggaagctggaacctctgggctcctaccgggcttgtgtggctggcttcaccaacattaccttccaccctcaaaacaaggggctcattgatggggytgagagctatgtgtccttcagtcgctactcagatgctgtttccttgccccaggatccaggtgtcatctgtggagcggtttttggctgtatctttggtgcc

SEQ ID NO: 5389 - DNA, 106 bp, Homo sapiens
aaagtccactggctttcgtctctctctgccgtgacacatatcggaatctactgtatatatatatatatatatatatatatatatatatatatatatatatrcacta

SEQ ID NO: 5390 - DNA, 201 bp, Homo sapiens
tcataaaagtcatcacagagccgatcccagtttctgatctccgtgttgccctcacgggtgtgaggaaggctgctctctcctggagcaatggcaatggcacygcctcctgccgggttcttcttgaaagcattggaagccatgaggagttgactcaagactcaagacttcaggtcaatatctcgggcctgaagccaggggttc

SEQ ID NO: 5391 - DNA, 201 bp, Homo sapiens
tcacaggcttacgtccagcgacttcatatgtattctccatcactccaggaataggcaatgagacttggggagatcccagagtcataaaagtcatcacagarccgatcccagtttctgatctccgtgttgccctcacgggtgtgaggaaggctgctctctcctggagcaatggcaatggcactgcctcctgccgggttcttc

SEQ ID NO: 5392 - DNA, 201 bp, Homo sapiens
gtagcttagcatcagaggtttgcttcctcagtaacatttctgttctcatttgatcaggggaggcctctttgccccgaccccgcttcccctgccccctgtasatttgtgctccattttttcttcccttttccctcccagttttctccaaagactcttctgttggcaacattttcaacccattggttgggtgagaatggcgac

SEQ ID NO: 5393 - DNA, 201 bp, Homo sapiens
tggaatatacggaatatttaaacagtagcttagcatcagaggtttgcttcctcagtaacatttctgttctcatttgatcaggggaggcctctttgccccgrccccgcttcccctgccccctgtacatttgtgctccattttttcttcccttttccctcccagttttctccaaagactcttctgttggcaacattttcaacc

SEQ ID NO: 5394 - DNA, 201 bp, Homo sapiens
cgcgctgtcatccccggactccgctccagcaccttctacaacatcacagtgtgtcctgtcctaggtgacatcgagggcacgccgggcttcctccaagtgcrcaccccccctgttccagtttctgacttccgagtgacagtggtcagcacgacggagatcggcttagcatggagcagccatgatgcagaatcatttcagatg

SEQ ID NO: 5395 - DNA, 201 bp, Homo sapiens
gccagcaatacagagagaagccgggcagggagccccaccgcccctgtgcatgatgagtccctcgtgggacctgtggacccatcctccggccagcagtcccragacacggaagtcctgcttgtcgggttagagcctggcacccgatacaatgccaccgtttattcccaagcagcgaatggcacagaaggacagccccaggcc

SEQ ID NO: 5396 - DNA, 201 bp, Homo sapiens
aaatggacctgccctcctggcgccaatgcaggctttgagctggaggtcagcagtggagcctggaacaatgcgacccacctggagagctgctcctctgagartggcactgagtatagaacggaagtcacgtatttgaatttttctacctcgtacaacatcagcatcaccactgtgtcctgtggaaagatggcagcccccacc

SEQ ID NO: 5397 - DNA, 201 bp, Homo sapiens
gtgacatcgagggcacgccgggcttcctccaagtgcacaccccccctgttccagtttctgacttccgagtgacagtggtcagcacgacggagatcggcttrgcatggagcagccatgatgcagaatcatttcagatgcatatcacacaggagggagctggcaattctcgggtagaaataaccaccaaccaaagtattatca

SEQ ID NO: 5398 - DNA, 201 bp, Homo sapiens
gatttgaagccagccacggacccatcaaagcctatgctgtcattctcaccaccggggaagctggtcacccttctgcagatgtcctgaaatacacgtatgasgatttcaaaaagggagcctcagatacttatgtgacatacctcataagaacagaagaaaagggacgttctcagagcttgtctgaagttttgaaatatgaaa

SEQ ID NO: 5399 - DNA, 201 bp, Homo sapiens
tcctggccagaccacggtgttcccgacaccactgacctgctcatcaacttccggtacctcgttcgtgactacatgaagcagagtcctcccgaatcgccgaytctggtgcattgcagtgctggggtcggaaggacgggcactttcattgccattgatcgtctcatctaccagatagagaatgagaacaccgtggatgtgtat

SEQ ID NO: 5400 - DNA, 201 bp, Homo sapiens
tcaatcagtgtgttttggatattgtcagatcccagaaagactcaaaagtagatcttatctaccagaacacaactgcaatgacaatctatgaaaaccttgcrcccgtgaccacatttggaaagaccaatggttacatcgcctaattccaaaggaataacctttctggagtgaaccagaccgtcgcacccacagcgaaggcac

SEQ ID NO: 5401 - DNA, 201 bp, Homo sapiens
aatgagaagacaattactgttgtgcatcaaccatggtgtaacatcacaggcttacgtccagcgacttcatatgtattctccatcactccaggaataggcartgagacttggggagatcccagagtcataaaagtcatcacagagccgatcccagtttctgatctccgtgttgccctcacgggtgtgaggaaggctgctctc

SEQ ID NO: 5402 - DNA, 201 bp, Homo sapiens
gaatatacggaatatttaaacagtagcttagcatcagaggtttgcttcctcagtaacatttctgttctcatttgatcaggggaggcctctttgccccgacyccgcttcccctgccccctgtacatttgtgctccattttttcttcccttttccctcccagttttctccaaagactcttctgttggcaacattttcaaccca

SEQ ID NO: 5403 - DNA, 201 bp, Homo sapiens
cacccgatacaatgccaccgtttattcccaagcagcgaatggcacagaaggacagccccaggccatagagttcaggacaaatgctattcaggtttttgacrtcaccgctgtgaacatcagtgccacaagcctgaccctgatctggaaagtcagcgataacgagtcgtcatctaactatacctacaagatacatgtggcggg

SEQ ID NO: 5404 - DNA, 201 bp, Homo sapiens
ctcgggcctgaagccaggggttcaatacaacatcaacccgtatcttctaccatcaaataagacaaagggagaccccttgggcacagaaggtggcttggatrccagcaatacagagagaagccgggcagggagccccaccgcccctgtgcatgatgagtccctcgtgggacctgtggacccatcctccggccagcagtccca

SEQ ID NO: 5405 - DNA, 201 bp, Homo sapiens
tgggtggggagcaaatcatctgcattcctgatgaccaatgggatgaggtcactttttttttttttcccccttgaggattgtggaaaaccaggaaaagggakctatgatttttttttccaaaacaatttcttttttaaaaaagactattttatatgattcacatgctaaagccaggattgtgttgggttgaatatattttaa

SEQ ID NO: 5406 - DNA, 201 bp, Homo sapiens
gggctgtcgggggctgtggatgggtggggagcaaatcatctgcattcctgatgaccaatgggatgaggtcactttttttttttttcccccttgaggattgyggaaaaccaggaaaagggagctatgatttttttttccaaaacaatttcttttttaaaaaagactattttatatgattcacatgctaaagccaggattgtg

SEQ ID NO: 5407 - DNA, 201 bp, Homo sapiens
aagactcaaaagtagatcttatctaccagaacacaactgcaatgacaatctatgaaaaccttgcgcccgtgaccacatttggaaagaccaatggttacatmgcctaattccaaaggaataacctttctggagtgaaccagaccgtcgcacccacagcgaaggcacatgccccgatgtcgacatgtttttatatgtctaata

SEQ ID NO: 5408 - DNA, 201 bp, Homo sapiens
gctcctaccgggcttgtgtggctggcttcaccaacattaccttccaccctcaaaacaaggggctcattgatggggctgagagctatgtgtccttcagtcgytactcagatgctgtttccttgccccaggatccaggtgtcatctgtggagcggtttttggctgtatctttggtgccctggttattgtgactgtgggaggct

SEQ ID NO: 5409 - DNA, 201 bp, Homo sapiens; identical to SEQ ID NO: 5386

SEQ ID NO: 5410 - DNA, 201 bp, Homo sapiens; identical to SEQ ID NO: 5387

SEQ ID NO: 5411 - DNA, 201 bp, Homo sapiens; identical to SEQ ID NO: 5388

SEQ ID NO: 5412 - DNA, 106 bp, Homo sapiens; identical to SEQ ID NO: 5389

SEQ ID NO: 5413 - DNA, 201 bp, Homo sapiens; identical to SEQ ID NO: 5390

SEQ ID NO: 5414 - DNA, 201 bp, Homo sapiens; identical to SEQ ID NO: 5391

SEQ ID NO: 5415 - DNA, 201 bp, Homo sapiens; identical to SEQ ID NO: 5392

SEQ ID NO: 5416 - DNA, 201 bp, Homo sapiens; identical to SEQ ID NO: 5393

SEQ ID NO: 5417 - DNA, 201 bp, Homo sapiens; identical to SEQ ID NO: 5394

SEQ ID NO: 5418 - DNA, 201 bp, Homo sapiens; identical to SEQ ID NO: 5395

SEQ ID NO: 5419 - DNA, 201 bp, Homo sapiens; identical to SEQ ID NO: 5396

SEQ ID NO: 5420 - DNA, 201 bp, Homo sapiens; identical to SEQ ID NO: 5397

SEQ ID NO: 5421 - DNA, 201 bp, Homo sapiens; identical to SEQ ID NO: 5398

SEQ ID NO: 5422 - DNA, 201 bp, Homo sapiens; identical to SEQ ID NO: 5399

SEQ ID NO: 5423 - DNA, 201 bp, Homo sapiens; identical to SEQ ID NO: 5401

SEQ ID NO: 5424 - DNA, 201 bp, Homo sapiens; identical to SEQ ID NO: 5400

SEQ ID NO: 5425 - DNA, 201 bp, Homo sapiens; identical to SEQ ID NO: 5402

SEQ ID NO: 5426 - DNA, 201 bp, Homo sapiens; identical to SEQ ID NO: 5403

SEQ ID NO: 5427 - DNA, 201 bp, Homo sapiens; identical to SEQ ID NO: 5406

SEQ ID NO: 5428 - DNA, 201 bp, Homo sapiens; identical to SEQ ID NO: 5405

SEQ ID NO: 5429 - DNA, 201 bp, Homo sapiens; identical to SEQ ID NO: 5404

SEQ ID NO: 5430 - DNA, 201 bp, Homo sapiens; identical to SEQ ID NO: 5407

SEQ ID NO: 5431 - DNA, 201 bp, Homo sapiens; identical to SEQ ID NO: 5408

SEQ ID NO: 5432 - DNA, 201 bp, Homo sapiens
tcaatcagtgtgttttggatattgtcagatcccagaaagactcaaaagtagatcttatctaccagaacacaactgcaatgacaatctatgaaaaccttgcrcccgtgaccacatttggaaagaccaatgaaaagcagctggtatgggtttgggtgtcaatgaaagggccaaagactggtggccagctggtttgggggattt

SEQ ID NO: 5433 - DNA, 118 bp, Homo sapiens
atgcctgggtacattgcrtgctctggggaccagtatgttttcctcaatcagtgtgttttggatattgtcagatcccagaaagactcaaaagtagatcttatctaccagaacacaactg

SEQ ID NO: 5434 - DNA, 201 bp, Homo sapiens; identical to SEQ ID NO: 5386

SEQ ID NO: 5435 - DNA, 201 bp, Homo sapiens; identical to SEQ ID NO: 5387

SEQ ID NO: 5436 - DNA, 201 bp, Homo sapiens; identical to SEQ ID NO: 5388

SEQ ID NO: 5437 - DNA, 106 bp, Homo sapiens; identical to SEQ ID NO: 5389

SEQ ID NO: 5438 - DNA, 201 bp, Homo sapiens; identical to SEQ ID NO: 5390

SEQ ID NO: 5439 - DNA, 201 bp, Homo sapiens; identical to SEQ ID NO: 5391

SEQ ID NO: 5440 - DNA, 201 bp, Homo sapiens; identical to SEQ ID NO: 5392

SEQ ID NO: 5441 - DNA, 201 bp, Homo sapiens; identical to SEQ ID NO: 5393

SEQ ID NO: 5442 - DNA, 201 bp, Homo sapiens; identical to SEQ ID NO: 5394

SEQ ID NO: 5443 - DNA, 201 bp, Homo sapiens; identical to SEQ ID NO: 5395

SEQ ID NO: 5444 - DNA, 201 bp, Homo sapiens; identical to SEQ ID NO: 5396

SEQ ID NO: 5445 - DNA, 201 bp, Homo sapiens; identical to SEQ ID NO: 5397

SEQ ID NO: 5446 - DNA, 201 bp, Homo sapiens; identical to SEQ ID NO: 5398

SEQ ID NO: 5447 - DNA, 201 bp, Homo sapiens; identical to SEQ ID NO: 5399

SEQ ID NO: 5448 - DNA, 201 bp, Homo sapiens; identical to SEQ ID NO: 5401

SEQ ID NO: 5449 - DNA, 201 bp, Homo sapiens; identical to SEQ ID NO: 5400

SEQ ID NO: 5450 - DNA, 201 bp, Homo sapiens; identical to SEQ ID NO: 5402

SEQ ID NO: 5451 - DNA, 201 bp, Homo sapiens; identical to SEQ ID NO: 5403

SEQ ID NO: 5452 - DNA, 201 bp, Homo sapiens; identical to SEQ ID NO: 5406

SEQ ID NO: 5453 - DNA, 201 bp, Homo sapiens; identical to SEQ ID NO: 5405

SEQ ID NO: 5454 - DNA, 201 bp, Homo sapiens; identical to SEQ ID NO: 5404

SEQ ID NO: 5455 - DNA, 201 bp, Homo sapiens; identical to SEQ ID NO: 5407

SEQ ID NO: 5456 - DNA, 201 bp, Homo sapiens; identical to SEQ ID NO: 5408

SEQ ID NO: 5457 - DNA, 201 bp, Homo sapiens; identical to SEQ ID NO: 5386

SEQ ID NO: 5458 - DNA, 201 bp, Homo sapiens; identical to SEQ ID NO: 5387

SEQ ID NO: 5459 - DNA, 201 bp, Homo sapiens
tgggaagctggaacctctgggctcctaccggtaatggcttgtgtggctggcttcaccaacattaccttccaccctcaaaacaaggggctcattgatggggytgagagctatgtgtccttcagtcgctactcagatgctgtttccttgccccaggatccaggtgtcatctgtggagcggtttttggctgtatctttggtgcc

SEQ ID NO: 5460 - DNA, 106 bp, Homo sapiens; identical to SEQ ID NO: 5389

SEQ ID NO: 5461 - DNA, 201 bp, Homo sapiens; identical to SEQ ID NO: 5390

SEQ ID NO: 5462 - DNA, 201 bp, Homo sapiens; identical to SEQ ID NO: 5391

SEQ ID NO: 5463 - DNA, 201 bp, Homo sapiens; identical to SEQ ID NO: 5392

SEQ ID NO: 5464 - DNA, 201 bp, Homo sapiens; identical to SEQ ID NO: 5393

SEQ ID NO: 5465 - DNA, 201 bp, Homo sapiens; identical to SEQ ID NO: 5394

SEQ ID NO: 5466 - DNA, 201 bp, Homo sapiens; identical to SEQ ID NO: 5395

SEQ ID NO: 5467 - DNA, 201 bp, Homo sapiens; identical to SEQ ID NO: 5396

SEQ ID NO: 5468 - DNA, 201 bp, Homo sapiens; identical to SEQ ID NO: 5397

SEQ ID NO: 5469 - DNA, 201 bp, Homo sapiens; identical to SEQ ID NO: 5398

SEQ ID NO: 5470 - DNA, 201 bp, Homo sapiens; identical to SEQ ID NO: 5399

SEQ ID NO: 5471 - DNA, 201 bp, Homo sapiens; identical to SEQ ID NO: 5401

SEQ ID NO: 5472 - DNA, 201 bp, Homo sapiens; identical to SEQ ID NO: 5400

SEQ ID NO: 5473 - DNA, 201 bp, Homo sapiens; identical to SEQ ID NO: 5402

SEQ ID NO: 5474 - DNA, 201 bp, Homo sapiens; identical to SEQ ID NO: 5403

SEQ ID NO: 5475 - DNA, 201 bp, Homo sapiens; identical to SEQ ID NO: 5406

SEQ ID NO: 5476 - DNA, 201 bp, Homo sapiens; identical to SEQ ID NO: 5405

SEQ ID NO: 5477 - DNA, 201 bp, Homo sapiens; identical to SEQ ID NO: 5404

SEQ ID NO: 5478 - DNA, 201 bp, Homo sapiens
taccggtaatggcttgtgtggctggcttcaccaacattaccttccaccctcaaaacaaggggctcattgatggggctgagagctatgtgtccttcagtcgytactcagatgctgtttccttgccccaggatccaggtgtcatctgtggagcggtttttggctgtatctttggtgccctggttattgtgactgtgggaggct

SEQ ID NO: 5479 - DNA, 201 bp, Homo sapiens; identical to SEQ ID NO: 5407

SEQ ID NO: 5480 - DNA, 201 bp, Homo sapiens
cctcttcccacaagaaattcatgattgcccaatggaactcgctcagaagagggaactaagcatttttggcaaccaatggcagatatctatggcagcacacaaaaaaagtatagaaagatccacccaacattaaatcagaaatcaagcaaatgcttacccaacaaatatttgagccctcatagctgggtttaagatgactca

SEQ ID NO: 5481 - DNA, 201 bp, Homo sapiens
catctcagacccttccagcgagtgcagatgtgtttagttctgtacctttcggcactgctgctgtaccctcaggttacgttgcaatgggcgctgtcctcccrtccttctggggtcagcagcccctcgtccaacagcagatggtcatgggtgcccagccaccagtcgctcaggtgatgccgggggctcagcccatcgcatggg

SEQ ID NO: 5482 - DNA, 201 bp, Homo sapiens
tgagacaccaaatttggagtgacaggcatcagaggattacaacagggttggaactgacttctttaagcaaaagcaaagggtcttctgtgaccacaatatcrtcatccatatgccttttcacataggatgatgtgttttttgtcactccatggggcctggtctgccattttcccccctttcctttttttgtcatgtttgaaa

SEQ ID NO: 5483 - DNA, 201 bp, Homo sapiens
tgaaggggtccggtacaaagccaaattgatcgggattgatgaagtttccgcagctcggggagacaagttatgtcaagattccatgatgaaactcaagggcrttgttgctggcgctcgttccaaaggagaacacaaacagaaaatctttttaaccatctcctttggaggaatcaaaatctttgatgagaagacaggggccct

SEQ ID NO: 5484 - DNA, 201 bp, Homo sapiens
acaccccctgatataacctctccccccactcctgcaactccaggtgatgcctttatcccatcttcatctcagacccttccagcgagtgcagatgtgtttarttctgtacctttcggcactgctgctgtaccctcaggttacgttgcaatgggcgctgtcctcccgtccttctggggtcagcagcccctcgtccaacagcag

SEQ ID NO: 5485 - DNA, 103 bp, Homo sapiens
gcagagagctcagtttttttttctaccaaggaaactttaaatctctgtggttcggctcataaagcaggcacacaagagggtgtcaaccgccgagagaacccag

SEQ ID NO: 5486 - DNA, 201 bp, Homo sapiens; identical to SEQ ID NO: 5480

SEQ ID NO: 5487 - DNA, 104 bp, Homo sapiens
gcagagagctcagtttttttttctaccaaggaaactttaaatctctgtggttcggctcataaagcaggcacacaagagggtgtcaaccgccgagagaacccaga

SEQ ID NO: 5488 - DNA, 201 bp, Homo sapiens; identical to SEQ ID NO: 5481

SEQ ID NO: 5489 - DNA, 201 bp, Homo sapiens; identical to SEQ ID NO: 5482

SEQ ID NO: 5490 - DNA, 201 bp, Homo sapiens; identical to SEQ ID NO: 5483

SEQ ID NO: 5491 - DNA, 201 bp, Homo sapiens; identical to SEQ ID NO: 5484

SEQ ID NO: 5492 - DNA, 103 bp, Homo sapiens; identical to SEQ ID NO: 5485

SEQ ID NO: 5493 - DNA, 201 bp, Homo sapiens; identical to SEQ ID NO: 5480

SEQ ID NO: 5494 - DNA, 104 bp, Homo sapiens; identical to SEQ ID NO: 5487

SEQ ID NO: 5495 - DNA, 201 bp, Homo sapiens; identical to SEQ ID NO: 5481

SEQ ID NO: 5496 - DNA, 201 bp, Homo sapiens; identical to SEQ ID NO: 5482

SEQ ID NO: 5497 - DNA, 201 bp, Homo sapiens; identical to SEQ ID NO: 5483

SEQ ID NO: 5498 - DNA, 201 bp, Homo sapiens; identical to SEQ ID NO: 5484

SEQ ID NO: 5499 - DNA, 201 bp, Homo sapiens
cctacaggactgtgcccaagccagggcctcagcctggcccacatggatcactattgactgaagggtgtctcagaagcctttcgggggacttgaaccggttmccctgtgggatggaggtgcactctggccagagagaactggagagcgtggttgctgtcggcgaagccatggcttttgaaatttccaatgggagccatgagt

SEQ ID NO: 5500 - DNA, 201 bp, Homo sapiens
gtggagccagagccctcacagtgaagtggagtcagatcctagattcgtctgattttatccagagaaggtctatggcaagcaatgtatatttttctaatgtsaatattgcacagatgaaccttttatttataaagaataatgtctttctgccctgctgtctacatttttctatggagcttgtcataataatagcagatatta

SEQ ID NO: 5501 - DNA, 201 bp, Homo sapiens
gcagaatggtcagtctgtagacgttgaagagacattgccatctgaaccagaaaatggagctcttttgcgatcagagagataccaaggacctagaagacgcrcatgctcagagacccttgcagagtcccgcacagctgtcctccagcagagaagagctgctcagctacctggtggccctgctgcggcaggggagcagagggc

SEQ ID NO: 5502 - DNA, 201 bp, Homo sapiens
ctgaagggtgtctcagaagcctttcgggggacttgaaccggttcccctgtgggatggaggtgcactctggccagagagaactggagagcgtggttgctgtyggcgaagccatggcttttgaaatttccaatgggagccatgagttactgtctcagggacagaagcagatttttattcagacttccgatgggcttatcttgt

SEQ ID NO: 5503 - DNA, 201 bp, Homo sapiens
aaaaaaatcgttaaaagtaaagacacgttctggacgggtatctcgacctcccaaatataaagctaaagattataagttcataaaaacagaggatctggcgratggtcatctgtcagattctgatgattactcagaactctgtgtggaagaagatgaagatcagagggagaggcacgcactctttgacttatcgagctgctc

SEQ ID NO: 5504 - DNA, 201 bp, Homo sapiens
ttgtgacttccacctgaaccaccagcagcccagccccaccagcgtcctgcctacagaggtggcagcccctccgcttgagaaaattttgtctgtggatagcrtggcagtggactgtgcctacaggactgtgcccaagccagggcctcagcctggcccacatggatcactattgactgaagggtgtctcagaagcctttcggg

SEQ ID NO: 5505 - DNA, 201 bp, Homo sapiens
gccagtggaagcaccctccgggggtgcacggaggaaaggacgctcagcctgacctccctggggctgtccatgccagcggatccatgtgagggaggggcccrctcctgcttggtgacagagtcagcacgcggtggcctgcagaatggtcagtctgtagacgttgaagagacattgccatctgaaccagaaaatggagctctt

SEQ ID NO: 5506 - DNA, 201 bp, Homo sapiens
aggaggaggacattgtcacagtgactgatgcagaggggcgtgcctgcggatgggcccgctagaaggagttcctctagaagctgtggagtcggtcgtcaccgtggagccagagccctcacagtgaagtggagtcagatcctagattcgtctgattttatccagagaaggtctatggcaagcaatgtatatttttctaatgtg

SEQ ID NO: 5507 - DNA, 201 bp, Homo sapiens
cgcttgtgagaaccgagccacagtcctgcttcctaagtgacttatgccaacctcctgctcaggggtttgtacagagaccactgccagccctccaggtggtycctgcaaagagagtcccagcccccaaggctccaaatgaacagggctccatgttgacccctttgtctgcctctgacccgctggcagtaacatctctttcat

SEQ ID NO: 5508 - DNA, 201 bp, Homo sapiens
gaggaggacattgtcacagtgactgatgcagaggggcgtgcctgcggatgggcccgctagaaggagttcctctagaagctgtggagtcggtcgtcaccgtggagccagagccctcacagtgaagtggagtcagatcctagattcgtctgattttatccagagaaggtctatggcaagcaatgtatatttttctaatgtgaa

SEQ ID NO: 5509 - DNA, 201 bp, Homo sapiens
aggaggacattgtcacagtgactgatgcagaggggcgtgcctgcggatgggcccgctagaaggagttcctctagaagctgtggagtcggtcgtcaccgtggagccagagccctcacagtgaagtggagtcagatcctagattcgtctgattttatccagagaaggtctatggcaagcaatgtatatttttctaatgtgaat

SEQ ID NO: 5510 - DNA, 201 bp, Homo sapiens
ggaggacattgtcacagtgactgatgcagaggggcgtgcctgcggatgggcccgctagaaggagttcctctagaagctgtggagtcggtcgtcaccgtggagccagagccctcacagtgaagtggagtcagatcctagattcgtctgattttatccagagaaggtctatggcaagcaatgtatatttttctaatgtgaata

SEQ ID NO: 5511 - DNA, 201 bp, Homo sapiens
aagtgacttatgccaacctcctgctcaggggtttgtacagagaccactgccagccctccaggtggtccctgcaaagagagtcccagcccccaaggctccaratgaacagggctccatgttgacccctttgtctgcctctgacccgctggcagtaacatctctttcatccagttcagcacatccatttatttccaacttgca

SEQ ID NO: 5512 - DNA, 201 bp, Homo sapiens
ggacattgtcacagtgactgatgcagaggggcgtgcctgcggatgggcccgctagaaggagttcctctagaagctgtggagtcggtcgtcaccgtggagcsagagccctcacagtgaagtggagtcagatcctagattcgtctgattttatccagagaaggtctatggcaagcaatgtatatttttctaatgtgaatattg

SEQ ID NO: 5513 - DNA, 201 bp, Homo sapiens
taccgaccacaatccagccccaaactgcaagaaagagccagctgccccgggggaattcctgcctggtggggctccatatcgccagccctcagctgctcagrgtacagccgcttgtgagaaccgagccacagtcctgcttcctaagtgacttatgccaacctcctgctcaggggtttgtacagagaccactgccagccctcc

SEQ ID NO: 5514 - DNA, 201 bp, Homo sapiens
ttctggtggcaatgggagcgtgttccaggcgggcccgcagcttcaggcactggctaacttagaagccaggagggggtctataggtgctgctctctcatccygggatgtcagtgggctgcctgtttatgctcagtcaggagagcctaggaggctgacccaggcacaggtggcagcgtttcctggagagaatgctttggaaca

SEQ ID NO: 5515 - DNA, 115 bp, Homo sapiens
taaaaagaaaataagctagtcattctgggcagcattttattgatagaagggggaaaaagtcatttctacttgcatgattttttaaattaaattaaattaawttaatttaattatt

SEQ ID NO: 5516 - DNA, 201 bp, Homo sapiens
catgcccagcaccattcctaggctgggagcaaaacgcaactagaagccatttgtgtcaaggtaacgtctggagaaacaaaaggtcaggaaaggccaatgcycctaccgaccacaatccagccccaaactgcaagaaagagccagctgccccgggggaattcctgcctggtggggctccatatcgccagccctcagctgctc

SEQ ID NO: 5517 - DNA, 201 bp, Homo sapiens
ggaggaggacattgtcacagtgactgatgcagaggggcgtgcctgcggatgggcccgctagaaggagttcctctagaagctgtggagtcggtcgtcaccgyggagccagagccctcacagtgaagtggagtcagatcctagattcgtctgattttatccagagaaggtctatggcaagcaatgtatatttttctaatgtga

SEQ ID NO: 5518 - DNA, 201 bp, Homo sapiens
ccctgggcccacttgcggggaagtcttggaggtgaaaatccaggtctggaatgaatgcattccacagatgcatatggagagctactgcatgcccagcaccrttcctaggctgggagcaaaacgcaactagaagccatttgtgtcaaggtaacgtctggagaaacaaaaggtcaggaaaggccaatgcccctaccgaccaca

SEQ ID NO: 5519 - DNA, 201 bp, Homo sapiens
agaagccctgtccaacgataccactgaatctcttgctgccaacagcagaggccgggagaagcccaggcccttgcatgctttggccgctggtttttcccctycagtaaatgtgactgtctctccccgttctgaagaaagccatacaacgacggtttctggtggcaatgggagcgtgttccaggcgggcccgcagcttcaggc

SEQ ID NO: 5520 - DNA, 201 bp, Homo sapiens; identical to SEQ ID NO: 5502

SEQ ID NO: 5521 - DNA, 201 bp, Homo sapiens; identical to SEQ ID NO: 5499

SEQ ID NO: 5522 - DNA, 201 bp, Homo sapiens; identical to SEQ ID NO: 5500

SEQ ID NO: 5523 - DNA, 201 bp, Homo sapiens; identical to SEQ ID NO: 5504

SEQ ID NO: 5524 - DNA, 201 bp, Homo sapiens; identical to SEQ ID NO: 5506

SEQ ID NO: 5525 - DNA, 201 bp, Homo sapiens; identical to SEQ ID NO: 5508

SEQ ID NO: 5526 - DNA, 201 bp, Homo sapiens; identical to SEQ ID NO: 5509

SEQ ID NO: 5527 - DNA, 201 bp, Homo sapiens; identical to SEQ ID NO: 5510

SEQ ID NO: 5528 - DNA, 201 bp, Homo sapiens; identical to SEQ ID NO: 5512

SEQ ID NO: 5529 - DNA, 201 bp, Homo sapiens; identical to SEQ ID NO: 5514

SEQ ID NO: 5530 - DNA, 115 bp, Homo sapiens; identical to SEQ ID NO: 5515

SEQ ID NO: 5531 - DNA, 201 bp, Homo sapiens; identical to SEQ ID NO: 5517

SEQ ID NO: 5532 - DNA, 201 bp, Homo sapiens; identical to SEQ ID NO: 5519

SEQ ID NO: 5533 - DNA, 201 bp, Homo sapiens; identical to SEQ ID NO: 5503

SEQ ID NO: 5534 - DNA, 152 bp, Homo sapiens
gtggagccagagccctcacagtgaagtggagtcagatcctagattcgtctgattttatccagagaaggtctatggcaagcaatgtatatttttctaatgtsaatattgcacagatgaaccttttatttataaagaataatgtctttctgccc

SEQ ID NO: 5535 - DNA, 201 bp, Homo sapiens; identical to SEQ ID NO: 5505

SEQ ID NO: 5536 - DNA, 201 bp, Homo sapiens; identical to SEQ ID NO: 5506

SEQ ID NO: 5537 - DNA, 201 bp, Homo sapiens; identical to SEQ ID NO: 5507

SEQ ID NO: 5538 - DNA, 201 bp, Homo sapiens; identical to SEQ ID NO: 5508

SEQ ID NO: 5539 - DNA, 201 bp, Homo sapiens; identical to SEQ ID NO: 5509

SEQ ID NO: 5540 - DNA, 201 bp, Homo sapiens; identical to SEQ ID NO: 5511

SEQ ID NO: 5541 - DNA, 201 bp, Homo sapiens; identical to SEQ ID NO: 5510

SEQ ID NO: 5542 - DNA, 201 bp, Homo sapiens; identical to SEQ ID NO: 5513

SEQ ID NO: 5543 - DNA, 201 bp, Homo sapiens; identical to SEQ ID NO: 5512

SEQ ID NO: 5544 - DNA, 201 bp, Homo sapiens; identical to SEQ ID NO: 5516

SEQ ID NO: 5545 - DNA, 201 bp, Homo sapiens; identical to SEQ ID NO: 5517

SEQ ID NO: 5546 - DNA, 201 bp, Homo sapiens; identical to SEQ ID NO: 5518

SEQ ID NO: 5547 - DNA, 201 bp, Homo sapiens; identical to SEQ ID NO: 5501

SEQ ID NO: 5548 - DNA, 201 bp, Homo sapiens; identical to SEQ ID NO: 5499

SEQ ID NO: 5549 - DNA, 201 bp, Homo sapiens; identical to SEQ ID NO: 5500

SEQ ID NO: 5550 - DNA, 201 bp, Homo sapiens; identical to SEQ ID NO: 5502

SEQ ID NO: 5551 - DNA, 201 bp, Homo sapiens; identical to SEQ ID NO: 5503

SEQ ID NO: 5552 - DNA, 201 bp, Homo sapiens; identical to SEQ ID NO: 5504

SEQ ID NO: 5553 - DNA, 201 bp, Homo sapiens
gccagtggaagcaccctccgggggtgcacggaggaaaggacgctcagcctgacctccctggggctgtccatgccagcggatccatgtgagggaggggcccrctcctgcttggtgacagagtcagcacgcggtggcctgcagttcctccagcagtgtgaccgggaggatctggtggaattggctctgcctcagctggctcag

SEQ ID NO: 5554 - DNA, 201 bp, Homo sapiens; identical to SEQ ID NO: 5506

SEQ ID NO: 5555 - DNA, 201 bp, Homo sapiens; identical to SEQ ID NO: 5507

SEQ ID NO: 5556 - DNA, 201 bp, Homo sapiens; identical to SEQ ID NO: 5508

SEQ ID NO: 5557 - DNA, 201 bp, Homo sapiens; identical to SEQ ID NO: 5509

SEQ ID NO: 5558 - DNA, 201 bp, Homo sapiens; identical to SEQ ID NO: 5510

SEQ ID NO: 5559 - DNA, 201 bp, Homo sapiens; identical to SEQ ID NO: 5511

SEQ ID NO: 5560 - DNA, 201 bp, Homo sapiens; identical to SEQ ID NO: 5512

SEQ ID NO: 5561 - DNA, 201 bp, Homo sapiens; identical to SEQ ID NO: 5513

SEQ ID NO: 5562 - DNA, 115 bp, Homo sapiens; identical to SEQ ID NO: 5515

SEQ ID NO: 5563 - DNA, 201 bp, Homo sapiens; identical to SEQ ID NO: 5514

SEQ ID NO: 5564 - DNA, 201 bp, Homo sapiens; identical to SEQ ID NO: 5516

SEQ ID NO: 5565 - DNA, 201 bp, Homo sapiens; identical to SEQ ID NO: 5517

SEQ ID NO: 5566 - DNA, 201 bp, Homo sapiens; identical to SEQ ID NO: 5518

SEQ ID NO: 5567 - DNA, 201 bp, Homo sapiens; identical to SEQ ID NO: 5519

SEQ ID NO: 5568 - DNA, 201 bp, Homo sapiens; identical to SEQ ID NO: 5499

SEQ ID NO: 5569 - DNA, 201 bp, Homo sapiens; identical to SEQ ID NO: 5500

SEQ ID NO: 5570 - DNA, 201 bp, Homo sapiens; identical to SEQ ID NO: 5501

SEQ ID NO: 5571 - DNA, 201 bp, Homo sapiens; identical to SEQ ID NO: 5502

SEQ ID NO: 5572 - DNA, 201 bp, Homo sapiens; identical to SEQ ID NO: 5503

SEQ ID NO: 5573 - DNA, 201 bp, Homo sapiens; identical to SEQ ID NO: 5504

SEQ ID NO: 5574 - DNA, 201 bp, Homo sapiens; identical to SEQ ID NO: 5505

SEQ ID NO: 5575 - DNA, 201 bp, Homo sapiens; identical to SEQ ID NO: 5506

SEQ ID NO: 5576 - DNA, 201 bp, Homo sapiens; identical to SEQ ID NO: 5507

SEQ ID NO: 5577 - DNA, 201 bp, Homo sapiens; identical to SEQ ID NO: 5508

SEQ ID NO: 5578 - DNA, 201 bp, Homo sapiens; identical to SEQ ID NO: 5509

SEQ ID NO: 5579 - DNA, 201 bp, Homo sapiens; identical to SEQ ID NO: 5510

SEQ ID NO: 5580 - DNA, 201 bp, Homo sapiens; identical to SEQ ID NO: 5511

SEQ ID NO: 5581 - DNA, 201 bp, Homo sapiens; identical to SEQ ID NO: 5512

SEQ ID NO: 5582 - DNA, 201 bp, Homo sapiens; identical to SEQ ID NO: 5513

SEQ ID NO: 5583 - DNA, 201 bp, Homo sapiens; identical to SEQ ID NO: 5514

SEQ ID NO: 5584 - DNA, 115 bp, Homo sapiens; identical to SEQ ID NO: 5515

SEQ ID NO: 5585 - DNA, 201 bp, Homo sapiens; identical to SEQ ID NO: 5516

SEQ ID NO: 5586 - DNA, 201 bp, Homo sapiens; identical to SEQ ID NO: 5517

SEQ ID NO: 5587 - DNA, 201 bp, Homo sapiens; identical to SEQ ID NO: 5518

SEQ ID NO: 5588 - DNA, 201 bp, Homo sapiens; identical to SEQ ID NO: 5519

SEQ ID NO: 5589 - DNA, 201 bp, Homo sapiens
tctgtaaggcaaattggaacacaaccaaggaaaagtactgggaaatttggtgcttgttttataccaggactctgtaagcaaagtgatctaaccttgtatgygtcacggcccgggctccggctatggaaggctgatgtccacgggactgttcaagccacgtttatcttaaaagatgcttttgccgggggagtcaagcctttt

SEQ ID NO: 5590 - DNA, 201 bp, Homo sapiens
tgtgccttccagcctcagctgggccccaagtgctgaacagtggctgcctgggaccagagctgatgaaggcagccccgtggagcccagccaagagcaggacrtcctaaccagcatggaggcctctggccacctcagcacaaatctctggcatgctgtcactgatgatgacacaggtcagaaagaaatacccatttctgaacg

SEQ ID NO: 5591 - DNA, 201 bp, Homo sapiens
ggtacgaagccctgccccaggcagtgtttgtggccctgagcgatgacacggcctggatcatcaggaccagtggggacctatacttgcagacaggtctgagygtggatcgcccttgtgccagagccgtaaaggtggactgtccctacccgctgtcccagatcacagcccggaacaatgtggtgtgggcgctgacagagcaga

SEQ ID NO: 5592 - DNA, 201 bp, Homo sapiens
tcctccggcccggcggggccgacgagtccggaggggctgccgcgggagcccccaggtttccctagatgacaaataaacattccttttcctgcgtgaagatmgtctgtggaaaccttggccatggcatcgatatcagagcctgttacattcagagagttctgcccgttgtactatctcctcaatgccattccgacaaagatc

SEQ ID NO: 5593 - DNA, 201 bp, Homo sapiens
cggtctctgccttggcagccagcactcacaagccctggcttgagcagcctccacgggatcagacattgacgtccagcgatgaggaggacatctatgcccaygggcttccttcttcatcctcagagacgagtgtgacagagctcggacctagttgctcccagcaggacctgagccggctgggtgcagaggacgccgggctgc

SEQ ID NO: 5594 - DNA, 201 bp, Homo sapiens
cgtcacggcccgggctccggctatggaaggctgatgtccacgggactgttcaagccacgtttatcttaaaagatgcttttgccgggggagtcaagcctttwgaactgcacccgcgtctggaatcccccaacagtggaagttgcagcttacctgagaggcacctggggcttgtttcatgtttctttcaagaaggctgggtgc

SEQ ID NO: 5595 - DNA, 201 bp, Homo sapiens
gtgggcgctgacagagcagagggccctcctgtaccgggagggcgtgagcagcttctgtccggaaggcgagcagtggaagtgtgacattgtcagcgaaaggmaagctttagaacccgtctgcataacgctcggggatcagcagactctctgggccctggacatccatgggaacctgtggttcagaactggcattatttccaa

SEQ ID NO: 5596 - DNA, 201 bp, Homo sapiens
tgtcgatgacctcaagtgtcctgggcagtagcgtggatcagttaagtgcagagtctccagaccaggaaagcagcttcaatggtgaagtgaacggtgtcccrcaggaaaatactgaccccgaaacgtttaatgtcctggaggtgtcaggatcaatgcctgattctctggctgaggaagatgacattagaactgaaatgccac

SEQ ID NO: 5597 - DNA, 201 bp, Homo sapiens
attaacatcaacagactcttctttcttagtgagagatggtctggagatgtctggatgctcagagcgtgtccacgtgcagcaagcggagaagctgccagggrccacagtttctgagacgaggctcagaggctcttccatggccagctccgtggccagcgagccaaggagcaggagcagctcgctcaactccaccgacagcgg

SEQ ID NO: 5598 - DNA, 201 bp, Homo sapiens
gaggcagtgatgtcacgggactcggagatgagccgtgtcctgcagatgatggaccaaatagcacacagttacccttccaagaacaggacagctctcctggrgcgcatgatggggaagacatccaacccattggcccccaaagcactttttgtgaagtccccctcctgaactcactcactgtgccttccagcctcagctggg

SEQ ID NO: 5599 - DNA, 201 bp, Homo sapiens
ccgacgagtccggaggggctgccgcgggagcccccaggtttccctagatgacaaataaacattccttttcctgcgtgaagatagtctgtggaaaccttggycatggcatcgatatcagagcctgttacattcagagagttctgcccgttgtactatctcctcaatgccattccgacaaagatccagaagggtttccgctct

SEQ ID NO: 5600 - DNA, 201 bp, Homo sapiens
gaggcacctggggcttgtttcatgtttctttcaagaaggctgggtgctgagttggaatgaatatagtatctatctcctagacacagtcaaccaggccacarttgctggtttggaaggatccggtgatattgtgtctgtttcgtgcacagaaaatgaaatatttttcttgaaaggagataggaacattataagaatttcaag

SEQ ID NO: 5601 - DNA, 201 bp, Homo sapiens
ccagctccgtggccagcgagccaaggagcaggagcagctcgctcaactccaccgacagcggctccgggctcctgccccctgggctccaggccacccctgarctgggcaagggcagccagcccctgtcacagagattcaacgccatcagctcagaggactttgaccaggagcttgtcgtgaagcctatcaaagtgaaaagga

SEQ ID NO: 5602 - DNA, 201 bp, Homo sapiens
gccaaggagcaggagcagctcgctcaactccaccgacagcggctccgggctcctgccccctgggctccaggccacccctgagctgggcaagggcagccagyccctgtcacagagattcaacgccatcagctcagaggactttgaccaggagcttgtcgtgaagcctatcaaagtgaaaaggaagaagaagaagaagaagac

SEQ ID NO: 5603 - DNA, 201 bp, Homo sapiens
tgttggcttctgcagctcccacgaaggaaggaagcttcctgtggctgtgccagagcagcaaggacctgtgcagcgtcagcgcccagagcgcacagtcgcgrccctccacggtgcagctgcctcccgaagccgagatgcgcgcctatgccgcctgccaggatgcgctgtgggcgctggacagcctcggccaggtgttcatca

SEQ ID NO: 5604 - DNA, 201 bp, Homo sapiens; identical to SEQ ID NO: 5590

SEQ ID NO: 5605 - DNA, 201 bp, Homo sapiens
gtagccgggcagctggtttggcccagggcctccttccacattagtagccccagggccagatggagccaaaggtcagctctctgcagcgcgggatgtgctcrgtgatggctttgtcccatcataggggggtgtccccccagagacaaagctgcagagcacattccatgccagacgctctggccaggaagctgaggccgggct

SEQ ID NO: 5606 - DNA, 201 bp, Homo sapiens; identical to SEQ ID NO: 5591

SEQ ID NO: 5607 - DNA, 201 bp, Homo sapiens
cgagtgggaggtcatctgaaggagccctggccgagtcacgcggaggggcccggcgtctgtggcgggcacaggggcttcggagtgactccctggtggacgcrctgcctcaacacttgtccagacacctctggccaggttggacccgcacacttactttcatctatgttggtttctgtctcgttccagaacccacagcctcca

SEQ ID NO: 5608 - DNA, 201 bp, Homo sapiens
cctcaacacttgtccagacacctctggccaggttggacccgcacacttactttcatctatgttggtttctgtctcgttccagaacccacagcctccacccrtggctggcgtgattgctgcagcagtggcgcctcctagctcaggacagtggcgactgcccggctgcatgcactccgattacccacgtgctgccgtcctggt

SEQ ID NO: 5609 - DNA, 201 bp, Homo sapiens
ccgcaccgcaccgcaccgtacctcgccacatctcaccacaccacaccacaccacacctcactgcccacacacggcgcaggctgcccgcctcctggagagcrcacttcagctgaaacagtaaagcctgatgggtgcaaatggaacctggatgtgtgcacgtgtgtcccaggtagggacggcacaggagggtgcatggggcgt

SEQ ID NO: 5610 - DNA, 201 bp, Homo sapiens; identical to SEQ ID NO: 5596

SEQ ID NO: 5611 - DNA, 201 bp, Homo sapiens
gcaccgcaccgcaccgtacctcgccacatctcaccacaccacaccacaccacacctcactgcccacacacggcgcaggctgcccgcctcctggagagcacwcttcagctgaaacagtaaagcctgatgggtgcaaatggaacctggatgtgtgcacgtgtgtcccaggtagggacggcacaggagggtgcatggggcgtgg

SEQ ID NO: 5612 - DNA, 201 bp, Homo sapiens
aagcaggcctgaaggattaacatcaacagtgagagatggtctggagatgtctggatgctcagagcgtgtccacgtgcagcaagcggagaagctgccagggrccacagtttctgagacgaggctcagaggctcttccatggccagctccgtggccagcgagccaaggagcaggagcagctcgctcaactccaccgacagcgg

SEQ ID NO: 5613 - DNA, 201 bp, Homo sapiens; identical to SEQ ID NO: 5600

SEQ ID NO: 5614 - DNA, 201 bp, Homo sapiens; identical to SEQ ID NO: 5603

SEQ ID NO: 5615 - DNA, 201 bp, Homo sapiens; identical to SEQ ID NO: 5589

SEQ ID NO: 5616 - DNA, 201 bp, Homo sapiens
cccaccctgaggacctggaggacgagtgggaggtcatctgaaggagccctggccgagtcacgcggaggggcccggcgtctgtggcgggcacaggggcttcrgagtgactccctggtggacgcgctgcctcaacacttgtccagacacctctggccaggttggacccgcacacttactttcatctatgttggtttctgtctc

SEQ ID NO: 5617 - DNA, 201 bp, Homo sapiens; identical to SEQ ID NO: 5592

SEQ ID NO: 5618 - DNA, 201 bp, Homo sapiens; identical to SEQ ID NO: 5593

SEQ ID NO: 5619 - DNA, 201 bp, Homo sapiens; identical to SEQ ID NO: 5594

SEQ ID NO: 5620 - DNA, 201 bp, Homo sapiens; identical to SEQ ID NO: 5595

SEQ ID NO: 5621 - DNA, 201 bp, Homo sapiens
tgggaggtcatctgaaggagccctggccgagtcacgcggaggggcccggcgtctgtggcgggcacaggggcttcggagtgactccctggtggacgcgctgyctcaacacttgtccagacacctctggccaggttggacccgcacacttactttcatctatgttggtttctgtctcgttccagaacccacagcctccacccg

SEQ ID NO: 5622 - DNA, 201 bp, Homo sapiens
aaaatacctcatttcaaatcaaatcttacaaatttagaagagagatatgttttccgaaaacagtggaagccctttgttccttcccgggtttgtcctgagcytgcactgtcctcgcctgcagcctcagaggggcaggcatccccgcacagacttgactggcagggcggtcacgggacctgcgggctggctccgagtggcagc

SEQ ID NO: 5623 - DNA, 201 bp, Homo sapiens; identical to SEQ ID NO: 5598

SEQ ID NO: 5624 - DNA, 201 bp, Homo sapiens
ttcaaatcaaatcttacaaatttagaagagagatatgttttccgaaaacagtggaagccctttgttccttcccgggtttgtcctgagcctgcactgtcctygcctgcagcctcagaggggcaggcatccccgcacagacttgactggcagggcggtcacgggacctgcgggctggctccgagtggcagcccatgccttctg

SEQ ID NO: 5625 - DNA, 201 bp, Homo sapiens; identical to SEQ ID NO: 5601

SEQ ID NO: 5626 - DNA, 201 bp, Homo sapiens; identical to SEQ ID NO: 5599

SEQ ID NO: 5627 - DNA, 201 bp, Homo sapiens
cctgcagcctcagaggggcaggcatccccgcacagacttgactggcagggcggtcacgggacctgcgggctggctccgagtggcagcccatgccttctgcrgggtatgggttgacacttgacaggttgaaaccagtgcctctatggacggctgctgtggccccttcagacaatgggcagtgcccaccccgcccactggcat

SEQ ID NO: 5628 - DNA, 201 bp, Homo sapiens; identical to SEQ ID NO: 5602

SEQ ID NO: 5629 - DNA, 201 bp, Homo sapiens
cggggtatgggttgacacttgacaggttgaaaccagtgcctctatggacggctgctgtggccccttcagacaatgggcagtgcccaccccgcccactggcrtctgcgtgtgagggctaggccgccctgccacacatcccgccccctcccggaggcagcttcaggacaggacaccaggctggctgctttttttagcctgccc

SEQ ID NO: 5630 - DNA, 201 bp, Homo sapiens; identical to SEQ ID NO: 5590

SEQ ID NO: 5631 - DNA, 201 bp, Homo sapiens; identical to SEQ ID NO: 5605

SEQ ID NO: 5632 - DNA, 201 bp, Homo sapiens; identical to SEQ ID NO: 5591

SEQ ID NO: 5633 - DNA, 201 bp, Homo sapiens; identical to SEQ ID NO: 5607

SEQ ID NO: 5634 - DNA, 201 bp, Homo sapiens; identical to SEQ ID NO: 5608

SEQ ID NO: 5635 - DNA, 201 bp, Homo sapiens; identical to SEQ ID NO: 5609

SEQ ID NO: 5636 - DNA, 201 bp, Homo sapiens; identical to SEQ ID NO: 5596

SEQ ID NO: 5637 - DNA, 201 bp, Homo sapiens; identical to SEQ ID NO: 5611

SEQ ID NO: 5638 - DNA, 201 bp, Homo sapiens; identical to SEQ ID NO: 5612

SEQ ID NO: 5639 - DNA, 201 bp, Homo sapiens; identical to SEQ ID NO: 5600

SEQ ID NO: 5640 - DNA, 201 bp, Homo sapiens; identical to SEQ ID NO: 5603

SEQ ID NO: 5641 - DNA, 201 bp, Homo sapiens; identical to SEQ ID NO: 5589

SEQ ID NO: 5642 - DNA, 201 bp, Homo sapiens; identical to SEQ ID NO: 5616

SEQ ID NO: 5643 - DNA, 201 bp, Homo sapiens; identical to SEQ ID NO: 5592

SEQ ID NO: 5644 - DNA, 201 bp, Homo sapiens; identical to SEQ ID NO: 5593

SEQ ID NO: 5645 - DNA, 201 bp, Homo sapiens; identical to SEQ ID NO: 5594

SEQ ID NO: 5646 - DNA, 201 bp, Homo sapiens; identical to SEQ ID NO: 5595

SEQ ID NO: 5647 - DNA, 201 bp, Homo sapiens; identical to SEQ ID NO: 5621

SEQ ID NO: 5648 - DNA, 201 bp, Homo sapiens; identical to SEQ ID NO: 5622

SEQ ID NO: 5649 - DNA, 201 bp, Homo sapiens; identical to SEQ ID NO: 5598

SEQ ID NO: 5650 - DNA, 201 bp, Homo sapiens; identical to SEQ ID NO: 5624

SEQ ID NO: 5651 - DNA, 201 bp, Homo sapiens; identical to SEQ ID NO: 5601

SEQ ID NO: 5652 - DNA, 201 bp, Homo sapiens; identical to SEQ ID NO: 5599

SEQ ID NO: 5653 - DNA, 201 bp, Homo sapiens; identical to SEQ ID NO: 5627

SEQ ID NO: 5654 - DNA, 201 bp, Homo sapiens; identical to SEQ ID NO: 5602

SEQ ID NO: 5655 - DNA, 201 bp, Homo sapiens; identical to SEQ ID NO: 5629

SEQ ID NO: 5656 - DNA, 201 bp, Homo sapiens; identical to SEQ ID NO: 5590

SEQ ID NO: 5657 - DNA, 201 bp, Homo sapiens; identical to SEQ ID NO: 5605

SEQ ID NO: 5658 - DNA, 201 bp, Homo sapiens; identical to SEQ ID NO: 5591

SEQ ID NO: 5659 - DNA, 201 bp, Homo sapiens; identical to SEQ ID NO: 5607

SEQ ID NO: 5660 - DNA, 201 bp, Homo sapiens; identical to SEQ ID NO: 5608

SEQ ID NO: 5661 - DNA, 201 bp, Homo sapiens; identical to SEQ ID NO: 5609

SEQ ID NO: 5662 - DNA, 201 bp, Homo sapiens; identical to SEQ ID NO: 5596

SEQ ID NO: 5663 - DNA, 201 bp, Homo sapiens; identical to SEQ ID NO: 5611

SEQ ID NO: 5664 - DNA, 201 bp, Homo sapiens; identical to SEQ ID NO: 5612

SEQ ID NO: 5665 - DNA, 201 bp, Homo sapiens; identical to SEQ ID NO: 5600

SEQ ID NO: 5666 - DNA, 201 bp, Homo sapiens; identical to SEQ ID NO: 5603

SEQ ID NO: 5667 - DNA, 201 bp, Homo sapiens; identical to SEQ ID NO: 5589

SEQ ID NO: 5668 - DNA, 201 bp, Homo sapiens; identical to SEQ ID NO: 5616

SEQ ID NO: 5669 - DNA, 201 bp, Homo sapiens; identical to SEQ ID NO: 5592

SEQ ID NO: 5670 - DNA, 201 bp, Homo sapiens; identical to SEQ ID NO: 5593

SEQ ID NO: 5671 - DNA, 201 bp, Homo sapiens; identical to SEQ ID NO: 5594

SEQ ID NO: 5672 - DNA, 201 bp, Homo sapiens; identical to SEQ ID NO: 5595

SEQ ID NO: 5673 - DNA, 201 bp, Homo sapiens; identical to SEQ ID NO: 5621

SEQ ID NO: 5674 - DNA, 201 bp, Homo sapiens; identical to SEQ ID NO: 5622

SEQ ID NO: 5675 - DNA, 201 bp, Homo sapiens; identical to SEQ ID NO: 5598

SEQ ID NO: 5676 - DNA, 201 bp, Homo sapiens; identical to SEQ ID NO: 5624

SEQ ID NO: 5677 - DNA, 201 bp, Homo sapiens; identical to SEQ ID NO: 5601

SEQ ID NO: 5678 - DNA, 201 bp, Homo sapiens; identical to SEQ ID NO: 5599

SEQ ID NO: 5679 - DNA, 201 bp, Homo sapiens; identical to SEQ ID NO: 5627

SEQ ID NO: 5680 - DNA, 201 bp, Homo sapiens; identical to SEQ ID NO: 5602

SEQ ID NO: 5681 - DNA, 201 bp, Homo sapiens; identical to SEQ ID NO: 5629

SEQ ID NO: 5682 - DNA, 201 bp, Homo sapiens
tttcgaaactagtgctaaatccagtatgaatgtggatgaggcttttagttccctggcccgggacatcttgctcaagtcaggaggccggagatcaggaaacrgcaacaagcctcccagtactgacctgaaaacttgtgacataaagaacaccaacaagtgctccctgagctgaggaccctttcttgcctccccaccccggaa

SEQ ID NO: 5683 - DNA, 201 bp, Homo sapiens
acaagtcttactctgttgcctaggctggagtgcagtggcacgatctcggctcactgcaacctcccccggctcccccggtgtccgccatggccaaagcctaygaccacctcttcaagttgctgctgatcggggactcgggggtgggcaagacttgtctgatcattcgctttgcagaggacaacttcaacaacacttacatct

SEQ ID NO: 5684 - DNA, 201 bp, Homo sapiens
tcttcaagttgctgctgatcggggactcgggggtgggcaagacttgtctgatcattcgctttgcagaggacaacttcaacaacacttacatctccaccatyggaattgatttcaagatccgcactgtggatatagaggggaagaagatcaaactacaagtctgggacacagctggccaagagcggttcaagacaataacta

SEQ ID NO: 5685 - DNA, 201 bp, Homo sapiens; identical to SEQ ID NO: 5682

SEQ ID NO: 5686 - DNA, 201 bp, Homo sapiens
tgcactccagcctggacaacagagcgattccgtctcaaaaataaataaatagccccatcccttccccggctcccccggtgtccgccatggccaaagcctaygaccacctcttcaagttgctgctgatcggggactcgggggtgggcaagacttgtctgatcattcgctttgcagaggacaacttcaacaacacttacatct

SEQ ID NO: 5687 - DNA, 201 bp, Homo sapiens; identical to SEQ ID NO: 5684

SEQ ID NO: 5688 - DNA, 201 bp, Homo sapiens
agcaggagtgaagatgtttcattatcttgggcctgggaaaccacttccccaggcttctccctccccccacccccataggaacaggatttggccttagcttytgggcctatcggctgccttccctctacttcctaccacctcttctgccttcctttgagctctgttgggcttggggatcttagttttcttttgtttatttcc

SEQ ID NO: 5689 - DNA, 201 bp, Homo sapiens
tccaaagaattttcactggttgcctgcatctttggctctgctgtgatctgattggaggagggacagtttctggtacccatcctctgatttatacatatgcrttttttcccctctggcctttagatggcctcagccccagccaccatatacccctgcagtttgcactttaattgatggtagttcagttggggtacttgtttt

SEQ ID NO: 5690 - DNA, 201 bp, Homo sapiens
ccaaaacaaactttcttcactttgtattataggtacaagacagcgacttacgtatcttttctcctcctccctagtgttcctccccattttttcagaaaacrcttctgactcctgtcccttccccttctgcttttggtcagtccctgttcttgagcctcttttctcctctccccaggatgcagaaagtggtgaacccaggaa

SEQ ID NO: 5691 - DNA, 201 bp, Homo sapiens
tgaaaacattgcggtatccatgatttggccttgtggagggtgttcctaggtagaggtgagaatggggaggcaagatctcaggcaccaggcaggaggtgccktgtaagctaactgggcggaggtggaggtgcagtgtcaactgtggctctgtaactcttcaaaggcccagtttcccctcacgcagcctcttaggtagcgttt

SEQ ID NO: 5692 - DNA, 201 bp, Homo sapiens
agtttctcatatttgaaaacattgcggtatccatgatttggccttgtggagggtgttcctaggtagaggtgagaatggggaggcaagatctcaggcaccargcaggaggtgccttgtaagctaactgggcggaggtggaggtgcagtgtcaactgtggctctgtaactcttcaaaggcccagtttcccctcacgcagcctc

SEQ ID NO: 5693 - DNA, 201 bp, Homo sapiens
ttaatccatgtaccaataggggctagtaccacagaggcctcctgtggtgccctcgtatcataccacctgttcctgtggagagggaatgaccggcactgaargtaccttacaactggctcatattatcagaggaccttggtcctttctaaatctctagtctctcttcatatccttcatcaggtgttttaagatgtctctgag

SEQ ID NO: 5694 - DNA, 201 bp, Homo sapiens
aaggcccagtttcccctcacgcagcctcttaggtagcgtttcccctaatcgtgggggttggaccccagagtcttccaaagaattttcactggttgcctgcrtctttggctctgctgtgatctgattggaggagggacagtttctggtacccatcctctgatttatacatatgcattttttcccctctggcctttagatggc

SEQ ID NO: 5695 - DNA, 201 bp, Homo sapiens
tggcagggaacaaagctgacctggccaacaaacgtatggtggagtatgaagaggcccaggcatatgcagatgacaacagcttattgttcatggagacttcmgccaagacagctatgaacgtgaatgatctcttcctggcaatagctaagaagttgccaaagagtgaaccccagaatctgggaggtgcagcaggccgaagcc

SEQ ID NO: 5696 - DNA, 201 bp, Homo sapiens
tccccattttttcagaaaacacttctgactcctgtcccttccccttctgcttttggtcagtccctgttcttgagcctcttttctcctctccccaggatgcwgaaagtggtgaacccaggaactgaggaaggaggtttccagttcatttacattaagggccctgggggagaataaagctcagagcaggagggagtaaggaaa

SEQ ID NO: 5697 - DNA, 201 bp, Homo sapiens
caaaggcccagtttcccctcacgcagcctcttaggtagcgtttcccctaatcgtgggggttggaccccagagtcttccaaagaattttcactggttgcctrcatctttggctctgctgtgatctgattggaggagggacagtttctggtacccatcctctgatttatacatatgcattttttcccctctggcctttagatg

SEQ ID NO: 5698 - DNA, 201 bp, Homo sapiens
gaaaacattgcggtatccatgatttggccttgtggagggtgttcctaggtagaggtgagaatggggaggcaagatctcaggcaccaggcaggaggtgcctkgtaagctaactgggcggaggtggaggtgcagtgtcaactgtggctctgtaactcttcaaaggcccagtttcccctcacgcagcctcttaggtagcgtttc

SEQ ID NO: 5699 - DNA, 201 bp, Homo sapiens
cttggtcctttctaaatctctagtctctcttcatatccttcatcaggtgttttaagatgtctctgagaagccatcaaggcaaaagagaactttaagttccttgttccagcccggagttttgggaaagaaagaaaggaaaggtcacagtgacctaggattggaaccttcctgcccttttggcttgcagactgccttctatcc

SEQ ID NO: 5700 - DNA, 201 bp, Homo sapiens
catgaacagtcccagcagaacaagagccagtgttgtagcaactgagggggtggctagcagcaaacaagtatggagctagcacaagagctaagaaataacckccatccctacccctcagcacacaacccctacggtaacagcacactgagccctggctcccaagggctgcctcctgacagctccgtcatggcactttttaac

SEQ ID NO: 5701 - DNA, 201 bp, Homo sapiens
ctacttcctaccacctcttctgccttcctttgagctctgttgggcttggggatcttagttttcttttgtttatttcccagctcatttttttcttctggtcmgtttttttaagggggggtgttgtggttttttgtttttgttttgcttctgagaaagcatttgcctttcttcctctcccaacataacaatcgtggtaacaga

SEQ ID NO: 5702 - DNA, 201 bp, Homo sapiens
agccagtgttgtagcaactgagggggtggctagcagcaaacaagtatggagctagcacaagagctaagaaataacctccatccctacccctcagcacacarcccctacggtaacagcacactgagccctggctcccaagggctgcctcctgacagctccgtcatggcactttttaacgcttcagcaacaaacaccaggcag

SEQ ID NO: 5703 - DNA, 201 bp, Homo sapiens
agtgaagatgtttcattatcttgggcctgggaaaccacttccccaggcttctccctccccccacccccataggaacaggatttggccttagcttctgggcstatcggctgccttccctctacttcctaccacctcttctgccttcctttgagctctgttgggcttggggatcttagttttcttttgtttatttcccagctc

SEQ ID NO: 5704 - DNA, 201 bp, Homo sapiens
ctaccccctactctggggcttgggggtcaactccccccaggacttaccttccaaaacaaactttcttcactttgtattataggtacaagacagcgacttaygtatcttttctcctcctccctagtgttcctccccattttttcagaaaacacttctgactcctgtcccttccccttctgcttttggtcagtccctgttctt

SEQ ID NO: 5705 - DNA, 201 bp, Homo sapiens; identical to SEQ ID NO: 5688

SEQ ID NO: 5706 - DNA, 201 bp, Homo sapiens; identical to SEQ ID NO: 5689

SEQ ID NO: 5707 - DNA, 201 bp, Homo sapiens; identical to SEQ ID NO: 5690

SEQ ID NO: 5708 - DNA, 201 bp, Homo sapiens; identical to SEQ ID NO: 5691

SEQ ID NO: 5709 - DNA, 201 bp, Homo sapiens; identical to SEQ ID NO: 5692

SEQ ID NO: 5710 - DNA, 201 bp, Homo sapiens; identical to SEQ ID NO: 5693

SEQ ID NO: 5711 - DNA, 201 bp, Homo sapiens; identical to SEQ ID NO: 5694

SEQ ID NO: 5712 - DNA, 201 bp, Homo sapiens; identical to SEQ ID NO: 5695

SEQ ID NO: 5713 - DNA, 201 bp, Homo sapiens; identical to SEQ ID NO: 5696

SEQ ID NO: 5714 - DNA, 201 bp, Homo sapiens; identical to SEQ ID NO: 5697

SEQ ID NO: 5715 - DNA, 201 bp, Homo sapiens; identical to SEQ ID NO: 5698

SEQ ID NO: 5716 - DNA, 201 bp, Homo sapiens; identical to SEQ ID NO: 5699

SEQ ID NO: 5717 - DNA, 201 bp, Homo sapiens; identical to SEQ ID NO: 5700

SEQ ID NO: 5718 - DNA, 201 bp, Homo sapiens; identical to SEQ ID NO: 5701

SEQ ID NO: 5719 - DNA, 201 bp, Homo sapiens; identical to SEQ ID NO: 5702

SEQ ID NO: 5720 - DNA, 201 bp, Homo sapiens; identical to SEQ ID NO: 5703

SEQ ID NO: 5721 - DNA, 201 bp, Homo sapiens; identical to SEQ ID NO: 5704

SEQ ID NO: 5722 - DNA, 201 bp, Homo sapiens; identical to SEQ ID NO: 5688

SEQ ID NO: 5723 - DNA, 201 bp, Homo sapiens; identical to SEQ ID NO: 5689

SEQ ID NO: 5724 - DNA, 201 bp, Homo sapiens; identical to SEQ ID NO: 5690

SEQ ID NO: 5725 - DNA, 201 bp, Homo sapiens; identical to SEQ ID NO: 5691

SEQ ID NO: 5726 - DNA, 201 bp, Homo sapiens; identical to SEQ ID NO: 5692

SEQ ID NO: 5727 - DNA, 201 bp, Homo sapiens; identical to SEQ ID NO: 5693

SEQ ID NO: 5728 - DNA, 201 bp, Homo sapiens; identical to SEQ ID NO: 5694

SEQ ID NO: 5729 - DNA, 201 bp, Homo sapiens
actacaggggtgcccaagctgcaatcgtggtttacgacattactaatcaggaggcccaggcatatgcagatgacaacagcttattgttcatggagacttcmgccaagacagctatgaacgtgaatgatctcttcctggcaatagctaagaagttgccaaagagtgaaccccagaatctgggaggtgcagcaggccgaagcc

SEQ ID NO: 5730 - DNA, 201 bp, Homo sapiens; identical to SEQ ID NO: 5696

SEQ ID NO: 5731 - DNA, 201 bp, Homo sapiens; identical to SEQ ID NO: 5697

SEQ ID NO: 5732 - DNA, 201 bp, Homo sapiens; identical to SEQ ID NO: 5698

SEQ ID NO: 5733 - DNA, 201 bp, Homo sapiens; identical to SEQ ID NO: 5699

SEQ ID NO: 5734 - DNA, 201 bp, Homo sapiens; identical to SEQ ID NO: 5700

SEQ ID NO: 5735 - DNA, 201 bp, Homo sapiens; identical to SEQ ID NO: 5701

SEQ ID NO: 5736 - DNA, 201 bp, Homo sapiens; identical to SEQ ID NO: 5702

SEQ ID NO: 5737 - DNA, 201 bp, Homo sapiens; identical to SEQ ID NO: 5703

SEQ ID NO: 5738 - DNA, 201 bp, Homo sapiens; identical to SEQ ID NO: 5704

SEQ ID NO: 5739 - DNA, 201 bp, Homo sapiens; identical to SEQ ID NO: 5688

SEQ ID NO: 5740 - DNA, 201 bp, Homo sapiens; identical to SEQ ID NO: 5689

SEQ ID NO: 5741 - DNA, 201 bp, Homo sapiens; identical to SEQ ID NO: 5690

SEQ ID NO: 5742 - DNA, 201 bp, Homo sapiens; identical to SEQ ID NO: 5691

SEQ ID NO: 5743 - DNA, 201 bp, Homo sapiens; identical to SEQ ID NO: 5692

SEQ ID NO: 5744 - DNA, 201 bp, Homo sapiens; identical to SEQ ID NO: 5693

SEQ ID NO: 5745 - DNA, 201 bp, Homo sapiens; identical to SEQ ID NO: 5694

SEQ ID NO: 5746 - DNA, 201 bp, Homo sapiens; identical to SEQ ID NO: 5695

SEQ ID NO: 5747 - DNA, 201 bp, Homo sapiens; identical to SEQ ID NO: 5696

SEQ ID NO: 5748 - DNA, 201 bp, Homo sapiens; identical to SEQ ID NO: 5697

SEQ ID NO: 5749 - DNA, 201 bp, Homo sapiens; identical to SEQ ID NO: 5698

SEQ ID NO: 5750 - DNA, 201 bp, Homo sapiens; identical to SEQ ID NO: 5700

SEQ ID NO: 5751 - DNA, 201 bp, Homo sapiens; identical to SEQ ID NO: 5701

SEQ ID NO: 5752 - DNA, 201 bp, Homo sapiens; identical to SEQ ID NO: 5702

SEQ ID NO: 5753 - DNA, 201 bp, Homo sapiens; identical to SEQ ID NO: 5703

SEQ ID NO: 5754 - DNA, 201 bp, Homo sapiens; identical to SEQ ID NO: 5704

SEQ ID NO: 5755 - DNA, 201 bp, Homo sapiens
gtttcatttattctttggctgccatacctggatatatggttctcttgaggtgtatgaaatctgaagagaagtcccttggtgtgggattacatacattttgyacaagagtatttgctggcattcctgcacctatatattttggcgctttaatggattccacatgtttacactggggaactttgaaatgtggtgagtcagggg

SEQ ID NO: 5756 - DNA, 201 bp, Homo sapiens
cttttttcagaattagagaacatgctgtacaacttaattgttttaaaaatcagtagagatataatagataactttttcttgtctttaagaacctaaaaaamctcttaactcaaaataataaaatgttcactaatgatatttctaaggtatcagtgacacttgagttttcctaggagggacatcaataacagccccctaaag

SEQ ID NO: 5757 - DNA, 201 bp, Homo sapiens
aagatttatatgtggaaaatgacatctttgctgattgcaatgtggattgcaactgtccatctaaaatatgggatcctgtgtgtggaaacaatggcttgtcrtatctgtcagcttgtcttgctggttgtgagacatccattggaacgggaataaacatggtgttccaaaattgcagctgtattcaaacatcaggaaattcat

SEQ ID NO: 5758 - DNA, 201 bp, Homo sapiens
ttggacttttgttggcatcattctgtgcaaatgtttatgttgacactggatttgtgaacacagatgatctgatcataactcccactgacactcgttgggtyggtgcatggtggtttggctttctgatttgtgcaggagttaacgtgctcactgccattccttttttctttttgcccaacacacttccaaaggaaggactag

SEQ ID NO: 5759 - DNA, 201 bp, Homo sapiens
acactggatttgtgaacacagatgatctgatcataactcccactgacactcgttgggtcggtgcatggtggtttggctttctgatttgtgcaggagttaaygtgctcactgccattccttttttctttttgcccaacacacttccaaaggaaggactagagactaatgctgacatcattaaaaatgaaaatgaagacaaac

SEQ ID NO: 5760 - DNA, 201 bp, Homo sapiens
aaataataaaatgttcactaatgatatttctaaggtatcagtgacacttgagttttcctaggagggacatcaataacagccccctaaagaagattcttagmgccagctttatttttatgttgaaacagcaatttcccttaattcatcgaagtaagggtgtacttcctacatctccttctactaatacttctaaaaattttc

SEQ ID NO: 5761 - DNA, 201 bp, Homo sapiens
ttatagagacaaaagtcaaagggaaggaaaatgagtgcaaagatatataccaaaagtccacggttttgaaagatgatgaattgaaaactaaattgtaattktcctattatattacttttttcagaattagagaacatgctgtacaacttaattgttttaaaaatcagtagagatataatagataactttttcttgtcttta

SEQ ID NO: 5762 - DNA, 201 bp, Homo sapiens
gggtagaagtaagacatatcaagatttaaaacataaatagcttggaacaccctgaagagcaacatgggagaaactgagaaaagaattgaaacccatagaayaagatgtctttccaagttgaagatgtttctgttggcaataacatgtgcatttgtatccaaaacactgtctggatcttatatgaattccatgctcacacaa

SEQ ID NO: 5763 - DNA, 201 bp, Homo sapiens
ttttaagaccaacgcaggatccatcagagtgtacaaaggaagttaaatcattaatgtgggtgtacgtcctagtaggcaatattgtacgtggaatgggtgamactcccatcctgcctttgggtatttcctatatagaagattttgccaaatttgaaaattctcctttatatattgggcttgtagaaacaggagctattattg

SEQ ID NO: 5764 - DNA, 201 bp, Homo sapiens
cttatagagacaaaagtcaaagggaaggaaaatgagtgcaaagatatataccaaaagtccacggttttgaaagatgatgaattgaaaactaaattgtaatygtcctattatattacttttttcagaattagagaacatgctgtacaacttaattgttttaaaaatcagtagagatataatagataactttttcttgtcttt

SEQ ID NO: 5765 - DNA, 201 bp, Homo sapiens
ggttatgggcttaggctgtttcttaaaatcactacctcatttcctcatgaaccaatatgaatatgaatctacagtttcagtttcaggcaacttgtcctcawacagtttcttgtgtatggaaaatggaacccagattttaagaccaacgcaggatccatcagagtgtacaaaggaagttaaatcattaatgtgggtgtacgt

SEQ ID NO: 5766 - DNA, 201 bp, Homo sapiens; identical to SEQ ID NO: 5755

SEQ ID NO: 5767 - DNA, 201 bp, Homo sapiens; identical to SEQ ID NO: 5756

SEQ ID NO: 5768 - DNA, 201 bp, Homo sapiens; identical to SEQ ID NO: 5757

SEQ ID NO: 5769 - DNA, 201 bp, Homo sapiens; identical to SEQ ID NO: 5758

SEQ ID NO: 5770 - DNA, 201 bp, Homo sapiens; identical to SEQ ID NO: 5759

SEQ ID NO: 5771 - DNA, 201 bp, Homo sapiens; identical to SEQ ID NO: 5760

SEQ ID NO: 5772 - DNA, 201 bp, Homo sapiens; identical to SEQ ID NO: 5761

SEQ ID NO: 5773 - DNA, 201 bp, Homo sapiens; identical to SEQ ID NO: 5762

SEQ ID NO: 5774 - DNA, 201 bp, Homo sapiens; identical to SEQ ID NO: 5763

SEQ ID NO: 5775 - DNA, 201 bp, Homo sapiens; identical to SEQ ID NO: 5764

SEQ ID NO: 5776 - DNA, 201 bp, Homo sapiens; identical to SEQ ID NO: 5765

SEQ ID NO: 5777 - DNA, 201 bp, Homo sapiens
gtttcatttattctttggctgccatacctggatatatggttctcttgaggtgtatgaaatctgaagagaagtcccttggtgtgggattacatacattttgyacaagagtatttggtaaaaatagttattttttcccacatcctatcagaacaatattattattattattttttattacactttaagttttagggtacatgt

SEQ ID NO: 5778 - DNA, 201 bp, Homo sapiens
tatacatgtgccatgttggtgtgctgcacccattaactcatcatttaacattaggtgaatctcctaatgctatccctccccccttcccccaccccacaacrggccgtggtgtgtgatgttccccttcctgtgtccatgtgcagaacaatattaaatactagataaacaaggtaatattatttcagaaaagcagtctagcaa

SEQ ID NO: 5779 - DNA, 201 bp, Homo sapiens; identical to SEQ ID NO: 5757

SEQ ID NO: 5780 - DNA, 201 bp, Homo sapiens
ctgtgtccatgtgcagaacaatattaaatactagataaacaaggtaatattatttcagaaaagcagtctagcaaatgtcccttctgtatgtaaaaagcacrttataaatatgagaatgcagcacacaaagagatagagaatctcttttacttgaaaaggccctgtctgaccttaattacactattctttgtttgaagattt

SEQ ID NO: 5781 - DNA, 201 bp, Homo sapiens; identical to SEQ ID NO: 5758

SEQ ID NO: 5782 - DNA, 201 bp, Homo sapiens
ctgaagagaagtcccttggtgtgggattacatacattttgcacaagagtatttggtaaaaatagttattttttcccacatcctatcagaacaatattattmttattattttttattacactttaagttttagggtacatgtgcacaacgtgcaggtttgttacatatgtatacatgtgccatgttggtgtgctgcacccat

SEQ ID NO: 5783 - DNA, 201 bp, Homo sapiens; identical to SEQ ID NO: 5759

SEQ ID NO: 5784 - DNA, 201 bp, Homo sapiens
tgaagagaagtcccttggtgtgggattacatacattttgcacaagagtatttggtaaaaatagttattttttcccacatcctatcagaacaatattattaktattattttttattacactttaagttttagggtacatgtgcacaacgtgcaggtttgttacatatgtatacatgtgccatgttggtgtgctgcacccatt

SEQ ID NO: 5785 - DNA, 201 bp, Homo sapiens; identical to SEQ ID NO: 5763

SEQ ID NO: 5786 - DNA, 201 bp, Homo sapiens; identical to SEQ ID NO: 5765

SEQ ID NO: 5787 - DNA, 201 bp, Homo sapiens
atcctatcagaacaatattattattattattttttattacactttaagttttagggtacatgtgcacaacgtgcaggtttgttacatatgtatacatgtgycatgttggtgtgctgcacccattaactcatcatttaacattaggtgaatctcctaatgctatccctccccccttcccccaccccacaacaggccgtggtg

SEQ ID NO: 5788 - DNA, 201 bp, Homo sapiens; identical to SEQ ID NO: 5755

SEQ ID NO: 5789 - DNA, 201 bp, Homo sapiens; identical to SEQ ID NO: 5756

SEQ ID NO: 5790 - DNA, 201 bp, Homo sapiens; identical to SEQ ID NO: 5757

SEQ ID NO: 5791 - DNA, 201 bp, Homo sapiens; identical to SEQ ID NO: 5758

SEQ ID NO: 5792 - DNA, 201 bp, Homo sapiens; identical to SEQ ID NO: 5759

SEQ ID NO: 5793 - DNA, 201 bp, Homo sapiens; identical to SEQ ID NO: 5760

SEQ ID NO: 5794 - DNA, 201 bp, Homo sapiens; identical to SEQ ID NO: 5761

SEQ ID NO: 5795 - DNA, 201 bp, Homo sapiens; identical to SEQ ID NO: 5762

SEQ ID NO: 5796 - DNA, 201 bp, Homo sapiens; identical to SEQ ID NO: 5763

SEQ ID NO: 5797 - DNA, 201 bp, Homo sapiens; identical to SEQ ID NO: 5764

SEQ ID NO: 5798 - DNA, 201 bp, Homo sapiens; identical to SEQ ID NO: 5765

SEQ ID NO: 5799 - DNA, 201 bp, Homo sapiens
tatctgaatggcgtaaaggtgccaggaatcgtccgtctccggaccctgctctgcaaggtccttggagtgctgttcagtgtggctggagggctcttcgtggrgaaggaaggccccatgatccacagtggttcggtggtgggagctggcctccctcagtttcagagcatctccttacggaagatccagtttaacttcccctat

SEQ ID NO: 5800 - DNA, 201 bp, Homo sapiens
tcctctgacaaagagtaaaacgacaaggaatatcggcctgaattctcttcccaagaagaaagaaagcacaccaacgcaggcatttgtcttctgtccatggkgctgaagtttattcactttcaaaccactttcagtaacagcaaattctttagaaaaggaaaatacagggaaagggataaacctcactgacttggaggaaat

SEQ ID NO: 5801 - DNA, 201 bp, Homo sapiens
tcacagagaaccgcggtaacgagaaggagttcatgaagggcaaccagctcatcagcaacaacatcaagttcaagaaatccagcatcctcacccgggctggygagcagcgcaaacggagccagtccatgaagtcctacccatccagcgagctacggaacatgtgtgatgagcacatcgcctctgaggagccagccgagaagg

SEQ ID NO: 5802 - DNA, 201 bp, Homo sapiens
gttcatgactaggtttaggaattgggcactgagaaaattctcaatatttcagagagtccttcccttatttgggactcttaacacggtatcctcgctagttkgttttaagggaaacactctgctcctgggtgtgagcagaggctctggtcttgccctgtggtttgactctccttagaaccaccgcccaccagaaacataaag

SEQ ID NO: 5803 - DNA, 201 bp, Homo sapiens
aggactacccgcggtaccccgacatccacgacctggacctgacgctgctcaacccgcgcatgatcgtggatgtcaccccatacatgaacccttcgcctttyaccgtctcgcccaacacccacgtctcccaagtcttcaacctgttcagaacgatgggcctgcgccacctgcccgtggtgaacgctgtgggagagatcgtgg

SEQ ID NO: 5804 - DNA, 201 bp, Homo sapiens
ggcggtgaagtggatggtggtgtttgccattggagtctgcactggcctggtgggtctctttgtggacttttttgtgcgactcttcacccaactcaagttcrgagtggtacagacattttccgcagcggtggaggagtgcagccagaaaggctgcctcgctctgtctctccttgaactcctgggttttaacctcacctttgt

SEQ ID NO: 5805 - DNA, 201 bp, Homo sapiens
ctctagaattcatctcctcctgctagcagccgcgtcctggaggagcagcggatggggaatccattctgtttcttcctggtgtttaggaagttgccccacamacagattgccccgatgtccaaccagaagaagtgaaactgctgctgggtctggagaggtgaagacccgtggccagcttctgttgttgccatcggccattgc

SEQ ID NO: 5806 - DNA, 201 bp, Homo sapiens
cggccattgctttttgttcgcttgcttttggttttgcaagaagagcggcctctgtctctgatctgcttcaaatcatcattccatcagtgacagaagtggcygttccatcagtggtcgcagccagttcagctcctgcatccatccccaagtgttctgagtggaatttgaggcctccccaaccacctaccaaaaaaggagggt

SEQ ID NO: 5807 - DNA, 201 bp, Homo sapiens
ccagcccaccctctcctggtgctgcctggggaggcaaatcatgctcactccggcgggcacagctggctggggctgttccggggcatggaagattcccagtyacccactcactcagaaagccgggagtcatcggacaccttgctggtcagaggtcctgggggtggttttgaaccatcagagcttggacttttctgacttccc

SEQ ID NO: 5808 - DNA, 201 bp, Homo sapiens
gcgggcacagctggctggggctgttccggggcatggaagattcccagtcacccactcactcagaaagccgggagtcatcggacaccttgctggtcagaggycctgggggtggttttgaaccatcagagcttggacttttctgacttccccagcaaggatcttcccacttcctgctccctgtgttcccaccctccagtgttg

SEQ ID NO: 5809 - DNA, 201 bp, Homo sapiens
tcatggagcccaacctgacctacgtctacccgcacacccgcatccagtctctggtgagcatcctgcgcaccacggtccaccatgccttcccggtggtcacrgagaaccgcggtaacgagaaggagttcatgaagggcaaccagctcatcagcaacaacatcaagttcaagaaatccagcatcctcacccgggctggcgagc

SEQ ID NO: 5810 - DNA, 201 bp, Homo sapiens
ggagatgccagtgacaacatacagttcatgactaggtttaggaattgggcactgagaaaattctcaatatttcagagagtccttcccttatttgggactcytaacacggtatcctcgctagttggttttaagggaaacactctgctcctgggtgtgagcagaggctctggtcttgccctgtggtttgactctccttagaac

SEQ ID NO: 5811 - DNA, 201 bp, Homo sapiens
cagtgacagaagtggctgttccatcagtggtcgcagccagttcagctcctgcatccatccccaagtgttctgagtggaatttgaggcctccccaaccaccyaccaaaaaaggagggtgaaatgaaaggaagaagaaaaactcagcattctttcctctgacaaagagtaaaacgacaaggaatatcggcctgaattctcttc

SEQ ID NO: 5812 - DNA, 201 bp, Homo sapiens
ggaaagactatgagagtttggattatgatcgctgtatcaatgacccttacctggaagttttggagaccatggataataagaaaggtcgaagatatgaggcrgtgaagtggatggtggtgtttgccattggagtctgcactggcctggtgggtctctttgtggacttttttgtgcgactcttcacccaactcaagttcggag

SEQ ID NO: 5813 - DNA, 201 bp, Homo sapiens; identical to SEQ ID NO: 5799

SEQ ID NO: 5814 - DNA, 201 bp, Homo sapiens; identical to SEQ ID NO: 5802

SEQ ID NO: 5815 - DNA, 201 bp, Homo sapiens
ggcggtgaagtggatggtggtgtttgccattggagtctgcactggcctggtgggtctctttgtggacttttttgtgcgactcttcacccaactcaagttcrgagtggtacagacatcggtggaggagtgcagccagaaaggctgcctcgctctgtctctccttgaactcctgggttttaacctcacctttgtcttcctggc

SEQ ID NO: 5816 - DNA, 201 bp, Homo sapiens
ttcttctccaggctggcccgccccctctgactaggcacccaaagtgagcatctgggcattgggcattcatgcttatcttcccccaccttctacatggtatyagtcccagcaggcatccctggggcagacgtgctttggctcaagatggccttcatttacgtttagttttttttaaaaccgtggaggttgcccacgggcctc

SEQ ID NO: 5817 - DNA, 201 bp, Homo sapiens
gtgacaggaaagcctttcgagaggcccaaggtggcctcgccagccctgcagtattgatgtgcagtattgcaccacagctctgcggaccttggccattgccrcagtcgcagcttccttttttctgtttgcactgtttgtttgtatgatgttagctaattccactgtgtatataaattgtattttttttaatttgtaaaatgc

SEQ ID NO: 5818 - DNA, 201 bp, Homo sapiens; identical to SEQ ID NO: 5807

SEQ ID NO: 5819 - DNA, 201 bp, Homo sapiens; identical to SEQ ID NO: 5808

SEQ ID NO: 5820 - DNA, 201 bp, Homo sapiens; identical to SEQ ID NO: 5810

SEQ ID NO: 5821 - DNA, 201 bp, Homo sapiens; identical to SEQ ID NO: 5812

SEQ ID NO: 5822 - DNA, 201 bp, Homo sapiens; identical to SEQ ID NO: 5799

SEQ ID NO: 5823 - DNA, 201 bp, Homo sapiens; identical to SEQ ID NO: 5801

SEQ ID NO: 5824 - DNA, 201 bp, Homo sapiens; identical to SEQ ID NO: 5802

SEQ ID NO: 5825 - DNA, 201 bp, Homo sapiens; identical to SEQ ID NO: 5803

SEQ ID NO: 5826 - DNA, 201 bp, Homo sapiens; identical to SEQ ID NO: 5815

SEQ ID NO: 5827 - DNA, 201 bp, Homo sapiens; identical to SEQ ID NO: 5816

SEQ ID NO: 5828 - DNA, 201 bp, Homo sapiens; identical to SEQ ID NO: 5817

SEQ ID NO: 5829 - DNA, 201 bp, Homo sapiens; identical to SEQ ID NO: 5807

SEQ ID NO: 5830 - DNA, 201 bp, Homo sapiens; identical to SEQ ID NO: 5808

SEQ ID NO: 5831 - DNA, 201 bp, Homo sapiens; identical to SEQ ID NO: 5809

SEQ ID NO: 5832 - DNA, 201 bp, Homo sapiens; identical to SEQ ID NO: 5810

SEQ ID NO: 5833 - DNA, 201 bp, Homo sapiens; identical to SEQ ID NO: 5812

SEQ ID NO: 5834 - DNA, 201 bp, Homo sapiens; identical to SEQ ID NO: 5799

SEQ ID NO: 5835 - DNA, 201 bp, Homo sapiens; identical to SEQ ID NO: 5800

SEQ ID NO: 5836 - DNA, 201 bp, Homo sapiens; identical to SEQ ID NO: 5801

SEQ ID NO: 5837 - DNA, 201 bp, Homo sapiens; identical to SEQ ID NO: 5802

SEQ ID NO: 5838 - DNA, 201 bp, Homo sapiens; identical to SEQ ID NO: 5803

SEQ ID NO: 5839 - DNA, 201 bp, Homo sapiens; identical to SEQ ID NO: 5804

SEQ ID NO: 5840 - DNA, 201 bp, Homo sapiens; identical to SEQ ID NO: 5805

SEQ ID NO: 5841 - DNA, 201 bp, Homo sapiens; identical to SEQ ID NO: 5806

SEQ ID NO: 5842 - DNA, 201 bp, Homo sapiens; identical to SEQ ID NO: 5807

SEQ ID NO: 5843 - DNA, 201 bp, Homo sapiens; identical to SEQ ID NO: 5808

SEQ ID NO: 5844 - DNA, 201 bp, Homo sapiens; identical to SEQ ID NO: 5809

SEQ ID NO: 5845 - DNA, 201 bp, Homo sapiens; identical to SEQ ID NO: 5810

SEQ ID NO: 5846 - DNA, 201 bp, Homo sapiens; identical to SEQ ID NO: 5811

SEQ ID NO: 5847 - DNA, 201 bp, Homo sapiens; identical to SEQ ID NO: 5812

SEQ ID NO: 5848 - DNA, 201 bp, Homo sapiens; identical to SEQ ID NO: 5799

SEQ ID NO: 5849 - DNA, 201 bp, Homo sapiens; identical to SEQ ID NO: 5802

SEQ ID NO: 5850 - DNA, 201 bp, Homo sapiens; identical to SEQ ID NO: 5815

SEQ ID NO: 5851 - DNA, 201 bp, Homo sapiens; identical to SEQ ID NO: 5816

SEQ ID NO: 5852 - DNA, 201 bp, Homo sapiens; identical to SEQ ID NO: 5817

SEQ ID NO: 5853 - DNA, 201 bp, Homo sapiens; identical to SEQ ID NO: 5807

SEQ ID NO: 5854 - DNA, 201 bp, Homo sapiens; identical to SEQ ID NO: 5808

SEQ ID NO: 5855 - DNA, 201 bp, Homo sapiens; identical to SEQ ID NO: 5810

SEQ ID NO: 5856 - DNA, 201 bp, Homo sapiens; identical to SEQ ID NO: 5812

SEQ ID NO: 5857 - DNA, 201 bp, Homo sapiens; identical to SEQ ID NO: 5799

SEQ ID NO: 5858 - DNA, 201 bp, Homo sapiens; identical to SEQ ID NO: 5802

SEQ ID NO: 5859 - DNA, 201 bp, Homo sapiens; identical to SEQ ID NO: 5815

SEQ ID NO: 5860 - DNA, 201 bp, Homo sapiens; identical to SEQ ID NO: 5816

SEQ ID NO: 5861 - DNA, 201 bp, Homo sapiens; identical to SEQ ID NO: 5817

SEQ ID NO: 5862 - DNA, 201 bp, Homo sapiens; identical to SEQ ID NO: 5807

SEQ ID NO: 5863 - DNA, 201 bp, Homo sapiens; identical to SEQ ID NO: 5808

SEQ ID NO: 5864 - DNA, 201 bp, Homo sapiens; identical to SEQ ID NO: 5810

SEQ ID NO: 5865 - DNA, 201 bp, Homo sapiens; identical to SEQ ID NO: 5812

SEQ ID NO: 5866 - DNA, 201 bp, Homo sapiens; identical to SEQ ID NO: 5799

SEQ ID NO: 5867 - DNA, 201 bp, Homo sapiens; identical to SEQ ID NO: 5800

SEQ ID NO: 5868 - DNA, 201 bp, Homo sapiens; identical to SEQ ID NO: 5801

SEQ ID NO: 5869 - DNA, 201 bp, Homo sapiens; identical to SEQ ID NO: 5802

SEQ ID NO: 5870 - DNA, 201 bp, Homo sapiens; identical to SEQ ID NO: 5803

SEQ ID NO: 5871 - DNA, 201 bp, Homo sapiens; identical to SEQ ID NO: 5804

SEQ ID NO: 5872 - DNA, 201 bp, Homo sapiens; identical to SEQ ID NO: 5805

SEQ ID NO: 5873 - DNA, 201 bp, Homo sapiens; identical to SEQ ID NO: 5806

SEQ ID NO: 5874 - DNA, 201 bp, Homo sapiens; identical to SEQ ID NO: 5807

SEQ ID NO: 5875 - DNA, 201 bp, Homo sapiens; identical to SEQ ID NO: 5808

SEQ ID NO: 5876 - DNA, 201 bp, Homo sapiens; identical to SEQ ID NO: 5809

SEQ ID NO: 5877 - DNA, 201 bp, Homo sapiens; identical to SEQ ID NO: 5810

SEQ ID NO: 5878 - DNA, 201 bp, Homo sapiens; identical to SEQ ID NO: 5811

SEQ ID NO: 5879 - DNA, 201 bp, Homo sapiens; identical to SEQ ID NO: 5812

SEQ ID NO: 5880 - DNA, 201 bp, Homo sapiens
gggagctgggcaccagccaagcgtcaccctctgtttccccgcacgggtaccagcgtcgaggagaaagaatcctgaggcacggcggtgagataaccaaggaytcttttttactcttctcacacctttgaagtgggagcctcttgagtcaaatcagtaagaatgcggctcttgcagctgagggtctggggggctgttggggct

SEQ ID NO: 5881 - DNA, 119 bp, Homo sapiens
tttgatggtgacttcctcgcctctcccaccccatgcattaaattttaaggtagaacctcacctgttactgaaagtggtttgaaagtgaataaacttcagcmccatggacagaagacaaa

SEQ ID NO: 5882 - DNA, 201 bp, Homo sapiens
gcagggctgggcctagggacagactgcaagaggctcctgtcccctggggtctctgctgcatttgtgtcatcttgttgccatggagttgtgatcatcccatytaagctgcagcttcctgtcaacacttctcacatcttatgctaactgtagataaagtggtttgatggtgacttcctcgcctctcccaccccatgcattaaa

SEQ ID NO: 5883 - DNA, 201 bp, Homo sapiens
gatggaggtgccctcgggcggggcccctgggactcctctgatcgatctgccctcctaaaaagcaagctgagggcgctgctcactgcccctcggagcctgcrgagatccagctgcttcgggggcaggatggacaggattggagcccagagcggactgggctgtaacagcttccggtaccgaagataacagccagggaggaca

SEQ ID NO: 5884 - DNA, 201 bp, Homo sapiens
cggtaccgaagataacagccagggaggacaagcagggctgggcctagggacagactgcaagaggctcctgtcccctggggtctctgctgcatttgtgtcaycttgttgccatggagttgtgatcatcccatctaagctgcagcttcctgtcaacacttctcacatcttatgctaactgtagataaagtggtttgatggtga

SEQ ID NO: 5885 - DNA, 201 bp, Homo sapiens
cagcttccggtaccgaagataacagccagggaggacaagcagggctgggcctagggacagactgcaagaggctcctgtcccctggggtctctgctgcattygtgtcatcttgttgccatggagttgtgatcatcccatctaagctgcagcttcctgtcaacacttctcacatcttatgctaactgtagataaagtggtttg

SEQ ID NO: 5886 - DNA, 201 bp, Homo sapiens
tccatttgtctcgggctgctggctgcctgccatttcctcctctccacccttatttggaggccctgacagctgagccacaaacaaaccaggggagctgggcmccagccaagcgtcaccctctgtttccccgcacgggtaccagcgtcgaggagaaagaatcctgaggcacggcggtgagataaccaaggactcttttttact

SEQ ID NO: 5887 - DNA, 201 bp, Homo sapiens
ggactgggctgtaacagcttccggtaccgaagataacagccagggaggacaagcagggctgggcctagggacagactgcaagaggctcctgtcccctgggktctctgctgcatttgtgtcatcttgttgccatggagttgtgatcatcccatctaagctgcagcttcctgtcaacacttctcacatcttatgctaactgta

SEQ ID NO: 5888 - DNA, 201 bp, Homo sapiens
gctcactgcccctcggagcctgcggagatccagctgcttcgggggcaggatggacaggattggagcccagagcggactgggctgtaacagcttccggtacygaagataacagccagggaggacaagcagggctgggcctagggacagactgcaagaggctcctgtcccctggggtctctgctgcatttgtgtcatcttgtt

SEQ ID NO: 5889 - DNA, 201 bp, Homo sapiens
gctggaccatttggaagaaaagatgcctttagaagatgaggtcgtgcccccacaagtgctcagtgagccgaatgaagaagcgggggctgctctcagccccytccctgaggtgcctccctggaccggggaagtcagcccagcccagagagatggaggtgccctcgggcggggcccctgggactcctctgatcgatctgccct

SEQ ID NO: 5890 - DNA, 201 bp, Homo sapiens
ccacccttatttggaggccctgacagctgagccacaaacaaaccaggggagctgggcaccagccaagcgtcaccctctgtttccccgcacgggtaccagcrtcgaggagaaagaatcctgaggcacggcggtgagataaccaaggactcttttttactcttctcacacctttgaagtgggagcctcttgagtcaaatcagt

SEQ ID NO: 5891 - DNA, 201 bp, Homo sapiens
cgccagcatgagctccttctccaccaccaccgtgagcttcctccttttactggcattccagctcctaggtcagaccagagctaatcccatgtacaatgccrtgtccaacgcagacctgatggatttcaagaatttgctggaccatttggaagaaaagatgcctttagaagatgaggtcgtgcccccacaagtgctcagtga

SEQ ID NO: 5892 - DNA, 201 bp, Homo sapiens
tccctgcccctccaggtgtccagggtaaagtgtaactcagactgacctgtggggcacagggggcaccagctggccttgccctctctggtctgggctgtctrccttcctcactgtatctttgcccagacccacctgggccagtaggcccctgtccccagccacacaccttagatgctggcatgccttactccaggtgcctgt

SEQ ID NO: 5893 - DNA, 201 bp, Homo sapiens
gaaagaacttccacttcgtgcaccgctcggccgacgtggagagcgtggtgagcgggaccctccgctcagccttcgagtacggtggccagaagtgttccgcstgctcgcgtctctacgtgccgcactcgctgtggccgcagatcaaagggcggctgctggaggagcacagtcggatcaaagtgggcgaccctgcagaggatt

SEQ ID NO: 5894 - DNA, 201 bp, Homo sapiens
actttgtggagccctgcatcgtggagagcaaggaccctcaggagcccatcatgaaggaggagatcttcgggcctgtactgtctgtgtacgtctacccggaygacaagtacaaggagacgctgcagctggttgacagcaccaccagctatggcctcacgggggcagtgttctcccaggataaggacgtcgtgcaggaggcca

SEQ ID NO: 5895 - DNA, 201 bp, Homo sapiens
tggagagcgtggtgagcgggaccctccgctcagccttcgagtacggtggccagaagtgttccgcctgctcgcgtctctacgtgccgcactcgctgtggccrcagatcaaagggcggctgctggaggagcacagtcggatcaaagtgggcgaccctgcagaggattttgggaccttcttctctgcagtgattgatgccaagt

SEQ ID NO: 5896 - DNA, 201 bp, Homo sapiens
caaggaccctcaggagcccatcatgaaggaggagatcttcgggcctgtactgtctgtgtacgtctacccggatgacaagtacaaggagacgctgcagctgrttgacagcaccaccagctatggcctcacgggggcagtgttctcccaggataaggacgtcgtgcaggaggccacaaaggtgctgaggaatgctgccggcaa

SEQ ID NO: 5897 - DNA, 201 bp, Homo sapiens
tcgccgcaggtcatcaaggagacacataagcccctgggggactggagctacgcgtacatgcagtgagcccctctcgggctccaccgtccagctgtctgtcygtccaggtggccgacctcactgcacagaccccactccagcccctccaccccttcttcatgcacagctgcctttctataatccgggcttgactcccttctt

SEQ ID NO: 5898 - DNA, 201 bp, Homo sapiens
catgactttcaaggatggttcttaggggactgtgaaagtgttgggtcttcctccaggatgcctgcatgggaccccacccggagctggtgtggccattcccsaagtgctggtgccagctgggctgggtgtgggttctgtgtccttccaggatatgtgtcatttcccatgaggggccggggcaggtggctgggtgggggcaca

SEQ ID NO: 5899 - DNA, 201 bp, Homo sapiens
aacttccacttcgtgcaccgctcggccgacgtggagagcgtggtgagcgggaccctccgctcagccttcgagtacggtggccagaagtgttccgcctgctygcgtctctacgtgccgcactcgctgtggccgcagatcaaagggcggctgctggaggagcacagtcggatcaaagtgggcgaccctgcagaggattttggg

SEQ ID NO: 5900 - DNA, 201 bp, Homo sapiens
tcggcggcaacctggcgggggcaccggccctgatgggcaacgtggtcctatggaagcccagtgacactgccatgctggccagctatgctgtctaccgcatycttcgggaggctggcctgccccccaacatcatccagtttgtgccagctgatgggcccctatttggggacactgtcaccagctcagagcacctctgtggca

SEQ ID NO: 5901 - DNA, 201 bp, Homo sapiens
ccagctgtctgtccgtccaggtggccgacctcactgcacagaccccactccagcccctccaccccttcttcatgcacagctgcctttctataatccgggcytgactcccttcttaccactgtattctggcctctcccatgcctcaggctctggtttgagatcgtgctggggaggaacatggccactaccccttatcccatc

SEQ ID NO: 5902 - DNA, 201 bp, Homo sapiens
tctcccaggataaggacgtcgtgcaggaggccacaaaggtgctgaggaatgctgccggcaacttctacatcaacgacaagtccactggctcgatagtgggycagcagccctttgggggggcccgagcctctggaaccaatgacaagccagggggcccacactacatcctgcgctggacgtcgccgcaggtcatcaaggaga

SEQ ID NO: 5903 - DNA, 201 bp, Homo sapiens
tgtttggccgaggcctgtgtgattcccggtctgcaccacatggcggggttggggggccgctggaggccacctgccaaggcgtgggatgggatggtcctgcrggtttaggccgtgattctggaaaaccttggatgggccttcgtcctatgtcagccttccctttgatcctcaggccctacctgtagagacctccactcctag

SEQ ID NO: 5904 - DNA, 201 bp, Homo sapiens
tccaggatgcctgcatgggaccccacccggagctggtgtggccattccccaagtgctggtgccagctgggctgggtgtgggttctgtgtccttccaggatmtgtgtcatttcccatgaggggccggggcaggtggctgggtgggggcacaggctggagtattcttagttctactggttctacactgtgaggtggcaatggg

SEQ ID NO: 5905 - DNA, 201 bp, Homo sapiens
tggttcttaggggactgtgaaagtgttgggtcttcctccaggatgcctgcatgggaccccacccggagctggtgtggccattccccaagtgctggtgccasctgggctgggtgtgggttctgtgtccttccaggatatgtgtcatttcccatgaggggccggggcaggtggctgggtgggggcacaggctggagtattctt

SEQ ID NO: 5906 - DNA, 201 bp, Homo sapiens
ccgtccagctgtctgtccgtccaggtggccgacctcactgcacagaccccactccagcccctccaccccttcttcatgcacagctgcctttctataatccrggcttgactcccttcttaccactgtattctggcctctcccatgcctcaggctctggtttgagatcgtgctggggaggaacatggccactaccccttatcc

SEQ ID NO: 5907 - DNA, 201 bp, Homo sapiens
ggaggccattctgggccccttggcaaacctcaccactcacagaggctcctggccttgatccctgcccctccaggtgtccagggtaaagtgtaactcagacygacctgtggggcacagggggcaccagctggccttgccctctctggtctgggctgtctaccttcctcactgtatctttgcccagacccacctgggccagta

SEQ ID NO: 5908 - DNA, 201 bp, Homo sapiens
ggaggccacctgccaaggcgtgggatgggatggtcctgccggtttaggccgtgattctggaaaaccttggatgggccttcgtcctatgtcagccttccctytgatcctcaggccctacctgtagagacctccactcctagagccagtctcagggtctgggatttccctgcaggagctcagccaccactgtgccatggtgac

SEQ ID NO: 5909 - DNA, 201 bp, Homo sapiens
atgactttcaaggatggttcttaggggactgtgaaagtgttgggtcttcctccaggatgcctgcatgggaccccacccggagctggtgtggccattccccragtgctggtgccagctgggctgggtgtgggttctgtgtccttccaggatatgtgtcatttcccatgaggggccggggcaggtggctgggtgggggcacag

SEQ ID NO: 5910 - DNA, 201 bp, Homo sapiens
aggcctgtgtgattcccggtctgcaccacatggcggggttggggggccgctggaggccacctgccaaggcgtgggatgggatggtcctgccggtttaggcygtgattctggaaaaccttggatgggccttcgtcctatgtcagccttccctttgatcctcaggccctacctgtagagacctccactcctagagccagtctc

SEQ ID NO: 5911 - DNA, 184 bp, Homo sapiens
cagctgggctgggtgtgggttctgtgtccttccaggatatgtgtcatttcccatgaggggccggggcaggtggctgggtgggggcacaggctggagtattyttagttctactggttctacactgtgaggtggcaatgggatttgctcagatgccacccaataaaatgcctgttacttaatcaca

SEQ ID NO: 5912 - DNA, 201 bp, Homo sapiens
ttgggaccttcttctctgcagtgattgatgccaagtcctttgcccgtatcaagaagtggctggagcacgcacgctcctcacccagcctcaccatcctggcygggggcaagtgtgatgactccgtgggctactttgtggagccctgcatcgtggagagcaaggaccctcaggagcccatcatgaaggaggagatcttcgggc

SEQ ID NO: 5913 - DNA, 201 bp, Homo sapiens
tgggcgaccctgcagaggattttgggaccttcttctctgcagtgattgatgccaagtcctttgcccgtatcaagaagtggctggagcacgcacgctcctcrcccagcctcaccatcctggccgggggcaagtgtgatgactccgtgggctactttgtggagccctgcatcgtggagagcaaggaccctcaggagcccatca

SEQ ID NO: 5914 - DNA, 201 bp, Homo sapiens
tgaccacgattcctcccacagatgcctcctgcttggattctgagtggtcagagatctgtaaagcatgactttcaaggatggttcttaggggactgtgaaartgttgggtcttcctccaggatgcctgcatgggaccccacccggagctggtgtggccattccccaagtgctggtgccagctgggctgggtgtgggttctgt

SEQ ID NO: 5915 - DNA, 201 bp, Homo sapiens
ttccctgcaggagctcagccaccactgtgccatggtgacacaggccaaggcagacattggccctcccttctcccagcccccagaggcctggccttgggttygtcagcatgggccgaggacgttgcctgtagaatcctcctctgcctgggagtggctctgtgtggaccagtccctcactggcccattctttttttgacgcag

SEQ ID NO: 5916 - DNA, 201 bp, Homo sapiens
ggatcaaagtgggcgaccctgcagaggattttgggaccttcttctctgcagtgattgatgccaagtcctttgcccgtatcaagaagtggctggagcacgcrcgctcctcacccagcctcaccatcctggccgggggcaagtgtgatgactccgtgggctactttgtggagccctgcatcgtggagagcaaggaccctcagg

SEQ ID NO: 5917 - DNA, 201 bp, Homo sapiens
ggtgagcgggaccctccgctcagccttcgagtacggtggccagaagtgttccgcctgctcgcgtctctacgtgccgcactcgctgtggccgcagatcaaarggcggctgctggaggagcacagtcggatcaaagtgggcgaccctgcagaggattttgggaccttcttctctgcagtgattgatgccaagtcctttgcccg

SEQ ID NO: 5918 - DNA, 201 bp, Homo sapiens
ggatttccctgcaggagctcagccaccactgtgccatggtgacacaggccaaggcagacattggccctcccttctcccagcccccagaggcctggccttgrgttcgtcagcatgggccgaggacgttgcctgtagaatcctcctctgcctgggagtggctctgtgtggaccagtccctcactggcccattctttttttgac

SEQ ID NO: 5919 - DNA, 201 bp, Homo sapiens; identical to SEQ ID NO: 5892

SEQ ID NO: 5920 - DNA, 201 bp, Homo sapiens; identical to SEQ ID NO: 5893

SEQ ID NO: 5921 - DNA, 201 bp, Homo sapiens; identical to SEQ ID NO: 5894

SEQ ID NO: 5922 - DNA, 201 bp, Homo sapiens; identical to SEQ ID NO: 5895

SEQ ID NO: 5923 - DNA, 201 bp, Homo sapiens; identical to SEQ ID NO: 5896

SEQ ID NO: 5924 - DNA, 201 bp, Homo sapiens; identical to SEQ ID NO: 5897

SEQ ID NO: 5925 - DNA, 201 bp, Homo sapiens
catgactttcaaggatggttcttaggggactgtgaaagtgttgggtcttcctccaggatgcctgcatgggaccccacccggagctggtgtggccattcccsaagtgccactggcccatggatgggggtgggtgctggtgccagctgggctgggtgtgggttctgtgtccttccaggatatgtgtcatttcccatgaggggc

SEQ ID NO: 5926 - DNA, 201 bp, Homo sapiens; identical to SEQ ID NO: 5899

SEQ ID NO: 5927 - DNA, 201 bp, Homo sapiens; identical to SEQ ID NO: 5900

SEQ ID NO: 5928 - DNA, 201 bp, Homo sapiens; identical to SEQ ID NO: 5901

SEQ ID NO: 5929 - DNA, 201 bp, Homo sapiens; identical to SEQ ID NO: 5902

SEQ ID NO: 5930 - DNA, 201 bp, Homo sapiens; identical to SEQ ID NO: 5903

SEQ ID NO: 5931 - DNA, 201 bp, Homo sapiens
cggagctggtgtggccattccccaagtgccactggcccatggatgggggtgggtgctggtgccagctgggctgggtgtgggttctgtgtccttccaggatmtgtgtcatttcccatgaggggccggggcaggtggctgggtgggggcacaggctggagtattcttagttctactggttctacactgtgaggtggcaatggg

SEQ ID NO: 5932 - DNA, 201 bp, Homo sapiens
gggtcttcctccaggatgcctgcatgggaccccacccggagctggtgtggccattccccaagtgccactggcccatggatgggggtgggtgctggtgccasctgggctgggtgtgggttctgtgtccttccaggatatgtgtcatttcccatgaggggccggggcaggtggctgggtgggggcacaggctggagtattctt

SEQ ID NO: 5933 - DNA, 201 bp, Homo sapiens; identical to SEQ ID NO: 5906

SEQ ID NO: 5934 - DNA, 201 bp, Homo sapiens; identical to SEQ ID NO: 5907

SEQ ID NO: 5935 - DNA, 201 bp, Homo sapiens; identical to SEQ ID NO: 5908

SEQ ID NO: 5936 - DNA, 201 bp, Homo sapiens
atgactttcaaggatggttcttaggggactgtgaaagtgttgggtcttcctccaggatgcctgcatgggaccccacccggagctggtgtggccattccccragtgccactggcccatggatgggggtgggtgctggtgccagctgggctgggtgtgggttctgtgtccttccaggatatgtgtcatttcccatgaggggcc

SEQ ID NO: 5937 - DNA, 201 bp, Homo sapiens; identical to SEQ ID NO: 5910

SEQ ID NO: 5938 - DNA, 179 bp, Homo sapiens
cagctgggctgggtgtgggttctgtgtccttccaggatatgtgtcatttcccatgaggggccggggcaggtggctgggtgggggcacaggctggagtattyttagttctactggttctacactgtgaggtggcaatgggatttgctcagatgccacccaataaaatgcctgttacttaa

SEQ ID NO: 5939 - DNA, 201 bp, Homo sapiens; identical to SEQ ID NO: 5912

SEQ ID NO: 5940 - DNA, 201 bp, Homo sapiens; identical to SEQ ID NO: 5913

SEQ ID NO: 5941 - DNA, 201 bp, Homo sapiens
tgaccacgattcctcccacagatgcctcctgcttggattctgagtggtcagagatctgtaaagcatgactttcaaggatggttcttaggggactgtgaaartgttgggtcttcctccaggatgcctgcatgggaccccacccggagctggtgtggccattccccaagtgccactggcccatggatgggggtgggtgctggt

SEQ ID NO: 5942 - DNA, 201 bp, Homo sapiens; identical to SEQ ID NO: 5915

SEQ ID NO: 5943 - DNA, 201 bp, Homo sapiens; identical to SEQ ID NO: 5916

SEQ ID NO: 5944 - DNA, 201 bp, Homo sapiens; identical to SEQ ID NO: 5917

SEQ ID NO: 5945 - DNA, 201 bp, Homo sapiens; identical to SEQ ID NO: 5918

SEQ ID NO: 5946 - DNA, 201 bp, Homo sapiens; identical to SEQ ID NO: 5893

SEQ ID NO: 5947 - DNA, 201 bp, Homo sapiens; identical to SEQ ID NO: 5894

SEQ ID NO: 5948 - DNA, 201 bp, Homo sapiens; identical to SEQ ID NO: 5895

SEQ ID NO: 5949 - DNA, 201 bp, Homo sapiens; identical to SEQ ID NO: 5896

SEQ ID NO: 5950 - DNA, 201 bp, Homo sapiens
tcgccgcaggtcatcaaggagacacataagcccctgggggactggagctacgcgtacatgcagtgagcccctctcgggctccaccgtccagctgtctgtcygtccagatgcctcctgcttggattctgagtggtcagagatctgtaaagcatgactttcaaggatggttcttaggggactgtgaaagtgttgggtcttcct

SEQ ID NO: 5951 - DNA, 201 bp, Homo sapiens; identical to SEQ ID NO: 5925

SEQ ID NO: 5952 - DNA, 201 bp, Homo sapiens; identical to SEQ ID NO: 5899

SEQ ID NO: 5953 - DNA, 201 bp, Homo sapiens; identical to SEQ ID NO: 5900

SEQ ID NO: 5954 - DNA, 201 bp, Homo sapiens; identical to SEQ ID NO: 5902

SEQ ID NO: 5955 - DNA, 201 bp, Homo sapiens; identical to SEQ ID NO: 5931

SEQ ID NO: 5956 - DNA, 201 bp, Homo sapiens; identical to SEQ ID NO: 5932

SEQ ID NO: 5957 - DNA, 201 bp, Homo sapiens; identical to SEQ ID NO: 5936

SEQ ID NO: 5958 - DNA, 201 bp, Homo sapiens; identical to SEQ ID NO: 5912

SEQ ID NO: 5959 - DNA, 177 bp, Homo sapiens
cagctgggctgggtgtgggttctgtgtccttccaggatatgtgtcatttcccatgaggggccggggcaggtggctgggtgggggcacaggctggagtattyttagttctactggttctacactgtgaggtggcaatgggatttgctcagatgccacccaataaaatgcctgttactt

SEQ ID NO: 5960 - DNA, 201 bp, Homo sapiens
tccagctgtctgtccgtccagatgcctcctgcttggattctgagtggtcagagatctgtaaagcatgactttcaaggatggttcttaggggactgtgaaartgttgggtcttcctccaggatgcctgcatgggaccccacccggagctggtgtggccattccccaagtgccactggcccatggatgggggtgggtgctggt

SEQ ID NO: 5961 - DNA, 201 bp, Homo sapiens; identical to SEQ ID NO: 5913

SEQ ID NO: 5962 - DNA, 201 bp, Homo sapiens; identical to SEQ ID NO: 5917

SEQ ID NO: 5963 - DNA, 201 bp, Homo sapiens; identical to SEQ ID NO: 5916

SEQ ID NO: 5964 - DNA, 157 bp, Homo sapiens
aggcagcagaggaagccgaggggcggccatcttggctccgtgaggctctgaggtgcyggggtgcggcggcggcagcggcggccagcagggcggaggctgaggcagcaagctcgctagagagggagaagcagtcgggcgcaggcgcctcctccgcagc

SEQ ID NO: 5965 - DNA, 201 bp, Homo sapiens
cggatatcggggacatccatagccttcaaaaatattgcttccaaaattgccaatgagctaaagctgtaacccagtgattatgatgtaaattaagtagcaaktaaagtgttttcctgaacactgatggaaatgtatagaataatatttaggcaataacgtctgcatcttctaaatcatgaaattaaagtctgaggacgagag

SEQ ID NO: 5966 - DNA, 201 bp, Homo sapiens
catctccatgtgcctcccgtctgggtgggtgtgagagtggacggtatgtgtgtgaagtggtgtatatggaagcatctccctacactggcagccagtcattrctagtacctctgcgggagatcatccggtgctaaaacattacagttgccaaggaggaaaatactgaatgactgctaagaattaaccttaagaccagttcat

SEQ ID NO: 5967 - DNA, 201 bp, Homo sapiens
ttgacaaaactcagttgaatccaacaagtctacaaaagctcttcagagaagtaagaataatgaagattttaaatcatcccaatatagtgaagttattcgargtcattgaaactgaaaaaacactctacctaatcatggaatatgcaagtggaggtgaagtatttgactatttggttgcacatggcaggatgaaggaaaaag

SEQ ID NO: 5968 - DNA, 201 bp, Homo sapiens
ggaccagctattccttctgttgtggcgtatccgaaaaggagtcagaccagcactgcagatagtgacctcaaagaagatggaatttcctcccggaaatcaastggcagtgctgttggaggaaagggaattgctccagccagtcccatgcttgggaatgcaagtaatcctaataaggcggatattcctgaacgcaagaaaagc

SEQ ID NO: 5969 - DNA, 201 bp, Homo sapiens
gcaattaaagtgttttcctgaacactgatggaaatgtatagaataatatttaggcaataacgtctgcatcttctaaatcatgaaattaaagtctgaggacragagcacgcctgggagcgaaagctggccttttttctacgaatgcactacattaaagatgtgcaacctatgcgccccctgccctacttccgttaccctgag

SEQ ID NO: 5970 - DNA, 201 bp, Homo sapiens
ggcaaagaaaacagcactattcctgatcagagaactccagttgcttcaacacacagtatcagtagtgcagccaccccagatcgaatccgcttcccaagagkcactgccagtcgtagcactttccacggccagccccgggaacggcgaaccgcaacatataatggccctcctgcctctcccagcctgtcccatgaagccaca

SEQ ID NO: 5971 - DNA, 201 bp, Homo sapiens
cgcctgggagcgaaagctggccttttttctacgaatgcactacattaaagatgtgcaacctatgcgccccctgccctacttccgttaccctgagagtcggygtgtggccccatctccatgtgcctcccgtctgggtgggtgtgagagtggacggtatgtgtgtgaagtggtgtatatggaagcatctccctacactggcag

SEQ ID NO: 5972 - DNA, 201 bp, Homo sapiens
ttcttcaagccaaaagcaaagacgctacagtgaccatgctggaccagctattccttctgttgtggcgtatccgaaaaggagtcagaccagcactgcagatrgtgacctcaaagaagatggaatttcctcccggaaatcaagtggcagtgctgttggaggaaagggaattgctccagccagtcccatgcttgggaatgcaag

SEQ ID NO: 5973 - DNA, 201 bp, Homo sapiens
attcctgaacgcaagaaaagctccactgtccctagtagtaacacagcatctggtggaatgacacgacgaaatacttatgtttgcagtgagagaactacagmtgatagacactcagtgattcagaatggcaaagaaaacagcactattcctgatcagagaactccagttgcttcaacacacagtatcagtagtgcagccacc

SEQ ID NO: 5974 - DNA, 201 bp, Homo sapiens
tgcagagaagtgtttcttcaagccaaaagcaaagacgctacagtgaccatgctggaccagctattccttctgttgtggcgtatccgaaaaggagtcagacmagcactgcagatagtgacctcaaagaagatggaatttcctcccggaaatcaagtggcagtgctgttggaggaaagggaattgctccagccagtcccatgc

SEQ ID NO: 5975 - DNA, 148 bp, Homo sapiens
aggcagcagaggaagccgaggggcggccatcttggctccgtgaggctytgaggtgccggggtgcggcggcggcagcggcggccagcagggcggaggctgaggcagcaagctcgctagagagggagaagcagtcgggcgcaggcgcctc

SEQ ID NO: 5976 - DNA, 157 bp, Homo sapiens; identical to SEQ ID NO: 5964

SEQ ID NO: 5977 - DNA, 201 bp, Homo sapiens; identical to SEQ ID NO: 5965

SEQ ID NO: 5978 - DNA, 201 bp, Homo sapiens; identical to SEQ ID NO: 5966

SEQ ID NO: 5979 - DNA, 201 bp, Homo sapiens; identical to SEQ ID NO: 5967

SEQ ID NO: 5980 - DNA, 201 bp, Homo sapiens; identical to SEQ ID NO: 5968

SEQ ID NO: 5981 - DNA, 201 bp, Homo sapiens; identical to SEQ ID NO: 5969

SEQ ID NO: 5982 - DNA, 201 bp, Homo sapiens; identical to SEQ ID NO: 5970

SEQ ID NO: 5983 - DNA, 201 bp, Homo sapiens; identical to SEQ ID NO: 5971

SEQ ID NO: 5984 - DNA, 201 bp, Homo sapiens; identical to SEQ ID NO: 5972

SEQ ID NO: 5985 - DNA, 201 bp, Homo sapiens; identical to SEQ ID NO: 5973

SEQ ID NO: 5986 - DNA, 201 bp, Homo sapiens; identical to SEQ ID NO: 5974

SEQ ID NO: 5987 - DNA, 148 bp, Homo sapiens; identical to SEQ ID NO: 5975

SEQ ID NO: 5988 - DNA, 157 bp, Homo sapiens; identical to SEQ ID NO: 5964

SEQ ID NO: 5989 - DNA, 201 bp, Homo sapiens; identical to SEQ ID NO: 5965

SEQ ID NO: 5990 - DNA, 201 bp, Homo sapiens; identical to SEQ ID NO: 5966

SEQ ID NO: 5991 - DNA, 201 bp, Homo sapiens; identical to SEQ ID NO: 5967

SEQ ID NO: 5992 - DNA, 201 bp, Homo sapiens; identical to SEQ ID NO: 5968

SEQ ID NO: 5993 - DNA, 201 bp, Homo sapiens; identical to SEQ ID NO: 5969

SEQ ID NO: 5994 - DNA, 201 bp, Homo sapiens; identical to SEQ ID NO: 5970

SEQ ID NO: 5995 - DNA, 201 bp, Homo sapiens; identical to SEQ ID NO: 5971

SEQ ID NO: 5996 - DNA, 201 bp, Homo sapiens; identical to SEQ ID NO: 5972

SEQ ID NO: 5997 - DNA, 201 bp, Homo sapiens; identical to SEQ ID NO: 5973

SEQ ID NO: 5998 - DNA, 201 bp, Homo sapiens; identical to SEQ ID NO: 5974

SEQ ID NO: 5999 - DNA, 148 bp, Homo sapiens; identical to SEQ ID NO: 5975

SEQ ID NO: 6000 - DNA, 157 bp, Homo sapiens; identical to SEQ ID NO: 5964

SEQ ID NO: 6001 - DNA, 201 bp, Homo sapiens; identical to SEQ ID NO: 5965

SEQ ID NO: 6002 - DNA, 201 bp, Homo sapiens; identical to SEQ ID NO: 5966

SEQ ID NO: 6003 - DNA, 201 bp, Homo sapiens; identical to SEQ ID NO: 5967

SEQ ID NO: 6004 - DNA, 201 bp, Homo sapiens; identical to SEQ ID NO: 5968

SEQ ID NO: 6005 - DNA, 201 bp, Homo sapiens; identical to SEQ ID NO: 5969

SEQ ID NO: 6006 - DNA, 201 bp, Homo sapiens; identical to SEQ ID NO: 5970

SEQ ID NO: 6007 - DNA, 201 bp, Homo sapiens; identical to SEQ ID NO: 5971

SEQ ID NO: 6008 - DNA, 201 bp, Homo sapiens; identical to SEQ ID NO: 5972

SEQ ID NO: 6009 - DNA, 201 bp, Homo sapiens; identical to SEQ ID NO: 5973

SEQ ID NO: 6010 - DNA, 201 bp, Homo sapiens; identical to SEQ ID NO: 5974

SEQ ID NO: 6011 - DNA, 148 bp, Homo sapiens; identical to SEQ ID NO: 5975

SEQ ID NO: 6012 - DNA, 157 bp, Homo sapiens; identical to SEQ ID NO: 5964

SEQ ID NO: 6013 - DNA, 201 bp, Homo sapiens; identical to SEQ ID NO: 5965

SEQ ID NO: 6014 - DNA, 201 bp, Homo sapiens; identical to SEQ ID NO: 5966

SEQ ID NO: 6015 - DNA, 201 bp, Homo sapiens; identical to SEQ ID NO: 5967

SEQ ID NO: 6016 - DNA, 201 bp, Homo sapiens; identical to SEQ ID NO: 5968

SEQ ID NO: 6017 - DNA, 201 bp, Homo sapiens; identical to SEQ ID NO: 5969

SEQ ID NO: 6018 - DNA, 201 bp, Homo sapiens; identical to SEQ ID NO: 5970

SEQ ID NO: 6019 - DNA, 201 bp, Homo sapiens; identical to SEQ ID NO: 5971

SEQ ID NO: 6020 - DNA, 201 bp, Homo sapiens; identical to SEQ ID NO: 5972

SEQ ID NO: 6021 - DNA, 201 bp, Homo sapiens; identical to SEQ ID NO: 5973

SEQ ID NO: 6022 - DNA, 201 bp, Homo sapiens; identical to SEQ ID NO: 5974

SEQ ID NO: 6023 - DNA, 148 bp, Homo sapiens; identical to SEQ ID NO: 5975

SEQ ID NO: 6024 - DNA, 157 bp, Homo sapiens; identical to SEQ ID NO: 5964

SEQ ID NO: 6025 - DNA, 201 bp, Homo sapiens; identical to SEQ ID NO: 5965

SEQ ID NO: 6026 - DNA, 201 bp, Homo sapiens; identical to SEQ ID NO: 5966

SEQ ID NO: 6027 - DNA, 201 bp, Homo sapiens; identical to SEQ ID NO: 5967

SEQ ID NO: 6028 - DNA, 201 bp, Homo sapiens; identical to SEQ ID NO: 5968

SEQ ID NO: 6029 - DNA, 201 bp, Homo sapiens; identical to SEQ ID NO: 5969

SEQ ID NO: 6030 - DNA, 201 bp, Homo sapiens; identical to SEQ ID NO: 5970

SEQ ID NO: 6031 - DNA, 201 bp, Homo sapiens; identical to SEQ ID NO: 5971

SEQ ID NO: 6032 - DNA, 201 bp, Homo sapiens; identical to SEQ ID NO: 5972

SEQ ID NO: 6033 - DNA, 201 bp, Homo sapiens; identical to SEQ ID NO: 5973

SEQ ID NO: 6034 - DNA, 201 bp, Homo sapiens; identical to SEQ ID NO: 5974

SEQ ID NO: 6035 - DNA, 148 bp, Homo sapiens; identical to SEQ ID NO: 5975

SEQ ID NO: 6036 - DNA, 201 bp, Homo sapiens
tccatccagcctgcccactcacactgcccttgtgtactcctgctttgctacgttatcattgatcaatgtccctggttacctatgtgtttgaattatcttcrtgttacaggtgtttaatgattttgctccttctagcttatttgtatttcacctgtttttctttaaatcaacatggttacactctgtttcagcaactgtata

SEQ ID NO: 6037 - DNA, 201 bp, Homo sapiens
agcattgtatcccgtataaaaggaaggaaagagagaaatatatttttacactcatcactcctcaggggctgtacaatcatgtagaaattgtttaatgtgcytgtcaaatagccaaagagtgttaaaccctgagttcccacccatgtgtgtggtatggttaggattcatccagatacacagagagaggcacaacaggaggag

SEQ ID NO: 6038 - DNA, 201 bp, Homo sapiens
accgtggattggtattactcacaaacaaacaaaagtattcccactcaggaaagaaatcgtgtgtttgcctcaggccaacttctgaagtttctaccagctgmagttgctgattctggtatttatacctgtattgtcagaagtcccacattcaataggactggatatgcgaatgtcaccatatataaaaaacaatcagattgc

SEQ ID NO: 6039 - DNA, 201 bp, Homo sapiens
atatttatgtttggtaaattcaataactttcctcatcatttggaaagtcaaattgtttattgcttccctacagttttttctgaatctagcaggattttaaygatatcattataatttgacacaataaaaggacaacatgaaactgatgaatctttattgggttaatttcagacactatataatcttttaaaaatgtaacat

SEQ ID NO: 6040 - DNA, 201 bp, Homo sapiens
ttacagactttggtgaaccaagaattcaacaagaggaagggcaaaatcaaagtttcagcaatgggctggcttgtctagacatggttttaagaatagctgaygtgaaggaagaggatttattgctgcagtacgactgtctggccctgaatttgcatggcttgagaaggcacaccgtaagactaagtaggaaaaatccaagta

SEQ ID NO: 6041 - DNA, 201 bp, Homo sapiens
ctcccaccaggctccacctcgaatactggggattaccattcagcatgagatttgggcaggaacacagacccaaaccataccacacacattatcatcgttaractttgtaaagtatttaaggtacatggaacacacgggaagtctggtagctcagcccatttctttattgcatctgttattcaccatgtaattcaggtacca

SEQ ID NO: 6042 - DNA, 201 bp, Homo sapiens
gtatgtgaaaggaaatgcaccaacaaccgtaaactgaacgtgttcttttgtgctcttttataacttgcattacatgttgtaagcatggtccgttctatacstttttctggtcataatgaacactcattttgttagcgagggtggtaaagtgaacaaaaaggggaagtatcaaactactgccatttcagtgagaaaatccta

SEQ ID NO: 6043 - DNA, 201 bp, Homo sapiens
ttgtctagaacactcagctgcttctttggtcatccttgttttctaactttatgaactccctctgtgtcactgtatgtgaaaggaaatgcaccaacaaccgwaaactgaacgtgttcttttgtgctcttttataacttgcattacatgttgtaagcatggtccgttctatacctttttctggtcataatgaacactcatttt

SEQ ID NO: 6044 - DNA, 201 bp, Homo sapiens
gaactttctctagcaagtgtaagcagaatggagtgtggttccaagagatccatcaagacaatgggaatggcctgtgccataaaatgtgcttctcttcttcrggatgttgtttgctgtctgatctttgtagactgttcctgtttgctgggagcttctctgctgcttaaattgttcgtcctcccccactccctcctatcgttg

SEQ ID NO: 6045 - DNA, 201 bp, Homo sapiens
atcccctctgtctttcagtttggttgagatataggctactcttcccaactcagtcttgaagagtatcaccaactgcctcatgtgtggtgaccttcactgtygtatgccagtgactcatctggagtaatctcaacaacgagttaccaatacttgctcttgattgataaacagaatggggttttggatcttagcaattctcac

SEQ ID NO: 6046 - DNA, 201 bp, Homo sapiens
tcccctctgtctttcagtttggttgagatataggctactcttcccaactcagtcttgaagagtatcaccaactgcctcatgtgtggtgaccttcactgtcrtatgccagtgactcatctggagtaatctcaacaacgagttaccaatacttgctcttgattgataaacagaatggggttttggatcttagcaattctcaca

SEQ ID NO: 6047 - DNA, 201 bp, Homo sapiens
ccaggaaggctgtggaccccatcaaggtgctatgtgagggccatgcttggggtggtggtgggcccagtagaccctgcagccatccatccagcctgcccacycacactgcccttgtgtactcctgctttgctacgttatcattgatcaatgtccctggttacctatgtgtttgaattatcttcgtgttacaggtgtttaatg

SEQ ID NO: 6048 - DNA, 201 bp, Homo sapiens
gattggtattactcacaaacaaacaaaagtattcccactcaggaaagaaatcgtgtgtttgcctcaggccaacttctgaagtttctaccagctgcagttgytgattctggtatttatacctgtattgtcagaagtcccacattcaataggactggatatgcgaatgtcaccatatataaaaaacaatcagattgcaatgtt

SEQ ID NO: 6049 - DNA, 201 bp, Homo sapiens
agcacctcttgagtggtttaagaattgtcaggctcttcaaggatcaaggtacagggcgcacaagtcatttttggtcattgataatgtgatgactgaggacrcaggtgattacacctgtaaatttatacacaatgaaaatggagccaattatagtgtgacggcgaccaggtccttcacggtcaaggatgagcaaggcttttc

SEQ ID NO: 6050 - DNA, 114 bp, Homo sapiens
tatgaggagggacytacaaagactggaaactattcttagctccgtcactgactccaagttcatcccctctgtctttcagtttggttgagatataggctactcttcccaactcag

SEQ ID NO: 6051 - DNA, 201 bp, Homo sapiens; identical to SEQ ID NO: 6036

SEQ ID NO: 6052 - DNA, 201 bp, Homo sapiens
agcacctcttgagtggtttaagaattgtcaggctcttcaaggatcaaggtacagggcgcacaagtcatttttggtcattgataatgtgatgactgaggacrcaggtgattacacctgtaaatttatacacaatgaaaatggagccaattatagtgtgacggcgaccaggtccttcacggtcaaggtttggtgtcagagttt

SEQ ID NO: 6053 - DNA, 114 bp, Homo sapiens; identical to SEQ ID NO: 6050

SEQ ID NO: 6054 - DNA, 201 bp, Homo sapiens; identical to SEQ ID NO: 6037

SEQ ID NO: 6055 - DNA, 201 bp, Homo sapiens; identical to SEQ ID NO: 6038

SEQ ID NO: 6056 - DNA, 201 bp, Homo sapiens; identical to SEQ ID NO: 6039

SEQ ID NO: 6057 - DNA, 201 bp, Homo sapiens; identical to SEQ ID NO: 6040

SEQ ID NO: 6058 - DNA, 201 bp, Homo sapiens; identical to SEQ ID NO: 6041

SEQ ID NO: 6059 - DNA, 201 bp, Homo sapiens; identical to SEQ ID NO: 6042

SEQ ID NO: 6060 - DNA, 201 bp, Homo sapiens; identical to SEQ ID NO: 6043

SEQ ID NO: 6061 - DNA, 201 bp, Homo sapiens
agtgtgacggcgaccaggtccttcacggtcaaggtttggtgtcagagtttctgcaaattaaaaaagagcttaatctttagtaatactcattggattcaaartttaatgagaggctttgtgatggtatactatggtgtacataaatgttgtcgagtggtttttaatctttgtttgcaatactttcaacatcatcaatggcct

SEQ ID NO: 6062 - DNA, 201 bp, Homo sapiens; identical to SEQ ID NO: 6044

SEQ ID NO: 6063 - DNA, 201 bp, Homo sapiens; identical to SEQ ID NO: 6045

SEQ ID NO: 6064 - DNA, 201 bp, Homo sapiens; identical to SEQ ID NO: 6046

SEQ ID NO: 6065 - DNA, 201 bp, Homo sapiens; identical to SEQ ID NO: 6047

SEQ ID NO: 6066 - DNA, 201 bp, Homo sapiens; identical to SEQ ID NO: 6048

SEQ ID NO: 6067 - DNA, 201 bp, Homo sapiens
tgtgacggcgaccaggtccttcacggtcaaggtttggtgtcagagtttctgcaaattaaaaaagagcttaatctttagtaatactcattggattcaaagtytaatgagaggctttgtgatggtatactatggtgtacataaatgttgtcgagtggtttttaatctttgtttgcaatactttcaacatcatcaatggccttg

SEQ ID NO: 6068 - DNA, 201 bp, Homo sapiens
cacattgccaataaaaggtccctgaattctaaattctggaagcacgtgaggtaccaaatgcctgtgccaagcaaaattcccagaaaggcctctagtttgaytcccttggctgcccagaagcaatagtgcctgctgtgatgtgcaaaggcatctgagtttgaagctttcctgacttctcctagctggcttatgcccctgcac

SEQ ID NO: 6069 - DNA, 201 bp, Homo sapiens
ctttgttcaccagattctgcctgatgttcttgaaaataaatgtggctataccttatgcatttatgggagagatatgctacctggagaagatgtagtcactrcagtggaaaccaacatacgaaagagcaggcggcacattttcatcctgacccctcagatcactcacaataaggagtttgcctacgagcaggaggttgccct

SEQ ID NO: 6070 - DNA, 201 bp, Homo sapiens
aggctgaggcgcttcaggactccctccagcatcttatgaaagtacaggggaccatcaagtggagggaggaccacattgccaataaaaggtccctgaattcyaaattctggaagcacgtgaggtaccaaatgcctgtgccaagcaaaattcccagaaaggcctctagtttgactcccttggctgcccagaagcaatagtgcc

SEQ ID NO: 6071 - DNA, 201 bp, Homo sapiens; identical to SEQ ID NO: 6038

SEQ ID NO: 6072 - DNA, 201 bp, Homo sapiens
ttacagactttggtgaaccaagaattcaacaagaggaagggcaaaatcaaagtttcagcaatgggctggcttgtctagacatggttttaagaatagctgaygtgaaggaagaggatttattgctgcagtacgactgtctggccctgaatttgcatggcttgagaaggcacaccgtaagactaagtaggaaaaatccaattg

SEQ ID NO: 6073 - DNA, 201 bp, Homo sapiens
gagatatgctacctggagaagatgtagtcactgcagtggaaaccaacatacgaaagagcaggcggcacattttcatcctgacccctcagatcactcacaayaaggagtttgcctacgagcaggaggttgccctgcactgtgccctcatccagaacgacgccaaggtgatacttattgagatggaggctctgagcgagctgg

SEQ ID NO: 6074 - DNA, 201 bp, Homo sapiens
aagatgtagtcactgcagtggaaaccaacatacgaaagagcaggcggcacattttcatcctgacccctcagatcactcacaataaggagtttgcctacgarcaggaggttgccctgcactgtgccctcatccagaacgacgccaaggtgatacttattgagatggaggctctgagcgagctggacatgctgcaggctgagg

SEQ ID NO: 6075 - DNA, 201 bp, Homo sapiens; identical to SEQ ID NO: 6045

SEQ ID NO: 6076 - DNA, 201 bp, Homo sapiens; identical to SEQ ID NO: 6046

SEQ ID NO: 6077 - DNA, 201 bp, Homo sapiens
agcgagctggacatgctgcaggctgaggcgcttcaggactccctccagcatcttatgaaagtacaggggaccatcaagtggagggaggaccacattgccawtaaaaggtccctgaattctaaattctggaagcacgtgaggtaccaaatgcctgtgccaagcaaaattcccagaaaggcctctagtttgactcccttggct

SEQ ID NO: 6078 - DNA, 201 bp, Homo sapiens; identical to SEQ ID NO: 6048

SEQ ID NO: 6079 - DNA, 201 bp, Homo sapiens
ctgtgccctcatccagaacgacgccaaggtgatacttattgagatggaggctctgagcgagctggacatgctgcaggctgaggcgcttcaggactccctcmagcatcttatgaaagtacaggggaccatcaagtggagggaggaccacattgccaataaaaggtccctgaattctaaattctggaagcacgtgaggtacca

SEQ ID NO: 6080 - DNA, 201 bp, Homo sapiens; identical to SEQ ID NO: 6049

SEQ ID NO: 6081 - DNA, 201 bp, Homo sapiens
tgtgccctcatccagaacgacgccaaggtgatacttattgagatggaggctctgagcgagctggacatgctgcaggctgaggcgcttcaggactccctccrgcatcttatgaaagtacaggggaccatcaagtggagggaggaccacattgccaataaaaggtccctgaattctaaattctggaagcacgtgaggtaccaa

SEQ ID NO: 6082 - DNA, 201 bp, Homo sapiens
gccaataaaaggtccctgaattctaaattctggaagcacgtgaggtaccaaatgcctgtgccaagcaaaattcccagaaaggcctctagtttgactccctyggctgcccagaagcaatagtgcctgctgtgatgtgcaaaggcatctgagtttgaagctttcctgacttctcctagctggcttatgcccctgcactgaagt

SEQ ID NO: 6083 - DNA, 114 bp, Homo sapiens; identical to SEQ ID NO: 6050

SEQ ID NO: 6084 - DNA, 201 bp, Homo sapiens; identical to SEQ ID NO: 6068

SEQ ID NO: 6085 - DNA, 201 bp, Homo sapiens; identical to SEQ ID NO: 6069

SEQ ID NO: 6086 - DNA, 201 bp, Homo sapiens; identical to SEQ ID NO: 6070

SEQ ID NO: 6087 - DNA, 201 bp, Homo sapiens; identical to SEQ ID NO: 6038

SEQ ID NO: 6088 - DNA, 201 bp, Homo sapiens; identical to SEQ ID NO: 6072

SEQ ID NO: 6089 - DNA, 201 bp, Homo sapiens; identical to SEQ ID NO: 6073

SEQ ID NO: 6090 - DNA, 201 bp, Homo sapiens; identical to SEQ ID NO: 6074

SEQ ID NO: 6091 - DNA, 178 bp, Homo sapiens
ttgagatataggctactcttcccaactcagtcttgaagagtatcaccaactgcctcatgtgtggtgaccttcactgtygtatgccagtgactcatctggagtaatctcaacaacgagttaccaatacttgctcttgattgataaacagaatggggttttggatcttagcaattctcac

SEQ ID NO: 6092 - DNA, 179 bp, Homo sapiens
ttgagatataggctactcttcccaactcagtcttgaagagtatcaccaactgcctcatgtgtggtgaccttcactgtcrtatgccagtgactcatctggagtaatctcaacaacgagttaccaatacttgctcttgattgataaacagaatggggttttggatcttagcaattctcaca

SEQ ID NO: 6093 - DNA, 201 bp, Homo sapiens; identical to SEQ ID NO: 6077

SEQ ID NO: 6094 - DNA, 201 bp, Homo sapiens; identical to SEQ ID NO: 6048

SEQ ID NO: 6095 - DNA, 201 bp, Homo sapiens; identical to SEQ ID NO: 6079

SEQ ID NO: 6096 - DNA, 201 bp, Homo sapiens; identical to SEQ ID NO: 6049

SEQ ID NO: 6097 - DNA, 201 bp, Homo sapiens; identical to SEQ ID NO: 6081

SEQ ID NO: 6098 - DNA, 201 bp, Homo sapiens; identical to SEQ ID NO: 6082

SEQ ID NO: 6099 - DNA, 201 bp, Homo sapiens; identical to SEQ ID NO: 6036

SEQ ID NO: 6100 - DNA, 201 bp, Homo sapiens; identical to SEQ ID NO: 6037

SEQ ID NO: 6101 - DNA, 201 bp, Homo sapiens; identical to SEQ ID NO: 6038

SEQ ID NO: 6102 - DNA, 201 bp, Homo sapiens; identical to SEQ ID NO: 6039

SEQ ID NO: 6103 - DNA, 201 bp, Homo sapiens; identical to SEQ ID NO: 6040

SEQ ID NO: 6104 - DNA, 201 bp, Homo sapiens; identical to SEQ ID NO: 6041

SEQ ID NO: 6105 - DNA, 201 bp, Homo sapiens; identical to SEQ ID NO: 6042

SEQ ID NO: 6106 - DNA, 201 bp, Homo sapiens; identical to SEQ ID NO: 6043

SEQ ID NO: 6107 - DNA, 201 bp, Homo sapiens; identical to SEQ ID NO: 6044

SEQ ID NO: 6108 - DNA, 178 bp, Homo sapiens; identical to SEQ ID NO: 6091

SEQ ID NO: 6109 - DNA, 201 bp, Homo sapiens; identical to SEQ ID NO: 6047

SEQ ID NO: 6110 - DNA, 179 bp, Homo sapiens; identical to SEQ ID NO: 6092

SEQ ID NO: 6111 - DNA, 201 bp, Homo sapiens; identical to SEQ ID NO: 6048

SEQ ID NO: 6112 - DNA, 201 bp, Homo sapiens; identical to SEQ ID NO: 6049

SEQ ID NO: 6113 - DNA, 201 bp, Homo sapiens; identical to SEQ ID NO: 6077

SEQ ID NO: 6114 - DNA, 201 bp, Homo sapiens; identical to SEQ ID NO: 6052

SEQ ID NO: 6115 - DNA, 201 bp, Homo sapiens; identical to SEQ ID NO: 6079

SEQ ID NO: 6116 - DNA, 201 bp, Homo sapiens; identical to SEQ ID NO: 6081

SEQ ID NO: 6117 - DNA, 114 bp, Homo sapiens; identical to SEQ ID NO: 6050

SEQ ID NO: 6118 - DNA, 201 bp, Homo sapiens; identical to SEQ ID NO: 6082

SEQ ID NO: 6119 - DNA, 201 bp, Homo sapiens; identical to SEQ ID NO: 6068

SEQ ID NO: 6120 - DNA, 201 bp, Homo sapiens; identical to SEQ ID NO: 6069

SEQ ID NO: 6121 - DNA, 201 bp, Homo sapiens; identical to SEQ ID NO: 6070

SEQ ID NO: 6122 - DNA, 201 bp, Homo sapiens; identical to SEQ ID NO: 6038

SEQ ID NO: 6123 - DNA, 201 bp, Homo sapiens; identical to SEQ ID NO: 6072

SEQ ID NO: 6124 - DNA, 201 bp, Homo sapiens; identical to SEQ ID NO: 6073

SEQ ID NO: 6125 - DNA, 201 bp, Homo sapiens; identical to SEQ ID NO: 6074

SEQ ID NO: 6126 - DNA, 201 bp, Homo sapiens; identical to SEQ ID NO: 6061

SEQ ID NO: 6127 - DNA, 201 bp, Homo sapiens; identical to SEQ ID NO: 6045

SEQ ID NO: 6128 - DNA, 201 bp, Homo sapiens; identical to SEQ ID NO: 6046

SEQ ID NO: 6129 - DNA, 201 bp, Homo sapiens; identical to SEQ ID NO: 6048

SEQ ID NO: 6130 - DNA, 201 bp, Homo sapiens; identical to SEQ ID NO: 6067

SEQ ID NO: 6131 - DNA, 201 bp, Homo sapiens
ccctggagctccagctgaagctgaaccaccctgagtcctcacagctgtttgccaagctgctccagaaaatgacagacctcagacagattgtcacggaacaygtgcagctactgcaggtgatcaagaagacggagacagacatgagtcttcacccgctcctgcaggagatctacaaggacttgtactagcagagagtcctga

SEQ ID NO: 6132 - DNA, 201 bp, Homo sapiens
ttgatcttttgctagatagagacaaaatatcagtgtgaattacagcaaacccctattccatgctgttatgggtgaaactctgggagattctcctattgacscagaaagcgattccttcactgatacactgtctgcaaacatatcacaagaaatgaccatggttgacacagagatgccattctggcccaccaactttgggat

SEQ ID NO: 6133 - DNA, 201 bp, Homo sapiens
gacattccattcacaagaacagatccagtggttgcagattacaagtatgacctgaaacttcaagagtaccaaagtgcaatcaaagtggagcctgcatctcmaccttattattctgagaagactcagctctacaataagcctcatgaagagccttccaactccctcatggcaattgaatgtcgtgtctgtggagataaagct

SEQ ID NO: 6134 - DNA, 201 bp, Homo sapiens
acacaatgctggcctccttgatgaataaagatggggttctcatatccgagggccaaggcttcatgacaagggagtttctaaagagcctgcgaaagcctttwggtgactttatggagcccaagtttgagtttgctgtgaagttcaatgcactggaattagatgacagcgacttggcaatatttattgctgtcattattctca

SEQ ID NO: 6135 - DNA, 201 bp, Homo sapiens
agattctcctattgacccagaaagcgattccttcactgatacactgtctgcaaacatatcacaagaaatgaccatggttgacacagagatgccattctggsccaccaactttgggatcagctccgtggatctctccgtaatggaagaccactcccactcctttgatatcaagcccttcactactgttgacttctccagcat

SEQ ID NO: 6136 - DNA, 201 bp, Homo sapiens
gatgggagaagataaaatcaagttcaaacacatcacccccctgcaggagcagagcaaagaggtggccatccgcatctttcagggctgccagtttcgctccrtggaggctgtgcaggagatcacagagtatgccaaaagcattcctggttttgtaaatcttgacttgaacgaccaagtaactctcctcaaatatggagtcca

SEQ ID NO: 6137 - DNA, 201 bp, Homo sapiens
aagctgctccagaaaatgacagacctcagacagattgtcacggaacacgtgcagctactgcaggtgatcaagaagacggagacagacatgagtcttcaccygctcctgcaggagatctacaaggacttgtactagcagagagtcctgagccactgccaacatttcccttcttccagttgcactattctgagggaaaatctg

SEQ ID NO: 6138 - DNA, 201 bp, Homo sapiens
  misc_feature (1)...(201): n = A,T,C or G, or insertion/deletion polymorphism (see Tables 1-2)
ccagctgaagctgaaccaccctgagtcctcacagctgtttgccaagctgctccagaaaatgacagacctcagacagattgtcacggaacacgtgcagctantgcaggtgatcaagaagacggagacagacatgagtcttcacccgctcctgcaggagatctacaaggacttgtactagcagagagtcctgagccactgcca

SEQ ID NO: 6139 - DNA, 201 bp, Homo sapiens; identical to SEQ ID NO: 6136

SEQ ID NO: 6140 - DNA, 201 bp, Homo sapiens; identical to SEQ ID NO: 6132

SEQ ID NO: 6141 - DNA, 201 bp, Homo sapiens; identical to SEQ ID NO: 6133

SEQ ID NO: 6142 - DNA, 201 bp, Homo sapiens; identical to SEQ ID NO: 6134

SEQ ID NO: 6143 - DNA, 201 bp, Homo sapiens; identical to SEQ ID NO: 6135

SEQ ID NO: 6144 - DNA, 201 bp, Homo sapiens; identical to SEQ ID NO: 6131

SEQ ID NO: 6145 - DNA, 201 bp, Homo sapiens; identical to SEQ ID NO: 6136

SEQ ID NO: 6146 - DNA, 201 bp, Homo sapiens; identical to SEQ ID NO: 6133

SEQ ID NO: 6147 - DNA, 201 bp, Homo sapiens; identical to SEQ ID NO: 6134

SEQ ID NO: 6148 - DNA, 201 bp, Homo sapiens
cgcctggggcgcttgggtcggcctcgaggacaccggagaggggcgccacgccgccgtggccgcagaaatgaccatggttgacacagagatgccattctggsccaccaactttgggatcagctccgtggatctctccgtaatggaagaccactcccactcctttgatatcaagcccttcactactgttgacttctccagcat

SEQ ID NO: 6149 - DNA, 201 bp, Homo sapiens; identical to SEQ ID NO: 6137

SEQ ID NO: 6150 - DNA, 201 bp, Homo sapiens; identical to SEQ ID NO: 6138
  misc_feature (1)...(201): n = A,T,C or G, or insertion/deletion polymorphism (see Tables 1-2)

SEQ ID NO: 6151 - DNA, 201 bp, Homo sapiens
gatgggagaagataaaatcaagttcaaacacatcacccccctgcaggagcagagcaaagaggtggccatccgcatctttcagggctgccagtttcgctccrtggaggctaccgcccaggtttgctgaatgtgaagcccattgaagacattcaagacaacctgctacaagccctggagctccagctgaagctgaaccaccct

SEQ ID NO: 6152 - DNA, 201 bp, Homo sapiens; identical to SEQ ID NO: 6131

SEQ ID NO: 6153 - DNA, 201 bp, Homo sapiens; identical to SEQ ID NO: 6133

SEQ ID NO: 6154 - DNA, 201 bp, Homo sapiens
caaatatacaacaaggccattttctcaaacgagagtcagcctttaacgtctatttttcctttcagaaatgaccatggttgacacagagatgccattctggsccaccaactttgggatcagctccgtggatctctccgtaatggaagaccactcccactcctttgatatcaagcccttcactactgttgacttctccagcat

SEQ ID NO: 6155 - DNA, 201 bp, Homo sapiens; identical to SEQ ID NO: 6137

SEQ ID NO: 6156 - DNA, 201 bp, Homo sapiens
ctcggtgtttagggaggagcctaaggtaaggagtcagaaacggggagtaaccgagctgcggcttttatataaggtcagtggtaggtaaggaaggggccttwacctctgctggtgaccagaagcctgcatttctgcattctgcttaattccctttccttagatttgaaagaagccaacactaaaccacaaatatacaacaag

SEQ ID NO: 6157 - DNA, 201 bp, Homo sapiens; identical to SEQ ID NO: 6138
  misc_feature (1)...(201): n = A,T,C or G, or insertion/deletion polymorphism (see Tables 1-2)

SEQ ID NO: 6158 - DNA, 201 bp, Homo sapiens
ggacgtcacatgtcattataccttcacccagcatttcatccctcgtcgaaaggattggattggcatctttagagcatttaaatgtttccaagacaaattgraacaagaactactcaaatggaggagccaaggacagaaattgcaggtggggtggaagacaacccgtgagtattacaccttcatgtgggttactttgcccat

SEQ ID NO: 6159 - DNA, 201 bp, Homo sapiens
tttgccgtatcaagtacctacttcagatgaaggaggcgcaagacaaaatccaggacttgcctatggaaacccatattctggtatccaagaaagttcttccsccagcccgctctccatcaagaaatgccctatctgcaaagcagatgatatttgtgatcacaccttggagcaacagcagatgcagcccctttgtttcaattg

SEQ ID NO: 6160 - DNA, 201 bp, Homo sapiens
cctgtcttaagattaaataaaaaagagtgtcctggcagttatcttgaggtggggaaggaggtgatgaaacattagtttgtgaaatccaaggccctggcttkctttctttcttttttttttttttttttttgaaacagtctctctctgtcacccaggctggcgtgcaatggcgcagttgactcactacagcctctgcctccc

SEQ ID NO: 6161 - DNA, 201 bp, Homo sapiens
agctacagagaagcagatctttgaagaccacgtgttctgccactctctctgagtatcccaacctcttggatgtatacagagattttatagaatagaacctrtagcttctaccatgagttatatgagtcaagatcctgcctaacctgaaattattagggatttactcagccctgctgccgctaacagtggagttatgtcact

SEQ ID NO: 6162 - DNA, 201 bp, Homo sapiens
gttcttccgccagcccgctctccatcaagaaatgccctatctgcaaagcagatgatatttgtgatcacaccttggagcaacagcagatgcagcccctttgyttcaattgtccaatttgtgacaagatcttcccagctacagagaagcagatctttgaagaccacgtgttctgccactctctctgagtatcccaacctcttg

SEQ ID NO: 6163 - DNA, 201 bp, Homo sapiens
cgtgcaatggcgcagttgactcactacagcctctgcctcccaggttcaagcgattctcatgccttagcctcccaagtagctgggattacaggtgtgtgccrcaatgcccagctaatttttgtgtttttagtagagacagggtttcactatgttggccaggctggtctcgaactcctggcctcacgtgatctgtccacttca

SEQ ID NO: 6164 - DNA, 201 bp, Homo sapiens
gattaaataaaaaagagtgtcctggcagttatcttgaggtggggaaggaggtgatgaaacattagtttgtgaaatccaaggccctggcttgctttctttcttttttttttttttttttttgaaacagtctctctctgtcacccaggctggcgtgcaatggcgcagttgactcactacagcctctgcctcccaggttcaagc

SEQ ID NO: 6165 - DNA, 201 bp, Homo sapiens
caaaaccagaagatgtcctcagaaaatgagaagatgggaatcagagtggatcagcttcaggcccagctgtcaactcaagagaaagaaatggagaagcttgytcagggagatcaagataagacagagcagttagagcagctgaaaaaggaaaatgaccacctctttctcagtttaactgaacagaggaaggaccagaagaag

SEQ ID NO: 6166 - DNA, 109 bp, Homo sapiens
caggcgggwcgggctctcccttgggtgcttagccccgcccccgtcccactctgccctgttgctgtcgcgccgctgctggttgctgtccctggacccctaccatggagga

SEQ ID NO: 6167 - DNA, 201 bp, Homo sapiens
tgcccagctaatttttgtgtttttagtagagacagggtttcactatgttggccaggctggtctcgaactcctggcctcacgtgatctgtccacttcagccstccaaagtgctgggattacaagcgtgagccactgtgctgggcccgaggccctgacttcttgctgtaactttccatgcattttttttaaaaggagcagtgt

SEQ ID NO: 6168 - DNA, 201 bp, Homo sapiens
tgctgggcccgaggccctgacttcttgctgtaactttccatgcattttttttaaaaggagcagtgtggattttcgcaccctttgtgaactaagttcaatgygctctatccaaatttgcctaattgaactataagaaagtaataattccattttctatcccctcagggactgaacaaatggaaataactcccaggcagtatc

SEQ ID NO: 6169 - DNA, 201 bp, Homo sapiens
aatgagacaacttgttaatctctttaatactaaaaataaattactcttctatttcagggacttaggtaatttaaaataaaccttcaatttatggtcttctrttttgaagctcatgggaaaattgtgatcaaaagggctatgggaagggcagaccccgccaatgatttctcttcacctgtcttaagattaaataaaaaagag

SEQ ID NO: 6170 - DNA, 201 bp, Homo sapiens
ttctgctatgtggatgaggatggtgtggtccggggagcaagtattcctttccaattccgtccagaaaatgaggaagacatcctggttgttaccactcaggragaggtggaagagattgagcagcacaacaaggagctttgcaaagaaaaccaggagctgaaggacagctgtatcagcctccagaagcagaactcagacatg

SEQ ID NO: 6171 - DNA, 201 bp, Homo sapiens
gttggaactgaaagtgaaagaacagaaggactattgggagacagagctgcttcaactgaaagaacaaaaccagaagatgtcctcagaaaatgagaagatgrgaatcagagtggatcagcttcaggcccagctgtcaactcaagagaaagaaatggagaagcttgttcagggagatcaagataagacagagcagttagagca

SEQ ID NO: 6172 - DNA, 201 bp, Homo sapiens; identical to SEQ ID NO: 6159

SEQ ID NO: 6173 - DNA, 201 bp, Homo sapiens; identical to SEQ ID NO: 6160

SEQ ID NO: 6174 - DNA, 201 bp, Homo sapiens; identical to SEQ ID NO: 6161

SEQ ID NO: 6175 - DNA, 201 bp, Homo sapiens; identical to SEQ ID NO: 6162

SEQ ID NO: 6176 - DNA, 201 bp, Homo sapiens; identical to SEQ ID NO: 6163

SEQ ID NO: 6177 - DNA, 201 bp, Homo sapiens; identical to SEQ ID NO: 6164

SEQ ID NO: 6178 - DNA, 201 bp, Homo sapiens; identical to SEQ ID NO: 6165

SEQ ID NO: 6179 - DNA, 109 bp, Homo sapiens; identical to SEQ ID NO: 6166

SEQ ID NO: 6180 - DNA, 201 bp, Homo sapiens; identical to SEQ ID NO: 6167

SEQ ID NO: 6181 - DNA, 201 bp, Homo sapiens; identical to SEQ ID NO: 6168

SEQ ID NO: 6182 - DNA, 201 bp, Homo sapiens; identical to SEQ ID NO: 6169

SEQ ID NO: 6183 - DNA, 201 bp, Homo sapiens; identical to SEQ ID NO: 6170

SEQ ID NO: 6184 - DNA, 201 bp, Homo sapiens; identical to SEQ ID NO: 6171

SEQ ID NO: 6185 - DNA, 201 bp, Homo sapiens
ccgattccaatgttacccgcccctcagaattcaactacgtgtggattgtgcccatcacatccatcagagatggcagacagcagcaggactactggctgatrgatgtaagagcccagaacgatctcttcagcacatcaggcaatgagtgggtcctgctgaacctcaatgtgacgggctattaccgggtgaactacgacgaag

SEQ ID NO: 6186 - DNA, 201 bp, Homo sapiens
actacgtggagaagcaggcatccaatggtgtcttgatccggatctgggcccggcccagtgccattgcggcgggccacggcgattatgccctgaacgtgacrggccccatccttaacttctttgctggtcattatgacacaccctacccactcccaaaatcagaccagattggcctgccagacttcaacgccggcgccatgg

SEQ ID NO: 6187 - DNA, 201 bp, Homo sapiens
cctacccactcccaaaatcagaccagattggcctgccagacttcaacgccggcgccatggagaactggggactggtgacctaccgggagaactccctgctrttcgaccccctgtcctcctccagcagcaacaaggagcgggtggtcactgtgattgctcatgagctggcccaccagtggttcgggaacctggtgaccatag

SEQ ID NO: 6188 - DNA, 201 bp, Homo sapiens
accgggtgacgctgagaccgtacctcacccccaatgacaggggcctgtacgtttttaagggctccagcaccgtccgtttcacctgcaaggaggccactgaygtcatcatcatccacagcaagaagctcaactacaccctcagccaggggcacagggtggtcctgcgtggtgtgggaggctcccagccccccgacattgaca

SEQ ID NO: 6189 - DNA, 201 bp, Homo sapiens
gagctggcccaccagtggttcgggaacctggtgaccatagagtggtggaatgacctgtggctgaacgagggcttcgcctcctacgtggagtacctgggtgstgactatgcggagcccacctggaacttgaaagacctcatggtgctgaatgatgtgtaccgcgtgatggcagtggatgcactggcctcctcccacccgctg

SEQ ID NO: 6190 - DNA, 201 bp, Homo sapiens
aaagccaacatcaagtgggtgaaggagaacaaggaggtggtgctccagtggttcacagaaaacagcaaatagtccccagcccttgaagtcacccggccccbatgcaaggtgcccacatgtgtccatcccagcggctggtgcagggcctccattcctggagcccgaggcaccagtgtcctcccctcaaggacaaagtctcca

SEQ ID NO: 6191 - DNA, 201 bp, Homo sapiens
gaagacgaaagccaacatcaagtgggtgaaggagaacaaggaggtggtgctccagtggttcacagaaaacagcaaatagtccccagcccttgaagtcaccsggcccccatgcaaggtgcccacatgtgtccatcccagcggctggtgcagggcctccattcctggagcccgaggcaccagtgtcctcccctcaaggacaaa

SEQ ID NO: 6192 - DNA, 201 bp, Homo sapiens
tggtgtactcccaggagaagaacaagaacgccaacagctcccccgtggcctccaccaccccgtccgcctcagccaccaccaaccccgcctcggccaccacmttggaccaaagtaaagcgtggaatcgttaccgcctccccaacacgctgaaacccgattcctaccgggtgacgctgagaccgtacctcacccccaatgaca

SEQ ID NO: 6193 - DNA, 201 bp, Homo sapiens
tacttgctggccttcattgtcagtgagttcgactacgtggagaagcaggcatccaatggtgtcttgatccggatctgggcccggcccagtgccattgcggygggccacggcgattatgccctgaacgtgacgggccccatccttaacttctttgctggtcattatgacacaccctacccactcccaaaatcagaccagatt

SEQ ID NO: 6194 - DNA, 201 bp, Homo sapiens
gtgagttcgactacgtggagaagcaggcatccaatggtgtcttgatccggatctgggcccggcccagtgccattgcggcgggccacggcgattatgccctkaacgtgacgggccccatccttaacttctttgctggtcattatgacacaccctacccactcccaaaatcagaccagattggcctgccagacttcaacgccg

SEQ ID NO: 6195 - DNA, 201 bp, Homo sapiens
ctaccagaacaccatctacctgaacctgtgggaccacctgcaggaggctgtgaacaaccggtccatccaactccccaccaccgtgcgggacatcatgaacygctggaccctgcagatgggcttcccggtcatcacggtggataccagcacggggaccctttcccaggagcacttcctccttgaccccgattccaatgttac

SEQ ID NO: 6196 - DNA, 201 bp, Homo sapiens
caggtacctgagctacaccctgaacccggacttaatccggaagcaggacgccacctctaccatcatcagcattaccaacaacgtcattgggcaaggtctgrtctgggactttgtccagagcaactggaagaagctttttaacgattatggtggtggctcgttctccttctccaacctcatccaggcagtgacacgacgatt

SEQ ID NO: 6197 - DNA, 201 bp, Homo sapiens
ccaacaactggagggagatcccagaaaacctgatggaccagtacagcgaggttaatgccatcagcaccgcctgctccaacggagttccagagtgtgaggaratggtctctggccttttcaagcagtggatggagaaccccaataataacccgatccaccccaacctgcggtccaccgtctactgcaacgctatcgcccagg

SEQ ID NO: 6198 - DNA, 201 bp, Homo sapiens
cactcggccatccctgtcatcaatcgggcacagatcattaatgacgccttcaacctggccagtgcccataaggtccctgtcactctggcgctgaacaacascctcttcctgattgaagagagacagtacatgccctgggaggccgccctgagcagcctgagctacttcaagctcatgtttgaccgctccgaggtctatggc

SEQ ID NO: 6199 - DNA, 201 bp, Homo sapiens
tggttaatttttgcccagtctgcctgttgtggggctcctcccctttggggatataagcccggcctggggctgctccgttctctgcctggcctgaggctccstgagccgcctccccaccatcaccatggccaagggcttctatatttccaagtccctgggcatcctggggatcctcctgggcgtggcagccgtgtgcacaat

SEQ ID NO: 6200 - DNA, 201 bp, Homo sapiens
aggtggtgctccagtggttcacagaaaacagcaaatagtccccagcccttgaagtcacccggcccccatgcaaggtgcccacatgtgtccatcccagcggmtggtgcagggcctccattcctggagcccgaggcaccagtgtcctcccctcaaggacaaagtctccagcccacgttctctctgcctgtgagccagtctagt

SEQ ID NO: 6201 - DNA, 201 bp, Homo sapiens
gccttctgaactacgagtcccaggcaccccccgagcccagctccacacaccgttcctggatctcctctccccaggcggagcgtgcccctgcccagtccagygaccttcgcctgttggagccctggttaatttttgcccagtctgcctgttgtggggctcctcccctttggggatataagcccggcctggggctgctccgtt

SEQ ID NO: 6202 - DNA, 201 bp, Homo sapiens
agttccgaaatgccacactggtcaatgaggctgacaagctccgggcagccctggcctgcagcaaagagttgtggatcctgaacaggtacctgagctacacmctgaacccggacttaatccggaagcaggacgccacctctaccatcatcagcattaccaacaacgtcattgggcaaggtctggtctgggactttgtccaga

SEQ ID NO: 6203 - DNA, 201 bp, Homo sapiens
ccaacggagttccagagtgtgaggagatggtctctggccttttcaagcagtggatggagaaccccaataataacccgatccaccccaacctgcggtccacygtctactgcaacgctatcgcccagggcggggaggaggagtgggacttcgcctgggagcagttccgaaatgccacactggtcaatgaggctgacaagctcc

SEQ ID NO: 6204 - DNA, 201 bp, Homo sapiens
aagaactacctgaagaagcaggtcacacccctcttcattcacttcagaaataataccaacaactggagggagatcccagaaaacctgatggaccagtacarcgaggttaatgccatcagcaccgcctgctccaacggagttccagagtgtgaggagatggtctctggccttttcaagcagtggatggagaaccccaataat

SEQ ID NO: 6205 - DNA, 201 bp, Homo sapiens
tgtggatcctgaacaggtacctgagctacaccctgaacccggacttaatccggaagcaggacgccacctctaccatcatcagcattaccaacaacgtcatygggcaaggtctggtctgggactttgtccagagcaactggaagaagctttttaacgattatggtggtggctcgttctccttctccaacctcatccaggcag

SEQ ID NO: 6206 - DNA, 201 bp, Homo sapiens
caggctgcctgagcacctcccagcccctgcccctcatgccaaccccgccctaggcctggcatggcacctgtcgcccagtgccctggggctgatctcagggragcccagctccagggccagatgagcagaagctctcgatggacaatgaacggccttgctgggggccgccctgtaccctctttcacctttccctaaagaccc

SEQ ID NO: 6207 - DNA, 201 bp, Homo sapiens
caccctcttcctgattgaagagagacagtacatgccctgggaggccgccctgagcagcctgagctacttcaagctcatgtttgaccgctccgaggtctatkgccccatgaagaactacctgaagaagcaggtcacacccctcttcattcacttcagaaataataccaacaactggagggagatcccagaaaacctgatgga

SEQ ID NO: 6208 - DNA, 201 bp, Homo sapiens
gggactttgtccagagcaactggaagaagctttttaacgattatggtggtggctcgttctccttctccaacctcatccaggcagtgacacgacgattctcmaccgagtatgagctgcagcagctggagcagttcaagaaggacaacgaggaaacaggcttcggctcaggcacccgggccctggagcaagccctggagaaga

SEQ ID NO: 6209 - DNA, 201 bp, Homo sapiens
tttttcgcaaggtcgtgctactgcgccttctgaactacgagtcccaggcaccccccgagcccagctccacacaccgttcctggatctcctctccccaggcrgagcgtgcccctgcccagtccagtgaccttcgcctgttggagccctggttaatttttgcccagtctgcctgttgtggggctcctcccctttggggatata

SEQ ID NO: 6210 - DNA, 201 bp, Homo sapiens
gcctcagccaccaccaaccccgcctcggccaccaccttggaccaaagtaaagcgtggaatcgttaccgcctccccaacacgctgaaacccgattcctaccrggtgacgctgagaccgtacctcacccccaatgacaggggcctgtacgtttttaagggctccagcaccgtccgtttcacctgcaaggaggccactgacgtc

SEQ ID NO: 6211 - DNA, 201 bp, Homo sapiens; identical to SEQ ID NO: 6185

SEQ ID NO: 6212 - DNA, 201 bp, Homo sapiens; identical to SEQ ID NO: 6186

SEQ ID NO: 6213 - DNA, 201 bp, Homo sapiens; identical to SEQ ID NO: 6187

SEQ ID NO: 6214 - DNA, 201 bp, Homo sapiens; identical to SEQ ID NO: 6188

SEQ ID NO: 6215 - DNA, 201 bp, Homo sapiens; identical to SEQ ID NO: 6189

SEQ ID NO: 6216 - DNA, 201 bp, Homo sapiens; identical to SEQ ID NO: 6190

SEQ ID NO: 6217 - DNA, 201 bp, Homo sapiens; identical to SEQ ID NO: 6191

SEQ ID NO: 6218 - DNA, 201 bp, Homo sapiens; identical to SEQ ID NO: 6192

SEQ ID NO: 6219 - DNA, 201 bp, Homo sapiens; identical to SEQ ID NO: 6193

SEQ ID NO: 6220 - DNA, 201 bp, Homo sapiens; identical to SEQ ID NO: 6194

SEQ ID NO: 6221 - DNA, 201 bp, Homo sapiens; identical to SEQ ID NO: 6195

SEQ ID NO: 6222 - DNA, 201 bp, Homo sapiens; identical to SEQ ID NO: 6196

SEQ ID NO: 6223 - DNA, 201 bp, Homo sapiens; identical to SEQ ID NO: 6197

SEQ ID NO: 6224 - DNA, 201 bp, Homo sapiens; identical to SEQ ID NO: 6198

SEQ ID NO: 6225 - DNA, 201 bp, Homo sapiens; identical to SEQ ID NO: 6199

SEQ ID NO: 6226 - DNA, 201 bp, Homo sapiens; identical to SEQ ID NO: 6200

SEQ ID NO: 6227 - DNA, 178 bp, Homo sapiens
gcaccccccgagcccagctccacacaccgttcctggatctcctctccccaggcggagcgtgcccctgcccagtccagygaccttcgcctgttggagccctggttaatttttgcccagtctgcctgttgtggggctcctcccctttggggatataagcccggcctggggctgctccgtt

SEQ ID NO: 6228 - DNA, 201 bp, Homo sapiens; identical to SEQ ID NO: 6202

SEQ ID NO: 6229 - DNA, 201 bp, Homo sapiens; identical to SEQ ID NO: 6203

SEQ ID NO: 6230 - DNA, 201 bp, Homo sapiens; identical to SEQ ID NO: 6204

SEQ ID NO: 6231 - DNA, 201 bp, Homo sapiens; identical to SEQ ID NO: 6205

SEQ ID NO: 6232 - DNA, 201 bp, Homo sapiens; identical to SEQ ID NO: 6206

SEQ ID NO: 6233 - DNA, 201 bp, Homo sapiens; identical to SEQ ID NO: 6207

SEQ ID NO: 6234 - DNA, 201 bp, Homo sapiens; identical to SEQ ID NO: 6208

SEQ ID NO: 6235 - DNA, 154 bp, Homo sapiens
gcaccccccgagcccagctccacacaccgttcctggatctcctctccccaggcrgagcgtgcccctgcccagtccagtgaccttcgcctgttggagccctggttaatttttgcccagtctgcctgttgtggggctcctcccctttggggatata

SEQ ID NO: 6236 - DNA, 201 bp, Homo sapiens; identical to SEQ ID NO: 6210

SEQ ID NO: 6237 - DNA, 201 bp, Homo sapiens; identical to SEQ ID NO: 6185

SEQ ID NO: 6238 - DNA, 201 bp, Homo sapiens; identical to SEQ ID NO: 6186

SEQ ID NO: 6239 - DNA, 201 bp, Homo sapiens; identical to SEQ ID NO: 6187

SEQ ID NO: 6240 - DNA, 201 bp, Homo sapiens; identical to SEQ ID NO: 6188

SEQ ID NO: 6241 - DNA, 201 bp, Homo sapiens; identical to SEQ ID NO: 6189

SEQ ID NO: 6242 - DNA, 201 bp, Homo sapiens
aaagccaacatcaagtgggtgaaggagaacaaggaggtggtgctccagtggttcacagaaaacagcaaatagtccccagcccttgaagtcacccggccccbatgcaaggcacctgtcgcccagtgccctggggctgatctcagggaagcccagctccagggccagatgagcagaagctctcgatggacaatgaacggcctt

SEQ ID NO: 6243 - DNA, 201 bp, Homo sapiens
gaagacgaaagccaacatcaagtgggtgaaggagaacaaggaggtggtgctccagtggttcacagaaaacagcaaatagtccccagcccttgaagtcaccsggcccccatgcaaggcacctgtcgcccagtgccctggggctgatctcagggaagcccagctccagggccagatgagcagaagctctcgatggacaatgaa

SEQ ID NO: 6244 - DNA, 201 bp, Homo sapiens; identical to SEQ ID NO: 6192

SEQ ID NO: 6245 - DNA, 201 bp, Homo sapiens; identical to SEQ ID NO: 6193

SEQ ID NO: 6246 - DNA, 201 bp, Homo sapiens; identical to SEQ ID NO: 6194

SEQ ID NO: 6247 - DNA, 201 bp, Homo sapiens; identical to SEQ ID NO: 6195

SEQ ID NO: 6248 - DNA, 201 bp, Homo sapiens; identical to SEQ ID NO: 6196

SEQ ID NO: 6249 - DNA, 201 bp, Homo sapiens; identical to SEQ ID NO: 6197

SEQ ID NO: 6250 - DNA, 201 bp, Homo sapiens; identical to SEQ ID NO: 6198

SEQ ID NO: 6251 - DNA, 201 bp, Homo sapiens; identical to SEQ ID NO: 6199

SEQ ID NO: 6252 - DNA, 201 bp, Homo sapiens; identical to SEQ ID NO: 6201

SEQ ID NO: 6253 - DNA, 201 bp, Homo sapiens; identical to SEQ ID NO: 6202

SEQ ID NO: 6254 - DNA, 201 bp, Homo sapiens; identical to SEQ ID NO: 6203

SEQ ID NO: 6255 - DNA, 201 bp, Homo sapiens; identical to SEQ ID NO: 6204

SEQ ID NO: 6256 - DNA, 201 bp, Homo sapiens; identical to SEQ ID NO: 6205

SEQ ID NO: 6257 - DNA, 201 bp, Homo sapiens
cagtggttcacagaaaacagcaaatagtccccagcccttgaagtcacccggcccccatgcaaggcacctgtcgcccagtgccctggggctgatctcagggragcccagctccagggccagatgagcagaagctctcgatggacaatgaacggccttgctgggggccgccctgtaccctctttcacctttccctaaagaccc

SEQ ID NO: 6258 - DNA, 201 bp, Homo sapiens; identical to SEQ ID NO: 6207

SEQ ID NO: 6259 - DNA, 201 bp, Homo sapiens; identical to SEQ ID NO: 6208

SEQ ID NO: 6260 - DNA, 201 bp, Homo sapiens; identical to SEQ ID NO: 6209

SEQ ID NO: 6261 - DNA, 201 bp, Homo sapiens; identical to SEQ ID NO: 6210

SEQ ID NO: 6262 - DNA, 201 bp, Homo sapiens
gaaactgtgacctgtgaggatgcccaaaagacctgccctgcagtgattgcctgtagctctccaggcatcaacggcttcccaggcaaagatgggcgtgatgrcaccaagggagaaaagggggaaccaggccaagggctcagaggcttacagggcccccctggaaagttggggcctccaggaaatccagggccttctgggtca

SEQ ID NO: 6263 - DNA, 201 bp, Homo sapiens
ttactcagaaactgtgacctgtgaggatgcccaaaagacctgccctgcagtgattgcctgtagctctccaggcatcaacggcttcccaggcaaagatgggygtgatggcaccaagggagaaaagggggaaccaggccaagggctcagaggcttacagggcccccctggaaagttggggcctccaggaaatccagggccttc

SEQ ID NO: 6264 - DNA, 201 bp, Homo sapiens
aaaaaggagaccctggaaaaagtccggatggtgatagtagcctggctgcctcagaaagaaaagctctgcaaacagaaatggcacgtatcaaaaagtggctsaccttctctctgggcaaacaagttgggaacaagttcttcctgaccaatggtgaaataatgacctttgaaaaagtgaaggccttgtgtgtcaagttccagg

SEQ ID NO: 6265 - DNA, 201 bp, Homo sapiens
tcctgagtatggtggcagcgtcttactcagaaactgtgacctgtgaggatgcccaaaagacctgccctgcagtgattgcctgtagctctccaggcatcaayggcttcccaggcaaagatgggcgtgatggcaccaagggagaaaagggggaaccaggccaagggctcagaggcttacagggcccccctggaaagttggggc

SEQ ID NO: 6266 - DNA, 201 bp, Homo sapiens
acctgtgaggatgcccaaaagacctgccctgcagtgattgcctgtagctctccaggcatcaacggcttcccaggcaaagatgggcgtgatggcaccaaggragaaaagggggaaccaggccaagggctcagaggcttacagggcccccctggaaagttggggcctccaggaaatccagggccttctgggtcaccaggacca

SEQ ID NO: 6267 - DNA, 201 bp, Homo sapiens; identical to SEQ ID NO: 6262

SEQ ID NO: 6268 - DNA, 201 bp, Homo sapiens
actgggaccacattgagtctatcaatcaacttatgcagaactggcaacttactactgaatctctaatcaatgttcatcatgtatcgcttcatgtaactagratttctttaacttaattgctatgttttgacatttttagtttaaaaaccttgtatatcttgttttggtggttttagtgattttaataatatattttaaata

SEQ ID NO: 6269 - DNA, 201 bp, Homo sapiens
gtaagctgaaaatatggcaatacttgcttcttcccaattgctttaccttttttcttaccttattgcactggttagcaaccccaatacagagaccaccagakcaggtatagactcctgaaagacaatataatgaagtgctccagtcaggcctatctaaactggattcacagctctgtcacttaattgctacatgatctagag

SEQ ID NO: 6270 - DNA, 201 bp, Homo sapiens
gtgtgtgtgtctgtttctgggctgtctattctagtctatttgttgatgcttgtgtcaaacagtacactatcttaattattgtacatttatagttgtaactrtagtccagctttgttcttcttaaagtcaagatttccatataaatattagaaacagcttctcaatttctacaaaatcctgatgaggtttctactgggacca

SEQ ID NO: 6271 - DNA, 201 bp, Homo sapiens
tgaaatcatgaagatatttttccatttttttctaatagttttattaataaacattctatctattcctggtagaatagatatccacttgagacagcactatrtaggaaagaccatttttcctccactgaactagggtggtgcatttttgtaagttaggtaactgtatgtgtgtgtgtctgtttctgggctgtctattctagt

SEQ ID NO: 6272 - DNA, 201 bp, Homo sapiens
tgtctattctagtctatttgttgatgcttgtgtcaaacagtacactatcttaattattgtacatttatagttgtaactatagtccagctttgttcttcttmaagtcaagatttccatataaatattagaaacagcttctcaatttctacaaaatcctgatgaggtttctactgggaccacattgagtctatcaatcaactt

SEQ ID NO: 6273 - DNA, 201 bp, Homo sapiens
aaacagtacactatcttaattattgtacatttatagttgtaactatagtccagctttgttcttcttaaagtcaagatttccatataaatattagaaacagyttctcaatttctacaaaatcctgatgaggtttctactgggaccacattgagtctatcaatcaacttatgcagaactggcaacttactactgaatctctaa

SEQ ID NO: 6274 - DNA, 201 bp, Homo sapiens
gtaaagtgatatttccccatggttttaatctgtatttccccaacatgtaataaggttgaacacttttttatatgcttattgggcacttgggtatcttcttytgtgaagtacccgttcacatttttgtattttgtttaaattagttagccaatatttttcttactgatttttaagttatttttacattctgaatatgtcctt

SEQ ID NO: 6275 - DNA, 201 bp, Homo sapiens
tcctgaaagacaatataatgaagtgctccagtcaggcctatctaaactggattcacagctctgtcacttaattgctacatgatctagagccagttactttktgtttcagccatgtatttgcagctgagagaaaataatcattcttatttcatgaaaattgtggggatgatgaaataagttaacacctttaaagtgtgtagt

SEQ ID NO: 6276 - DNA, 201 bp, Homo sapiens
tttagtagatattaccagttttcctaagtgattgtatgaatttatgctcctaccggcaatgtgtggcagtcctagatgctctatgtgcttgtaaaaagtcratgttttcagttctcttgattttcattattcctgtggatgtaaagtgatatttccccatggttttaatctgtatttccccaacatgtaataaggttgaac

SEQ ID NO: 6277 - DNA, 201 bp, Homo sapiens
tttagtgattttaataatatattttaaatattttttcttttctattgttgtacacagaaatacagttaagttttgtgtgtagtcttacgatgtttagtaamctcaataagtttatttcttaaatctagtaatttgtagattcctctggattttgtatatgcatagtcatgtaagctgaaaatatggcaatacttgcttctt

SEQ ID NO: 6278 - DNA, 201 bp, Homo sapiens; identical to SEQ ID NO: 6263

SEQ ID NO: 6279 - DNA, 201 bp, Homo sapiens
aggaaaatactattctgacctccatgactgcacagtaatttcgtctgtttataaacattgtatagttggaatcatattgtgtgtaatgttgtatgtcttgyttactcagaattaagtctgtgagattcattcatgtcatgtgtacaaaagtttcatccttttcattgccatgtagggttcccttatattaatattcctcag

SEQ ID NO: 6280 - DNA, 201 bp, Homo sapiens; identical to SEQ ID NO: 6264

SEQ ID NO: 6281 - DNA, 201 bp, Homo sapiens
aggtttctactgggaccacattgagtctatcaatcaacttatgcagaactggcaacttactactgaatctctaatcaatgttcatcatgtatcgcttcatktaactagaatttctttaacttaattgctatgttttgacatttttagtttaaaaaccttgtatatcttgttttggtggttttagtgattttaataatatat

SEQ ID NO: 6282 - DNA, 201 bp, Homo sapiens; identical to SEQ ID NO: 6266

SEQ ID NO: 6283 - DNA, 201 bp, Homo sapiens; identical to SEQ ID NO: 6265

SEQ ID NO: 6284 - DNA, 201 bp, Homo sapiens
cactgaaaaccaggccctgttgccttttaagcatgtaccgctccctcagtcctgtgctgcagccccccaaatatatttttctgatatagaccttgtatatrgctttaatgccgcaaaatatttatttttccttaaaaaaggtgtcaacttggaaataatggtttaaaaacaggataagcattaaggaaaaacactttcaat

SEQ ID NO: 6285 - DNA, 201 bp, Homo sapiens
tctctctttatccccgcaaggtggagtttcatgtcctcggtgaaaccagacagtgtgaatctgttccagcccaaatctgcagcattagggatgagttctcrgaagtgattctgaactgagcacgcactcatgtctgcatggggaactctggggagaagagccttccttttctttcccttgggcatttgcctttccttgtcg

SEQ ID NO: 6286 - DNA, 180 bp, Homo sapiens
acagaaagcttcctctttctctgttctattgcaactacaaattctacagtcatgcctaagatcctttagctaacacccttttcaagaaatcatcagactcytggattgacttagaattcattcattcgttaagtgcttaccgagtccccgctctgtggcaagcactgttctatatcaact

SEQ ID NO: 6287 - DNA, 153 bp, Homo sapiens
attgcaactacaaattctacagtcatgcctaagatcctttagctaacacccttttcaagaaatcatcagactcttggattgacttagaattcattcattcrttaagtgcttaccgagtccccgctctgtggcaagcactgttctatatcaact

SEQ ID NO: 6288 - DNA, 201 bp, Homo sapiens
aagagatatgaggatgggaccatcagttccaacgccacccatgtggagcatccgttatgtcccccgaagccaggttttgtgagaggatttaaccatccttktggttgcttctgtgaacctcttccaggggaacccaccaagaccaacctggtcacattcttccataccgacctcagcggttacctcccacagaacgtggtg

SEQ ID NO: 6289 - DNA, 201 bp, Homo sapiens
gtgtgactaaaatcccttcacgctgcatttacccaggttactattgtgcgcgcaaaatgttttcacagtgttctcagcctttgctcctccaaacagaaaaygtttcccctgcgttactgttacttccctatttttgagtcctggggtgactgtctcttaaatgtgccaagatgtgagcaagctttaaaacatgacagctca

SEQ ID NO: 6290 - DNA, 132 bp, Homo sapiens
gtcatgcctaagatcctttagctaacacccttttcaagaaatcatcagactcttggattgacttagaattcattcattcgttaagtgcttaccgagtcccygctctgtggcaagcactgttctatatcaact

SEQ ID NO: 6291 - DNA, 201 bp, Homo sapiens
gttcactctttggaacaagctgatggactgcgcatctctgagaatgccaaccagaggcggcagcccacccttcctgcctcctgccccactcagggttggcrtgtgatgagccattcatgtgttccaaactccatctgcctgttacccaaacacgcctctcctggcagggtagacccaggcctctaaccatctgacagagac

SEQ ID NO: 6292 - DNA, 201 bp, Homo sapiens
gcaacctcatctgcacccccaccaccttccttgtaagaaagaccacgtgtgactaaaatcccttcacgctgcatttacccaggttactattgtgcgcgcaraatgttttcacagtgttctcagcctttgctcctccaaacagaaaacgtttcccctgcgttactgttacttccctatttttgagtcctggggtgactgtct

SEQ ID NO: 6293 - DNA, 201 bp, Homo sapiens
caacctcatctgcacccccaccaccttccttgtaagaaagaccacgtgtgactaaaatcccttcacgctgcatttacccaggttactattgtgcgcgcaaratgttttcacagtgttctcagcctttgctcctccaaacagaaaacgtttcccctgcgttactgttacttccctatttttgagtcctggggtgactgtctc

SEQ ID NO: 6294 - DNA, 201 bp, Homo sapiens
acagcaggctggaagatttgccgggaaggcgtaccgaggagaaggcattgtatatgggacactagaggaggtgtgggactgtgtgaagccagctgttggargcctacgagtgaagtgggatgagaatgtgaccggttttgaaattatccaaagcatcactgacaccctgtgtgtaagcagaacctccactccctccgctgc

SEQ ID NO: 6295 - DNA, 201 bp, Homo sapiens; identical to SEQ ID NO: 6284

SEQ ID NO: 6296 - DNA, 201 bp, Homo sapiens; identical to SEQ ID NO: 6285

SEQ ID NO: 6297 - DNA, 180 bp, Homo sapiens; identical to SEQ ID NO: 6286

SEQ ID NO: 6298 - DNA, 153 bp, Homo sapiens; identical to SEQ ID NO: 6287

SEQ ID NO: 6299 - DNA, 201 bp, Homo sapiens; identical to SEQ ID NO: 6288

SEQ ID NO: 6300 - DNA, 201 bp, Homo sapiens; identical to SEQ ID NO: 6289

SEQ ID NO: 6301 - DNA, 132 bp, Homo sapiens; identical to SEQ ID NO: 6290

SEQ ID NO: 6302 - DNA, 201 bp, Homo sapiens; identical to SEQ ID NO: 6291

SEQ ID NO: 6303 - DNA, 201 bp, Homo sapiens; identical to SEQ ID NO: 6292

SEQ ID NO: 6304 - DNA, 201 bp, Homo sapiens; identical to SEQ ID NO: 6293

SEQ ID NO: 6305 - DNA, 201 bp, Homo sapiens
gaggccatctgtggagtttccagggaacctgtaccgaggagaaggcattgtatatgggacactagaggaggtgtgggactgtgtgaagccagctgttggargcctacgagtgaagtgggatgagaatgtgaccggttttgaaattatccaaagcatcactgacaccctgtgtgtaagcagaacctccactccctccgctgc

SEQ ID NO: 6306 - DNA, 201 bp, Homo sapiens
tcatggctaccagcacctgaaagcttcctcgacatctgttaataaagccgtaggcccttgtctaagtgcaaccgcctagactttctttcagatacatgtcyacatgtccatttttcaggttctctaagttggagtggagtctgggaagggttgtgaatgaggcttctgggctatgggtgaggttccaatggcaggttagag

SEQ ID NO: 6307 - DNA, 201 bp, Homo sapiens
cctttccttaaaggccatccttaaaaccagaccctcatggctaccagcacctgaaagcttcctcgacatctgttaataaagccgtaggcccttgtctaagygcaaccgcctagactttctttcagatacatgtccacatgtccatttttcaggttctctaagttggagtggagtctgggaagggttgtgaatgaggcttct

SEQ ID NO: 6308 - DNA, 201 bp, Homo sapiens
attaacccttggtgaatttttgaaactggacagagaaagagccaagaacaaaattgcaaaggaaaccaacaataagaagaaagaatttgaggaaactgcgragaaagtgcgccgtgccatcgagcagctggctgccatggattgaggcctctggccggagctgcctggtcccagagtggctgcaccacttccagggtttat

SEQ ID NO: 6309 - DNA, 201 bp, Homo sapiens
tgtctgtcagcccaaccttcacatctgtcacgttctccacacgggggagagacgcagtccgcccaggtccccgctttctttggaggcagcagctcccgcasggctgaagtctggcgtaagatgatggatttgattcgccctcctccctgtcatagagctgcagggtggattgttacagcttcgctggaaacctctggaggt

SEQ ID NO: 6310 - DNA, 201 bp, Homo sapiens
agcctgtgctgtgggcagggctgagctggagccgcccctctcagcccgcctgccacggcctttccttaaaggccatccttaaaaccagaccctcatggctrccagcacctgaaagcttcctcgacatctgttaataaagccgtaggcccttgtctaagtgcaaccgcctagactttctttcagatacatgtccacatgtcc

SEQ ID NO: 6311 - DNA, 201 bp, Homo sapiens
tctgtcacacctgtgcctcctcagaggacatgtttttttgtttttttttttttggtagatgcatgacttgtgtgtgatgagagaatggagacagagtcccyggctcctctactgtttaacaacatggctttcttattttgtttgaattgttaattcacagaatagcacaaactacaattaaaactaagcacaaagccattc

SEQ ID NO: 6312 - DNA, 201 bp, Homo sapiens
tggaaaaaaatggttttgtcttcaactcctttgcatgccaggcggtgatgtggatctcggcttctgtgagcctgtgctgtgggcagggctgagctggagcmgcccctctcagcccgcctgccacggcctttccttaaaggccatccttaaaaccagaccctcatggctaccagcacctgaaagcttcctcgacatctgtta

SEQ ID NO: 6313 - DNA, 201 bp, Homo sapiens
ctctggccggagctgcctggtcccagagtggctgcaccacttccagggtttattccctggtgccaccagccttcctgtgggccccttagcaatgtcttagraaaggagatcaacattttcaaattagatgtttcaactgtgctcttgttttgtcttgaaagtggcaccagaggtgcttctgcctgtgcagcgggtgctgct

SEQ ID NO: 6314 - DNA, 201 bp, Homo sapiens
ttgaggctgtcacagtcctgagtgtggacttggcaggtgcctgttgaatctgagctgcaggttccttatctgtcacacctgtgcctcctcagaggacatgtttttttgtttttttttttttggtagatgcatgacttgtgtgtgatgagagaatggagacagagtccctggctcctctactgtttaacaacatggctttct

SEQ ID NO: 6315 - DNA, 201 bp, Homo sapiens
tgtcacagtcctgagtgtggacttggcaggtgcctgttgaatctgagctgcaggttccttatctgtcacacctgtgcctcctcagaggacatgtttttttgtttttttttttttggtagatgcatgacttgtgtgtgatgagagaatggagacagagtccctggctcctctactgtttaacaacatggctttcttattttg

SEQ ID NO: 6316 - DNA, 201 bp, Homo sapiens
tctgggcgcttgccagagccacgaaccccagacctgtttgtatcatccgggctccttccgggcagaaacaactgaaaatgcacttcagacccacttatttmtgccacatctgagtcggcctgagatagacttttccctctaaactgggagaatatcacagtggtttttgttagcagaaaatgcactccagcctctgtactc

SEQ ID NO: 6317 - DNA, 144 bp, Homo sapiens
gacatgccccgcggcgcgccattaaccgccagatttgaatcgcsggacccgttggcagaggtggcggcggcggcatgggtgccccgacgttgccccctgcctggcagccctttctcaaggaccaccgcatctctacattcaaga

SEQ ID NO: 6318 - DNA, 201 bp, Homo sapiens
agggtttattccctggtgccaccagccttcctgtgggccccttagcaatgtcttaggaaaggagatcaacattttcaaattagatgtttcaactgtgctcytgttttgtcttgaaagtggcaccagaggtgcttctgcctgtgcagcgggtgctgctggtaacagtggctgcttctctctctctctctcttttttgggggc

SEQ ID NO: 6319 - DNA, 201 bp, Homo sapiens; identical to SEQ ID NO: 6306

SEQ ID NO: 6320 - DNA, 201 bp, Homo sapiens; identical to SEQ ID NO: 6307

SEQ ID NO: 6321 - DNA, 201 bp, Homo sapiens
agtgtttcttctgcttcaaggagctggaaggctgggagccagatgacgaccccatgcaaaggaaaccaacaataagaagaaagaatttgaggaaactgcgragaaagtgcgccgtgccatcgagcagctggctgccatggattgaggcctctggccggagctgcctggtcccagagtggctgcaccacttccagggtttat

SEQ ID NO: 6322 - DNA, 201 bp, Homo sapiens; identical to SEQ ID NO: 6309

SEQ ID NO: 6323 - DNA, 201 bp, Homo sapiens; identical to SEQ ID NO: 6310

SEQ ID NO: 6324 - DNA, 201 bp, Homo sapiens; identical to SEQ ID NO: 6311

SEQ ID NO: 6325 - DNA, 201 bp, Homo sapiens; identical to SEQ ID NO: 6312

SEQ ID NO: 6326 - DNA, 201 bp, Homo sapiens; identical to SEQ ID NO: 6313

SEQ ID NO: 6327 - DNA, 201 bp, Homo sapiens; identical to SEQ ID NO: 6314

SEQ ID NO: 6328 - DNA, 201 bp, Homo sapiens; identical to SEQ ID NO: 6315

SEQ ID NO: 6329 - DNA, 201 bp, Homo sapiens; identical to SEQ ID NO: 6316

SEQ ID NO: 6330 - DNA, 144 bp, Homo sapiens; identical to SEQ ID NO: 6317

SEQ ID NO: 6331 - DNA, 201 bp, Homo sapiens; identical to SEQ ID NO: 6318

SEQ ID NO: 6332 - DNA, 201 bp, Homo sapiens; identical to SEQ ID NO: 6306

SEQ ID NO: 6333 - DNA, 201 bp, Homo sapiens; identical to SEQ ID NO: 6307

SEQ ID NO: 6334 - DNA, 201 bp, Homo sapiens; identical to SEQ ID NO: 6308

SEQ ID NO: 6335 - DNA, 201 bp, Homo sapiens; identical to SEQ ID NO: 6309

SEQ ID NO: 6336 - DNA, 201 bp, Homo sapiens; identical to SEQ ID NO: 6310

SEQ ID NO: 6337 - DNA, 201 bp, Homo sapiens
cctcctcagaggacagtttttttgttgttgtgtttttttgtttttttttttttggtagatgcatgacttgtgtgtgatgagagaatggagacagagtcccyggctcctctactgtttaacaacatggctttcttattttgtttgaattgttaattcacagaatagcacaaactacaattaaaactaagcacaaagccattc

SEQ ID NO: 6338 - DNA, 201 bp, Homo sapiens; identical to SEQ ID NO: 6312

SEQ ID NO: 6339 - DNA, 201 bp, Homo sapiens; identical to SEQ ID NO: 6313

SEQ ID NO: 6340 - DNA, 201 bp, Homo sapiens
ctgtcacagtcctgagtgtggacttggcaggtgcctgttgaatctgagctgcaggttccttatctgtcacacctgtgcctcctcagaggacagtttttttgttgttgtgtttttttgtttttttttttttggtagatgcatgacttgtgtgtgatgagagaatggagacagagtccctggctcctctactgtttaacaaca

SEQ ID NO: 6341 - DNA, 201 bp, Homo sapiens
tcctgagtgtggacttggcaggtgcctgttgaatctgagctgcaggttccttatctgtcacacctgtgcctcctcagaggacagtttttttgttgttgtgtttttttgtttttttttttttggtagatgcatgacttgtgtgtgatgagagaatggagacagagtccctggctcctctactgtttaacaacatggctttct

SEQ ID NO: 6342 - DNA, 201 bp, Homo sapiens
tgtggacttggcaggtgcctgttgaatctgagctgcaggttccttatctgtcacacctgtgcctcctcagaggacagtttttttgttgttgtgtttttttgtttttttttttttggtagatgcatgacttgtgtgtgatgagagaatggagacagagtccctggctcctctactgtttaacaacatggctttcttattttg

SEQ ID NO: 6343 - DNA, 201 bp, Homo sapiens; identical to SEQ ID NO: 6316

SEQ ID NO: 6344 - DNA, 144 bp, Homo sapiens; identical to SEQ ID NO: 6317

SEQ ID NO: 6345 - DNA, 201 bp, Homo sapiens; identical to SEQ ID NO: 6318

SEQ ID NO: 6346 - DNA, 144 bp, Homo sapiens; identical to SEQ ID NO: 6317

SEQ ID NO: 6347 - DNA, 201 bp, Homo sapiens; identical to SEQ ID NO: 6306

SEQ ID NO: 6348 - DNA, 201 bp, Homo sapiens; identical to SEQ ID NO: 6307

SEQ ID NO: 6349 - DNA, 201 bp, Homo sapiens; identical to SEQ ID NO: 6321

SEQ ID NO: 6350 - DNA, 201 bp, Homo sapiens; identical to SEQ ID NO: 6309

SEQ ID NO: 6351 - DNA, 201 bp, Homo sapiens; identical to SEQ ID NO: 6310

SEQ ID NO: 6352 - DNA, 201 bp, Homo sapiens; identical to SEQ ID NO: 6337

SEQ ID NO: 6353 - DNA, 201 bp, Homo sapiens; identical to SEQ ID NO: 6312

SEQ ID NO: 6354 - DNA, 201 bp, Homo sapiens; identical to SEQ ID NO: 6313

SEQ ID NO: 6355 - DNA, 201 bp, Homo sapiens; identical to SEQ ID NO: 6340

SEQ ID NO: 6356 - DNA, 201 bp, Homo sapiens; identical to SEQ ID NO: 6341

SEQ ID NO: 6357 - DNA, 201 bp, Homo sapiens; identical to SEQ ID NO: 6342

SEQ ID NO: 6358 - DNA, 201 bp, Homo sapiens; identical to SEQ ID NO: 6316

SEQ ID NO: 6359 - DNA, 144 bp, Homo sapiens; identical to SEQ ID NO: 6317

SEQ ID NO: 6360 - DNA, 201 bp, Homo sapiens; identical to SEQ ID NO: 6318

SEQ ID NO: 6361 - DNA, 201 bp, Homo sapiens; identical to SEQ ID NO: 6306

SEQ ID NO: 6362 - DNA, 201 bp, Homo sapiens; identical to SEQ ID NO: 6307

SEQ ID NO: 6363 - DNA, 201 bp, Homo sapiens; identical to SEQ ID NO: 6308

SEQ ID NO: 6364 - DNA, 201 bp, Homo sapiens; identical to SEQ ID NO: 6309

SEQ ID NO: 6365 - DNA, 201 bp, Homo sapiens; identical to SEQ ID NO: 6310

SEQ ID NO: 6366 - DNA, 201 bp, Homo sapiens; identical to SEQ ID NO: 6311

SEQ ID NO: 6367 - DNA, 201 bp, Homo sapiens; identical to SEQ ID NO: 6312

SEQ ID NO: 6368 - DNA, 201 bp, Homo sapiens; identical to SEQ ID NO: 6313

SEQ ID NO: 6369 - DNA, 201 bp, Homo sapiens; identical to SEQ ID NO: 6314

SEQ ID NO: 6370 - DNA, 201 bp, Homo sapiens; identical to SEQ ID NO: 6315

SEQ ID NO: 6371 - DNA, 201 bp, Homo sapiens; identical to SEQ ID NO: 6316

SEQ ID NO: 6372 - DNA, 144 bp, Homo sapiens; identical to SEQ ID NO: 6317

SEQ ID NO: 6373 - DNA, 201 bp, Homo sapiens; identical to SEQ ID NO: 6318

SEQ ID NO: 6374 - DNA, 201 bp, Homo sapiens; identical to SEQ ID NO: 6306

SEQ ID NO: 6375 - DNA, 201 bp, Homo sapiens; identical to SEQ ID NO: 6307

SEQ ID NO: 6376 - DNA, 201 bp, Homo sapiens; identical to SEQ ID NO: 6308

SEQ ID NO: 6377 - DNA, 201 bp, Homo sapiens; identical to SEQ ID NO: 6309

SEQ ID NO: 6378 - DNA, 201 bp, Homo sapiens; identical to SEQ ID NO: 6310

SEQ ID NO: 6379 - DNA, 201 bp, Homo sapiens; identical to SEQ ID NO: 6337

SEQ ID NO: 6380 - DNA, 201 bp, Homo sapiens; identical to SEQ ID NO: 6312

SEQ ID NO: 6381 - DNA, 201 bp, Homo sapiens; identical to SEQ ID NO: 6313

SEQ ID NO: 6382 - DNA, 201 bp, Homo sapiens; identical to SEQ ID NO: 6340

SEQ ID NO: 6383 - DNA, 201 bp, Homo sapiens; identical to SEQ ID NO: 6341

SEQ ID NO: 6384 - DNA, 201 bp, Homo sapiens; identical to SEQ ID NO: 6342

SEQ ID NO: 6385 - DNA, 201 bp, Homo sapiens; identical to SEQ ID NO: 6316

SEQ ID NO: 6386 - DNA, 144 bp, Homo sapiens; identical to SEQ ID NO: 6317

SEQ ID NO: 6387 - DNA, 201 bp, Homo sapiens; identical to SEQ ID NO: 6318

SEQ ID NO: 6388 - DNA, 201 bp, Homo sapiens
cgagggccggaactgtgagacgcacaaggatgaccagctgatctgtgtgaacgagaacggcggctgtgagcagtactgcagtgaccacacgggcaccaagygctcctgtcggtgccacgaggggtactctctgctggcagacggggtgtcctgcacacccacagttgaatatccatgtggaaaaatacctattctagaaaa

SEQ ID NO: 6389 - DNA, 201 bp, Homo sapiens
gcgctgctccgcctgcaccagcccgtggtcctcactgaccatgtggtgcccctctgcctgcccgaacggacgttctctgagaggacgctggccttcgtgcrcttctcattggtcagcggctggggccagctgctggaccgtggcgccacggccctggagctcatggtcctcaacgtgccccggctgatgacccaggactgc

SEQ ID NO: 6390 - DNA, 201 bp, Homo sapiens
cagcacgtacgtcccgggcaccaccaaccacgacatcgcgctgctccgcctgcaccagcccgtggtcctcactgaccatgtggtgcccctctgcctgcccraacggacgttctctgagaggacgctggccttcgtgcgcttctcattggtcagcggctggggccagctgctggaccgtggcgccacggccctggagctcat

SEQ ID NO: 6391 - DNA, 201 bp, Homo sapiens
acgttctctgagaggacgctggccttcgtgcgcttctcattggtcagcggctggggccagctgctggaccgtggcgccacggccctggagctcatggtccycaacgtgccccggctgatgacccaggactgcctgcagcagtcacggaaggtgggagactccccaaatatcacggagtacatgttctgtgccggctactcg

SEQ ID NO: 6392 - DNA, 201 bp, Homo sapiens
aggcccacatgccacccactaccggggcacgtggtacctgacgggcatcgtcagctggggccagggctgcgcaaccgtgggccactttggggtgtacaccrgggtctcccagtacatcgagtggctgcaaaagctcatgcgctcagagccacgcccaggagtcctcctgcgagccccatttccctagcccagcagccctgg

SEQ ID NO: 6393 - DNA, 201 bp, Homo sapiens
tgagaggacgctggccttcgtgcgcttctcattggtcagcggctggggccagctgctggaccgtggcgccacggccctggagctcatggtcctcaacgtgmcccggctgatgacccaggactgcctgcagcagtcacggaaggtgggagactccccaaatatcacggagtacatgttctgtgccggctactcggatggcag

SEQ ID NO: 6394 - DNA, 201 bp, Homo sapiens
gagaggacgctggccttcgtgcgcttctcattggtcagcggctggggccagctgctggaccgtggcgccacggccctggagctcatggtcctcaacgtgcsccggctgatgacccaggactgcctgcagcagtcacggaaggtgggagactccccaaatatcacggagtacatgttctgtgccggctactcggatggcagc

SEQ ID NO: 6395 - DNA, 201 bp, Homo sapiens
ggcccgggagatcttcaaggacgcggagaggacgaagctgttctggatttcttacagtgatggggaccagtgtgcctcaagtccatgccagaatgggggcycctgcaaggaccagctccagtcctatatctgcttctgcctccctgccttcgagggccggaactgtgagacgcacaaggatgaccagctgatctgtgtgaa

SEQ ID NO: 6396 - DNA, 201 bp, Homo sapiens
cgggagatcttcaaggacgcggagaggacgaagctgttctggatttcttacagtgatggggaccagtgtgcctcaagtccatgccagaatgggggctcctkcaaggaccagctccagtcctatatctgcttctgcctccctgccttcgagggccggaactgtgagacgcacaaggatgaccagctgatctgtgtgaacgag

SEQ ID NO: 6397 - DNA, 201 bp, Homo sapiens
cgcttctcattggtcagcggctggggccagctgctggaccgtggcgccacggccctggagctcatggtcctcaacgtgccccggctgatgacccaggactkcctgcagcagtcacggaaggtgggagactccccaaatatcacggagtacatgttctgtgccggctactcggatggcagcaaggactcctgcaagggggac

SEQ ID NO: 6398 - DNA, 201 bp, Homo sapiens
ctccgcggcccactgtttcgacaaaatcaagaactggaggaacctgatcgcggtgctgggcgagcacgacctcagcgagcacgacggggatgagcagagcyggcgggtggcgcaggtcatcatccccagcacgtacgtcccgggcaccaccaaccacgacatcgcgctgctccgcctgcaccagcccgtggtcctcactga

SEQ ID NO: 6399 - DNA, 201 bp, Homo sapiens
cacgacctcagcgagcacgacggggatgagcagagccggcgggtggcgcaggtcatcatccccagcacgtacgtcccgggcaccaccaaccacgacatcgygctgctccgcctgcaccagcccgtggtcctcactgaccatgtggtgcccctctgcctgcccgaacggacgttctctgagaggacgctggccttcgtgcgc

SEQ ID NO: 6400 - DNA, 201 bp, Homo sapiens
ctggagctcatggtcctcaacgtgccccggctgatgacccaggactgcctgcagcagtcacggaaggtgggagactccccaaatatcacggagtacatgtyctgtgccggctactcggatggcagcaaggactcctgcaagggggacagtggaggcccacatgccacccactaccggggcacgtggtacctgacgggcatc

SEQ ID NO: 6401 - DNA, 201 bp, Homo sapiens
agacgcacaaggatgaccagctgatctgtgtgaacgagaacggcggctgtgagcagtactgcagtgaccacacgggcaccaagcgctcctgtcggtgccaygaggggtactctctgctggcagacggggtgtcctgcacacccacagttgaatatccatgtggaaaaatacctattctagaaaaaagaaatgccagcaaac

SEQ ID NO: 6402 - DNA, 201 bp, Homo sapiens
gggcgagcacgacctcagcgagcacgacggggatgagcagagccggcgggtggcgcaggtcatcatccccagcacgtacgtcccgggcaccaccaaccacvacatcgcgctgctccgcctgcaccagcccgtggtcctcactgaccatgtggtgcccctctgcctgcccgaacggacgttctctgagaggacgctggcctt

SEQ ID NO: 6403 - DNA, 201 bp, Homo sapiens
cggaaggtgggagactccccaaatatcacggagtacatgttctgtgccggctactcggatggcagcaaggactcctgcaagggggacagtggaggcccacrtgccacccactaccggggcacgtggtacctgacgggcatcgtcagctggggccagggctgcgcaaccgtgggccactttggggtgtacaccagggtctcc

SEQ ID NO: 6404 - DNA, 201 bp, Homo sapiens
ggaaggtgggagactccccaaatatcacggagtacatgttctgtgccggctactcggatggcagcaaggactcctgcaagggggacagtggaggcccacakgccacccactaccggggcacgtggtacctgacgggcatcgtcagctggggccagggctgcgcaaccgtgggccactttggggtgtacaccagggtctccc

SEQ ID NO: 6405 - DNA, 201 bp, Homo sapiens
gcacgacctcagcgagcacgacggggatgagcagagccggcgggtggcgcaggtcatcatccccagcacgtacgtcccgggcaccaccaaccacgacatcrcgctgctccgcctgcaccagcccgtggtcctcactgaccatgtggtgcccctctgcctgcccgaacggacgttctctgagaggacgctggccttcgtgcg

SEQ ID NO: 6406 - DNA, 201 bp, Homo sapiens
ggagctcatggtcctcaacgtgccccggctgatgacccaggactgcctgcagcagtcacggaaggtgggagactccccaaatatcacggagtacatgttcbgtgccggctactcggatggcagcaaggactcctgcaagggggacagtggaggcccacatgccacccactaccggggcacgtggtacctgacgggcatcgt

SEQ ID NO: 6407 - DNA, 201 bp, Homo sapiens
cagcgagcacgacggggatgagcagagccggcgggtggcgcaggtcatcatccccagcacgtacgtcccgggcaccaccaaccacgacatcgcgctgctcygcctgcaccagcccgtggtcctcactgaccatgtggtgcccctctgcctgcccgaacggacgttctctgagaggacgctggccttcgtgcgcttctcatt

SEQ ID NO: 6408 - DNA, 201 bp, Homo sapiens
catggtcctcaacgtgccccggctgatgacccaggactgcctgcagcagtcacggaaggtgggagactccccaaatatcacggagtacatgttctgtgccrgctactcggatggcagcaaggactcctgcaagggggacagtggaggcccacatgccacccactaccggggcacgtggtacctgacgggcatcgtcagctg

SEQ ID NO: 6409 - DNA, 201 bp, Homo sapiens
tctgtgtgaacgagaacggcggctgtgagcagtactgcagtgaccacacgggcaccaagcgctcctgtcggtgccacgaggggtactctctgctggcagayggggtgtcctgcacacccacagttgaatatccatgtggaaaaatacctattctagaaaaaagaaatgccagcaaaccccaaggccgaattgtggggggca

SEQ ID NO: 6410 - DNA, 201 bp, Homo sapiens
gggagatcttcaaggacgcggagaggacgaagctgttctggatttcttacagtgatggggaccagtgtgcctcaagtccatgccagaatgggggctcctgmaaggaccagctccagtcctatatctgcttctgcctccctgccttcgagggccggaactgtgagacgcacaaggatgaccagctgatctgtgtgaacgaga

SEQ ID NO: 6411 - DNA, 201 bp, Homo sapiens
aaggacgcggagaggacgaagctgttctggatttcttacagtgatggggaccagtgtgcctcaagtccatgccagaatgggggctcctgcaaggaccagcyccagtcctatatctgcttctgcctccctgccttcgagggccggaactgtgagacgcacaaggatgaccagctgatctgtgtgaacgagaacggcggctgt

SEQ ID NO: 6412 - DNA, 201 bp, Homo sapiens
gagaggacgaagctgttctggatttcttacagtgatggggaccagtgtgcctcaagtccatgccagaatgggggctcctgcaaggaccagctccagtcctrtatctgcttctgcctccctgccttcgagggccggaactgtgagacgcacaaggatgaccagctgatctgtgtgaacgagaacggcggctgtgagcagtac

SEQ ID NO: 6413 - DNA, 201 bp, Homo sapiens
atctgcttctgcctccctgccttcgagggccggaactgtgagacgcacaaggatgaccagctgatctgtgtgaacgagaacggcggctgtgagcagtactrcagtgaccacacgggcaccaagcgctcctgtcggtgccacgaggggtactctctgctggcagacggggtgtcctgcacacccacagttgaatatccatgt

SEQ ID NO: 6414 - DNA, 201 bp, Homo sapiens
tctctgctggcagacggggtgtcctgcacacccacagttgaatatccatgtggaaaaatacctattctagaaaaaagaaatgccagcaaaccccaaggccraattgtggggggcaaggtgtgccccaaaggggagtgtccatggcaggtcctgttgttggtgaatggagctcagttgtgtggggggaccctgatcaacacc

SEQ ID NO: 6415 - DNA, 201 bp, Homo sapiens
ggtgtgccccaaaggggagtgtccatggcaggtcctgttgttggtgaatggagctcagttgtgtggggggaccctgatcaacaccatctgggtggtctccrcggcccactgtttcgacaaaatcaagaactggaggaacctgatcgcggtgctgggcgagcacgacctcagcgagcacgacggggatgagcagagccggcg

SEQ ID NO: 6416 - DNA, 201 bp, Homo sapiens
gaggacgctggccttcgtgcgcttctcattggtcagcggctggggccagctgctggaccgtggcgccacggccctggagctcatggtcctcaacgtgcccyggctgatgacccaggactgcctgcagcagtcacggaaggtgggagactccccaaatatcacggagtacatgttctgtgccggctactcggatggcagcaa

SEQ ID NO: 6417 - DNA, 201 bp, Homo sapiens
ggactgcctgcagcagtcacggaaggtgggagactccccaaatatcacggagtacatgttctgtgccggctactcggatggcagcaaggactcctgcaagrgggacagtggaggcccacatgccacccactaccggggcacgtggtacctgacgggcatcgtcagctggggccagggctgcgcaaccgtgggccactttgg

SEQ ID NO: 6418 - DNA, 201 bp, Homo sapiens
aacggacgttctctgagaggacgctggccttcgtgcgcttctcattggtcagcggctggggccagctgctggaccgtggcgccacggccctggagctcatrgtcctcaacgtgccccggctgatgacccaggactgcctgcagcagtcacggaaggtgggagactccccaaatatcacggagtacatgttctgtgccggct

SEQ ID NO: 6419 - DNA, 201 bp, Homo sapiens
atcacggagtacatgttctgtgccggctactcggatggcagcaaggactcctgcaagggggacagtggaggcccacatgccacccactaccggggcacgtrgtacctgacgggcatcgtcagctggggccagggctgcgcaaccgtgggccactttggggtgtacaccagggtctcccagtacatcgagtggctgcaaaag

SEQ ID NO: 6420 - DNA, 201 bp, Homo sapiens
tcctatatctgcttctgcctccctgccttcgagggccggaactgtgagacgcacaaggatgaccagctgatctgtgtgaacgagaacggcggctgtgagcrgtactgcagtgaccacacgggcaccaagcgctcctgtcggtgccacgaggggtactctctgctggcagacggggtgtcctgcacacccacagttgaatat

SEQ ID NO: 6421 - DNA, 201 bp, Homo sapiens
ggatgagcagagccggcgggtggcgcaggtcatcatccccagcacgtacgtcccgggcaccaccaaccacgacatcgcgctgctccgcctgcaccagcccrtggtcctcactgaccatgtggtgcccctctgcctgcccgaacggacgttctctgagaggacgctggccttcgtgcgcttctcattggtcagcggctgggg

SEQ ID NO: 6422 - DNA, 201 bp, Homo sapiens
ctctgcctgcccgaacggacgttctctgagaggacgctggccttcgtgcgcttctcattggtcagcggctggggccagctgctggaccgtggcgccacggycctggagctcatggtcctcaacgtgccccggctgatgacccaggactgcctgcagcagtcacggaaggtgggagactccccaaatatcacggagtacatg

SEQ ID NO: 6423 - DNA, 201 bp, Homo sapiens
tacatgttctgtgccggctactcggatggcagcaaggactcctgcaagggggacagtggaggcccacatgccacccactaccggggcacgtggtacctgaygggcatcgtcagctggggccagggctgcgcaaccgtgggccactttggggtgtacaccagggtctcccagtacatcgagtggctgcaaaagctcatgcgc

SEQ ID NO: 6424 - DNA, 201 bp, Homo sapiens
gatggggaccagtgtgcctcaagtccatgccagaatgggggctcctgcaaggaccagctccagtcctatatctgcttctgcctccctgccttcgagggccrgaactgtgagacgcacaaggatgaccagctgatctgtgtgaacgagaacggcggctgtgagcagtactgcagtgaccacacgggcaccaagcgctcctgt

SEQ ID NO: 6425 - DNA, 201 bp, Homo sapiens
aggacgctggccttcgtgcgcttctcattggtcagcggctggggccagctgctggaccgtggcgccacggccctggagctcatggtcctcaacgtgccccrgctgatgacccaggactgcctgcagcagtcacggaaggtgggagactccccaaatatcacggagtacatgttctgtgccggctactcggatggcagcaag

SEQ ID NO: 6426 - DNA, 201 bp, Homo sapiens
tgatggggaccagtgtgcctcaagtccatgccagaatgggggctcctgcaaggaccagctccagtcctatatctgcttctgcctccctgccttcgagggcyggaactgtgagacgcacaaggatgaccagctgatctgtgtgaacgagaacggcggctgtgagcagtactgcagtgaccacacgggcaccaagcgctcctg

SEQ ID NO: 6427 - DNA, 201 bp, Homo sapiens
gtactgcagtgaccacacgggcaccaagcgctcctgtcggtgccacgaggggtactctctgctggcagacggggtgtcctgcacacccacagttgaatatmcatgtggaaaaatacctattctagaaaaaagaaatgccagcaaaccccaaggccgaattgtggggggcaaggtgtgccccaaaggggagtgtccatggca

SEQ ID NO: 6428 - DNA, 201 bp, Homo sapiens
accaaccacgacatcgcgctgctccgcctgcaccagcccgtggtcctcactgaccatgtggtgcccctctgcctgcccgaacggacgttctctgagaggaygctggccttcgtgcgcttctcattggtcagcggctggggccagctgctggaccgtggcgccacggccctggagctcatggtcctcaacgtgccccggctg

SEQ ID NO: 6429 - DNA, 201 bp, Homo sapiens
aggaacctgatcgcggtgctgggcgagcacgacctcagcgagcacgacggggatgagcagagccggcgggtggcgcaggtcatcatccccagcacgtacgwcccgggcaccaccaaccacgacatcgcgctgctccgcctgcaccagcccgtggtcctcactgaccatgtggtgcccctctgcctgcccgaacggacgttc

SEQ ID NO: 6430 - DNA, 201 bp, Homo sapiens
ctgcagtgaccacacgggcaccaagcgctcctgtcggtgccacgaggggtactctctgctggcagacggggtgtcctgcacacccacagttgaatatccaygtggaaaaatacctattctagaaaaaagaaatgccagcaaaccccaaggccgaattgtggggggcaaggtgtgccccaaaggggagtgtccatggcaggt

SEQ ID NO: 6431 - DNA, 201 bp, Homo sapiens
ctgcctgcagcagtcacggaaggtgggagactccccaaatatcacggagtacatgttctgtgccggctactcggatggcagcaaggactcctgcaaggggvacagtggaggcccacatgccacccactaccggggcacgtggtacctgacgggcatcgtcagctggggccagggctgcgcaaccgtgggccactttggggt

SEQ ID NO: 6432 - DNA, 201 bp, Homo sapiens
tcgcggtgctgggcgagcacgacctcagcgagcacgacggggatgagcagagccggcgggtggcgcaggtcatcatccccagcacgtacgtcccgggcacyaccaaccacgacatcgcgctgctccgcctgcaccagcccgtggtcctcactgaccatgtggtgcccctctgcctgcccgaacggacgttctctgagagga

SEQ ID NO: 6433 - DNA, 201 bp, Homo sapiens
tgaccacacgggcaccaagcgctcctgtcggtgccacgaggggtactctctgctggcagacggggtgtcctgcacacccacagttgaatatccatgtggaraaatacctattctagaaaaaagaaatgccagcaaaccccaaggccgaattgtggggggcaaggtgtgccccaaaggggagtgtccatggcaggtcctgtt

SEQ ID NO: 6434 - DNA, 201 bp, Homo sapiens
ttggtgaatggagctcagttgtgtggggggaccctgatcaacaccatctgggtggtctccgcggcccactgtttcgacaaaatcaagaactggaggaaccygatcgcggtgctgggcgagcacgacctcagcgagcacgacggggatgagcagagccggcgggtggcgcaggtcatcatccccagcacgtacgtcccgggc

SEQ ID NO: 6435 - DNA, 201 bp, Homo sapiens
tcatggtcctcaacgtgccccggctgatgacccaggactgcctgcagcagtcacggaaggtgggagactccccaaatatcacggagtacatgttctgtgcyggctactcggatggcagcaaggactcctgcaagggggacagtggaggcccacatgccacccactaccggggcacgtggtacctgacgggcatcgtcagct

SEQ ID NO: 6436 - DNA, 201 bp, Homo sapiens
gccggctactcggatggcagcaaggactcctgcaagggggacagtggaggcccacatgccacccactaccggggcacgtggtacctgacgggcatcgtcakctggggccagggctgcgcaaccgtgggccactttggggtgtacaccagggtctcccagtacatcgagtggctgcaaaagctcatgcgctcagagccacgc

SEQ ID NO: 6437 - DNA, 201 bp, Homo sapiens
cgtggtcctcactgaccatgtggtgcccctctgcctgcccgaacggacgttctctgagaggacgctggccttcgtgcgcttctcattggtcagcggctggrgccagctgctggaccgtggcgccacggccctggagctcatggtcctcaacgtgccccggctgatgacccaggactgcctgcagcagtcacggaaggtggg

SEQ ID NO: 6438 - DNA, 201 bp, Homo sapiens
ctctctgctggcagacggggtgtcctgcacacccacagttgaatatccatgtggaaaaatacctattctagaaaaaagaaatgccagcaaaccccaaggcygaattgtggggggcaaggtgtgccccaaaggggagtgtccatggcaggtcctgttgttggtgaatggagctcagttgtgtggggggaccctgatcaacac

SEQ ID NO: 6439 - DNA, 201 bp, Homo sapiens
cgaacggacgttctctgagaggacgctggccttcgtgcgcttctcattggtcagcggctggggccagctgctggaccgtggcgccacggccctggagctcrtggtcctcaacgtgccccggctgatgacccaggactgcctgcagcagtcacggaaggtgggagactccccaaatatcacggagtacatgttctgtgccgg

SEQ ID NO: 6440 - DNA, 201 bp, Homo sapiens
accaaatcccatatattcttctgcagttaatggggtagaggagggcatgggagggagggagaggtggggagggagacagagacagaaacagagagagacaragacagagagagactgagggagagactctgaggacatggagagagactcaaagagactccaagattcaaagagactaatagagacacagagatggaatag

SEQ ID NO: 6441 - DNA, 201 bp, Homo sapiens
atggtcctcaacgtgccccggctgatgacccaggactgcctgcagcagtcacggaaggtgggagactccccaaatatcacggagtacatgttctgtgccgrctactcggatggcagcaaggactcctgcaagggggacagtggaggcccacatgccacccactaccggggcacgtggtacctgacgggcatcgtcagctgg

SEQ ID NO: 6442 - DNA, 201 bp, Homo sapiens
gactgcctgcagcagtcacggaaggtgggagactccccaaatatcacggagtacatgttctgtgccggctactcggatggcagcaaggactcctgcaaggrggacagtggaggcccacatgccacccactaccggggcacgtggtacctgacgggcatcgtcagctggggccagggctgcgcaaccgtgggccactttggg

SEQ ID NO: 6443 - DNA, 201 bp, Homo sapiens
ggccctggagctcatggtcctcaacgtgccccggctgatgacccaggactgcctgcagcagtcacggaaggtgggagactccccaaatatcacggagtacrtgttctgtgccggctactcggatggcagcaaggactcctgcaagggggacagtggaggcccacatgccacccactaccggggcacgtggtacctgacggg

SEQ ID NO: 6444 - DNA, 201 bp, Homo sapiens
tccccaaatatcacggagtacatgttctgtgccggctactcggatggcagcaaggactcctgcaagggggacagtggaggcccacatgccacccactaccrgggcacgtggtacctgacgggcatcgtcagctggggccagggctgcgcaaccgtgggccactttggggtgtacaccagggtctcccagtacatcgagtgg

SEQ ID NO: 6445 - DNA, 201 bp, Homo sapiens
cgcgctgctccgcctgcaccagcccgtggtcctcactgaccatgtggtgcccctctgcctgcccgaacggacgttctctgagaggacgctggccttcgtgygcttctcattggtcagcggctggggccagctgctggaccgtggcgccacggccctggagctcatggtcctcaacgtgccccggctgatgacccaggactg

SEQ ID NO: 6446 - DNA, 201 bp, Homo sapiens
cctgcaccagcccgtggtcctcactgaccatgtggtgcccctctgcctgcccgaacggacgttctctgagaggacgctggccttcgtgcgcttctcattgktcagcggctggggccagctgctggaccgtggcgccacggccctggagctcatggtcctcaacgtgccccggctgatgacccaggactgcctgcagcagtc

SEQ ID NO: 6447 - DNA, 201 bp, Homo sapiens
gaatggagctcagttgtgtggggggaccctgatcaacaccatctgggtggtctccgcggcccactgtttcgacaaaatcaagaactggaggaacctgatcrcggtgctgggcgagcacgacctcagcgagcacgacggggatgagcagagccggcgggtggcgcaggtcatcatccccagcacgtacgtcccgggcaccac

SEQ ID NO: 6448 - DNA, 201 bp, Homo sapiens
ccttctgcttgggcttcagggctgcctggctgcaggcggggtcgctaaggcctcaggaggagaaacacgggacatgccgtggaagccggggcctcacagartcttcgtaacccaggaggaagcccacggcgtcctgcaccggcgccggcgcgccaacgcgttcctggaggagctgcggccgggctccctggagagggagtg

SEQ ID NO: 6449 - DNA, 161 bp, Homo sapiens
agtcccatggggaatgtcaacaggcaggggcagcactgcagagatttcatcatggtctccyaggccctcaggctcctctgccttctgcttgggcttcagggctgcctggctgcaggcggggtcgctaaggcctcaggaggagaaacacgggacatgccgtg

SEQ ID NO: 6450 - DNA, 154 bp, Homo sapiens
agtcccatggggaatgtcaacaggcaggggcagcactgcagagatttcatcatsgtctcccaggccctcaggctcctctgccttctgcttgggcttcagggctgcctggctgcaggcggggtcgctaaggcctcaggaggagaaacacgggaca

SEQ ID NO: 6451 - DNA, 201 bp, Homo sapiens
accagcccgtggtcctcactgaccatgtggtgcccctctgcctgcccgaacggacgttctctgagaggacgctggccttcgtgcgcttctcattggtcagsggctggggccagctgctggaccgtggcgccacggccctggagctcatggtcctcaacgtgccccggctgatgacccaggactgcctgcagcagtcacgga

SEQ ID NO: 6452 - DNA, 201 bp, Homo sapiens
agaaacacgggacatgccgtggaagccggggcctcacagagtcttcgtaacccaggaggaagcccacggcgtcctgcaccggcgccggcgcgccaacgcgytcctggaggagctgcggccgggctccctggagagggagtgcaaggaggagcagtgctccttcgaggaggcccgggagatcttcaaggacgcggagaggac

SEQ ID NO: 6453 - DNA, 201 bp, Homo sapiens
gggcctcacagagtcttcgtaacccaggaggaagcccacggcgtcctgcaccggcgccggcgcgccaacgcgttcctggaggagctgcggccgggctcccwggagagggagtgcaaggaggagcagtgctccttcgaggaggcccgggagatcttcaaggacgcggagaggacgaagctgttctggatttcttacagtgat

SEQ ID NO: 6454 - DNA, 201 bp, Homo sapiens
gctactcggatggcagcaaggactcctgcaagggggacagtggaggcccacatgccacccactaccggggcacgtggtacctgacgggcatcgtcagctgvggccagggctgcgcaaccgtgggccactttggggtgtacaccagggtctcccagtacatcgagtggctgcaaaagctcatgcgctcagagccacgcccag

SEQ ID NO: 6455 - DNA, 201 bp, Homo sapiens
cgtaacccaggaggaagcccacggcgtcctgcaccggcgccggcgcgccaacgcgttcctggaggagctgcggccgggctccctggagagggagtgcaagsaggagcagtgctccttcgaggaggcccgggagatcttcaaggacgcggagaggacgaagctgttctggatttcttacagtgatggggaccagtgtgcctc

SEQ ID NO: 6456 - DNA, 201 bp, Homo sapiens
ggggacagtggaggcccacatgccacccactaccggggcacgtggtacctgacgggcatcgtcagctggggccagggctgcgcaaccgtgggccactttgrggtgtacaccagggtctcccagtacatcgagtggctgcaaaagctcatgcgctcagagccacgcccaggagtcctcctgcgagccccatttccctagccc

SEQ ID NO: 6457 - DNA, 201 bp, Homo sapiens
gcggcccactgtttcgacaaaatcaagaactggaggaacctgatcgcggtgctgggcgagcacgacctcagcgagcacgacggggatgagcagagccggcrggtggcgcaggtcatcatccccagcacgtacgtcccgggcaccaccaaccacgacatcgcgctgctccgcctgcaccagcccgtggtcctcactgaccat

SEQ ID NO: 6458 - DNA, 201 bp, Homo sapiens
ggaagcccacggcgtcctgcaccggcgccggcgcgccaacgcgttcctggaggagctgcggccgggctccctggagagggagtgcaaggaggagcagtgcyccttcgaggaggcccgggagatcttcaaggacgcggagaggacgaagctgttctggatttcttacagtgatggggaccagtgtgcctcaagtccatgcca

SEQ ID NO: 6459 - DNA, 201 bp, Homo sapiens
agcgagcacgacggggatgagcagagccggcgggtggcgcaggtcatcatccccagcacgtacgtcccgggcaccaccaaccacgacatcgcgctgctccrcctgcaccagcccgtggtcctcactgaccatgtggtgcccctctgcctgcccgaacggacgttctctgagaggacgctggccttcgtgcgcttctcattg

SEQ ID NO: 6460 - DNA, 201 bp, Homo sapiens
aaaccccaaggccgaattgtggggggcaaggtgtgccccaaaggggagtgtccatggcaggtcctgttgttggtgaatggagctcagttgtgtggggggamcctgatcaacaccatctgggtggtctccgcggcccactgtttcgacaaaatcaagaactggaggaacctgatcgcggtgctgggcgagcacgacctcagc

SEQ ID NO: 6461 - DNA, 201 bp, Homo sapiens
aaaggggagtgtccatggcaggtcctgttgttggtgaatggagctcagttgtgtggggggaccctgatcaacaccatctgggtggtctccgcggcccactrtttcgacaaaatcaagaactggaggaacctgatcgcggtgctgggcgagcacgacctcagcgagcacgacggggatgagcagagccggcgggtggcgcag

SEQ ID NO: 6462 - DNA, 201 bp, Homo sapiens
cagagtcttcgtaacccaggaggaagcccacggcgtcctgcaccggcgccggcgcgccaacgcgttcctggaggagctgcggccgggctccctggagaggragtgcaaggaggagcagtgctccttcgaggaggcccgggagatcttcaaggacgcggagaggacgaagctgttctggatttcttacagtgatggggacca

SEQ ID NO: 6463 - DNA, 201 bp, Homo sapiens; identical to SEQ ID NO: 6388

SEQ ID NO: 6464 - DNA, 201 bp, Homo sapiens; identical to SEQ ID NO: 6389

SEQ ID NO: 6465 - DNA, 201 bp, Homo sapiens; identical to SEQ ID NO: 6390

SEQ ID NO: 6466 - DNA, 201 bp, Homo sapiens; identical to SEQ ID NO: 6391

SEQ ID NO: 6467 - DNA, 201 bp, Homo sapiens; identical to SEQ ID NO: 6392

SEQ ID NO: 6468 - DNA, 201 bp, Homo sapiens; identical to SEQ ID NO: 6393

SEQ ID NO: 6469 - DNA, 201 bp, Homo sapiens; identical to SEQ ID NO: 6394

SEQ ID NO: 6470 - DNA, 201 bp, Homo sapiens; identical to SEQ ID NO: 6395

SEQ ID NO: 6471 - DNA, 201 bp, Homo sapiens; identical to SEQ ID NO: 6396

SEQ ID NO: 6472 - DNA, 201 bp, Homo sapiens; identical to SEQ ID NO: 6397

SEQ ID NO: 6473 - DNA, 201 bp, Homo sapiens; identical to SEQ ID NO: 6398

SEQ ID NO: 6474 - DNA, 201 bp, Homo sapiens; identical to SEQ ID NO: 6399

SEQ ID NO: 6475 - DNA, 201 bp, Homo sapiens; identical to SEQ ID NO: 6400

SEQ ID NO: 6476 - DNA, 201 bp, Homo sapiens; identical to SEQ ID NO: 6401

SEQ ID NO: 6477 - DNA, 201 bp, Homo sapiens; identical to SEQ ID NO: 6402

SEQ ID NO: 6478 - DNA, 201 bp, Homo sapiens; identical to SEQ ID NO: 6403

SEQ ID NO: 6479 - DNA, 201 bp, Homo sapiens; identical to SEQ ID NO: 6404

SEQ ID NO: 6480 - DNA, 201 bp, Homo sapiens; identical to SEQ ID NO: 6405

SEQ ID NO: 6481 - DNA, 201 bp, Homo sapiens; identical to SEQ ID NO: 6406

SEQ ID NO: 6482 - DNA, 201 bp, Homo sapiens; identical to SEQ ID NO: 6407

SEQ ID NO: 6483 - DNA, 201 bp, Homo sapiens; identical to SEQ ID NO: 6408

SEQ ID NO: 6484 - DNA, 201 bp, Homo sapiens; identical to SEQ ID NO: 6409

SEQ ID NO: 6485 - DNA, 201 bp, Homo sapiens; identical to SEQ ID NO: 6410

SEQ ID NO: 6486 - DNA, 201 bp, Homo sapiens; identical to SEQ ID NO: 6411

SEQ ID NO: 6487 - DNA, 201 bp, Homo sapiens; identical to SEQ ID NO: 6412

SEQ ID NO: 6488 - DNA, 201 bp, Homo sapiens; identical to SEQ ID NO: 6413

SEQ ID NO: 6489 - DNA, 201 bp, Homo sapiens; identical to SEQ ID NO: 6414

SEQ ID NO: 6490 - DNA, 201 bp, Homo sapiens; identical to SEQ ID NO: 6415

SEQ ID NO: 6491 - DNA, 201 bp, Homo sapiens; identical to SEQ ID NO: 6416

SEQ ID NO: 6492 - DNA, 201 bp, Homo sapiens; identical to SEQ ID NO: 6417

SEQ ID NO: 6493 - DNA, 201 bp, Homo sapiens; identical to SEQ ID NO: 6418

SEQ ID NO: 6494 - DNA, 201 bp, Homo sapiens; identical to SEQ ID NO: 6419

SEQ ID NO: 6495 - DNA, 201 bp, Homo sapiens; identical to SEQ ID NO: 6420

SEQ ID NO: 6496 - DNA, 201 bp, Homo sapiens; identical to SEQ ID NO: 6421

SEQ ID NO: 6497 - DNA, 201 bp, Homo sapiens; identical to SEQ ID NO: 6422

SEQ ID NO: 6498 - DNA, 201 bp, Homo sapiens; identical to SEQ ID NO: 6423

SEQ ID NO: 6499 - DNA, 201 bp, Homo sapiens; identical to SEQ ID NO: 6424

SEQ ID NO: 6500 - DNA, 201 bp, Homo sapiens; identical to SEQ ID NO: 6425

SEQ ID NO: 6501 - DNA, 201 bp, Homo sapiens; identical to SEQ ID NO: 6426

SEQ ID NO: 6502 - DNA, 201 bp, Homo sapiens; identical to SEQ ID NO: 6427

SEQ ID NO: 6503 - DNA, 201 bp, Homo sapiens; identical to SEQ ID NO: 6428

SEQ ID NO: 6504 - DNA, 201 bp, Homo sapiens; identical to SEQ ID NO: 6429

SEQ ID NO: 6505 - DNA, 201 bp, Homo sapiens; identical to SEQ ID NO: 6430

SEQ ID NO: 6506 - DNA, 201 bp, Homo sapiens; identical to SEQ ID NO: 6431

SEQ ID NO: 6507 - DNA, 201 bp, Homo sapiens; identical to SEQ ID NO: 6432

SEQ ID NO: 6508 - DNA, 201 bp, Homo sapiens; identical to SEQ ID NO: 6433

SEQ ID NO: 6509 - DNA, 201 bp, Homo sapiens; identical to SEQ ID NO: 6434

SEQ ID NO: 6510 - DNA, 201 bp, Homo sapiens; identical to SEQ ID NO: 6435

SEQ ID NO: 6511 - DNA, 201 bp, Homo sapiens; identical to SEQ ID NO: 6436

SEQ ID NO: 6512 - DNA, 201 bp, Homo sapiens; identical to SEQ ID NO: 6437

SEQ ID NO: 6513 - DNA, 201 bp, Homo sapiens; identical to SEQ ID NO: 6438

SEQ ID NO: 6514 - DNA, 201 bp, Homo sapiens; identical to SEQ ID NO: 6439

SEQ ID NO: 6515 - DNA, 201 bp, Homo sapiens; identical to SEQ ID NO: 6440

SEQ ID NO: 6516 - DNA, 201 bp, Homo sapiens; identical to SEQ ID NO: 6441

SEQ ID NO: 6517 - DNA, 201 bp, Homo sapiens; identical to SEQ ID NO: 6442

SEQ ID NO: 6518 - DNA, 201 bp, Homo sapiens; identical to SEQ ID NO: 6443

SEQ ID NO: 6519 - DNA, 201 bp, Homo sapiens; identical to SEQ ID NO: 6444

SEQ ID NO: 6520 - DNA, 201 bp, Homo sapiens; identical to SEQ ID NO: 6445

SEQ ID NO: 6521 - DNA, 201 bp, Homo sapiens; identical to SEQ ID NO: 6446

SEQ ID NO: 6522 - DNA, 201 bp, Homo sapiens; identical to SEQ ID NO: 6447

SEQ ID NO: 6523 - DNA, 201 bp, Homo sapiens; identical to SEQ ID NO: 6448

SEQ ID NO: 6524 - DNA, 161 bp, Homo sapiens; identical to SEQ ID NO: 6449

SEQ ID NO: 6525 - DNA, 154 bp, Homo sapiens; identical to SEQ ID NO: 6450

SEQ ID NO: 6526 - DNA, 201 bp, Homo sapiens; identical to SEQ ID NO: 6451

SEQ ID NO: 6527 - DNA, 201 bp, Homo sapiens; identical to SEQ ID NO: 6452

SEQ ID NO: 6528 - DNA, 201 bp, Homo sapiens; identical to SEQ ID NO: 6453

SEQ ID NO: 6529 - DNA, 201 bp, Homo sapiens; identical to SEQ ID NO: 6454

SEQ ID NO: 6530 - DNA, 201 bp, Homo sapiens; identical to SEQ ID NO: 6455

SEQ ID NO: 6531 - DNA, 201 bp, Homo sapiens; identical to SEQ ID NO: 6456

SEQ ID NO: 6532 - DNA, 201 bp, Homo sapiens; identical to SEQ ID NO: 6457

SEQ ID NO: 6533 - DNA, 201 bp, Homo sapiens; identical to SEQ ID NO: 6458

SEQ ID NO: 6534 - DNA, 201 bp, Homo sapiens; identical to SEQ ID NO: 6459

SEQ ID NO: 6535 - DNA, 201 bp, Homo sapiens; identical to SEQ ID NO: 6460

SEQ ID NO: 6536 - DNA, 201 bp, Homo sapiens; identical to SEQ ID NO: 6461

SEQ ID NO: 6537 - DNA, 201 bp, Homo sapiens; identical to SEQ ID NO: 6462

SEQ ID NO: 6538 - DNA, 201 bp, Homo sapiens; identical to SEQ ID NO: 6388

SEQ ID NO: 6539 - DNA, 201 bp, Homo sapiens; identical to SEQ ID NO: 6389

SEQ ID NO: 6540 - DNA, 201 bp, Homo sapiens; identical to SEQ ID NO: 6390

SEQ ID NO: 6541 - DNA, 201 bp, Homo sapiens; identical to SEQ ID NO: 6391

SEQ ID NO: 6542 - DNA, 201 bp, Homo sapiens; identical to SEQ ID NO: 6392

SEQ ID NO: 6543 - DNA, 201 bp, Homo sapiens; identical to SEQ ID NO: 6393

SEQ ID NO: 6544 - DNA, 201 bp, Homo sapiens; identical to SEQ ID NO: 6394

SEQ ID NO: 6545 - DNA, 201 bp, Homo sapiens; identical to SEQ ID NO: 6395

SEQ ID NO: 6546 - DNA, 201 bp, Homo sapiens; identical to SEQ ID NO: 6396

SEQ ID NO: 6547 - DNA, 201 bp, Homo sapiens; identical to SEQ ID NO: 6397

SEQ ID NO: 6548 - DNA, 201 bp, Homo sapiens; identical to SEQ ID NO: 6398

SEQ ID NO: 6549 - DNA, 201 bp, Homo sapiens; identical to SEQ ID NO: 6399

SEQ ID NO: 6550 - DNA, 201 bp, Homo sapiens; identical to SEQ ID NO: 6400

SEQ ID NO: 6551 - DNA, 201 bp, Homo sapiens; identical to SEQ ID NO: 6401

SEQ ID NO: 6552 - DNA, 201 bp, Homo sapiens; identical to SEQ ID NO: 6402

SEQ ID NO: 6553 - DNA, 201 bp, Homo sapiens; identical to SEQ ID NO: 6403

SEQ ID NO: 6554 - DNA, 201 bp, Homo sapiens; identical to SEQ ID NO: 6404

SEQ ID NO: 6555 - DNA, 201 bp, Homo sapiens; identical to SEQ ID NO: 6405

SEQ ID NO: 6556 - DNA, 201 bp, Homo sapiens; identical to SEQ ID NO: 6406

SEQ ID NO: 6557 - DNA, 201 bp, Homo sapiens; identical to SEQ ID NO: 6407

SEQ ID NO: 6558 - DNA, 201 bp, Homo sapiens; identical to SEQ ID NO: 6408

SEQ ID NO: 6559 - DNA, 201 bp, Homo sapiens; identical to SEQ ID NO: 6409

SEQ ID NO: 6560 - DNA, 201 bp, Homo sapiens; identical to SEQ ID NO: 6410

SEQ ID NO: 6561 - DNA, 201 bp, Homo sapiens; identical to SEQ ID NO: 6411

SEQ ID NO: 6562 - DNA, 201 bp, Homo sapiens; identical to SEQ ID NO: 6412

SEQ ID NO: 6563 - DNA, 201 bp, Homo sapiens; identical to SEQ ID NO: 6413

SEQ ID NO: 6564 - DNA, 201 bp, Homo sapiens; identical to SEQ ID NO: 6414

SEQ ID NO: 6565 - DNA, 201 bp, Homo sapiens; identical to SEQ ID NO: 6415

SEQ ID NO: 6566 - DNA, 201 bp, Homo sapiens; identical to SEQ ID NO: 6416

SEQ ID NO: 6567 - DNA, 201 bp, Homo sapiens; identical to SEQ ID NO: 6417

SEQ ID NO: 6568 - DNA, 201 bp, Homo sapiens; identical to SEQ ID NO: 6418

SEQ ID NO: 6569 - DNA, 201 bp, Homo sapiens; identical to SEQ ID NO: 6419

SEQ ID NO: 6570 - DNA, 201 bp, Homo sapiens; identical to SEQ ID NO: 6420

SEQ ID NO: 6571 - DNA, 201 bp, Homo sapiens; identical to SEQ ID NO: 6421

SEQ ID NO: 6572 - DNA, 201 bp, Homo sapiens; identical to SEQ ID NO: 6422

SEQ ID NO: 6573 - DNA, 201 bp, Homo sapiens; identical to SEQ ID NO: 6423

SEQ ID NO: 6574 - DNA, 201 bp, Homo sapiens; identical to SEQ ID NO: 6424

SEQ ID NO: 6575 - DNA, 201 bp, Homo sapiens; identical to SEQ ID NO: 6425

SEQ ID NO: 6576 - DNA, 201 bp, Homo sapiens; identical to SEQ ID NO: 6426

SEQ ID NO: 6577 - DNA, 201 bp, Homo sapiens; identical to SEQ ID NO: 6427

SEQ ID NO: 6578 - DNA, 201 bp, Homo sapiens; identical to SEQ ID NO: 6428

SEQ ID NO: 6579 - DNA, 201 bp, Homo sapiens; identical to SEQ ID NO: 6429

SEQ ID NO: 6580 - DNA, 201 bp, Homo sapiens; identical to SEQ ID NO: 6430

SEQ ID NO: 6581 - DNA, 201 bp, Homo sapiens; identical to SEQ ID NO: 6431

SEQ ID NO: 6582 - DNA, 201 bp, Homo sapiens; identical to SEQ ID NO: 6432

SEQ ID NO: 6583 - DNA, 201 bp, Homo sapiens; identical to SEQ ID NO: 6433

SEQ ID NO: 6584 - DNA, 201 bp, Homo sapiens; identical to SEQ ID NO: 6434

SEQ ID NO: 6585 - DNA, 201 bp, Homo sapiens; identical to SEQ ID NO: 6435

SEQ ID NO: 6586 - DNA, 201 bp, Homo sapiens; identical to SEQ ID NO: 6436

SEQ ID NO: 6587 - DNA, 201 bp, Homo sapiens; identical to SEQ ID NO: 6437

SEQ ID NO: 6588 - DNA, 201 bp, Homo sapiens; identical to SEQ ID NO: 6438

SEQ ID NO: 6589 - DNA, 201 bp, Homo sapiens; identical to SEQ ID NO: 6439

SEQ ID NO: 6590 - DNA, 201 bp, Homo sapiens; identical to SEQ ID NO: 6440

SEQ ID NO: 6591 - DNA, 201 bp, Homo sapiens; identical to SEQ ID NO: 6441

SEQ ID NO: 6592 - DNA, 201 bp, Homo sapiens; identical to SEQ ID NO: 6442

SEQ ID NO: 6593 - DNA, 201 bp, Homo sapiens; identical to SEQ ID NO: 6443

SEQ ID NO: 6594 - DNA, 201 bp, Homo sapiens; identical to SEQ ID NO: 6444

SEQ ID NO: 6595 - DNA, 201 bp, Homo sapiens; identical to SEQ ID NO: 6445

SEQ ID NO: 6596 - DNA, 201 bp, Homo sapiens; identical to SEQ ID NO: 6446

SEQ ID NO: 6597 - DNA, 201 bp, Homo sapiens; identical to SEQ ID NO: 6447

SEQ ID NO: 6598 - DNA, 161 bp, Homo sapiens
agtcccatggggaatgtcaacaggcaggggcagcactgcagagatttcatcatggtctccyaggccctcaggctcctctgccttctgcttgggcttcagggctgcctggctgcagtcttcgtaacccaggaggaagcccacggcgtcctgcaccggcgccg

SEQ ID NO: 6599 - DNA, 154 bp, Homo sapiens
agtcccatggggaatgtcaacaggcaggggcagcactgcagagatttcatcatsgtctcccaggccctcaggctcctctgccttctgcttgggcttcagggctgcctggctgcagtcttcgtaacccaggaggaagcccacggcgtcctgcacc

SEQ ID NO: 6600 - DNA, 201 bp, Homo sapiens; identical to SEQ ID NO: 6451

SEQ ID NO: 6601 - DNA, 201 bp, Homo sapiens
cctctgccttctgcttgggcttcagggctgcctggctgcagtcttcgtaacccaggaggaagcccacggcgtcctgcaccggcgccggcgcgccaacgcgytcctggaggagctgcggccgggctccctggagagggagtgcaaggaggagcagtgctccttcgaggaggcccgggagatcttcaaggacgcggagaggac

SEQ ID NO: 6602 - DNA, 201 bp, Homo sapiens
tgcctggctgcagtcttcgtaacccaggaggaagcccacggcgtcctgcaccggcgccggcgcgccaacgcgttcctggaggagctgcggccgggctcccwggagagggagtgcaaggaggagcagtgctccttcgaggaggcccgggagatcttcaaggacgcggagaggacgaagctgttctggatttcttacagtgat

SEQ ID NO: 6603 - DNA, 201 bp, Homo sapiens; identical to SEQ ID NO: 6454

SEQ ID NO: 6604 - DNA, 201 bp, Homo sapiens; identical to SEQ ID NO: 6455

SEQ ID NO: 6605 - DNA, 201 bp, Homo sapiens; identical to SEQ ID NO: 6456

SEQ ID NO: 6606 - DNA, 201 bp, Homo sapiens; identical to SEQ ID NO: 6457

SEQ ID NO: 6607 - DNA, 201 bp, Homo sapiens; identical to SEQ ID NO: 6458

SEQ ID NO: 6608 - DNA, 201 bp, Homo sapiens; identical to SEQ ID NO: 6459

SEQ ID NO: 6609 - DNA, 201 bp, Homo sapiens; identical to SEQ ID NO: 6460

SEQ ID NO: 6610 - DNA, 201 bp, Homo sapiens; identical to SEQ ID NO: 6461

SEQ ID NO: 6611 - DNA, 201 bp, Homo sapiens
tgcagtcttcgtaacccaggaggaagcccacggcgtcctgcaccggcgccggcgcgccaacgcgttcctggaggagctgcggccgggctccctggagaggragtgcaaggaggagcagtgctccttcgaggaggcccgggagatcttcaaggacgcggagaggacgaagctgttctggatttcttacagtgatggggacca

SEQ ID NO: 6612 - DNA, 201 bp, Homo sapiens; identical to SEQ ID NO: 6388

SEQ ID NO: 6613 - DNA, 201 bp, Homo sapiens; identical to SEQ ID NO: 6389

SEQ ID NO: 6614 - DNA, 201 bp, Homo sapiens; identical to SEQ ID NO: 6390

SEQ ID NO: 6615 - DNA, 201 bp, Homo sapiens; identical to SEQ ID NO: 6391

SEQ ID NO: 6616 - DNA, 201 bp, Homo sapiens; identical to SEQ ID NO: 6392

SEQ ID NO: 6617 - DNA, 201 bp, Homo sapiens; identical to SEQ ID NO: 6393

SEQ ID NO: 6618 - DNA, 201 bp, Homo sapiens; identical to SEQ ID NO: 6394

SEQ ID NO: 6619 - DNA, 201 bp, Homo sapiens; identical to SEQ ID NO: 6395

SEQ ID NO: 6620 - DNA, 201 bp, Homo sapiens; identical to SEQ ID NO: 6396

SEQ ID NO: 6621 - DNA, 201 bp, Homo sapiens; identical to SEQ ID NO: 6397

SEQ ID NO: 6622 - DNA, 201 bp, Homo sapiens; identical to SEQ ID NO: 6398

SEQ ID NO: 6623 - DNA, 201 bp, Homo sapiens; identical to SEQ ID NO: 6399

SEQ ID NO: 6624 - DNA, 201 bp, Homo sapiens; identical to SEQ ID NO: 6400

SEQ ID NO: 6625 - DNA, 201 bp, Homo sapiens; identical to SEQ ID NO: 6401

SEQ ID NO: 6626 - DNA, 201 bp, Homo sapiens; identical to SEQ ID NO: 6402

SEQ ID NO: 6627 - DNA, 201 bp, Homo sapiens; identical to SEQ ID NO: 6403

SEQ ID NO: 6628 - DNA, 201 bp, Homo sapiens; identical to SEQ ID NO: 6404

SEQ ID NO: 6629 - DNA, 201 bp, Homo sapiens; identical to SEQ ID NO: 6405

SEQ ID NO: 6630 - DNA, 201 bp, Homo sapiens; identical to SEQ ID NO: 6406

SEQ ID NO: 6631 - DNA, 201 bp, Homo sapiens; identical to SEQ ID NO: 6407

SEQ ID NO: 6632 - DNA, 201 bp, Homo sapiens; identical to SEQ ID NO: 6408

SEQ ID NO: 6633 - DNA, 201 bp, Homo sapiens; identical to SEQ ID NO: 6409

SEQ ID NO: 6634 - DNA, 201 bp, Homo sapiens; identical to SEQ ID NO: 6410

SEQ ID NO: 6635 - DNA, 201 bp, Homo sapiens; identical to SEQ ID NO: 6411

SEQ ID NO: 6636 - DNA, 201 bp, Homo sapiens; identical to SEQ ID NO: 6412

SEQ ID NO: 6637 - DNA, 201 bp, Homo sapiens; identical to SEQ ID NO: 6413

SEQ ID NO: 6638 - DNA, 201 bp, Homo sapiens; identical to SEQ ID NO: 6414

SEQ ID NO: 6639 - DNA, 201 bp, Homo sapiens; identical to SEQ ID NO: 6415

SEQ ID NO: 6640 - DNA, 201 bp, Homo sapiens; identical to SEQ ID NO: 6416

SEQ ID NO: 6641 - DNA, 201 bp, Homo sapiens; identical to SEQ ID NO: 6417

SEQ ID NO: 6642 - DNA, 201 bp, Homo sapiens; identical to SEQ ID NO: 6418

SEQ ID NO: 6643 - DNA, 201 bp, Homo sapiens; identical to SEQ ID NO: 6419

SEQ ID NO: 6644 - DNA, 201 bp, Homo sapiens; identical to SEQ ID NO: 6420

SEQ ID NO: 6645 - DNA, 201 bp, Homo sapiens; identical to SEQ ID NO: 6421

SEQ ID NO: 6646 - DNA, 201 bp, Homo sapiens; identical to SEQ ID NO: 6422

SEQ ID NO: 6647 - DNA, 201 bp, Homo sapiens; identical to SEQ ID NO: 6423

SEQ ID NO: 6648 - DNA, 201 bp, Homo sapiens; identical to SEQ ID NO: 6424

SEQ ID NO: 6649 - DNA, 201 bp, Homo sapiens; identical to SEQ ID NO: 6425

SEQ ID NO: 6650 - DNA, 201 bp, Homo sapiens; identical to SEQ ID NO: 6426

SEQ ID NO: 6651 - DNA, 201 bp, Homo sapiens; identical to SEQ ID NO: 6427

SEQ ID NO: 6652 - DNA, 201 bp, Homo sapiens; identical to SEQ ID NO: 6428

SEQ ID NO: 6653 - DNA, 201 bp, Homo sapiens; identical to SEQ ID NO: 6429

SEQ ID NO: 6654 - DNA, 201 bp, Homo sapiens; identical to SEQ ID NO: 6430

SEQ ID NO: 6655 - DNA, 201 bp, Homo sapiens; identical to SEQ ID NO: 6431

SEQ ID NO: 6656 - DNA, 201 bp, Homo sapiens; identical to SEQ ID NO: 6432

SEQ ID NO: 6657 - DNA, 201 bp, Homo sapiens; identical to SEQ ID NO: 6433

SEQ ID NO: 6658 - DNA, 201 bp, Homo sapiens; identical to SEQ ID NO: 6434

SEQ ID NO: 6659 - DNA, 201 bp, Homo sapiens; identical to SEQ ID NO: 6435

SEQ ID NO: 6660 - DNA, 201 bp, Homo sapiens; identical to SEQ ID NO: 6436

SEQ ID NO: 6661 - DNA, 201 bp, Homo sapiens; identical to SEQ ID NO: 6437

SEQ ID NO: 6662 - DNA, 201 bp, Homo sapiens; identical to SEQ ID NO: 6438

SEQ ID NO: 6663 - DNA, 201 bp, Homo sapiens; identical to SEQ ID NO: 6439

SEQ ID NO: 6664 - DNA, 201 bp, Homo sapiens; identical to SEQ ID NO: 6440

SEQ ID NO: 6665 - DNA, 201 bp, Homo sapiens; identical to SEQ ID NO: 6441

SEQ ID NO: 6666 - DNA, 201 bp, Homo sapiens; identical to SEQ ID NO: 6442

SEQ ID NO: 6667 - DNA, 201 bp, Homo sapiens; identical to SEQ ID NO: 6443

SEQ ID NO: 6668 - DNA, 201 bp, Homo sapiens; identical to SEQ ID NO: 6444

SEQ ID NO: 6669 - DNA, 201 bp, Homo sapiens; identical to SEQ ID NO: 6445

SEQ ID NO: 6670 - DNA, 201 bp, Homo sapiens; identical to SEQ ID NO: 6446

SEQ ID NO: 6671 - DNA, 201 bp, Homo sapiens; identical to SEQ ID NO: 6447

SEQ ID NO: 6672 - DNA, 161 bp, Homo sapiens; identical to SEQ ID NO: 6598

SEQ ID NO: 6673 - DNA, 154 bp, Homo sapiens; identical to SEQ ID NO: 6599

SEQ ID NO: 6674 - DNA, 201 bp, Homo sapiens; identical to SEQ ID NO: 6451

SEQ ID NO: 6675 - DNA, 201 bp, Homo sapiens; identical to SEQ ID NO: 6601

SEQ ID NO: 6676 - DNA, 201 bp, Homo sapiens; identical to SEQ ID NO: 6602

SEQ ID NO: 6677 - DNA, 201 bp, Homo sapiens; identical to SEQ ID NO: 6454

SEQ ID NO: 6678 - DNA, 201 bp, Homo sapiens; identical to SEQ ID NO: 6455

SEQ ID NO: 6679 - DNA, 201 bp, Homo sapiens; identical to SEQ ID NO: 6456

SEQ ID NO: 6680 - DNA, 201 bp, Homo sapiens; identical to SEQ ID NO: 6457

SEQ ID NO: 6681 - DNA, 201 bp, Homo sapiens; identical to SEQ ID NO: 6458

SEQ ID NO: 6682 - DNA, 201 bp, Homo sapiens; identical to SEQ ID NO: 6459

SEQ ID NO: 6683 - DNA, 201 bp, Homo sapiens; identical to SEQ ID NO: 6460

SEQ ID NO: 6684 - DNA, 201 bp, Homo sapiens; identical to SEQ ID NO: 6461

SEQ ID NO: 6685 - DNA, 201 bp, Homo sapiens; identical to SEQ ID NO: 6611

SEQ ID NO: 6686 - DNA, 201 bp, Homo sapiens
aggctcttaactcagcagggatatcgtacatctattgctctacctcaggggtccagtgatacccactagatcttccaaggaaaaacataattctttcaaayggtgtgtatttggcaaagagctcttcaaatctgggagagggacttcctcaaggttttcctgtgtgcagtggatccacatagctaatatgacagctagtca

SEQ ID NO: 6687 - DNA, 201 bp, Homo sapiens
atatgtatgtatactcatatagatatattgtcattgaaatattcccccaaaatattctcagactaaacctgacatagggaacaccgagaatgaaaacatckttaacaccaaaactgaattcttatgcagaatttcctagcccatagatgacaacctgactttctgtatgttaaagtagatgtaatgaattattattattac

SEQ ID NO: 6688 - DNA, 201 bp, Homo sapiens
cagactaaacctgacatagggaacaccgagaatgaaaacatcgttaacaccaaaactgaattcttatgcagaatttcctagcccatagatgacaacctgastttctgtatgttaaagtagatgtaatgaattattattattacagtggtcacgattttcttcagtgtttatgattataaaaattgacatgaacatctttca

SEQ ID NO: 6689 - DNA, 201 bp, Homo sapiens
gaaaattggaatttcattggaattcatgtattggtttcagtaccaagtgactggtggcccaattctttaatgggacaaatattgtttcctatatatatgtrtatgttttatatatgtatgtatactcatatagatatattgtcattgaaatattcccccaaaatattctcagactaaacctgacatagggaacaccgagaa

SEQ ID NO: 6690 - DNA, 201 bp, Homo sapiens
gccgtggggcatttgtgttggcttcctctgtcagtttggaatcatgcccctcacaggattcatcctgtcggtggcctttgacatcctcccgctccaggccrtagtggtgctcattataggatgctgccctggaggaactgcctccaatatcttggcctattgggtcgatggcgacatggacctgagcgtcagcatgaccac

SEQ ID NO: 6691 - DNA, 201 bp, Homo sapiens
tggctcagtccctataagattctgtactattcagagttgattttaagtgtcacttaactgaaattatccaacaaaccttcatggcatgaaacattaacacrgctctttttatatggcatggttcctatggctcaatccctataagattctgtactattcagagttgattttaaaagtcacttaactgaaattatccaacaa

SEQ ID NO: 6692 - DNA, 201 bp, Homo sapiens
atgcaacagtttgctctggtgcatcctgtgtggtacctgagagcaatttcaataacatcctaagtgtggtcctaagtacggtgctgaccatcctgttggcyttggtgatgttctccatgggatgcaacgtggaaatcaagaaatttctagggcacataaagcggccgtggggcatttgtgttggcttcctctgtcagtttg

SEQ ID NO: 6693 - DNA, 201 bp, Homo sapiens
ctttttatatggcatggttcattatcatgccaataaatgattaatcgtaactctctgtcttgaccaataattttgctggacttttgtgattcacaacgtgytctgtgttgtaatgctacctcttgaaactgacatcctagctttattgttttttattacttccctaaggtggctttcaaaagagacaccaagtgacatatt

SEQ ID NO: 6694 - DNA, 201 bp, Homo sapiens
tgcaagtcagactcctttccaccaggaaacacagaaaacattctatcttcccaaatgttactctctcagatttgcaccaagaccctagaagtttcttaaayttccatatactttatggacactacaaagcaattccaggaaacactgatacagtagcaaaactactgggagtggaaattggatggagatctgggtcccagt

SEQ ID NO: 6695 - DNA, 201 bp, Homo sapiens
ggggtttaaaagtttgatggggtagaagtaaacgttgcttaactcaaccagcagcagagccagggcccagggaccagcgcttctgtggacttggcctttcsagcagcagacccagcaatgaatgatccgaacagctgtgtggacaatgcaacagtttgctctggtgcatcctgtgtggtacctgagagcaatttcaataac

SEQ ID NO: 6696 - DNA, 201 bp, Homo sapiens
aacggttgcttttgaaacggggatgcagaacacgcagctatgttccaccatcgttcagctctccttcactcctgaggagctcaatgtcgtattcaccttcycgctcatctacagcattttccagctcgcctttgccgcaatattcttaggattttatgtggcatacaagaaatgtcatggaaaaaacaaggcagaaattcc

SEQ ID NO: 6697 - DNA, 201 bp, Homo sapiens
ttgagagaaacaccaagactctagtggaggaattaattcaatgggagatagtataaaatacatagaaaacacaagtaacagaaacctggttgaaatgcttractagagtcaattagatgtgcaggagtaagtagtataagaagaatcaagtccgagagtgatcaggaaatgagtattaaacagtatttgaaacagagaacg

SEQ ID NO: 6698 - DNA, 201 bp, Homo sapiens
gagcgtcagcatgaccacatgctccacactgcttgccctcggaatgatgccgctgtgcctccttatctataccaaaatgtgggtcgactctgggagcatcrtaattccctatgataacataggtacatctctggttgctctcgttgttcctgtttccattggaatgtttgttaatcacaaatggccccaaaaagcaaagat

SEQ ID NO: 6699 - DNA, 201 bp, Homo sapiens
attgagagaaacaccaagactctagtggaggaattaattcaatgggagatagtataaaatacatagaaaacacaagtaacagaaacctggttgaaatgctwaactagagtcaattagatgtgcaggagtaagtagtataagaagaatcaagtccgagagtgatcaggaaatgagtattaaacagtatttgaaacagagaac

SEQ ID NO: 6700 - DNA, 201 bp, Homo sapiens
gacgagttccaaattacgttcttaaaccgtaactatatttaattatttgttttggtaggacagttggcagaaaagagttaaagtgaaaattggaatttcaytggaattcatgtattggtttcagtaccaagtgactggtggcccaattctttaatgggacaaatattgtttcctatatatatgtatatgttttatatatgt

SEQ ID NO: 6701 - DNA, 201 bp, Homo sapiens
gaactgcctccaatatcttggcctattgggtcgatggcgacatggacctgagcgtcagcatgaccacatgctccacactgcttgccctcggaatgatgccrctgtgcctccttatctataccaaaatgtgggtcgactctgggagcatcgtaattccctatgataacataggtacatctctggttgctctcgttgttcctg

SEQ ID NO: 6702 - DNA, 201 bp, Homo sapiens
cctcggaatgatgccgctgtgcctccttatctataccaaaatgtgggtcgactctgggagcatcgtaattccctatgataacataggtacatctctggttkctctcgttgttcctgtttccattggaatgtttgttaatcacaaatggccccaaaaagcaaagatcatacttaaaattgggtccatcgcgggcgccatcct

SEQ ID NO: 6703 - DNA, 201 bp, Homo sapiens
gcttgccctcggaatgatgccgctgtgcctccttatctataccaaaatgtgggtcgactctgggagcatcgtaattccctatgataacataggtacatctytggttgctctcgttgttcctgtttccattggaatgtttgttaatcacaaatggccccaaaaagcaaagatcatacttaaaattgggtccatcgcgggcgc

SEQ ID NO: 6704 - DNA, 201 bp, Homo sapiens
gcctcatagagtctatttcaagtgttttggctgaaagggctttttgcatttgcatgttctgagttcagattctgctggtgcacccaagcattatgggaacrggaactcaacttagctcttccagtagaggggtgagggattctgcttttcaaattcataacattgatctttttatgcaagatttccatttacagttgaata

SEQ ID NO: 6705 - DNA, 201 bp, Homo sapiens
acccccagaaataaaatggtataaaaatggaataccccttgagtccaatcacacaattaaagcggggcatgtactgacgattatggaagtgagtgaaagaracacaggaaattacactgtcatccttaccaatcccatttcaaaggagaagcagagccatgtggtctctctggttgtgtatgtcccaccccagattggtga

SEQ ID NO: 6706 - DNA, 201 bp, Homo sapiens
ccactcaaacgctgacatgtacggtctatgccattcctcccccgcatcacatccactggtattggcagttggaggaagagtgcgccaacgagcccagccawgctgtctcagtgacaaacccatacccttgtgaagaatggagaagtgtggaggacttccagggaggaaataaaattgaagttaataaaaatcaatttgctc

SEQ ID NO: 6707 - DNA, 201 bp, Homo sapiens
ctgcaaatttggaaacctgtccacttacctgaggagcaagagaaatgaatttgtcccctacaagaccaaaggggcacgattccgtcaagggaaagactacrttggagcaatccctgtggatctgaaacggcgcttggacagcatcaccagtagccagagctcagccagctctggatttgtggaggagaagtccctcagtga

SEQ ID NO: 6708 - DNA, 201 bp, Homo sapiens
aggacttcctgaccttggagcatctcatctgttacagcttccaagtggctaagggcatggagttcttggcatcgcgaaagtgtatccacagggacctggcrgcacgaaatatcctcttatcggagaagaacgtggttaaaatctgtgactttggcttggcccgggatatttataaagatccagattatgtcagaaaaggag

SEQ ID NO: 6709 - DNA, 201 bp, Homo sapiens
ggcatgcagtgttcttggctgtgcaaaagtggaggcatttttcataatagaaggtgcccaggaaaagacgaacttggaaatcattattctagtaggcacgrcggtgattgccatgttcttctggctacttcttgtcatcatcctacggaccgttaagcgggccaatggaggggaactgaagacaggctacttgtccatcgt

SEQ ID NO: 6710 - DNA, 201 bp, Homo sapiens
ggctcagcatacaaaaagacatacttacaattaaggctaatacaactcttcaaattacttgcaggggacagagggacttggactggctttggcccaataawcagagtggcagtgagcaaagggtggaggtgactgagtgcagcgatggcctcttctgtaagacactcacaattccaaaagtgatcggaaatgacactggag

SEQ ID NO: 6711 - DNA, 201 bp, Homo sapiens
gagtgcaaaccggtagcacagcccagattctccagcctgactcggggaccacactgagctctcctcctgtttaaaaggaagcatccacacccccaactccyggacatcacatgagaggtgctgctcagattttcaagtgttgttctttccaccagcaggaagtagccgcatttgattttcatttcgacaacaaacaaagac

SEQ ID NO: 6712 - DNA, 201 bp, Homo sapiens
gcggctaccagtccggatatcactccgatgacacagacaccaccgtgtactccagtgaggaagcagaacttttaaagctgatagagattggagtgcaaacyggtagcacagcccagattctccagcctgactcggggaccacactgagctctcctcctgtttaaaaggaagcatccacacccccaactcccggacatcaca

SEQ ID NO: 6713 - DNA, 132 bp, Homo sapiens
actgagtcccgggaccccgggagagcggtcartgtgtggtcgctgcgtttcctctgcctgcgccgggcatcacttgcgcgccgcagaaagtccgtctggcagcctggatatcctctcctaccggcacccgca

SEQ ID NO: 6714 - DNA, 201 bp, Homo sapiens
ttcttcgaagcatcagcataagaaacttgtaaaccgagacctaaaaacccagtctgggagtgagatgaagaaatttttgagcaccttaactatagatggtrtaacccggagtgaccaaggattgtacacctgtgcagcatccagtgggctgatgaccaagaagaacagcacatttgtcagggtccatgaaaaaccttttgt

SEQ ID NO: 6715 - DNA, 201 bp, Homo sapiens
agcctgactcggggaccacactgagctctcctcctgtttaaaaggaagcatccacacccccaactcccggacatcacatgagaggtgctgctcagattttsaagtgttgttctttccaccagcaggaagtagccgcatttgattttcatttcgacaacaaacaaagacgttcaagaaatggccccatcctcaaagaagtag

SEQ ID NO: 6716 - DNA, 201 bp, Homo sapiens
cacagacaccaccgtgtactccagtgaggaagcagaacttttaaagctgatagagattggagtgcaaaccggtagcacagcccagattctccagcctgacwcggggaccacactgagctctcctcctgtttaaaaggaagcatccacacccccaactcccggacatcacatgagaggtgctgctcagattttcaagtgttg

SEQ ID NO: 6717 - DNA, 201 bp, Homo sapiens
aagaagaacagcacatttgtcagggtccatgaaaaaccttttgttgcttttggaagtggcatggaatctctggtggaagccacggtgggggagcgtgtcaraatccctgcgaagtaccttggttacccacccccagaaataaaatggtataaaaatggaataccccttgagtccaatcacacaattaaagcggggcatgta

SEQ ID NO: 6718 - DNA, 201 bp, Homo sapiens
tgccattcctcccccgcatcacatccactggtattggcagttggaggaagagtgcgccaacgagcccagccaagctgtctcagtgacaaacccataccctygtgaagaatggagaagtgtggaggacttccagggaggaaataaaattgaagttaataaaaatcaatttgctctaattgaaggaaaaaacaaaactgtaag

SEQ ID NO: 6719 - DNA, 201 bp, Homo sapiens; identical to SEQ ID NO: 6705

SEQ ID NO: 6720 - DNA, 201 bp, Homo sapiens; identical to SEQ ID NO: 6706

SEQ ID NO: 6721 - DNA, 201 bp, Homo sapiens; identical to SEQ ID NO: 6708

SEQ ID NO: 6722 - DNA, 201 bp, Homo sapiens; identical to SEQ ID NO: 6709

SEQ ID NO: 6723 - DNA, 201 bp, Homo sapiens; identical to SEQ ID NO: 6710

SEQ ID NO: 6724 - DNA, 201 bp, Homo sapiens; identical to SEQ ID NO: 6711

SEQ ID NO: 6725 - DNA, 201 bp, Homo sapiens; identical to SEQ ID NO: 6712

SEQ ID NO: 6726 - DNA, 132 bp, Homo sapiens; identical to SEQ ID NO: 6713

SEQ ID NO: 6727 - DNA, 201 bp, Homo sapiens; identical to SEQ ID NO: 6714

SEQ ID NO: 6728 - DNA, 201 bp, Homo sapiens; identical to SEQ ID NO: 6715

SEQ ID NO: 6729 - DNA, 201 bp, Homo sapiens; identical to SEQ ID NO: 6716

SEQ ID NO: 6730 - DNA, 201 bp, Homo sapiens; identical to SEQ ID NO: 6717

SEQ ID NO: 6731 - DNA, 201 bp, Homo sapiens; identical to SEQ ID NO: 6718

SEQ ID NO: 6732 - DNA, 201 bp, Homo sapiens; identical to SEQ ID NO: 6705

SEQ ID NO: 6733 - DNA, 201 bp, Homo sapiens; identical to SEQ ID NO: 6706

SEQ ID NO: 6734 - DNA, 201 bp, Homo sapiens; identical to SEQ ID NO: 6707

SEQ ID NO: 6735 - DNA, 201 bp, Homo sapiens; identical to SEQ ID NO: 6708

SEQ ID NO: 6736 - DNA, 201 bp, Homo sapiens; identical to SEQ ID NO: 6709

SEQ ID NO: 6737 - DNA, 201 bp, Homo sapiens; identical to SEQ ID NO: 6710

SEQ ID NO: 6738 - DNA, 201 bp, Homo sapiens
gagtgcaaaccggtagcacagcccagattctccagcctgactcggggaccacactgagctctcctcctgtttaaaaggaagcatccacacccccaactccyggacatcacatgagaggtgctgctcagattttcaagtgttgttctttccaccagcaggaagtagccgcatttgattttcatttcgacaacagaaaaagga

SEQ ID NO: 6739 - DNA, 201 bp, Homo sapiens; identical to SEQ ID NO: 6712

SEQ ID NO: 6740 - DNA, 132 bp, Homo sapiens; identical to SEQ ID NO: 6713

SEQ ID NO: 6741 - DNA, 201 bp, Homo sapiens; identical to SEQ ID NO: 6714

SEQ ID NO: 6742 - DNA, 201 bp, Homo sapiens
agcctgactcggggaccacactgagctctcctcctgtttaaaaggaagcatccacacccccaactcccggacatcacatgagaggtgctgctcagattttsaagtgttgttctttccaccagcaggaagtagccgcatttgattttcatttcgacaacagaaaaaggacctcggactgcagggagccagtcttctaggcat

SEQ ID NO: 6743 - DNA, 201 bp, Homo sapiens; identical to SEQ ID NO: 6716

SEQ ID NO: 6744 - DNA, 201 bp, Homo sapiens; identical to SEQ ID NO: 6717

SEQ ID NO: 6745 - DNA, 201 bp, Homo sapiens; identical to SEQ ID NO: 6718

SEQ ID NO: 6746 - DNA, 201 bp, Homo sapiens
gtttgacctgtgctgacaccacagcggcccttctcacgtcccatctcctgcagtcggaaataggagattacgatgaaacgctggaccgagagcacctcaamgtgaacgagtatttgcctggccagcagcactgccttgagaagatactagaattccatcagaagcacgtgggccagacacctgctgagtcggatttccagg

SEQ ID NO: 6747 - DNA, 201 bp, Homo sapiens
ttccatatgaaagaaggcacagcaagacccacacgtccgttcgagctctgactgcagacctaccaaaacagagcatctcattccccgagggattgaggacwcctgcctccccatcttcagcgaatgccttttactcgctctctccctccactctggtcccctctggcctgccagagtttaaggacagcagcagctccctca

SEQ ID NO: 6748 - DNA, 201 bp, Homo sapiens
atcggcccagcccctcgggccccccgcactccagcctggtccaggcctttccacgaagagtcctcagccttctccctccagccggaagagccccctgagtytgagccctgcatttcaggtgcctttgggcccagctgaacagggctcatccccactcctgagccctgtcctcagtgatgctggcggagccgggatggactg

SEQ ID NO: 6749 - DNA, 201 bp, Homo sapiens
gaaggccaaagaatgtggtgcttcgcctagctgtaaaattttttccacctgatcctggtcagctacaagaagaatatacaagatacttgtttgccttgcarcttaagagagacctgctggaagagcgtttgacctgtgctgacaccacagcggcccttctcacgtcccatctcctgcagtcggaaataggagattacgatg

SEQ ID NO: 6750 - DNA, 201 bp, Homo sapiens
tgcagacctaccaaaacagagcatctcattccccgagggattgaggactcctgcctccccatcttcagcgaatgccttttactcgctctctccctccactstggtcccctctggcctgccagagtttaaggacagcagcagctccctcacagatccccaggtttcctacgtcaagagtccagctgcagagaggcgcagtgg

SEQ ID NO: 6751 - DNA, 201 bp, Homo sapiens
gcagactgcagggatgcgcttgggtgcccagacccctgtgggagttagcacccttgagcctgggcagactctcttgcccagaatgcaagagaagcacctgyacctcagagtaaagctgctggacaacaccatggaaatatttgacattgagcctaaatgcgatggccaggtattactgacacaagtgtggaagcgtttaaa

SEQ ID NO: 6752 - DNA, 174 bp, Homo sapiens
tgttttcttcactcatggtgaagaatgggggagatagaaggaacatacagagtcctgcagactgcagggatgcrcttgggtgcccagacccctgtgggagttagcacccttgagcctgggcagactctcttgcccagaatgcaagagaagcacctgcacctcagagtaaagctg

SEQ ID NO: 6753 - DNA, 201 bp, Homo sapiens
gaaatgtacggcatcagatttcacatggcttctgacagggaaggaaccaagattcaactggcagtttcccacatgggtgtactcgtgttccagggcaccaycaaaatcaacactttcaactggtccaaggtccgtaaactaagcttcaagaggaaaagatttcttatcaaacttcatccagaggttcatggaccttaccag

SEQ ID NO: 6754 - DNA, 201 bp, Homo sapiens; identical to SEQ ID NO: 6746

SEQ ID NO: 6755 - DNA, 201 bp, Homo sapiens
aggagtttgagctgcagaaggtctgctacttgcctctcaacacgttcctgctgaagcccatccagcggctgctgcactaccgcctgctgctgcgccgcctrtgcggacattacagccccgggcaccatgactacgctgactgccatgacgccctgaaagccatcacagaggtgaccaccacactacagcacattctcatcc

SEQ ID NO: 6756 - DNA, 201 bp, Homo sapiens; identical to SEQ ID NO: 6747

SEQ ID NO: 6757 - DNA, 201 bp, Homo sapiens
atgcggacattacagccccgggcaccatgactacgctgactgccatgacgccctgaaagccatcacagaggtgaccaccacactacagcacattctcatcyggctggagaacctgcagaagctaacggagctgcagcgggacctggtgggcatagagaacctcattgctcctggcagggagttcatccgtgagggctgcct

SEQ ID NO: 6758 - DNA, 201 bp, Homo sapiens; identical to SEQ ID NO: 6748

SEQ ID NO: 6759 - DNA, 201 bp, Homo sapiens; identical to SEQ ID NO: 6749

SEQ ID NO: 6760 - DNA, 201 bp, Homo sapiens; identical to SEQ ID NO: 6750

SEQ ID NO: 6761 - DNA, 201 bp, Homo sapiens
agcccacacaaaaggcagtcatcaacgaatcggggacatcctgctcaggaacatgcgccagttaaaggagtttaccagctacttccaaagacatgacgagrtcctaacagaactggaaaaggctaccaaacgctgtaagaagttggaggcagtgtacaaggagtttgagctgcagaaggtctgctacttgcctctcaacac

SEQ ID NO: 6762 - DNA, 201 bp, Homo sapiens
ggaagaaagtgataacgagtggtctgttccacactgtttcaccatctacgcggctcagaaaacaatcgtggtggcagccagcactcggctggagaaagagmagtggatgctggacctgaactccgcgatccaagcagccaagagtggcggtgacacggcccctgcactgccaggccgcactgtgtgcactcgtccccccag

SEQ ID NO: 6763 - DNA, 201 bp, Homo sapiens; identical to SEQ ID NO: 6751

SEQ ID NO: 6764 - DNA, 201 bp, Homo sapiens
tacacaagcaaaggagttgcagggaccagccacttccggatccggggcctccttcccctccaaggcatgctggtggaagaaagtgataacgagtggtctgwtccacactgtttcaccatctacgcggctcagaaaacaatcgtggtggcagccagcactcggctggagaaagagaagtggatgctggacctgaactccgcg

SEQ ID NO: 6765 - DNA, 174 bp, Homo sapiens; identical to SEQ ID NO: 6752

SEQ ID NO: 6766 - DNA, 201 bp, Homo sapiens
ggaccagccacttccggatccggggcctccttcccctccaaggcatgctggtggaagaaagtgataacgagtggtctgttccacactgtttcaccatctaygcggctcagaaaacaatcgtggtggcagccagcactcggctggagaaagagaagtggatgctggacctgaactccgcgatccaagcagccaagagtggcg

SEQ ID NO: 6767 - DNA, 201 bp, Homo sapiens; identical to SEQ ID NO: 6753

SEQ ID NO: 6768 - DNA, 201 bp, Homo sapiens
aggtgtgcacgtggcatgtggcctgtggcctgtgtcccatgacccacccctgtgctccgtgcctccaccaccactggccaccaggctggcgcagccaaggycgaagctctggctgaaccctgtgctggtgtcctgaccaccctcccctctcttgcacccgcctctcccgtcagggcccaagtccctgttttctgagcccgg

SEQ ID NO: 6769 - DNA, 201 bp, Homo sapiens
tctaccctagccattcctggtacccagccatctgcccaggggtgccccctcctctcccatccccctgccctcgtggccagcccggctggttttgtaagatrctgggttggtgcacagtgatttttttcttgtaatttaaacaggcccagcattgctggttctatttaatggacatgagataatgttagaggttttaaagtg

SEQ ID NO: 6770 - DNA, 201 bp, Homo sapiens
caggcgccatggtggccctggcccagaattggaccacagtggccccccagcggaagtgcatcatcgacatcctcaccgagcccaaagacatcgggaaacgkctcgaggtgcggaagaccgtgaccgcgtgcctgggcgagcccaaccacatcactcggctggagcacgctcaggcgcggctcaccctgtcctataatcgcc

SEQ ID NO: 6771 - DNA, 201 bp, Homo sapiens
caagtgccagaggtgggcaggtggtggcactgagcccccccaacactgtgccctggtggagaaagcactgacctgtcatgcccccctcaaacctcctcttytgacgtgccttttgcacccctcccattaggacaatcagtcccctcccatctgggagtccccttttcttttctaccctagccattcctggtacccagccat

SEQ ID NO: 6772 - DNA, 201 bp, Homo sapiens
tttttaatgggggtagcagctggactacccacgttctcacacccaccgtccgccctgctcctccctggctgccctggccctgaggtgtgggggctgcagcrtgttgctgaggagtgaggaatagttgagccccaagtcctgaagaggcgggccagccaggcgggctcaaggaaagggggtcccagtgggaggggcaggctg

SEQ ID NO: 6773 - DNA, 201 bp, Homo sapiens
cacctgcctgaggtggtggccggcctcagctgcgccttcatcgtgctggtcttcgtcactgtcttcctggtcctgcagctgcgctctggctttagttttcrgggggtgaaggtgtacaccatggaccgtggcctcatctcctacaaggggctgccccctgaagcctggcaggaggagtgcccgtctgactcagaagaggac

SEQ ID NO: 6774 - DNA, 201 bp, Homo sapiens
gcagtggctgcaagaccctcacgtccagtcaggcctgtgtggtgtgcgaggaaggcttctccctgcaccagaagagctgtgtccagcactgccctccaggsttcgccccccaagtcctcgatacgcactatagcaccgagaatgacgtggagaccatccgggccagcgtctgcgccccctgccacgcctcatgtgccacat

SEQ ID NO: 6775 - DNA, 101 bp, Homo sapiens
cttgtaatttaaacaggcccagcattgctggttctatttaatggacatgagataatgttagaggttttaaagtgattaaacgtgcagactatgcaaaccas

SEQ ID NO: 6776 - DNA, 201 bp, Homo sapiens
aaggtcggcactcttcaccctcccgagccctgcccgtctcggccccatgcccccaccagtcagccccgggccacaggcagtgagcaggcacctgggagccraggccctgtgaccaggccaaggagacgggcgctccagggtcccagccacctgtcccccccatggagctgaggccctggttgctatgggtggtagcagcaa

SEQ ID NO: 6777 - DNA, 201 bp, Homo sapiens
gcggagtgaagaggggcagcccttgcttgttgggattcctgacccaggccgcagctcttgcccttccctgtccctctaaagcaataatggtcccatccagrcagtcgggggctggcctaggagatatctgagggaggaggccacctctccaagggcttctgcaccctccaccctgtcccccagctctggtgagtcttggcg

SEQ ID NO: 6778 - DNA, 201 bp, Homo sapiens
gtggtagcagcaacaggaaccttggtcctgctagcagctgatgctcagggccagaaggtcttcaccaacacgtgggctgtgcgcatccctggaggcccagyggtggccaacagtgtggcacggaagcatgggttcctcaacctgggccagatcttcggggactattaccacttctggcatcgaggagtgacgaagcggtcc

SEQ ID NO: 6779 - DNA, 201 bp, Homo sapiens
cactcttcaccctcccgagccctgcccgtctcggccccatgcccccaccagtcagccccgggccacaggcagtgagcaggcacctgggagccgaggccctrtgaccaggccaaggagacgggcgctccagggtcccagccacctgtcccccccatggagctgaggccctggttgctatgggtggtagcagcaacaggaacc

SEQ ID NO: 6780 - DNA, 201 bp, Homo sapiens
agccaatcccctccttgggcactttttaattcaccaaagtatttttttatcttgggactgggtttggaccccagctgggaggcaagaggggtggagactgyttcccatcctaccctcgggcccacctggccacctgaggtgggcccaggaccagctggggcgtggggagggccgtaccccaccctcagcaccccttccatg

SEQ ID NO: 6781 - DNA, 201 bp, Homo sapiens; identical to SEQ ID NO: 6768

SEQ ID NO: 6782 - DNA, 201 bp, Homo sapiens
actgacctgtcatgcccccctcaaacctcctcttctgacgggtgccccctcctctcccatccccctgccctcgtggccagcccggctggttttgtaagatrctgggttggtgcacagtgatttttttcttgtaatttaaacaggcccagcattgctggttctatttaatggacatgagataatgttagaggttttaaagtg

SEQ ID NO: 6783 - DNA, 201 bp, Homo sapiens; identical to SEQ ID NO: 6770

SEQ ID NO: 6784 - DNA, 201 bp, Homo sapiens
caagtgccagaggtgggcaggtggtggcactgagcccccccaacactgtgccctggtggagaaagcactgacctgtcatgcccccctcaaacctcctcttytgacgggtgccccctcctctcccatccccctgccctcgtggccagcccggctggttttgtaagatactgggttggtgcacagtgatttttttcttgtaat

SEQ ID NO: 6785 - DNA, 201 bp, Homo sapiens; identical to SEQ ID NO: 6772

SEQ ID NO: 6786 - DNA, 201 bp, Homo sapiens; identical to SEQ ID NO: 6773

SEQ ID NO: 6787 - DNA, 201 bp, Homo sapiens; identical to SEQ ID NO: 6774

SEQ ID NO: 6788 - DNA, 201 bp, Homo sapiens; identical to SEQ ID NO: 6776

SEQ ID NO: 6789 - DNA, 201 bp, Homo sapiens; identical to SEQ ID NO: 6777

SEQ ID NO: 6790 - DNA, 201 bp, Homo sapiens; identical to SEQ ID NO: 6778

SEQ ID NO: 6791 - DNA, 201 bp, Homo sapiens; identical to SEQ ID NO: 6779

SEQ ID NO: 6792 - DNA, 201 bp, Homo sapiens; identical to SEQ ID NO: 6780

SEQ ID NO: 6793 - DNA, 160 bp, Homo sapiens
cggcaacaagtcctgtttttataagagagcgaggaggacacttctcagaaggggttgttktgcttttgcttatttccgtccatttccctctctgcgcgcggaccttccttttccagatggtgagagccgcggggacacccgacgccggggcaggctgatc

SEQ ID NO: 6794 - DNA, 201 bp, Homo sapiens
ctttcaagtagttagagttgagctgttaaggacagaataaaatcatagttgaggacagcaggttttagttgaattgaaaatttgactgctctgccccctakaatgtgtgtattttaagcatatgtagctaatctcttgtgttgttaaactataactgtttcatatttttcttttgacaaagtagccaaagacaatcagcag

SEQ ID NO: 6795 - DNA, 201 bp, Homo sapiens
gaaggaaatgcagcctcagtaacttccttttcaaagcagtggaggagcacacggcacctttccccagagccccagcatcccttgctcacacctgcagtagyggtgctgtcccaggtggcttccagatgaacccaactgtggagatgatgcagttggcccaacctcactgacggtggaaaaatgtttgccagggtccagaaa

SEQ ID NO: 6796 - DNA, 201 bp, Homo sapiens
agaaggggttgttttgcttttgcttatttccgtccatttccctctctgcgcgcggaccttccttttccagatggtgagagccgcggggacacccgacgccrgggcaggctgatccacgatcctgggtgtgcgtaacgccgcctggggctccgtgggcgagggacgtgtggggacaggtgcaccggaaactgccagactgga

SEQ ID NO: 6797 - DNA, 201 bp, Homo sapiens
actccttcctgctggacttcgtggcggcggacaaccaccgctggaagtacgtgaacggggaatgggtgccggggggcaagccggagccgcaggcgcccagytgcgtctacatccaccccgactcgcccaacttcggggcccactggatgaaggctcccgtctccttcagcaaagtcaagctcaccaacaagctcaacggag

SEQ ID NO: 6798 - DNA, 201 bp, Homo sapiens
tttccctctctgcgcgcggaccttccttttccagatggtgagagccgcggggacacccgacgccggggcaggctgatccacgatcctgggtgtgcgtaacrccgcctggggctccgtgggcgagggacgtgtggggacaggtgcaccggaaactgccagactggagagttgaggcatcggaggcgcgagaacagcactact

SEQ ID NO: 6799 - DNA, 201 bp, Homo sapiens
ccaagaacggcaggaggatgtttccggtgctgaaggtgaacgtgtctggcctggaccccaacgccatgtactccttcctgctggacttcgtggcggcggayaaccaccgctggaagtacgtgaacggggaatgggtgccggggggcaagccggagccgcaggcgcccagctgcgtctacatccaccccgactcgcccaact

SEQ ID NO: 6800 - DNA, 201 bp, Homo sapiens
ccaacctcactgacggtggaaaaatgtttgccagggtccagaaactttttttggtttatttctcatacagtgtattggcaactttggcacaccagaatttrtaaactccaccagtcctactttagtgagataaaaagcacactcttaatcttcttccttgttgctttcaagtagttagagttgagctgttaaggacagaat

SEQ ID NO: 6801 - DNA, 201 bp, Homo sapiens
acttccttttcaaagcagtggaggagcacacggcacctttccccagagccccagcatcccttgctcacacctgcagtagcggtgctgtcccaggtggcttmcagatgaacccaactgtggagatgatgcagttggcccaacctcactgacggtggaaaaatgtttgccagggtccagaaactttttttggtttatttctca

SEQ ID NO: 6802 - DNA, 201 bp, Homo sapiens
aaaggaaagaagtgatcacaaagagatgatggaggaacccggagacagccagcaacctgggtactcccaatgggggtggcttcttcctggaaccagcaccstgtgtccacctgcaaatcctcatcctcagtttggaggtgccctctccctcccctccacgcacagctgtgacaggtacccaaccctgaggagccaccggtc

SEQ ID NO: 6803 - DNA, 201 bp, Homo sapiens
cccagcatcccttgctcacacctgcagtagcggtgctgtcccaggtggcttccagatgaacccaactgtggagatgatgcagttggcccaacctcactgayggtggaaaaatgtttgccagggtccagaaactttttttggtttatttctcatacagtgtattggcaactttggcacaccagaatttataaactccaccag

SEQ ID NO: 6804 - DNA, 201 bp, Homo sapiens
ccccgggctcccaggcagcagccgtgtccaacgggctgggggcccagttcttccggggctcccccgcgcactacacacccctcacccatccggtctcggcrccctcttcctcgggatccccactgtacgaaggggcggccgcggccacagacatcgtggacagccagtacgacgccgcagcccaaggccgcctcatagcct

SEQ ID NO: 6805 - DNA, 166 bp, Homo sapiens
cggcaacaagtcctgtttttataagagagcgaggaggacacttctcagaaggggttgttttgcttktgcttatttccgtccatttccctctctgcgcgcggaccttccttttccagatggtgagagccgcggggacacccgacgccggggcaggctgatccacgat

SEQ ID NO: 6806 - DNA, 201 bp, Homo sapiens
agcaaagtcaagctcaccaacaagctcaacggagggggccagatcatgctgaactccttgcataagtatgagcctcgaatccacatagtgagagttggggrtccacagcgcatgatcaccagccactgcttccctgagacccagttcatagcggtgactgcttatcagaacgaggagatcacagctcttaaaattaagtac

SEQ ID NO: 6807 - DNA, 201 bp, Homo sapiens
gcgccctcctcccgggtctgtgccgggacccgggacccgggagccgtcgcaggtctcggtccaaggggccccttttctcggaagggcggcggccaagagcrgggaaggtggatctcaggtagcgagtctgggcttcggggacggcggggaggggagccggacgggaggatgagctcccctggcaccgagagcgcgggaaag

SEQ ID NO: 6808 - DNA, 201 bp, Homo sapiens
caacgggctgggggcccagttcttccggggctcccccgcgcactacacacccctcacccatccggtctcggcgccctcttcctcgggatccccactgtacraaggggcggccgcggccacagacatcgtggacagccagtacgacgccgcagcccaaggccgcctcatagcctcatggacacctgtgtcgccaccttccat

SEQ ID NO: 6809 - DNA, 201 bp, Homo sapiens
cgtgagccacaatgccagcccacctaccagctccagtcagtaccccagcctgtggtctgtgagcaacggcgccgtcaccccgggctcccaggcagcagccrtgtccaacgggctgggggcccagttcttccggggctcccccgcgcactacacacccctcacccatccggtctcggcgccctcttcctcgggatccccact

SEQ ID NO: 6810 - DNA, 172 bp, Homo sapiens
gtagctaatctcttgtgttgttaaactataactgtttcatatttttcttttgacaaagtagccaaagacaatcagcagaaagcattttctgcaaaataaaygcaatatgcaaaatgtgattcgtccagttattagtgaagcccctccttttgtgagtatttactgtttattg

SEQ ID NO: 6811 - DNA, 201 bp, Homo sapiens
ccttggaatgcctgcccatcccagcatgctccccgtgagccacaatgccagcccacctaccagctccagtcagtaccccagcctgtggtctgtgagcaacrgcgccgtcaccccgggctcccaggcagcagccgtgtccaacgggctgggggcccagttcttccggggctcccccgcgcactacacacccctcacccatcc

SEQ ID NO: 6812 - DNA, 201 bp, Homo sapiens
gggtactcccaatgggggtggcttcttcctggaaccagcaccctgtgtccacctgcaaatcctcatcctcagtttggaggtgccctctccctcccctccaygcacagctgtgacaggtacccaaccctgaggagccaccggtcctcaccctaccccagcccctatgctcatcggaacaattctccaacctattctgacaac

SEQ ID NO: 6813 - DNA, 179 bp, Homo sapiens
agcatatgtagctaatctcttgtgttgttaaactataactgtttcatatttttcttttgacaaagtagccaaagacaatcagcagaaagcattttctgcamaataaacgcaatatgcaaaatgtgattcgtccagttattagtgaagcccctccttttgtgagtatttactgtttattg

SEQ ID NO: 6814 - DNA, 201 bp, Homo sapiens
gtctcggtccaaggggccccttttctcggaagggcggcggccaagagcagggaaggtggatctcaggtagcgagtctgggcttcggggacggcggggaggrgagccggacgggaggatgagctcccctggcaccgagagcgcgggaaagagcctgcagtaccgagtggaccacctgctgagcgccgtggagaatgagctgc

SEQ ID NO: 6815 - DNA, 201 bp, Homo sapiens
cacaatgccagcccacctaccagctccagtcagtaccccagcctgtggtctgtgagcaacggcgccgtcaccccgggctcccaggcagcagccgtgtccarcgggctgggggcccagttcttccggggctcccccgcgcactacacacccctcacccatccggtctcggcgccctcttcctcgggatccccactgtacgaa

SEQ ID NO: 6816 - DNA, 192 bp, Homo sapiens
cggcaacaagtcctgtttttataagagagcgaggaggacacttctcagaaggggttgttttgcttttgcttatttccgtccatttccctctstgcgcgcggaccttccttttccagatggtgagagccgcggggacacccgacgccggggcaggctgatccacgatcctgggtgtgcgtaacgccgcctggg

SEQ ID NO: 6817 - DNA, 201 bp, Homo sapiens
cacacggcacctttccccagagccccagcatcccttgctcacacctgcagtagcggtgctgtcccaggtggcttccagatgaacccaactgtggagatgaygcagttggcccaacctcactgacggtggaaaaatgtttgccagggtccagaaactttttttggtttatttctcatacagtgtattggcaactttggcaca

SEQ ID NO: 6818 - DNA, 201 bp, Homo sapiens
tgattattctgcaatcagccaactggctctgggaatttcacatccacctgcatcttcagatgacagccgatcaagtgcaggtggcgaagatatggtcagasacctagatgaaatggatctgtctgacactcctgccccatctgaggtaccagagctcagcgaatatgtttctgtcccagatcatttcttggaggataccac

SEQ ID NO: 6819 - DNA, 201 bp, Homo sapiens
ggcctctgtggccctggcacaaaggaatgcgaggtcctccagggaaagggagctccatgcaggttgccagatcactctgaaaatcaagcatacaaaactartgttaaaaagttccaaaatcaacaaaataacaaggtaatcagtaaaagaaattctgaattactgaccgtagaatatgaagaatttaaccatcaagattgg

SEQ ID NO: 6820 - DNA, 201 bp, Homo sapiens
cctgacacttcttggtctccacctgctatggcctctacctccctgtcagaagctccacctttctttatggcatcaagcatcttctctctgactgatcaagkcaccacagatacaatggccactgaccagacaatgctagtaccagggctcaccatccccaccagtgattattctgcaatcagccaactggctctgggaatt

SEQ ID NO: 6821 - DNA, 201 bp, Homo sapiens
ctactttgagtccagaacttcctcctgttgaaccccagcttgagacagtggacggagcagagcatggtctacctgacacttcttggtctccacctgctatrgcctctacctccctgtcagaagctccacctttctttatggcatcaagcatcttctctctgactgatcaaggcaccacagatacaatggccactgaccaga

SEQ ID NO: 6822 - DNA, 201 bp, Homo sapiens
aacattgaaccagctgatcaagcagatccctgcaagttcctggcctgcggcgaatttgcccaatgtgtaaagaacgaacggactgaggaagcggagtgtcrctgcaaaccaggatatgacagccaggggagcctggacggtctggaaccaggcctctgtggccctggcacaaaggaatgcgaggtcctccagggaaaggga

SEQ ID NO: 6823 - DNA, 201 bp, Homo sapiens
ggaaatagacagctactctctcaacattgaaccagctgatcaagcagatccctgcaagttcctggcctgcggcgaatttgcccaatgtgtaaagaacgaayggactgaggaagcggagtgtcgctgcaaaccaggatatgacagccaggggagcctggacggtctggaaccaggcctctgtggccctggcacaaaggaatg

SEQ ID NO: 6824 - DNA, 201 bp, Homo sapiens
ctcagcgaatatgtttctgtcccagatcatttcttggaggataccactcctgtctcagctttacagtatatcaccactagttctatgaccattgcccccargggccgagagctggtagtgttcttcagtctgcgtgttgctaacatggccttctccaacgacctgttcaacaagagctctctggagtaccgagctctggag

SEQ ID NO: 6825 - DNA, 201 bp, Homo sapiens; identical to SEQ ID NO: 6818

SEQ ID NO: 6826 - DNA, 201 bp, Homo sapiens; identical to SEQ ID NO: 6819

SEQ ID NO: 6827 - DNA, 201 bp, Homo sapiens; identical to SEQ ID NO: 6820

SEQ ID NO: 6828 - DNA, 201 bp, Homo sapiens; identical to SEQ ID NO: 6821

SEQ ID NO: 6829 - DNA, 201 bp, Homo sapiens; identical to SEQ ID NO: 6822

SEQ ID NO: 6830 - DNA, 201 bp, Homo sapiens; identical to SEQ ID NO: 6823

SEQ ID NO: 6831 - DNA, 201 bp, Homo sapiens; identical to SEQ ID NO: 6824

SEQ ID NO: 6832 - DNA, 201 bp, Homo sapiens; identical to SEQ ID NO: 6818

SEQ ID NO: 6833 - DNA, 201 bp, Homo sapiens; identical to SEQ ID NO: 6819

SEQ ID NO: 6834 - DNA, 201 bp, Homo sapiens; identical to SEQ ID NO: 6820

SEQ ID NO: 6835 - DNA, 201 bp, Homo sapiens; identical to SEQ ID NO: 6821

SEQ ID NO: 6836 - DNA, 201 bp, Homo sapiens; identical to SEQ ID NO: 6822

SEQ ID NO: 6837 - DNA, 201 bp, Homo sapiens; identical to SEQ ID NO: 6823

SEQ ID NO: 6838 - DNA, 201 bp, Homo sapiens; identical to SEQ ID NO: 6824

SEQ ID NO: 6839 - DNA, 201 bp, Homo sapiens
tcccgggccccaaggaccaaaagggcagaaaggtgagccttatgcactgcctaaagaggagcgcgacagatatcggggtgaacctggagagcctggattgktcggtttccagggacctcccggccgccctgggcatgtgggacagatgggtccagttggagctccagggagaccaggaccacctggaccccctggaccaaa

SEQ ID NO: 6840 - DNA, 201 bp, Homo sapiens
aagggcagaaaggtgagccttatgcactgcctaaagaggagcgcgacagatatcggggtgaacctggagagcctggattggtcggtttccagggacctccyggccgccctgggcatgtgggacagatgggtccagttggagctccagggagaccaggaccacctggaccccctggaccaaaaggacagcaaggcaacagag

SEQ ID NO: 6841 - DNA, 201 bp, Homo sapiens
cacactgcccagctgggtggcggagtttgtggatcggatattccttcctcatgcacacggcggcgggagacgaaggcggtggccaatcactggtgtcaccrggcagctgtctagaggacttccgcgccacaccattcatcgaatgcaatggaggccgcggcacctgccactactacgccaacaagtacagcttctggctga

SEQ ID NO: 6842 - DNA, 201 bp, Homo sapiens
tgggcatgaacaaactctggagtggatacagcctgctgtacttcgagggccaggagaaggcgcacaaccaggacctggggctggcgggctcctgcctggcrcggttcagcaccatgcccttcctgtactgcaaccctggtgatgtctgctactatgccagccggaacgacaagtcctactggctctctaccactgcgccgc

SEQ ID NO: 6843 - DNA, 201 bp, Homo sapiens
ccgggccccaaggaccaaaagggcagaaaggtgagccttatgcactgcctaaagaggagcgcgacagatatcggggtgaacctggagagcctggattggtyggtttccagggacctcccggccgccctgggcatgtgggacagatgggtccagttggagctccagggagaccaggaccacctggaccccctggaccaaaag

SEQ ID NO: 6844 - DNA, 201 bp, Homo sapiens
cacatccctatagaccactgggtttggcaaaactcaggcagaaccttgctacttgaaggtacaccccatagggtcggaggtgctgtccccactgccccacsttgtccctgagatttaacccctccactgctgggggtgagctgtactcttctgactgccccctcctgtgtaacgactacaaaataaaacttggttctgaat

SEQ ID NO: 6845 - DNA, 160 bp, Homo sapiens
gctacttgaaggtacaccccatagggtcggaggtgctgtccccactgccccacgttgtccctgagatttaacccctccactgctgggggtgagctgtactyttctgactgccccctcctgtgtaacgactacaaaataaaacttggttctgaatattttt

SEQ ID NO: 6846 - DNA, 201 bp, Homo sapiens
actccgggccccagggcaggcctggtgtgtttggtctcccaggagaaaaagggcccaggggtgaacaaggcttcatggggaacactggacccaccggggcrgtgggcgacagaggccccaagggacccaagggagacccaggattccctggtgcccccgggactgtgggagcccccgggattgcaggaatcccccagaaga

SEQ ID NO: 6847 - DNA, 201 bp, Homo sapiens
cgccggcttacctggaccaccaggcttcctgggccctcctggccccgcagggaccccaggacaaatagattgtgacacagatgtgaaaagggccgttggargtgacagacaggaggccatccagccaggttgcataggagggcccaagggattgccaggcctgccaggacccccaggccccacaggtgccaaaggcctccg

SEQ ID NO: 6848 - DNA, 201 bp, Homo sapiens
cctggccccgcagggaccccaggacaaatagattgtgacacagatgtgaaaagggccgttggaggtgacagacaggaggccatccagccaggttgcatagsagggcccaagggattgccaggcctgccaggacccccaggccccacaggtgccaaaggcctccgaggaatcccaggcttcgcaggagctgatggaggacca

SEQ ID NO: 6849 - DNA, 201 bp, Homo sapiens
tgaggggttaccctggcttgagtggtgaaaaaggatcaccaggacagaagggaagccgaggcctggatggctatcaagggcctgatggaccccggggaccyaagggagaagccggagacccagggccccctggactacctgcctactcccctcacccttccctagcaaaaggtgccagaggtgacccgggattcccagggg

SEQ ID NO: 6850 - DNA, 201 bp, Homo sapiens
gaacctgtgagccggcgcgtgccaggaagggccattttggtgcttattcttaacttattacctcaggtgccaacccaaaaattggctttatttttttcttaaaaaaaaaagtctaccaaaggaatttgcatccagcagcagcacttagacctgccagccactgtcaccgagcgggtgcaagcactcggggtccctggaggg

SEQ ID NO: 6851 - DNA, 201 bp, Homo sapiens
gggccccgtgggtgggcctggccctgctttctacgccaatgttatgccagctccatgttctcccaaataccgttgatgtgaattattttaaaggcaaaacygtgctctttattttaaaaaacactgataatcacactgcggtaggtcattcttttgccacatccctatagaccactgggtttggcaaaactcaggcagaac

SEQ ID NO: 6852 - DNA, 201 bp, Homo sapiens
ggcttcccggctcccctggagcccgcggaccaaaggggtggaaaggtgacgctggggaatgcagatgtacagaaggcgacgaagctatcaaaggtcttccrggactgccaggacccaagggcttcgcaggcatcaacggggagccggggaggaaaggggacagaggagaccccggccaacacggcctccctgggttcccag

SEQ ID NO: 6853 - DNA, 201 bp, Homo sapiens
cctggccctgctttctacgccaatgttatgccagctccatgttctcccaaataccgttgatgtgaattattttaaaggcaaaaccgtgctctttattttaraaaacactgataatcacactgcggtaggtcattcttttgccacatccctatagaccactgggtttggcaaaactcaggcagaaccttgctacttgaaggt

SEQ ID NO: 6854 - DNA, 201 bp, Homo sapiens
agatgtacagaaggcgacgaagctatcaaaggtcttccgggactgccaggacccaagggcttcgcaggcatcaacggggagccggggaggaaaggggacaraggagaccccggccaacacggcctccctgggttcccagggctcaagggagtgcctggcaacattggtgctcccggacccaaaggagcaaaaggagattcc

SEQ ID NO: 6855 - DNA, 201 bp, Homo sapiens
ggggtgaacaaggcttcatggggaacactggacccaccggggcggtgggcgacagaggccccaagggacccaagggagacccaggattccctggtgccccygggactgtgggagcccccgggattgcaggaatcccccagaagattgccgtccaaccagggacagtgggtccccaggggaggcgaggcccccctggggcac

SEQ ID NO: 6856 - DNA, 201 bp, Homo sapiens
tctgaagggattctttggagagaagggaacagaaggtgacatcggcttccctgggataacaggcgtgactggagtccaaggccctcctggacttaaaggamaaacaggctttccagggctgactgggcctccagggtcgcagggagagctggggcggattggactgcctggtggcaaaggagatgatggctggccgggagc

SEQ ID NO: 6857 - DNA, 201 bp, Homo sapiens
ccaggtgtgcatgaagaacctgtgagccggcgcgtgccaggaagggccattttggtgcttattcttaacttattacctcaggtgccaacccaaaaattggytttatttttttcttaaaaaaaaaagtctaccaaaggaatttgcatccagcagcagcacttagacctgccagccactgtcaccgagcgggtgcaagcactc

SEQ ID NO: 6858 - DNA, 201 bp, Homo sapiens
ccagggaaagctgggccccaaggaagaggtggtgtgtctgctgttcccggcttccggggagatgaaggacccataggccaccaggggccgattggccaagmaggtgcaccaggccgtccagggagcccgggcctgccgggtatgccaggccgcagcgtcagcatcggctacctcctggtgaagcacagccagacggaccag

SEQ ID NO: 6859 - DNA, 201 bp, Homo sapiens
ggcggcgggagacgaaggcggtggccaatcactggtgtcaccgggcagctgtctagaggacttccgcgccacaccattcatcgaatgcaatggaggccgcrgcacctgccactactacgccaacaagtacagcttctggctgaccaccattcccgagcagagcttccagggctcgccctccgccgacacgctcaaggccgg

SEQ ID NO: 6860 - DNA, 201 bp, Homo sapiens
ttgccgtccaaccagggacagtgggtccccaggggaggcgaggcccccctggggcaccgggggagatggggccccagggcccccccggagaaccaggtttycgtggggctccagggaaagctgggccccaaggaagaggtggtgtgtctgctgttcccggcttccggggagatgaaggacccataggccaccaggggccga

SEQ ID NO: 6861 - DNA, 201 bp, Homo sapiens
  misc_feature (1)...(201): n = A,T,C or G, or insertion/deletion polymorphism (see Tables 1-2)
gtccagggagcccgggcctgccgggtatgccaggccgcagcgtcagcatcggctacctcctggtgaagcacagccagacggaccaggagcccatgtgcccngtgggcatgaacaaactctggagtggatacagcctgctgtacttcgagggccaggagaaggcgcacaaccaggacctggggctggcgggctcctgcctgg

SEQ ID NO: 6862 - DNA, 165 bp, Homo sapiens
accttgctacttgaaggtacaccccatagggtcggaggtgctgtccccactgccccacgttgtccctgagatttaacccctccactgctgggggtgagctrtactcttctgactgccccctcctgtgtaacgactacaaaataaaacttggttctgaatattttt

SEQ ID NO: 6863 - DNA, 201 bp, Homo sapiens
gcccaagggattgccaggcctgccaggacccccaggccccacaggtgccaaaggcctccgaggaatcccaggcttcgcaggagctgatggaggaccagggyccaggggcttgccaggagacgcaggtcgtgaagggttcccaggacccccagggttcataggaccccgaggatccaaaggtgcagtgggcctccctggccc

SEQ ID NO: 6864 - DNA, 201 bp, Homo sapiens
acagacaactcacattgttcaactcccttctcggggtgggacagacgagacaacagcacacaggcagccagccgtggccagaggctcgaggggctcagggsctcaggcacccgtccccacacgagggccccgtgggtgggcctggccctgctttctacgccaatgttatgccagctccatgttctcccaaataccgttgat

SEQ ID NO: 6865 - DNA, 201 bp, Homo sapiens
agcacacaggcagccagccgtggccagaggctcgaggggctcaggggctcaggcacccgtccccacacgagggccccgtgggtgggcctggccctgctttytacgccaatgttatgccagctccatgttctcccaaataccgttgatgtgaattattttaaaggcaaaaccgtgctctttattttaaaaaacactgataat

SEQ ID NO: 6866 - DNA, 201 bp, Homo sapiens
tccctgggcttcccggctcccctggagcccgcggaccaaaggggtggaaaggtgacgctggggaatgcagatgtacagaaggcgacgaagctatcaaaggwcttccgggactgccaggacccaagggcttcgcaggcatcaacggggagccggggaggaaaggggacagaggagaccccggccaacacggcctccctgggt

SEQ ID NO: 6867 - DNA, 201 bp, Homo sapiens
ccggtttgccaggattccctggggtggctggcccccctggaattacgggattcccaggattcataggaagccggggtgacaaaggtgccccagggagagcmggcctgtatggcgagattggcgcgactggtgatttcggtgacatcggggacactataaatttaccaggaagaccaggcctgaagggggagcggggcacca

SEQ ID NO: 6868 - DNA, 201 bp, Homo sapiens
ccggggactccgggccccagggcaggcctggtgtgtttggtctcccaggagaaaaagggcccaggggtgaacaaggcttcatggggaacactggacccacyggggcggtgggcgacagaggccccaagggacccaagggagacccaggattccctggtgcccccgggactgtgggagcccccgggattgcaggaatccccc

SEQ ID NO: 6869 - DNA, 201 bp, Homo sapiens
tgggcccccaggggtacaatgggccaccaggattacaaggattcccgggactgcagggacgtaaaggagacaagggtgaaaggggagcccccggagtaacrggacccaagggcgacgtgggagcaagaggcgtttctggattccctggtgccgatggaattcctggacacccggggcaaggtgggcccaggggaaggccgg

SEQ ID NO: 6870 - DNA, 201 bp, Homo sapiens
cccttccaggccctgtgggagtcccaggacagaaaggagaccaaggagctccaggggaacgaggcccacctgggagcccaggacttcaggggttcccaggyatcacacccccttccaacatctctggggcacctggtgacaaaggggcgccagggatatttggcctgaaaggttatcggggcccaccagggccaccaggtt

SEQ ID NO: 6871 - DNA, 201 bp, Homo sapiens
acacccttccaggccctgtgggagtcccaggacagaaaggagaccaaggagctccaggggaacgaggcccacctgggagcccaggacttcaggggttcccwggcatcacacccccttccaacatctctggggcacctggtgacaaaggggcgccagggatatttggcctgaaaggttatcggggcccaccagggccaccag

SEQ ID NO: 6872 - DNA, 201 bp, Homo sapiens
atctcagtcaggataagctcacagatgtggccatcggggcccccctggaaggttttggggcagatgatggtgccagcttcggcagtgtgtatatctacaayggacactgggacggcctctccgccagcccctcgcagcggatcagagcctccacggtggccccaggactccagtacttcggcatgtccatggctggtggct

SEQ ID NO: 6873 - DNA, 201 bp, Homo sapiens
cacaaagaattcctcttccatgtacatggggagaacctctttggagcagaataccagttgcaaatttgcgtcccaaccaaattacgaggtctccaggttgyagcagtgaagaagctgacgaggactcaggcctccacggtgtgcacctggagtcaggagcgcgcttgtgcgtacagttcggttcagcatgtggaagaatgg

SEQ ID NO: 6874 - DNA, 162 bp, Homo sapiens
tctgtccccgcctcctggcctcctggctgaggggaagctgagtgggccacggcccatgtgtygcactcgcctcggctcccacacagccgcctctgctccagcaaggatgtggctcttccacactctgctctgcatagccagcctggccctgctggccgcttt

SEQ ID NO: 6875 - DNA, 103 bp, Homo sapiens
tagtttttaaccatacattgtcccaaaagtgtctgtgcattgtgcaaaaagtaaacttaggaaacatttggtattaaataaatttacacttttctttgcarta

SEQ ID NO: 6876 - DNA, 201 bp, Homo sapiens
gcggcggcagacgcggaggctgcgcagtacagctacctgggttacgctgtggccgtgctgcacaagacctgcagcctctcctacgtcgcgggggctccacrgtacaaacatcatggggccgtgtttgagctccagaaggagggcagagaggccagcttcctgccagtgctggagggagagcagatggggtcctattttggc

SEQ ID NO: 6877 - DNA, 201 bp, Homo sapiens
ctaactccggggaagattcctacatgacaagcatggccttgaattaccccagaaacctgcagttgaagaggatgcaaaagcctccctctccaaacattcastgtgatgaccctcagccggttgcttctgtcctgatcatgaactgcaggattggtcaccccgtcctcaagaggtcatctgctcatgtttcagtcgtttggc

SEQ ID NO: 6878 - DNA, 201 bp, Homo sapiens
cctggaccgctacactgagccctttgccatcttccagctgccctatgagaaggcctgcaagaataagctgttttgtgtcgcagaattacagttggccaccrccgtctctcagcaggagttggtggtgggtctcacaaaggagctgaccctgaacattaacctaactaactccggggaagattcctacatgacaagcatggc

SEQ ID NO: 6879 - DNA, 201 bp, Homo sapiens
ggccgtgctgcacaagacctgcagcctctcctacgtcgcgggggctccacggtacaaacatcatggggccgtgtttgagctccagaaggagggcagagagkccagcttcctgccagtgctggagggagagcagatggggtcctattttggctctgagctgtgccctgtggacattgacatggatggaagcacggacttctt

SEQ ID NO: 6880 - DNA, 201 bp, Homo sapiens
gtcatctgctcatgtttcagtcgtttggcagctagaggagaatgcctttccaaacaggacagcagacatcactgtgactgtcaccaattccaatgaaagayggtctttggccaacgagacccacacccttcaattcaggcatggcttcgttgcagttctgtccaaaccatccataatgtacgtgaacacaggccaggggct

SEQ ID NO: 6881 - DNA, 201 bp, Homo sapiens
tgtagcagtgaagaagctgacgaggactcaggcctccacggtgtgcacctggagtcaggagcgcgcttgtgcgtacagttcggttcagcatgtggaagaakggcattcagtgagctgtgtcatcgcttcagataaagaaaatgtcaccgtggctgcagagatctcctgggatcactctgaggagttactaaaagatgtaac

SEQ ID NO: 6882 - DNA, 201 bp, Homo sapiens
tcacccccagcgcactgcccatcggcttcaacggcgtcgtgaatgtccgtttatgttttgaaatcagctctgtaaccacagcctctgagtcaggcctccgygaggcacttctcaacttcacgctggatgtggatgtggggaagcagaggagacggctgcagtgttcagacgtaagaagctgtctgggctgcctgagggagt

SEQ ID NO: 6883 - DNA, 201 bp, Homo sapiens
gaaccagacagcggcggcggcggcagacgcggaggctgcgcagtacagctacctgggttacgctgtggccgtgctgcacaagacctgcagcctctcctacrtcgcgggggctccacggtacaaacatcatggggccgtgtttgagctccagaaggagggcagagaggccagcttcctgccagtgctggagggagagcagat

SEQ ID NO: 6884 - DNA, 201 bp, Homo sapiens
cagagatctcctgggatcactctgaggagttactaaaagatgtaactgaactgcagatccttggtgaaatatctttcaacaaatctctatatgagggactkaatgcagagaaccacagaactaagatcactgtcgtcttcctgaaagatgagaagtaccattctttgcctatcatcattaaaggcagcgttggtggacttc

SEQ ID NO: 6885 - DNA, 198 bp, Homo sapiens
cgcgcccctcccagccgcgcgcgcccgcctgcggtttgtctgcgcagccctggaggctgcgacttccggactgctcctggccgcagggggcgccgccrtcgcacagagaggcctgggcggggcggaccggcgctgggcagccaggacagccgcggcagccgggtccgcagggcagcagccggcctctcccactgcagc

SEQ ID NO: 6886 - DNA, 201 bp, Homo sapiens
gcaagcccatgtcagggcgatcctggttcaaatgtgccatttcccgggttgatgctgccacactttgtagagagtttagcaacacagtgtgcttagtcagygtaggaatcctcactaaagcaggagaagttccattcaaagtgccaatgatagagtcaacaggaaggttaatgttggaaacacaatcaggtgtggattggt

SEQ ID NO: 6887 - DNA, 201 bp, Homo sapiens
aaaggctggccttgcctgcttgtttctctatatggctggaataattacgttctctttaatcacaaaacagcttttatggtagaatacttatatcaattcakcactgctccttgaaatagcaggtcctcttgtttgaactgataaataatgaggagcccccccaaaaaatgttttctatttcctgacagccatgagtcctac

SEQ ID NO: 6888 - DNA, 201 bp, Homo sapiens
gggcgatcctggttcaaatgtgccatttcccgggttgatgctgccacactttgtagagagtttagcaacacagtgtgcttagtcagcgtaggaatcctcaytaaagcaggagaagttccattcaaagtgccaatgatagagtcaacaggaaggttaatgttggaaacacaatcaggtgtggattggtgctactttgaacaa

SEQ ID NO: 6889 - DNA, 201 bp, Homo sapiens
gcgatcctggttcaaatgtgccatttcccgggttgatgctgccacactttgtagagagtttagcaacacagtgtgcttagtcagcgtaggaatcctcactwaagcaggagaagttccattcaaagtgccaatgatagagtcaacaggaaggttaatgttggaaacacaatcaggtgtggattggtgctactttgaacaaaa

SEQ ID NO: 6890 - DNA, 201 bp, Homo sapiens
atgtgccatttcccgggttgatgctgccacactttgtagagagtttagcaacacagtgtgcttagtcagcgtaggaatcctcactaaagcaggagaagttycattcaaagtgccaatgatagagtcaacaggaaggttaatgttggaaacacaatcaggtgtggattggtgctactttgaacaaaagtaatttattttgtc

SEQ ID NO: 6891 - DNA, 201 bp, Homo sapiens
tgtgccatttcccgggttgatgctgccacactttgtagagagtttagcaacacagtgtgcttagtcagcgtaggaatcctcactaaagcaggagaagttcyattcaaagtgccaatgatagagtcaacaggaaggttaatgttggaaacacaatcaggtgtggattggtgctactttgaacaaaagtaatttattttgtct

SEQ ID NO: 6892 - DNA, 201 bp, Homo sapiens
atgaagaggtggcccgtaagctggtcatcattgagagcgacctggaacgtgcagaggagcgggctgagctctcagaaggcaaatgtgccgagcttgaagargaattgaaaactgtgacgaacaacttgaagtcactggaggctcaggctgagaagtactcgcagaaggaagacagatatgaggaagagatcaaggtccttt

SEQ ID NO: 6893 - DNA, 162 bp, Homo sapiens
aatcctcactaaagcaggagaagttccattcaaagtgccaatgatagagtcaacaggaaggttaatgttggaaacacaatcaggtgtggattggtgctacyttgaacaaaagtaatttattttgtcttgagttttactacaagatgagactatggatcccgc

SEQ ID NO: 6894 - DNA, 201 bp, Homo sapiens
aggcagcagatgagagtgagagaggcatgaaagtcattgagagtcgagcccaaaaagatgaagaaaaaatggaaattcaggagatccaactgaaagaggcmaagcacattgctgaagatgccgaccgcaaatatgaagaggtggcccgtaagctggtcatcattgagagcgacctggaacgtgcagaggagcgggctgagc

SEQ ID NO: 6895 - DNA, 201 bp, Homo sapiens
tggttcaaatgtgccatttcccgggttgatgctgccacactttgtagagagtttagcaacacagtgtgcttagtcagcgtaggaatcctcactaaagcagragaagttccattcaaagtgccaatgatagagtcaacaggaaggttaatgttggaaacacaatcaggtgtggattggtgctactttgaacaaaagtaattt

SEQ ID NO: 6896 - DNA, 201 bp, Homo sapiens
gagcgcgcgggcaccctgcagcgcgagctggaccacgagaggaagctgagggagaccgctgaagccgacgtagcttctctgaacagacgcatccagctggytgaggaagagttggatcgtgcccaggagcgtctggcaacagctttgcagaagctggaggaagctgagaaggcagcagatgagagtgagagaggcatgaaa

SEQ ID NO: 6897 - DNA, 201 bp, Homo sapiens
ttcgtaacttcttcagtttgtataacagtgctgcagctgtatttggtttttacctctccctgttcccacggcacaccgtcagtgaaccttcaccaaacccyacgtgcattttatcctcagtgaattgttggtggaggtgcacctgactgctctgtgagaatccgtgccatggctcctttgggtcaaagatgccctcccctc

SEQ ID NO: 6898 - DNA, 201 bp, Homo sapiens
tgttcgtaacttcttcagtttgtataacagtgctgcagctgtatttggtttttacctctccctgttcccacggcacaccgtcagtgaaccttcaccaaacmccacgtgcattttatcctcagtgaattgttggtggaggtgcacctgactgctctgtgagaatccgtgccatggctcctttgggtcaaagatgccctcccc

SEQ ID NO: 6899 - DNA, 158 bp, Homo sapiens
cgcgcccctcccagccgcgcgcgcccgcctgcggtttgtctgcgcagccctggaggcygcgacttccggactgctcctggccgcagggggcgccgccgtcgcacagagaggcctgggcggggcggaccggcgctgggcagccaggacagccgcggcag

SEQ ID NO: 6900 - DNA, 201 bp, Homo sapiens
aaatgtctgctgttcgtaacttcttcagtttgtataacagtgctgcagctgtatttggtttttacctctccctgttcccacggcacaccgtcagtgaaccytcaccaaaccccacgtgcattttatcctcagtgaattgttggtggaggtgcacctgactgctctgtgagaatccgtgccatggctcctttgggtcaaaga

SEQ ID NO: 6901 - DNA, 201 bp, Homo sapiens
aagaagaaaaccttagtatgcatcagatgctggatcagactttactggagttaaacaacatgtgaaaacctccttagctgcgaccacattctttcattttkttttgttttgttttgtttttaaacacctgcttaccccttaaatgcaatttatttacttttaccactgtcacagaaacatccacaagataccagctaggtc

SEQ ID NO: 6902 - DNA, 201 bp, Homo sapiens
gttaaacaacatgtgaaaacctccttagctgcgaccacattctttcattttgttttgttttgttttgtttttaaacacctgcttaccccttaaatgcaatwtatttacttttaccactgtcacagaaacatccacaagataccagctaggtcagggggtggggaaaacacatacaaaaaggcaagcccatgtcagggcgat

SEQ ID NO: 6903 - DNA, 201 bp, Homo sapiens
aaggcggcggaagacaggagcaagcagctggaagatgagctggtgtcactgcaaaagaaactcaagggcaccgaagatgaactggacaaatactctgaggytctcaaagatgcccaggagaagctggagctggcagagaaaaaggccaccgatgctgaagccgacgtagcttctctgaacagacgcatccagctggttgag

SEQ ID NO: 6904 - DNA, 201 bp, Homo sapiens; identical to SEQ ID NO: 6894

SEQ ID NO: 6905 - DNA, 201 bp, Homo sapiens
aatcctcactaaagcaggagaagttccattcaaagtgccaatgatagagtcaacaggaaggttaatgttggaaacacaatcaggtgtggattggtgctacyttgaacaaaaggtccccctgtggtcttttgttcaacattgtacaatgtagaactctgtccaacactaatttattttgtcttgagttttactacaagatga

SEQ ID NO: 6906 - DNA, 201 bp, Homo sapiens; identical to SEQ ID NO: 6886

SEQ ID NO: 6907 - DNA, 201 bp, Homo sapiens
tggttcaaatgtgccatttcccgggttgatgctgccacactttgtagagagtttagcaacacagtgtgcttagtcagcgtaggaatcctcactaaagcagragaagttccattcaaagtgccaatgatagagtcaacaggaaggttaatgttggaaacacaatcaggtgtggattggtgctactttgaacaaaaggtcccc

SEQ ID NO: 6908 - DNA, 201 bp, Homo sapiens; identical to SEQ ID NO: 6888

SEQ ID NO: 6909 - DNA, 201 bp, Homo sapiens
gaagatgcagatgctgaagctcgacaaggagaacgccttggatcgagctgagcaggcggaggccgacaagaaggcggcggaagacaggagcaagcagctgraagatgagctggtgtcactgcaaaagaaactcaagggcaccgaagatgaactggacaaatactctgaggctctcaaagatgcccaggagaagctggagct

SEQ ID NO: 6910 - DNA, 201 bp, Homo sapiens
gaggctctcaaagatgcccaggagaagctggagctggcagagaaaaaggccaccgatgctgaagccgacgtagcttctctgaacagacgcatccagctggytgaggaagagttggatcgtgcccaggagcgtctggcaacagctttgcagaagctggaggaagctgagaaggcagcagatgagagtgagagaggcatgaaa

SEQ ID NO: 6911 - DNA, 201 bp, Homo sapiens; identical to SEQ ID NO: 6889

SEQ ID NO: 6912 - DNA, 201 bp, Homo sapiens
atgtgccatttcccgggttgatgctgccacactttgtagagagtttagcaacacagtgtgcttagtcagcgtaggaatcctcactaaagcaggagaagttycattcaaagtgccaatgatagagtcaacaggaaggttaatgttggaaacacaatcaggtgtggattggtgctactttgaacaaaaggtccccctgtggtc

SEQ ID NO: 6913 - DNA, 201 bp, Homo sapiens; identical to SEQ ID NO: 6901

SEQ ID NO: 6914 - DNA, 117 bp, Homo sapiens
ttaaagatttagacaccacatacaactggtaaaggacgttttcttgagagttttaactatatgtaaacattgtataatgatatggaataaaatgcacattktaggacattttctaaa

SEQ ID NO: 6915 - DNA, 201 bp, Homo sapiens
tcgagctgagcaggcggaggccgacaagaaggcggcggaagacaggagcaagcagctggaagatgagctggtgtcactgcaaaagaaactcaagggcaccraagatgaactggacaaatactctgaggctctcaaagatgcccaggagaagctggagctggcagagaaaaaggccaccgatgctgaagccgacgtagcttc

SEQ ID NO: 6916 - DNA, 201 bp, Homo sapiens
tgtgccatttcccgggttgatgctgccacactttgtagagagtttagcaacacagtgtgcttagtcagcgtaggaatcctcactaaagcaggagaagttcyattcaaagtgccaatgatagagtcaacaggaaggttaatgttggaaacacaatcaggtgtggattggtgctactttgaacaaaaggtccccctgtggtct

SEQ ID NO: 6917 - DNA, 201 bp, Homo sapiens; identical to SEQ ID NO: 6902

SEQ ID NO: 6918 - DNA, 201 bp, Homo sapiens
actaatttattttgtcttgagttttactacaagatgagactatggatcccgcatgcctgaattcactaaagccaagggtctgtaagccacgctgctcttcygagacttccattcctttctgattggcacacgtgcagctcatgacaatctgtaggataacaatcagtgtggatttccactcttttcagtccttcatgttaa

SEQ ID NO: 6919 - DNA, 201 bp, Homo sapiens
agccacgctgctcttctgagacttccattcctttctgattggcacacgtgcagctcatgacaatctgtaggataacaatcagtgtggatttccactctttkcagtccttcatgttaaagatttagacaccacatacaactggtaaaggacgttttcttgagagttttaactatatgtaaacattgtataatgatatggaat

SEQ ID NO: 6920 - DNA, 201 bp, Homo sapiens; identical to SEQ ID NO: 6903

SEQ ID NO: 6921 - DNA, 201 bp, Homo sapiens; identical to SEQ ID NO: 6894

SEQ ID NO: 6922 - DNA, 201 bp, Homo sapiens
agagagtttagcaacacagtgtgcttagtcagcgtaggaatcctcactaaagcaggagaagttaatgttggaaacacaatcaggtgtggattggtgctacyttgaacaaaaggtccccctgtggtcttttgttcaacattgtacaatgtagaactctgtccaacactaatttattttgtcttgagttttactacaagatga

SEQ ID NO: 6923 - DNA, 201 bp, Homo sapiens
gcaagcccatgtcagggcgatcctggttcaaatgtgccatttcccgggttgatgctgccacactttgtagagagtttagcaacacagtgtgcttagtcagygtaggaatcctcactaaagcaggagaagttaatgttggaaacacaatcaggtgtggattggtgctactttgaacaaaaggtccccctgtggtcttttgtt

SEQ ID NO: 6924 - DNA, 201 bp, Homo sapiens
tggttcaaatgtgccatttcccgggttgatgctgccacactttgtagagagtttagcaacacagtgtgcttagtcagcgtaggaatcctcactaaagcagragaagttaatgttggaaacacaatcaggtgtggattggtgctactttgaacaaaaggtccccctgtggtcttttgttcaacattgtacaatgtagaactc

SEQ ID NO: 6925 - DNA, 201 bp, Homo sapiens
gggcgatcctggttcaaatgtgccatttcccgggttgatgctgccacactttgtagagagtttagcaacacagtgtgcttagtcagcgtaggaatcctcaytaaagcaggagaagttaatgttggaaacacaatcaggtgtggattggtgctactttgaacaaaaggtccccctgtggtcttttgttcaacattgtacaat

SEQ ID NO: 6926 - DNA, 201 bp, Homo sapiens; identical to SEQ ID NO: 6909

SEQ ID NO: 6927 - DNA, 201 bp, Homo sapiens; identical to SEQ ID NO: 6910

SEQ ID NO: 6928 - DNA, 201 bp, Homo sapiens
gcgatcctggttcaaatgtgccatttcccgggttgatgctgccacactttgtagagagtttagcaacacagtgtgcttagtcagcgtaggaatcctcactwaagcaggagaagttaatgttggaaacacaatcaggtgtggattggtgctactttgaacaaaaggtccccctgtggtcttttgttcaacattgtacaatgt

SEQ ID NO: 6929 - DNA, 201 bp, Homo sapiens; identical to SEQ ID NO: 6901

SEQ ID NO: 6930 - DNA, 120 bp, Homo sapiens
ttaaagatttagacaccacatacaactggtaaaggacgttttcttgagagttttaactatatgtaaacattgtataatgatatggaataaaatgcacattktaggacattttctaaattt

SEQ ID NO: 6931 - DNA, 201 bp, Homo sapiens; identical to SEQ ID NO: 6915

SEQ ID NO: 6932 - DNA, 201 bp, Homo sapiens; identical to SEQ ID NO: 6902

SEQ ID NO: 6933 - DNA, 201 bp, Homo sapiens; identical to SEQ ID NO: 6918

SEQ ID NO: 6934 - DNA, 201 bp, Homo sapiens; identical to SEQ ID NO: 6919

SEQ ID NO: 6935 - DNA, 201 bp, Homo sapiens; identical to SEQ ID NO: 6894

SEQ ID NO: 6936 - DNA, 201 bp, Homo sapiens; identical to SEQ ID NO: 6905

SEQ ID NO: 6937 - DNA, 201 bp, Homo sapiens
aggccaagtccgacagctggaagaacaattaagaataatggatcagaccttgaaagcattaatggctgcagaggataagcaaatgtgccgagcttgaagargaattgaaaactgtgacgaacaacttgaagtcactggaggctcaggctgagaagtactcgcagaaggaagacagatatgaggaagagatcaaggtccttt

SEQ ID NO: 6938 - DNA, 201 bp, Homo sapiens; identical to SEQ ID NO: 6886

SEQ ID NO: 6939 - DNA, 201 bp, Homo sapiens; identical to SEQ ID NO: 6907

SEQ ID NO: 6940 - DNA, 201 bp, Homo sapiens; identical to SEQ ID NO: 6888

SEQ ID NO: 6941 - DNA, 201 bp, Homo sapiens
gaggagctgcacaaggcggaggacagcctcctggccgccgaagaggccgccgccaaggctgaagccgacgtagcttctctgaacagacgcatccagctggytgaggaagagttggatcgtgcccaggagcgtctggcaacagctttgcagaagctggaggaagctgagaaggcagcagatgagagtgagagaggcatgaaa

SEQ ID NO: 6942 - DNA, 201 bp, Homo sapiens; identical to SEQ ID NO: 6889

SEQ ID NO: 6943 - DNA, 201 bp, Homo sapiens; identical to SEQ ID NO: 6912

SEQ ID NO: 6944 - DNA, 201 bp, Homo sapiens; identical to SEQ ID NO: 6901

SEQ ID NO: 6945 - DNA, 117 bp, Homo sapiens; identical to SEQ ID NO: 6914

SEQ ID NO: 6946 - DNA, 201 bp, Homo sapiens; identical to SEQ ID NO: 6916

SEQ ID NO: 6947 - DNA, 201 bp, Homo sapiens; identical to SEQ ID NO: 6902

SEQ ID NO: 6948 - DNA, 201 bp, Homo sapiens; identical to SEQ ID NO: 6918

SEQ ID NO: 6949 - DNA, 201 bp, Homo sapiens; identical to SEQ ID NO: 6919

SEQ ID NO: 6950 - DNA, 201 bp, Homo sapiens; identical to SEQ ID NO: 6923

SEQ ID NO: 6951 - DNA, 201 bp, Homo sapiens; identical to SEQ ID NO: 6925

SEQ ID NO: 6952 - DNA, 201 bp, Homo sapiens; identical to SEQ ID NO: 6928

SEQ ID NO: 6953 - DNA, 201 bp, Homo sapiens; identical to SEQ ID NO: 6918

SEQ ID NO: 6954 - DNA, 201 bp, Homo sapiens; identical to SEQ ID NO: 6919

SEQ ID NO: 6955 - DNA, 201 bp, Homo sapiens; identical to SEQ ID NO: 6922

SEQ ID NO: 6956 - DNA, 201 bp, Homo sapiens; identical to SEQ ID NO: 6892

SEQ ID NO: 6957 - DNA, 201 bp, Homo sapiens; identical to SEQ ID NO: 6894

SEQ ID NO: 6958 - DNA, 201 bp, Homo sapiens; identical to SEQ ID NO: 6924

SEQ ID NO: 6959 - DNA, 201 bp, Homo sapiens; identical to SEQ ID NO: 6941

SEQ ID NO: 6960 - DNA, 201 bp, Homo sapiens; identical to SEQ ID NO: 6901

SEQ ID NO: 6961 - DNA, 120 bp, Homo sapiens; identical to SEQ ID NO: 6930

SEQ ID NO: 6962 - DNA, 201 bp, Homo sapiens; identical to SEQ ID NO: 6902

SEQ ID NO: 6963 - DNA, 201 bp, Homo sapiens; identical to SEQ ID NO: 6894

SEQ ID NO: 6964 - DNA, 201 bp, Homo sapiens; identical to SEQ ID NO: 6892

SEQ ID NO: 6965 - DNA, 201 bp, Homo sapiens; identical to SEQ ID NO: 6903

SEQ ID NO: 6966 - DNA, 201 bp, Homo sapiens
cccacctctctgagctctgcatttgtctattctccagctgaccctggttctctctcttagcatcctgccttagagccaggcacacactgtgctttctattktacagaagctcttcgtttcagtgtcaaataaacactgtgtaagctatttctgtttgctattctttttacttcttatttattgacattttagtttcaacat

SEQ ID NO: 6967 - DNA, 201 bp, Homo sapiens; identical to SEQ ID NO: 6910

SEQ ID NO: 6968 - DNA, 201 bp, Homo sapiens; identical to SEQ ID NO: 6909

SEQ ID NO: 6969 - DNA, 201 bp, Homo sapiens; identical to SEQ ID NO: 6915

SEQ ID NO: 6970 - DNA, 201 bp, Homo sapiens; identical to SEQ ID NO: 6923

SEQ ID NO: 6971 - DNA, 201 bp, Homo sapiens; identical to SEQ ID NO: 6925

SEQ ID NO: 6972 - DNA, 201 bp, Homo sapiens; identical to SEQ ID NO: 6928

SEQ ID NO: 6973 - DNA, 201 bp, Homo sapiens; identical to SEQ ID NO: 6918

SEQ ID NO: 6974 - DNA, 201 bp, Homo sapiens; identical to SEQ ID NO: 6919

SEQ ID NO: 6975 - DNA, 201 bp, Homo sapiens; identical to SEQ ID NO: 6922

SEQ ID NO: 6976 - DNA, 201 bp, Homo sapiens; identical to SEQ ID NO: 6894

SEQ ID NO: 6977 - DNA, 201 bp, Homo sapiens; identical to SEQ ID NO: 6924

SEQ ID NO: 6978 - DNA, 201 bp, Homo sapiens; identical to SEQ ID NO: 6941

SEQ ID NO: 6979 - DNA, 201 bp, Homo sapiens; identical to SEQ ID NO: 6901

SEQ ID NO: 6980 - DNA, 120 bp, Homo sapiens; identical to SEQ ID NO: 6930

SEQ ID NO: 6981 - DNA, 201 bp, Homo sapiens; identical to SEQ ID NO: 6902

SEQ ID NO: 6982 - DNA, 198 bp, Homo sapiens; identical to SEQ ID NO: 6885

SEQ ID NO: 6983 - DNA, 201 bp, Homo sapiens; identical to SEQ ID NO: 6923

SEQ ID NO: 6984 - DNA, 201 bp, Homo sapiens; identical to SEQ ID NO: 6925

SEQ ID NO: 6985 - DNA, 201 bp, Homo sapiens; identical to SEQ ID NO: 6928

SEQ ID NO: 6986 - DNA, 201 bp, Homo sapiens; identical to SEQ ID NO: 6918

SEQ ID NO: 6987 - DNA, 201 bp, Homo sapiens; identical to SEQ ID NO: 6919

SEQ ID NO: 6988 - DNA, 201 bp, Homo sapiens; identical to SEQ ID NO: 6922

SEQ ID NO: 6989 - DNA, 201 bp, Homo sapiens; identical to SEQ ID NO: 6894

SEQ ID NO: 6990 - DNA, 201 bp, Homo sapiens; identical to SEQ ID NO: 6892

SEQ ID NO: 6991 - DNA, 201 bp, Homo sapiens; identical to SEQ ID NO: 6924

SEQ ID NO: 6992 - DNA, 201 bp, Homo sapiens; identical to SEQ ID NO: 6896

SEQ ID NO: 6993 - DNA, 158 bp, Homo sapiens; identical to SEQ ID NO: 6899

SEQ ID NO: 6994 - DNA, 201 bp, Homo sapiens; identical to SEQ ID NO: 6901

SEQ ID NO: 6995 - DNA, 120 bp, Homo sapiens; identical to SEQ ID NO: 6930

SEQ ID NO: 6996 - DNA, 201 bp, Homo sapiens; identical to SEQ ID NO: 6902

SEQ ID NO: 6997 - DNA, 198 bp, Homo sapiens; identical to SEQ ID NO: 6885

SEQ ID NO: 6998 - DNA, 201 bp, Homo sapiens; identical to SEQ ID NO: 6923

SEQ ID NO: 6999 - DNA, 201 bp, Homo sapiens; identical to SEQ ID NO: 6925

SEQ ID NO: 7000 - DNA, 201 bp, Homo sapiens; identical to SEQ ID NO: 6928

SEQ ID NO: 7001 - DNA, 201 bp, Homo sapiens; identical to SEQ ID NO: 6918

SEQ ID NO: 7002 - DNA, 201 bp, Homo sapiens; identical to SEQ ID NO: 6919

SEQ ID NO: 7003 - DNA, 201 bp, Homo sapiens; identical to SEQ ID NO: 6922

SEQ ID NO: 7004 - DNA, 201 bp, Homo sapiens; identical to SEQ ID NO: 6894

SEQ ID NO: 7005 - DNA, 201 bp, Homo sapiens; identical to SEQ ID NO: 6924

SEQ ID NO: 7006 - DNA, 201 bp, Homo sapiens; identical to SEQ ID NO: 6896

SEQ ID NO: 7007 - DNA, 158 bp, Homo sapiens; identical to SEQ ID NO: 6899

SEQ ID NO: 7008 - DNA, 201 bp, Homo sapiens; identical to SEQ ID NO: 6901

SEQ ID NO: 7009 - DNA, 120 bp, Homo sapiens; identical to SEQ ID NO: 6930

SEQ ID NO: 7010 - DNA, 201 bp, Homo sapiens; identical to SEQ ID NO: 6902

SEQ ID NO: 7011 - DNA, 198 bp, Homo sapiens; identical to SEQ ID NO: 6885

SEQ ID NO: 7012 - DNA, 201 bp, Homo sapiens; identical to SEQ ID NO: 6894

SEQ ID NO: 7013 - DNA, 201 bp, Homo sapiens; identical to SEQ ID NO: 6892

SEQ ID NO: 7014 - DNA, 201 bp, Homo sapiens; identical to SEQ ID NO: 6966

SEQ ID NO: 7015 - DNA, 201 bp, Homo sapiens; identical to SEQ ID NO: 6896

SEQ ID NO: 7016 - DNA, 158 bp, Homo sapiens; identical to SEQ ID NO: 6899

SEQ ID NO: 7017 - DNA, 201 bp, Homo sapiens; identical to SEQ ID NO: 6887

SEQ ID NO: 7018 - DNA, 201 bp, Homo sapiens; identical to SEQ ID NO: 6894

SEQ ID NO: 7019 - DNA, 201 bp, Homo sapiens; identical to SEQ ID NO: 6909

SEQ ID NO: 7020 - DNA, 201 bp, Homo sapiens; identical to SEQ ID NO: 6901

SEQ ID NO: 7021 - DNA, 201 bp, Homo sapiens; identical to SEQ ID NO: 6902

SEQ ID NO: 7022 - DNA, 201 bp, Homo sapiens; identical to SEQ ID NO: 6886

SEQ ID NO: 7023 - DNA, 201 bp, Homo sapiens; identical to SEQ ID NO: 6888

SEQ ID NO: 7024 - DNA, 201 bp, Homo sapiens; identical to SEQ ID NO: 6889

SEQ ID NO: 7025 - DNA, 201 bp, Homo sapiens; identical to SEQ ID NO: 6890

SEQ ID NO: 7026 - DNA, 201 bp, Homo sapiens; identical to SEQ ID NO: 6891

SEQ ID NO: 7027 - DNA, 201 bp, Homo sapiens; identical to SEQ ID NO: 6915

SEQ ID NO: 7028 - DNA, 162 bp, Homo sapiens; identical to SEQ ID NO: 6893

SEQ ID NO: 7029 - DNA, 201 bp, Homo sapiens; identical to SEQ ID NO: 6903

SEQ ID NO: 7030 - DNA, 201 bp, Homo sapiens; identical to SEQ ID NO: 6892

SEQ ID NO: 7031 - DNA, 201 bp, Homo sapiens; identical to SEQ ID NO: 6895

SEQ ID NO: 7032 - DNA, 201 bp, Homo sapiens; identical to SEQ ID NO: 6910

SEQ ID NO: 7033 - DNA, 201 bp, Homo sapiens; identical to SEQ ID NO: 6897

SEQ ID NO: 7034 - DNA, 201 bp, Homo sapiens; identical to SEQ ID NO: 6898

SEQ ID NO: 7035 - DNA, 201 bp, Homo sapiens; identical to SEQ ID NO: 6900

SEQ ID NO: 7036 - DNA, 201 bp, Homo sapiens; identical to SEQ ID NO: 6903

SEQ ID NO: 7037 - DNA, 201 bp, Homo sapiens; identical to SEQ ID NO: 6892

SEQ ID NO: 7038 - DNA, 201 bp, Homo sapiens; identical to SEQ ID NO: 6894

SEQ ID NO: 7039 - DNA, 201 bp, Homo sapiens; identical to SEQ ID NO: 6922

SEQ ID NO: 7040 - DNA, 201 bp, Homo sapiens; identical to SEQ ID NO: 6923

SEQ ID NO: 7041 - DNA, 201 bp, Homo sapiens; identical to SEQ ID NO: 6924

SEQ ID NO: 7042 - DNA, 201 bp, Homo sapiens; identical to SEQ ID NO: 6925

SEQ ID NO: 7043 - DNA, 201 bp, Homo sapiens; identical to SEQ ID NO: 6909

SEQ ID NO: 7044 - DNA, 201 bp, Homo sapiens; identical to SEQ ID NO: 6910

SEQ ID NO: 7045 - DNA, 201 bp, Homo sapiens; identical to SEQ ID NO: 6928

SEQ ID NO: 7046 - DNA, 201 bp, Homo sapiens; identical to SEQ ID NO: 6901

SEQ ID NO: 7047 - DNA, 120 bp, Homo sapiens; identical to SEQ ID NO: 6930

SEQ ID NO: 7048 - DNA, 201 bp, Homo sapiens; identical to SEQ ID NO: 6915

SEQ ID NO: 7049 - DNA, 201 bp, Homo sapiens; identical to SEQ ID NO: 6902

SEQ ID NO: 7050 - DNA, 201 bp, Homo sapiens; identical to SEQ ID NO: 6918

SEQ ID NO: 7051 - DNA, 201 bp, Homo sapiens; identical to SEQ ID NO: 6919

SEQ ID NO: 7052 - DNA, 201 bp, Homo sapiens; identical to SEQ ID NO: 6894

SEQ ID NO: 7053 - DNA, 201 bp, Homo sapiens; identical to SEQ ID NO: 6892

SEQ ID NO: 7054 - DNA, 201 bp, Homo sapiens; identical to SEQ ID NO: 6903

SEQ ID NO: 7055 - DNA, 147 bp, Homo sapiens
cccacctctctgagctctgcatttgtctattctccagctgaccctggttctctctcttagcatcctgccttagagccaggcacacactgtgctttctattktacagaagctcttcgtttcagtgtcaaataaacactgtgtaagcta

SEQ ID NO: 7056 - DNA, 201 bp, Homo sapiens; identical to SEQ ID NO: 6910

SEQ ID NO: 7057 - DNA, 201 bp, Homo sapiens; identical to SEQ ID NO: 6909

SEQ ID NO: 7058 - DNA, 201 bp, Homo sapiens; identical to SEQ ID NO: 6915

SEQ ID NO: 7059 - DNA, 201 bp, Homo sapiens; identical to SEQ ID NO: 6894

SEQ ID NO: 7060 - DNA, 201 bp, Homo sapiens; identical to SEQ ID NO: 6903

SEQ ID NO: 7061 - DNA, 201 bp, Homo sapiens; identical to SEQ ID NO: 6966

SEQ ID NO: 7062 - DNA, 201 bp, Homo sapiens; identical to SEQ ID NO: 6910

SEQ ID NO: 7063 - DNA, 201 bp, Homo sapiens; identical to SEQ ID NO: 6909

SEQ ID NO: 7064 - DNA, 201 bp, Homo sapiens; identical to SEQ ID NO: 6915

SEQ ID NO: 7065 - DNA, 201 bp, Homo sapiens
taaagttatagaagcagatgatctgttaatttcctatctaataaatgcctttaattgttctcataatgaagaataagtaggtatccctccatgcccttctrtaataaatatctggaaaaaacattaaacaataggcaaatatatgttatgtgcatttctagaaatacataacacatatatatgtctgtatcttatattcaa

SEQ ID NO: 7066 - DNA, 201 bp, Homo sapiens
tggatgtgaatgaggagggcactgaagcagccgctggcacaggaggtgttatgacagggagaactggacatggaggcccacagtttgtggcagatcatccktttctttttcttattatgcataagataaccaactgcattttatttttcggcagattttcctcaccctaaaactaagcgtgctgcttctgcaaaagatttt

SEQ ID NO: 7067 - DNA, 201 bp, Homo sapiens
ctggcacaggaggtgttatgacagggagaactggacatggaggcccacagtttgtggcagatcatccttttctttttcttattatgcataagataaccaastgcattttatttttcggcagattttcctcaccctaaaactaagcgtgctgcttctgcaaaagatttttgtagatgagctgtgtgcctcagaattgctatt

SEQ ID NO: 7068 - DNA, 201 bp, Homo sapiens
aaagtgtcaataagctgtttggtgagaagtctgcgagcttccgggaagaatatattcgactctgtcagaaatattactcctcagaaccccaggcagtagayttcctagaatgtgcagaagaagctagaaaaaagattaattcctgggtcaagactcaaaccaaaggcaaaatcccaaacttgttacctgaaggttctgtag

SEQ ID NO: 7069 - DNA, 201 bp, Homo sapiens
agaactggacatggaggcccacagtttgtggcagatcatccttttctttttcttattatgcataagataaccaactgcattttatttttcggcagattttsctcaccctaaaactaagcgtgctgcttctgcaaaagatttttgtagatgagctgtgtgcctcagaattgctatttcaaattgccaaaaatttagagatgt

SEQ ID NO: 7070 - DNA, 129 bp, Homo sapiens
tgtaacaactctcagaggagcattgcccrtcagacagcaactcagagaataaccagagaacaaccagattgaaacaatggaggatctttgtgtggcaaacacactctttgccctcaatttattcaagca

SEQ ID NO: 7071 - DNA, 201 bp, Homo sapiens
agtttgtggcagatcatccttttctttttcttattatgcataagataaccaactgcattttatttttcggcagattttcctcaccctaaaactaagcgtgytgcttctgcaaaagatttttgtagatgagctgtgtgcctcagaattgctatttcaaattgccaaaaatttagagatgttttctacatatttctgctcttc

SEQ ID NO: 7072 - DNA, 201 bp, Homo sapiens
gaagggtagttatcctgatgcgattttgcaggcacaagctgcagataaaatccattcatccttccgctctctcagctctgcaatcaatgcatccacagggrattatttactggaaagtgtcaataagctgtttggtgagaagtctgcgagcttccgggaagaatatattcgactctgtcagaaatattactcctcagaacc

SEQ ID NO: 7073 - DNA, 201 bp, Homo sapiens
ttaatgaagtgggagccaatgcagttacccccatgactccagagaactttaccagctgtgggttcatgcagcagatccagaagggtagttatcctgatgcvattttgcaggcacaagctgcagataaaatccattcatccttccgctctctcagctctgcaatcaatgcatccacagggaattatttactggaaagtgtca

SEQ ID NO: 7074 - DNA, 201 bp, Homo sapiens
tcagggatgtcggagaggaatgacctgtttctttctgaagtgttccaccaagccatggtggatgtgaatgaggagggcactgaagcagccgctggcacagsaggtgttatgacagggagaactggacatggaggcccacagtttgtggcagatcatccttttctttttcttattatgcataagataaccaactgcatttta

SEQ ID NO: 7075 - DNA, 201 bp, Homo sapiens
cgagcttccgggaagaatatattcgactctgtcagaaatattactcctcagaaccccaggcagtagacttcctagaatgtgcagaagaagctagaaaaaarattaattcctgggtcaagactcaaaccaaaggcaaaatcccaaacttgttacctgaaggttctgtagatggggataccaggatggtcctggtgaatgctg

SEQ ID NO: 7076 - DNA, 201 bp, Homo sapiens
aatatattcgactctgtcagaaatattactcctcagaaccccaggcagtagacttcctagaatgtgcagaagaagctagaaaaaagattaattcctgggtsaagactcaaaccaaaggcaaaatcccaaacttgttacctgaaggttctgtagatggggataccaggatggtcctggtgaatgctgtctacttcaaaggaa

SEQ ID NO: 7077 - DNA, 201 bp, Homo sapiens
atggtcctggtgaatgctgtctacttcaaaggaaagtggaaaactccatttgagaagaaactaaatgggctttatcctttccgtgtaaactcggctcagcrcacacctgtacagatgatgtacttgcgtgaaaagctaaacattggatacatagaagacctaaaggctcagattctagaactcccatatgctggagatgtt

SEQ ID NO: 7078 - DNA, 201 bp, Homo sapiens; identical to SEQ ID NO: 7065

SEQ ID NO: 7079 - DNA, 201 bp, Homo sapiens; identical to SEQ ID NO: 7066

SEQ ID NO: 7080 - DNA, 201 bp, Homo sapiens; identical to SEQ ID NO: 7067

SEQ ID NO: 7081 - DNA, 201 bp, Homo sapiens; identical to SEQ ID NO: 7068

SEQ ID NO: 7082 - DNA, 201 bp, Homo sapiens; identical to SEQ ID NO: 7069

SEQ ID NO: 7083 - DNA, 201 bp, Homo sapiens; identical to SEQ ID NO: 7071

SEQ ID NO: 7084 - DNA, 201 bp, Homo sapiens
gatggccaagaattccttctttcttttcaaggcacaagctgcagataaaatccattcatccttccgctctctcagctctgcaatcaatgcatccacagggrattatttactggaaagtgtcaataagctgtttggtgagaagtctgcgagcttccgggaagaatatattcgactctgtcagaaatattactcctcagaacc

SEQ ID NO: 7085 - DNA, 201 bp, Homo sapiens; identical to SEQ ID NO: 7074

SEQ ID NO: 7086 - DNA, 201 bp, Homo sapiens; identical to SEQ ID NO: 7075

SEQ ID NO: 7087 - DNA, 201 bp, Homo sapiens; identical to SEQ ID NO: 7076

SEQ ID NO: 7088 - DNA, 201 bp, Homo sapiens; identical to SEQ ID NO: 7077

SEQ ID NO: 7089 - DNA, 201 bp, Homo sapiens
tgaaatcagaggaccaaagtacagatggaaaccatttcctacatcacaaaaacccaagtttacagcttgtactttactttaatgtgtaatactcaactcamggtacaagacaattgcatttaacattgttataaataaaaggaacatcagatcaatcattaagggctccagagtgaacagcatcttcataacttccatgtt

SEQ ID NO: 7090 - DNA, 201 bp, Homo sapiens
tagaagccatgtccaagctaaagccttactttcttactgatggaacgggaacagtcaccccagccaatgcttcaggaataaatgatggtgctgcagctgtygttcttatgaagaagtcagaagctgataaacgtgggcttacacctttagcacggatagtttcctggtcccaagtgggtgtggagccttccattatgggaa

SEQ ID NO: 7091 - DNA, 201 bp, Homo sapiens
ccaagacgtcaagtcggggaactccaacattggggtgtccagaaacactggggtttcaggcgctctgtaaatgcgtccgaggtccgcggttctgcccgcargcccagaccccggcctcacttccgccccgcgccccgcgccccggcctcacgtcccgcccgcggcaggcctgtgggctgcgaggaggagctttgcctagct

SEQ ID NO: 7092 - DNA, 201 bp, Homo sapiens
ctgatggaacgggaacagtcaccccagccaatgcttcaggaataaatgatggtgctgcagctgtcgttcttatgaagaagtcagaagctgataaacgtggrcttacacctttagcacggatagtttcctggtcccaagtgggtgtggagccttccattatgggaataggaccaattccagccataaagcaagctgttacaa

SEQ ID NO: 7093 - DNA, 201 bp, Homo sapiens
aatattgaaggaggggctatagccttgggccaccctcttggagcatctggctgtcgaattcttgtgaccctgttacacacactggagagaatgggcagaartcgtggtgttgcagccctgtgcattgggggtgggatgggaatagcaatgtgtgttcagagagaatgaattgcttaaactttgaacaacctcaatttcttt

SEQ ID NO: 7094 - DNA, 201 bp, Homo sapiens
cgtgggattccagtcctgagctgaacgagagataagtctttgtcaccccccagtctttactgtttcgagaaaccctaagattttttaaaaaaaagcccaaracgtcaagtcggggaactccaacattggggtgtccagaaacactggggtttcaggcgctctgtaaatgcgtccgaggtccgcggttctgcccgcaagccc

SEQ ID NO: 7095 - DNA, 193 bp, Homo sapiens
ttacagcttgtactttactttaatgtgtaatactcaactcaaggtacaagacaattgcatttaacattgttataaataaaaggaacatcagatcaatcatwaagggctccagagtgaacagcatcttcataacttccatgtttatcatctttactttctggatgtaatttaataagatcatcaattcgaagaa

SEQ ID NO: 7096 - DNA, 201 bp, Homo sapiens
caggacaaggttgcagttctgtcccagaacaggacagagaatgcacagaaagctggccattttgacaaagagattgtaccagttttggtgtcaactagaaraggtcttattgaagttaaaacagatgagtttcctcgccatgggagcaacatagaagccatgtccaagctaaagccttactttcttactgatggaacggga

SEQ ID NO: 7097 - DNA, 194 bp, Homo sapiens
tttacagcttgtactttactttaatgtgtaatactcaactcaaggtacaagacaattgcatttaacattgttataaataaaaggaacatcagatcaatcawtaagggctccagagtgaacagcatcttcataacttccatgtttatcatctttactttctggatgtaatttaataagatcatcaattcgaagaa

SEQ ID NO: 7098 - DNA, 201 bp, Homo sapiens
tacagatggaaaccatttcctacatcacaaaaacccaagtttacagcttgtactttactttaatgtgtaatactcaactcaaggtacaagacaattgcatytaacattgttataaataaaaggaacatcagatcaatcattaagggctccagagtgaacagcatcttcataacttccatgtttatcatctttactttctgg

SEQ ID NO: 7099 - DNA, 201 bp, Homo sapiens
gcccctcacgcgagcgaatgactggcgccaggagaaacgcataggacctcccgaagccgccgagagcaaaaggacccatcagagctgtgctgagacccgcygcgggccgggctcgcactcgagattctcgcccgtgggattccagtcctgagctgaacgagagataagtctttgtcaccccccagtctttactgtttcgag

SEQ ID NO: 7100 - DNA, 201 bp, Homo sapiens; identical to SEQ ID NO: 7089

SEQ ID NO: 7101 - DNA, 201 bp, Homo sapiens; identical to SEQ ID NO: 7090

SEQ ID NO: 7102 - DNA, 201 bp, Homo sapiens; identical to SEQ ID NO: 7091

SEQ ID NO: 7103 - DNA, 201 bp, Homo sapiens; identical to SEQ ID NO: 7092

SEQ ID NO: 7104 - DNA, 201 bp, Homo sapiens; identical to SEQ ID NO: 7093

SEQ ID NO: 7105 - DNA, 201 bp, Homo sapiens; identical to SEQ ID NO: 7094

SEQ ID NO: 7106 - DNA, 201 bp, Homo sapiens
ttacagcttgtactttactttaatgtgtaatactcaactcaaggtacaagacaattgcatttaacattgttataaataaaaggaacatcagatcaatcatwaagggctccagagtgaacagcatcttcataacttccatgtttatcatctttactttctggcattttagatttttacgttctgggttaacctgggcctcat

SEQ ID NO: 7107 - DNA, 201 bp, Homo sapiens; identical to SEQ ID NO: 7096

SEQ ID NO: 7108 - DNA, 201 bp, Homo sapiens
tttacagcttgtactttactttaatgtgtaatactcaactcaaggtacaagacaattgcatttaacattgttataaataaaaggaacatcagatcaatcawtaagggctccagagtgaacagcatcttcataacttccatgtttatcatctttactttctggcattttagatttttacgttctgggttaacctgggcctca

SEQ ID NO: 7109 - DNA, 201 bp, Homo sapiens; identical to SEQ ID NO: 7098

SEQ ID NO: 7110 - DNA, 201 bp, Homo sapiens; identical to SEQ ID NO: 7099

SEQ ID NO: 7111 - DNA, 201 bp, Homo sapiens; identical to SEQ ID NO: 7089

SEQ ID NO: 7112 - DNA, 201 bp, Homo sapiens; identical to SEQ ID NO: 7090

SEQ ID NO: 7113 - DNA, 201 bp, Homo sapiens; identical to SEQ ID NO: 7092

SEQ ID NO: 7114 - DNA, 201 bp, Homo sapiens; identical to SEQ ID NO: 7093

SEQ ID NO: 7115 - DNA, 193 bp, Homo sapiens; identical to SEQ ID NO: 7095

SEQ ID NO: 7116 - DNA, 201 bp, Homo sapiens; identical to SEQ ID NO: 7096

SEQ ID NO: 7117 - DNA, 194 bp, Homo sapiens; identical to SEQ ID NO: 7097

SEQ ID NO: 7118 - DNA, 201 bp, Homo sapiens; identical to SEQ ID NO: 7098

SEQ ID NO: 7119 - DNA, 201 bp, Homo sapiens
aagtagttgcccaagggccagctcagtttatccttcggagagacaaggatatgcatgattcttaaccaggctatatgttaaaaaaaaattggaaaatgcartacattttttattatacaaactacagaatgagtatgcaagttttatttatcaaaatgtaatggatttttaaaggctgagaaattttccttatacctacct

SEQ ID NO: 7120 - DNA, 201 bp, Homo sapiens
gctccaccatgacaggaacctattctggccagtttgtcatggagggattcctgaacctaaagtggtcacgctttgcccgagtggttctgactcgctctatygccatcatccccactctgcttgttgctgtcttccaagatgtagagcatctaacagggatgaatgactttctgaatgttctacagagcttacagcttccct

SEQ ID NO: 7121 - DNA, 201 bp, Homo sapiens
tggtggagctctggagtcagaggaaatgggtgtcttcagcacaaagctgctgcttttacttcagccacttctgacatttttacataccgagcctgagattrtgtgattatctcaaatcaaatcactttgatggagataaataatcaaaactgttttatagtcattgatttggtgagaacagtaatggaaaatggtgttgaa

SEQ ID NO: 7122 - DNA, 201 bp, Homo sapiens
acatgtatctttgccctgggtctgggtgggtccagtcagtctcagatttacaagcatttaggagcctaggtaaaagctgctagtattcttttaaaagttayatttatgacttgcaatgatagaaaactccttccaattaaatggcattttataatattatgtgtgtacttcacagtgttaaaatactctgggtgcaataaa

SEQ ID NO: 7123 - DNA, 201 bp, Homo sapiens
ctgacatttttacataccgagcctgagattgtgtgattatctcaaatcaaatcactttgatggagataaataatcaaaactgttttatagtcattgatttkgtgagaacagtaatggaaaatggtgttgaaggacttctcatttttggagctttccttccagagtcctggctgattggtgttcgctgttcatctgagcccc

SEQ ID NO: 7124 - DNA, 201 bp, Homo sapiens
cttcggagagacaaggatatgcatgattcttaaccaggctatatgttaaaaaaaaattggaaaatgcaatacattttttattatacaaactacagaatgartatgcaagttttatttatcaaaatgtaatggatttttaaaggctgagaaattttccttatacctaccttttcagttattttaattataccaaattatcaa

SEQ ID NO: 7125 - DNA, 201 bp, Homo sapiens
gttgagggtggggacagaatcgtcatgtttttctgatgcaccgctctgcttcatgcccaagatgacttgcgaggcaatctcaggagctgtggacttaaccrttgcaaagcacactgtctttctcagcgttctctgcaagtcagtaggtgttagtatggttgcaaagttcactgtctcagcaaagttgaactgggctacctc

SEQ ID NO: 7126 - DNA, 201 bp, Homo sapiens
tggaaaagactttgtttcatgtgtatttgaaagatggaattattttttccttcctgacctaaccttagaactggattagggtgggatctttgaaaagctgmcatttgctgctatcattccaacactaaattcttaagtagttgcccaagggccagctcagtttatccttcggagagacaaggatatgcatgattcttaacc

SEQ ID NO: 7127 - DNA, 201 bp, Homo sapiens; identical to SEQ ID NO: 7119

SEQ ID NO: 7128 - DNA, 201 bp, Homo sapiens; identical to SEQ ID NO: 7120

SEQ ID NO: 7129 - DNA, 201 bp, Homo sapiens; identical to SEQ ID NO: 7121

SEQ ID NO: 7130 - DNA, 201 bp, Homo sapiens
acatgtatctttgccctgggtctgggtgggtccagtcagtctcagatttacaagcatttaggagcctaggtaaaagctgctagtattcttttaaaagttayatttatgacttgcaatgatagaaaactccttccaattaaatggcattttataatattatgtgtgtacttcacagtgttaaaaataccctcatacgttatt

SEQ ID NO: 7131 - DNA, 140 bp, Homo sapiens
agccagcttggcgctggctcccggaatatggagccctggrcgcgggggcggcgtgtcaggtggttgcggagctggtaagaatcatattctaagaactcagccactcaggtatccaccatggtgctgggtcctgaacagaa

SEQ ID NO: 7132 - DNA, 108 bp, Homo sapiens
agccagcktggcgctggctcccggaatatggagccctgggcgcgggggcggcgtgtcaggtggttgcggagctggtaagaatcatattctaagaactcagccactcag

SEQ ID NO: 7133 - DNA, 201 bp, Homo sapiens; identical to SEQ ID NO: 7126

SEQ ID NO: 7134 - DNA, 201 bp, Homo sapiens; identical to SEQ ID NO: 7123

SEQ ID NO: 7135 - DNA, 201 bp, Homo sapiens; identical to SEQ ID NO: 7124

SEQ ID NO: 7136 - DNA, 201 bp, Homo sapiens
aagccacctctcagcagaatcgtcatgtttttctgatgcaccgctctgcttcatgcccaagatgacttgcgaggcaatctcaggagctgtggacttaaccrttgcaaagcacactgtctttctcagcgttctctgcaagtcagtaggtgttagtatggttgcaaagttcactgtctcagcaaagttgaactgggctacctc

SEQ ID NO: 7137 - DNA, 201 bp, Homo sapiens; identical to SEQ ID NO: 7119

SEQ ID NO: 7138 - DNA, 201 bp, Homo sapiens; identical to SEQ ID NO: 7120

SEQ ID NO: 7139 - DNA, 201 bp, Homo sapiens; identical to SEQ ID NO: 7121

SEQ ID NO: 7140 - DNA, 201 bp, Homo sapiens; identical to SEQ ID NO: 7130

SEQ ID NO: 7141 - DNA, 201 bp, Homo sapiens; identical to SEQ ID NO: 7123

SEQ ID NO: 7142 - DNA, 201 bp, Homo sapiens; identical to SEQ ID NO: 7124

SEQ ID NO: 7143 - DNA, 111 bp, Homo sapiens
ggagccctggrcgcgggggcggcgtgtcaggtggttgcggagctggtaagcatggtgctgggtcctgaacagaagatgtcagatgacagtgtttctggagatcatggggag

SEQ ID NO: 7144 - DNA, 201 bp, Homo sapiens; identical to SEQ ID NO: 7136

SEQ ID NO: 7145 - DNA, 201 bp, Homo sapiens; identical to SEQ ID NO: 7126

SEQ ID NO: 7146 - DNA, 201 bp, Homo sapiens; identical to SEQ ID NO: 7120

SEQ ID NO: 7147 - DNA, 201 bp, Homo sapiens
gagacgggatttcaccatgttgcccaggctggtgttgaactcatgagctcaagtaatctgctggccttggcctcccaaagtgctgagattataggcgtgarccactgcatccagctcactcctcatttctttctagccccaaaggtgttgagtcagcaaatcctgcagcctttgtgtgactttgagcatcactttcccctt

SEQ ID NO: 7148 - DNA, 157 bp, Homo sapiens
cccgggttcaagagattctcctgtctcagcctcccgagtagctgggactacaggtaygtgccaccacacctggctaatttttgtatttttagtagagacaagagttacaccatattggccaggatcttttgctttctatagcttcaaaatgttctta

SEQ ID NO: 7149 - DNA, 201 bp, Homo sapiens
cgctactttgccattacttcacctttcaagtaccagagcctgctgaccaagaataaggcccgggtgatcattctgatggtgtggattgtgtcaggccttayctccttcttgcccattcagatgcactggtaccgggccacccaccaggaagccatcaactgctatgccaatgagacctgctgtgacttcttcacgaaccaa

SEQ ID NO: 7150 - DNA, 181 bp, Homo sapiens
ccactcctcttatttgctcacacggggtattttaggcagggatttgaggagcagcttcagttgttttcccgagcaaagtctaaagtttacagtaaataaawtgtttgaccatgccttcattgcacctgtttctccaaaaccccttgactggagtgctgttgcctcccccactggaaaccgc

SEQ ID NO: 7151 - DNA, 201 bp, Homo sapiens
tgggtccgcctgctgaggcgcccccagccagtgcgctcacctgccagactgcgcgccatggggcaacccgggaacggcagcgccttcttgctggcacccartggaagccatgcgccggaccacgacgtcacgcaggaaagggacgaggtgtgggtggtgggcatgggcatcgtcatgtctctcatcgtcctggccatcgtg

SEQ ID NO: 7152 - DNA, 201 bp, Homo sapiens
aatgagacctgctgtgacttcttcacgaaccaagcctatgccattgcctcttccatcgtgtccttctacgttcccctggtgatcatggtcttcgtctactscagggtctttcaggaggccaaaaggcagctccagaagattgacaaatctgagggccgcttccatgtccagaaccttagccaggtggagcaggatgggcgg

SEQ ID NO: 7153 - DNA, 201 bp, Homo sapiens
cccgctccagataaaatccaaagggtaaaactgtcttcatgcctgcaaattcctaaggagggcacctaaagtacttgacagcgagtgtgctgaggaaatcrgcagctgttgaagtcacctcctgtgctcttgccaaatgtttgaaagggaatacactgggttaccgggtgtatgttgggaggggagcattatcagtgctcg

SEQ ID NO: 7154 - DNA, 201 bp, Homo sapiens
tgccaccacacctggctaatttttgtatttttagtagagacaagagttacaccatattggccaggatcttttgctttctatagcttcaaaatgttcttaawgttaagacattcttaatactctgaaccatatgaatttgccattttggtaagtcacagacgccagatggtggcaatttcacatggcacaacccgaaagatt

SEQ ID NO: 7155 - DNA, 201 bp, Homo sapiens
atattttcatgacttttccatgtatctacctcactattcaagtattaggggtaatatattgctgctggtaatttgtatctgaaggagattttccttcctamacccttggacttgaggattttgagtatctcggacctttcagctgtgaacatggactcttcccccactcctcttatttgctcacacggggtattttaggca

SEQ ID NO: 7156 - DNA, 201 bp, Homo sapiens
gtgtgctgccctctgccttgagacctcaagccgcgcaggcgcccagggcaggcaggtagcggccacagaagagccaaaagctcccgggttggctggtaagsacaccacctccagctttagccctctggggccagccagggtagccgggaagcagtggtggcccgccctccagggagcagttgggccccgcccgggccagcc

SEQ ID NO: 7157 - DNA, 201 bp, Homo sapiens
gagtgtgcaggacgagtccccaccacacccacaccacagccgctgaatgaggcttccaggcgtccgctcgcggcccgcagagccccgccgtgggtccgccygctgaggcgcccccagccagtgcgctcacctgccagactgcgcgccatggggcaacccgggaacggcagcgccttcttgctggcacccaatggaagccat

SEQ ID NO: 7158 - DNA, 201 bp, Homo sapiens
cccacaccacagccgctgaatgaggcttccaggcgtccgctcgcggcccgcagagccccgccgtgggtccgcctgctgaggcgcccccagccagtgcgctyacctgccagactgcgcgccatggggcaacccgggaacggcagcgccttcttgctggcacccaatggaagccatgcgccggaccacgacgtcacgcaggaa

SEQ ID NO: 7159 - DNA, 201 bp, Homo sapiens
ggtccgcctgctgaggcgcccccagccagtgcgctcacctgccagactgcgcgccatggggcaacccgggaacggcagcgccttcttgctggcacccaatrgaagccatgcgccggaccacgacgtcacgcaggaaagggacgaggtgtgggtggtgggcatgggcatcgtcatgtctctcatcgtcctggccatcgtgtt

SEQ ID NO: 7160 - DNA, 201 bp, Homo sapiens
attctggtttcaatccccttatctactgccggagcccagatttcaggattgccttccaggagcttctgtgcctgcgcaggtcttctttgaaggcctatggsaatggctactccagcaacggcaacacaggggagcagagtggatatcacgtggaacaggagaaagaaaataaactgctgtgtgaagacctcccaggcacgg

SEQ ID NO: 7161 - DNA, 201 bp, Homo sapiens
ctcacctgccagactgcgcgccatggggcaacccgggaacggcagcgccttcttgctggcacccaatggaagccatgcgccggaccacgacgtcacgcagsaaagggacgaggtgtgggtggtgggcatgggcatcgtcatgtctctcatcgtcctggccatcgtgtttggcaatgtgctggtcatcacagccattgccaa

SEQ ID NO: 7162 - DNA, 201 bp, Homo sapiens
ccagagcctgctgaccaagaataaggcccgggtgatcattctgatggtgtggattgtgtcaggccttacctccttcttgcccattcagatgcactggtacmgggccacccaccaggaagccatcaactgctatgccaatgagacctgctgtgacttcttcacgaaccaagcctatgccattgcctcttccatcgtgtcctt

SEQ ID NO: 7163 - DNA, 201 bp, Homo sapiens
atgtgctggtcatcacagccattgccaagttcgagcgtctgcagacggtcaccaactacttcatcacttcactggcctgtgctgatctggtcatgggcctrgcagtggtgccctttggggccgcccatattcttatgaaaatgtggacttttggcaacttctggtgcgagttttggacttccattgatgtgctgtgcgtca

SEQ ID NO: 7164 - DNA, 201 bp, Homo sapiens
caaaatgttcttaatgttaagacattcttaatactctgaaccatatgaatttgccattttggtaagtcacagacgccagatggtggcaatttcacatggcrcaacccgaaagattaacaaactatccagcagatgaaaggattttttttagtttcattgggtttactgaagaaattgtttgaattctcattgcatctccag

SEQ ID NO: 7165 - DNA, 201 bp, Homo sapiens
caggggagcagagtggatatcacgtggaacaggagaaagaaaataaactgctgtgtgaagacctcccaggcacggaagactttgtgggccatcaaggtacygtgcctagcgataacattgattcacaagggaggaattgtagtacaaatgactcactgctgtaaagcagtttttctacttttaaagaccccccccccccaa

SEQ ID NO: 7166 - DNA, 201 bp, Homo sapiens
agatgctcctggtgttgctggtgctctcgtggctgccgcatgggggcgccctgtctctggccgaggcgagccgcgcaagtttcccgggaccctcagagttrcactccgaagactccagattccgagagttgcggaaacgctacgaggacctgctaaccaggctgcgggccaaccagagctgggaagattcgaacaccgacc

SEQ ID NO: 7167 - DNA, 201 bp, Homo sapiens
gttccggctgtccccgacggcgtcaaggtcgtgggacgtgacacgaccgctgcggcgtcagctcagccttgcaagaccccaggcgcccgcgctgcacctgmgactgtcgccgccgccgtcgcagtcggaccaactgctggcagaatcttcgtccgcacggccccagctggagttgcacttgcggccgcaagccgccagggg

SEQ ID NO: 7168 - DNA, 201 bp, Homo sapiens
gctcctggtgttgctggtgctctcgtggctgccgcatgggggcgccctgtctctggccgaggcgagccgcgcaagtttcccgggaccctcagagttgcacwccgaagactccagattccgagagttgcggaaacgctacgaggacctgctaaccaggctgcgggccaaccagagctgggaagattcgaacaccgacctcgt

SEQ ID NO: 7169 - DNA, 201 bp, Homo sapiens
ggtccgcgcgtcgctggaagacctgggctgggccgattgggtgctgtcgccacgggaggtgcaagtgaccatgtgcatcggcgcgtgcccgagccagttcsgggcggcaaacatgcacgcgcagatcaagacgagcctgcaccgcctgaagcccgacacggtgccagcgccctgctgcgtgcccgccagctacaatcccat

SEQ ID NO: 7170 - DNA, 201 bp, Homo sapiens
accgacaccggggtgtcgctccagacctatgatgacttgttagccaaagactgccactgcatatgagcagtcctggtccttccactgtgcacctgcgcggrggacgcgacctcagttgtcctgccctgtggaatgggctcaaggttcctgagacacccgattcctgcccaaacagctgtatttatataagtctgttattta

SEQ ID NO: 7171 - DNA, 201 bp, Homo sapiens
acaccggggtgtcgctccagacctatgatgacttgttagccaaagactgccactgcatatgagcagtcctggtccttccactgtgcacctgcgcgggggasgcgacctcagttgtcctgccctgtggaatgggctcaaggttcctgagacacccgattcctgcccaaacagctgtatttatataagtctgttatttattat

SEQ ID NO: 7172 - DNA, 201 bp, Homo sapiens
cttgttagccaaagactgccactgcatatgagcagtcctggtccttccactgtgcacctgcgcgggggacgcgacctcagttgtcctgccctgtggaatgsgctcaaggttcctgagacacccgattcctgcccaaacagctgtatttatataagtctgttatttattattaatttattggggtgaccttcttggggactc

SEQ ID NO: 7173 - DNA, 201 bp, Homo sapiens
cttccactgtgcacctgcgcgggggacgcgacctcagttgtcctgccctgtggaatgggctcaaggttcctgagacacccgattcctgcccaaacagctgyatttatataagtctgttatttattattaatttattggggtgaccttcttggggactcgggggctggtctgatggaactgtgtatttatttaaaactctgg

SEQ ID NO: 7174 - DNA, 201 bp, Homo sapiens
ccgacctcgtcccggcccctgcagtccggatactcacgccagaagtgcggctgggatccggcggccacctgcacctgcgtatctctcgggccgcccttccygaggggctccccgaggcctcccgccttcaccgggctctgttccggctgtccccgacggcgtcaaggtcgtgggacgtgacacgaccgctgcggcgtcagc

SEQ ID NO: 7175 - DNA, 151 bp, Homo sapiens
actcccaggctggaatggtgtcctcatatcgaggaagaggatactgaggcycagaaatgtgccctagctttactaggagcgcccccacctaaagatcctccccctaaatacacccccagaccccgcccagctgtggtcattggagtgttta

SEQ ID NO: 7176 - DNA, 201 bp, Homo sapiens
gggccgcccttcccgaggggctccccgaggcctcccgccttcaccgggctctgttccggctgtccccgacggcgtcaaggtcgtgggacgtgacacgacckctgcggcgtcagctcagccttgcaagaccccaggcgcccgcgctgcacctgcgactgtcgccgccgccgtcgcagtcggaccaactgctggcagaatctt

SEQ ID NO: 7177 - DNA, 201 bp, Homo sapiens
actgctggcagaatcttcgtccgcacggccccagctggagttgcacttgcggccgcaagccgccagggggcgccgcagagcgcgtgcgcgcaacggggacsactgtccgctcgggcccgggcgttgctgccgtctgcacacggtccgcgcgtcgctggaagacctgggctgggccgattgggtgctgtcgccacgggaggt

SEQ ID NO: 7178 - DNA, 201 bp, Homo sapiens
acaaagtccggggactataaaggccggtccggcagcatctggtcagtcccagctcagagccgcaacctgcacagccatgcccgggcaagaactcaggacgstgaatggctctcagatgctcctggtgttgctggtgctctcgtggctgccgcatgggggcgccctgtctctggccgaggcgagccgcgcaagtttcccggg

SEQ ID NO: 7179 - DNA, 201 bp, Homo sapiens; identical to SEQ ID NO: 7166

SEQ ID NO: 7180 - DNA, 201 bp, Homo sapiens; identical to SEQ ID NO: 7167

SEQ ID NO: 7181 - DNA, 201 bp, Homo sapiens; identical to SEQ ID NO: 7168

SEQ ID NO: 7182 - DNA, 201 bp, Homo sapiens; identical to SEQ ID NO: 7169

SEQ ID NO: 7183 - DNA, 201 bp, Homo sapiens; identical to SEQ ID NO: 7170

SEQ ID NO: 7184 - DNA, 201 bp, Homo sapiens; identical to SEQ ID NO: 7171

SEQ ID NO: 7185 - DNA, 201 bp, Homo sapiens; identical to SEQ ID NO: 7172

SEQ ID NO: 7186 - DNA, 201 bp, Homo sapiens; identical to SEQ ID NO: 7173

SEQ ID NO: 7187 - DNA, 201 bp, Homo sapiens; identical to SEQ ID NO: 7174

SEQ ID NO: 7188 - DNA, 201 bp, Homo sapiens
gacaaggagagccaggaggagctgggccccaacctcatccaaaagcacagactcccaggctggaatggtgtcctcatatcgaggaagaggatactgaggcycagaaatgtgccctagctttactaggagcgcccccacctaaagatcctccccctaaatacacccccagaccccgcccagctgtggtcattggagtgttta

SEQ ID NO: 7189 - DNA, 201 bp, Homo sapiens; identical to SEQ ID NO: 7176

SEQ ID NO: 7190 - DNA, 201 bp, Homo sapiens; identical to SEQ ID NO: 7177

SEQ ID NO: 7191 - DNA, 201 bp, Homo sapiens; identical to SEQ ID NO: 7178

SEQ ID NO: 7192 - DNA, 201 bp, Homo sapiens
ttgccagccctggtcatgcagtggccatggagaatgtgtagaaatcatcaataattacacctgcaactgtgatgtggggtactatgggccccagtgtcagyttgtgattcagtgtgagcctttggaggccccagagctgggtaccatggactgtactcaccctttgggaaacttcagcttcagctcacagtgtgccttcag

SEQ ID NO: 7193 - DNA, 201 bp, Homo sapiens
ctgcaactgtgatgtggggtactatgggccccagtgtcagtttgtgattcagtgtgagcctttggaggccccagagctgggtaccatggactgtactcacyctttgggaaacttcagcttcagctcacagtgtgccttcagctgctctgaaggaacaaacttaactgggattgaagaaaccacctgtggaccatttggaaa

SEQ ID NO: 7194 - DNA, 201 bp, Homo sapiens
agtatctggagaagactctgcctttcagtcgttcttactactggataggaatccggaagataggaggaatatggacgtgggtgggaaccaacaaatctctyactgaagaagcagagaactggggagatggtgagcccaacaacaagaagaacaaggaggactgcgtggagatctatatcaagagaaacaaagatgcaggca

SEQ ID NO: 7195 - DNA, 201 bp, Homo sapiens
cagcttccatttcgcccctcatttatccctcaacccccagcccacaggtgtttatacagctcagctttttgtcttttctgaggagaaacaaataagaccayaaagggaaaggattcatgtggaatataaagatggctgactttgctctttcttgactcttgttttcagtttcaattcagtgctgtacttgatgacagacac

SEQ ID NO: 7196 - DNA, 201 bp, Homo sapiens
gtgtttccttcagtgcatctgggaagatttctacctgaccaacagttccttcagcttccatttcgcccctcatttatccctcaacccccagcccacaggtstttatacagctcagctttttgtcttttctgaggagaaacaaataagaccataaagggaaaggattcatgtggaatataaagatggctgactttgctcttt

SEQ ID NO: 7197 - DNA, 201 bp, Homo sapiens
gagatcctttaaatccttccatgaaacgttttgtgtggtggcacctcctacgtcaaacatgaagtgtgtttccttcagtgcatctgggaagatttctaccygaccaacagttccttcagcttccatttcgcccctcatttatccctcaacccccagcccacaggtgtttatacagctcagctttttgtcttttctgaggag

SEQ ID NO: 7198 - DNA, 201 bp, Homo sapiens
gttcttactactggataggaatccggaagataggaggaatatggacgtgggtgggaaccaacaaatctcttactgaagaagcagagaactggggagatggygagcccaacaacaagaagaacaaggaggactgcgtggagatctatatcaagagaaacaaagatgcaggcaaatggaacgatgacgcctgccacaaactaa

SEQ ID NO: 7199 - DNA, 201 bp, Homo sapiens; identical to SEQ ID NO: 7195

SEQ ID NO: 7200 - DNA, 201 bp, Homo sapiens; identical to SEQ ID NO: 7196

SEQ ID NO: 7201 - DNA, 201 bp, Homo sapiens
gctgcaagtgacatctctttgatgtcatatggaagagttaaaacaggtggagaaattccttgattcacaatgaaatgctctcctttcccctgcccccagamcttttatccacttacctagattctacatattctttaaatttcatctcaggcctccctcaaccccaccacttcttttataactagtcctttactaatccaa

SEQ ID NO: 7202 - DNA, 201 bp, Homo sapiens; identical to SEQ ID NO: 7197

SEQ ID NO: 7203 - DNA, 201 bp, Homo sapiens; identical to SEQ ID NO: 7192

SEQ ID NO: 7204 - DNA, 201 bp, Homo sapiens; identical to SEQ ID NO: 7193

SEQ ID NO: 7205 - DNA, 201 bp, Homo sapiens; identical to SEQ ID NO: 7194

SEQ ID NO: 7206 - DNA, 201 bp, Homo sapiens; identical to SEQ ID NO: 7198

SEQ ID NO: 7207 - DNA, 201 bp, Homo sapiens; identical to SEQ ID NO: 7192

SEQ ID NO: 7208 - DNA, 201 bp, Homo sapiens; identical to SEQ ID NO: 7193

SEQ ID NO: 7209 - DNA, 201 bp, Homo sapiens; identical to SEQ ID NO: 7194

SEQ ID NO: 7210 - DNA, 201 bp, Homo sapiens; identical to SEQ ID NO: 7201

SEQ ID NO: 7211 - DNA, 201 bp, Homo sapiens; identical to SEQ ID NO: 7198

SEQ ID NO: 7212 - DNA, 201 bp, Homo sapiens; identical to SEQ ID NO: 7192

SEQ ID NO: 7213 - DNA, 201 bp, Homo sapiens; identical to SEQ ID NO: 7193

SEQ ID NO: 7214 - DNA, 201 bp, Homo sapiens; identical to SEQ ID NO: 7194

SEQ ID NO: 7215 - DNA, 201 bp, Homo sapiens; identical to SEQ ID NO: 7201

SEQ ID NO: 7216 - DNA, 201 bp, Homo sapiens; identical to SEQ ID NO: 7198

SEQ ID NO: 7217 - DNA, 201 bp, Homo sapiens; identical to SEQ ID NO: 7195

SEQ ID NO: 7218 - DNA, 201 bp, Homo sapiens; identical to SEQ ID NO: 7196

SEQ ID NO: 7219 - DNA, 201 bp, Homo sapiens; identical to SEQ ID NO: 7201

SEQ ID NO: 7220 - DNA, 201 bp, Homo sapiens; identical to SEQ ID NO: 7197

SEQ ID NO: 7221 - DNA, 201 bp, Homo sapiens; identical to SEQ ID NO: 7192

SEQ ID NO: 7222 - DNA, 201 bp, Homo sapiens; identical to SEQ ID NO: 7193

SEQ ID NO: 7223 - DNA, 201 bp, Homo sapiens; identical to SEQ ID NO: 7194

SEQ ID NO: 7224 - DNA, 201 bp, Homo sapiens; identical to SEQ ID NO: 7198

SEQ ID NO: 7225 - DNA, 201 bp, Homo sapiens
accagagcgttcacggtgagcatgaaaggcagccgcgtggagcgcgcggaagaggcacttgcccacatgggcagctccgtgttcagtggaatcacacttasaaaatttggagggattgtggtgttggcttttgccaaatctcaaattttccagatattctacttcaggatgtatttggccatggtcttactgggagccact

SEQ ID NO: 7226 - DNA, 201 bp, Homo sapiens
tttctggtgaccatggtcctcctgggctgtgagctctggtctgcagtcatcatgtgtgccaccatcgccatggtcttggtcaacatgtttggagttatgtrgctctggggcatcagtctgaacgctgtatccttggtcaacctggtgatgagctgtggcatctccgtggagttctgcagccacataaccagagcgttcacg

SEQ ID NO: 7227 - DNA, 201 bp, Homo sapiens
atatttctggtgaccatggtcctcctgggctgtgagctctggtctgcagtcatcatgtgtgccaccatcgccatggtcttggtcaacatgtttggagttaygtggctctggggcatcagtctgaacgctgtatccttggtcaacctggtgatgagctgtggcatctccgtggagttctgcagccacataaccagagcgttc

SEQ ID NO: 7228 - DNA, 201 bp, Homo sapiens
ttctgcagttaacatcctccttggccatggcaccagggtcggagccacgtacttcatgacctaccacaccgtgctgcagacctctgctgactttattgacrctctgaagaaagcccgacttatagccagtaatgtcaccgaaaccatgggcattaacggcagtgcctaccgagtatttccttacagtgtgttttatgtctt

SEQ ID NO: 7229 - DNA, 201 bp, Homo sapiens
tgggctgtgagctctggtctgcagtcatcatgtgtgccaccatcgccatggtcttggtcaacatgtttggagttatgtggctctggggcatcagtctgaaygctgtatccttggtcaacctggtgatgagctgtggcatctccgtggagttctgcagccacataaccagagcgttcacggtgagcatgaaaggcagccgcg

SEQ ID NO: 7230 - DNA, 201 bp, Homo sapiens
cagtgtgttttatgtcttctacgaacagtacctgaccatcattgacgacactatcttcaacctcggtgtgtccctgggcgcgatatttctggtgaccatgktcctcctgggctgtgagctctggtctgcagtcatcatgtgtgccaccatcgccatggtcttggtcaacatgtttggagttatgtggctctggggcatcag

SEQ ID NO: 7231 - DNA, 201 bp, Homo sapiens
ttgaagatgaactaaatcgtgaaagtgacagtgatgtcttcaccgttgtaattagctatgccatcatgtttctatatatttccctagccttggggcacatsaaaagctgtcgcaggcttctggtggattcgaaggtctcactaggcatcgcgggcatcttgatcgtgctgagctcggtggcttgctccttgggtgtcttca

SEQ ID NO: 7232 - DNA, 201 bp, Homo sapiens
agtagatattggattggatcagtctctttcgatgccagatgactcctacatggtggattatttcaaatccatcagtcagtacctgcatgcgggtccgcctrtgtactttgtcctggaggaagggcacgactacacttcttccaaggggcagaacatggtgtgcggcggcatgggctgcaacaatgattccctggtgcagca

SEQ ID NO: 7233 - DNA, 201 bp, Homo sapiens
actgcaccaggttcttgacttacaaatagccatcgaaaacattactgcctcttatgacaatgagactgtgacacttcaagacatctgcttggcccctcttycaccgtataacacgaactgcaccattttgagtgtgttaaattacttccagaacagccattccgtgctggaccacaagaaaggggacgacttctttgtgta

SEQ ID NO: 7234 - DNA, 201 bp, Homo sapiens
ttcctttcggataaccctaaccccaagtgtggcaaagggggacatgctgcctatagttctgcagttaacatcctccttggccatggcaccagggtcggagycacgtacttcatgacctaccacaccgtgctgcagacctctgctgactttattgacgctctgaagaaagcccgacttatagccagtaatgtcaccgaaacc

SEQ ID NO: 7235 - DNA, 201 bp, Homo sapiens
taccatcactcctgtgttttcagattttccagtccatgggatggagcccatgaacaatgccaccaaaggctgtgacgagtctgtggatgaggtcacagcaycatgtagctgccaagactgctctattgtctgtggccccaagccccagcccccacctcctcctgctccctggacgatccttggcttggacgccatgtatgt

SEQ ID NO: 7236 - DNA, 201 bp, Homo sapiens
ctgctcctgctcctccgctcctcctgcgcggggtgctgaaacagcccggggaagtagagccgcctccggggagcccaaccagccgaacgccgccggcgtcmgcagccttgcgcggccacagcatgaccgctcgcggcctggcccttggcctcctcctgctgctactgtgtccagcgcaggtgttttcacagtcctgtgttt

SEQ ID NO: 7237 - DNA, 201 bp, Homo sapiens
agtggacaatatcactgaccagttctgcaatgcttcagtggttgaccctgcctgcgttcgctgcaggcctctgactccggaaggcaaacagaggcctcagkggggagacttcatgagattcctgcccatgttcctttcggataaccctaaccccaagtgtggcaaagggggacatgctgcctatagttctgcagttaacat

SEQ ID NO: 7238 - DNA, 201 bp, Homo sapiens
gttacaatactacgtcggacagagttttgccaatgcaatgtacaatgcctgccgggatgtggaggccccctcaagtaatgacaaggccctgggactcctgkgtgggaaggacgctgacgcctgtaatgccaccaactggattgaatacatgttcaataaggacaatggacaggcaccttttaccatcactcctgtgttttc

SEQ ID NO: 7239 - DNA, 201 bp, Homo sapiens
acagtcgtcttgctgtcgagtggacaatatcactgaccagttctgcaatgcttcagtggttgaccctgcctgcgttcgctgcaggcctctgactccggaargcaaacagaggcctcaggggggagacttcatgagattcctgcccatgttcctttcggataaccctaaccccaagtgtggcaaagggggacatgctgccta

SEQ ID NO: 7240 - DNA, 201 bp, Homo sapiens
tgattccctggtgcagcagatatttaacgcggcgcagctggacaactatacccgaataggcttcgccccctcgtcctggatcgacgattatttcgactggrtgaagccacagtcgtcttgctgtcgagtggacaatatcactgaccagttctgcaatgcttcagtggttgaccctgcctgcgttcgctgcaggcctctgac

SEQ ID NO: 7241 - DNA, 201 bp, Homo sapiens
ctttcggataaccctaaccccaagtgtggcaaagggggacatgctgcctatagttctgcagttaacatcctccttggccatggcaccagggtcggagccaygtacttcatgacctaccacaccgtgctgcagacctctgctgactttattgacgctctgaagaaagcccgacttatagccagtaatgtcaccgaaaccatg

SEQ ID NO: 7242 - DNA, 201 bp, Homo sapiens
aaaaatcggctagacatcttttgctgtgtcagaggtgctgaagatggaacaagcgtccaggcctcagagagctgtttgtttcgcttcttcaaaaactcctrttctccacttctgctaaaggactggatgagaccaattgtgatagcaatatttgtgggtgttctgtcattcagcatcgcagtcctgaacaaagtagatatt

SEQ ID NO: 7243 - DNA, 201 bp, Homo sapiens
gagactgtagcatttttcttaggagcattgtccgtgatgccagccgtgcacaccttctctctctttgcgggattggcagtcttcattgactttcttctgcmgattacctgtttcgtgagtctcttggggttagacattaaacgtcaagagaaaaatcggctagacatcttttgctgtgtcagaggtgctgaagatggaaca

SEQ ID NO: 7244 - DNA, 201 bp, Homo sapiens
gatgtccatcctgtttttataacctactgaacctgttttgtgagctgacatgtagccctcgacagagtcagtttttgaatgttacagctactgaagattaygttgatcctgttacaaaccagacgaaaacaaatgtgaaagagttacaatactacgtcggacagagttttgccaatgcaatgtacaatgcctgccgggatg

SEQ ID NO: 7245 - DNA, 201 bp, Homo sapiens
ccgttcctggtgctggctgttggagtggacaacatcttcattctggtgcaggcctaccagagagatgaacgtcttcaaggggaaaccctggatcagcagcygggcagggtcctaggagaagtggctcccagtatgttcctgtcatccttttctgagactgtagcatttttcttaggagcattgtccgtgatgccagccgtg

SEQ ID NO: 7246 - DNA, 201 bp, Homo sapiens
tagccttggggcacatcaaaagctgtcgcaggcttctggtggattcgaaggtctcactaggcatcgcgggcatcttgatcgtgctgagctcggtggcttgstccttgggtgtcttcagctacattgggttgcccttgaccctcattgtgattgaagtcatcccgttcctggtgctggctgttggagtggacaacatcttca

SEQ ID NO: 7247 - DNA, 201 bp, Homo sapiens
aatctgaccatttccttcactgctgaacgaagtattgaagatgaactaaatcgtgaaagtgacagtgatgtcttcaccgttgtaattagctatgccatcakgtttctatatatttccctagccttggggcacatcaaaagctgtcgcaggcttctggtggattcgaaggtctcactaggcatcgcgggcatcttgatcgtg

SEQ ID NO: 7248 - DNA, 201 bp, Homo sapiens
tacagagaagctccagagggcccaggcctgggaaaaagagtttattaattttgtgaaaaactacaagaatcccaatctgaccatttccttcactgctgaaygaagtattgaagatgaactaaatcgtgaaagtgacagtgatgtcttcaccgttgtaattagctatgccatcatgtttctatatatttccctagccttggg

SEQ ID NO: 7249 - DNA, 201 bp, Homo sapiens
acacttacaaaatttggagggattgtggtgttggcttttgccaaatctcaaattttccagatattctacttcaggatgtatttggccatggtcttactggragccactcacggattaatatttctccctgtcttactcagttacatagggccatcagtaaataaagccaaaagttgtgccactgaagagcgatacaaagga

SEQ ID NO: 7250 - DNA, 201 bp, Homo sapiens
gcttcagacactaaaagacaacctgcagctgcctctacagtttctgtccagatgtccatcctgtttttataacctactgaacctgttttgtgagctgacaygtagccctcgacagagtcagtttttgaatgttacagctactgaagattatgttgatcctgttacaaaccagacgaaaacaaatgtgaaagagttacaata

SEQ ID NO: 7251 - DNA, 201 bp, Homo sapiens
cagctggacaactatacccgaataggcttcgccccctcgtcctggatcgacgattatttcgactgggtgaagccacagtcgtcttgctgtcgagtggacartatcactgaccagttctgcaatgcttcagtggttgaccctgcctgcgttcgctgcaggcctctgactccggaaggcaaacagaggcctcaggggggagac

SEQ ID NO: 7252 - DNA, 201 bp, Homo sapiens
caacaatgattccctggtgcagcagatatttaacgcggcgcagctggacaactatacccgaataggcttcgccccctcgtcctggatcgacgattatttcractgggtgaagccacagtcgtcttgctgtcgagtggacaatatcactgaccagttctgcaatgcttcagtggttgaccctgcctgcgttcgctgcaggcc

SEQ ID NO: 7253 - DNA, 201 bp, Homo sapiens
gtgagtctcttggggttagacattaaacgtcaagagaaaaatcggctagacatcttttgctgtgtcagaggtgctgaagatggaacaagcgtccaggcctsagagagctgtttgtttcgcttcttcaaaaactcctattctccacttctgctaaaggactggatgagaccaattgtgatagcaatatttgtgggtgttctg

SEQ ID NO: 7254 - DNA, 201 bp, Homo sapiens
aatgatacagagaagctccagagggcccaggcctgggaaaaagagtttattaattttgtgaaaaactacaagaatcccaatctgaccatttccttcactgytgaacgaagtattgaagatgaactaaatcgtgaaagtgacagtgatgtcttcaccgttgtaattagctatgccatcatgtttctatatatttccctagcc

SEQ ID NO: 7255 - DNA, 201 bp, Homo sapiens
gtccgggtcacaaccaatccagttgacctctggtcagcccccagcagccaggctcgcctggaaaaagagtactttgaccagcactttgggcctttcttccrgacggagcagctcatcatccgggcccctctcactgacaaacacatttaccagccatacccttcgggagctgatgtaccctttggacctccgcttgacata

SEQ ID NO: 7256 - DNA, 201 bp, Homo sapiens
ttctgcgtccgaaaccctggctgtgtcattttcttctcgctggtcttcattactgcgtgttcgtcaggcctggtgtttgtccgggtcacaaccaatccagytgacctctggtcagcccccagcagccaggctcgcctggaaaaagagtactttgaccagcactttgggcctttcttccggacggagcagctcatcatccgg

SEQ ID NO: 7257 - DNA, 201 bp, Homo sapiens
actgaccagttctgcaatgcttcagtggttgaccctgcctgcgttcgctgcaggcctctgactccggaaggcaaacagaggcctcaggggggagacttcakgagattcctgcccatgttcctttcggataaccctaaccccaagtgtggcaaagggggacatgctgcctatagttctgcagttaacatcctccttggccat

SEQ ID NO: 7258 - DNA, 201 bp, Homo sapiens
tgctgcatcggcaaggccaagttgaacaccggatggtgccaaccatcggttgtttggcagcagctttgaacgtagcgcctgtgaactcaggaatgcacagytgacttgggaagcagtattactagatctggaggcaaccacaggacactaaacttctcccagcctcttcaggaaagaaacctcattctttggcaagcagga

SEQ ID NO: 7259 - DNA, 201 bp, Homo sapiens
ctattctccacttctgctaaaggactggatgagaccaattgtgatagcaatatttgtgggtgttctgtcattcagcatcgcagtcctgaacaaagtagatrttggattggatcagtctctttcgatgccagatgactcctacatggtggattatttcaaatccatcagtcagtacctgcatgcgggtccgcctgtgtactt

SEQ ID NO: 7260 - DNA, 201 bp, Homo sapiens
actacacttcttccaaggggcagaacatggtgtgcggcggcatgggctgcaacaatgattccctggtgcagcagatatttaacgcggcgcagctggacaaytatacccgaataggcttcgccccctcgtcctggatcgacgattatttcgactgggtgaagccacagtcgtcttgctgtcgagtggacaatatcactgacc

SEQ ID NO: 7261 - DNA, 201 bp, Homo sapiens
gcctttcttccggacggagcagctcatcatccgggcccctctcactgacaaacacatttaccagccatacccttcgggagctgatgtaccctttggacctycgcttgacatacagatactgcaccaggttcttgacttacaaatagccatcgaaaacattactgcctcttatgacaatgagactgtgacacttcaagacat

SEQ ID NO: 7262 - DNA, 201 bp, Homo sapiens
aaggcagccgcgtggagcgcgcggaagaggcacttgcccacatgggcagctccgtgttcagtggaatcacacttacaaaatttggagggattgtggtgttsgcttttgccaaatctcaaattttccagatattctacttcaggatgtatttggccatggtcttactgggagccactcacggattaatatttctccctgtct

SEQ ID NO: 7263 - DNA, 201 bp, Homo sapiens
gtgcaggaactctgtccaggattcttctttggcaatgtcagtctctgttgtgatgttcggcagcttcagacactaaaagacaacctgcagctgcctctacrgtttctgtccagatgtccatcctgtttttataacctactgaacctgttttgtgagctgacatgtagccctcgacagagtcagtttttgaatgttacagct

SEQ ID NO: 7264 - DNA, 201 bp, Homo sapiens
tgtgggaaggacgctgacgcctgtaatgccaccaactggattgaatacatgttcaataaggacaatggacaggcaccttttaccatcactcctgtgttttmagattttccagtccatgggatggagcccatgaacaatgccaccaaaggctgtgacgagtctgtggatgaggtcacagcaccatgtagctgccaagactgc

SEQ ID NO: 7265 - DNA, 201 bp, Homo sapiens
tgcaccattttgagtgtgttaaattacttccagaacagccattccgtgctggaccacaagaaaggggacgacttctttgtgtatgccgattaccacacgcrctttctgtactgcgtacgggctcctgcctctctgaatgatacaagtttgctccatgacccttgtctgggtacgtttggtggaccagtgttcccgtggctt

SEQ ID NO: 7266 - DNA, 201 bp, Homo sapiens
gttaaattacttccagaacagccattccgtgctggaccacaagaaaggggacgacttctttgtgtatgccgattaccacacgcactttctgtactgcgtaygggctcctgcctctctgaatgatacaagtttgctccatgacccttgtctgggtacgtttggtggaccagtgttcccgtggcttgtgttgggaggctatga

SEQ ID NO: 7267 - DNA, 201 bp, Homo sapiens
tgctccttgggtgtcttcagctacattgggttgcccttgaccctcattgtgattgaagtcatcccgttcctggtgctggctgttggagtggacaacatctycattctggtgcaggcctaccagagagatgaacgtcttcaaggggaaaccctggatcagcagctgggcagggtcctaggagaagtggctcccagtatgttc

SEQ ID NO: 7268 - DNA, 201 bp, Homo sapiens
atatttgtgggtgttctgtcattcagcatcgcagtcctgaacaaagtagatattggattggatcagtctctttcgatgccagatgactcctacatggtggwttatttcaaatccatcagtcagtacctgcatgcgggtccgcctgtgtactttgtcctggaggaagggcacgactacacttcttccaaggggcagaacatg

SEQ ID NO: 7269 - DNA, 201 bp, Homo sapiens
gaagggcacgactacacttcttccaaggggcagaacatggtgtgcggcggcatgggctgcaacaatgattccctggtgcagcagatatttaacgcggcgcmgctggacaactatacccgaataggcttcgccccctcgtcctggatcgacgattatttcgactgggtgaagccacagtcgtcttgctgtcgagtggacaat

SEQ ID NO: 7270 - DNA, 201 bp, Homo sapiens
tggcttgctccttgggtgtcttcagctacattgggttgcccttgaccctcattgtgattgaagtcatcccgttcctggtgctggctgttggagtggacaayatcttcattctggtgcaggcctaccagagagatgaacgtcttcaaggggaaaccctggatcagcagctgggcagggtcctaggagaagtggctcccagta

SEQ ID NO: 7271 - DNA, 201 bp, Homo sapiens
actaaaagacaacctgcagctgcctctacagtttctgtccagatgtccatcctgtttttataacctactgaacctgttttgtgagctgacatgtagccctygacagagtcagtttttgaatgttacagctactgaagattatgttgatcctgttacaaaccagacgaaaacaaatgtgaaagagttacaatactacgtcgg

SEQ ID NO: 7272 - DNA, 201 bp, Homo sapiens
gacgcctgtaatgccaccaactggattgaatacatgttcaataaggacaatggacaggcaccttttaccatcactcctgtgttttcagattttccagtccrtgggatggagcccatgaacaatgccaccaaaggctgtgacgagtctgtggatgaggtcacagcaccatgtagctgccaagactgctctattgtctgtggc

SEQ ID NO: 7273 - DNA, 201 bp, Homo sapiens
cagcagatatttaacgcggcgcagctggacaactatacccgaataggcttcgccccctcgtcctggatcgacgattatttcgactgggtgaagccacagtygtcttgctgtcgagtggacaatatcactgaccagttctgcaatgcttcagtggttgaccctgcctgcgttcgctgcaggcctctgactccggaaggcaaa

SEQ ID NO: 7274 - DNA, 201 bp, Homo sapiens
gaaaggcagccgcgtggagcgcgcggaagaggcacttgcccacatgggcagctccgtgttcagtggaatcacacttacaaaatttggagggattgtggtgktggcttttgccaaatctcaaattttccagatattctacttcaggatgtatttggccatggtcttactgggagccactcacggattaatatttctccctgt

SEQ ID NO: 7275 - DNA, 201 bp, Homo sapiens
gttctgcagccacataaccagagcgttcacggtgagcatgaaaggcagccgcgtggagcgcgcggaagaggcacttgcccacatgggcagctccgtgttcrgtggaatcacacttacaaaatttggagggattgtggtgttggcttttgccaaatctcaaattttccagatattctacttcaggatgtatttggccatggt

SEQ ID NO: 7276 - DNA, 201 bp, Homo sapiens
aatggacaggcaccttttaccatcactcctgtgttttcagattttccagtccatgggatggagcccatgaacaatgccaccaaaggctgtgacgagtctgkggatgaggtcacagcaccatgtagctgccaagactgctctattgtctgtggccccaagccccagcccccacctcctcctgctccctggacgatccttggc

SEQ ID NO: 7277 - DNA, 201 bp, Homo sapiens
aatttggagggattgtggtgttggcttttgccaaatctcaaattttccagatattctacttcaggatgtatttggccatggtcttactgggagccactcayggattaatatttctccctgtcttactcagttacatagggccatcagtaaataaagccaaaagttgtgccactgaagagcgatacaaaggaacagagcgcg

SEQ ID NO: 7278 - DNA, 201 bp, Homo sapiens
gggcatcagtctgaacgctgtatccttggtcaacctggtgatgagctgtggcatctccgtggagttctgcagccacataaccagagcgttcacggtgagcrtgaaaggcagccgcgtggagcgcgcggaagaggcacttgcccacatgggcagctccgtgttcagtggaatcacacttacaaaatttggagggattgtggt

SEQ ID NO: 7279 - DNA, 201 bp, Homo sapiens
gtcttcaaggggaaaccctggatcagcagctgggcagggtcctaggagaagtggctcccagtatgttcctgtcatccttttctgagactgtagcatttttyttaggagcattgtccgtgatgccagccgtgcacaccttctctctctttgcgggattggcagtcttcattgactttcttctgcagattacctgtttcgtga

SEQ ID NO: 7280 - DNA, 201 bp, Homo sapiens
atccatcagtcagtacctgcatgcgggtccgcctgtgtactttgtcctggaggaagggcacgactacacttcttccaaggggcagaacatggtgtgcggcrgcatgggctgcaacaatgattccctggtgcagcagatatttaacgcggcgcagctggacaactatacccgaataggcttcgccccctcgtcctggatcga

SEQ ID NO: 7281 - DNA, 201 bp, Homo sapiens
acaaagtagatattggattggatcagtctctttcgatgccagatgactcctacatggtggattatttcaaatccatcagtcagtacctgcatgcgggtccrcctgtgtactttgtcctggaggaagggcacgactacacttcttccaaggggcagaacatggtgtgcggcggcatgggctgcaacaatgattccctggtgc

SEQ ID NO: 7282 - DNA, 201 bp, Homo sapiens
tggtgttggcttttgccaaatctcaaattttccagatattctacttcaggatgtatttggccatggtcttactgggagccactcacggattaatatttctycctgtcttactcagttacatagggccatcagtaaataaagccaaaagttgtgccactgaagagcgatacaaaggaacagagcgcgaacggcttctaaatt

SEQ ID NO: 7283 - DNA, 201 bp, Homo sapiens
gtcttactgggagccactcacggattaatatttctccctgtcttactcagttacatagggccatcagtaaataaagccaaaagttgtgccactgaagagcratacaaaggaacagagcgcgaacggcttctaaatttctagccctctcgcagggcatcctgactgaactgtgtctaagggtcggtcggtttaccactggac

SEQ ID NO: 7284 - DNA, 201 bp, Homo sapiens
agctgccaagactgctctattgtctgtggccccaagccccagcccccacctcctcctgctccctggacgatccttggcttggacgccatgtatgtcatcakgtggatcacctacatggcgtttttgcttgtgttttttggagcattttttgcagtgtggtgctacagaaaacggtattttgtctccgagtacactcccatc

SEQ ID NO: 7285 - DNA, 201 bp, Homo sapiens
gttttcagattttccagtccatgggatggagcccatgaacaatgccaccaaaggctgtgacgagtctgtggatgaggtcacagcaccatgtagctgccaasactgctctattgtctgtggccccaagccccagcccccacctcctcctgctccctggacgatccttggcttggacgccatgtatgtcatcatgtggatcac

SEQ ID NO: 7286 - DNA, 201 bp, Homo sapiens
ttacaatactacgtcggacagagttttgccaatgcaatgtacaatgcctgccgggatgtggaggccccctcaagtaatgacaaggccctgggactcctgtrtgggaaggacgctgacgcctgtaatgccaccaactggattgaatacatgttcaataaggacaatggacaggcaccttttaccatcactcctgtgttttca

SEQ ID NO: 7287 - DNA, 201 bp, Homo sapiens
ggccatggcaccagggtcggagccacgtacttcatgacctaccacaccgtgctgcagacctctgctgactttattgacgctctgaagaaagcccgacttayagccagtaatgtcaccgaaaccatgggcattaacggcagtgcctaccgagtatttccttacagtgtgttttatgtcttctacgaacagtacctgaccatc

SEQ ID NO: 7288 - DNA, 201 bp, Homo sapiens
gtgaccctgtcagcgcagcatttgagggctgcttgaggcggctgttcacacgctgggggtctttctgcgtccgaaaccctggctgtgtcattttcttctcrctggtcttcattactgcgtgttcgtcaggcctggtgtttgtccgggtcacaaccaatccagttgacctctggtcagcccccagcagccaggctcgcctgg

SEQ ID NO: 7289 - DNA, 201 bp, Homo sapiens
cagtgtggtgctacagaaaacggtattttgtctccgagtacactcccatcgatagcaatatagctttttctgttaatgcaagtgacaaaggagaggcgtcytgctgtgaccctgtcagcgcagcatttgagggctgcttgaggcggctgttcacacgctgggggtctttctgcgtccgaaaccctggctgtgtcattttct

SEQ ID NO: 7290 - DNA, 201 bp, Homo sapiens
tcttccaaggggcagaacatggtgtgcggcggcatgggctgcaacaatgattccctggtgcagcagatatttaacgcggcgcagctggacaactatacccraataggcttcgccccctcgtcctggatcgacgattatttcgactgggtgaagccacagtcgtcttgctgtcgagtggacaatatcactgaccagttctgc

SEQ ID NO: 7291 - DNA, 201 bp, Homo sapiens
atatttaacgcggcgcagctggacaactatacccgaataggcttcgccccctcgtcctggatcgacgattatttcgactgggtgaagccacagtcgtcttrctgtcgagtggacaatatcactgaccagttctgcaatgcttcagtggttgaccctgcctgcgttcgctgcaggcctctgactccggaaggcaaacagagg

SEQ ID NO: 7292 - DNA, 201 bp, Homo sapiens
cgattatttcgactgggtgaagccacagtcgtcttgctgtcgagtggacaatatcactgaccagttctgcaatgcttcagtggttgaccctgcctgcgttygctgcaggcctctgactccggaaggcaaacagaggcctcaggggggagacttcatgagattcctgcccatgttcctttcggataaccctaaccccaagtg

SEQ ID NO: 7293 - DNA, 201 bp, Homo sapiens
ctgaagaaagcccgacttatagccagtaatgtcaccgaaaccatgggcattaacggcagtgcctaccgagtatttccttacagtgtgttttatgtcttctrcgaacagtacctgaccatcattgacgacactatcttcaacctcggtgtgtccctgggcgcgatatttctggtgaccatggtcctcctgggctgtgagctc

SEQ ID NO: 7294 - DNA, 201 bp, Homo sapiens
tctgcagtcatcatgtgtgccaccatcgccatggtcttggtcaacatgtttggagttatgtggctctggggcatcagtctgaacgctgtatccttggtcarcctggtgatgagctgtggcatctccgtggagttctgcagccacataaccagagcgttcacggtgagcatgaaaggcagccgcgtggagcgcgcggaagag

SEQ ID NO: 7295 - DNA, 201 bp, Homo sapiens
tctacgaaggatatggacagactgaaacggtgctaatctgtggaaattttaagggaatgaaaattaaacctggctcaatgggaaaaccttctcctgctttygatgttaagattgtagatgtaaatggcaatgttctacctcctggacaagaaggagatattggcattcaagttctacccaaccgaccatttggccttttta

SEQ ID NO: 7296 - DNA, 201 bp, Homo sapiens
aatggaaggttctggctagatttgacaccctcagatgtgatgtggaatacctcagatacgggctgggcaaagtctgcatggagtagtgttttttctccgtrgatccagggagcatgtgtattcacacaccatttaccccgttttgagccgacttctatcttgcaaacactctccaagtaccccatcacagtcttctgttca

SEQ ID NO: 7297 - DNA, 201 bp, Homo sapiens
gaactcaaggttcagggctgctcttctaagaaacaagtctgccataatctccatctgtgttggaatctgttaactaatgaactggtctctgtgcaaatccygagtgctaaagcttccaacaagactgatgctagctcgtgtcaccaggaagatgctacgtcatgccaagtgttttcagcgcctagcaatttttggttctgt

SEQ ID NO: 7298 - DNA, 201 bp, Homo sapiens
tacaatcttcaaaagcaaactgcattatcaccaatgatgttttagccccagcagtagacgctgttgcatccaaatgtgaaaatctgcactccaagctgatygtatcagagaactccagagaggggtgggggaacctcaaggagttgatgaaacatgccagtgacagccacacctgtgtgaagacaaaacacaatgagatca

SEQ ID NO: 7299 - DNA, 201 bp, Homo sapiens
tctgtgcaaatcctgagtgctaaagcttccaacaagactgatgctagctcgtgtcaccaggaagatgctacgtcatgccaagtgttttcagcgcctagcartttttggttctgtgagggcactgcataaagataatagaacagcaacccctcagaatttctccaactatgaatccatgaaacaggacttcaaactggggat

SEQ ID NO: 7300 - DNA, 201 bp, Homo sapiens
aactaataaaggagattcaggagcatgttaaaaaaactacagcaccttacaaatatcccagaaaggtagaatttattcaagagctgccaaagactatcagwgggaagacaaaaagaaatgaactgaggaagaaagaatggaagacaatttaaagttgtttcattaattaccatatctataaaacaaacatagtatctgtca

SEQ ID NO: 7301 - DNA, 201 bp, Homo sapiens
agattgtagatgtaaatggcaatgttctacctcctggacaagaaggagatattggcattcaagttctacccaaccgaccatttggcctttttactcattasgtagataatccttcaaaaacagcttcaactctacgaggcaatttctatatcactggggacagaggatatatggataaagatgggtatttctggtttgttg

SEQ ID NO: 7302 - DNA, 201 bp, Homo sapiens
caatggactgataaggaaaaggctggaaagaaaccttcaaatccagccttctggtggatcaacagaaatggagaagagatgcgatggagttttgaggaacygggatctctgtccagaaaatttgccaatatactttcagaagcctgttccctacaaagaggagatcgggtaattctgattctgcccagggtcccagagtgg

SEQ ID NO: 7303 - DNA, 201 bp, Homo sapiens
ctacccaaccgaccatttggcctttttactcattacgtagataatccttcaaaaacagcttcaactctacgaggcaatttctatatcactggggacagagsatatatggataaagatgggtatttctggtttgttgcaagagcagatgatgtcatattatcctctggctatcgaattggaccatttgaggtagaaaatgcc

SEQ ID NO: 7304 - DNA, 201 bp, Homo sapiens
tacagaatgatataaccagctataagtttaaaagcttaaagcactgtgtgagtgctggggaaccaattacccctgacgtgactgaaaaatggagaaacaasacgggcctggatatctacgaaggatatggacagactgaaacggtgctaatctgtggaaattttaagggaatgaaaattaaacctggctcaatgggaaaac

SEQ ID NO: 7305 - DNA, 190 bp, Homo sapiens
cggattgtcagactgctcctccctcttctttagactgccacgaggaaaaagcagatgtgagaactcaaggttcagggctgctcttctaasaaacaagtctgccataatctccatctgtgttggaatctgttaactaatgaactggtctctgtgcaaatcctgagtgctaaagcttccaacaagactgatg

SEQ ID NO: 7306 - DNA, 201 bp, Homo sapiens
aaacagcttcaactctacgaggcaatttctatatcactggggacagaggatatatggataaagatgggtatttctggtttgttgcaagagcagatgatgtyatattatcctctggctatcgaattggaccatttgaggtagaaaatgccctgaatgaacacccttcagttgcagagtcagctgttgtcagcagcccagacc

SEQ ID NO: 7307 - DNA, 201 bp, Homo sapiens
tctacgaaggatatggacagactgaaacggtgctaatctgtggaaattttaagggaatgaaaattaaacctggctcaatgggaaaaccttctcctgctttygatgttaaggtttgcacatccccttccaggagaatgtttaacaacccaatctgtacactacctacctaccgcttacccccatataaactttctttgttat

SEQ ID NO: 7308 - DNA, 201 bp, Homo sapiens; identical to SEQ ID NO: 7296

SEQ ID NO: 7309 - DNA, 201 bp, Homo sapiens; identical to SEQ ID NO: 7297

SEQ ID NO: 7310 - DNA, 201 bp, Homo sapiens; identical to SEQ ID NO: 7298

SEQ ID NO: 7311 - DNA, 201 bp, Homo sapiens; identical to SEQ ID NO: 7299

SEQ ID NO: 7312 - DNA, 201 bp, Homo sapiens; identical to SEQ ID NO: 7302

SEQ ID NO: 7313 - DNA, 201 bp, Homo sapiens; identical to SEQ ID NO: 7304

SEQ ID NO: 7314 - DNA, 190 bp, Homo sapiens; identical to SEQ ID NO: 7305

SEQ ID NO: 7315 - DNA, 201 bp, Homo sapiens
gaaaataaggaagtattacctcagctggtggatgctgtcacctctgctcagacctcagactcattagaagccattttggactttttggatttcaaaagtgmcagcagcattatcctccaggagaggtttctctatgcctgtggatttgcttctcatcccaatgaagaactcctgagagccctcattagtaagttcaaaggt

SEQ ID NO: 7316 - DNA, 201 bp, Homo sapiens
agaaacacacaattttggactgaatttcctacaaaccattaaggggaaaatagtatcgaagcagaaattagagctgaagacaaccgaagcaggcccaagaytgatgtctggaaagcaggctgcagccataatcaaagcagttgattcaaagtacacggccattcccattgtggggcaggtcttccagagccagtgtaaagg

SEQ ID NO: 7317 - DNA, 201 bp, Homo sapiens
aaagagttctactcatatcaaaatgaggcagtggccatagaaaatatcaagagaggcctggctagcctatttcagacacagttaagctctggaaccaccartgaggtagatatctctggaaattgtaaagtgacctaccaggctcatcaagacaaagtgatcaaaattaaggccttggattcatgcaaaatagcgaggtct

SEQ ID NO: 7318 - DNA, 201 bp, Homo sapiens
ctctgcaaagacctacgctccttcatctaatccatggaaaggtcaaagagttctactcatatcaaaatgaggcagtggccatagaaaatatcaagagaggyctggctagcctatttcagacacagttaagctctggaaccaccaatgaggtagatatctctggaaattgtaaagtgacctaccaggctcatcaagacaaag

SEQ ID NO: 7319 - DNA, 201 bp, Homo sapiens
gttccctaatcaggaaaaaaaaaaaaaaaaaaagtaagacacaaacaaaccattttttttctctttttttggagttgggggcccagggagaagggacaagrcttttaaaagacttgttagccaacttcaagaattaatatttatgtctctgttattgttagttttaagccttaaggtagaaggcacatagaaataacatct

SEQ ID NO: 7320 - DNA, 201 bp, Homo sapiens
aaaatgtttttatttgtatgaattaaaagatccatgttgaacatttgcaaatatttattaataaacagatgtggtgataaacccaaaacaaatgacaggtscttattttccactaaacacagacacatgaaatgaaagtttagctagcccactatttgttgtaaattgaaaacgaagtgtgataaaataaatatgtagaaa

SEQ ID NO: 7321 - DNA, 201 bp, Homo sapiens
aggcagtggccatagaaaatatcaagagaggcctggctagcctatttcagacacagttaagctctggaaccaccaatgaggtagatatctctggaaattgyaaagtgacctaccaggctcatcaagacaaagtgatcaaaattaaggccttggattcatgcaaaatagcgaggtctggatttacgaccccaaatcaggtct

SEQ ID NO: 7322 - DNA, 201 bp, Homo sapiens
gcccaagattgatgtctggaaagcaggctgcagccataatcaaagcagttgattcaaagtacacggccattcccattgtggggcaggtcttccagagccastgtaaaggatgtccttctctctcggagctctggcggtccaccaggaaatacctgcagcctgacaacctttccaaggctgaggctgtcagaaacttcctgg

SEQ ID NO: 7323 - DNA, 201 bp, Homo sapiens
aagcagttgattcaaagtacacggccattcccattgtggggcaggtcttccagagccagtgtaaaggatgtccttctctctcggagctctggcggtccacmaggaaatacctgcagcctgacaacctttccaaggctgaggctgtcagaaacttcctggccttcattcagcacctcaggactgcgaagaaagaagagatcc

SEQ ID NO: 7324 - DNA, 201 bp, Homo sapiens
agagtccacttctcagtgactcctagctgggcactggatgcagttgaggattgctggtcaatatgattcttcttgctgtgctttttctctgcttcatttcstcatattcagcttctgttaaaggtcacacaactggtctctcattaaataatgaccggctgtacaagctcacgtactccactgaagttcttcttgatcggg

SEQ ID NO: 7325 - DNA, 201 bp, Homo sapiens
gtgtctttttgagactgtaatatggtacactgtcctctaagggacatcctcattttatctcacctttttgggggtgagagctctagttcatttaactgtamtctgcacaatagctaggatgactaagagaacattgcttcaagaaactggtggatttggatttccaaaatatgaaataaggaaaaaaatgtttttatttgt

SEQ ID NO: 7326 - DNA, 201 bp, Homo sapiens
agcaggcttggagtttatctccacagtgcagttttctcagtacccattcttagtttgcatgcagatggacaaggatgaagctccattcaggcaatttgagwaaaagtacgaaaggctgtccacaggcagaggttatgtctctcagaaaagaaaagaaagcgtattagcaggatgtgaattcccgctccatcaagagaactc

SEQ ID NO: 7327 - DNA, 201 bp, Homo sapiens
tggccttactatggaggaatcctgatggtgatgatgaccagttgatccaaataacgatgaaggatgtaaatgttgaaaatgtgaatcagcagagaggagasaagagcatcttcaaaggaaaaagcccatctaaaataatgggaaaggaaaacttggaagctctgcaaagacctacgctccttcatctaatccatggaaagg

SEQ ID NO: 7328 - DNA, 201 bp, Homo sapiens
gctctccagagatatgatctccctttcataactgatgaggtgaagaagaccttaaacagaatataccaccaaaaccgtaaagttcatgaaaagactgtgcrcactgctgcagctgctatcattttaaataacaatccatcctacatggacgtcaagaacatcctgctgtctattggggagcttccccaagaaatgaataaa

SEQ ID NO: 7329 - DNA, 201 bp, Homo sapiens
acgtggatgtggccttactatggaggaatcctgatggtgatgatgaccagttgatccaaataacgatgaaggatgtaaatgttgaaaatgtgaatcagcasagaggagagaagagcatcttcaaaggaaaaagcccatctaaaataatgggaaaggaaaacttggaagctctgcaaagacctacgctccttcatctaatcc

SEQ ID NO: 7330 - DNA, 201 bp, Homo sapiens
tggggcaggtcttccagagccagtgtaaaggatgtccttctctctcggagctctggcggtccaccaggaaatacctgcagcctgacaacctttccaaggcygaggctgtcagaaacttcctggccttcattcagcacctcaggactgcgaagaaagaagagatccttcaaatactaaagatggaaaataaggaagtattac

SEQ ID NO: 7331 - DNA, 201 bp, Homo sapiens
ccatctaaaataatgggaaaggaaaacttggaagctctgcaaagacctacgctccttcatctaatccatggaaaggtcaaagagttctactcatatcaaartgaggcagtggccatagaaaatatcaagagaggcctggctagcctatttcagacacagttaagctctggaaccaccaatgaggtagatatctctggaaat

SEQ ID NO: 7332 - DNA, 201 bp, Homo sapiens
caaggatgaagctccattcaggcaatttgagaaaaagtacgaaaggctgtccacaggcagaggttatgtctctcagaaaagaaaagaaagcgtattagcakgatgtgaattcccgctccatcaagagaactcagagatgtgcaaagtggtgtttgcccctcagccggatagtacttccagcggatggttttgaaactgacc

SEQ ID NO: 7333 - DNA, 201 bp, Homo sapiens
gttcaaaggttctattggtagcagtgacatcagagaaactgttatgatcatcactgggacacttgtcagaaagttgtgtcagaatgaaggctgcaaactcwaagcagtagtggaagctaagaagttaatcctgggaggacttgaaaaagcagagaaaaaagaggacaccaggatgtatctgctggctttgaagaatgccct

SEQ ID NO: 7334 - DNA, 201 bp, Homo sapiens
gtcaagaacatcctgctgtctattggggagcttccccaagaaatgaataaatacatgctcgccattgttcaagacatcctacgttttgaaatgcctgcaakcaaaattgtccgtcgagttctgaaggaaatggtcgctcacaattatgaccgtttctccaggagtggatcttcttctgcctacactggctacatagaacgt

SEQ ID NO: 7335 - DNA, 201 bp, Homo sapiens
actaaaagccaatatagaggtccagggtggtctagctattgatatttcaggtgcaatggagtttagcttgtggtatcgtgagtctaaaacccgagtgaaawatagggtgactgtggtaataaccactgacatcacagtggactcctcttttgtgaaagctggcctggaaaccagtacagaaacagaagcaggcttggagtt

SEQ ID NO: 7336 - DNA, 201 bp, Homo sapiens
cagagaggagagaagagcatcttcaaaggaaaaagcccatctaaaataatgggaaaggaaaacttggaagctctgcaaagacctacgctccttcatctaayccatggaaaggtcaaagagttctactcatatcaaaatgaggcagtggccatagaaaatatcaagagaggcctggctagcctatttcagacacagttaagc

SEQ ID NO: 7337 - DNA, 201 bp, Homo sapiens
gttctactcatatcaaaatgaggcagtggccatagaaaatatcaagagaggcctggctagcctatttcagacacagttaagctctggaaccaccaatgagrtagatatctctggaaattgtaaagtgacctaccaggctcatcaagacaaagtgatcaaaattaaggccttggattcatgcaaaatagcgaggtctggatt

SEQ ID NO: 7338 - DNA, 201 bp, Homo sapiens
gccagctcgaccggctgctccccaaactggcccgtggctccctgtcagtgggggacaaggaccacatgtgcagtgtcaaaagtcgcctgtggaagctgctrtccccagccaggctggccaggcgggcccaccggagcaaatggctggagagttacctgctgcacctggaggagatgggtgtgtcagaggagatgcaggcac

SEQ ID NO: 7339 - DNA, 201 bp, Homo sapiens
cagtgggggacaaggaccacatgtgcagtgtcaaaagtcgcctgtggaagctgctatccccagccaggctggccaggcgggcccaccggagcaaatggctrgagagttacctgctgcacctggaggagatgggtgtgtcagaggagatgcaggcacgggccctggtgctgcagctgtgggccacacaggggaatatgggtc

SEQ ID NO: 7340 - DNA, 201 bp, Homo sapiens
tccccagccaggctggccaggcgggcccaccggagcaaatggctggagagttacctgctgcacctggaggagatgggtgtgtcagaggagatgcaggcacrggccctggtgctgcagctgtgggccacacaggggaatatgggtcccgctgccttctggctcctgctcttccttctcaagaatcctgaagccctggctgct

SEQ ID NO: 7341 - DNA, 201 bp, Homo sapiens
ccggtttccgtggcaaccctcagctgcctcatcgtggctgggaagggaaggaagcaagccggcagaaatagctatggaaggtcttgcgcaggctgcaaccytggtgtgctgggcgaaaacccttatgactccccccttccaaatcaggctgggttgtcactgagactagattctcacctgccttcaaagaagggccaattc

SEQ ID NO: 7342 - DNA, 201 bp, Homo sapiens
ataaaatactcttaagttgatctaatgaagtgtttccttaccattgtgattattgttactattatttgctatattttaatattgttgtttaccaaatattytcctttaaacagactcgctttttaaacttttttttttttttttgagacggagtttcacgcttattgcccaggctggagtgcaatggcacgatctcagctc

SEQ ID NO: 7343 - DNA, 201 bp, Homo sapiens
agactagattctcacctgccttcaaagaagggccaattccctttaaaggtcgcacctccttggaaccacagtcattagtgaattacactcaaggaaaagaygtgctcccaccaggcagctccagctgttacctgagatactgaagtgcagctcaggagacgattatttaaacctgcccttgttttaatcgttatttttctc

SEQ ID NO: 7344 - DNA, 201 bp, Homo sapiens
tgctatttttattaatataaagtcctgtttattgagaccctttaaatgcctgcgagagaccctacagacagtatgtctactcctcacagcatctctatgargagaaggagggttgtgcccacttcatagatgagaaaactgagaggtgaggtgacttgcctggggccacatagctcataagctgtagaactctgcaggcag

SEQ ID NO: 7345 - DNA, 201 bp, Homo sapiens
gccaaaaatagaaagtgaccatgaaaaataaattcgctggggaagggggctccatgctggtgtggccaaggctgagagctctctcttctctgttacaaaaygagataagcaagtgttagaattgccttaaggccacactggcatctccctgaccttctccagggacagaagcaggagtaagtttctcatcccatgggcgac

SEQ ID NO: 7346 - DNA, 201 bp, Homo sapiens
gaggtgggcggatcacttgaggtcgggagttcaagaccagcctggccaacatggcgaaaccccgtctctactaaacataaaaaaattagtcaggtgtggcrgtgcgtgcctgtaatcccagctattcaggaggctgaggcaccagaattgcttgaacccaggaggtggaggttgcagtgaactgagactgcgccacggcac

SEQ ID NO: 7347 - DNA, 201 bp, Homo sapiens
tgtttttaaaatgaactttttttccccccaattgctgccaatagtggataacatgtatcactcactgccaaaaatagaaagtgaccatgaaaaataaattygctggggaagggggctccatgctggtgtggccaaggctgagagctctctcttctctgttacaaaacgagataagcaagtgttagaattgccttaaggcca

SEQ ID NO: 7348 - DNA, 201 bp, Homo sapiens
agtgggccaggccgccagccccgccagccccgccagccccgccagccccgcgatggcttgggccgcgctcctcggcctcctggccgcactgttgctgctgytgctactgagccgccgccgcacgcggcgacctggtgagcctcccctggacctgggcagcatcccctggttggggtatgccttggactttggaaaagatgc

SEQ ID NO: 7349 - DNA, 201 bp, Homo sapiens
cggtggtgtgggagcctcgcaccaggctcgacttccatgcctatgccatcttcctcatggagaggatttttgatgtgcagcttccacattacagccccagwgatgaaaaggccaggatgaaactgactcttctccacagagagctccaggcactcacagaagccatgtataccaacctccatgcagtgctgttgggcgatg

SEQ ID NO: 7350 - DNA, 201 bp, Homo sapiens
cacagggagctggcaatgccctacctgcctgttctccagatggagaaacaggctctgagatttcacaggtcttgcccaaagtcattgattttgatgattaraaagaataaacacagtgtttcctgagtagcagtgattgttatgccttgctattttaataaagattctattttcgtataacattgtcaagtggaaacatgc

SEQ ID NO: 7351 - DNA, 201 bp, Homo sapiens
aaggccaggatgaaactgactcttctccacagagagctccaggcactcacagaagccatgtataccaacctccatgcagtgctgttgggcgatgctacagmagcaggcagtggctggcacgagatgggtctcctcgacttctcctacagcttcctgctcagagccggctacctgactctttacggaattgaggcgctgcca

SEQ ID NO: 7352 - DNA, 201 bp, Homo sapiens
agaagccatgtataccaacctccatgcagtgctgttgggcgatgctacagaagcaggcagtggctggcacgagatgggtctcctcgacttctcctacagcytcctgctcagagccggctacctgactctttacggaattgaggcgctgccacgcacccatgaaagccaggcccaggaccgcgtccactcagctgatgtctt

SEQ ID NO: 7353 - DNA, 201 bp, Homo sapiens
tttgccccggcttgcctgtaatcccagcactttgggaggccgaggtgggcggatcacttgaggtcgggagttcaagaccagcctggccaacatggcgaaaycccgtctctactaaacataaaaaaattagtcaggtgtggcggtgcgtgcctgtaatcccagctattcaggaggctgaggcaccagaattgcttgaaccca

SEQ ID NO: 7354 - DNA, 201 bp, Homo sapiens
tgtaatcccagcactttgggaggccgaggtgggcggatcacttgaggtcgggagttcaagaccagcctggccaacatggcgaaaccccgtctctactaaamataaaaaaattagtcaggtgtggcggtgcgtgcctgtaatcccagctattcaggaggctgaggcaccagaattgcttgaacccaggaggtggaggttgca

SEQ ID NO: 7355 - DNA, 201 bp, Homo sapiens
gatcaacgcagatgtggagatccctgagtttgacctcagcaggtacggcttcggtctgatgcagccggaacacgacgtgcccgtccgctaccgcatccgcycatgacacagggagcagatggatccacgtgctcgcctctgcccagcctgccccagcctgccccagcctcccagctttctgtgtgcacagttggcccgggt

SEQ ID NO: 7356 - DNA, 201 bp, Homo sapiens
tcctcgacttctcctacagcttcctgctcagagccggctacctgactctttacggaattgaggcgctgccacgcacccatgaaagccaggcccaggaccgygtccactcagctgatgtcttccacacctttcgccagctcgaccggctgctccccaaactggcccgtggctccctgtcagtgggggacaaggaccacatgt

SEQ ID NO: 7357 - DNA, 201 bp, Homo sapiens
ggatgggctttctcagtgtcagcactcaggtagggagctaaggaagacacagcccagacaagatggctggaaggagccagccaggactccttagactgatmaagccaaaaaagaaggtgccgatttcatgcattctagtgcagaagccccaactgtgatcacgatccagtctgcagacgtgttttgtttggacttcactta

SEQ ID NO: 7358 - DNA, 201 bp, Homo sapiens
gccccagcctcccagctttctgtgtgcacagttggcccgggtgcaggtgctagcattaccacttccctgcttttctcccagaaggctgggtccaggggagkgaaaagctaagagggtgaacaaagaaaagacattgaaagctctatggattatccactgcaaagttttctttccaaaatcaggctttgtctgctcccaatt

SEQ ID NO: 7359 - DNA, 201 bp, Homo sapiens
taactcttggccagagctgagtggcagccgcctcccttatgcaggacatgtgctctcggcttcaccagggttctgaccgggtctgcttctgcattcacagygcctcctggacctgaaggcatctgagtgtgagaccctgttctaactcttagaagtgacattgtaagaggtggtggggaccagctaattggtccaacccag

SEQ ID NO: 7360 - DNA, 201 bp, Homo sapiens
caggggagggaaaagctaagagggtgaacaaagaaaagacattgaaagctctatggattatccactgcaaagttttctttccaaaatcaggctttgtctgytcccaattcacctcgttactctcacctcgtgatatccacaaatgctattcagataaggcagaactaggagtcttcactgctctgcccccaactcccggag

SEQ ID NO: 7361 - DNA, 201 bp, Homo sapiens
ggattatccactgcaaagttttctttccaaaatcaggctttgtctgctcccaattcacctcgttactctcacctcgtgatatccacaaatgctattcagayaaggcagaactaggagtcttcactgctctgcccccaactcccggaggtgtcaccttcctagttcttatgagctagcatggcccgggccttatccagtcaa

SEQ ID NO: 7362 - DNA, 201 bp, Homo sapiens
cttcactgctctgcccccaactcccggaggtgtcaccttcctagttcttatgagctagcatggcccgggccttatccagtcaaagcggatgctggccacakaaaggccactcaggatgtcctttgtgtccattgatgtcattcagcagtcagtcccccaataatccttaaactagctaaaaccaaaggagtcccttagaag

SEQ ID NO: 7363 - DNA, 201 bp, Homo sapiens
cgacagagcaagactctgtctcaataaataaataattaattaaaataaaaaacagcttaaagagaaaaatggcctgcaaaccttttttatgatgctatttktattaatataaagtcctgtttattgagaccctttaaatgcctgcgagagaccctacagacagtatgtctactcctcacagcatctctatgaagagaagga

SEQ ID NO: 7364 - DNA, 201 bp, Homo sapiens
tccatgcagtgctgttgggcgatgctacagaagcaggcagtggctggcacgagatgggtctcctcgacttctcctacagcttcctgctcagagccggctayctgactctttacggaattgaggcgctgccacgcacccatgaaagccaggcccaggaccgcgtccactcagctgatgtcttccacacctttcgccagctcg

SEQ ID NO: 7365 - DNA, 201 bp, Homo sapiens
gatccacgtgctcgcctctgcccagcctgccccagcctgccccagcctcccagctttctgtgtgcacagttggcccgggtgcaggtgctagcattaccacytccctgcttttctcccagaaggctgggtccaggggagggaaaagctaagagggtgaacaaagaaaagacattgaaagctctatggattatccactgcaaa

SEQ ID NO: 7366 - DNA, 201 bp, Homo sapiens
tgtctcaataaataaataattaattaaaataaaaaacagcttaaagagaaaaatggcctgcaaaccttttttatgatgctatttttattaatataaagtcytgtttattgagaccctttaaatgcctgcgagagaccctacagacagtatgtctactcctcacagcatctctatgaagagaaggagggttgtgcccacttc

SEQ ID NO: 7367 - DNA, 201 bp, Homo sapiens
tgtgcttgatagcgtgctgagtgagagcctcaggcttacagctgcccccttcatcacccgcgaggttgtggtggacctggccatgcccatggcagacgggmgagaattcaacctgcgacgtggtgaccgcctcctcctcttccccttcctgagcccccagagagacccagaaatctacacagacccagaggtatttaaata

SEQ ID NO: 7368 - DNA, 126 bp, Homo sapiens
ggagtgggccaggccgccagccccgycagccccgccagccccgccagccccgcgatggcttgggccgcgctcctcggcctcctggccgcactgttgctgctgctgctactgagccgccgccgcacg

SEQ ID NO: 7369 - DNA, 201 bp, Homo sapiens
atcccagcactttgggaggccgaggtgggcggatcacttgaggtcgggagttcaagaccagcctggccaacatggcgaaaccccgtctctactaaacatamaaaaattagtcaggtgtggcggtgcgtgcctgtaatcccagctattcaggaggctgaggcaccagaattgcttgaacccaggaggtggaggttgcagtga

SEQ ID NO: 7370 - DNA, 201 bp, Homo sapiens
cttcatcccttgcttaagaatcaaaattactggacatatgttaggaatactctttctttctttctttctttttaagctcagtggcaagaatgaaatactctttttttttttttttttttgagatggagtctcgctctgctgcccaggctagagtgcagtggcgtgatctcggctcactgcaagctctgcctcccgtgttca

SEQ ID NO: 7371 - DNA, 201 bp, Homo sapiens
aagctcagtggcaagaatgaaatactctttttttttttttttttttgagatggagtctcgctctgctgcccaggctagagtgcagtggcgtgatctcggcycactgcaagctctgcctcccgtgttcacaccattctcctgcctcagcctcctgagtagctgggactacaggcacccgccaccacacccggctaatttttg

SEQ ID NO: 7372 - DNA, 201 bp, Homo sapiens
cattctcctgcctcagcctcctgagtagctgggactacaggcacccgccaccacacccggctaatttttggatttttagtagagatgggatttcaccgtaytagccaggatggtcttgatctcctgagctcgtgatctgcccgcctcggcctcccaaagtgctgggattacaggtgtgagccaccgcgcccagccaagaat

SEQ ID NO: 7373 - DNA, 201 bp, Homo sapiens
ccaggatggtcttgatctcctgagctcgtgatctgcccgcctcggcctcccaaagtgctgggattacaggtgtgagccaccgcgcccagccaagaataaamtactcttaagttgatctaatgaagtgtttccttaccattgtgattattgttactattatttgctatattttaatattgttgtttaccaaatattctcctt

SEQ ID NO: 7374 - DNA, 201 bp, Homo sapiens
agtagagatgggatttcaccgtattagccaggatggtcttgatctcctgagctcgtgatctgcccgcctcggcctcccaaagtgctgggattacaggtgtragccaccgcgcccagccaagaataaaatactcttaagttgatctaatgaagtgtttccttaccattgtgattattgttactattatttgctatattttaa

SEQ ID NO: 7375 - DNA, 201 bp, Homo sapiens
attgttgtttaccaaatattctcctttaaacagactcgctttttaaacttttttttttttttttgagacggagtttcacgcttattgcccaggctggagtrcaatggcacgatctcagctcaccacaacctccacctcctgggtttaagcaatgcttctgcctcagcttcccaagtagctgagattacaggcgcacaccac

SEQ ID NO: 7376 - DNA, 201 bp, Homo sapiens
tcctcacgaggatgaaggagaagcacggtgacatctttactatactggttgggggcaggtatgtcaccgttctcctggacccacactcctacgacgcggtkgtgtgggagcctcgcaccaggctcgacttccatgcctatgccatcttcctcatggagaggatttttgatgtgcagcttccacattacagccccagtgatg

SEQ ID NO: 7377 - DNA, 201 bp, Homo sapiens
tgtcttccacacctttcgccagctcgaccggctgctccccaaactggcccgtggctccctgtcagtgggggacaaggaccacatgtgcagtgtcaaaagtygcctgtggaagctgctatccccagccaggctggccaggcgggcccaccggagcaaatggctggagagttacctgctgcacctggaggagatgggtgtgtc

SEQ ID NO: 7378 - DNA, 201 bp, Homo sapiens
accacaacctccacctcctgggtttaagcaatgcttctgcctcagcttcccaagtagctgagattacaggcgcacaccaccacgcccaactgatttttgtwtttttagtagagacggggtttccccatgttggtcaggctggtctcgaactcctgacctcgtgatttgcctgcctgggcctcccaaagtgctaggattaca

SEQ ID NO: 7379 - DNA, 201 bp, Homo sapiens
ctgctctgcccccaactcccggaggtgtcaccttcctagttcttatgagctagcatggcccgggccttatccagtcaaagcggatgctggccacagaaagrccactcaggatgtcctttgtgtccattgatgtcattcagcagtcagtcccccaataatccttaaactagctaaaaccaaaggagtcccttagaagatctg

SEQ ID NO: 7380 - DNA, 201 bp, Homo sapiens
accaccacgcccaactgatttttgtatttttagtagagacggggtttccccatgttggtcaggctggtctcgaactcctgacctcgtgatttgcctgcctkggcctcccaaagtgctaggattacaggcatgagccaccatgcccggcctaaactttgtttttaaaatgaactttttttccccccaattgctgccaatagt

SEQ ID NO: 7381 - DNA, 201 bp, Homo sapiens
gtgaccgcctcctcctcttccccttcctgagcccccagagagacccagaaatctacacagacccagaggtatttaaatacaaccgattcctgaaccctgayggatcagagaagaaagacttttacaaggatgggaaacggctgaagaattacaacatgccctggggggcggggcacaatcactgcctggggaggagttatg

SEQ ID NO: 7382 - DNA, 201 bp, Homo sapiens
tagagacggggtttccccatgttggtcaggctggtctcgaactcctgacctcgtgatttgcctgcctgggcctcccaaagtgctaggattacaggcatgarccaccatgcccggcctaaactttgtttttaaaatgaactttttttccccccaattgctgccaatagtggataacatgtatcactcactgccaaaaataga

SEQ ID NO: 7383 - DNA, 201 bp, Homo sapiens
ttccccatgttggtcaggctggtctcgaactcctgacctcgtgatttgcctgcctgggcctcccaaagtgctaggattacaggcatgagccaccatgcccrgcctaaactttgtttttaaaatgaactttttttccccccaattgctgccaatagtggataacatgtatcactcactgccaaaaatagaaagtgaccatga

SEQ ID NO: 7384 - DNA, 201 bp, Homo sapiens
tgcctggggtaccaggcatgccaggccccaagggcccccccggccctcctggcccatcaggagcggtggtgcccctggccctgcagaatgagccaaccccrgcaccggaggacaatggctgcccgcctcactggaagaacttcacagacaaatgctactatttttcagttgagaaagaaatttttgaggatgcaaagcttt

SEQ ID NO: 7385 - DNA, 201 bp, Homo sapiens
accagctggtccccccggagagcgtggcggcaaaggatctaaaggctcccagggccccaaaggctcccgtggttcccctgggaagcccggccctcagggcyccagtggggacccaggccccccgggcccaccaggcaaagagggactccccggccctcagggccctcctggcttccagggacttcagggcaccgttgggga

SEQ ID NO: 7386 - DNA, 201 bp, Homo sapiens
attaaatatacatgtatatatatatatatatatatatttttttttttttttaatgtttcatttcctcagaggaaccaatcacttggaatgtctagaaatayccttgcagattttgccagtgtcaatcaagcctgcacacatgcacagtgaagcgggctgtgcctgccttgagcccatcaccagccaacattcttgacgtgt

SEQ ID NO: 7387 - DNA, 201 bp, Homo sapiens
tgtcttttacaatttttttcctttttttttttttgtcattttaccgacataatacatggagccaaagaaaacaataatggtactaataaaaactcctaggktttcctgtcagatttaattctacccagtggcaaagaattttttcaattgtggctttaaaaaaataattaaatatacatgtatatatatatatatatatat

SEQ ID NO: 7388 - DNA, 201 bp, Homo sapiens
aataacttcatttgcgaaaaagacagggagacagtactgtcatctgcattataacggactgtgatgggatcacatgagcaaattttcagctctcaaaggcmaaggacactcctttctaattgcatcaccttctcatcagattgaaaaaaaaaaagcactgaaaaccaattactgaaaaaaaattgacagctagtgtttttt

SEQ ID NO: 7389 - DNA, 201 bp, Homo sapiens
atatataggccaactattagtaataatatgaaatatacttaaagagcttttaaaactttgtatttttgtacaaaatatttgtcttttacaatttttttcctttttttttttttgtcattttaccgacataatacatggagccaaagaaaacaataatggtactaataaaaactcctagggtttcctgtcagatttaattct

SEQ ID NO: 7390 - DNA, 201 bp, Homo sapiens
tttcctgtcagatttaattctacccagtggcaaagaattttttcaattgtggctttaaaaaaataattaaatatacatgtatatatatatatatatatatatttttttttttttttaatgtttcatttcctcagaggaaccaatcacttggaatgtctagaaatatccttgcagattttgccagtgtcaatcaagcctgca

SEQ ID NO: 7391 - DNA, 201 bp, Homo sapiens
catcaccagccaacattcttgacgtgtgcctgaccagacacagaagaaatgggcaactcaagacgtgcttccacttcattttggtggagtcgggaggtgtrggggatggagaggcatctgttgggaagggcactgaatctggcctatctggaaggccctgtgtcatggctgagctatgactgtacttggcatcagatccct

SEQ ID NO: 7392 - DNA, 201 bp, Homo sapiens
gaaaaagacagggagacagtactgtcatctgcattataacggactgtgatgggatcacatgagcaaattttcagctctcaaaggcaaaggacactcctttytaattgcatcaccttctcatcagattgaaaaaaaaaaagcactgaaaaccaattactgaaaaaaaattgacagctagtgttttttaccatccgtcattac

SEQ ID NO: 7393 - DNA, 201 bp, Homo sapiens
atgggatcacatgagcaaattttcagctctcaaaggcaaaggacactcctttctaattgcatcaccttctcatcagattgaaaaaaaaaaagcactgaaarccaattactgaaaaaaaattgacagctagtgttttttaccatccgtcattacccaaagacttgggaactaaaatgttccccagggtgatatgctgatttt

SEQ ID NO: 7394 - DNA, 201 bp, Homo sapiens
tccagcgaatcaagaacgactttcaaaatctgcagcaggtttttcttcaagccaagaaggacacggattggctgaaggagaaagtgcagagcttgcagacrctggctgccaacaactctgcgttggccaaagccaacaacgacaccctggaggatatgaacagccagctcaactcattcacaggtcagatggagaacatca

SEQ ID NO: 7395 - DNA, 201 bp, Homo sapiens
ccttcggttacaagcggtttggtattcaggaaggaacacaatgtaccaaatgtaaaaataactgggcactgaagttttctatcatattattatacattttstgtgccttgctaacaatcacagtagccattttgggatataaagttgtagagaaaatggacaatgtcacaggtggcatggaaacatctcgccaaacctatg

SEQ ID NO: 7396 - DNA, 201 bp, Homo sapiens
ccaccttcagatcagacattctagatctccgtcagcaacttcgtgagattacagaaaaaaccagcaagaacaaggatacgctggagaagttacaggcgagyggggatgctctggtggacaggcagagtcaattgaaagaaactttggagaataactctttcctcatcaccactgtaaacaaaaccctccaggcgtataatg

SEQ ID NO: 7397 - DNA, 201 bp, Homo sapiens
ttttctgtgaagacaagtcttcacatcttgttttcataaacactagagaggaacagcaatggataaaaaaacagatggtagggagagagagccactggatyggcctcacagactcagagcgtgaaaatgaatggaagtggctggatgggacatctccagactacaaaaattggaaagctggacagccggataactggggtc

SEQ ID NO: 7398 - DNA, 201 bp, Homo sapiens
cagaggatcccagggaccccctggcccaactggcaacaagggacagaaaggagagaagggggagcctggaccacctggccctgcgggtgagagaggcccarttggaccagctggtccccccggagagcgtggcggcaaaggatctaaaggctcccagggccccaaaggctcccgtggttcccctgggaagcccggccctca

SEQ ID NO: 7399 - DNA, 201 bp, Homo sapiens
catgccaggccccaagggcccccccggccctcctggcccatcaggagcggtggtgcccctggccctgcagaatgagccaaccccagcaccggaggacaatrgctgcccgcctcactggaagaacttcacagacaaatgctactatttttcagttgagaaagaaatttttgaggatgcaaagcttttctgtgaagacaagtc

SEQ ID NO: 7400 - DNA, 201 bp, Homo sapiens
tgcctggggtaccaggcatgccaggccccaagggcccccccggccctcctggcccatcaggagcggtggtgcccctggccctgcagaatgagccaaccccrgcaccggaggacaatggtaagtccaagccctccctccagccagggggacagggcagtgcatgtgcttgagactgagccaacccccagtgtgtggccccac

SEQ ID NO: 7401 - DNA, 201 bp, Homo sapiens; identical to SEQ ID NO: 7385

SEQ ID NO: 7402 - DNA, 201 bp, Homo sapiens; identical to SEQ ID NO: 7386

SEQ ID NO: 7403 - DNA, 201 bp, Homo sapiens
cccacccatgttatttttgtttttgtttttgttttgagacagggtctcactctgttgcccaggctggagtgcagtggcgtgatctcggctcactgcaaccyccacatcccgggttcaagtgattctcctgccttagcctcccaggtagctgggactacaagcgtgtgcccccacagccagctaatttttgtatttttagta

SEQ ID NO: 7404 - DNA, 201 bp, Homo sapiens; identical to SEQ ID NO: 7387

SEQ ID NO: 7405 - DNA, 201 bp, Homo sapiens; identical to SEQ ID NO: 7388

SEQ ID NO: 7406 - DNA, 201 bp, Homo sapiens; identical to SEQ ID NO: 7389

SEQ ID NO: 7407 - DNA, 201 bp, Homo sapiens; identical to SEQ ID NO: 7390

SEQ ID NO: 7408 - DNA, 201 bp, Homo sapiens
tccttcagggaagcctgctggccgccctgagcgctcttccctcgttttacatcctcactctggagatagatgggctccctcggttagctccatcaacatgyggatggaaccctctgctattgatgactacatttaatttctttttgagaaaggtgttagatgttacggtgccttctagtcttttgataattaaacctttgg

SEQ ID NO: 7409 - DNA, 201 bp, Homo sapiens; identical to SEQ ID NO: 7391

SEQ ID NO: 7410 - DNA, 201 bp, Homo sapiens; identical to SEQ ID NO: 7392

SEQ ID NO: 7411 - DNA, 201 bp, Homo sapiens
gagccactgcacctggctcttgcacttgtttatttataggagccagccctcagaagacaaacacaatgcaaaacatttccttcagggaagcctgctggccrccctgagcgctcttccctcgttttacatcctcactctggagatagatgggctccctcggttagctccatcaacatgcggatggaaccctctgctattgat

SEQ ID NO: 7412 - DNA, 201 bp, Homo sapiens; identical to SEQ ID NO: 7393

SEQ ID NO: 7413 - DNA, 201 bp, Homo sapiens; identical to SEQ ID NO: 7394

SEQ ID NO: 7414 - DNA, 180 bp, Homo sapiens
gtattcaggaaggaacacaatgtaccaaatgtaaaaataactgggcactgaagttttctatcatattattatacattttstgtgccttgctaacaatcacagtagccattttgggatataaagttgtagagaaaatggacaatgtcacaggtggcatggaaacatctcgccaaacctatg

SEQ ID NO: 7415 - DNA, 201 bp, Homo sapiens; identical to SEQ ID NO: 7396

SEQ ID NO: 7416 - DNA, 201 bp, Homo sapiens; identical to SEQ ID NO: 7397

SEQ ID NO: 7417 - DNA, 201 bp, Homo sapiens; identical to SEQ ID NO: 7398

SEQ ID NO: 7418 - DNA, 201 bp, Homo sapiens
catgccaggccccaagggcccccccggccctcctggcccatcaggagcggtggtgcccctggccctgcagaatgagccaaccccagcaccggaggacaatrgtaagtccaagccctccctccagccagggggacagggcagtgcatgtgcttgagactgagccaacccccagtgtgtggccccacccatgttatttttgtt

SEQ ID NO: 7419 - DNA, 201 bp, Homo sapiens; identical to SEQ ID NO: 7400

SEQ ID NO: 7420 - DNA, 201 bp, Homo sapiens; identical to SEQ ID NO: 7385

SEQ ID NO: 7421 - DNA, 201 bp, Homo sapiens; identical to SEQ ID NO: 7386

SEQ ID NO: 7422 - DNA, 201 bp, Homo sapiens; identical to SEQ ID NO: 7403

SEQ ID NO: 7423 - DNA, 201 bp, Homo sapiens; identical to SEQ ID NO: 7387

SEQ ID NO: 7424 - DNA, 201 bp, Homo sapiens; identical to SEQ ID NO: 7388

SEQ ID NO: 7425 - DNA, 201 bp, Homo sapiens; identical to SEQ ID NO: 7389

SEQ ID NO: 7426 - DNA, 201 bp, Homo sapiens; identical to SEQ ID NO: 7390

SEQ ID NO: 7427 - DNA, 201 bp, Homo sapiens; identical to SEQ ID NO: 7408

SEQ ID NO: 7428 - DNA, 201 bp, Homo sapiens; identical to SEQ ID NO: 7391

SEQ ID NO: 7429 - DNA, 201 bp, Homo sapiens; identical to SEQ ID NO: 7392

SEQ ID NO: 7430 - DNA, 201 bp, Homo sapiens; identical to SEQ ID NO: 7411

SEQ ID NO: 7431 - DNA, 201 bp, Homo sapiens; identical to SEQ ID NO: 7393

SEQ ID NO: 7432 - DNA, 201 bp, Homo sapiens; identical to SEQ ID NO: 7394

SEQ ID NO: 7433 - DNA, 201 bp, Homo sapiens; identical to SEQ ID NO: 7395

SEQ ID NO: 7434 - DNA, 201 bp, Homo sapiens; identical to SEQ ID NO: 7396

SEQ ID NO: 7435 - DNA, 201 bp, Homo sapiens; identical to SEQ ID NO: 7397

SEQ ID NO: 7436 - DNA, 201 bp, Homo sapiens; identical to SEQ ID NO: 7398

SEQ ID NO: 7437 - DNA, 201 bp, Homo sapiens; identical to SEQ ID NO: 7418

SEQ ID NO: 7438 - DNA, 201 bp, Homo sapiens; identical to SEQ ID NO: 7395

SEQ ID NO: 7439 - DNA, 201 bp, Homo sapiens; identical to SEQ ID NO: 7384

SEQ ID NO: 7440 - DNA, 201 bp, Homo sapiens; identical to SEQ ID NO: 7385

SEQ ID NO: 7441 - DNA, 201 bp, Homo sapiens; identical to SEQ ID NO: 7386

SEQ ID NO: 7442 - DNA, 201 bp, Homo sapiens; identical to SEQ ID NO: 7387

SEQ ID NO: 7443 - DNA, 201 bp, Homo sapiens; identical to SEQ ID NO: 7388

SEQ ID NO: 7444 - DNA, 201 bp, Homo sapiens; identical to SEQ ID NO: 7389

SEQ ID NO: 7445 - DNA, 201 bp, Homo sapiens; identical to SEQ ID NO: 7390

SEQ ID NO: 7446 - DNA, 201 bp, Homo sapiens; identical to SEQ ID NO: 7391

SEQ ID NO: 7447 - DNA, 201 bp, Homo sapiens; identical to SEQ ID NO: 7392

SEQ ID NO: 7448 - DNA, 201 bp, Homo sapiens; identical to SEQ ID NO: 7393

SEQ ID NO: 7449 - DNA, 201 bp, Homo sapiens; identical to SEQ ID NO: 7394

SEQ ID NO: 7450 - DNA, 180 bp, Homo sapiens; identical to SEQ ID NO: 7414

SEQ ID NO: 7451 - DNA, 201 bp, Homo sapiens; identical to SEQ ID NO: 7396

SEQ ID NO: 7452 - DNA, 201 bp, Homo sapiens; identical to SEQ ID NO: 7397

SEQ ID NO: 7453 - DNA, 201 bp, Homo sapiens; identical to SEQ ID NO: 7398

SEQ ID NO: 7454 - DNA, 201 bp, Homo sapiens; identical to SEQ ID NO: 7399

SEQ ID NO: 7455 - DNA, 201 bp, Homo sapiens
ggggtggctgttgaacctcttccacaaccagattgagtccaagttccagaaagtactggagagcaggatttgcgaaatgatccagaaatcagtgtcctccratctacagccttatctccaaactctgccagttacaacagagattgacagtttcgccgacattgattatagcttagtggaagcccctcgggcaacagccca

SEQ ID NO: 7456 - DNA, 201 bp, Homo sapiens
cgggagacttggggtggctgttgaacctcttccacaaccagattgagtccaagttccagaaagtactggagagcaggatttgcgaaatgatccagaaatcrgtgtcctccgatctacagccttatctccaaactctgccagttacaacagagattgacagtttcgccgacattgattatagcttagtggaagcccctcggg

SEQ ID NO: 7457 - DNA, 201 bp, Homo sapiens
aaactacagggctcctttgatgtcagtgtcaagggcatcagcatttcggtcaacctcctgttgggcagcgagtcctccgggaggcccacagttactgcctscagctgcagcagtgacatcgctgacgtggaggtggacatgtcgggagacttggggtggctgttgaacctcttccacaaccagattgagtccaagttccag

SEQ ID NO: 7458 - DNA, 201 bp, Homo sapiens
tacagccttatctccaaactctgccagttacaacagagattgacagtttcgccgacattgattatagcttagtggaagcccctcgggcaacagcccagatrctggaggtgatgtttaagggtgaaatctttcatcgtaaccaccgttctccagttaccctccttgctgcagtcatgagccttcctgaggaacacaacaaaa

SEQ ID NO: 7459 - DNA, 201 bp, Homo sapiens
ggatcaccgacaagggactgcagtatgcggcccaggaggggctattggctctgcagagtgagctgctcaggatcacgctgcctgacttcaccggggacttraggatcccccacgtcggccgtgggcgctatgagttccacagcctgaacatccacagctgtgagctgcttcactctgcgctgaggcctgtccctggccagg

SEQ ID NO: 7460 - DNA, 201 bp, Homo sapiens
ttccacagcctgaacatccacagctgtgagctgcttcactctgcgctgaggcctgtccctggccagggcctgagtctcagcatctccgactcctccatccrggtccagggcaggtggaaggtgcgcaagtcattcttcaaactacagggctcctttgatgtcagtgtcaagggcatcagcatttcggtcaacctcctgttg

SEQ ID NO: 7461 - DNA, 152 bp, Homo sapiens
ctggcccactgcactgggaatctaggatgggggccttggccagagccctgcygtccatactgctggcattgctgcttacgtccaccccagaggctctgggtgccaaccccggcttggtcgccaggatcaccgacaagggactgcagtatgcg

SEQ ID NO: 7462 - DNA, 201 bp, Homo sapiens
atccataaggacttcctgttcttgggtgccaatgtccaatacatgagagtttgaggacaagaaagatgaagcttggaggtcacagctggatctgcttgttscatttccagctgtgcagcacgtctcagagattcttgaagaatgaagacatttctgctctcagctccgggggtgaggtgtgcctggcctctgcctccaccc

SEQ ID NO: 7463 - DNA, 201 bp, Homo sapiens
tgctgcttacgtccaccccagaggctctgggtgccaaccccggcttggtcgccaggatcaccgacaagggactgcagtatgcggcccaggaggggctattrgctctgcagagtgagctgctcaggatcacgctgcctgacttcaccggggacttgaggatcccccacgtcggccgtgggcgctatgagttccacagcctga

SEQ ID NO: 7464 - DNA, 201 bp, Homo sapiens
tgcgctgaggcctgtccctggccagggcctgagtctcagcatctccgactcctccatccgggtccagggcaggtggaaggtgcgcaagtcattcttcaaamtacagggctcctttgatgtcagtgtcaagggcatcagcatttcggtcaacctcctgttgggcagcgagtcctccgggaggcccacagttactgcctccag

SEQ ID NO: 7465 - DNA, 201 bp, Homo sapiens
gtgcctggcctctgcctccaccctcctcctcttcaccaggtgcatgcatgccctctctgagtctggactttgcttcccctccaggagggaccaccctcccygactggcctgggatatctttacaagcaggcactgtatttttttattcgccatctgatccccatgcctagcagagtgctggcacttagtaggtcctcaata

SEQ ID NO: 7466 - DNA, 201 bp, Homo sapiens
aagaatccaaagttggactattcaatgcagagctgttggaagcgctcctcaactattacatccttaacaccttctaccccaagttcaatgataagttggcygaaggcttcccccttcctctgctgaagcgtgttcagctctacgaccttgggctgcagatccataaggacttcctgttcttgggtgccaatgtccaataca

SEQ ID NO: 7467 - DNA, 201 bp, Homo sapiens
aacttctccatcacagatgacatgataccgcctgactctaatatccgactgaccaccaagtccttccgacccttcgtcccacggttagccaggctctaccycaacatgaacctggaactccagggatcagtgccctctgctccgctcctgaacttcagccctgggaatctgtctgtggacccctatatggagatagatgcc

SEQ ID NO: 7468 - DNA, 201 bp, Homo sapiens
gggcaggtggaaggtgcgcaagtcattcttcaaactacagggctcctttgatgtcagtgtcaagggcatcagcatttcggtcaacctcctgttgggcagcragtcctccgggaggcccacagttactgcctccagctgcagcagtgacatcgctgacgtggaggtggacatgtcgggagacttggggtggctgttgaacct

SEQ ID NO: 7469 - DNA, 201 bp, Homo sapiens
agtcattcttcaaactacagggctcctttgatgtcagtgtcaagggcatcagcatttcggtcaacctcctgttgggcagcgagtcctccgggaggcccacrgttactgcctccagctgcagcagtgacatcgctgacgtggaggtggacatgtcgggagacttggggtggctgttgaacctcttccacaaccagattgagt

SEQ ID NO: 7470 - DNA, 201 bp, Homo sapiens
cttgggtgccaatgtccaatacatgagagtttgaggacaagaaagatgaagcttggaggtcacagctggatctgcttgttgcatttccagctgtgcagcaygtctcagagattcttgaagaatgaagacatttctgctctcagctccgggggtgaggtgtgcctggcctctgcctccaccctcctcctcttcaccaggtgc

SEQ ID NO: 7471 - DNA, 201 bp, Homo sapiens
gaaagaatccaaagttggactattcaatgcagagctgttggaagcgctcctcaactattacatccttaacaccttctaccccaagttcaatgataagttgrccgaaggcttcccccttcctctgctgaagcgtgttcagctctacgaccttgggctgcagatccataaggacttcctgttcttgggtgccaatgtccaata

SEQ ID NO: 7472 - DNA, 201 bp, Homo sapiens
catgaggaaggatatctgaacttctccatcacagatgacatgataccgcctgactctaatatccgactgaccaccaagtccttccgacccttcgtcccacrgttagccaggctctaccccaacatgaacctggaactccagggatcagtgccctctgctccgctcctgaacttcagccctgggaatctgtctgtggacccc

SEQ ID NO: 7473 - DNA, 201 bp, Homo sapiens
gttccacagcctgaacatccacagctgtgagctgcttcactctgcgctgaggcctgtccctggccagggcctgagtctcagcatctccgactcctccatcygggtccagggcaggtggaaggtgcgcaagtcattcttcaaactacagggctcctttgatgtcagtgtcaagggcatcagcatttcggtcaacctcctgtt

SEQ ID NO: 7474 - DNA, 201 bp, Homo sapiens
accctccttgctgcagtcatgagccttcctgaggaacacaacaaaatggtctactttgccatctcggattatgtcttcaacacggccagcctggtttatcrtgaggaaggatatctgaacttctccatcacagatgacatgataccgcctgactctaatatccgactgaccaccaagtccttccgacccttcgtcccacgg

SEQ ID NO: 7475 - DNA, 201 bp, Homo sapiens
ctctaccccaacatgaacctggaactccagggatcagtgccctctgctccgctcctgaacttcagccctgggaatctgtctgtggacccctatatggagayagatgcctttgtgctcctgcccagctccagcaaggagcctgtcttccggctcagtgtggccactaatgtgtccgccaccttgaccttcaataccagcaag

SEQ ID NO: 7476 - DNA, 201 bp, Homo sapiens
gaaatctttcatcgtaaccaccgttctccagttaccctccttgctgcagtcatgagccttcctgaggaacacaacaaaatggtctactttgccatctcggrttatgtcttcaacacggccagcctggtttatcatgaggaaggatatctgaacttctccatcacagatgacatgataccgcctgactctaatatccgactg

SEQ ID NO: 7477 - DNA, 201 bp, Homo sapiens
gaagccaggaaaggtaaaagtggaactgaaagaatccaaagttggactattcaatgcagagctgttggaagcgctcctcaactattacatccttaacaccytctaccccaagttcaatgataagttggccgaaggcttcccccttcctctgctgaagcgtgttcagctctacgaccttgggctgcagatccataaggactt

SEQ ID NO: 7478 - DNA, 201 bp, Homo sapiens
ggttagccaggctctaccccaacatgaacctggaactccagggatcagtgccctctgctccgctcctgaacttcagccctgggaatctgtctgtggacccstatatggagatagatgcctttgtgctcctgcccagctccagcaaggagcctgtcttccggctcagtgtggccactaatgtgtccgccaccttgaccttca

SEQ ID NO: 7479 - DNA, 201 bp, Homo sapiens
gggacttgaggatcccccacgtcggccgtgggcgctatgagttccacagcctgaacatccacagctgtgagctgcttcactctgcgctgaggcctgtcccyggccagggcctgagtctcagcatctccgactcctccatccgggtccagggcaggtggaaggtgcgcaagtcattcttcaaactacagggctcctttgatg

SEQ ID NO: 7480 - DNA, 201 bp, Homo sapiens
tgtcaagggcatcagcatttcggtcaacctcctgttgggcagcgagtcctccgggaggcccacagttactgcctccagctgcagcagtgacatcgctgacrtggaggtggacatgtcgggagacttggggtggctgttgaacctcttccacaaccagattgagtccaagttccagaaagtactggagagcaggatttgcga

SEQ ID NO: 7481 - DNA, 201 bp, Homo sapiens
gcagcgagtcctccgggaggcccacagttactgcctccagctgcagcagtgacatcgctgacgtggaggtggacatgtcgggagacttggggtggctgttkaacctcttccacaaccagattgagtccaagttccagaaagtactggagagcaggatttgcgaaatgatccagaaatcagtgtcctccgatctacagcctt

SEQ ID NO: 7482 - DNA, 201 bp, Homo sapiens
aaggggctgagcgatccagggaagatcaagcggctgcgttcccaggtgcaggtgagcttggaggactacatcaacgaccgccagtatgactcgcgtggccrctttggagagctgctgctgctgctgcccaccttgcagagcatcacctggcagatgatcgagcagatccagttcatcaagctcttcggcatggccaagatt

SEQ ID NO: 7483 - DNA, 198 bp, Homo sapiens
tttgaaaggaaggcagagagggcactgggaggaggcagtgggagggcggagggcgggggccttcggggtgggcgcccagggtagggcaggtggccgcsgcgtggaggcagggagaatgcgactctccaaaaccctcgtcgacatggacatggccgactacagtgctgcactggacccagcctacaccaccctggaatt

SEQ ID NO: 7484 - DNA, 201 bp, Homo sapiens
acggcgacattcgggcgaagaagattgccagcatcgcagatgtgtgtgagtccatgaaggagcagctgctggttctcgttgagtgggccaagtacatcccrgctttctgcgagctccccctggacgaccaggtggccctgctcagagcccatgctggcgagcacctgctgctcggagccaccaagagatccatggtgttca

SEQ ID NO: 7485 - DNA, 201 bp, Homo sapiens
cctgttgcaggagatgctgctgggagggtcccccagcgatgcaccccatgcccaccaccccctgcaccctcacctgatgcaggaacatatgggaaccaacrtcatcgttgccaacacaatgcccactcacctcagcaacggacagatgtgtgagtggccccgacccaggggacaggcagccacccctgagaccccacagcc

SEQ ID NO: 7486 - DNA, 201 bp, Homo sapiens
ttgccaacacaatgcccactcacctcagcaacggacagatgtgtgagtggccccgacccaggggacaggcagccacccctgagaccccacagccctcacckccaggtggctcagggtctgagccctataagctcctgccgggagccgtcgccacaatcgtcaagcccctctctgccatcccccagccgaccatcaccaagc

SEQ ID NO: 7487 - DNA, 201 bp, Homo sapiens
cggagccaccaagagatccatggtgttcaaggacgtgctgctcctaggcaatgactacattgtccctcggcactgcccggagctggcggagatgagccggrtgtccatacgcatccttgacgagctggtgctgcccttccaggagctgcagatcgatgacaatgagtatgcctacctcaaagccatcatcttctttgaccc

SEQ ID NO: 7488 - DNA, 201 bp, Homo sapiens
cctcagcaacggacagatgtgtgagtggccccgacccaggggacaggcagccacccctgagaccccacagccctcaccgccaggtggctcagggtctgagycctataagctcctgccgggagccgtcgccacaatcgtcaagcccctctctgccatcccccagccgaccatcaccaagcaggaagttatctagcaagccgc

SEQ ID NO: 7489 - DNA, 201 bp, Homo sapiens
gtccagaatgagcgggaccggatcagcactcgaaggtcaagctatgaggacagcagcctgccctccatcaatgcgctcctgcaggcggaggtcctgtcccracagatcacctcccccgtctccgggatcaacggcgacattcgggcgaagaagattgccagcatcgcagatgtgtgtgagtccatgaaggagcagctgctg

SEQ ID NO: 7490 - DNA, 201 bp, Homo sapiens
acctgttgcaggagatgctgctgggagggtcccccagcgatgcaccccatgcccaccaccccctgcaccctcacctgatgcaggaacatatgggaaccaaygtcatcgttgccaacacaatgcccactcacctcagcaacggacagatgtgtgagtggccccgacccaggggacaggcagccacccctgagaccccacagc

SEQ ID NO: 7491 - DNA, 201 bp, Homo sapiens
gctcctaggcaatgactacattgtccctcggcactgcccggagctggcggagatgagccgggtgtccatacgcatccttgacgagctggtgctgcccttcyaggagctgcagatcgatgacaatgagtatgcctacctcaaagccatcatcttctttgacccagatgccaaggggctgagcgatccagggaagatcaagcg

SEQ ID NO: 7492 - DNA, 201 bp, Homo sapiens
cgtccagaatgagcgggaccggatcagcactcgaaggtcaagctatgaggacagcagcctgccctccatcaatgcgctcctgcaggcggaggtcctgtccygacagatcacctcccccgtctccgggatcaacggcgacattcgggcgaagaagattgccagcatcgcagatgtgtgtgagtccatgaaggagcagctgct

SEQ ID NO: 7493 - DNA, 201 bp, Homo sapiens
aaagacaagaggaaccagtgccgctactgcaggctcaagaaatgcttccgggctggcatgaagaaggaagccgtccagaatgagcgggaccggatcagcaytcgaaggtcaagctatgaggacagcagcctgccctccatcaatgcgctcctgcaggcggaggtcctgtcccgacagatcacctcccccgtctccgggatc

SEQ ID NO: 7494 - DNA, 201 bp, Homo sapiens
gttctccacagggagacacgtccccatcagaaggcaccaacctcaacgcgcccaacagcctgggtgtcagcgccctgtgtgccatctgcggggaccgggcyacgggcaaacactacggtgcctcgagctgtgacggctgcaagggcttcttccggaggagcgtgcggaagaaccacatgtactcctgcagatttagccggc

SEQ ID NO: 7495 - DNA, 201 bp, Homo sapiens
cgacttcatcccaaaggacagccgcctggagatgacttgaggccttacttaaacccagctcccttcttccctagcctggtgcttctcctctcctagcccckgtcatggtgtccagacagagccctgtgaggctgggtccaattgtggcacttggggcaccttgctcctccttctgctgctgcccccacctctgctgcctcc

SEQ ID NO: 7496 - DNA, 201 bp, Homo sapiens
ccctgagaccccacagccctcaccgccaggtggctcagggtctgagccctataagctcctgccgggagccgtcgccacaatcgtcaagcccctctctgccrtcccccagccgaccatcaccaagcaggaagttatctagcaagccgctggggcttgggggctccactggctccccccagccccctaagagagcacctggtg

SEQ ID NO: 7497 - DNA, 121 bp, Homo sapiens
gccttggaaacgattcccccagtcattctgggaacatgttgtaagcactgactgggaccaggcaccaggcagggtctagaaggctgtggtgagggaagacrcctttctcctccaacccaac

SEQ ID NO: 7498 - DNA, 201 bp, Homo sapiens; identical to SEQ ID NO: 7490

SEQ ID NO: 7499 - DNA, 201 bp, Homo sapiens; identical to SEQ ID NO: 7491

SEQ ID NO: 7500 - DNA, 201 bp, Homo sapiens; identical to SEQ ID NO: 7492

SEQ ID NO: 7501 - DNA, 201 bp, Homo sapiens; identical to SEQ ID NO: 7482

SEQ ID NO: 7502 - DNA, 201 bp, Homo sapiens; identical to SEQ ID NO: 7493

SEQ ID NO: 7503 - DNA, 201 bp, Homo sapiens
tggagagttcttacgacacgtccccatcagaaggcaccaacctcaacgcgcccaacagcctgggtgtcagcgccctgtgtgccatctgcggggaccgggcyacgggcaaacactacggtgcctcgagctgtgacggctgcaagggcttcttccggaggagcgtgcggaagaaccacatgtactcctgcagatttagccggc

SEQ ID NO: 7504 - DNA, 201 bp, Homo sapiens; identical to SEQ ID NO: 7495

SEQ ID NO: 7505 - DNA, 201 bp, Homo sapiens; identical to SEQ ID NO: 7484

SEQ ID NO: 7506 - DNA, 201 bp, Homo sapiens; identical to SEQ ID NO: 7485

SEQ ID NO: 7507 - DNA, 201 bp, Homo sapiens; identical to SEQ ID NO: 7486

SEQ ID NO: 7508 - DNA, 201 bp, Homo sapiens; identical to SEQ ID NO: 7487

SEQ ID NO: 7509 - DNA, 201 bp, Homo sapiens; identical to SEQ ID NO: 7488

SEQ ID NO: 7510 - DNA, 201 bp, Homo sapiens; identical to SEQ ID NO: 7496

SEQ ID NO: 7511 - DNA, 121 bp, Homo sapiens; identical to SEQ ID NO: 7497

SEQ ID NO: 7512 - DNA, 201 bp, Homo sapiens; identical to SEQ ID NO: 7489

SEQ ID NO: 7513 - DNA, 201 bp, Homo sapiens
catggtggatgccgtggggaacaaggatgtaaagcccttgataccacgtgcattgcaaagacacaatcaacatttatgtcatcaattgctgaggacagagrgccagggaatgacagaatcagggcctgatctcctgactctagtcaggaagaatcttctttgctttgacccccatcaaacaggaatatgtgatgcactgga

SEQ ID NO: 7514 - DNA, 201 bp, Homo sapiens
ataacctgacagcctttcactgtctcccacgtctctgcaccttgtaggatgtcctcatgtctcttcatctctgctcctgtgtcatactcattatatagcaracattcagcaattattagaatggttgcttctatcgacaggtaggtgggtgaatggatggatgaatgggttagtgaatgttctactattatctctcagaca

SEQ ID NO: 7515 - DNA, 201 bp, Homo sapiens; identical to SEQ ID NO: 7482

SEQ ID NO: 7516 - DNA, 198 bp, Homo sapiens; identical to SEQ ID NO: 7483

SEQ ID NO: 7517 - DNA, 201 bp, Homo sapiens; identical to SEQ ID NO: 7484

SEQ ID NO: 7518 - DNA, 201 bp, Homo sapiens; identical to SEQ ID NO: 7487

SEQ ID NO: 7519 - DNA, 201 bp, Homo sapiens; identical to SEQ ID NO: 7489

SEQ ID NO: 7520 - DNA, 201 bp, Homo sapiens; identical to SEQ ID NO: 7492

SEQ ID NO: 7521 - DNA, 201 bp, Homo sapiens; identical to SEQ ID NO: 7491

SEQ ID NO: 7522 - DNA, 201 bp, Homo sapiens; identical to SEQ ID NO: 7493

SEQ ID NO: 7523 - DNA, 201 bp, Homo sapiens
tgacgatgggcaatgacacgtccccatcagaaggcaccaacctcaacgcgcccaacagcctgggtgtcagcgccctgtgtgccatctgcggggaccgggcyacgggcaaacactacggtgcctcgagctgtgacggctgcaagggcttcttccggaggagcgtgcggaagaaccacatgtactcctgcagatttagccggc

SEQ ID NO: 7524 - DNA, 201 bp, Homo sapiens; identical to SEQ ID NO: 7482

SEQ ID NO: 7525 - DNA, 198 bp, Homo sapiens; identical to SEQ ID NO: 7483

SEQ ID NO: 7526 - DNA, 201 bp, Homo sapiens; identical to SEQ ID NO: 7484

SEQ ID NO: 7527 - DNA, 201 bp, Homo sapiens; identical to SEQ ID NO: 7485

SEQ ID NO: 7528 - DNA, 201 bp, Homo sapiens; identical to SEQ ID NO: 7486

SEQ ID NO: 7529 - DNA, 201 bp, Homo sapiens; identical to SEQ ID NO: 7487

SEQ ID NO: 7530 - DNA, 201 bp, Homo sapiens; identical to SEQ ID NO: 7488

SEQ ID NO: 7531 - DNA, 201 bp, Homo sapiens; identical to SEQ ID NO: 7489

SEQ ID NO: 7532 - DNA, 201 bp, Homo sapiens; identical to SEQ ID NO: 7490

SEQ ID NO: 7533 - DNA, 201 bp, Homo sapiens; identical to SEQ ID NO: 7491

SEQ ID NO: 7534 - DNA, 201 bp, Homo sapiens; identical to SEQ ID NO: 7492

SEQ ID NO: 7535 - DNA, 201 bp, Homo sapiens; identical to SEQ ID NO: 7493

SEQ ID NO: 7536 - DNA, 201 bp, Homo sapiens; identical to SEQ ID NO: 7523

SEQ ID NO: 7537 - DNA, 201 bp, Homo sapiens; identical to SEQ ID NO: 7495

SEQ ID NO: 7538 - DNA, 201 bp, Homo sapiens; identical to SEQ ID NO: 7496

SEQ ID NO: 7539 - DNA, 121 bp, Homo sapiens; identical to SEQ ID NO: 7497

SEQ ID NO: 7540 - DNA, 201 bp, Homo sapiens
ggatttcagagccttctgcttctgaagtaaaattatgtgcatttgttacttggtcagactgggacttgggggtttgcctggagtatgagtgtaaaagaaarcagctgttaaaacctgtgtttttaaattcttggattgatctcagagcaacttacaagcttttctataggagaaaaccaaaaggactaagtggtgccttgc

SEQ ID NO: 7541 - DNA, 201 bp, Homo sapiens
tccattatgcaagtgtggtcggagatctaagagacttgttgtttctaataatggaccgaaccatggaaaagtcttctattgttgccctatcgggaaatacmaagaaaacagaaaatgttgtggttatttcaaatgggaacaaacacttcaaaaggaaagagccaacagcatggttccatctcattccacagggggactcac

SEQ ID NO: 7542 - DNA, 188 bp, Homo sapiens
tgacagatactatgtttgttttatagatatggtaattaatgaaacaactttaaattgtcttccattctttcttcctcagttcatttctttttgtcttcccwctgatagtctttggcagctcttgaataaattctacctgttggcatcaaggggaagaaaattagcctggaaatttttatctttacata

SEQ ID NO: 7543 - DNA, 201 bp, Homo sapiens
agagttaatgccaatatgtctcatcctttagttttggggaaacatcctcttctttcaggtggtaccaaaaggaatccatgcagtccccaagctttcccacyagcaaaaaaacaacccttcactattcatgaagaaaagcctacatcatctgattgctccccagtaagaagttcttcctggaggcgtctcccatctatatta

SEQ ID NO: 7544 - DNA, 201 bp, Homo sapiens
tataaaagcaagtcttcacaatgtcaaaagttccttacctctttttaatactaagtcctctacttctgtggggcagttgcagtctcctaccttgaattcayctatctatatgcaaaagcaaggaaaaaatgaacatcttgcatttaataccaaatctaaggcttcaacagttggttcagaattggtacttgtttctaccac

SEQ ID NO: 7545 - DNA, 201 bp, Homo sapiens
cattctggccagaaatttgaatacaattcaagttgaagaaatgtctgcctgtaacattagcatccagggtcccagcatatataataaggagcctaaaaatrtaataaatcctcatgaaaaagttcaaatgaagtcaatttgtgcaaattctcctataaaggcacaacaggatcaattacaagtaaaaaacaatataaaagc

SEQ ID NO: 7546 - DNA, 201 bp, Homo sapiens
cagttaacctacaagagccatggaagagtgggaaaatgacacctccattatgcaagtgtggtcggagatctaagagacttgttgtttctaataatggacckaaccatggaaaagtcttctattgttgccctatcgggaaataccaagaaaacagaaaatgttgtggttatttcaaatgggaacaaacacttcaaaaggaaa

SEQ ID NO: 7547 - DNA, 201 bp, Homo sapiens
gcaagtcttcacaatgtcaaaagttccttacctctttttaatactaagtcctctacttctgtggggcagttgcagtctcctaccttgaattcacctatctrtatgcaaaagcaaggaaaaaatgaacatcttgcatttaataccaaatctaaggcttcaacagttggttcagaattggtacttgtttctaccaccgttcca

SEQ ID NO: 7548 - DNA, 201 bp, Homo sapiens
gaaccatggaaaagtcttctattgttgccctatcgggaaataccaagaaaacagaaaatgttgtggttatttcaaatgggaacaaacacttcaaaaggaargagccaacagcatggttccatctcattccacagggggactcacttttagttctccagaaacaagccatatttgtgacagaaatttaagtatttccaccaa

SEQ ID NO: 7549 - DNA, 201 bp, Homo sapiens
tgacagtgactggccccaaggagacagcctccatttttgccacctatcctgccccctatctgtccctgaacaatggcttcctggatcaggttctgggcacygggatgctgattgtggggctcttggccatcctggacagacggaacaagggagtccctgcgggtctggagcctgtggtggtggggatgctgatcctggccc

SEQ ID NO: 7550 - DNA, 201 bp, Homo sapiens
gtgcatcgttggacgcctcccctgggtcaagctccccatttacatcttggtgcagttgctgtctgctttctgtgcttcgggagccacctatgttctctacyatgatgccctacagaactatacaggtgggaacctgacagtgactggccccaaggagacagcctccatttttgccacctatcctgccccctatctgtccct

SEQ ID NO: 7551 - DNA, 201 bp, Homo sapiens
gcatcgttggacgcctcccctgggtcaagctccccatttacatcttggtgcagttgctgtctgctttctgtgcttcgggagccacctatgttctctaccaygatgccctacagaactatacaggtgggaacctgacagtgactggccccaaggagacagcctccatttttgccacctatcctgccccctatctgtccctga

SEQ ID NO: 7552 - DNA, 184 bp, Homo sapiens
agacagagggagcagtgaatagcaatagggtgtttccaccatggtcttcactcaggccccggctgaaatcatgggccacctccrgatacgcagcctcctggcccggcagtgcctggcagagtttctgggtgtgtttgtactcatgctcctcacccaaggagctgtggcccaggctgtcaccagt

SEQ ID NO: 7553 - DNA, 201 bp, Homo sapiens
tgcctcagctcagatgctggagtgtaagctatgattaggacaaccctcacttcactcatggaccctggagccagccactgaccccgcctgggaacaacagwcattcttcctctttgttaatgtgccagaacctgggaggcttctctgtttatctgtttggcatcccttcctcctaaactaagaaggatcctggacagggag

SEQ ID NO: 7554 - DNA, 201 bp, Homo sapiens; identical to SEQ ID NO: 7549

SEQ ID NO: 7555 - DNA, 201 bp, Homo sapiens; identical to SEQ ID NO: 7550

SEQ ID NO: 7556 - DNA, 201 bp, Homo sapiens; identical to SEQ ID NO: 7551

SEQ ID NO: 7557 - DNA, 172 bp, Homo sapiens
cagtgaatagcaatagggtgtttccaccatggtcttcactcaggccccggctgaaatcatgggccacctccrgatacgcagcctcctggcccggcagtgcctggcagagtttctgggtgtgtttgtactcatggggcccacctgaatccagccttctccctggccatgtgca

SEQ ID NO: 7558 - DNA, 201 bp, Homo sapiens; identical to SEQ ID NO: 7553

SEQ ID NO: 7559 - DNA, 201 bp, Homo sapiens; identical to SEQ ID NO: 7549

SEQ ID NO: 7560 - DNA, 201 bp, Homo sapiens; identical to SEQ ID NO: 7550

SEQ ID NO: 7561 - DNA, 201 bp, Homo sapiens; identical to SEQ ID NO: 7551

SEQ ID NO: 7562 - DNA, 184 bp, Homo sapiens; identical to SEQ ID NO: 7552

SEQ ID NO: 7563 - DNA, 201 bp, Homo sapiens; identical to SEQ ID NO: 7553

SEQ ID NO: 7564 - DNA, 201 bp, Homo sapiens
atcccaaagtcagccagtgccccctcagcacacctctttgacagcagccagctggtcagtgcacggaagaagctcagaaagactgctgaaggtttgcagargaggagagtgagctcacccatggatgaggtgctagcctccttgaagcgtggtagttttcatctgaaaaaggttgaacagcgaactctgcctccttttcct

SEQ ID NO: 7565 - DNA, 201 bp, Homo sapiens
aatgaagaaaaggccttctggagatttctgttttttaagcacattctccttccatccacatatttacatccttgtaatggccagttaagctagggcttgcygtaagttggaagaacactgggttgacagagatctactgtgagctgtattgggactgctttgagaaccatctttcaatgcactgaaaagtcatctgaaaaa

SEQ ID NO: 7566 - DNA, 201 bp, Homo sapiens
ggttcagtggtgtgaagaaaggaagcacaattggcaggttatcactttccagtcgttccaatagatgatggttaacatgaattttacatgtgcaatgttcrtgactgcaatgaagaaaaggccttctggagatttctgttttttaagcacattctccttccatccacatatttacatccttgtaatggccagttaagctag

SEQ ID NO: 7567 - DNA, 201 bp, Homo sapiens
cagcgcaactagaaagcatcaaaagacttatatcagaaaaaagagatgaagtggtatactatgacacttacgaaagcatggaggccatgctggagaaggaygagatggcagcatctgcgtacttacagagagaagagctgcagaaacttcagcagaaagcacgccagctggaagcaagacgtggacgggtttctgccaaga

SEQ ID NO: 7568 - DNA, 201 bp, Homo sapiens
aagtcagccagtgccccctcagcacacctctttgacagcagccagctggtcagtgcacggaagaagctcagaaagactgctgaaggtttgcagaggaggakagtgagctcacccatggatgaggtgctagcctccttgaagcgtggtagttttcatctgaaaaaggttgaacagcgaactctgcctccttttcctgatgaa

SEQ ID NO: 7569 - DNA, 201 bp, Homo sapiens
ccaaagtgcattggttcagtggtgtgaagaaaggaagcacaattggcaggttatcactttccagtcgttccaatagatgatggttaacatgaattttacaygtgcaatgttcctgactgcaatgaagaaaaggccttctggagatttctgttttttaagcacattctccttccatccacatatttacatccttgtaatggc

SEQ ID NO: 7570 - DNA, 201 bp, Homo sapiens
agttggaggatgaagcctacagcagccttgcagaagctacaaccgaactctatcagtatttactacagccattccgagacatgagagaacttgccatgctrcgaagacagcagatcaagatttccatggagaatgattatctgggacctcgaagaattgagagtctacaaaaagaagatgctgattggcagcggaaagctc

SEQ ID NO: 7571 - DNA, 201 bp, Homo sapiens
atatttacatccttgtaatggccagttaagctagggcttgctgtaagttggaagaacactgggttgacagagatctactgtgagctgtattgggactgctytgagaaccatctttcaatgcactgaaaagtcatctgaaaaaatagcttcttccatatcagcttatattaaatactgtgacactctgagaaagtttatcat

SEQ ID NO: 7572 - DNA, 201 bp, Homo sapiens
gccagtgccccctcagcacacctctttgacagcagccagctggtcagtgcacggaagaagctcagaaagactgctgaaggtttgcagaggaggagagtgawctcacccatggatgaggtgctagcctccttgaagcgtggtagttttcatctgaaaaaggttgaacagcgaactctgcctccttttcctgatgaagatgat

SEQ ID NO: 7573 - DNA, 201 bp, Homo sapiens
aaaatccaacagcgcactcggattgaagatgaatatagaacccatcacacagtacaactaaagagagaaaaattacatgatgaagaagaaagaaaaagtgmctgggttagccaagagagacagagaacactggatagacttcgaacatttaaacagaggtatcctgggcaagtcatacttaaatcaaccagattacgacta

SEQ ID NO: 7574 - DNA, 201 bp, Homo sapiens
tgatgtggatgagatctgtccgatttctcatcatgagatgcaagcacacatattccatctggagactctgtccacctccacagaagccaggagaaaaaagygtttccaaggacggaagactgttaatttgtccattccactaagtgaaacatcttccaccaaactgtcccacattgatgaatacatttcctcatctccaac

SEQ ID NO: 7575 - DNA, 201 bp, Homo sapiens
tacagtacttgtttttcttagcccaaattcccatcgccatgtcaccactaagtaacaatagcctatttctagagtatgccaaaaatccttttttggatttycttcagaaagggctaatgatctcactgtctacagatgacccaatgcaattccactttaccaaggagcccctaatggaagaatatgctattgctgcacaag

SEQ ID NO: 7576 - DNA, 201 bp, Homo sapiens
atctggacaccttcttagacgatatgaattttttacttgctttaattgctcaaggacctgttaagacctatacccaccggcgcctgaagttcctctcctcsaagttccaggtccatcagatgcttaacgagatggacgagttaaaggagctgaaaaacaacccccaccgagatttttataactgcaggaaggtggacaccc

SEQ ID NO: 7577 - DNA, 201 bp, Homo sapiens
cctgactgttgattctctggatgttcatgctggacgccagaccttccagcgttttgataagttcaatgacaaatataatcctgtaggagcaagtgagctaygggacctctacttgaagacagacaattacattaatggggaatattttgccactatcatcaaggaggtaggtgcggacctggtggaggccaagtaccagca

SEQ ID NO: 7578 - DNA, 201 bp, Homo sapiens
acggaagactgttaatttgtccattccactaagtgaaacatcttccaccaaactgtcccacattgatgaatacatttcctcatctccaacctaccagaccrtgcctgattttcagagagtgcagattactggtgactatgcctctggggttacagttgaagattttgaaattgtttgcaaaggtctgtatcgggcactatg

SEQ ID NO: 7579 - DNA, 201 bp, Homo sapiens
gatgtggatgagatctgtccgatttctcatcatgagatgcaagcacacatattccatctggagactctgtccacctccacagaagccaggagaaaaaagcrtttccaaggacggaagactgttaatttgtccattccactaagtgaaacatcttccaccaaactgtcccacattgatgaatacatttcctcatctccaacc

SEQ ID NO: 7580 - DNA, 201 bp, Homo sapiens
ggacctgttaagacctatacccaccggcgcctgaagttcctctcctccaagttccaggtccatcagatgcttaacgagatggacgagttaaaggagctgawaaacaacccccaccgagatttttataactgcaggaaggtggacacccatatccatgcagccgcttgcatgaaccagaaacatctgctgcgttttattaag

SEQ ID NO: 7581 - DNA, 201 bp, Homo sapiens
tgcagaagtcgtttcagaggttccctaaaaccccttccaaatacttgcggaacattgatggtgaggcttgggtagcaaatgagagcttctatccagtcttyactcctcctgtgaagaagggagaggaccccttccgaacagacaaccttcctgaaaacctgggctatcacctcaaaatgaaggacggtgtagtttacgtct

SEQ ID NO: 7582 - DNA, 201 bp, Homo sapiens
actatgcctctggggttacagttgaagattttgaaattgtttgcaaaggtctgtatcgggcactatgcatacgtgagaaatacatgcagaagtcgtttcakaggttccctaaaaccccttccaaatacttgcggaacattgatggtgaggcttgggtagcaaatgagagcttctatccagtctttactcctcctgtgaaga

SEQ ID NO: 7583 - DNA, 201 bp, Homo sapiens
tcatgacagcattcatgatagcagatgatatctctcatggcctaaatttaaaaaagagtcccgtgctacagtacttgtttttcttagcccaaattcccatygccatgtcaccactaagtaacaatagcctatttctagagtatgccaaaaatccttttttggatttccttcagaaagggctaatgatctcactgtctacag

SEQ ID NO: 7584 - DNA, 201 bp, Homo sapiens
ccatgtcaccactaagtaacaatagcctatttctagagtatgccaaaaatccttttttggatttccttcagaaagggctaatgatctcactgtctacagaygacccaatgcaattccactttaccaaggagcccctaatggaagaatatgctattgctgcacaagtcttcaagctgagcacctgtgatatgtgcgaagtgg

SEQ ID NO: 7585 - DNA, 201 bp, Homo sapiens
ttgaagacagacaattacattaatggggaatattttgccactatcatcaaggaggtaggtgcggacctggtggaggccaagtaccagcatgctgagccccrcctgtccatctatggccgcagtcctgatgagtggagcaaactctcctcctggttcgtctgcaatcgcatccactgccccaacatgacatggatgatccag

SEQ ID NO: 7586 - DNA, 201 bp, Homo sapiens
gatgcaatgcgcaactttgctgaaaaagtgtttgcctctgaagtcaaagatgaaggaggtcgtcaggagatttccccctttgatgtggatgagatctgtcygatttctcatcatgagatgcaagcacacatattccatctggagactctgtccacctccacagaagccaggagaaaaaagcgtttccaaggacggaagact

SEQ ID NO: 7587 - DNA, 201 bp, Homo sapiens
aggagctggacaaagtgtttaatgactacactgcagttccagacctctactttgaaaatgccatgcggtttttcaacttctcatggagggtcactgccgaycagctcaggaaagcccccaacagagatcagtggagcatgaccccgcccatggtgaacgcctactactcgcccaccaagaatgagattgtgtttccggccg

SEQ ID NO: 7588 - DNA, 155 bp, Homo sapiens
gagcgcgccgcctgggccaggcagccgagccgtccgagcagctgggctgggagcmgggaacccggagctgggaatcgggagccgggcgcggggagctgcgcgaagccggggcggagcacgcgagctatgcatgcggggcgtgtggccgcccccgg

SEQ ID NO: 7589 - DNA, 201 bp, Homo sapiens
tcaacaccatcttctaccccgtggagatcaatgaatccgagcctattgtggtctatgacaaggaataccttgagcagatctccactctcatcaacaccacygacagatgcctgctcaacaactacatgatctggaacctggtgcggaaaacaagctccttccttgaccagcgctttcaggacgccgatgagaagttcatgg

SEQ ID NO: 7590 - DNA, 201 bp, Homo sapiens
ggcattcgggtgctgggctggtggctcatcaggcctgggccccacactgacaagcgccagatacgccacaaataccactgtgtcaaatgctttcaagatayatttttggggaaactattttttaaacactgtggaatacactggaaatcttcagggaaaaacacatttaaacacttttttttttaaggaaagaattggtat

SEQ ID NO: 7591 - DNA, 201 bp, Homo sapiens
gcctgggcttgccctcgagagactattacctgaacaaaactgaaaacgagaaggtgctgaccggatatctgaactacatggtccagctggggaagctgctkggcggcggggacgaggaggccatccggccccagatgcagcagatcttggactttgagacggcactggccaacatcaccatcccacaggagaagcgccgtg

SEQ ID NO: 7592 - DNA, 201 bp, Homo sapiens
ttggactttgagacggcactggccaacatcaccatcccacaggagaagcgccgtgatgaggagctcatctaccacaaagtgacggcagccgagctgcagaycttggcacccgccatcaactggttgccttttctcaacaccatcttctaccccgtggagatcaatgaatccgagcctattgtggtctatgacaaggaatac

SEQ ID NO: 7593 - DNA, 201 bp, Homo sapiens
agtctggcctgggcttgccctcgagagactattacctgaacaaaactgaaaacgagaaggtgctgaccggatatctgaactacatggtccagctggggaarctgctgggcggcggggacgaggaggccatccggccccagatgcagcagatcttggactttgagacggcactggccaacatcaccatcccacaggagaagc

SEQ ID NO: 7594 - DNA, 201 bp, Homo sapiens
aggaaagcccccaacagagatcagtggagcatgaccccgcccatggtgaacgcctactactcgcccaccaagaatgagattgtgtttccggccgggatccwgcaggcaccattctacacacgctcctcacccaaggccttaaactttggtggcataggtgtcgtcgtgggccatgagctgactcatgcttttgatgatcaa

SEQ ID NO: 7595 - DNA, 201 bp, Homo sapiens
cctccacgggagcccaggagctctggccggcaggtccatggcacagggcatcggaagactgcaaaactgctggacttaccctgggctgcagtccattgtcrgcccctgggttgaatcaagatagtacttgcagctagatggatgcttttagccaggggacattgtgaggggaagattcctccacccagtctggcctgtggt

SEQ ID NO: 7596 - DNA, 201 bp, Homo sapiens
gatccccaaagccacagcaggggactgatggctatagcagaatgaggtcgggtcaggaccctcaaacaccatctgggaacaccaagcaccctgaatcgagrctgcaggagccctgcggggtgagactgtgtcagagatacactgctggccacaagtgtcccctctcagtcccaccttttcgggctgtcccatgtctatctc

SEQ ID NO: 7597 - DNA, 201 bp, Homo sapiens
aggccaacccagtccctgatggccactcacgctgggggaccttcagcaacctctgggaacacaaccaagcaatcatcaagcacctcctcgaaaactccacrgccagcgtgagcgaggcagagagaaaggcgcaagtatactaccgtgcgtgcatgaacgagaccaggatcgaggagctcagggccaaacctctaatggagt

SEQ ID NO: 7598 - DNA, 201 bp, Homo sapiens
catgcaagggcgtggagaccagtagaggtgtggaggccaggcagagagaggagcctgctctgcggggggcccagctcatgggcactgccccttcagctagsctgcctccgtcccctgagtccaacagtgggagccctagctgggaagttctgatccccaaagccacagcaggggactgatggctatagcagaatgaggtcg

SEQ ID NO: 7599 - DNA, 201 bp, Homo sapiens
tgagagctcccacgaaggcctcatcaccgatccccacagcccctctcgcttccgggtcatcggctccctctccaattccaaggagttctcagaacacttcygctgcccacctggctcacccatgaacccgcctcacaagtgcgaagtctggtaaggacgaagcggagagagccaagacggaggaggggaaggggctgagga

SEQ ID NO: 7600 - DNA, 171 bp, Homo sapiens
gagcgcgccgcctgggccaggcagccgagccgtccgagcagctgggctgggagcagggaacccggagctgsgaatcgggagccgggcgcggggagctgcgcgaagccggggcggagcacgcgagctatgcatgcggggcgtgtggccgcccccggtgtccgccctgctgtc

SEQ ID NO: 7601 - DNA, 201 bp, Homo sapiens
atatctgaactacatggtccagctggggaagctgctgggcggcggggacgaggaggccatccggccccagatgcagcagatcttggactttgagacggcaytggccaacatcaccatcccacaggagaagcgccgtgatgaggagctcatctaccacaaagtgacggcagccgagctgcagaccttggcacccgccatcaa

SEQ ID NO: 7602 - DNA, 147 bp, Homo sapiens
tgctggacttaccctgggctgcagtccattgtcggcccctgggttgaatcaagatagtacttgcagctagatggatgcttttagccaggggacattgtgasgggaagattcctccacccagtctggcctgtggtgtctgtctcctcc

SEQ ID NO: 7603 - DNA, 201 bp, Homo sapiens
agctgcctcagcccctgggatgtgtgatttcagctcctgtcacctcatgcaagggcgtggagaccagtagaggtgtggaggccaggcagagagaggagccygctctgcggggggcccagctcatgggcactgccccttcagctagcctgcctccgtcccctgagtccaacagtgggagccctagctgggaagttctgatcc

SEQ ID NO: 7604 - DNA, 201 bp, Homo sapiens
gaaggggctgaggacgagacccccatccagcctccagggcattgctcagcccgcttggccacccggggccctgcttcctcacactggcgggttttcagccrgaaccgagcccatggtgttggctctcaacgtgacccgcagtctgatcccctgtgaagagccggacatcccaggcacacgtgtgcgccaccttcagcaggc

SEQ ID NO: 7605 - DNA, 201 bp, Homo sapiens
gtctggtaaggacgaagcggagagagccaagacggaggaggggaaggggctgaggacgagacccccatccagcctccagggcattgctcagcccgcttggmcacccggggccctgcttcctcacactggcgggttttcagccggaaccgagcccatggtgttggctctcaacgtgacccgcagtctgatcccctgtgaaga

SEQ ID NO: 7606 - DNA, 201 bp, Homo sapiens; identical to SEQ ID NO: 7587

SEQ ID NO: 7607 - DNA, 201 bp, Homo sapiens; identical to SEQ ID NO: 7589

SEQ ID NO: 7608 - DNA, 201 bp, Homo sapiens; identical to SEQ ID NO: 7590

SEQ ID NO: 7609 - DNA, 201 bp, Homo sapiens; identical to SEQ ID NO: 7591

SEQ ID NO: 7610 - DNA, 201 bp, Homo sapiens; identical to SEQ ID NO: 7592

SEQ ID NO: 7611 - DNA, 201 bp, Homo sapiens; identical to SEQ ID NO: 7593

SEQ ID NO: 7612 - DNA, 201 bp, Homo sapiens; identical to SEQ ID NO: 7594

SEQ ID NO: 7613 - DNA, 201 bp, Homo sapiens; identical to SEQ ID NO: 7595

SEQ ID NO: 7614 - DNA, 201 bp, Homo sapiens; identical to SEQ ID NO: 7596

SEQ ID NO: 7615 - DNA, 201 bp, Homo sapiens; identical to SEQ ID NO: 7597

SEQ ID NO: 7616 - DNA, 201 bp, Homo sapiens; identical to SEQ ID NO: 7598

SEQ ID NO: 7617 - DNA, 201 bp, Homo sapiens; identical to SEQ ID NO: 7599

SEQ ID NO: 7618 - DNA, 201 bp, Homo sapiens; identical to SEQ ID NO: 7601

SEQ ID NO: 7619 - DNA, 201 bp, Homo sapiens
tgctggacttaccctgggctgcagtccattgtcggcccctgggttgaatcaagatagtacttgcagctagatggatgcttttagccaggggacattgtgasgggaagattcctccacccagtctggcctgtggtgtctgtctcctccctggaatcctcctgcccgagaggaagcagacggcacagggacacccctgccacc

SEQ ID NO: 7620 - DNA, 201 bp, Homo sapiens; identical to SEQ ID NO: 7603

SEQ ID NO: 7621 - DNA, 201 bp, Homo sapiens; identical to SEQ ID NO: 7604

SEQ ID NO: 7622 - DNA, 201 bp, Homo sapiens; identical to SEQ ID NO: 7605

SEQ ID NO: 7623 - DNA, 201 bp, Homo sapiens; identical to SEQ ID NO: 7587

SEQ ID NO: 7624 - DNA, 201 bp, Homo sapiens; identical to SEQ ID NO: 7589

SEQ ID NO: 7625 - DNA, 201 bp, Homo sapiens; identical to SEQ ID NO: 7590

SEQ ID NO: 7626 - DNA, 201 bp, Homo sapiens; identical to SEQ ID NO: 7591

SEQ ID NO: 7627 - DNA, 201 bp, Homo sapiens; identical to SEQ ID NO: 7592

SEQ ID NO: 7628 - DNA, 201 bp, Homo sapiens; identical to SEQ ID NO: 7593

SEQ ID NO: 7629 - DNA, 201 bp, Homo sapiens
ccctgagacaggaggcagccctgatgcctctccagggcctgggcctgcagcggaaccccttcctccaagggaagcggggcccggggctcacgtcttccccrcccctcctgcctccttccctgcaggtgaacttccacagcccccggagtggccagaggtgctgggctgcacggacccaggtggagaagcggctggtggtgt

SEQ ID NO: 7630 - DNA, 201 bp, Homo sapiens; identical to SEQ ID NO: 7594

SEQ ID NO: 7631 - DNA, 201 bp, Homo sapiens; identical to SEQ ID NO: 7595

SEQ ID NO: 7632 - DNA, 201 bp, Homo sapiens; identical to SEQ ID NO: 7596

SEQ ID NO: 7633 - DNA, 201 bp, Homo sapiens; identical to SEQ ID NO: 7597

SEQ ID NO: 7634 - DNA, 201 bp, Homo sapiens; identical to SEQ ID NO: 7598

SEQ ID NO: 7635 - DNA, 201 bp, Homo sapiens; identical to SEQ ID NO: 7599

SEQ ID NO: 7636 - DNA, 201 bp, Homo sapiens; identical to SEQ ID NO: 7601

SEQ ID NO: 7637 - DNA, 201 bp, Homo sapiens; identical to SEQ ID NO: 7619

SEQ ID NO: 7638 - DNA, 201 bp, Homo sapiens; identical to SEQ ID NO: 7603

SEQ ID NO: 7639 - DNA, 201 bp, Homo sapiens; identical to SEQ ID NO: 7604

SEQ ID NO: 7640 - DNA, 201 bp, Homo sapiens; identical to SEQ ID NO: 7605

SEQ ID NO: 7641 - DNA, 201 bp, Homo sapiens; identical to SEQ ID NO: 7587

SEQ ID NO: 7642 - DNA, 201 bp, Homo sapiens; identical to SEQ ID NO: 7589

SEQ ID NO: 7643 - DNA, 201 bp, Homo sapiens; identical to SEQ ID NO: 7590

SEQ ID NO: 7644 - DNA, 201 bp, Homo sapiens; identical to SEQ ID NO: 7591

SEQ ID NO: 7645 - DNA, 201 bp, Homo sapiens; identical to SEQ ID NO: 7592

SEQ ID NO: 7646 - DNA, 201 bp, Homo sapiens; identical to SEQ ID NO: 7593

SEQ ID NO: 7647 - DNA, 201 bp, Homo sapiens; identical to SEQ ID NO: 7594

SEQ ID NO: 7648 - DNA, 201 bp, Homo sapiens; identical to SEQ ID NO: 7595

SEQ ID NO: 7649 - DNA, 201 bp, Homo sapiens; identical to SEQ ID NO: 7596

SEQ ID NO: 7650 - DNA, 201 bp, Homo sapiens; identical to SEQ ID NO: 7597

SEQ ID NO: 7651 - DNA, 201 bp, Homo sapiens; identical to SEQ ID NO: 7598

SEQ ID NO: 7652 - DNA, 201 bp, Homo sapiens; identical to SEQ ID NO: 7599

SEQ ID NO: 7653 - DNA, 201 bp, Homo sapiens; identical to SEQ ID NO: 7601

SEQ ID NO: 7654 - DNA, 147 bp, Homo sapiens; identical to SEQ ID NO: 7602

SEQ ID NO: 7655 - DNA, 201 bp, Homo sapiens; identical to SEQ ID NO: 7603

SEQ ID NO: 7656 - DNA, 201 bp, Homo sapiens; identical to SEQ ID NO: 7604

SEQ ID NO: 7657 - DNA, 201 bp, Homo sapiens; identical to SEQ ID NO: 7605

SEQ ID NO: 7658 - DNA, 201 bp, Homo sapiens; identical to SEQ ID NO: 7587

SEQ ID NO: 7659 - DNA, 201 bp, Homo sapiens; identical to SEQ ID NO: 7589

SEQ ID NO: 7660 - DNA, 201 bp, Homo sapiens; identical to SEQ ID NO: 7590

SEQ ID NO: 7661 - DNA, 201 bp, Homo sapiens; identical to SEQ ID NO: 7591

SEQ ID NO: 7662 - DNA, 201 bp, Homo sapiens; identical to SEQ ID NO: 7592

SEQ ID NO: 7663 - DNA, 201 bp, Homo sapiens; identical to SEQ ID NO: 7593

SEQ ID NO: 7664 - DNA, 201 bp, Homo sapiens; identical to SEQ ID NO: 7594

SEQ ID NO: 7665 - DNA, 201 bp, Homo sapiens; identical to SEQ ID NO: 7595

SEQ ID NO: 7666 - DNA, 201 bp, Homo sapiens; identical to SEQ ID NO: 7596

SEQ ID NO: 7667 - DNA, 201 bp, Homo sapiens; identical to SEQ ID NO: 7597

SEQ ID NO: 7668 - DNA, 201 bp, Homo sapiens; identical to SEQ ID NO: 7598

SEQ ID NO: 7669 - DNA, 201 bp, Homo sapiens; identical to SEQ ID NO: 7599

SEQ ID NO: 7670 - DNA, 201 bp, Homo sapiens; identical to SEQ ID NO: 7601

SEQ ID NO: 7671 - DNA, 201 bp, Homo sapiens; identical to SEQ ID NO: 7619

SEQ ID NO: 7672 - DNA, 201 bp, Homo sapiens; identical to SEQ ID NO: 7603

SEQ ID NO: 7673 - DNA, 201 bp, Homo sapiens; identical to SEQ ID NO: 7604

SEQ ID NO: 7674 - DNA, 201 bp, Homo sapiens; identical to SEQ ID NO: 7605

SEQ ID NO: 7675 - DNA, 201 bp, Homo sapiens; identical to SEQ ID NO: 7597

SEQ ID NO: 7676 - DNA, 201 bp, Homo sapiens; identical to SEQ ID NO: 7599

SEQ ID NO: 7677 - DNA, 171 bp, Homo sapiens; identical to SEQ ID NO: 7600

SEQ ID NO: 7678 - DNA, 201 bp, Homo sapiens; identical to SEQ ID NO: 7587

SEQ ID NO: 7679 - DNA, 155 bp, Homo sapiens; identical to SEQ ID NO: 7588

SEQ ID NO: 7680 - DNA, 201 bp, Homo sapiens; identical to SEQ ID NO: 7589

SEQ ID NO: 7681 - DNA, 201 bp, Homo sapiens; identical to SEQ ID NO: 7590

SEQ ID NO: 7682 - DNA, 201 bp, Homo sapiens; identical to SEQ ID NO: 7591

SEQ ID NO: 7683 - DNA, 201 bp, Homo sapiens; identical to SEQ ID NO: 7592

SEQ ID NO: 7684 - DNA, 201 bp, Homo sapiens; identical to SEQ ID NO: 7593

SEQ ID NO: 7685 - DNA, 201 bp, Homo sapiens; identical to SEQ ID NO: 7601

SEQ ID NO: 7686 - DNA, 146 bp, Homo sapiens
gagctttaaggaaaatgaagtgagacccctccccttaggcctggggagccatagggctggcttctctgtgggtgcgtggacgtggggttgggagctgggartctattttttgtattatgttttgagctactgtagttttggcgtgg

SEQ ID NO: 7687 - DNA, 201 bp, Homo sapiens; identical to SEQ ID NO: 7604

SEQ ID NO: 7688 - DNA, 201 bp, Homo sapiens; identical to SEQ ID NO: 7605

SEQ ID NO: 7689 - DNA, 201 bp, Homo sapiens; identical to SEQ ID NO: 7594

SEQ ID NO: 7690 - DNA, 201 bp, Homo sapiens; identical to SEQ ID NO: 7587

SEQ ID NO: 7691 - DNA, 201 bp, Homo sapiens; identical to SEQ ID NO: 7589

SEQ ID NO: 7692 - DNA, 201 bp, Homo sapiens; identical to SEQ ID NO: 7590

SEQ ID NO: 7693 - DNA, 201 bp, Homo sapiens; identical to SEQ ID NO: 7591

SEQ ID NO: 7694 - DNA, 201 bp, Homo sapiens; identical to SEQ ID NO: 7592

SEQ ID NO: 7695 - DNA, 201 bp, Homo sapiens; identical to SEQ ID NO: 7593

SEQ ID NO: 7696 - DNA, 201 bp, Homo sapiens; identical to SEQ ID NO: 7594

SEQ ID NO: 7697 - DNA, 201 bp, Homo sapiens; identical to SEQ ID NO: 7595

SEQ ID NO: 7698 - DNA, 201 bp, Homo sapiens; identical to SEQ ID NO: 7596

SEQ ID NO: 7699 - DNA, 201 bp, Homo sapiens; identical to SEQ ID NO: 7597

SEQ ID NO: 7700 - DNA, 201 bp, Homo sapiens; identical to SEQ ID NO: 7598

SEQ ID NO: 7701 - DNA, 201 bp, Homo sapiens; identical to SEQ ID NO: 7599

SEQ ID NO: 7702 - DNA, 201 bp, Homo sapiens; identical to SEQ ID NO: 7601

SEQ ID NO: 7703 - DNA, 147 bp, Homo sapiens; identical to SEQ ID NO: 7602

SEQ ID NO: 7704 - DNA, 201 bp, Homo sapiens; identical to SEQ ID NO: 7603

SEQ ID NO: 7705 - DNA, 201 bp, Homo sapiens; identical to SEQ ID NO: 7604

SEQ ID NO: 7706 - DNA, 201 bp, Homo sapiens; identical to SEQ ID NO: 7605

SEQ ID NO: 7707 - DNA, 201 bp, Homo sapiens; identical to SEQ ID NO: 7587

SEQ ID NO: 7708 - DNA, 201 bp, Homo sapiens; identical to SEQ ID NO: 7589

SEQ ID NO: 7709 - DNA, 201 bp, Homo sapiens; identical to SEQ ID NO: 7590

SEQ ID NO: 7710 - DNA, 201 bp, Homo sapiens; identical to SEQ ID NO: 7591

SEQ ID NO: 7711 - DNA, 201 bp, Homo sapiens; identical to SEQ ID NO: 7592

SEQ ID NO: 7712 - DNA, 201 bp, Homo sapiens; identical to SEQ ID NO: 7593

SEQ ID NO: 7713 - DNA, 201 bp, Homo sapiens; identical to SEQ ID NO: 7629

SEQ ID NO: 7714 - DNA, 201 bp, Homo sapiens; identical to SEQ ID NO: 7594

SEQ ID NO: 7715 - DNA, 201 bp, Homo sapiens; identical to SEQ ID NO: 7595

SEQ ID NO: 7716 - DNA, 201 bp, Homo sapiens; identical to SEQ ID NO: 7596

SEQ ID NO: 7717 - DNA, 201 bp, Homo sapiens; identical to SEQ ID NO: 7597

SEQ ID NO: 7718 - DNA, 201 bp, Homo sapiens; identical to SEQ ID NO: 7598

SEQ ID NO: 7719 - DNA, 201 bp, Homo sapiens; identical to SEQ ID NO: 7599

SEQ ID NO: 7720 - DNA, 201 bp, Homo sapiens; identical to SEQ ID NO: 7601

SEQ ID NO: 7721 - DNA, 147 bp, Homo sapiens; identical to SEQ ID NO: 7602

SEQ ID NO: 7722 - DNA, 201 bp, Homo sapiens; identical to SEQ ID NO: 7603

SEQ ID NO: 7723 - DNA, 201 bp, Homo sapiens; identical to SEQ ID NO: 7604

SEQ ID NO: 7724 - DNA, 201 bp, Homo sapiens; identical to SEQ ID NO: 7605

SEQ ID NO: 7725 - DNA, 201 bp, Homo sapiens; identical to SEQ ID NO: 7597

SEQ ID NO: 7726 - DNA, 201 bp, Homo sapiens; identical to SEQ ID NO: 7599

SEQ ID NO: 7727 - DNA, 201 bp, Homo sapiens; identical to SEQ ID NO: 7587

SEQ ID NO: 7728 - DNA, 201 bp, Homo sapiens; identical to SEQ ID NO: 7589

SEQ ID NO: 7729 - DNA, 201 bp, Homo sapiens; identical to SEQ ID NO: 7590

SEQ ID NO: 7730 - DNA, 201 bp, Homo sapiens; identical to SEQ ID NO: 7591

SEQ ID NO: 7731 - DNA, 201 bp, Homo sapiens; identical to SEQ ID NO: 7592

SEQ ID NO: 7732 - DNA, 201 bp, Homo sapiens; identical to SEQ ID NO: 7601

SEQ ID NO: 7733 - DNA, 201 bp, Homo sapiens; identical to SEQ ID NO: 7593

SEQ ID NO: 7734 - DNA, 146 bp, Homo sapiens; identical to SEQ ID NO: 7686

SEQ ID NO: 7735 - DNA, 201 bp, Homo sapiens; identical to SEQ ID NO: 7604

SEQ ID NO: 7736 - DNA, 201 bp, Homo sapiens; identical to SEQ ID NO: 7605

SEQ ID NO: 7737 - DNA, 201 bp, Homo sapiens; identical to SEQ ID NO: 7594

SEQ ID NO: 7738 - DNA, 201 bp, Homo sapiens; identical to SEQ ID NO: 7587

SEQ ID NO: 7739 - DNA, 155 bp, Homo sapiens; identical to SEQ ID NO: 7588

SEQ ID NO: 7740 - DNA, 201 bp, Homo sapiens; identical to SEQ ID NO: 7589

SEQ ID NO: 7741 - DNA, 201 bp, Homo sapiens; identical to SEQ ID NO: 7590

SEQ ID NO: 7742 - DNA, 201 bp, Homo sapiens; identical to SEQ ID NO: 7591

SEQ ID NO: 7743 - DNA, 201 bp, Homo sapiens; identical to SEQ ID NO: 7592

SEQ ID NO: 7744 - DNA, 201 bp, Homo sapiens; identical to SEQ ID NO: 7593

SEQ ID NO: 7745 - DNA, 201 bp, Homo sapiens; identical to SEQ ID NO: 7594

SEQ ID NO: 7746 - DNA, 201 bp, Homo sapiens; identical to SEQ ID NO: 7595

SEQ ID NO: 7747 - DNA, 201 bp, Homo sapiens; identical to SEQ ID NO: 7596

SEQ ID NO: 7748 - DNA, 201 bp, Homo sapiens; identical to SEQ ID NO: 7597

SEQ ID NO: 7749 - DNA, 201 bp, Homo sapiens; identical to SEQ ID NO: 7598

SEQ ID NO: 7750 - DNA, 201 bp, Homo sapiens; identical to SEQ ID NO: 7599

SEQ ID NO: 7751 - DNA, 171 bp, Homo sapiens; identical to SEQ ID NO: 7600

SEQ ID NO: 7752 - DNA, 201 bp, Homo sapiens; identical to SEQ ID NO: 7601

SEQ ID NO: 7753 - DNA, 201 bp, Homo sapiens; identical to SEQ ID NO: 7619

SEQ ID NO: 7754 - DNA, 201 bp, Homo sapiens; identical to SEQ ID NO: 7603

SEQ ID NO: 7755 - DNA, 201 bp, Homo sapiens; identical to SEQ ID NO: 7604

SEQ ID NO: 7756 - DNA, 201 bp, Homo sapiens; identical to SEQ ID NO: 7605

SEQ ID NO: 7757 - DNA, 201 bp, Homo sapiens; identical to SEQ ID NO: 7587

SEQ ID NO: 7758 - DNA, 155 bp, Homo sapiens
gagcgcgccgcctgggccaggcagccgagccgtccgagcagctgggctgggagcmgggaacccggagctgggaatcgggagccgggcgcggggagctgcgcgaagccggggcggagcacgcgagctatgatgtcgacgtacaagcgggccacgct

SEQ ID NO: 7759 - DNA, 201 bp, Homo sapiens; identical to SEQ ID NO: 7589

SEQ ID NO: 7760 - DNA, 201 bp, Homo sapiens; identical to SEQ ID NO: 7590

SEQ ID NO: 7761 - DNA, 201 bp, Homo sapiens; identical to SEQ ID NO: 7591

SEQ ID NO: 7762 - DNA, 201 bp, Homo sapiens; identical to SEQ ID NO: 7592

SEQ ID NO: 7763 - DNA, 201 bp, Homo sapiens; identical to SEQ ID NO: 7593

SEQ ID NO: 7764 - DNA, 201 bp, Homo sapiens; identical to SEQ ID NO: 7594

SEQ ID NO: 7765 - DNA, 201 bp, Homo sapiens; identical to SEQ ID NO: 7595

SEQ ID NO: 7766 - DNA, 201 bp, Homo sapiens; identical to SEQ ID NO: 7596

SEQ ID NO: 7767 - DNA, 201 bp, Homo sapiens; identical to SEQ ID NO: 7597

SEQ ID NO: 7768 - DNA, 201 bp, Homo sapiens; identical to SEQ ID NO: 7598

SEQ ID NO: 7769 - DNA, 201 bp, Homo sapiens; identical to SEQ ID NO: 7599

SEQ ID NO: 7770 - DNA, 171 bp, Homo sapiens
gagcgcgccgcctgggccaggcagccgagccgtccgagcagctgggctgggagcagggaacccggagctgsgaatcgggagccgggcgcggggagctgcgcgaagccggggcggagcacgcgagctatgatgtcgacgtacaagcgggccacgctggacgaggaggacctg

SEQ ID NO: 7771 - DNA, 201 bp, Homo sapiens; identical to SEQ ID NO: 7601

SEQ ID NO: 7772 - DNA, 201 bp, Homo sapiens; identical to SEQ ID NO: 7619

SEQ ID NO: 7773 - DNA, 201 bp, Homo sapiens; identical to SEQ ID NO: 7603

SEQ ID NO: 7774 - DNA, 201 bp, Homo sapiens; identical to SEQ ID NO: 7604

SEQ ID NO: 7775 - DNA, 201 bp, Homo sapiens; identical to SEQ ID NO: 7605

SEQ ID NO: 7776 - DNA, 201 bp, Homo sapiens
gtggcagagagcggcagcccggcccagctgctggcccagaagggcctgttttacagactggcccaggagtcaggcctggtctgagccaggaccctcaaccrtaccccagttggaccagcccgcacagcctgcagtgctggagatggaagtgacccgtggtcatcgatagctccacacgatattgagtctagacctgtgttt

SEQ ID NO: 7777 - DNA, 201 bp, Homo sapiens
cccctggcctcagggcgggcagatcgagttccgggactttgggctaagataccgacctgagctcccgctggctgtgcagggcgtgtccttcaagatccacrcaggagagaaggtgggcatcgttggcaggaccggggcagggaagtcctccctggccagtgggctgctgcggctccaggaggcagctgagggtgggatctg

SEQ ID NO: 7778 - DNA, 201 bp, Homo sapiens
ctccccagccattgggctgtttgcctccatggctgcggtgctcctaggtggggcccgggcatccaggttgctcttccagaggctcctgtgggatgtggtgygatctcccatcagcttctttgagcggacacccattggtcacctgctaaaccgcttctccaaggagacagacacggttgacgtggacattccagacaaact

SEQ ID NO: 7779 - DNA, 201 bp, Homo sapiens
ccagcctgcccggccagctgcagtacaagtgtgctgaccgaggcgaggacctgagcgtgggccagaaacagctcctgtgtctggcacgtgcccttctccgraagacccagatcctcatcctggacgaggctactgctgccgtggaccctggcacggagctgcagatgcaggccatgctcgggagctggtttgcacagtgca

SEQ ID NO: 7780 - DNA, 201 bp, Homo sapiens
ggagcactcggacgaggctatctgggcagccctggagacggtgcagctcaaagccttggtggccagcctgcccggccagctgcagtacaagtgtgctgacygaggcgaggacctgagcgtgggccagaaacagctcctgtgtctggcacgtgcccttctccggaagacccagatcctcatcctggacgaggctactgctgc

SEQ ID NO: 7781 - DNA, 201 bp, Homo sapiens
gggtgggatctggatcgacggggtccccattgcccacgtggggctgcacacactgcgctccaggatcagcatcatcccccaggaccccatcctgttccctsgctctctgcggatgaacctcgacctgctgcaggagcactcggacgaggctatctgggcagccctggagacggtgcagctcaaagccttggtggccagcct

SEQ ID NO: 7782 - DNA, 201 bp, Homo sapiens
gatcgagttccgggactttgggctaagataccgacctgagctcccgctggctgtgcagggcgtgtccttcaagatccacgcaggagagaaggtgggcatckttggcaggaccggggcagggaagtcctccctggccagtgggctgctgcggctccaggaggcagctgagggtgggatctggatcgacggggtccccattgc

SEQ ID NO: 7783 - DNA, 201 bp, Homo sapiens
ctgcagtacaagtgtgctgaccgaggcgaggacctgagcgtgggccagaaacagctcctgtgtctggcacgtgcccttctccggaagacccagatcctcaycctggacgaggctactgctgccgtggaccctggcacggagctgcagatgcaggccatgctcgggagctggtttgcacagtgcactgtgctgctcattgcc

SEQ ID NO: 7784 - DNA, 201 bp, Homo sapiens
ccggtccctgctgatgtacgcctttggactcctggaggtcagcctggtggtggcagtggctaccccactggccactgtggccatcctgccactgtttctcmtctacgctgggtttcaggtggcttgcggccaatgtggagctcctggggaatggcctggtgtttgcagctgccacgtgtgctgtgctgagcaaagcccacc

SEQ ID NO: 7785 - DNA, 201 bp, Homo sapiens
cgggactttgggctaagataccgacctgagctcccgctggctgtgcagggcgtgtccttcaagatccacgcaggagagaaggtgggcatcgttggcaggaycggggcagggaagtcctccctggccagtgggctgctgcggctccaggaggcagctgagggtgggatctggatcgacggggtccccattgcccacgtgggg

SEQ ID NO: 7786 - DNA, 201 bp, Homo sapiens
ggactttgggctaagataccgacctgagctcccgctggctgtgcagggcgtgtccttcaagatccacgcaggagagaaggtgggcatcgttggcaggaccrgggcagggaagtcctccctggccagtgggctgctgcggctccaggaggcagctgagggtgggatctggatcgacggggtccccattgcccacgtggggct

SEQ ID NO: 7787 - DNA, 201 bp, Homo sapiens
gctgtgcagggcgtgtccttcaagatccacgcaggagagaaggtgggcatcgttggcaggaccggggcagggaagtcctccctggccagtgggctgctgcrgctccaggaggcagctgagggtgggatctggatcgacggggtccccattgcccacgtggggctgcacacactgcgctccaggatcagcatcatcccccag

SEQ ID NO: 7788 - DNA, 201 bp, Homo sapiens
caagatccacgcaggagagaaggtgggcatcgttggcaggaccggggcagggaagtcctccctggccagtgggctgctgcggctccaggaggcagctgagrgtgggatctggatcgacggggtccccattgcccacgtggggctgcacacactgcgctccaggatcagcatcatcccccaggaccccatcctgttccctgg

SEQ ID NO: 7789 - DNA, 201 bp, Homo sapiens
ggctccaggaggcagctgagggtgggatctggatcgacggggtccccattgcccacgtggggctgcacacactgcgctccaggatcagcatcatcccccasgaccccatcctgttccctggctctctgcggatgaacctcgacctgctgcaggagcactcggacgaggctatctgggcagccctggagacggtgcagctca

SEQ ID NO: 7790 - DNA, 201 bp, Homo sapiens
catctcgccctgtccaccctgcagccaatgtcaacagcgactctcagccccgctgtactctggactcacctgggggcctcaagcacatgcccaggctcccrgctagacccttaaatcagaatctctgaggctgggaactgccatgctgtgtgtactttttacaaattaacacttttattttgggataatcccagactcaca

SEQ ID NO: 7791 - DNA, 201 bp, Homo sapiens
ggtccccattgcccacgtggggctgcacacactgcgctccaggatcagcatcatcccccaggaccccatcctgttccctggctctctgcggatgaacctcracctgctgcaggagcactcggacgaggctatctgggcagccctggagacggtgcagctcaaagccttggtggccagcctgcccggccagctgcagtacaa

SEQ ID NO: 7792 - DNA, 201 bp, Homo sapiens
ggctgtgcagggcgtgtccttcaagatccacgcaggagagaaggtgggcatcgttggcaggaccggggcagggaagtcctccctggccagtgggctgctgyggctccaggaggcagctgagggtgggatctggatcgacggggtccccattgcccacgtggggctgcacacactgcgctccaggatcagcatcatccccca

SEQ ID NO: 7793 - DNA, 201 bp, Homo sapiens
cggatgcaggactatgcctggacgcccaaggaggctccctggaggctgcccacatgtgcagctcagcccccctggcctcagggcgggcagatcgagttccrggactttgggctaagataccgacctgagctcccgctggctgtgcagggcgtgtccttcaagatccacgcaggagagaaggtgggcatcgttggcaggacc

SEQ ID NO: 7794 - DNA, 201 bp, Homo sapiens
accgtctggtcaccttcctctgcctggaagaagttgaccctggtgtcgtagactcaagttcctctggaagcgctgccgggaaggattgcatcacgatacamagtgccaccttcgcctggtcccaggaaagccctccctgcctccacagaataaacctcacggtgccccagggctgtctgctggctgttgtcggtccagtgg

SEQ ID NO: 7795 - DNA, 201 bp, Homo sapiens
cctttgaccgtctggtcaccttcctctgcctggaagaagttgaccctggtgtcgtagactcaagttcctctggaagcgctgccgggaaggattgcatcacsatacaaagtgccaccttcgcctggtcccaggaaagccctccctgcctccacagaataaacctcacggtgccccagggctgtctgctggctgttgtcggtc

SEQ ID NO: 7796 - DNA, 201 bp, Homo sapiens
caaagtgccaccttcgcctggtcccaggaaagccctccctgcctccacagaataaacctcacggtgccccagggctgtctgctggctgttgtcggtccagygggggcagggaagtcctccctgctgtccgccctccttggggagctgtcaaaggtggaggggttcgtgagcatcgagggtgctgtggcctacgtgccccag

SEQ ID NO: 7797 - DNA, 201 bp, Homo sapiens
ggcctggtgggctactccagggaacaacacggattctcgtgacgcacgcactccacatcctgccccaggctgattggatcatagtgctggcaaatggggcyatcgcagagatgggttcctaccaggagcttctgcagaggaagggggccctcgtgtgtcttctggatcaagccagacagccaggagatagaggagaaggag

SEQ ID NO: 7798 - DNA, 201 bp, Homo sapiens
caggctttcctgcccttctccatccactccctcgtccaggcccgggtgtcctttgaccgtctggtcaccttcctctgcctggaagaagttgaccctggtgycgtagactcaagttcctctggaagcgctgccgggaaggattgcatcacgatacaaagtgccaccttcgcctggtcccaggaaagccctccctgcctccac

SEQ ID NO: 7799 - DNA, 201 bp, Homo sapiens
ggactcacgggcacggctcaccagctctatcctcaggaactcgaagaccatcaagttccatggctgggagggagcctttctggacagagtcctgggcatcygaggccaggagctgggcgccttgcggacctccggcctcctcttctctgtgtcgctggtgtccttccaagtgtctacatttctggtcgcactggtggtgtt

SEQ ID NO: 7800 - DNA, 201 bp, Homo sapiens
aatgaggcagaaggactcacgggcacggctcaccagctctatcctcaggaactcgaagaccatcaagttccatggctgggagggagcctttctggacagartcctgggcatccgaggccaggagctgggcgccttgcggacctccggcctcctcttctctgtgtcgctggtgtccttccaagtgtctacatttctggtcgc

SEQ ID NO: 7801 - DNA, 201 bp, Homo sapiens; identical to SEQ ID NO: 7793

SEQ ID NO: 7802 - DNA, 201 bp, Homo sapiens
tatacagaaaggcagctgtgtacctgctggatgaccccctggcggccctggatgcccacgttggccagcatgtcttcaaccaggtcattgggcctggtggrctactccagggaacaacacggattctcgtgacgcacgcactccacatcctgccccaggctgattggatcatagtgctggcaaatggggccatcgcagaga

SEQ ID NO: 7803 - DNA, 201 bp, Homo sapiens
agagaatgtgtgcttcgggcaggagctggacccaccctggctggagagagtactagaagcctgtgccctgcagccagatgtggacagcttccctgagggartccacacttcaattggggagcagggcatgaatctctccggaggccagaagcagcggctgagcctggcccgggctgtatacagaaaggcagctgtgtacct

SEQ ID NO: 7804 - DNA, 201 bp, Homo sapiens
tccctgagaaggaccgtaccacttcagaagcccagacagaggttcctctggatgaccctgacagggcaggatggccagcaggaaaggacagcatccaatayggcagggtgaaggccacagtgcacctggcctacctgcgtgccgtgggcacccccctctgcctctacgcactcttcctcttcctctgccagcaagtggcct

SEQ ID NO: 7805 - DNA, 201 bp, Homo sapiens
agaacctgggaccagcaccaaggaccccagaggcacctctgcaggcaggaggcccgagcttagacgcgagaggtccatcaagtcagtccctgagaaggacygtaccacttcagaagcccagacagaggttcctctggatgaccctgacagggcaggatggccagcaggaaaggacagcatccaatacggcagggtgaaggc

SEQ ID NO: 7806 - DNA, 201 bp, Homo sapiens; identical to SEQ ID NO: 7780

SEQ ID NO: 7807 - DNA, 201 bp, Homo sapiens; identical to SEQ ID NO: 7779

SEQ ID NO: 7808 - DNA, 163 bp, Homo sapiens
cgccaggtcctggctctgtccagcggctccagaaaggccagtgcggtgggtgatgtggtcaakctggtgtccgtagacgtgcagcggctgaccgagagcgtcctctacctcaacgggctgtggctgcctctcgtctggatcgtggtctgcttcgtctatctct

SEQ ID NO: 7809 - DNA, 201 bp, Homo sapiens; identical to SEQ ID NO: 7783

SEQ ID NO: 7810 - DNA, 201 bp, Homo sapiens
tatgtggttagctcatgccagctgagacgcttggagtcagccagctactcgtctgtctgctcccacatggctgagacgttccagggcagcacagtggtccvggcattccgaacccaggccccctttgtggctcagaacaatgctcgcgtagatgaaagccagaggatcagtttcccgcgactggtggctgacaggtggctt

SEQ ID NO: 7811 - DNA, 201 bp, Homo sapiens
gtatgtggttagctcatgccagctgagacgcttggagtcagccagctactcgtctgtctgctcccacatggctgagacgttccagggcagcacagtggtcygggcattccgaacccaggccccctttgtggctcagaacaatgctcgcgtagatgaaagccagaggatcagtttcccgcgactggtggctgacaggtggct

SEQ ID NO: 7812 - DNA, 201 bp, Homo sapiens
gactcacgggcacggctcaccagctctatcctcaggaactcgaagaccatcaagttccatggctgggagggagcctttctggacagagtcctgggcatccraggccaggagctgggcgccttgcggacctccggcctcctcttctctgtgtcgctggtgtccttccaagtgtctacatttctggtcgcactggtggtgttt

SEQ ID NO: 7813 - DNA, 201 bp, Homo sapiens
tcgctggtgtccttccaagtgtctacatttctggtcgcactggtggtgtttgctgtccacactctggtggccgagaatgctatgaatgcagagaaagcctytgtgactctcacagttctcaacatcctcaacaaggcccaggctttcctgcccttctccatccactccctcgtccaggcccgggtgtcctttgaccgtctg

SEQ ID NO: 7814 - DNA, 201 bp, Homo sapiens
caggaaagccctccctgcctccacagaataaacctcacggtgccccagggctgtctgctggctgttgtcggtccagtgggggcagggaagtcctccctgcygtccgccctccttggggagctgtcaaaggtggaggggttcgtgagcatcgagggtgctgtggcctacgtgccccaggaggcctgggtgcagaacacctct

SEQ ID NO: 7815 - DNA, 201 bp, Homo sapiens
cagccagatgtggacagcttccctgagggaatccacacttcaattggggagcagggcatgaatctctccggaggccagaagcagcggctgagcctggcccrggctgtatacagaaaggcagctgtgtacctgctggatgaccccctggcggccctggatgcccacgttggccagcatgtcttcaaccaggtcattgggcct

SEQ ID NO: 7816 - DNA, 201 bp, Homo sapiens
tagctcatgccagctgagacgcttggagtcagccagctactcgtctgtctgctcccacatggctgagacgttccagggcagcacagtggtccgggcattcygaacccaggccccctttgtggctcagaacaatgctcgcgtagatgaaagccagaggatcagtttcccgcgactggtggctgacaggtggcttgcggccaa

SEQ ID NO: 7817 - DNA, 201 bp, Homo sapiens; identical to SEQ ID NO: 7790

SEQ ID NO: 7818 - DNA, 201 bp, Homo sapiens; identical to SEQ ID NO: 7792

SEQ ID NO: 7819 - DNA, 201 bp, Homo sapiens
gttccagggcagcacagtggtccgggcattccgaacccaggccccctttgtggctcagaacaatgctcgcgtagatgaaagccagaggatcagtttcccgygactggtggctgacaggtggcttgcggccaatgtggagctcctggggaatggcctggtgtttgcagctgccacgtgtgctgtgctgagcaaagcccacct

SEQ ID NO: 7820 - DNA, 201 bp, Homo sapiens; identical to SEQ ID NO: 7781

SEQ ID NO: 7821 - DNA, 201 bp, Homo sapiens; identical to SEQ ID NO: 7776

SEQ ID NO: 7822 - DNA, 201 bp, Homo sapiens
agcggctgaccgagagcgtcctctacctcaacgggctgtggctgcctctcgtctggatcgtggtctgcttcgtctatctctggcagctcctggggccctcygccctcactgccatcgctgtcttcctgagcctcctccctctgaatttcttcatctccaagaaaaggaaccaccatcaggaggagcaaatgaggcagaagg

SEQ ID NO: 7823 - DNA, 201 bp, Homo sapiens; identical to SEQ ID NO: 7777

SEQ ID NO: 7824 - DNA, 201 bp, Homo sapiens
tagacgtgcagcggctgaccgagagcgtcctctacctcaacgggctgtggctgcctctcgtctggatcgtggtctgcttcgtctatctctggcagctcctrgggccctccgccctcactgccatcgctgtcttcctgagcctcctccctctgaatttcttcatctccaagaaaaggaaccaccatcaggaggagcaaatga

SEQ ID NO: 7825 - DNA, 201 bp, Homo sapiens
accctgacagggcaggatggccagcaggaaaggacagcatccaatacggcagggtgaaggccacagtgcacctggcctacctgcgtgccgtgggcaccccyctctgcctctacgcactcttcctcttcctctgccagcaagtggcctccttctgccggggctactggctgagcctgtgggcggacgaccctgcagtaggtg

SEQ ID NO: 7826 - DNA, 201 bp, Homo sapiens
ctctacgctgggtttcagagcctgtatgtggttagctcatgccagctgagacgcttggagtcagccagctactcgtctgtctgctcccacatggctgagaygttccagggcagcacagtggtccgggcattccgaacccaggccccctttgtggctcagaacaatgctcgcgtagatgaaagccagaggatcagtttcccg

SEQ ID NO: 7827 - DNA, 201 bp, Homo sapiens
tggacagcttccctgagggaatccacacttcaattggggagcagggcatgaatctctccggaggccagaagcagcggctgagcctggcccgggctgtatamagaaaggcagctgtgtacctgctggatgaccccctggcggccctggatgcccacgttggccagcatgtcttcaaccaggtcattgggcctggtgggctac

(The sequence listing continues in the following parts.)
